(19) United States
(12) Patent Application Publication
(10) Pub. No.: US 2022/0403035 A1
(43) Pub. Date: Dec. 22, 2022

(54) MULTITARGETING ANTIGEN-BINDING MOLECULES FOR USE IN PROLIFERATIVE DISEASES

(71) Applicants: AMGEN RESEARCH ( MUNICH) GMBH, Munich (DE); AMGEN INC., Thousand Oaks, CA (US)

(72) Inventors: Jonas Anlahr, Munich (DE); Tara Arvedson, Thousand Oaks, CA (US); Julie Bailis, Thousand Oaks, CA (US); Matthew Chun, Thousand Oaks, CA (US); Igor D'Angelo, Thousand Oaks, CA (US); Christopher Dahlhoff, Munich (DE); Stephanie Everts, Munich (DE); Mattias Friedrich, Munich (DE); Lars Gaedtke, Munich (DE); Patrick Hoffmann, Munich (DE); Rebecca Goldstein, Thousand Oaks, CA (US); Jonas Karl-Josef Honer, Munich (DE); Roman Kischel, Munich (DE); Matthias Klinger, Munich (DE); Peter Kufer, Munich (DE); Markus Muenz, Munich (DE)

(21) Appl. No.: 17/774,232

(22) PCT Filed: Nov. 6, 2020
(86) PCT No.: PCT/EP2020/081224

§ 371 Date: May 4, 2022

Related U.S. Application Data
(60) Provisional application No. 62/931,783, filed on Nov. 6, 2019.
(60) Provisional application No. 62/953,120, filed on Dec. 23, 2019.

(51) Int. Cl. C07K 16/28

(52) U.S. Cl. CPC C07K 16/2851; C07K 16/2863; C07K 16/2803; C07K 16/2878; C07K 16/2887; C07K 2317/622; C07K 2317/31; C07K 2317/92; C07K 2317/73; C07K 2317/34; C07K 2317/94

(57) ABSTRACT

The present invention provides bispecific antigen-binding molecules characterized by comprising a first and a second domain, each binding to any of CS1, BCMA, CD20, CD22, FLT3, CD123, CLL1, MSLN, CDH3 or EpCAM, a third domain binding to an extracellular epitope of the human and the Macaca CD3ε chain and optionally a fourth domain, which is a Fc modality. Moreover, the invention provides a polynucleotide, encoding the antigen-binding molecule, a vector comprising this polynucleotide, host cells, expressing the construct and a pharmaceutical composition comprising the same.

### TECHNICAL FIELD

[0001] This invention relates to products and methods of biotechnology, in particular to multitargeting antigen-binding molecules, their preparation and their use.

### BACKGROUND

[0002] In comparison to small chemical drugs, protein pharmaceuticals have high specificity and activity at relatively low concentrations, and typically provide for therapy of high impact diseases such as various cancers, auto-immune diseases, and metabolic disorders (Roberts, Trends Biotechnol. 2014 July; 32(7):372-80, Wang, Int J Pharm. 1999 Aug. 20; 185(2):129-88). Such new protein-based pharmaceuticals comprise, for example, bispecific (monoclonal) antibodies which typically can simultaneously bind to two different types of antigen. They are known in several structural formats, and current applications have been explored for cancer immunotherapy and drug delivery (Fan, Gaowei; Wang, Zujian; Hao, Mingju; Li, Jinming (2015). “Bispecific antibodies and their applications”. Journal of Hematology & Oncology. 8: 130).

[0003] Bispecific molecules useful in immunooncology can be antigen-binding polypeptides such as antibodies, e.g. IgG-like, i.e. full-length bispecific antibodies, or non-IgG-like bispecific antibodies, which are not full-length antigen-binding molecules. Full length bispecific antibodies typically retain the traditional monoclonal antibody (mAb) structure of two Fab arms and one Fc region, except the two Fab sites bind different antigens. Non-full-length bispecific antibodies can lack an Fc region entirely. These include chemically linked Fabs, consisting of only the Fab regions, and various types of bivalent and trivalent single-chain variable fragments (scFvs). There are also fusion proteins mimicking the variable domains of two antibodies. An example of such a format is the bi-specific T-cell engager (BiTE®) (Yang, Fa; Wen, Weihong; Qin, Weijun (2016). “Bispecific Antibodies as a Development Platform for New Concepts and Treatment Strategies”. International Journal of Molecular Sciences. 18 (1): 48).

[0004] Exemplary bispecific antibody-derived molecules such as BiTE® molecules are recombinant protein constructs made from two flexibly linked antibody derived binding domains. One binding domain of BiTE® molecules is specific for a selected tumor-associated surface antigen on target cells; the second binding domain is specific for CD3, a subunit of the T cell receptor complex on T cells. By their particular design, BiTE® antigen-binding molecules are uniquely suited to transiently connect T cells with target cells and, at the same time, potently activate the inherent cytolytic potential of T cells against target cells. An important further development of the first generation of BiTE® molecules (see WO 99/54440 and WO 2005/040220) developed into the clinic as AMG 103 and AMG 110 was the provision of bispecific antigen-binding molecules binding to a context independent epitope at the N-terminus of the CD3s chain (WO 2008/119567). BiTE® molecules binding to this elected epitope do not only show cross-species specificity for the human and the Macaca, or Callithrix jacchus, Saguinus oedipus or Saimiri sciureus CD3ε chain, but also, due to recognizing this specific epitope (instead of previously described epitopes of CD3 binders in bispecific T cell engaging molecules), do not demonstrate unspecific activation of T cells to the same degree as observed for the previous generation of T cell engaging antibodies. This reduction in T cell activation was connected with less or reduced T cell redistribution in patients, the latter being identified as a risk for side effects, e.g. in pasotuximab.

[0005] Antibody-based molecules as described in WO 2008/119567 are characterized by rapid clearance from the body; thus, while they are able to reach most parts of the body rapidly, their in vivo applications may be limited by their brief persistence in vivo. On the other hand, their concentration in the body can be adapted and fine-tuned at short notice. Prolonged administration by continuous intravenous infusion is used to achieve therapeutic effects because of the short in vivo half-life of this small, single chain molecule. However, bispecific antigen-binding molecules are available which have more favorable pharmacokinetic properties, including a longer half-life as described in WO 2017/134140. An increased half-life is typically useful in in vivo applications of immunoglobulins, especially with respect to especially antibody fragments or constructs of small size, e.g. in the interest of patient compliance.

[0006] One challenging ongoing problem in antibody-based immunooncology is tumor escape. Such tumor escape happens when the immune system—even if triggered or directed by some antibody—based immune-therapeutics—is not capable enough to eradicate tumors, which carry accumulated genetic and epigenetic alterations and use several mechanisms to be the victorious of the immunoediting process (Keshavarz-Fathi, Mahsa; Rezaei, Nima (2019) “Vaccines for Cancer Immunotherapy”). Generally, four mechanisms interfering with effective antitumor immune responses are known: (1) defective tumor antigen processing or presentation, (2) lack of activating mechanisms, (3) inhibitory mechanisms and immunosuppressive state, and (4) resistant tumor cells. Especially with respect to the first mechanism, tumor antigens might be present in a new form due to the genetic instability, mutation of the tumor and escape from immune system. Epitope-negative tumor cells remain hidden and consequently resistant to the immune rejection. They have been developed following the elimination of epitope-positive tumor cells, similar to Darwin's theory of natural selection. In consequence, antibody-based immune-therapy directed against an antigen on tumor cells is rendered ineffective when such tumor cells no longer express a respective antigen due to tumor escape. Said antigen loss is understood herein as driving force for tumor escape and thus, used interchangeably. Accordingly, there is a need to provide improved antibody-based immunooncology which addresses the problem of antigen loss to effectively prevent tumor escape.

[0007] Further, despite the so-far achieved pre-clinical and clinical success of antibody-based immune-therapeutics, notable limitations remain including differential responses between individuals and cancer types. Not all patients will respond to therapy at available safe doses as dose-limiting toxicity can be a limiting factor for the efficacy of antibody-based immune-therapeutics. Hence, there is also a need to reduce dose-limiting toxicity in antibody-based immune-therapeutics to make such therapy available to more patients suffering from diverse proliferative diseases.

[0008] Another challenge to the broad utilization of immunooncology with respect to T-cell engaging bispecific molecules is the availability of suitable targets (Bacac et al., Clin Cancer Res; 22(13) Jul. 1, 2016). For example, solid tumor targets may be overexpressed on tumor cells but expressed at lower, yet significant levels on non-malignant primary cells in critical tissues. In nature, according to Bacac et al, T cells can distinguish between high- and low-antigen expressing cells by means of relatively low-affinity T cell receptors (TCRs) that can still achieve high-avidity binding to target cells expressing sufficiently high levels of target antigen. T-cell engaging bispecific molecules that could facilitate the same, and thus maximize the window between killing of high- and low-target expressing cells, are thus highly desirable. One approach discussed in the art is the use of dual targeting of two antigens on the same cell leads to improved target selectivity over normal tissues that express only one or low levels of both target antigens. This effect is thought to be dependent on the avidity component mediated by the concurrent binding of the bsAb to both antigens on the same cell. With respect to dual targeting as such, some multispecific monoclonal antibodies (mAb) or other immune constructs are known in the art. WO 2014/116846 teaches a multispecific binding protein comprising a first binding site that specifically binds to a target cell antigen, a second binding site that specifically binds to a cell surface receptor on an immune cell, and a third binding site that specifically binds to cell surface modulator on the immune cell. US 2017/0022274 discloses a trivalent T-cell redirecting complex comprising a bispecific antibody, wherein the bispecific antibody has two binding sites against a tumor-associated antigen (TAA) and one binding site against a T-cell. While different multispecific antibodies or antibody fragments are known in the art, some of which address T-cells, no multitargeting bispecific molecules employing the mechanism of a—preferably single chain—bispecific T-cell engaging molecule has been proposed before which both addresses the need of overcoming antigen loss/tumor escape and to reduce dose-limiting toxicity in antibody-based immune-therapeutics while effectively redirecting T-cells by one stable and ready-to-use therapeutic system.

### SUMMARY

[0009] In view of the needs described above, it is an object of the present invention to provide multitargeting antigen-binding molecules, typically polypeptides, such as T cell engaging bispecific molecules, which are specifically suitable to bind two antigens on a target cell associated with specific conditions and one antigen on an effector cell at the same time, preferably for use in the treatment of said specific conditions. Accordingly, the present invention provides a multitargeting bispecific antigen-binding molecule characterized by comprising a first domain binding to a target cell surface antigen (e.g. a first TAA), a second domain binding to the same or preferably a different target cell surface antigen (e.g. a second TAA), a third domain binding to an extracellular epitope of the human and non-human, e.g. Macaca CD3ε chain, and preferably a fourth domain, which is a specific Fc modality which modulates half-life of the molecule. Preferably, the domains are binding domains comprised of VH and VL domains in amino to carboxyl orientation, respectively, wherein a flexible but short peptide linker links the VL of the first binding domain to the VH of the second binding domain. Surprisingly, activity of the molecules of the present invention against target cells associated with particular diseases can be preserved thereby without steric hindrance between the first and the second binding domain, and without the requirement of providing long linkers which would disadvantageously be more prone to degradation, cleavage or the like than the instantly provided shorter linkers. Moreover, the invention provides a polynucleotide encoding the antigen-binding molecule, a vector comprising this polynucleotide, and host cells expressing the construct and a pharmaceutical composition comprising the same.

[0010] In a first aspect, it is envisaged in the context of the present invention to provide a multispecific antigen-binding molecule comprising at least three binding domains, wherein
[0011] (i) the first binding domain comprises a paratope which immuno-specifically binds to a first target cell surface antigen (e.g. TAA1),
[0012] (ii) the second binding domain comprises a paratope which immune-specifically binds to a second target cell surface antigen (e.g. TAA2), and
[0013] (iii) the third binding domain comprises a paratope which immune-specifically binds to an extracellular epitope of the human and/or the Macaca CD3ε chain,
[0014] wherein the first, second and third binding domain are arranged in an amino to carboxyl order, and wherein the first binding domain and the second binding domain are linked by a peptide linker having a length of 5 to 24 amino acids, preferably 5 to 18 amino acids.

[0015] Within said aspect, it is also envisaged in the context of the present invention to provide an multispecific antigen-binding molecule, wherein the antigen-binding molecule comprises a fourth domain which comprises two polypeptide monomers, each comprising a hinge, a CH2 and a CH3 domain, wherein said two polypeptide monomers are fused to each other via a peptide linker.

[0016] Within said aspect, it is also envisaged in the context of the present invention to provide an multispecific antigen-binding molecule, wherein said forth domain comprises in an amino to carboxyl order:
[0017] hinge-CH2-CH3-linker-hinge-CH2-CH3.

[0018] Within said aspect, it is also envisaged in the context of the present invention to provide an multispecific antigen-binding molecule, wherein each of said polypeptide monomers in the fourth domain has an amino acid sequence that is at least 90% identical to a sequence selected from the group from the group consisting of: SEQ ID NO: 17-24, wherein preferably each of said polypeptide monomers has an amino acid sequence selected from SEQ ID NO: 17-24.

[0019] Within said aspect, it is also envisaged in the context of the present invention to provide an multispecific antigen-binding molecule, wherein the CH2 domain comprises an intra domain cysteine disulfide bridge.

[0020] Within said aspect, it is also envisaged in the context of the present invention to provide an multispecific antigen-binding molecule, wherein the first, second, third and the optional fourth binding domain are arranged in an amino to carboxyl order.

[0021] Within said aspect, it is also envisaged in the context of the present invention to provide an multispecific antigen-binding molecule, wherein the antigen-binding molecule is a single chain antigen-binding molecule, preferably a multispecific scFv antigen-binding molecule.

[0022] Within said aspect, it is also envisaged in the context of the present invention to provide an multispecific antigen-binding molecule, wherein the first, second, and third binding domain each comprise in a amino to carboxyl order a VH domain and a VL domain.

[0023] Within said aspect, it is also envisaged in the context of the present invention to provide an multispecific antigen-binding molecule, wherein the peptide linker between the VL of the first binding domain and the VH of the second binding domain is selected from having a length of 5, 6, 7, 8, 9, 10, 11, 12, 13, 14, 15, 16, 17, 18, 19, 20, 21, 22, 23, or 24 amino acids, preferably 5, 6, 7, 8, 9, 10, 11 or 12 amino acids, more preferably 6 amino acids.

[0024] Within said aspect, it is also envisaged in the context of the present invention to provide an multispecific antigen-binding molecule, wherein the peptide linker between the VL of the first binding domain and the VH of the second binding domain is a flexible linker which comprises serine and glycine as amino acid building blocks, preferably only serine (Ser, S) and glycine (Gly, G).

[0025] Within said aspect, it is also envisaged in the context of the present invention to provide an multispecific antigen-binding molecule, wherein the peptide linker between the first binding domain and the second binding domain is preferably rich in small and/or hydrophilic amino acids and preferably selected from the group consisting of S(G₄S)n, (G₄S)n, (G₄)n, and (G₅)n, wherein n equals 1, 2, 3 or 4, more preferably n equals 1 or 2, more preferably SG₄S.

[0026] Within said aspect, it is also envisaged in the context of the present invention to provide an multispecific antigen-binding molecule, wherein any of the first target cell surface antigen and the second target cell surface antigen is selected from the group consisting of CS1, BCMA, FLT3, CD123, CD20, CD22, EpCAM, MSLN, CDH3 and CLL1.

[0027] Within said aspect, it is also envisaged in the context of the present invention to provide an multispecific antigen-binding molecule, wherein the first target cell surface antigen and the second target cell surface antigen are not identical.

[0028] Within said aspect, it is also envisaged in the context of the present invention to provide an multispecific antigen-binding molecule, wherein the first binding domains is capable of binding to the first target cell surface antigen and the second binding domain is capable of binding to the second target cell surface antigen simultaneously, preferably wherein the first target cell surface antigen and the second target cell surface antigen are on the same target cell.

[0029] Within said aspect, it is also envisaged in the context of the present invention to provide an multispecific antigen-binding molecule, wherein the first target cell surface antigen and the second target cell surface antigen, respectively, are selected from the group consisting of CS1 and BCMA, BCMA and CS1, FLT3 and CD123, CD123 and FLT3, CD20 and CD22, CD22 and CD20, EpCAM and MSLN, MSLN and EpCAM, CDH3 and MSN, MSLN and CDH3, FLT3 and CLL1, and CLL1 and FLT3.

[0030] Within said aspect it is also envisaged that the multispecific antigen-binding molecule is characterized by
[0031] (i) the first and second domain comprise two antibody variable domains and the third domain comprises two antibody variable domains;
[0032] (ii) the first and second domain comprise one antibody variable domain and the third domain comprises two antibody variable domains;
[0033] (iii) the first and second domain comprise two antibody variable domains and the second domain comprises one antibody variable domain; or
[0034] (iv) the first domain comprises one antibody variable domain and the second domain comprises one antibody variable domain.

[0035] Within said aspect, it is also envisaged in the context of the present invention to provide an multispecific antigen-binding molecule, wherein the first, second and third domain, which are fused by respective peptide linkers, are fused to the fourth domain via a peptide linker.

[0036] Within said aspect, it is also envisaged in the context of the present invention to provide an multispecific antigen-binding molecule, wherein the antigen-binding molecule comprises in an amino to carboxyl order:
[0037] (a) the first domain;
[0038] (b) a peptide linker preferably having an amino acid sequence selected from the group consisting of SEQ ID NOs: 1-4 and 9-12, preferably 11;
[0039] (c) the second domain,
[0040] (d) a peptide linker preferably having an amino acid sequence selected from the group consisting of SEQ ID NOs: 1-3; and
[0041] (c) the third domain.

[0042] Within said aspect, it is also envisaged in the context of the present invention to provide an multispecific antigen-binding molecule, wherein the antigen-binding molecule further comprises in an amino to carboxyl order:
[0043] (f) a peptide linker having an amino acid sequence selected from the group consisting of SEQ ID NOs: 1, 2, 3, 9, 10, 11 and 12.
[0044] (e) the first polypeptide monomer of the fourth domain;
[0045] (f) a peptide linker having an amino acid sequence selected from the group consisting of SEQ ID NOs: 5, 6, 7 and 8; and
[0046] (g) the second polypeptide monomer of the fourth domain.

[0047] Within said aspect, it is also envisaged in the context of the present invention to provide an antigen-binding molecule, wherein the first and the second binding domain comprise a VH region comprising CDR-H1, CDR-H2 and CDR-H3 selected from—the group consisting of SEQ ID Nos: 33 to 35, 44 to 46, 55 to 57, 66 to 68, 77 to 79, 88 to 90, 99 to 101, 110 to 112, 121 to 123, 132 to 134, 143 to 145, 154 to 156, 165 to 167, 176 to 178, 187 to 189, 198 to 200,209 to 211,220 to 222,231 to 233, 242 to 244, 253 to 255, 264 to 266, 275 to 277, 286 to 288, 297 to 299, 308 to 310, 319 to 321, 330 to 332, 341 to 343, 352 to 354, 363 to 365, 374 to 376, 385 to 387, 396 to 398, 407 to 409, 418 to 420, 429 to 431, 440 to 442, 451 to 453, 462 to 464, 473 to 475, 484 to 486, 495 to 497, 506 to 508, 517 to 519, 528 to 530, 539 to 541, 550 to 552, 561 to 563, 572 to 574, 583 to 585, 594 to 596, 605 to 607, 616 to 618, 627 to 629, 638 to 640, 649 to 651, 660 to 662, 896 to 898, 907 to 909, 918 to 920, 929 to 931, 940 to 942, 951 to 953, 962 to 964, 973 to 975, 984 to 986, 995 to 997, 1006 to 1008, 1017 to 1019, 1028 to 1030, 1039 to 1041, 1050 to 1052, 1061

to 1063, 1072 to 1074, 1083 to 1085, 1094 to 1096, 1105 to 1107, 1116 to 1118, 1127 to 1129, 1138 to 1140, 1149 to 1151, 1160 to 1162, 1171 to 1173, 1182 to 1184, 1193 to 1195, 1204 to 1206, 1215 to 1217, 1226 to 1228, 1237 to 1239, 1248 to 1250, 1259 to 1261, 1270 to 1272, 1281 to 1283, 1292 to 1294, 1303 to 1305, 1314 to 1316, 1325 to 1327, 1336 to 1338, 1347 to 1349, 1358 to 1360, 1369 to 1371, 1380 to 1382, 1391 to 1393, 1402 to 1404, 1413 to 1415, 1424 to 1426, 1489 to 1491, 1500 to 1502, 1511 to 1513, 1522 to 1524, 1533 to 1535, 1544 to 1546, 1555 to 1557, 1566 to 1568, 1577 to 1579, 1588 to 1590, 1599 to 1601, 1610 to 1612, 1621 to 1623, 1632 to 1634, 1643 to 1645, 1654 to 1656, 1827 to 1829, 1840 to 1842, 1853 to 1855, 1866 to 1868, 1879 to 1881, 1892 to 1894, 11905 to 1907, 1922 to 1924, 1935 to 1937, 1948 to 1950, 1961 to 1963, 1974 to 1976, 1987 to 1989, 2000 to 2002, 2013 to 2015, 2026 to 2028, 2039 to 2041, 2052 to 2054, 2065 to 2067, 2078 to 2080, 2091 to 2093, 2104 to 2106, 2117 to 2119, 2130 to 2132, 2143 to 2145, 2156 to 2158, 2169 to 2171, 2182 to 2184, 2195 to 2197, 2208 to 2210, 2221 to 2223, 2234 to 2236, 2247 to 2249, 3346 to 3348, 3357 to 3359, 3368 to 3370, 3379 to 3381, 3390 to 3392, 3401 to 3403, 3412 to 3414, 3423 to 3425, 3434 to 3436, 3445 to 3447, 3456 to 3458, 3467 to 3469, 3478 to 3480, 3489 to 3491, 3500 to 3502, 3511 to 3513, 3522 to 3524, 3533 to 3535, 3544 to 3546, 3555 to 3557, 3566 to 3568, 3679 to 3681, 3690 to 3692, 3712 to 3714, 3723 to 3725.

[0048] Within said aspect, it is also envisaged in the context of the present invention to provide an multispecific antigen-binding molecule, wherein the first and second binding domain comprise a VL region comprising CDR-L1, CDR-L2 and CDR-L3 selected from the group consisting of SEQ ID Nos: 36 to 38, 47 to 49, 58 to 60, 69 to 71, 80 to 82, 91 to 93, 102 to 104, 113 to 115, 124 to 126, 135 to 137, 146 to 148, 157 to 159, 168 to 170, 179 to 181, 190 to 192, 201 to 203, 212 to 214, 223 to 225, 234 to 236, 245 to 247, 256 to 258, 267 to 269,278 to 280, 289 to 291, 300 to 302, 311 to 313, 322 to 324, 333 to 335, 344 to 346, 355 to 357, 366 to 368, 377 to 379, 388 to 390, 399 to 401, 410 to 412, 421 to 423, 432 to 434, 443 to 445, 454 to 456, 465 to 467, 476 to 478, 487 to 489, 498 to 500, 509 to 511, 520 to 522, 531 to 533, 542 to 544, 553 to 555, 564 to 566, 575 to 577, 586 to 588, 597 to 599, 608 to 610, 619 to 621, 630 to 632, 641 to 643, 652 to 654, 663 to 665, 899 to 901, 910 to 912, 921 to 923, 932 to 934, 943 to 945, 954 to 956, 965 to 967, 976 to 978, 987 to 989, 998 to 1000, 1009 to 1011, 1020 to 1022, 1031 to 1033, 1042 to 1043, 1053 to 1055, 1064 to 1066, 1075 to 1077, 1086 to 1088, 1097 to 1099, 1108 to 1110, 1119 to 1121, 1130 to 1132, 1141 to 1143, 1152 to 1154, 1163 to 1165, 1174 to 1176, 1185 to 1187, 1196 to 1198, 1207 to 1209, 1218 to 1220, 1229 to 1231, 1240 to 1242, 1251 to 1253, 1262 to 1264, 1273 to 1275, 1284 to 1286, 1295 to 1297, 1306 to 1308, 1317 to 1319, 1328 to 1330, 1339 to 1341, 1350 to 1352, 1361 to 1363, 1372 to 1374, 1383 to 1385, 1394 to 1396, 1405 to 1407, 1416 to 1418, 1427 to 1429, 1492 to 1494, 1503 to 1505, 1514 to 1516, 1525 to 1527, 1536 to 1538, 1547 to 1549, 1558 to 1560, 1569 to 1571, 1580 to 1582, 1591 to 1593, 1602 to 1604, 1613 to 1615, 1624 to 1626, 1635 to 1637, 1646 to 1648, 1657 to 1659, 1830 to 1832, 1843 to 1845, 1856 to 1858, 1869 to 1871, 1882 to 1884, 1895 to 1897, 1908 to 1910, 1925 to 1927, 1938 to 1940,

1951 to 1953, 1964 to 1966, 1977 to 1979, 1990 to 1992, 2003 to 2005, 2016 to 2018, 2029 to 2031, 2042 to 2044, 2055 to 2057, 2068 to 2070, 2081 to 2083, 2094 to 2096, 2107 to 2109, 2120 to 2122, 2133 to 2135, 2146 to 2148, 2159 to 2131, 2172 to 2174, 2085 to 2187, 2198 to 2200, 2211 to 2213, 2224 to 2226, 2237 to 2239, 2250 to 2252, 3349 to 3351, 3360 to 3362, 3371 to 3373, 3382 to 3384, 3393 to 3392, 3404 to 3406, 3415 to 3417, 3426 to 3428, 3437 to 3439, 3448 to 3450, 3459 to 3461, 3470 to 3472, 3481 to 3483, 3492 to 3494, 3503 to 3505, 3514 to 3516, 3525 to 3527, 3536 to 3538, 3547 to 3549, 3558 to 3560, 3569 to 3571, 3682 to 3684, 3693 to 3695, 3715 to 3717, and 3726 to 3728.

[0049] Within said aspect, it is also envisaged in the context of the present invention to provide an multispecific antigen-binding molecule, wherein the first and second binding domain comprise a VH region selected from the group consisting of SEQ ID Nos: 39, 50, 61, 72, 83, 94, 105, 116, 127, 138, 149, 160, 171, 182, 193, 204, 215, 226, 237, 248, 259, 270, 281, 292, 303, 314, 325, 336, 347, 358, 369, 380, 391, 402, 413, 424, 435, 446, 457, 468, 479, 490, 501, 512, 523, 534, 545, 556, 567, 578, 589, 600, 611, 622, 633, 644, 655, 666, 902, 913, 924, 935, 946, 957, 968, 979, 990, 1001, 1012, 1023, 1034, 1045, 1056, 1067, 1078, 1089, 1100, 1111, 1122, 1133, 1144, 1155, 1166, 1177, 1188, 1199, 1210, 1221, 1232, 1243, 1254, 1265, 1276, 1287, 1298, 1309, 1320, 1331, 1342, 1353, 1364, 1375, 1386, 1397, 1408, 1419, 1430, 1495, 1506, 1517, 1528, 1539, 1550, 1561, 1572, 1583, 1594, 1605, 1616, 1627, 1638, 1649, 1660, 1833, 1846, 1859, 1872, 1885, 1898, 1911, 1928, 1941, 1954, 1967, 1980, 1993, 2006, 2019, 2032, 2045, 2058, 2071, 2084, 2097, 2110, 2123, 2136, 2149, 2162, 2175, 2188, 2201, 2214, 2227, 2240, 2253, 3352, 3363, 3374, 3385, 3396, 3407, 3418, 3429, 3440, 3451, 3462, 3473, 3484, 3495, 3506, 3517, 3528, 3539, 3550, 3561, 3572, 3686, 3696, 3718, and 3729.

[0050] Within said aspect, it is also envisaged in the context of the present invention to provide an multispecific antigen-binding molecule, wherein the first and second binding domain comprises a VL region selected from the group consisting of SEQ ID Nos: 40, 51, 62, 73, 84, 95, 106, 117, 128, 139, 150, 161, 172, 183, 194, 205, 216, 227, 238, 249, 260, 271, 282, 293, 304, 315, 326, 337, 348, 359, 370, 381, 392, 403, 414, 425, 436, 447, 458, 469, 480, 491, 502, 513, 524, 535, 546, 557, 568, 579, 590, 601, 612, 623, 634, 645, 656, 667, 903, 914, 925, 936, 947, 958, 969, 980, 991, 1002, 1013, 1024, 1035, 1046, 1057, 1068, 1079, 1090, 1101, 1112, 1123, 1134, 1145, 1156, 1167, 1178, 1189, 1200, 1211, 1222, 1233, 1244, 1255, 1266, 1277, 1288, 1299, 1310, 1321, 1332, 1343, 1354, 1365, 1376, 1387, 1398, 1409, 1420, 1431, 1496, 1507, 1518, 1529, 1540, 1551, 1562, 1573, 1584, 1595, 1606, 1617, 1628, 1639, 1650, 1661, 1834, 1847, 1860, 1873, 1886, 1899, 1912, 1929, 1942, 1955, 1968, 1981, 1994, 2007, 2020, 2033, 2046, 2059, 2072, 2085, 2098, 2111, 2124, 2137, 2150, 2163, 2176, 2189, 2202, 2215, 2228, 2241, 2254, 3353, 3364, 3375, 3386, 3397, 3408, 3419, 3430, 3441, 3452, 3463, 3474, 3485, 3496, 3507, 3518, 3529, 3540, 3551, 3562, 3573, 3685, 3697, 3719, and 3730.

[0051] Within said aspect, it is also envisaged in the context of the present invention to provide an multispecific antigen-binding molecule, wherein the first and second binding domain comprises a scFv sequence selected from the group consisting of SEQ ID Nos: 41, 52, 63, 74, 85, 96, 107, 118, 129, 140, 151, 162, 173, 184, 195, 206, 217, 228, 239, 250, 261, 272, 283, 294, 305, 316, 327, 338, 349, 360, 371, 382, 393, 404, 415, 426, 437, 448, 459, 470, 481, 492, 503, 514, 525, 536, 547, 558, 569, 580, 591, 602, 613, 624, 635, 646, 657, 668, 671, 674, 677, 680, 683, 686, 689, 692, 695, 698, 701, 704, 707, 710, 713, 716, 719, 722, 725, 728, 731, 734, 737, 740, 743, 746, 749, 752, 755, 758, 761, 764, 767, 770, 773, 776, 779, 782, 785, 788, 791, 794, 797, 800, 803, 806, 809, 812, 815, 818, 821, 824, 827, 830, 833, 836, 839, 842, 845, 848, 851, 854, 857, 860, 863, 866, 869, 872, 874, 876, 878, 880, 882, 884, 886, 888, 890, 892, 894, 904, 915, 926, 937, 948, 959, 970, 981, 992, 1003, 1014, 1025, 1036, 1047, 1058, 1069, 1080, 1091, 1102, 1113, 1124, 1135, 1146, 1157, 1168, 1179, 1190, 1201, 1212, 1223, 1234, 1245, 1256, 1267, 1278, 1289, 1300, 1311, 1322, 1333, 1344, 1355, 1366, 1377, 1388, 1399, 1410, 1421, 1432, 1435, 1438, 1441, 1444, 1447, 1450, 1453, 1456, 1459, 1462, 1465, 1468, 1471, 1474, 1477, 1480, 1483, 1486, 1497, 1508, 1519, 1530, 1541, 1552, 1563, 1574, 1585, 1596, 1607, 1618, 1629, 1640, 1651, 1662, 1665, 1668, 1671, 1674, 1677, 1680, 1683, 1686, 1689, 1692, 1695, 1698, 1701, 1704, 1707, 1710, 1713, 1716, 1719, 1722, 1725, 1728, 1731, 1734, 1737, 1740, 1743, 1746, 1749, 1752, 1755, 1758, 1761, 1764, 1767, 1770, 1773, 1776, 1779, 1782, 1785, 1788, 1791, 1794, 1797, 1800, 1803, 1806, 1809, 1812, 1815, 1818, 1821, 1824, 1835, 1848, 1861, 1874, 1887, 1900, 1913, 1930, 1943, 1956, 1969, 1982, 1995, 2008, 2021, 2034, 2047, 2060, 2073, 2086, 2099, 2112, 2125, 2138, 2151, 2164, 2177, 2190, 2203, 2216, 2229, 2242, 2255, 2264, 2265, 2274, 2275, 2284, 2285, 2294, 2295, 2304, 2305, 2314, 2315, 2324, 2325, 2334, 2335, 2344, 2345, 2354, 2355, 2364, 2365, 2374, 2375, 2384, 2385, 2394, 2395, 2404, 2405, 2414, 2415, 2424, 2425, 2434, 2435, 2444, 2445, 2454, 2455, 2464, 2465, 2474, 2475, 2484, 2485, 2494, 2495, 2504, 2505, 2514, 2515, 2524, 2525, 2534, 2535, 2544, 2545, 2554, 2555, 2564, 2565, 2574, 2575, 2584, 2585, 2594, 2595, 2604, 2605, 2614, 2615, 2624, 2625, 2634, 2635, 2644, 2645, 2654, 2655, 2664, 2665, 2674, 2675, 2684, 2685, 2694, 2695, 2704, 2705, 2714, 2715, 2724, 2725, 2734, 2735, 2744, 2745, 2754, 2755, 2764, 2765, 2774, 2775, 2784, 2785, 2794, 2795, 2804, 2805, 2814, 2815, 2824, 2825, 2834, 2835, 2844, 2845, 2854, 2855, 2864, 2865, 2874, 2875, 2884, 2885, 2894, 2895, 2904, 2905, 2914, 2915, 2914, 2925, 2934, 2935, 2944, 2945, 2954, 2955, 2964, 2965, 2974, 2975, 2984, 2985, 2994, 2995, 3004, 3005, 3014, 3015, 3024, 3025, 3034, 3035, 3044, 3045, 3054, 3055, 3064, 3065, 3074, 3075, 3084, 3085, 3094, 3095, 3104, 3105, 3114, 3115, 3124, 3125, 3134, 3135, 3144, 3145, 3154, 3155, 3164, 3165, 3174, 3175, 3184, 3185, 3194, 3195, 3204, 3205, 3214, 3215, 3224, 3225, 3234, 3235, 3244, 3245, 3254, 3255, 3264, 3265, 3274, 3275, 3284, 3285, 3294, 3295, 3304, 3305, 3314, 3315, 3324, 3325, 3334, 3335, 3354, 3365, 3376, 3387, 3398, 3409, 3420, 3431, 3442, 3453, 3464, 3475, 3486, 3497, 3508, 3519, 3530, 3541, 3552, 3563, 3574, 3577, 3580, 3583, 3586, 3589, 3592, 3595, 3598, 3601, 3604, 3607, 3610, 3613, 3616, 3619, 3622, 3625, 3628, 3631, 3634, 3637, 3640, 3643, 3646, 3649, 3652, 3655, 3658, 3661, 3664, 3667, 3670, 3673, 3676, 3687, 3698, 3701, 3706, 3720, 3731, 3734, 3737, 3740, 3749, 3750, preferably 1399 or 1435.

[0052] Within said aspect, it is also envisaged in the context of the present invention to provide an multispecific antigen-binding molecule, comprises a first and/or second target binding domain together with a third effector binding domain, the two or three binding domains together having a sequence selected from the group consisting of SEQ ID Nos: 42, 53, 64, 75, 86, 97, 108, 119, 130, 141, 152, 163, 174, 185, 196, 207, 218, 229, 240, 251, 262, 273, 284, 295, 306, 317, 328, 339, 350, 361, 372, 383, 394, 405, 416, 427, 438, 449, 460, 471, 482, 493, 504, 515, 526, 537, 548, 559, 570, 581, 592, 603, 614, 625, 636, 647, 658, 669, 672, 675, 678, 681, 684, 687, 690, 693, 696, 699, 702, 705, 708, 711, 714, 717, 720, 723, 726, 729, 732, 735, 738, 741, 744, 747, 750, 753, 756, 759, 762, 765, 768, 771, 774, 777, 780, 783, 786, 789, 792, 795, 798, 801, 804, 807, 810, 813, 816, 819, 822, 825, 828, 831, 834, 837, 840, 843, 846, 849, 852, 855, 858, 861, 864, 867, 870 873, 875, 877, 879, 881, 883, 885, 887, 889, 891, 893, 895, 905, 916, 927, 938, 949, 960, 971, 982, 993, 1004, 1015, 1026, 1037, 1048, 1059, 1070, 1081, 1092, 1103, 1114, 1125, 1136, 1147, 1158, 1169, 1180, 1191, 1202, 1213, 1224, 1235, 1246, 1257, 1268, 1279, 1290, 1301, 1312, 1323, 1334, 1345, 1356, 1367, 1378, 1389, 1400, 1411, 1422, 1433, 1436, 1439, 1442, 1445, 1448, 1451, 1454, 1457, 1460, 1463, 1466, 1469, 1472, 1475, 1478, 1481, 1484, 1487, 1498, 1509, 1520, 1531, 1542, 1553, 1564, 1575, 1586, 1597, 1608, 1619, 1630, 1641, 1652, 1663, 1666, 1669, 1672, 1675, 1678, 1681, 1684, 1687, 1690, 1693, 1696, 1699, 1702, 1705, 1708, 1711, 1714, 1717, 1720, 1723, 1726, 1729, 1732, 1735, 1738, 1741, 1744, 1747, 1750, 1753, 1756, 1759, 1762, 1765, 1768, 1771, 1774, 1777, 1780, 1783, 1786, 1789, 1792, 1795, 1798, 1801, 1804, 1807, 1810, 1813, 1816, 1819, 1822, 1825, 1836, 1849, 1862, 1875, 1888, 1901, 1914, 1931, 1944, 1957, 1970, 1983, 1996, 2009, 2022, 2035, 2048, 2061, 2074, 2087, 2300, 2113, 2126, 2139, 2152, 2165, 2178, 2191, 2204, 2217, 2230, 2243, 2256, 2260, 2266, 2267, 2276, 2277, 2286, 2287, 2296, 2297, 2306, 2307, 2316, 2317, 2326, 2327, 2336, 2337, 2346, 2347, 2356, 2357, 2366, 2367, 2376, 2377, 2386, 2387, 2396, 2397, 2406, 2407, 2416, 2417, 2426, 2427, 2436, 2437, 2446, 2447, 2456, 2457, 2466, 2467, 2476, 2477, 2486, 2487, 2496, 2497, 2506, 2507, 2516, 2517, 2526, 2527, 2536, 2537, 2546, 2547, 2556, 2557, 2566, 2567, 2576, 2577, 2586, 2587, 2596, 2597, 2606, 2607, 2616, 2617, 2626, 2627, 2636, 2637, 2646, 2647, 2656, 2657, 2666, 2667, 2676, 2677, 2686, 2687, 2696, 2697, 2706, 2707, 2716, 2717, 2726, 2727, 2736, 2737, 2746, 2747, 2756, 2757, 2766, 2767, 2776, 2777, 2786, 2787, 2796, 2797, 2806, 2807, 2816, 2817, 2826, 2827, 2836, 2837, 2846, 2847, 2856, 2857, 2866, 2867, 2876, 2877, 2886, 2887, 2896, 2897, 2906, 2907, 2916, 2917, 2926, 2927, 2936, 2937, 2946, 2947, 2956, 2957, 2966, 2967, 2976, 2977, 2986, 2987, 2996, 2997, 3006, 3007, 3016, 3017, 3026, 3027, 3036, 3037, 3046, 3047, 3056, 3057, 3066, 3067, 3076, 3077, 3086, 3087, 3096, 3097, 3106, 3107, 3116, 3117, 3126, 3127, 3136, 3137, 3146, 3147, 3156, 3157, 3166, 3167, 3176, 3177, 3186, 3187, 3196, 3197, 3206, 3207, 3216, 3217, 3226, 3227, 3236, 3237, 3246, 3247, 3246, 3247, 3256, 3257, 3266, 3267, 3276, 3277, 3286, 3287, 3296, 3297, 3306, 3307, 3316, 3317, 3326, 3327, 3336, 3337, 3355, 3366, 3377, 3388, 3399, 3410, 3421, 3432, 3443, 3454, 3465, 3476, 3487, 3498, 3509, 3520, 3531, 3542, 3553, 3564, 3575, 3578, 3581, 3584, 3587, 3590, 3593, 3596, 3599, 3602, 3605, 3608, 3611, 3614, 3617, 3620, 3623, 3626, 3629, 3632, 3635, 3638, 3641, 3644, 3647, 3650, 3653, 3656, 3659, 3662, 3665, 3668, 3671, 3674, 3677, 3688, 3699, 3702, 3703, 3707, 3721, 3732, 3735, 3738, 3741, 3751, 3752, preferably 1400 or 1436

[0053] Within said aspect, it is also envisaged in the context of the present invention to provide an multispecific antigen-binding molecule, wherein the construct comprises a first and second target binding as disclosed herein, a third domain and optionally a fourth domain conferring extended half-life.

[0054] Within said aspect, it is also envisaged in the context of the present invention to provide an antigen-binding molecule, wherein the antigen-binding molecule further comprises in addition to (a) to (d) an amino to carboxyl order:

(e) the first polypeptide monomer of the third domain having a polypeptide sequence selected from the group consisting of SEQ ID NOs: 17-24;
(f) a peptide linker having an amino acid sequence selected from the group consisting of SEQ ID NOs: 5, 6, 7 and 8; and
(g) the second polypeptide monomer of the third domain having a polypeptide sequence selected from the group consisting of SEQ ID NOs: 17-24.

[0055] Within said aspect, it is also envisaged in the context of the present invention to provide an antigen-binding molecule, having an amino acid sequence selected from the group consisting of SEQ ID NOs: 41, 52, 63, 74, 85, 96, 107, 118, 129, 140, 151, 162, 173, 184, 195, 206, 217, 228, 239, 250, 261, 272, 283, 294, 305, 316, 327, 338, 349, 360, 371, 382, 393, 404, 415, 426, 437, 448, 459, 470, 481, 492, 503, 514, 525, 536, 547, 558, 569, 580, 591, 602, 613, 624, 635, 646, 657, 668, 671, 674, 677, 680, 683, 686, 689, 692, 695, 698, 701, 704, 707, 710, 713, 716, 719, 722, 725, 728, 731, 734, 737, 740, 743, 746, 749, 752, 755, 758, 761, 764, 767, 770, 773, 776, 779, 782, 785, 788, 791, 794, 797, 800, 803, 806, 809, 812, 815, 818, 821, 824, 827, 830, 833, 836, 839, 842, 845, 848, 851, 854, 857, 860, 863, 866, 869, 872, 874, 876, 878, 880, 882, 884, 886, 888, 890, 892, 894, 904, 915, 926, 937, 948, 959, 970, 981, 992, 1003, 1014, 1025, 1036, 1047, 1058, 1069, 1080, 1091, 1102, 1113, 1124, 1135, 1146, 1157, 1168, 1179, 1190, 1201, 1212, 1223, 1234, 1245, 1256, 1267, 1278, 1289, 1300, 1311, 1322, 1333, 1344, 1355, 1366, 1377, 1388, 1399, 1410, 1421, 1432, 1435, 1438, 1441, 1444, 1447, 1450, 1453, 1456, 1459, 1462, 1465, 1468, 1471, 1474, 1477, 1480, 1483, 1486, 1497, 1508, 1519, 1530, 1541, 1552, 1563, 1574, 1585, 1596, 1607, 1618, 1629, 1640, 1651, 1662, 1665, 1668, 1671, 1674, 1677, 1680, 1683, 1686, 1689, 1692, 1695, 1698, 1701, 1704, 1707, 1710, 1713, 1716, 1719, 1722, 1725, 1728, 1731, 1734, 1737, 1740, 1743, 1746, 1749, 1752, 1755, 1758, 1761, 1764, 1767, 1770, 1773, 1776, 1779, 1782, 1785, 1788, 1791, 1794, 1797, 1800, 1803, 1806, 1809, 1812, 1815, 1818, 1821, and 1824, preferably 1399 or 1435, preferably SEQ ID NOs 42, 53, 64, 75, 86, 97, 108, 119, 130, 141, 152, 163, 174, 185, 196, 207, 218, 229, 240, 251, 262, 273, 284, 295, 306, 317, 328, 339, 350, 361, 372, 383, 394, 405, 416, 427, 438, 449, 460, 471, 482, 493, 504, 515, 526, 537, 548, 559, 570, 581, 592, 603, 614, 625, 636, 647, 658, 669, 672, 675, 678, 681, 684, 687, 690, 693, 696, 699, 702, 705, 708, 711, 714, 717, 720, 723, 726, 729, 732, 735, 738, 741, 744, 747, 750, 753, 756, 759, 762, 765, 768, 771, 774, 777, 780, 783, 786, 789, 792, 795, 798, 801, 804, 807, 810, 813, 816, 819, 822, 825, 828, 831, 834, 837, 840, 843, 846, 849, 852, 855, 858, 861, 864, 867, 870 873, 875, 877, 879, 881, 883, 885, 887, 889, 891, 893, 895, 905, 916, 927, 938, 949, 960, 971, 982, 993, 1004, 1015, 1026, 1037, 1048, 1059, 1070, 1081, 1092, 1103, 1114, 1125, 1136, 1147, 1158, 1169, 1180, 1191, 1202, 1213, 1224, 1235, 1246, 1257, 1268, 1279, 1290, 1301, 1312, 1323, 1334, 1345, 1356, 1367, 1378, 1389, 1400, 1411, 1422, 1433, 1436, 1439, 1442, 1445, 1448, 1451, 1454, 1457, 1460, 1463, 1466, 1469, 1472, 1475, 1478, 1481, 1484, 1487, 1498, 1509, 1520, 1531, 1542, 1553, 1564, 1575, 1586, 1597, 1608, 1619, 1630, 1641, 1652, 1663, 1666, 1669, 1672, 1675, 1678, 1681, 1684, 1687, 1690, 1693, 1696, 1699, 1702, 1705, 1708, 1711, 1714, 1717, 1720, 1723, 1726, 1729, 1732, 1735, 1738, 1741, 1744, 1747, 1750, 1753, 1756, 1759, 1762, 1765, 1768, 1771, 1774, 1777, 1780, 1783, 1786, 1789, 1792, 1795, 1798, 1801, 1804, 1807, 1810, 1813, 1816, 1819, 1822, and 1825, preferably 1400 or 1436, more preferably 43, 54, 65, 76, 87, 98, 109, 120, 131, 142, 153, 164, 175, 186, 197, 208, 219, 230, 241, 252, 263, 274, 285, 296, 307, 318, 329, 340, 351, 362, 373, 384, 395, 406, 417, 428, 439, 450, 461, 472, 483, 494, 505, 516, 527, 538, 549, 560, 571, 582, 593, 604, 615, 626, 637, 648, 659, 670, 673, 676, 679, 682, 685, 688, 691, 694, 697, 700, 703, 706, 709, 712, 715, 718, 721, 724, 727, 730, 733, 736, 739, 742, 745, 748, 751, 754, 757, 760, 763, 766, 769, 772, 775, 778, 781, 784, 787, 790, 793, 796, 799, 802, 805, 808, 811, 814, 817, 820, 823, 826, 829, 832, 835, 838, 841, 844, 847, 850, 853, 856, 859, 862, 865, 868, 871, 906, 917, 928, 939, 950, 961, 972, 983, 994, 1005, 1016, 1027, 1038, 1049, 1060, 1071, 1082, 1093, 1104, 1115, 1126, 1137, 1148, 1159, 1170, 1181, 1192, 1203, 1214, 1225, 1236, 1247, 1258, 1269, 1280, 1291, 1302, 1313, 1324, 1335, 1346, 1357, 1368, 1379, 1390, 1401, 1412, 1423, 1434, 1437, 1440, 1443, 1446, 1449, 1452, 1455, 1458, 1461, 1464, 1467, 1470, 1473, 1476, 1479, 1482, 1485, 1488, 1499, 1510, 1521, 1532, 1543, 1554, 1565, 1576, 1587, 1598, 1609, 1620, 1631, 1642, 1653, 1664, 1667, 1670, 1673, 1676, 1679, 1682, 1685, 1688, 1691, 1694, 1697, 1700, 1703, 1706, 1709, 1712, 1715, 1718, 1721, 1724, 1727, 1730, 1733, 1736, 1739, 1742, 1745, 1748, 1751, 1754, 1757, 1760, 1763, 1766, 1769, 1772, 1775, 1778, 1781, 1784, 1787, 1790, 1793, 1796, 1799, 1802, 1805, 1808, 1811, 1814, 1817, 1820, 1823, 1826, 1838, 1851, 1864, 1877, 1890, 1903, 1916, 1933, 1946, 1959, 1972, 1985, 1998, 2011, 2024, 2037, 2050, 2063, 2076, 2089, 2102, 2115, 2128, 2141, 2154, 2167, 2180, 2194, 2206, 2219, 2232, 2245, 2258, 2262, 2270, 2271, 2280, 2281, 2290, 2291, 2300, 2301, 2310, 2311, 2320, 2321, 2330, 2331, 2340, 2341, 2350, 2351, 2360, 2361, 2370, 2371, 2380, 2381, 2390, 2391, 2400, 2401, 2410, 2411, 2420, 2421, 2430, 2431, 2440, 2441, 2450, 2451, 2460, 2461, 2470, 2471, 2480, 2481, 2490, 2491, 2500, 2501, 2510, 2511, 2520, 2521, 2530, 2531, 2540, 2541, 2550, 2551, 2560, 2561, 2570, 2571, 2580, 2581, 2590, 2591, 2600, 2601, 2610, 2611, 2620, 2621, 2630, 2631, 2640, 2641, 2650, 2651, 2660, 2661, 2670, 2671, 2680, 2681, 2690, 2691, 2700, 2701, 2710, 2711, 2720, 2721, 2730, 2731, 2740, 2741, 2750, 2751, 2760, 2761, 2770, 2771, 2780, 2781, 2790, 2791, 2800, 2801, 2810, 2811, 2820, 2821, 2830, 2831, 2840, 2841, 2850, 2851, 2860, 2861, 2870, 2871, 2880, 2881, 2890, 2891, 2900, 2901, 2910, 2911, 2920, 2921, 2930, 2931, 2940, 2941, 2950, 2951, 2960, 2961, 2970, 2971, 2980, 2981, 2990, 2991, 3000, 3001, 3010, 3011, 3020, 3021, 3030, 3031, 3040, 3041, 3050, 3051, 3060, 3061, 3070, 3071, 3080, 3081, 3090, 3091, 3100, 3101, 3110, 3111, 3120, 3121, 3130, 3131, 3140, 3141, 3150, 3151, 3160, 3161, 3170, 3171, 3180, 3181, 3190, 3191, 3200, 3201, 3210, 3211, 3220, 3221, 3231, 3240, 3241, 3250, 3251, 3260, 3261, 3270, 3271, 3280, 3281, 3290, 3291, 3300, 3301, 3310, 3311, 3320, 3321, 3330, 3331, 3340, 3341, 3344, 3345, 3356, 3367, 3378, 3389, 3400, 3411, 3422, 3433, 3444, 3455, 3466, 3477, 3488, 3499, 3510, 3521, 3532, 3543, 3554, 3565, 3576, 3579, 382, 3585, 3588, 3591, 3594, 3597, 3600, 3603, 3606, 3609, 3612, 3615, 3618, 3621, 3624, 3627, 3630, 3633, 3636, 3639, 3642, 3645, 3648, 3651, 3654, 3657, 3660, 3663, 3666, 3669, 3672, 3675, 3678, 3689, 3700, 3704, 3705, 3708, 3709, 3710, 3711, 3722, 3733, 3736, 3739, 3744, 3747, 3748, 3756, 3757, 3761, and 3762 preferably 1401 or 1437.

[0056] Within said aspect, it is also envisaged in the context of the present invention to provide an antigen-binding molecule which has a stability-optimized CD3 binder, the molecule having an amino acid sequence selected from the group consisting of 1839, 1852, 1865, 1878, 1891, 1904, 1917, 1919, 1921, 1934, 1947, 1960, 1973, 1986, 1999, 2012, 2025, 2038, 2051, 2064, 2077, 2090, 2103, 2116, 2029, 2142, 2155, 2168, 2181, 2193, 2207, 2220, 2233, 2246, 2259, 2263, 2272, 2273, 2282, 2283, 2292, 2293, 2302, 2303, 2312, 2313, 2322, 2323, 2332, 2333, 2342, 2343, 2352, 2353, 2362, 2363, 2372, 2373, 2382, 2383, 2392, 2393, 2402, 2403, 2412, 2413, 2422, 2423, 2432, 3433, 2442, 2443, 2452, 2453, 2462, 2463, 2472, 2473, 2482, 2483, 2492, 2493, 2502, 2503, 2512, 2513, 2522, 2523, 2532, 2533, 2542, 2543, 2552, 2553, 2562, 2563, 2572, 2573, 2582, 2583, 2592, 2593, 2602, 2603, 2612, 2613, 2622, 2623, 2632, 2633, 2642, 2643, 2652, 2653, 2662, 2663, 2672, 2673, 2682, 2683, 2692, 2693, 2702, 2703, 2712, 2713, 2722, 2723, 2732, 2733, 2742, 2743, 2752, 2753, 2762, 2763, 2772, 2773, 2782, 2783, 2792, 2793, 2802, 2803, 2812, 2813, 2822, 2823, 2832, 2833, 2842, 2843, 2852, 2853, 2862, 2863, 2872, 2873, 2882, 2883, 2892, 2893, 2902, 2903, 2912, 2913, 2922, 2923, 2932, 2933, 2942, 2943, 2952, 2953, 2962, 2963, 2972, 2973, 2982, 2983, 2992, 2993, 3002, 3003, 3012, 3013, 3022, 3023, 3032, 3033, 3042, 3043, 3052, 3053, 3062, 3063, 3072, 3073, 3082, 3083, 3092, 3093, 3112, 3113, 3122, 3123, 3132, 3133, 3142, 3143, 3152, 3153, 3162, 3163, 3172, 3173, 3182, 3183, 3192, 3193, 3202, 3203, 3212, 3213, 3222, 3223, 3232, 3233, 3242, 3243, 3252, 3253, 3262, 3263, 3272, 3273, 3282, 3283, 3292, 3293, 3302, 3303, 3312, 3313, 3322, 3323, 3332, 3333, 3342, 3343, 3745, 3746, 3758, 3759, and 3760.

[0057] In a second aspect, it is further envisaged in the context of the present invention to provide a polynucleotide encoding an antigen-binding molecule of the present invention.

[0058] In a third aspect, it is also envisaged in the context of the present invention to provide a vector comprising a polynucleotide of the present invention.

[0059] In a fourth aspect, it is further envisaged in the context of the present invention to provide a host cell transformed or transfected with the polynucleotide or with the vector of the present invention.

[0060] In a fifth aspect, it is also envisaged in the context of the present invention to provide a process for the production of an antigen-binding molecule of the present invention, said process comprising culturing a host cell of the present invention under conditions allowing the expression of the antigen-binding molecule and recovering the produced antigen-binding molecule from the culture.

[0061] In a sixth aspect, it is further envisaged in the context of the present invention to provide a pharmaceutical composition comprising an antigen-binding molecule of the present invention or produced according to the process of the present invention.

[0062] Within said aspect, is also envisaged in the context of the present invention that the pharmaceutical composition is stable for at least four weeks at about −20° C.

[0063] It is further envisaged in the context of the present invention to provide the antigen-binding molecule of the present invention, or produced according to the process of the present invention, for use in the prevention, treatment or amelioration of a disease selected from a proliferative disease, a tumorous disease, cancer or an immunological disorder.

[0064] Within said aspect, it is also envisaged in the context of the present invention that the disease preferably is multiple myeloma (MM), acute myeloid leukemia (AML), Non-Hodgkin lymphoma (NHL), Non-small-cell lung carcinoma (NSCLC) and Colorectal cancer (CRC), wherein preferably a CS1xBCMA or BCMAxCS1 multispecific antigen-binding molecule is for use in the treatment of multiple myeloma, wherein preferably a FLT3xCD123 or CD123xFLT3 multispecific antigen-binding molecule is for use in the treatment of acute myeloid leukemia, and wherein preferably a CD20xCD22 or CD22xCD20 multispecific antigen-binding molecule is for use in the treatment of Non-Hodgkin lymphoma.

[0065] In a seventh aspect, it is further envisaged in the context of the present invention to provide a method for the treatment or amelioration of a proliferative disease, a tumorous disease, cancer, or an immunological disorder, comprising the step of administering to a subject in need thereof the antigen-binding molecule of the present invention, or produced according to the process of the present invention, wherein the disease preferably is multiple myeloma, acute myeloid leukemia, Non-Hodgkin lymphoma, Non-small-cell lung carcinoma and/or Colorectal cancer, wherein preferably a CS1xBCMA or BCMAxCS1 multispecific antigen-binding molecule is for the treatment of multiple myeloma, wherein preferably a FLT3xCD123 or CD123xFLT3 multispecific antigen-binding molecule is for the treatment of acute myeloid leukemia, and wherein preferably a CD20xCD22 or CD22xCD20 multispecific antigen-binding molecule is for the treatment of Non-Hodgkin lymphoma.

[0066] In an eighth aspect, it is also envisaged in the context of the present invention to provide a kit comprising an antigen-binding molecule of the present invention, or produced according to the process of the present invention, a polynucleotide of the present invention, a vector of the present invention, and/or a host cell of the present invention.

### DESCRIPTION OF THE FIGURES

[0067] FIG. 1 shows the general setup of multispecific antigen-binding molecules of the present invention.

[0068] FIG. 2 shows a schematic model overview why a multispecific antigen-binding molecule according to the present invention with a short (6 aa) peptidic linker between the first and second binding domain would not be expected to be able to bind to the TAA2 (A), while it would with a longer peptidic linker of 30 aa (B). The third binding domain and the optional fourth domain are not shown for readability.

[0069] FIG. 3 shows an overview of three different modeled confirmations of the second binding domain with respect to the first binding domain of example multispecific antigen-binding molecule MSLNxEpCAM HLE BiTE® antigen-binding molecule (A), conformation 2 allowing a maximum space for the TAA2 of 10 to 30 Å (B), conformation 1 allowing a maximum space for the TAA2 of 3 to 8 Å (C), and conformation 3 allowing no space for the TAA2, i.e. provoking a steric clash between the binding domains (D).

[0070] FIG. 4: FIG. 4 shows the modeled space between the first and the second binding domain of example multispecific antigen-binding molecule MSLNxEpCAM HLE BiTE® antigen-binding molecule depending on the linker length, wherein a flexible (SGn)x linker, with n being 2 to 4 and x being 3 to 6, has been examined. The maximum available space is 39-50 Å for a 12 aa long exemplary linker (A), 54-60 Å for a 18 aa long exemplary linker (B), and 84-94 Å for a 30 aa long exemplary linker (C). For a CD20xCD22 HLE BiTE® molecule, the available space is modeled with a 5 aa long linker (D), 30 aa long linker (E) and a 50 aa long linker (F), as well as for a CS1xBCMA HLE BiTE® molecule, the available space is modeled with a 5 aa long linker (G), 30 aa long linker (H) and a 50 aa long linker (1).

[0071] FIG. 5: FIG. 5 shows binding experiments using electrically switchable nanolever technology. Association and dissociation of exemplary MSLNxEpCAM HLE BiTE® antigen-binding molecule measured in three concentrations (12.5 nM, 25 nM and 50 nM) is shown (A, B, C, D). Tested biochip was coated with a 1:1 mix of antigen EpCAM (A, B) and antigen MSLN (C, D). Quenching of green fluorophore is shown, respectively binding to antigen EpCAM (A, B). Quenching of red fluorophore is shown, respectively binding to antigen MSLN (C, D). Binding experiments using switchSENSE® (Planegg, Germany) technology are further shown in E, F, G, H, I J, K, L M, N, O and P. Association and dissociation of the dual targeting CLL1xFLT3 HLE BiTE® antigen-binding molecule in three concentrations (12.5 nM, 25 nM and 50 nM) is shown. Tested biochip was coated with either antigen CLL1 (E, F), antigen FLT3 (G, H) or a 1:1 mix of both antigens CLL1 and FLT3 (I, J). Association and dissociation of the dual targeting CS1xBCMA HLE BiTE® antigen-binding molecule in three concentrations (12.5 nM, 25 nM and 50 nM) is shown. Tested biochip was coated with either antigen CS1 (K, L), antigen BCMA (M, N) or a 1:1 mix of both antigens CS1 and BCMA (O, P).

[0072] FIG. 6: FIG. 6 shows CS1 and BCMA surface expression in human multiple myeloma cell lines and additional human blood cancer cell lines. The antibody clone 162.1 was used to detect CS1 (•) while the antibody clone 19F2 was used to detect BCMA ( [symbol] ).

[0073] FIG. 7: FIG. 7 shows re-directed T cell lysis (A), activation of T cells (B), and induction of cytokines (C) by multitargeting (dual) CS1 x BCMA BiTE® antigen-binding molecule using ARH-77 target cells.

[0074] FIG. 8: FIG. 8 shows re-directed T cell lysis (A), activation of T cells (B), and induction of cytokines (C, D) using T cell sub-populations by multitargeting (dual) CS1 x BCMA BiTE® antigen-binding molecule using MM.1R target cells.

[0075] FIG. 9: FIG. 9 shows re-directed T cell lysis by multitargeting CS1 x BCMA (dual) BiTE® antigen-binding molecule, CS1 (mono) BiTE® antigen-binding molecule, and BCMA (mono) BiTE® antigen-binding molecule using ARH-77 (A), MM.1R (B), OPM-2 (C), and U266B1 (D) target cells.

[0076] FIG. 10: FIG. 10 shows re-directed T cell lysis by the multitargeting CS1 x BCMA Dual BiTE® antigen-binding molecule, CS1 Mono BiTE® antigen-binding molecule, and BCMA Mono BiTE® antigen-binding molecule in the presence of soluble CS1 and/or soluble BCMA at different concentrations from 0 ng/ml of each (A) up to 80 ng/ml soluble CS1 and 250 ng/ml soluble BCMA (G) using U266B1 target cells.

[0077] FIG. 11: FIG. 11 shows re-directed T cell lysis by the multispecific CS1 x BCMA Dual BiTE®, CS1 Mono BiTE® antigen-binding molecule, and BCMA Mono BiTE® antigen-binding molecule in the presence of soluble CS1 or soluble BCMA at different concentrations from 0 ng/ml of each (A) up to 250 ng/ml soluble BCMA (I) using OPM-2 target cells

[0078] FIG. 12: FIG. 12 shows re-directed T cell lysis by the multispecific CS1 x BCMA dual BiTE® antigen-binding molecule, CS1 Mono BiTE® antigen-binding molecule, and BCMA Mono BiTE® antigen-binding molecule in the presence of soluble BCMA using U266B1 (A to C), NCI-H929 (D to F) and OPM-2 (G to I) target cell lines.

[0079] FIG. 13: FIG. 13 shows Re-directed T cell lysis using T cell sub-populations Pan T cells (A), CD4+ T cells (B) and CD8⁺ T cells (C) by the CS1 x BCMA Dual BiTE® antigen-binding molecule, CS1 Mono BiTE® antigen-binding molecule, and BCMA Mono BiTE® antigen-binding molecule using U266B1 target cells.

[0080] FIG. 14: FIG. 14 shows re-directed T cell lysis using T cell sub-populations by the CS1 x BCMA Dual BiTE® antigen-binding molecule using U266B1 target cells.

[0081] FIG. 15: FIG. 15 shows J chain mRNA levels plotted against BiTE® concentration of CS1 mono BiTE® antigen-binding molecule (CS1 HLE BiTE®) vs. BCMA mono BiTE® antigen-binding molecule vs. multitargeting CS1xBCMA BiTE® antigen-binding molecule (dBiTE).

[0082] FIG. 16: FIG. 16 (A to C) shows target cell lysis by two representative CD20-CD22 T-cell engager molecules compared to equimolar mixtures of CD20 and CD22 T-cell engager molecules on Ramos wt cells.

[0083] FIG. 17: BCMA-CS1 T-cell molecule 1 with 6 amino acid linker showed comparable EC50 values [pM] on OPM-2 cells as engager molecules 2 and 3 with longer linker variants (FIG. 17A). EpCAM-MSLN T-cell engager molecules 2 and 3 with longer linker variants showed comparable EC50 values [pM] on HCT-116 cells as EpCAM-MSLN T-cell engager molecule 1 with original 6 amino acid linker (FIG. 17B). CD123-FLT3 T-cell engager molecules 2 and 3 with longer linker variants showed comparable EC50 values [pM] on OPM-2 cells as CD123-FLT3 T-cell engager molecule 1 with original 6 amino acid linker (FIG. 17C).

[0084] FIG. 18: The tested CD22 T-cell engager molecule 1 showed comparable EC50 values [pM] on Raji cells (FIG. 18A) as CD20-CD22 T-cell engager molecule 1 on Raji CRISPR CD20 cells (FIG. 18B).

[0085] FIG. 19: FIG. 19 depicts alignments of CD20xCLL1 protein sequences of human and mouse with epitope sections. The extracellular loop 1 (ECL1) of CD20 protein was designated E1, extracellular loop 2 (ECL2) was designated E2. For more refined epitope mapping, the extracellular loop 1 (ECL1) was further divided into ElA and E1B subparts and extracellular loop 2 (ECL2) was further divided into the subparts E2A, E2B, E2C or E2D.

[0086] FIG. 20: Flow Cytometry Binding Analysis of known CD20 Antibodies (A) and T Cell Engager Molecules as disclosed herein (B) on transfected CHO cells Expressing Full-length Human or Mouse CD20 Protein Constructs or Human/Mouse Chimeric CD20 Protein Constructs.

[0087] FIG. 21: Sequence Alignment of Human and Mouse CD22. Sequence above: human CD22, sequence below: mouse CD22. Sequence alignment of the CD22 protein shows each mouse sequence part (V+C2-1, C2-1+C2-2, C2-2+C2-3, C2-3+C2-4, C2-4+C2-5, C2-5+C2-6) that was replaced with the corresponding human sequence and which amino acids differ between the two species. To guarantee structure integrity of the transition area between domains two adjacent domains of mouse CD22 protein were swapped to the corresponding sequence of human CD22 protein. To get a single domain specific result epitope clustering constructs were designed to overlap each other. The swapped sequence regions comprise two CD22 domains, the amino acid stretch between the swapped domains and the amino acid stretch between the second swapped domain and the following CD22 domain.

[0088] FIG. 22: Flow Cytometry Binding Analysis of CD22 Antibodies and T Cell Engager Molecules on HEK Cell Membrane Fragments: Truncated CD22 proteins—controls, i.e. known antibodies (A), Mouse/human chimeric CD22 proteins—controls, i.e. known antibodies (B), Truncated CD22 proteins—CD22 T cell engager molecules disclosed herein (C).

[0089] FIG. 23: FACS based cytotoxicity assays testing CD20xCD22 antigen-binding molecules U4U, Z3L, G3P, Y3N, B5K and C8V as disclosed herein on target cells CHO ff/Luc pCMV/hu orl CD22 v1 pEFDHFR with Effector cells unstim. PBMC #263 (E:T-Ratio 50.000:5.000 S100 μl) in RPMI plus+10% FCS at a starting concentration of 160 nM and a dilution of 1:6 on F-bottom plate (A), on target cells CHO huCD20 pEFDHFR/ffLuc pCMV with Effector cells unstim. PBMC #263 (E:T-Ratio 50.000:5.000 S100 μl) in RPMI plus+10% FCS at a starting concentration of 160 nM and a dilution of 1:6 on F-bottom plate (B), and LUC based cytotoxicity assays testing CD20xCD22 antigen-binding molecule Y3N and CD20 antigen-binding molecules T9J and S3 as disclosed herein on target cells huCHO CD20+ Effector cells unstim. PBMC #773 (E:T-Ratio 25.000:2.500 S50 μl) in RPMI plus+10% FCS at a starting concentration of 160 nM and a dilution of 1:6 on 384-well F-bottom plate (C), and on target cells huCHO CD22+ Effector cells unstim. PBMC #773 (E:T-Ratio 25.000:2.500 S50 μl) in RPMI plus+10% FCS at a starting concentration of 160 nM and a dilution of 1:6 on 384-well F-bottom plate (D).

[0090] FIG. 24: Three dual targeting CLL1xFLT3 antigen binding molecules with three different arrangements of domains have been tested for cytotoxic activity on huCHO FLT3 positive cells, huCHO CLL1 positive cells and double positive cells (DT): format 1 1CL1 9-G4 CC x I2C0 x scFc x FL 4-E9 CC (A), format 2 CL1 9-G4 CC x FL 4-E9 CC x I2C0 x ScFc (B), and format 3 CL1 9-G4 CC x ScFc x 4-E9 CC x I2C0 (C).

### DETAILED DESCRIPTION

[0091] In the context of the present invention, a multitargeting antigen-binding molecule is provided comprising at least three binding domains, wherein the first and second binding domain in amino to carboxyl orientation are capable to preferably target two target cell surface antigens associated with a malignancy simultaneously, wherein the third binding domain binds to an extracellular epitope of the human and/or the Macaca CD3ε chain on an effector cell which is a T cell.

[0092] It is a surprising finding in the context of the present invention that the T-cell engaging multispecific antigen-binding molecules according to the present invention are preferably suited to target two (different) antigens on one target cells, such as cancer cells, and in contrast, do less target non-cancer cells. By being capable to address two target antigens at the same time, (a) the likeliness of targeting a target cell such as a cancer cell is greatly increased once such target cell has undergone antigen loss and, thus, is prone to tumor escape from effective anti-tumor therapy because one valid antigen to target remains on the cell which has undergone antigen escape, and (b) the likeliness of targeting a target cell associated with a disease instead of a physiologic cell is greatly increased when two TAAs are chosen which are typically associated with a target cell associated with a disease instead of a physiologic cell. In this regard, multitargeting antigen-binding molecules are envisaged herein, which do not only prevent antigen escape e.g. in a tumor setting, but so furthermore widen the therapeutic window by addressing cells with a pattern of, e.g., two antigens which re typically associated with a particular disease. Thereby, physiologic tissue whose cells express only one of the two targets is not addressed by the instant dual targeting antigen-binding molecules. In particular, a selectivity gap can be achieved by dual targeting molecules, e.g. of formats as described herein, which have a bispecific entity comprising a target binding domain (or binder, as synonymously used throughout this disclosure) and a CD3 binder, a further target binder and optionally a half-life extending domain such as a scFc domain. Dual targeting antigen-binding molecules as described herein typically feature EC50 values below 100 pM, preferably below 50 pM, more preferably below 30 pM and even more preferably about 10 pM or below on cells positive for both targets while such dual targeting molecules typically show significantly higher EC50 values (e.g. at least 50 pM, 100 pM, 250 pM or even 500 pM and higher) when employed with mono-targeting cells. This finding suggests that multitargeting molecules of the present invention do have selectivity gaps in terms of activity of at least factor 10, preferably at least factor 20 or even 30, which can beneficially be used to specifically address pathogenic target cells which express both targets and which can be bound at the same time by said molecules in order to trigger T-cell mediated cytotoxicity. Off-target toxicities and related side effects can thereby be reduced and a safer therapy can be provided based on the instantly described concept. Hence, a T-cell engaging multitargeting antigen-binding molecules according to the present invention, which is typically singe-chained, both provides improved efficacy and safety with regard to existing bispecific antibodies or antigen-binding molecules which are T-cell engaging. Said advantageous properties are preferably achieved by the fact that the first and the second binding domain of the multitargeting antigen-binding molecule are capable to independently from each other to maintain their bioactivity, i.e. to bind their respective targets without being sterically hindered by the respective other binding domain and/or the target to which the respective other target binder has bound. The preserved bioactivity is preferably achieved by (a) the VH-VL setup in amino to carboxyl orientation of both binding domains and/or (b) the careful selection of the linker which links the first and the second binding domain. Said linker needs to have a length with ensures both bioactivity of both binding domains and sufficient (chemical) stability of the construct. Surprisingly relatively short peptide linkers of about 5 to 24, preferably 5 to 18, more preferably 6 or 12 amino acids in length fulfil both requirements. Preferably, such linkers are rich in small or hydrophilic amino acids, such as Gly and Ser, because such composition preferably provides flexibility. In consequence, such flexibility preferably allows for interaction of the respective binding domain independently of the other binding domain of the multitargeting antigen-binding molecule according to the present invention. At the same time, it is surprising that even such short preferably flexible peptide linkers typically provide for sufficient spatial separation between the first and the second binding domain so that both domains retain their bioactivity which is required to have a therapeutically useful molecule in the context of the present invention. An additional advantage of such short linkers as disclosed in the context of the present invention is that interchain mispairings re preferably prevented in comparison to longer linkers.

[0093] The above-specified finding underlying the present invention is surprising in view of the teaching of the prior art. For example, Liu et al. showed that the longer the inter-peptide linkers were, the better the preservation of the independent folding and biological activities of the two molecules (Liu Z G, Lin J B, Du W, et al. Anti-proteolysis study of recombinant IIn-UK fusion protein in CHO cell. Prog Biochem Biophys 2005; 32:544-50). Linkers between binding domains, preferably scFv binding domains, that are too short negatively affect protein folding by spatial occupancy, and those that are too long enhance the antigenicity of the scFv antibody and also affect the functionality and activity of scFv antibodies. Xu et al. teach that sufficient length and certain sequence characteristics are the key factors that provide the two half-molecules with sufficient free space to fulfill their functions, and avoiding the formation of the a-helix and b-sheet is important for stability (Xue F, Gu Z, Feng J A. LINKER: a web server to generate peptide sequences with extended conformation. Nucleic Acids Res 2004; 32:W562-5). Hence, the skilled person aiming to maintain distance between binding domains would have contemplated to employ rigid linkers which typically feature a helical structure or are rich in proline. However, also the length of the rigid linkers has a major impact on protein bioactivity. McCormick et al examined rigid peptide linkers (Ala-Pro)n (10-34 aa) which were applied in an interferon-γ-gp120 fusion protein (McCormick A, Thomas M, Heath A. Immunization with an interferon-gamma-gp120 fusion protein induces enhanced immune responses to human immunodeficiency virus gp120. J Infect Dis. 2001; 184:1423-1430). With a short 10-aa linker, the fusion protein possessed a relatively low biological activity of interferon-γ. By increasing the linker length, the bioactivity of the fusion protein was gradually improved, peaking at 88% activity of free interferon-γ with the longest 34-residue linker. Even more, in some cases even with the insertion of flexible or rigid linkers, the impaired bioactivity can still not be overcome due to steric hindrance between domains (Bai Y, Ann D K, Shen W C. Recombinant granulocyte colony-stimulating factor-transferrin fusion protein as an oral myelopoietic agent. Proc Natl Acad Sci USA. 2005; 102:7292-7296).

[0094] In view of the obstacles know in the art, the skilled person would have been prompted to avoid short flexible or even rigid linkers and would turn to longer rigid lingers, wherein “long” could be understood from the art as about 30 amino acids, preferably comprising proline. Based on this information, the skilled person would preferably model the first and the second binding domain linked by a peptide linker to confirm what linker length to take and which to avoid using state of the art modeling technology. Provided the linker is a flexible linker rich in Ger and Ser, a linker length of 30 amino acids would typically lead to a rather large space between the first and the second binding domain, typically of at least 70 Å, more typically of at least 80 Å, which the skilled person would consider safe in size to accommodate the second target cell surface antigen (e.g. TAA2) to facilitate binding by the second binding domain of the multitargeting antigen-binding molecule. It is important to note in the context of the present invention that while the first binding domain, i.e. the N-terminal binding domain, is comparably easy to access as it has only one adjacent binding domain which potentially causes steric hindrance when binding to the target, the second binding domain is connected to the first binding domain in N-direction

[0095] Typically, when a SGGGGS linker is modeled between the two target binding domains which are scFvs (e.g. MSLNxEpCAM), when a (GGGGS)3 linker between the VH and VL within the binding domains, respectively, when the first binding domain, e.g. an anti-MSLN binding domain, is fixed, and when three likely expected conformations are applied where the linker swings in different orthogonal (linker conformation 1, 2 and 3, respectively), then in case of linker position 3, a complete clash is observed, while in positions 1 and 2, no clash is observed. However, the space is typically still not enough to accommodate the TAA2 EpCAM based on where the CDRs are preferably located in the second binding domain of the multitargeting antigen-binding molecule according to the present invention. Hence, this result strongly indicates the need of a longer linker between the two target binding domains. If the skilled person used the size of target EpCAM as guide, one would predict a better linker to be one that has preferably at least about 30 residues, less preferred at least 20 residues (i.e. 70 A preferred distance divided by 3.8 per aa). Accordingly, lack of space renders a short linker solution such as a SGGGS linker and short multiplicities thereof (e.g. S(G4S)2 and S(G4S)2 between the two target binding domains according to the present invention a non-preferred and therefore non-obvious choice for this setup of target binders in a multitargeting antigen-binding molecule, in particular a dual targeting BiTE® molecule. The same applies to a linker of 12 aa which typically offers a maximum available space as small as about 35 Å which, depending on the circumstances, can be up to about 50 Å which would not safely accommodate typical target to be bound which is at least about 45, 50, 55, 60, 65, 70, 75, 80 or 85 Å in size. Also, an 18 aa long linker (e.g. SGGGGSGGGGSGGGGSGG) with a maximum available space between binding domains in a setup as described herein of not more than 60 Å, typically not more than 55 Å, for example, 54 to 60 Å, would likely not allow binding to the second TAA2 of an exemplary size of 45 to 70 Å. In contrast, a 30 aa long linker would typically offer 84 to 94 Å of maximum space, thus safely allowing the target binder to bind its exemplified target EpCAM of about 45 to 70 Å. Thus, the skilled person would have chosen a linker length at least greater than 18 aa to ensure binding of the second TAA2, such as in a MSLNxEpCAM HLE dual BiTE® as an example for the multitargeting antigen-binding molecule according to the present invention. It has to be noted that the above considerations are based on flexible linkers with a high Ser and/or Gly content. The skilled person would have contemplated that less flexible likers may require even higher numbers of amino acids to ensure sufficient length to keep distance between the two adjacent target binding domains according to the present invention, in order to keep said target binding domains biologically functional.

[0096] It is envisaged that the bispecific antigen-binding molecules according to the present invention have cross-reactivity to, for example, cynomolgus monkey tumor antigens such as CS1, BCMA, CD20, CD22, FLT3, CD123, CLL1, MSLN and EpCAM. It is in particular envisaged in the context of the present invention that two targets can be addressed simultaneously by one multitargeting antigen-binding molecule simultaneously which dual targeting mitigates, for example, (i) the presence of soluble target which otherwise would “mask” the target on the target cell by binding the antibody-based drug without allowing any therapeutic effect (e.g. soluble BCMA) and (ii) low cell surface BCMA expression risk in the course of antigen loss as the driving factor for tumor escape, as generally described herein.

[0097] For example, a multitargeting antigen-binding molecule according to the present invention such as a construct directed against CS1 as TAA1 and BCMA as TAA2 is suitable for use in the treatment of multiple myeloma (MM). The presently presented multitargeting antigen-binding molecule is particularly suitable to achieve efficacious exposure despite the presence of soluble target (e.g. BCMA), and antigen loss may lead to resistance. BCMA and CS1 are good combination partners due to their broad MM expression and limited normal expression relative to other MM antigens (e.g., CD38). A BCMAxCS1 HLE (half-life extended) dual BiTE® antigen-binding molecule as disclosed herein as an illustrative example, is manufacturable, has an acceptable safety profile, shows increased efficacy as the multitargeting BiTE® antigen-binding molecule induces lysis of CS1- and/or BCMA-expressing cells and is active in the presence of high concentrations of sBCMA and/or sCS1.

[0098] It is especially envisaged in the context of the present invention that a multitargeting antigen-binding molecule which preferably addresses two different target cell surface antigens thereby is very specific for its target cell and, therefore, preferably safe in its therapeutic use. This has been demonstrated in a cynomolgus toxicology study. Exemplary CS1xBCMA HLE dual BiTE® antigen-binding molecule is typically well tolerated and also typically no cytokine release syndrome occurs (CRS, a typical but severe side effect for T cell redirecting therapy) despite CS1 target expression in periphery. Peripheral CS1-expressing NK and T cells are preferably unaffected. Histopathological findings for the multitargeting BiTE® antigen-binding molecule are comparable to findings on a BiTE® antigen-binding molecule with only a binding domain to TAA BCMA. Further, multitargeting BiTE® antigen-binding molecule-mediated depletion of plasma cells from periphery and BM is typically observed and correlated with exposure. Even further, when J chain mRNA levels are plotted against BiTE® concentration of CS1 HLE BiTE® antigen-binding molecule versus BCMA HLE BiTE® antigen-binding molecule vs. monospecific CS1xBCMA HLE BiTE® antigen-binding molecule, the data preferably demonstrates that the exemplary CS1xBCMA HLE BiTE® antigen-binding molecule induces deeper target cell depletion than either CS1 HLE BiTE® antigen-binding molecule or BCMA HLE BiTE® which indicates better clinical efficacy of multitargeting antigen-binding molecules according to the present invention. Mesothelin, also known as MSLN, is a 40 kDa protein that is expressed in mesothelial cells. Mesothelin is a tumor differentiation antigen that is normally present on the mesothelial cells lining the pleura, peritoneum and pericardium. As MSLN is overexpressed in several cancers and is immunogenic, the protein could be exploited as tumor marker or as the antigenic target of a therapeutic cancer vaccine

[0099] Preferred target cell surface antigens in the context of the present invention are CS1, BCMA, CD20, CD22, FLT3, CD123, CLL1, MSLN, CDH3 and EpCAM. Typically, target cell surface antigens in the context of the present invention are tumor associated antigens (TAA). CS1 is a member of the CD2 subset of immunoglobulin superfamily (IgSF) expressed on NK, T and stimulated B cells. B-cell maturation antigen (BCMA or BCM), also known as tumor necrosis factor receptor superfamily member 17 (TNFRSF17), is a protein that is expressed in mature B lymphocytes. B-lymphocyte antigen CD20 or CD20 is expressed on the surface of all B-cells beginning at the pro-B phase (CD45R+, CD117+) and progressively increasing in concentration until maturity. CD22, or cluster of differentiation-22, is a molecule belonging to the SIGLEC family of lectins. It is found on the surface of mature B cells and to a lesser extent on some immature B cells. Fins like tyrosine kinase 3 (FLT3) is also known as Cluster of differentiation antigen 135 (CD135), receptor-type tyrosine-protein kinase FLT3, or fetal liver kinase-2 (Flk2). FLT3 is a cytokine receptor which belongs to the receptor tyrosine kinase class III. CD135 is the receptor for the cytokine Flt3 ligand (FLT3L). The FLT3 gene is frequently mutated in acute myeloid leukemia (AML). The interleukin-3 receptor (CD123) is a molecule found on cells which helps transmit the signal of interleukin-3, a soluble cytokine important in the immune system. C-type lectin-like receptor (CLL1), also known as CLEC12A, or as MICL. It contains an ITIM motif in cytoplasmic tail that can associate with signaling phosphatases SHP-1 and SHP-2. Human MICL is expressed as a monomer primarily on myeloid cells, including granulocytes, monocytes, macrophages and dendritic cells and is associated with AML. Mesothelin (MSLN) is a 40 kDa protein that is expressed in mesothelial cells and overexpressed in several human tumors. Cadherin-3 (CDH3), also known as P-Cadherin, is a calcium-dependent cell-cell adhesion glycoprotein composed of five extracellular cadherin repeats, a transmembrane region and a highly conserved cytoplasmic tail. It is associated with some types of tumors. Epithelial cell adhesion molecule (EpCAM) is a transmembrane glycoprotein mediating Ca2+-independent homotypic cell-cell adhesion in epithelia. EpCAM has oncogenic potential and appears to play a role in tumorigenesis and metastasis of carcinomas.

[0100] Further, it is envisaged as optionally but advantageously in the context of the present invention that the multitargeting antigen-binding molecule is provides with a fourth domain, typically a scFc domain, i.e. a HLE, antigen-binding molecule enables intravenous dosing that is administrated only once every week, once every two weeks, once every three weeks or even once every four weeks, or less frequently.

[0101] In order to determine the epitope(s) of preferred multitargeting antigen-binding molecules according to the present invention directed, e.g. to the CD20 epitope, mapping was conducted as described herein. The human CD20 protein extracellular region was divided into two parts: (1) extracellular loop 1 (ECL1, amino acids 72 to 84, see references in Example 17), designated E1, and extracellular loop 2 (ECL2), designated E2. The extracellular loop 1 (E1) was further divided into two subparts, designated ElA (aa 72 to 79) and ElB (aa 80 to 84). The extracellular loop 2 (E2, aa 142 to 188) was further divided into four subparts, designated E2A (aa 142 to 161), E2B (aa 162 to 166), E2C (aa 167 to 175) and E2D (aa 176 to 188). It was surprisingly found that CD20 antigen-binding molecules, both mono and dual targeting, show preferably higher cytotoxic activity when binding (i) to the ElA and the E2B and E2C epitope or (ii) to the E2 Å and E2B epitope. Correspondingly, for the purpose of epitope characterization the human CD22 protein extracellular region was divided into seven parts: V (aa 20-142 as specified in Uniprot P20273+RPFP), C2-1 (aa 143-241 as specified in Uniprot P20273+LNVKHT), C2-2 (aa 242-330 as specified in Uniprot P20273+VQYA), C2-3 (aa 331-418 as specified in Uniprot P20273+YP), C2-4 (aa 419-504 as specified in Uniprot P20273+VQYA), C2-5 (aa 505-592 as specified in Uniprot P20273+KAWTLEVLYA) and C2-6 (aa 593-687 as specified in Uniprot P20273+VYYSPETIGRR). It was surprisingly found that CD22 antigen-binding molecules, both mono and dual targeting, show preferably higher cytotoxic activity when binding to the C2-1 epitope.

[0102] It is particular surprising that a multispecific antigen-binding molecule according to the present invention is capable, despite the short linker between the target binding domains, to bind, preferably simultaneously to two different targets. Simultaneous binding has been demonstrated herein for several targets. However, this is surprising given the typically typical distance between the targets. For example, CD20 comprises two small extra cellular domains of only 13 aa (E1) and 47 aa (E2). In contrast, CD22 comprises a 7 Ig domain long extracellular domain with 676 aa. However, despite the significantly different extracellular size and setup, a multispecific antigen-binding molecule according to the present intention may successfully address both TAAs CD20 and CD22 at the same time for the benefit of increased efficacy and less toxicity. This is preferably achieved if the

[0103] The antigen-binding molecule of the present invention is preferably multitargeting and bispecific. However, also monospecific (for one target) and bispecific antigen-binding molecules which comprisc (i) a first binding domain against one cell surface target antigen and a second binding domain which is an effector binding domain which binds preferably to CD3c, or (ii) a first and a second binding domain against the same cell surface target and a third binding domain which is an effector binding domain which binds preferably to CD3e is encompassed by the present invention, wherein the cell surface target antigen is selected from CS1, CD20, CD22, CD123 and CLL1. For example, a CS1xCD3 bispecific antigen-binding molecule, i.e. which is directed to CS1 as only target cell surface antigen next to the effector CD3, has shown comparable efficacy in terms of EC₅₀ values than BCMAxCD3 antibody which is in clinical assessment and evaluation since a longer time. Also, e.g. CD20 antigen-binding molecules as described herein feature high activity against CD20 bearing targets in terms of EC50 values, in particular if they address specific epitopes as disclosed herein.

[0104] It is envisaged in the context of the present invention, that preferred multispecific antigen-binding molecules do not only show a favorable ratio of cytotoxicity to affinity, but additionally show sufficient stability characteristics in order to facilitate practical handling in formulating, storing and administrating said constructs. Sufficient stability is, for example, characterized by a high monomer content (i.e. non-aggregated and/or non-associated, native molecule) after standard preparation, such as at least 65% as determined by preparative size exclusion chromatography (SEC), more preferably at least 70% and even more preferably at least 75%. Also, the turbidity measured, e.g., at 340 nm as optical absorption at a concentration of 2.5 mg/ml should, preferably, be equal to or lower than 0.025, more preferably 0.020, e.g., in order to conclude to the essential absence of undesired aggregates. Advantageously, high monomer content is maintained after incubation in stress conditions such as freeze/thaw or incubation at 37 or 40° C. Even more, multispecific antigen-binding molecules according to the present invention typically have a thermal stability which is at least comparable or even higher than that of bispecific antigen-binding molecules which have only one target binding domain but otherwise comprise a CD3 binding domain and, optionally, a half-life extending scFc domain, i.e. which are structurally less complex. The skilled person would expect that a more structurally complex protein-based molecule was less prone to thermal and other degradation, i.e. be less thermal stable. However, surprisingly the contrary is the case, e.g., a CS1xBCMA or BCMAxCS1 multispecific antigen-binding molecule according to the present invention shows higher thermal stability, less monomer decrease after storage, higher monomer percentage after three freeze thaw cycles and higher protein homogeneity than a CS1 or a BCMA bispecific monotargeting antigen-binding molecule as disclosed herein. The same applies, for example, to the CD123xFLT3 multispecific antigen-binding molecules as disclosed herein, with respect to FTL3 bispecific antigen-binding molecules as disclosed herein.

[0105] Thus, the present invention provides a multispecific antigen-binding molecule comprising:

(i) the first binding domain specifically binds to a first target cell surface antigen (e.g. TAA1),
(ii) the second binding domain specifically binds to a second target cell surface antigen (e.g. TAA2), and
(iii) the third binding domain binds to an extracellular epitope of the human and/or the Macaca CD3ε chain, wherein the first, second and third binding domain are arranged in an amino to carboxyl order, and wherein the first binding domain and the second binding domain are linked by a peptide linker having a length of 5 to 25, preferably 5 to 18 or 6 to 16 amino acids, and optionally
(iv) a fourth domain which comprises two polypeptide monomers, each comprising a hinge, a CH2 and a CH3 domain, wherein said two polypeptide monomers are fused to each other via a peptide linker.

[0106] In an embodiment, the present invention provides a multispecific antigen-binding molecule comprising all four such domains. In a preferred embodiment, the domains under (i), (ii), (iii) and (iv) are arranged in an N to C orientation (format 2). However, alternatively, the multispecific antigen-binding molecule may have the domains arranged in the order (ii), (iii), (iv) (format 1) and (i), or (ii), (iv), (i) and (iii) (format 3) in an N to C orientation. Surprisingly, all arrangements (a) provide significant efficacy in terms of on target cytotoxicity and (b) are producible in acceptable product quality. As a general requirement for the multitargeting bispecific antigen-binding molecule of the present invention, one target binding domain has to be located adjacently N-terminally to the effector CD3 binding domain in order to act as a bispecific entity and, thereby, form a cytolytic synapse between the—preferably double positive-target cell and the effector T-cell.

[0107] The term “polypeptide” is understood herein as an organic polymer which comprises at least one continuous, unbranched amino acid chain. In the context of the present invention, a polypeptide comprising more than one amino acid chain is likewise envisaged. An amino acid chain of a polypeptide typically comprises at least 50 amino acids, preferably at least 100, 200, 300, 400 or 500 amino acids. It is also envisaged in the context of the present invention that an amino acid chain of a polymer is linked to an entity which is not composed of amino acids.

[0108] The term “antigen-binding polypeptide” according to the present invention is preferably a polypeptide which immunospecifically binds to its target or antigen. It typically comprises the heavy chain variable region (VH) and/or the light chain variable region (VL) of an antibody, or comprises domains derived therefrom. A polypeptide according to the invention comprises the minimum structural requirements of an antibody which allow for immunospecific target binding. This minimum requirement may e.g. be defined by the presence of at least three light chain CDRs (i.e. CDR1, CDR2 and CDR3 ofthe VL region) and/or three heavy chain CDRs (i.e. CDR1, CDR2 and CDR3 of the VH region), preferably of all six CDRs. A T-cell engaging polypeptide may hence be characterized by the presence of three or six CDRs in either one or both binding domains, and the skilled person knows where (in which order) those CDRs are located within the binding domain. Typically, an “antigen-binding molecule” is understood as an “antigen-binding polypeptide” in the context of the present invention.

[0109] Alternatively, in the context of the present invention, an antigen-binding polypeptide corresponds to an “antibody construct” which typically refers to a molecule in which the structure and/or function is/are based on the structure and/or function of an antibody, e.g., of a full-length or whole immunoglobulin molecule. An antigen-binding molecule is hence capable of binding to its specific target or antigen and/or is/are drawn from the variable heavy chain (VH) and/or variable light chain (VL) domains of an antibody or fragment thereof. Furthermore, the domain which binds to its binding partner according to the present invention is understood herein as a binding domain of an antigen-binding molecule according to the invention. Typically, a binding domain according to the present invention comprises the minimum structural requirements of an antibody which allow for the target binding. This minimum requirement may e.g. be defined by the presence of at least the three light chain CDRs (i.e. CDR1, CDR2 and CDR3 of the VL region) and/or the three heavy chain CDRs (i.e. CDR1, CDR2 and CDR3 of the VH region), preferably of all six CDRs. An alternative approach to define the minimal structure requirements of an antibody is the definition of the epitope of the antibody within the structure of the specific target, respectively, the protein domain of the target protein composing the epitope region (epitope cluster) or by reference to a specific antibody competing with the epitope of the defined antibody. The antibodies on which the constructs according to the invention are based include for example monoclonal, recombinant, chimeric, deimmunized, humanized and human antibodies.

[0110] The binding domain of an antigen-binding molecule according to the invention may e.g. comprise the above referred groups of CDRs. Preferably, those CDRs are comprised in the framework of an antibody light chain variable region (VL) and an antibody heavy chain variable region (VH); however, it does not have to comprise both. Fd fragments, for example, have two VH regions and often retain some antigen-binding function of the intact antigen-binding domain. Additional examples for the format of antibody fragments, antibody variants or binding domains include (1) a Fab fragment, a monovalent fragment having the VL, VH, CL and CH1 domains; (2) a F(ab′)₂ fragment, a bivalent fragment having two Fab fragments linked by a disulfide bridge at the hinge region; (3) an Fd fragment having the two VH and CH1 domains; (4) an Fv fragment having the VL and VH domains of a single arm of an antibody, (5) a dAb fragment (Ward et al., (1989) Nature 341:544-546), which has a VH domain; (6) an isolated complementarity determining region (CDR), and (7) a single chain Fv (scFv), the latter being preferred (for example, derived from an scFV-library). Examples for embodiments of antigen-binding molecules according to the invention are e.g. described in WO 00/006605, WO 2005/040220, WO 2008/119567, WO 2010/037838, WO 2013/026837, WO 2013/026833, US 2014/0308285, US 2014/0302037, WO 2014/144722, WO 2014/151910, and WO 2015/048272.

[0111] Also, within the definition of “binding domain” or “domain which binds” are fragments of full-length antibodies, such as VH, VHH, VL, (s)dAb, Fv, Fd, Fab, Fab′, F(ab′)2 or “r IgG” (“half antibody”). Antigen-binding molecules according to the invention may also comprise modified fragments of antibodies, also called antibody variants, such as scFv, di-scFv or bi(s)-scFv, scFv-Fc, scFv-zipper, scFab, Fab₂, Fab₃, diabodies, single chain diabodies, tandem diabodies (Tandab's), tandem di-scFv, tandem tri-scFv, “multibodies” such as triabodies or tetrabodies, and single domain antibodies such as nanobodies or single variable domain antibodies comprising merely one variable domain, which may be VHH, VH or VL, that specifically bind an antigen or epitope independently of other V regions or domains.

[0112] As used herein, the terms “single-chain Fv,” “single-chain antibodies” or “scFv” refer to single polypeptide chain antibody fragments that comprise the variable regions from both the heavy and light chains, but lack the constant regions. Generally, a single-chain antibody further comprises a polypeptide linker between the VH and VL domains which enables it to form the desired structure which would allow for antigen binding. Single chain antibodies are discussed in detail by Pluckthun in The Pharmacology of Monoclonal Antibodies, vol. 113, Rosenburg and Moore eds. Springer-Verlag, New York, pp. 269-315 (1994). Various methods of generating single chain antibodies are known, including those described in U.S. Pat. Nos. 4,694,778 and 5,260,203; International Patent Application Publication No. WO 88/01649; Bird (1988) Science 242:423-442; Huston et al. (1988) Proc. Natl. Acad. Sci. USA 85:5879-5883; Ward et al. (1989) Nature 334:54454; Skerra et al. (1988) Science 242:1038-1041. In specific embodiments, single-chain antibodies can also be bispecific, multispecific, human, and/or humanized and/or synthetic.

[0113] Furthermore, the definition of the term “antigen-binding molecule” includes preferably polyvalent/multivalent constructs and, thus, bispecific molecules, wherein bispecific means that they specifically bind to two cell typs comprising distinctive antigenic structures, i.e. target cells and effector cells. As the antigen-binding molecules of the present invention are preferably multitargeting, they are typically as well as polyvalent/multivalent molecules, which specifically bind more than two antigenic structures, preferably. three, through distinct binding domains in the context of the present invention which are two target binding domains and one CD3 binding domain. Moreover, the definition of the term “antigen-binding molecule” includes molecules consisting of only one polypeptide chain as well as molecules consisting of more than one polypeptide chain, which chains can be either identical (homodimers, homotrimers or homo oligomers) or different (heterodimer, heterotrimer or heterooligomer). Such molecules comprising more than one polypeptide chain, i.e. typically two chains, have these chains typically attached to each other as heterodimers via charged pair binding, e.g. within a heteroFc entity which serves as a half-life extending moiety e.g. in C-terminal position of the CD3 binder as described herein. Examples for the above identified antigen-binding molecules, e.g. antibody-based molecules are described inter alia in Harlow and Lane, Antibodies a laboratory manual, CSHL Press (1988) and Using Antibodies: a laboratory manual, CSHL Press (1999), Kontermann and Dübel, Antibody Engineering, Springer, 2nd ed. 2010 and Little, Recombinant Antibodies for Immunotherapy, Cambridge University Press 2009.

[0114] The term “bispecific” as used herein refers to an antigen-binding molecule which is “at least bispecific”, i.e., it addresses two different cell types, i.e. target an effector cells, and comprises at least a first binding domain and a second binding domain, wherein at least one binding domain binds to an antigen or target selected preferably from CS1, BCMA, CD20, CD22, FLT3, CD123, MSLN, CLL1 and EpCAM, and another binding domain of the same molecule binds to another antigen or target (here: CD3). Accordingly, antigen-binding molecules according to the invention comprise specificities for at least two different antigens or targets. For example, one domain does preferably not bind to an extracellular epitope of CD3e of one or more of the species as described herein.

[0115] The term “target cell surface antigen” refers to an antigenic structure expressed by a cell and which is present at the cell surface such that it is accessible for an antigen-binding molecule as described herein. A preferred target cell surface antigen in the context of the present invention is a tumor associated antigen (TAA). It may be a protein, preferably the extracellular portion of a protein, or a carbohydrate structure, preferably a carbohydrate structure of a protein, such as a glycoprotein. It is preferably a tumor antigen. The term “bispecific antigen-binding molecule” of the invention also encompasses multispecific antigen-binding molecules such as trispecific antigen-binding molecules, the latter ones including three binding domains, or constructs having more than three (e.g. four, five . . . ) specificities.

[0116] Preferred in the context of the present invention is a molecule which is “multispecific”, which is understood herein to be “at least bispecific”. In this regard, a multispecific molecule such as an antigen-binding molecule is specific for an effector such as CD3, more preferably CD3e, and at least two target cell surface antigens. Said specificity is conferred by respective binding domains as defined herein. Typically, “multispecific” refers to a molecule which is specific for two different target cell surface effectors as such multi-specificity confers to preferred properties of a multispecific antigen-binding molecule according to the present invention, namely mitigation of antigen loss and increase of the therapeutic window or higher tolerability.

[0117] Given that the antigen-binding molecules according to the invention are (at least) bispecific, they do not occur naturally and they are markedly different from naturally occurring products. A “bispecific” antigen-binding molecule or immunoglobulin is hence an artificial hybrid antibody or immunoglobulin having at least two distinct binding sides with different specificities. Bispecific antigen-binding molecules can be produced by a variety of methods including fusion of hybridomas or linking of Fab′ fragments. See, e.g., Songsivilai & Lachmann, Clin. Exp. Immunol. 79:315-321 (1990).

[0118] The at least three binding domains and the variable domains (VH/VL) of the antigen-binding molecule of the present invention typically comprise peptide linkers (spacer peptides). The term “peptide linker” comprises in accordance with the present invention an amino acid sequence by which the amino acid sequences of one (variable and/or binding) domain and another (variable and/or binding) domain of the antigen-binding molecule of the invention are linked with each other. The peptide linker between the first and the second binding domain, which are capable to bind simultaneously to two targets, which are preferably different targets (e.g. TAA1 and TAA2), are preferably flexible and of limited length, e.g. of 5, 6, 7, 8, 9, 10, 11, 12, 13, 14, 15, 16, 17 or 18 amino acids. The peptide linkers can also be used to fuse the third domain to the other domains of the antigen-binding molecule of the invention. An essential technical feature of such peptide linker is that it does not comprise any polymerization activity. Among the suitable peptide linkers are those described in U.S. Pat. Nos. 4,751,180 and 4,935,233 or WO 88/09344. The peptide linkers can also be used to attach other domains or modules or regions (such as half-life extending domains) to the antigen-binding molecule of the invention. However, typically the linker between the first and the second target binding domain differs from the intra-binder linker which links the VH and VL within the target binding domain. Said difference is the linker between the first and the second binding domain having one amino acid more than intra-binder linkers, e.g. six and five amino acids, respectively, such as SGGGGS versus GGGGS. This confers surprisingly flexibility and stability at the same time in the specific antigen-binding molecule format as described herein.

[0119] The antigen-binding molecules of the present invention are preferably “in vitro generated antigen-binding molecules”. This term refers to an antigen-binding molecule according to the above definition where all or part of the variable region (e.g., at least one CDR) is generated in a non-immune cell selection, e.g., an in vitro phage display, protein chip or any other method in which candidate sequences can be tested for their ability to bind to an antigen. This term thus preferably excludes sequences generated solely by genomic rearrangement in an immune cell in an animal. A “recombinant antibody” is an antibody made through the use of recombinant DNA technology or genetic engineering.

[0120] The term “monoclonal antibody” (mAb) or monoclonal antigen-binding molecule as used herein refers to an antibody obtained from a population of substantially homogeneous antibodies, i.e., the individual antibodies comprising the population are identical except for possible naturally occurring mutations and/or post-translation modifications (e.g., isomerizations, amidations) that may be present in minor amounts. Monoclonal antibodies are highly specific, being directed against a single antigenic side or determinant on the antigen, in contrast to conventional (polyclonal) antibody preparations which typically include different antibodies directed against different determinants (or epitopes). In addition to their specificity, the monoclonal antibodies are advantageous in that they are synthesized by the hybridoma culture, hence uncontaminated by other immunoglobulins. The modifier “monoclonal” indicates the character of the antibody as being obtained from a substantially homogeneous population of antibodies, and is not to be construed as requiring production of the antibody by any particular method.

[0121] For the preparation of monoclonal antibodies, any technique providing antibodies produced by continuous cell line cultures can be used. For example, monoclonal antibodies to be used may be made by the hybridoma method first described by Koehler et al., Nature, 256: 495 (1975), or may be made by recombinant DNA methods (see, e.g., U.S. Pat. No. 4,816,567). Examples for further techniques to produce human monoclonal antibodies include the trioma technique, the human B-cell hybridoma technique (Kozbor, Immunology Today 4 (1983), 72) and the EBV-hybridoma technique (Cole et al., Monoclonal Antibodies and Cancer Therapy, Alan R. Liss, Inc. (1985), 77-96).

[0122] Hybridomas can then be screened using standard methods, such as enzyme-linked immunosorbent assay (ELISA) and surface plasmon resonance analysis, e.g. Biacore™ to identify one or more hybridomas that produce an antibody that specifically binds with a specified antigen. Any form of the relevant antigen may be used as the immunogen, e.g., recombinant antigen, naturally occurring forms, any variants or fragments thereof, as well as an antigenic peptide thereof. Surface plasmon resonance as employed in the Biacore system can be used to increase the efficiency of phage antibodies which bind to an epitope of a target cell surface antigen (Schier, Human Antibodies Hybridomas 7 (1996), 97-105; Malmborg, J. Immunol. Methods 183 (1995), 7-13).

[0123] Another exemplary method of making monoclonal antibodies includes screening protein expression libraries, e.g., phage display or ribosome display libraries. Phage display is described, for example, in Ladner et al., U.S. Pat. No. 5,223,409; Smith (1985) Science 228:1315-1317, Clackson et al., Nature, 352: 624-628 (1991) and Marks et al., J. Mol. Biol., 222: 581-597 (1991).

[0124] In addition to the use of display libraries, the relevant antigen can be used to immunize a non-human animal, e.g., a rodent (such as a mouse, hamster, rabbit or rat). In one embodiment, the non-human animal includes at least a part of a human immunoglobulin gene. For example, it is possible to engineer mouse strains deficient in mouse antibody production with large fragments of the human Ig (immunoglobulin) loci. Using the hybridoma technology, antigen-specific monoclonal antibodies derived from the genes with the desired specificity may be produced and selected. See, e.g., XENOMOUSE™, Green et al. (1994) Nature Genetics 7:13-21, US 2003-0070185, WO 96/34096, and WO 96/33735.

[0125] A monoclonal antibody can also be obtained from a non-human animal, and then modified, e.g., humanized, deimmunized, rendered chimeric etc., using recombinant DNA techniques known in the art. Examples of modified antigen-binding molecules include humanized variants of non-human antibodies, “affinity matured” antibodies (see, e.g. Hawkins et al. J. Mol. Biol. 254, 889-896 (1992) and Lowman et al., Biochemistry 30, 10832-10837 (1991)) and antibody mutants with altered effector function(s) (see, e.g., U.S. Pat. No. 5,648,260, Kontermann and Dubel (2010), loc. cit. and Little (2009), loc. cit.).

[0126] In immunology, affinity maturation is the process by which B cells produce antibodies with increased affinity for antigen during the course of an immune response. With repeated exposures to the same antigen, a host will produce antibodies of successively greater affinities. Like the natural prototype, the in vitro affinity maturation is based on the principles of mutation and selection. The in vitro affinity maturation has successfully been used to optimize antibodies, antigen-binding molecules, and antibody fragments. Random mutations inside the CDRs are introduced using radiation, chemical mutagens or error-prone PCR. In addition, the genetic diversity can be increased by chain shuffling. Two or three rounds of mutation and selection using display methods like phage display usually results in antibody fragments with affinities in the low nanomolar range.

[0127] A preferred type of an amino acid substitutional variation of the antigen-binding molecules involves substituting one or more hypervariable region residues of a parent antibody (e. g. a humanized or human antibody). Generally, the resulting variant(s) selected for further development will have improved biological properties relative to the parent antibody from which they are generated. A convenient way for generating such substitutional variants involves affinity maturation using phage display. Briefly, several hypervariable region sides (e. g. 6-7 sides) are mutated to generate all possible amino acid substitutions at each side. The antibody variants thus generated are displayed in a monovalent fashion from filamentous phage particles as fusions to the gene III product of M13 packaged within each particle. The phage-displayed variants are then screened for their biological activity (e. g. binding affinity) as herein disclosed. In order to identify candidate hypervariable region sides for modification, alanine scanning mutagenesis can be performed to identify hypervariable region residues contributing significantly to antigen binding. Alternatively, or additionally, it may be beneficial to analyze a crystal structure of the antigen-antibody complex to identify contact points between the binding domain and, e.g., human CS1, BCMA, CD20, CD22, FLT3, CD123, MSLN, CLL1 or EpCAM. Such contact residues and neighbouring residues are candidates for substitution according to the techniques elaborated herein. Once such variants are generated, the panel of variants is subjected to screening as described herein and antibodies with superior properties in one or more relevant assays may be selected for further development.

[0128] The monoclonal antibodies and antigen-binding molecules of the present invention specifically include “chimeric” antibodies (immunoglobulins) in which a portion of the heavy and/or light chain is identical with or homologous to corresponding sequences in antibodies derived from a particular species or belonging to a particular antibody class or subclass, while the remainder of the chain(s) is/are identical with or homologous to corresponding sequences in antibodies derived from another species or belonging to another antibody class or subclass, as well as fragments of such antibodies, so long as they exhibit the desired biological activity (U.S. Pat. No. 4,816,567; Momson et al., Proc. Natl. Acad. Sci. USA, 81: 6851-6855 (1984)). Chimeric antibodies of interest herein include “primitized” antibodies comprising variable domain antigen-binding sequences derived from a non-human primate (e.g., Old World Monkey, Ape etc.) and human constant region sequences. A variety of approaches for making chimeric antibodies have been described. See e.g., Morrison et al., Proc. Natl. Acad. ScL U.S.A. 81:6851, 1985; Takeda et al., Nature 314:452, 1985, Cabilly et al., U.S. Pat. No. 4,816,567; Boss et al., U.S. Pat. No. 4,816,397; Tanaguchi et al., EP 0171496; EP 0173494; and GB 2177096.

[0129] An antibody, antigen-binding molecule, antibody fragment or antibody variant may also be modified by specific deletion of human T cell epitopes (a method called “deimmunization”) by the methods disclosed for example in WO 98/52976 or WO 00/34317. Briefly, the heavy and light chain variable domains of an antibody can be analyzed for peptides that bind to MHC class II; these peptides represent potential T cell epitopes (as defined in WO 98/52976 and WO 00/34317). For detection of potential T cell epitopes, a computer modeling approach termed “peptide threading” can be applied, and in addition a database of human MHC class II binding peptides can be searched for motifs present in the VH and VL sequences, as described in WO 98/52976 and WO 00/34317. These motifs bind to any of the 18 major MHC class II DR allotypes, and thus constitute potential T cell epitopes. Potential T cell epitopes detected can be eliminated by substituting small numbers of amino acid residues in the variable domains, or preferably, by single amino acid substitutions. Typically, conservative substitutions are made. Often, but not exclusively, an amino acid common to a position in human germline antibody sequences may be used. Human germline sequences are disclosed e.g. in Tomlinson, et al. (1992) J. MoI. Biol. 227:776-798; Cook, G. P. et al. (1995) Immunol. Today Vol. 16 (5): 237-242; and Tomlinson et al. (1995) EMBO J. 14: 14:4628-4638. The V BASE directory provides a comprehensive directory of human immunoglobulin variable region sequences (compiled by Tomlinson, L A. et al. MRC Centre for Protein Engineering, Cambridge, UK). These sequences can be used as a source of human sequence, e.g., for framework regions and CDRs. Consensus human framework regions can also be used, for example as described in U.S. Pat. No. 6,300,064.

[0130] “Humanized” antibodies, antigen-binding molecules, variants or fragments thereof (such as Fv, Fab, Fab′, F(ab′)2 or other antigen-binding subsequences of antibodies) are antibodies or immunoglobulins of mostly human sequences, which contain (a) minimal sequence(s) derived from non-human immunoglobulin. For the most part, humanized antibodies are human immunoglobulins (recipient antibody) in which residues from a hypervariable region (also CDR) of the recipient are replaced by residues from a hypervariable region of a non-human (e.g., rodent) species (donor antibody) such as mouse, rat, hamster or rabbit having the desired specificity, affinity, and capacity. In some instances, Fv framework region (FR) residues of the human immunoglobulin are replaced by corresponding non-human residues. Furthermore, “humanized antibodies” as used herein may also comprise residues which are found neither in the recipient antibody nor the donor antibody. These modifications are made to further refine and optimize antibody performance. The humanized antibody may also comprise at least a portion of an immunoglobulin constant region (Fc), typically that of a human immunoglobulin. For further details, see Jones et al., Nature, 321: 522-525 (1986); Reichmann et al., Nature, 332: 323-329 (1988); and Presta, Curr. Op. Struct. Biol., 2: 593-596 (1992).

[0131] Humanized antibodies or fragments thereof can be generated by replacing sequences of the Fv variable domain that are not directly involved in antigen binding with equivalent sequences from human Fv variable domains. Exemplary methods for generating humanized antibodies or fragments thereof are provided by Morrison (1985) Science 229:1202-1207; by Oi et al. (1986) BioTechniques 4:214; and by U.S. Pat. Nos. 5,585,089; 5,693,761; 5,693,762; 5,859,205; and 6,407,213. Those methods include isolating, manipulating, and expressing the nucleic acid sequences that encode all or part of immunoglobulin Fv variable domains from at least one of a heavy or light chain. Such nucleic acids may be obtained from a hybridoma producing an antibody against a predetermined target, as described above, as well as from other sources. The recombinant DNA encoding the humanized antibody molecule can then be cloned into an appropriate expression vector.

[0132] Humanized antibodies may also be produced using transgenic animals such as mice that express human heavy and light chain genes, but are incapable of expressing the endogenous mouse immunoglobulin heavy and light chain genes. Winter describes an exemplary CDR grafting method that may be used to prepare the humanized antibodies described herein (U.S. Pat. No. 5,225,539). All of the CDRs of a particular human antibody may be replaced with at least a portion of a non-human CDR, or only some of the CDRs may be replaced with non-human CDRs. It is only necessary to replace the number of CDRs required for binding of the humanized antibody to a predetermined antigen.

[0133] A humanized antibody can be optimized by the introduction of conservative substitutions, consensus sequence substitutions, germline substitutions and/or back mutations. Such altered immunoglobulin molecules can be made by any of several techniques known in the art, (e.g., Teng et al., Proc. Natl. Acad. Sci. U.S.A., 80: 7308-7312, 1983; Kozbor et al., Immunology Today, 4: 7279, 1983; Olsson et al., Meth. Enzymol., 92: 3-16, 1982, and EP 239 400).

[0134] The term “human antibody”, “human antigen-binding molecule” and “human binding domain” includes antibodies, antigen-binding molecules and binding domains having antibody regions such as variable and constant regions or domains which correspond substantially to human germline immunoglobulin sequences known in the art, including, for example, those described by Kabat et al. (1991) (loc. cit.). The human antibodies, antigen-binding molecules or binding domains of the invention may include amino acid residues not encoded by human germline immunoglobulin sequences (e.g., mutations introduced by random or site-specific mutagenesis in vitro or by somatic mutation in vivo), for example in the CDRs, and in particular, in CDR3. The human antibodies, antigen-binding molecules or binding domains can have at least one, two, three, four, five, or more positions replaced with an amino acid residue that is not encoded by the human germline immunoglobulin sequence. The definition of human antibodies, antigen-binding molecules and binding domains as used herein also contemplates fully human antibodies, which include only non-artificially and/or genetically altered human sequences of antibodies as those can be derived by using technologies or systems such as the Xenomouse. Preferably, a “fully human antibody” does not include amino acid residues not encoded by human germline immunoglobulin sequences.

[0135] In some embodiments, the antigen-binding molecules of the invention are “isolated” or “substantially pure” antigen-binding molecules. “Isolated” or “substantially pure”, when used to describe the antigen-binding molecules disclosed herein, means an antigen-binding molecule that has been identified, separated and/or recovered from a component of its production environment. Preferably, the antigen-binding molecule is free or substantially free of association with all other components from its production environment. Contaminant components of its production environment, such as that resulting from recombinant transfected cells, are materials that would typically interfere with diagnostic or therapeutic uses for the polypeptide, and may include enzymes, hormones, and other proteinaceous or non-proteinaceous solutes. The antigen-binding molecules may e.g. constitute at least about 5%, or at least about 50% by weight of the total protein in a given sample. It is understood that the isolated protein may constitute from 5% to 99.9% by weight of the total protein content, depending on the circumstances. The polypeptide may be made at a significantly higher concentration through the use of an inducible promoter or high expression promoter, such that it is made at increased concentration levels. The definition includes the production of an antigen-binding molecule in a wide variety of organisms and/or host cells that are known in the art. In preferred embodiments, the antigen-binding molecule will be purified (1) to a degree sufficient to obtain at least 15 residues of N-terminal or internal amino acid sequence by use of a spinning cup sequenator, or (2) to homogeneity by SDS-PAGE under non-reducing or reducing conditions using Coomassie blue or, preferably, silver stain. Ordinarily, however, an isolated antigen-binding molecule will be prepared by at least one purification step.

[0136] The term “binding domain” characterizes in connection with the present invention a domain which (specifically) binds to/interacts with/recognizes a given target epitope or a given target side on the target molecules (antigens), e.g. CS1, BCMA, CD20, CD22, FLT3, CD123, CLL1, MSLN, or EpCAM, and CD3, respectively. The structure and function of the first and/or second binding domain (recognizing CS1, BCMA, CD20, CD22, FLT3, CD123, CLL1, MSLN, or EpCAM), and preferably also the structure and/or function of the effector binding domain (typically the third binding domain recognizing CD3), is/are based on the structure and/or function of an antibody, e.g. of a full-length or whole immunoglobulin molecule, and/or is/are drawn from the variable heavy chain (VH) and/or variable light chain (VL) domains of an antibody or fragment thereof. Preferably the target cell surface antigen(s) binding domain(s) is/are characterized by the presence of three light chain CDRs (i.e. CDR1, CDR2 and CDR3 of the VL region) and/or three heavy chain CDRs (i.e. CDR1, CDR2 and CDR3 of the VH region). The effector (typically CD3) binding domain preferably also comprises the minimum structural requirements of an antibody which allow for the target binding. More preferably, the second binding domain comprises at least three light chain CDRs (i.e. CDR1, CDR2 and CDR3 of the VL region) and/or three heavy chain CDRs (i.e. CDR1, CDR2 and CDR3 of the VH region). It is envisaged that the first and/or second binding domain is produced by or obtainable by phage-display or library screening methods rather than by grafting CDR sequences from a pre-existing (monoclonal) antibody into a scaffold.

[0137] According to the present invention, binding domains are in the form of one or more polypeptides. Such polypeptides may include proteinaceous parts and non-proteinaceous parts (e.g. chemical linkers or chemical cross-linking agents such as glutaraldehyde). Proteins (including fragments thereof, preferably biologically active fragments, and peptides, usually having less than 30 amino acids) comprise two or more amino acids coupled to each other via a covalent peptide bond (resulting in a chain of amino acids).

[0138] The term “polypeptide” as used herein describes a group of molecules, which usually consist of more than 30 amino acids. Polypeptides may further form multimers such as dimers, trimers and higher oligomers, i.e., consisting of more than one polypeptide molecule. Polypeptide molecules forming such dimers, trimers etc. may be identical or non-identical. The corresponding higher order structures of such multimers are, consequently, termed homo- or heterodimers, homo- or heterotrimers etc. An example for a heteromultimer is an antibody molecule, which, in its naturally occurring form, consists of two identical light polypeptide chains and two identical heavy polypeptide chains. The terms “peptide”, “polypeptide” and “protein” also refer to naturally modified peptides/polypeptides/proteins wherein the modification is effected e.g. by post-translational modifications like glycosylation, acetylation, phosphorylation and the like. A “peptide”, “polypeptide” or “protein” when referred to herein may also be chemically modified such as pegylated. Such modifications are well known in the art and described herein below.

[0139] Preferably the binding domain which binds to any of CS1, BCMA, CD20, CD22, FLT3, CD123, CLL1, MSLN, and EpCAM, and/or the binding domain which binds to CD3s is/are human binding domains. Antibodies and antigen-binding molecules comprising at least one human binding domain avoid some of the problems associated with antibodies or antigen-binding molecules that possess non-human such as rodent (e.g. murine, rat, hamster or rabbit) variable and/or constant regions. The presence of such rodent derived proteins can lead to the rapid clearance of the antibodies or antigen-binding molecules or can lead to the generation of an immune response against the antibody or antigen-binding molecule by a patient. In order to avoid the use of rodent derived antibodies or antigen-binding molecules, human or fully human antibodies/antigen-binding molecules can be generated through the introduction of human antibody function into a rodent so that the rodent produces fully human antibodies.

[0140] The ability to clone and reconstruct megabase-sized human loci in yeast artificial chromosomes YACs and to introduce them into the mouse germline provides a powerful approach to elucidating the functional components of very large or crudely mapped loci as well as generating useful models of human disease. Furthermore, the use of such technology for substitution of mouse loci with their human equivalents could provide unique insights into the expression and regulation of human gene products during development, their communication with other systems, and their involvement in disease induction and progression.

[0141] An important practical application of such a strategy is the “humanization” of the mouse humoral immune system. Introduction of human immunoglobulin (Ig) loci into mice in which the endogenous Ig genes have been inactivated offers the opportunity to study the mechanisms underlying programmed expression and assembly of antibodies as well as their role in B-cell development. Furthermore, such a strategy could provide an ideal source for production of fully human monoclonal antibodies (mAbs)—an important milestone towards fulfilling the promise of antibody therapy in human disease. Fully human antibodies or antigen-binding molecules are expected to minimize the immunogenic and allergic responses intrinsic to mouse or mouse-derivatized mAbs and thus to increase the efficacy and safety of the administered antibodies/antigen-binding molecules. The use of fully human antibodies or antigen-binding molecules can be expected to provide a substantial advantage in the treatment of chronic and recurring human diseases, such as inflammation, autoimmunity, and cancer, which require repeated compound administrations.

[0142] One approach towards this goal was to engineer mouse strains deficient in mouse antibody production with large fragments of the human Ig loci in anticipation that such mice would produce a large repertoire of human antibodies in the absence of mouse antibodies. Large human Ig fragments would preserve the large variable gene diversity as well as the proper regulation of antibody production and expression. By exploiting the mouse machinery for antibody diversification and selection and the lack of immunological tolerance to human proteins, the reproduced human antibody repertoire in these mouse strains should yield high affinity antibodies against any antigen of interest, including human antigens. Using the hybridoma technology, antigen-specific human mAbs with the desired specificity could be readily produced and selected. This general strategy was demonstrated in connection with the generation of the first XenoMouse mouse strains (see Green et al. Nature Genetics 7:13-21 (1994)). The XenoMouse strains were engineered with YACs containing 245 kb and 190 kb-sized germline configuration fragments of the human heavy chain locus and kappa light chain locus, respectively, which contained core variable and constant region sequences. The human Ig containing YACs proved to be compatible with the mouse system for both rearrangement and expression of antibodies and were capable of substituting for the inactivated mouse Ig genes. This was demonstrated by their ability to induce B cell development, to produce an adult-like human repertoire of fully human antibodies, and to generate antigen-specific human mAbs. These results also suggested that introduction of larger portions of the human Ig loci containing greater numbers of V genes, additional regulatory elements, and human Ig constant regions may recapitulate substantially the full repertoire that is characteristic of the human humoral response to infection and immunization. The work of Green et al. was recently extended to the introduction of greater than approximately 80% of the human antibody repertoire through introduction of megabase sized, germline configuration YAC fragments of the human heavy chain loci and kappa light chain loci, respectively. See Mendez et al. Nature Genetics 15:146-156 (1997) and U.S. patent application Ser. No. 08/759,620.

[0143] The production of the XenoMouseanimals is further discussed and delineated in U.S. patent application Ser. No. 07/466,008, Ser. No. 07/610,515, Ser. No. 07/919,297, Ser. No. 07/922,649, Ser. No. 08/031,801, Ser. No. 08/112,848, Ser. No. 08/234,145, Ser. No. 08/376,279, Ser. No. 08/430,938, Ser. No. 08/464,584, Ser. No. 08/464,582, Ser. No. 08/463,191, Ser. No. 08/462,837, Ser. No. 08/486,853, Ser. No. 08/486,857, Ser. No. 08/486,859, Ser. No. 08/462,513, Ser. No. 08/724,752, and Ser. No. 08/759,620; and U.S. Pat. Nos. 6,162,963; 6,150,584; 6,114,598; 6,075,181, and 5,939,598 and Japanese Patent Nos. 3,068,180 B2, 3068506 B2, and 3068507 B2. See also Mendez et al. Nature Genetics 15:146-156 (1997) and Green and Jakobovits J. Exp. Med. 188:483-495 (1998), EP 0 463 151 B1, WO 94/02602, WO 96/34096, WO 98/24893, WO 00/76310, and WO 03/47336.

[0144] In an alternative approach, others, including GenPharm International, Inc., have utilized a “minilocus” approach. In the minilocus approach, an exogenous Ig locus is mimicked through the inclusion of pieces (individual genes) from the Ig locus. Thus, one or more VH genes, one or more DH genes, one or more JH genes, a mu constant region, and a second constant region (preferably a gamma constant region) are formed into a construct for insertion into an animal. This approach is described in U.S. Pat. No. 5,545,807 to Surani et al. and U.S. Pat. Nos. 5,545,806; 5,625,825; 5,625,126; 5,633,425; 5,661,016; 5,770,429; 5,789,650; 5,814,318; 5,877,397; 5,874,299; and 6,255,458 each to Lonberg and Kay, U.S. Pat. Nos. 5,591,669 and 6,023,010 to Krimpenfort and Berns, U.S. Pat. Nos. 5,612,205; 5,721,367; and U.S. Pat. No. 5,789,215 to Berns et al., and U.S. Pat. No. 5,643,763 to Choi and Dunn, and GenPharm International U.S. patent application Ser. No. 07/574,748, Ser. No. 07/575,962, Ser. No. 07/810,279, Ser. No. 07/853,408, Ser. No. 07/904,068, Ser. No. 07/990,860, Ser. No. 08/053,131, Ser. No. 08/096,762, Ser. No. 08/155,301, Ser. No. 08/161,739, Ser. No. 08/165,699, Ser. No. 08/209,741. See also EP 0 546 073 B1, WO 92/03918, WO 92/22645, WO 92/22647, WO 92/22670, WO 93/12227, WO 94/00569, WO 94/25585, WO 96/14436, WO 97/13852, and WO 98/24884 and U.S. Pat. No. 5,981,175. See further Taylor et al. (1992), Chen et al. (1993), Tuaillon et al. (1993), Choi et al. (1993), Lonberg et al. (1994), Taylor et al. (1994), and Tuaillon et al. (1995), Fishwild et al. (1996).

[0145] Kirin has also demonstrated the generation of human antibodies from mice in which, through microcell fusion, large pieces of chromosomes, or entire chromosomes, have been introduced. See European Patent Application Nos. 773288 and 843961. Xenerex Biosciences is developing a technology for the potential generation of human antibodies. In this technology, SCID mice are reconstituted with human lymphatic cells, e.g., B and/or T cells. Mice are then immunized with an antigen and can generate an immune response against the antigen. See U.S. Pat. Nos. 5,476,996; 5,698,767; and 5,958,765.

[0146] Human anti-mouse antibody (HAMA) responses have led the industry to prepare chimeric or otherwise humanized antibodies. It is however expected that certain human anti-chimeric antibody (HACA) responses will be observed, particularly in chronic or multi-dose utilizations of the antibody. Thus, it would be desirable to provide antigen-binding molecules comprising a human binding domain against CS1, BCMA, CD20, CD22, FLT3, CD123, CLL1, MSLN, CDH3 or EpCAM and a human binding domain against CD3s in order to vitiate concerns and/or effects of HAMA or HACA response.

[0147] The terms “(specifically) or (immune-specifically) binds to”, (specifically) recognizes”, “is (specifically) directed to”, and “(specifically) reacts with” mean in accordance with this invention that a binding domain, preferably by means of its paratope, interacts or specifically interacts with a given epitope or a given target side on the target molecules (antigens), here preferably CS1, BCMA, CD20, CD22, FLT3, CD123, CLL1, MSLN, CDH3 or EpCAM, and CD3s, respectively.

[0148] In the context of the present invention, a paratope is understood as an antigen-binding site which is a part of a polypeptide as described herein and which recognizes and binds to an antigen. A paratope is typically a small region of about at least 5 amino acids. A paratope as understood herein typically comprises parts of antibody-derived heavy (VH) and light chain (VL) sequences. Each binding domain of a polypeptide according to the present invention is provided with a paratope comprising a set of 6 complementarity-determining regions (CDR loops) with three of each being comprised within the antibody-derived VH and VL sequence, respectively.

[0149] In the context of the present invention, an antigen-binding molecule, i.e. preferably a polypeptide, of the present invention binds to its respective target structure in a particular manner. Preferably, a polypeptide according to the present invention comprises one paratope per binding domain which specifically or immunospecifically binds to”, “(specifically or immunospecifically) recognizes”, or “(specifically or immunospecifically) reacts with” its respective target structure. This means in accordance with this invention that a polypeptide or a binding domain thereof interacts or (immuno-)specifically interacts with a given epitope on the target molecule (antigen) and CD3, respectively. This interaction or association occurs more frequently, more rapidly, with greater duration, with greater affinity, or with some combination of these parameters, to an epitope on the specific target than to alternative substances (non-target molecules). Because of the sequence similarity between homologous proteins in different species, an antibody construct or a binding domain that immunspecifically binds to its target (such as a human target) may, however, cross-react with homologous target molecules from different species (such as, from non-human primates). The term “specific/immunospecific binding” can hence include the binding of an antibody construct or binding domain to epitopes and/or structurally related epitopes in more than one species. The term “(immuno-) selectively binds does exclude the binding to structurally related epitopes.

[0150] The term “epitope” refers to a side on an antigen to which a binding domain, such as an antibody or immunoglobulin, or a derivative, fragment or variant of an antibody or an immunoglobulin, specifically binds. An “epitope” is antigenic and thus the term epitope is sometimes also referred to herein as “antigenic structure” or “antigenic determinant”. Thus, the binding domain is an “antigen interaction side”. Said binding/interaction is also understood to define a “specific recognition”.

[0151] “Epitopes” can be formed both by contiguous amino acids or non-contiguous amino acids juxtaposed by tertiary folding of a protein. A “linear epitope” is an epitope where an amino acid primary sequence comprises the recognized epitope. A linear epitope typically includes at least 3 or at least 4, and more usually, at least 5 or at least 6 or at least 7, for example, about 8 to about 10 amino acids in a unique sequence.

[0152] A “conformational epitope”, in contrast to a linear epitope, is an epitope wherein the primary sequence of the amino acids comprising the epitope is not the sole defining component of the epitope recognized (e.g., an epitope wherein the primary sequence of amino acids is not necessarily recognized by the binding domain). Typically, a conformational epitope comprises an increased number of amino acids relative to a linear epitope. With regard to recognition of conformational epitopes, the binding domain recognizes a three-dimensional structure of the antigen, preferably a peptide or protein or fragment thereof (in the context of the present invention, the antigenic structure for one of the binding domains is comprised within the target cell surface antigen protein). For example, when a protein molecule folds to form a three-dimensional structure, certain amino acids and/or the polypeptide backbone forming the conformational epitope become juxtaposed enabling the antibody to recognize the epitope. Methods of determining the conformation of epitopes include, but are not limited to, x-ray crystallography, two-dimensional nuclear magnetic resonance (2D-NMR) spectroscopy and site-directed spin labelling and electron paramagnetic resonance (EPR) spectroscopy.

[0153] A method for epitope mapping is described in the following: When a region (a contiguous amino acid stretch) in the human CS1, BCMA, CD20, CD22, FLT3, CD123, CLL1, MSLN, or EpCAM protein is exchanged or replaced with its corresponding region of a non-human and non-primate CS1, BCMA, CD20, CD22, FLT3, CD123, CLL1, MSLN, or EpCAM (e.g., mouse CS1, BCMA, CD20, CD22, FLT3, CD123, CLL1, MSLN, or EpCAM, but others like chicken, rat, hamster, rabbit etc. may also be conceivable), a decrease in the binding of the binding domain is expected to occur, unless the binding domain is cross-reactive for the non-human, non-primate CS1, BCMA, CD20, CD22, FLT3, CD123, CLL1, MSLN, CDH3 or EpCAM used. Said decrease is preferably at least 10%, 20%, 30%, 40%, or 50%; more preferably at least 60%, 70%, or 80%, and most preferably 90%, 95% or even 100% in comparison to the binding to the respective region in the human CS1, BCMA, CD20, CD22, FLT3, CD123, CLL1, MSLN, or EpCAM protein, whereby binding to the respective region in the human CS1, BCMA, CD20, CD22, FLT3, CD123, CLL1, MSLN, or EpCAM protein is set to be 100%. It is envisaged that the aforementioned human CS1, BCMA, CD20, CD22, FLT3, CD123, CLL1, MSLN, or EpCAM/non-human CS1, BCMA, CD20, CD22, FLT3, CD123, CLL1, MSLN, or EpCAM chimeras are expressed in CHO cells. It is also envisaged that the human CS1, BCMA, CD20, CD22, FLT3, CD123, CLL1, MSLN, or EpCAM/non-human CS1, BCMA, CD20, CD22, FLT3, CD123, CLL1, MSLN, or EpCAM chimeras are fused with a transmembrane domain and/or cytoplasmic domain of a different membrane-bound protein such as EpCAM.

[0154] In an alternative or additional method for epitope mapping, several truncated versions of the human CS1, BCMA, CD20, CD22, FLT3, CD123, CLL1, MSLN, or EpCAM extracellular domain can be generated in order to determine a specific region that is recognized by a binding domain. In these truncated versions, the different extracellular CS1, BCMA, CD20, CD22, FLT3, CD123, CLL1, MSLN, or EpCAM domains/sub-domains or regions are stepwise deleted, starting from the N-terminus. It is envisaged that the truncated CS1, BCMA, CD20, CD22, FLT3, CD123, CLL1, MSLN, or EpCAM versions may be expressed in CHO cells. It is also envisaged that the truncated CS1, BCMA, CD20, CD22, FLT3, CD123, CLL1, MSLN, or EpCAM versions may be fused with a transmembrane domain and/or cytoplasmic domain of a different membrane-bound protein such as EpCAM. It is also envisaged that the truncated CS1, BCMA, CD20, CD22, FLT3, CD123, CLL1, MSLN, or EpCAM versions may encompass a signal peptide domain at their N-terminus, for example a signal peptide derived from mouse IgG heavy chain signal peptide. It is furthermore envisaged that the truncated CS1, BCMA, CD20, CD22, FLT3, CD123, CLL1, MSLN, or EpCAM versions may encompass a v5 domain at their N-terminus (following the signal peptide) which allows verifying their correct expression on the cell surface. A decrease or a loss of binding is expected to occur with those truncated CS1, BCMA, CD20, CD22, FLT3, CD123, CLL1, MSLN, or EpCAM versions which do not encompass any more the CS1, BCMA, CD20, CD22, FLT3, CD123, CLL1, MSLN, or EpCAM region that is recognized by the binding domain. The decrease of binding is preferably at least 10%, 20%, 30%, 40%, 50%; more preferably at least 60%, 70%, 80%, and most preferably 90%, 95% or even 100%, whereby binding to the entire human CS1, BCMA, CD20, CD22, FLT3, CD123, CLL1, MSLN, or EpCAM protein (or its extracellular region or domain) is set to be 100.

[0155] A further method to determine the contribution of a specific residue of CS1, BCMA, CD20, CD22, FLT3, CD123, CLL1, MSLN, or EpCAM to the recognition by an antigen-binding molecule or binding domain is alanine scanning (see e.g. Morrison K L & Weiss G A. Cur Opin Chem Biol. 2001 June; 5(3):302-7), where each residue to be analyzed is replaced by alanine, e.g. via site-directed mutagenesis. Alanine is used because of its non-bulky, chemically inert, methyl functional group that nevertheless mimics the secondary structure references that many of the other amino acids possess. Sometimes bulky amino acids such as valine or leucine can be used in cases where conservation of the size of mutated residues is desired. Alanine scanning is a mature technology which has been used for a long period of time.

[0156] The interaction between the binding domain and the epitope or the region comprising the epitope implies that a binding domain exhibits appreciable affinity for the epitope/the region comprising the epitope on a particular protein or antigen (here: CS1, BCMA, CD20, CD22, FLT3, CD123, CLL1, MSLN, CDH3 or EpCAM and CD3, respectively) and, generally, does not exhibit significant reactivity with proteins or antigens other than the CS1, BCMA, CD20, CD22, FLT3, CD123, CLL1, MSLN, CDH3 or EpCAM or CD3. “Appreciable affinity” includes binding with an affinity of about 10⁻⁶ M (KD) or stronger. Preferably, binding is considered specific when the binding affinity is about 10⁻¹² to 10⁻⁸ M, 10-12 to 10⁻⁹ M, 10-12 to 10-10 M, 10-11 to 10⁻⁸ M, preferably of about 10⁻¹¹ to 10⁻⁹ M. Whether a binding domain specifically reacts with or binds to a target can be tested readily by, inter alia, comparing the reaction of said binding domain with a target protein or antigen with the reaction of said binding domain with proteins or antigens other than the CS1, BCMA, CD20, CD22, FLT3, CD123, CLL1, MSLN, CDH3 or EpCAM or CD3. Preferably, a binding domain of the invention does not essentially or substantially bind to proteins or antigens other than CS1, BCMA, CD20, CD22, FLT3, CD123, CLL1, MSLN, or EpCAM or CD3 (i.e., the first binding domain is not capable of binding to proteins other than CS1, BCMA, CD20, CD22, FLT3, CD123, CLL1, MSLN, CDH3 or EpCAM and the second binding domain is not capable of binding to proteins other than CD3). It is an envisaged characteristic of the antigen-binding molecules according to the present invention to have superior affinity characteristics in comparison to other HLE formats. Such a superior affinity, in consequence, suggests a prolonged half-life in vivo. The longer half-life of the antigen-binding molecules according to the present invention may reduce the duration and frequency of administration which typically contributes to improved patient compliance. This is of particular importance as the antigen-binding molecules of the present invention are particularly beneficial for highly weakened or even multimorbid cancer patients.

[0157] The term “does not essentially/substantially bind” or “is not capable of binding” means that a binding domain of the present invention does not bind a protein or antigen other than the CS1, BCMA, CD20, CD22, FLT3, CD123, CLL1, MSLN, or EpCAM or CD3, i.e., does not show reactivity of more than 30%, preferably not more than 20%, more preferably not more than 10%, particularly preferably not more than 9%, 8%, 7%, 6% or 5% with proteins or antigens other than CS1, BCMA, CD20, CD22, FLT3, CD123, CLL1, MSLN, CDH3 or EpCAM or CD3, whereby binding to the CS1, BCMA, CD20, CD22, FLT3, CD123, CLL1, MSLN, CDH3 or EpCAM or CD3, respectively, is set to be 100%.

[0158] Specific binding is believed to be effected by specific motifs in the amino acid sequence of the binding domain and the antigen. Thus, binding is achieved as a result of their primary, secondary and/or tertiary structure as well as the result of secondary modifications of said structures. The specific interaction of the antigen-interaction-side with its specific antigen may result in a simple binding of said side to the antigen. Moreover, the specific interaction of the antigen-interaction-side with its specific antigen may alternatively or additionally result in the initiation of a signal, e.g. due to the induction of a change of the conformation of the antigen, an oligomerization of the antigen, etc.

[0159] The term “variable” refers to the portions of the antibody or immunoglobulin domains that exhibit variability in their sequence and that are involved in determining the specificity and binding affinity of a particular antibody (i.e., the “variable domain(s)”). The pairing of a variable heavy chain (VH) and a variable light chain (VL) together forms a single antigen-binding site.

[0160] Variability is not evenly distributed throughout the variable domains of antibodies; it is concentrated in sub-domains of each of the heavy and light chain variable regions. These sub-domains are called “hypervariable regions” or “complementarity determining regions” (CDRs). The more conserved (i.e., non-hypervariable) portions of the variable domains are called the “framework” regions (FRM or FR) and provide a scaffold for the six CDRs in three dimensional space to form an antigen-binding surface. The variable domains of naturally occurring heavy and light chains each comprise four FRM regions (FR1, FR2, FR3, and FR4), largely adopting a R-sheet configuration, connected by three hypervariable regions, which form loops connecting, and in some cases forming part of, the β-sheet structure. The hypervariable regions in each chain are held together in close proximity by the FRM and, with the hypervariable regions from the other chain, contribute to the formation of the antigen-binding side (see Kabat et al., loc. cit.).

[0161] The terms “CDR”, and its plural “CDRs”, refer to the complementarity determining region of which three make up the binding character of a light chain variable region (CDR-L1, CDR-L2 and CDR-L3) and three make up the binding character of a heavy chain variable region (CDR-H1, CDR-H2 and CDR-H3). CDRs contain most of the residues responsible for specific interactions of the antibody with the antigen and hence contribute to the functional activity of an antibody molecule: they are the main determinants of antigen specificity.

[0162] The exact definitional CDR boundaries and lengths are subject to different classification and numbering systems. CDRs may therefore be referred to by Kabat, Chothia, contact or any other boundary definitions, including the numbering system described herein. Despite differing boundaries, each of these systems has some degree of overlap in what constitutes the so called “hypervariable regions” within the variable sequences. CDR definitions according to these systems may therefore differ in length and boundary areas with respect to the adjacent framework region. See for example Kabat (an approach based on cross-species sequence variability), Chothia (an approach based on crystallographic studies of antigen-antibody complexes), and/or MacCallum (Kabat et al., loc. cit.; Chothia et al., J. MoI. Biol, 1987, 196: 901-917; and MacCallum et al., J. MoI. Biol, 1996, 262: 732). Still another standard for characterizing the antigen binding side is the AbM definition used by Oxford Molecular's AbM antibody modeling software. See, e.g., Protein Sequence and Structure Analysis of Antibody Variable Domains. In: Antibody Engineering Lab Manual (Ed.: Duebel, S. and Kontermann, R., Springer-Verlag, Heidelberg). To the extent that two residue identification techniques define regions of overlapping, but not identical regions, they can be combined to define a hybrid CDR. However, the numbering in accordance with the so-called Kabat system is preferred.

[0163] Typically, CDRs form a loop structure that can be classified as a canonical structure. The term “canonical structure” refers to the main chain conformation that is adopted by the antigen binding (CDR) loops. From comparative structural studies, it has been found that five of the six antigen binding loops have only a limited repertoire of available conformations. Each canonical structure can be characterized by the torsion angles of the polypeptide backbone. Correspondent loops between antibodies may, therefore, have very similar three dimensional structures, despite high amino acid sequence variability in most parts of the loops (Chothia and Lesk, J. MoI. Biol., 1987, 196: 901; Chothia et al., Nature, 1989, 342: 877; Martin and Thornton, J. MoI. Biol, 1996, 263: 800). Furthermore, there is a relationship between the adopted loop structure and the amino acid sequences surrounding it. The conformation of a particular canonical class is determined by the length of the loop and the amino acid residues residing at key positions within the loop, as well as within the conserved framework (i.e., outside of the loop). Assignment to a particular canonical class can therefore be made based on the presence of these key amino acid residues.

[0164] The term “canonical structure” may also include considerations as to the linear sequence of the antibody, for example, as catalogued by Kabat (Kabat et al., loc. cit.). The Kabat numbering scheme (system) is a widely adopted standard for numbering the amino acid residues of an antibody variable domain in a consistent manner and is the preferred scheme applied in the present invention as also mentioned elsewhere herein. Additional structural considerations can also be used to determine the canonical structure of an antibody. For example, those differences not fully reflected by Kabat numbering can be described by the numbering system of Chothia et al. and/or revealed by other techniques, for example, crystallography and two- or three-dimensional computational modeling. Accordingly, a given antibody sequence may be placed into a canonical class which allows for, among other things, identifying appropriate chassis sequences (e.g., based on a desire to include a variety of canonical structures in a library). Kabat numbering of antibody amino acid sequences and structural considerations as described by Chothia et al., loc. cit. and their implications for construing canonical aspects of antibody structure, are described in the literature. The subunit structures and three-dimensional configurations of different classes of immunoglobulins are well known in the art. For a review of the antibody structure, see Antibodies: A Laboratory Manual, Cold Spring Harbor Laboratory, eds. Harlow et al., 1988.

[0165] The CDR3 of the light chain and, particularly, the CDR3 of the heavy chain may constitute the most important determinants in antigen binding within the light and heavy chain variable regions. In some antigen-binding molecules, the heavy chain CDR3 appears to constitute the major area of contact between the antigen and the antibody. In vitro selection schemes in which CDR3 alone is varied can be used to vary the binding properties of an antibody or determine which residues contribute to the binding of an antigen. Hence, CDR3 is typically the greatest source of molecular diversity within the antibody-binding side. H3, for example, can be as short as two amino acid residues or greater than 26 amino acids.

[0166] In a classical full-length antibody or immunoglobulin, each light (L) chain is linked to a heavy (H) chain by one covalent disulfide bond, while the two H chains are linked to each other by one or more disulfide bonds depending on the H chain isotype. The CH domain most proximal to VH is usually designated as CH1. The constant (“C”) domains are not directly involved in antigen binding, but exhibit various effector functions, such as antibody-dependent, cell-mediated cytotoxicity and complement activation. The Fc region of an antibody is comprised within the heavy chain constant domains and is for example able to interact with cell surface located Fc receptors.

[0167] The sequence of antibody genes after assembly and somatic mutation is highly varied, and these varied genes are estimated to encode 10¹⁰ different antibody molecules (Immunoglobulin Genes, 2^{nd} ed., eds. Jonio et al., Academic Press, San Diego, Calif., 1995). Accordingly, the immune system provides a repertoire of immunoglobulins. The term “repertoire” refers to at least one nucleotide sequence derived wholly or partially from at least one sequence encoding at least one immunoglobulin. The sequence(s) may be generated by rearrangement in vivo of the V, D, and J segments of heavy chains, and the V and J segments of light chains. Alternatively, the sequence(s) can be generated from a cell in response to which rearrangement occurs, e.g., in vitro stimulation. Alternatively, part or all of the sequence(s) may be obtained by DNA splicing, nucleotide synthesis, mutagenesis, and other methods, see, e.g., U.S. Pat. No. 5,565,332. A repertoire may include only one sequence or may include a plurality of sequences, including ones in a genetically diverse collection.

[0168] The term “Fc portion” or “Fc monomer” means in connection with this invention a polypeptide comprising at least one domain having the function of a CH2 domain and at least one domain having the function of a CH3 domain of an immunoglobulin molecule. As apparent from the term “Fc monomer”, the polypeptide comprising those CH domains is a “polypeptide monomer”. An Fc monomer can be a polypeptide comprising at least a fragment of the constant region of an immunoglobulin excluding the first constant region immunoglobulin domain of the heavy chain (CH1), but maintaining at least a functional part of one CH2 domain and a functional part of one CH3 domain, wherein the CH2 domain is amino terminal to the CH3 domain. In a preferred aspect of this definition, an Fc monomer can be a polypeptide constant region comprising a portion of the Ig-Fc hinge region, a CH2 region and a CH3 region, wherein the hinge region is amino terminal to the CH2 domain. It is envisaged that the hinge region of the present invention promotes dimerization. Such Fc polypeptide molecules can be obtained by papain digestion of an immunoglobulin region (of course resulting in a dimer of two Fc polypeptide), for example and not limitation. In another aspect of this definition, an Fc monomer can be a polypeptide region comprising a portion of a CH2 region and a CH3 region. Such Fc polypeptide molecules can be obtained by pepsin digestion of an immunoglobulin molecule, for example and not limitation. In one embodiment, the polypeptide sequence of an Fc monomer is substantially similar to an Fc polypeptide sequence of: an IgG₁ Fc region, an IgG₂ Fc region, an IgG₃ Fc region, an IgG₄ Fc region, an IgM Fc region, an IgA Fc region, an IgD Fc region and an IgE Fc region. (See, e.g., Padlan, Molecular Immunology, 31(3), 169-217 (1993)). Because there is some variation between immunoglobulins, and solely for clarity, Fc monomer refers to the last two heavy chain constant region immunoglobulin domains of IgA, IgD, and IgG, and the last three heavy chain constant region immunoglobulin domains of IgE and IgM. As mentioned, the Fc monomer can also include the flexible hinge N-terminal to these domains. For IgA and IgM, the Fc monomer may include the J chain. For IgG, the Fc portion comprises immunoglobulin domains CH2 and CH3 and the hinge between the first two domains and CH2. Although the boundaries of the Fc portion may vary an example for a human IgG heavy chain Fc portion comprising a functional hinge, CH2 and CH3 domain can be defined e.g. to comprise residues D231 (of the hinge domain—corresponding to D234 in Table 1 below) to P476, respectively L476 (for IgG₄) of the carboxyl-terminus of the CH3 domain, wherein the numbering is according to Kabat. The two Fc portion or Fc monomer, which are fused to each other via a peptide linker define the third domain of the antigen-binding molecule of the invention, which may also be defined as scFc domain.

[0169] In one embodiment of the invention it is envisaged that a scFc domain as disclosed herein, respectively the Fc monomers fused to each other are comprised only in the third domain of the antigen-binding molecule.

[0170] In line with the present invention an IgG hinge region can be identified by analogy using the Kabat numbering as set forth in Table 1. In line with the above, it is envisaged that for a hinge domain/region of the present invention the minimal requirement comprises the amino acid residues corresponding to the IgG1 sequence stretch of D231 D234 to P243 according to the Kabat numbering. It is likewise envisaged that a hinge domain/region of the present invention comprises or consists of the IgG1 hinge sequence DKTHTCPPCP (SEQ ID NO) (corresponding to the stretch D234 to P243 as shown in Table 1 below—variations of said sequence are also envisaged provided that the hinge region still promotes dimerization). In a preferred embodiment of the invention the glycosylation site at Kabat position 314 of the CH2 domains in the third domain of the antigen-binding molecule is removed by a N314X substitution, wherein X is any amino acid excluding Q. Said substitution is preferably a N314G substitution. In a more preferred embodiment, said CH2 domain additionally comprises the following substitutions (position according to Kabat) V321C and R309C (these substitutions introduce the intra domain cysteine disulfide bridge at Kabat positions 309 and 321).

[0171] It is also envisaged that the third domain of the antigen-binding molecule of the invention comprises or consists in an amino to carboxyl order: DKTHTCPPCP (SEQ ID NO) (i.e. hinge) —CH2-CH3-linker-DKTHTCPPCP (SEQ ID NO) (i.e. hinge) —CH2-CH3. The peptide linker of the aforementioned antigen-binding molecule is in a preferred embodiment characterized by the amino acid sequence Gly-Gly-Gly-Gly-Ser, i.e. Gly4Ser (SEQ ID NO: 1), or polymers thereof, i.e. (Gly4Ser)x, where x is an integer of 5 or greater (e.g. 5, 6, 7, 8 etc. or greater), 6 being preferred ((Gly4Ser)6). Said construct may further comprise the aforementioned substitutions: N314X, preferably N314G, and/or the further substitutions V321C and R309C. In a preferred embodiment of the antigen-binding molecules of the invention as defined herein before, it is envisaged that the second domain binds to an extracellular epitope of the human and/or the Macaca CD3ε chain.

TABLE 1
Kabat numbering of the amino acid residues of the hinge region

| IMGT numbering | IgG₁ amino acid | Kabat |
|---|---|---|
| for the hinge | translation | numbering |
| 1 | (E) | 226 |
| 2 | P | 227 |
| 3 | K | 228 |
| 4 | S | 232 |
| 5 | C | 233 |
| 6 | D | 234 |
| 7 | K | 235 |
| 8 | T | 236 |
| 9 | H | 237 |
| 10 | T | 238 |
| 11 | C | 239 |
| 12 | P | 240 |
| 13 | P | 241 |
| 14 | C | 242 |
| 15 | P | 243 |

[0172] In further embodiments of the present invention, the hinge domain/region comprises or consists of the IgG2 subtype hinge sequence ERKCCVECPPCP (SEQ ID NO), the IgG3 subtype hinge sequence ELKTPLDTTHTCPRCP (SEQ ID NO) or ELKTPLGDTTHTCPRCP (SEQ ID NO), and/or the IgG4 subtype hinge sequence ESKYGPPCPSCP (SEQ ID NO). The IgG1 subtype hinge sequence may be the following one EPKSCDKTHTCPPCP (as shown in Table 1 and SEQ ID NO). These core hinge regions are thus also envisaged in the context of the present invention.

[0173] The location and sequence of the IgG CH2 and IgG CD3 domain can be identified by analogy using the Kabat numbering as set forth in Table 2:

TABLE 2
Kabat numbering of the amino acid residues of the IgG CH2
and CH3 region

| IgG | CH2 aa | CH2 Kabat | CH3 aa | CH3 Kabat |
|---|---|---|---|---|
| subtype | translation | numbering | translation | numbering |
| IgG₁ | APE . . . KAK | 244 . . . 360 | GQP . . . PGK | 361 . . . 478 |
| IgG₂ | APP . . . KTK | 244 . . . 360 | GQP . . . PGK | 361 . . . 478 |
| IgG₃ | APE . . . KTK | 244 . . . 360 | GQP . . . PGK | 361 . . . 478 |
| IgG₄ | APE . . . KAK | 244 . . . 360 | GQP . . . PGK | 361 . . . 478 |

[0174] In one embodiment of the invention the emphasized bold amino acid residues in the CH3 domain of the first or both Fc monomers are deleted.

[0175] The peptide linker, by whom the polypeptide monomers (“Fc portion” or “Fc monomer”) of the third domain are fused to each other, preferably comprises at least 25 amino acid residues (25, 26, 27, 28, 29, 30 etc.). More preferably, this peptide linker comprises at least 30 amino acid residues (30, 31, 32, 33, 34, 35 etc.). It is also preferred that the linker comprises up to 40 amino acid residues, more preferably up to 35 amino acid residues, most preferably exactly 30 amino acid residues. A preferred embodiment of such peptide linker is characterized by the amino acid sequence Gly-Gly-Gly-Gly-Ser, i.e. Gly₄Ser (SEQ ID NO: 1), or polymers thereof, i.e. (Gly₄Ser)x, where x is an integer of 5 or greater (e.g. 6, 7 or 8). Preferably the integer is 6 or 7, more preferably the integer is 6.

[0176] In the event that a linker is used to fuse the first domain to the second domain, or the first or second domain to the third domain, this linker is preferably of a length and sequence sufficient to ensure that each of the first and second domains can, independently from one another, retain their differential binding specificities. For peptide linkers which connect the at least two binding domains (or two variable domains) in the antigen-binding molecule of the invention, those peptide linkers are preferred which comprise only a few number of amino acid residues, e.g. 12 amino acid residues or less. Thus, peptide linkers of 12, 11, 10, 9, 8, 7, 6 or 5 amino acid residues are preferred. An envisaged peptide linker with less than 5 amino acids comprises 4, 3, 2 or one amino acid(s), wherein Gly-rich linkers are preferred. A preferred embodiment of the peptide linker for a fusion the first and the second domain is depicted in SEQ ID NO:1. A preferred linker embodiment of the peptide linker for fusing the second and the third domain is a (Gly)₄-linker, also called G₄-linker.

[0177] A particularly preferred “single” amino acid in the context of one of the above described “peptide linker” is Gly. Accordingly, said peptide linker may consist of the single amino acid Gly. In a preferred embodiment of the invention a peptide linker is characterized by the amino acid sequence Gly-Gly-Gly-Gly-Ser, i.e. Gly₄Ser (SEQ ID NO: 1), or polymers thereof, i.e. (Gly₄Ser)x, where x is an integer of 1 or greater (e.g. 2 or 3). Preferred linkers are depicted in SEQ ID NOs: 1 to 12. The characteristics of said peptide linker, which comprise the absence of the promotion of secondary structures, are known in the art and are described e.g. in Dall'Acqua et al. (Biochem. (1998) 37, 9266-9273), Cheadle et al. (Mol Immunol (1992) 29, 21-30) and Raag and Whitlow (FASEB (1995) 9(1), 73-80). Peptide linkers which furthermore do not promote any secondary structures are preferred. The linkage of said domains to each other can be provided, e.g., by genetic engineering, as described in the examples. Methods for preparing fused and operatively linked bispecific single chain constructs and expressing them in mammalian cells or bacteria are well-known in the art (e.g. WO 99/54440 or Sambrook et al., Molecular Cloning: A Laboratory Manual, Cold Spring Harbor Laboratory Press, Cold Spring Harbor, N.Y., 2001).

[0178] In a preferred embodiment of the antigen-binding molecule or the present invention the first and second domain form an antigen-binding molecule in a format selected from the group consisting of (scFv)₂, scFv-single domain mAb, diabody and oligomers of any of these formats.

[0179] According to a particularly preferred embodiment, and as documented in the appended examples, the first and the second domain of the antigen-binding molecule of the invention is a “bispecific single chain antigen-binding molecule”, more preferably a bispecific “single chain Fv” (scFv). Although the two domains of the Fv fragment, VL and VH, are coded for by separate genes, they can be joined, using recombinant methods, by a synthetic linker—as described hereinbefore—that enables them to be made as a single protein chain in which the VL and VH regions pair to form a monovalent molecule; see e.g., Huston et al. (1988) Proc. Natl. Acad. Sci USA 85:5879-5883). These antibody fragments are obtained using conventional techniques known to those with skill in the art, and the fragments are evaluated for function in the same manner as are whole or full-length antibodies. A single-chain variable fragment (scFv) is hence a fusion protein of the variable region of the heavy chain (VH) and of the light chain (VL) of immunoglobulins, usually connected with a short linker peptide as described herein. The linker is usually rich in glycine for flexibility, as well as serine or threonine for solubility, and can either connect the N-terminus of the VH with the C-terminus of the VL, or vice versa. This protein retains the specificity of the original immunoglobulin, despite removal of the constant regions and introduction of the linker.

[0180] Bispecific single chain antigen-binding molecules are known in the art and are described in WO 99/54440, Mack, J. Immunol. (1997), 158, 3965-3970, Mack, PNAS, (1995), 92, 7021-7025, Kufer, Cancer Immunol. Immunother., (1997), 45, 193-197, Löffler, Blood, (2000), 95, 6, 2098-2103, Brühl, Immunol., (2001), 166, 2420-2426, Kipriyanov, J. Mol. Biol., (1999), 293, 41-56. Techniques described for the production of single chain antibodies (see, inter alia, U.S. Pat. No. 4,946,778, Kontermann and Dübel (2010), loc. cit. and Little (2009), loc. cit.) can be adapted to produce single chain antigen-binding molecules specifically recognizing (an) elected target(s).

[0181] Bivalent (also called divalent) or bispecific single-chain variable fragments (bi-scFvs or di-scFvs having the format (scFv)₂ can be engineered by linking two scFv molecules (e.g. with linkers as described hereinbefore). If these two scFv molecules have the same binding specificity, the resulting (scFv)₂ molecule will preferably be called bivalent (i.e. it has two valences for the same target epitope). If the two scFv molecules have different binding specificities, the resulting (scFv)₂ molecule will preferably be called bispecific. The linking can be done by producing a single peptide chain with two VH regions and two VL regions, yielding tandem scFvs (see e.g. Kufer P. et al., (2004) Trends in Biotechnology 22(5):238-244). Another possibility is the creation of scFv molecules with linker peptides that are too short for the two variable regions to fold together (e.g. about five amino acids), forcing the scFvs to dimerize. This type is known as diabodies (see e.g. Hollinger, Philipp et al., (July 1993) Proceedings of the National Academy of Sciences of the United States of America 90 (14): 6444-8).

[0182] In line with this invention either the first, the second or the first and the second domain may comprise a single domain antibody, respectively the variable domain or at least the CDRs of a single domain antibody. Single domain antibodies comprise merely one (monomeric) antibody variable domain which is able to bind selectively to a specific antigen, independently of other V regions or domains. The first single domain antibodies were engineered from heavy chain antibodies found in camelids, and these are called V_{H}H fragments. Cartilaginous fishes also have heavy chain antibodies (IgNAR) from which single domain antibodies called V_{NAR} fragments can be obtained. An alternative approach is to split the dimeric variable domains from common immunoglobulins e.g. from humans or rodents into monomers, hence obtaining VH or VL as a single domain Ab. Although most research into single domain antibodies is currently based on heavy chain variable domains, nanobodies derived from light chains have also been shown to bind specifically to target epitopes. Examples of single domain antibodies are called sdAb, nanobodies or single variable domain antibodies.

[0183] A (single domain mAb)₂ is hence a monoclonal antigen-binding molecule composed of (at least) two single domain monoclonal antibodies, which are individually selected from the group comprising V_{H}, V_{L}, V_{H}H and V_{NAR}. The linker is preferably in the form of a peptide linker. Similarly, an “scFv-single domain mAb” is a monoclonal antigen-binding molecule composed of at least one single domain antibody as described above and one scFv molecule as described above. Again, the linker is preferably in the form of a peptide linker.

[0184] Whether or not an antigen-binding molecule competes for binding with another given antigen-binding molecule can be measured in a competition assay such as a competitive ELISA or a cell-based competition assay. Avidin-coupled microparticles (beads) can also be used. Similar to an avidin-coated ELISA plate, when reacted with a biotinylated protein, each of these beads can be used as a substrate on which an assay can be performed. Antigen is coated onto a bead and then precoated with the first antibody. The second antibody is added and any additional binding is determined. Possible means for the read-out includes flow cytometry.

[0185] T cells or T lymphocytes are a type of lymphocyte (itself a type of white blood cell) that play a central role in cell-mediated immunity. There are several subsets of T cells, each with a distinct function. T cells can be distinguished from other lymphocytes, such as B cells and NK cells, by the presence of a T cell receptor (TCR) on the cell surface. The TCR is responsible for recognizing antigens bound to major histocompatibility complex (MHC) molecules and is composed of two different protein chains. In 95% of the T cells, the TCR consists of an alpha (a) and beta (D) chain. When the TCR engages with antigenic peptide and MHC (peptide/MHC complex), the T lymphocyte is activated through a series of biochemical events mediated by associated enzymes, co-receptors, specialized adaptor molecules, and activated or released transcription factors.

[0186] The CD3 receptor complex is a protein complex and is composed of four chains. In mammals, the complex contains a CD3γ (gamma) chain, a CD36 (delta) chain, and two CD3ε (epsilon) chains. These chains associate with the T cell receptor (TCR) and the so-called ((zeta) chain to form the T cell receptor CD3 complex and to generate an activation signal in T lymphocytes. The CD3γ (gamma), CD36 (delta), and CD3ε (epsilon) chains are highly related cell-surface proteins of the immunoglobulin superfamily containing a single extracellular immunoglobulin domain. The intracellular tails of the CD3 molecules contain a single conserved motif known as an immunoreceptor tyrosine-based activation motif or ITAM for short, which is essential for the signaling capacity of the TCR. The CD3 epsilon molecule is a polypeptide which in humans is encoded by the CD3ε gene which resides on chromosome 11. The most preferred epitope of CD3 epsilon is comprised within amino acid residues 1-27 of the human CD3 epsilon extracellular domain. It is envisaged that antigen-binding molecules according to the present invention typically and advantageously show less unspecific T cell activation, which is not desired in specific immunotherapy. This translates to a reduced risk of side effects.

[0187] The redirected lysis of target cells via the recruitment of T cells by a multispecific, at least bispecific, antigen-binding molecule involves cytolytic synapse formation and delivery of perforin and granzymes. The engaged T cells are capable of serial target cell lysis, and are not affected by immune escape mechanisms interfering with peptide antigen processing and presentation, or clonal T cell differentiation; see, for example, WO 2007/042261.

[0188] Cytotoxicity mediated by antigen-binding molecules of the invention can be measured in various ways. Effector cells can be e.g. stimulated enriched (human) CD8 positive T cells or unstimulated (human) peripheral blood mononuclear cells (PBMC). If the target cells are of macaque origin or express or are transfected with macaque CS1, BCMA, CD20, CD22, FLT3, CD123, CLL1, MSLN, or EpCAM which is bound by the first domain, the effector cells should also be of macaque origin such as a macaque T cell line, e.g. 4119LnPx. The target cells should express (at least the extracellular domain of) CS1, BCMA, CD20, CD22, FLT3, CD123, CLL1, MSLN, or EpCAM, e.g. human or macaque CS1, BCMA, CD20, CD22, FLT3, CD123, CLL1, MSLN, or EpCAM. Target cells can be a cell line (such as CHO) which is stably or transiently transfected with CS1, BCMA, CD20, CD22, FLT3, CD123, CLL1, MSLN, or EpCAM, e.g. human or macaque CS1, BCMA, CD20, CD22, FLT3, CD123, CLL1, MSLN, or EpCAM. Usually EC₅₀ values are expected to be lower with target cell lines expressing higher levels of CS1, BCMA, CD20, CD22, FLT3, CD123, CLL1, MSLN, or EpCAM on the cell surface. The effector to target cell (E:T) ratio is usually about 10:1, but can also vary. Cytotoxic activity of CS1, BCMA, CD20, CD22, FLT3, CD123, CLL1, MSLN, or EpCAMbispecific antigen-binding molecules can be measured in a ⁵¹Cr-release assay (incubation time of about 18 hours) or in a in a FACS-based cytotoxicity assay (incubation time of about 48 hours). Modifications of the assay incubation time (cytotoxic reaction) are also possible. Other methods of measuring cytotoxicity are well-known to the skilled person and comprise MTT or MTS assays, ATP-based assays including bioluminescent assays, the sulforhodamine B (SRB) assay, WST assay, clonogenic assay and the ECIS technology.

[0189] The cytotoxic activity mediated by CS1, BCMA, CD20, CD22, FLT3, CD123, CLL1, MSLN, or EpCAMxCD3 bispecific antigen-binding molecules of the present invention is preferably measured in a cell-based cytotoxicity assay. It may also be measured in a ⁵¹Cr-release assay. It is represented by the EC₅₀ value, which corresponds to the half maximal effective concentration (concentration of the antigen-binding molecule which induces a cytotoxic response halfway between the baseline and maximum). Preferably, the EC₅₀ value of the CS1, BCMA, CD20, CD22, FLT3, CD123, CLL1, MSLN, or EpCAMxCD3 bispecific antigen-binding molecules is ≤5000 pM or ≤4000 pM, more preferably ≤3000 pM or ≤2000 pM, even more preferably ≤1000 pM or ≤500 pM, even more preferably ≤400 pM or ≤300 pM, even more preferably ≤200 pM, even more preferably ≤100 pM, even more preferably ≤50 pM, even more preferably ≤20 pM or ≤10 pM, and most preferably 5 pM.

[0190] The above given EC₅₀ values can be measured in different assays. The skilled person is aware that an EC₅₀ value can be expected to be lower when stimulated/enriched CD8⁺ T cells are used as effector cells, compared with unstimulated PBMC. It can furthermore be expected that the EC₅₀ values are lower when the target cells express a high number of CS1, BCMA, CD20, CD22, FLT3, CD123, CLL1, MSLN, or EpCAM compared with a low target expression rat. For example, when stimulated/enriched human CD8⁺ T cells are used as effector cells (and either CS1, BCMA, CD20, CD22, FLT3, CD123, CLL1, MSLN, or EpCAM transfected cells such as CHO cells or CS1, BCMA, CD20, CD22, FLT3, CD123, CLL1, MSLN, or EpCAM positive human cell lines are used as target cells), the EC₅₀ value of the CS1, BCMA, CD20, CD22, FLT3, CD123, CLL1, MSLN, or EpCAMxCD3 bispecific antigen-binding molecule is preferably ≤1000 pM, more preferably ≤500 pM, even more preferably ≤250 pM, even more preferably ≤100 pM, even more preferably ≤50 pM, even more preferably ≤10 pM, and most preferably ≤5 pM. When human PBMCs are used as effector cells, the EC₅₀ value of the CS1, BCMA, CD20, CD22, FLT3, CD123, CLL1, MSLN, or EpCAMxCD3 bispecific antigen-binding molecule is preferably ≤5000 pM or ≤4000 pM (in particular when the target cells are CS1, BCMA, CD20, CD22, FLT3, CD123, CLL1, MSLN, or EpCAM positive human cell lines), more preferably ≤2000 pM (in particular when the target cells are CS1, BCMA, CD20, CD22, FLT3, CD123, CLL1, MSLN, or EpCAM transfected cells such as CHO cells), more preferably 1000 pM or ≤500 pM, even more preferably ≤200 pM, even more preferably ≤150 pM, even more preferably ≤100 pM, and most preferably ≤50 pM, or lower. When a macaque T cell line such as LnPx4l 19 is used as effector cells, and a macaque CS1, BCMA, CD20, CD22, FLT3, CD123, CLL1, MSLN, or EpCAM transfected cell line such as CHO cells is used as target cell line, the EC₅₀ value of the CS1, BCMA, CD20, CD22, FLT3, CD123, CLL1, MSLN, or EpCAMxCD3 bispecific antigen-binding molecule is preferably ≤2000 pM or ≤1500 pM, more preferably ≤1000 pM or ≤500 pM, even more preferably ≤300 pM or ≤250 pM, even more preferably ≤100 pM, and most preferably ≤50 pM.

[0191] Preferably, the CS1, BCMA, CD20, CD22, FLT3, CD123, CLL1, MSLN, or EpCAMxCD3 bispecific antigen-binding molecules of the present invention do not induce/mediate lysis or do not essentially induce/mediate lysis of CS1, BCMA, CD20, CD22, FLT3, CD123, CLL1, MSLN, or EpCAM negative cells such as CHO cells. The term “do not induce lysis”, “do not essentially induce lysis”, “do not mediate lysis” or “do not essentially mediate lysis” means that an antigen-binding molecule of the present invention does not induce or mediate lysis of more than 30%, preferably not more than 20%, more preferably not more than 10%, particularly preferably not more than 9%, 8%, 7%, 6% or 5% of CS1, BCMA, CD20, CD22, FLT3, CD123, CLL1, MSLN, or EpCAM negative cells, whereby lysis of a CS1, BCMA, CD20, CD22, FLT3, CD123, CLL1, MSLN, or EpCAM positive human cell line is set to be 100%. This usually applies for concentrations of the antigen-binding molecule of up to 500 nM. The skilled person knows how to measure cell lysis without further ado. Moreover, the present specification teaches specific instructions how to measure cell lysis.

[0192] The difference in cytotoxic activity between the monomeric and the dimeric isoform of individual CS1, BCMA, CD20, CD22, FLT3, CD123, CLL1, MSLN, or EpCAMxCD3 bispecific antigen-binding molecules is referred to as “potency gap”. This potency gap can e.g. be calculated as ratio between EC₅₀ values of the molecule's monomeric and dimeric form. Potency gaps of the CS1, BCMA, CD20, CD22, FLT3, CD123, CLL1, MSLN, or EpCAMxCD3 bispecific antigen-binding molecules of the present invention are preferably ≤5, more preferably ≤4, even more preferably ≤3, even more preferably ≤2 and most preferably ≤1.

[0193] The first and/or the second (or any further) binding domain(s) of the antigen-binding molecule of the invention is/are preferably cross-species specific for members of the mammalian order of primates. Cross-species specific CD3 binding domains are, for example, described in WO 2008/119567. According to one embodiment, the first and/or second binding domain, in addition to binding to human CS1, BCMA, CD20, CD22, FLT3, CD123, CLL1, MSLN, or EpCAM and human CD3, respectively, will also bind to CS1, BCMA, CD20, CD22, FLT3, CD123, CLL1, MSLN, or EpCAM/CD3 of primates including (but not limited to) new world primates (such as Callithrix jacchus, Saguinus Oedipus or Saimiri sciureus), old world primates (such baboons and macaques), gibbons, and non-human homininae.

[0194] In one embodiment of the antigen-binding molecule of the invention the first domain binds to human CS1, BCMA, CD20, CD22, FLT3, CD123, CLL1, MSLN, or EpCAM and further binds to macaque CS1, BCMA, CD20, CD22, FLT3, CD123, CLL1, MSLN, or EpCAM, such as CS1, BCMA, CD20, CD22, FLT3, CD123, CLL1, MSLN, or EpCAM ofMacacafascicularis, and more preferably, to macaque CS1, BCMA, CD20, CD22, FLT3, CD123, CLL1, MSLN, or EpCAM expressed on the surface of cells, e.g. such as CHO or 293 cells. The affinity of the first domain for CS1, BCMA, CD20, CD22, FLT3, CD123, CLL1, MSLN, or EpCAM, preferably for human CS1, BCMA, CD20, CD22, FLT3, CD123, CLL1, MSLN, or EpCAM, is preferably ≤100 nM or ≤50 nM, more preferably ≤25 nM or ≤20 nM, more preferably ≤15 nM or ≤10 nM, even more preferably ≤5 nM, even more preferably ≤2.5 nM or ≤2 nM, even more preferably ≤1 nM, even more preferably ≤0.6 nM, even more preferably ≤0.5 nM, and most preferably ≤0.4 nM. The affinity can be measured for example in a BIAcore assay or in a Scatchard assay. Other methods of determining the affinity are also well-known to the skilled person. The affinity of the first domain for macaque CS1, BCMA, CD20, CD22, FLT3, CD123, CLL1, MSLN, or EpCAM is preferably ≤15 nM, more preferably ≤10 nM, even more preferably ≤5 nM, even more preferably ≤1 nM, even more preferably ≤0.5 nM, even more preferably ≤0.1 nM, and most preferably ≤0.05 nM or even ≤0.01 nM.

[0195] Preferably the affinity gap of the antigen-binding molecules according to the invention for binding macaque CS1, BCMA, CD20, CD22, FLT3, CD123, CLL1, MSLN, or EpCAM versus human CS1, BCMA, CD20, CD22, FLT3, CD123, CLL1, MSLN, or EpCAM [ma CS1, BCMA, CD20, CD22, FLT3, CD123, CLL1, MSLN, or EpCAM: hu CS1, BCMA, CD20, CD22, FLT3, CD123, CLL1, MSLN, or EpCAM] (as determined e.g. by BiaCore or by Scatchard analysis) is <100, preferably <20, more preferably <15, further preferably <10, even more preferably <8, more preferably <6 and most preferably <2. Preferred ranges for the affinity gap of the antigen-binding molecules according to the invention for binding macaque CS1, BCMA, CD20, CD22, FLT3, CD123, CLL1, MSLN, or EpCAM versus human CS1, BCMA, CD20, CD22, FLT3, CD123, CLL1, MSLN, or EpCAM are between 0.1 and 20, more preferably between 0.2 and 10, even more preferably between 0.3 and 6, even more preferably between 0.5 and 3 or between 0.5 and 2.5, and most preferably between 0.5 and 2 or between 0.6 and 2.

[0196] The third binding domain of the antigen-binding molecule of the invention binds to human CD3 epsilon and/or to Macaca CD3 epsilon. In a preferred embodiment the second domain further binds to Callithrix jacchus, Saguinus Oedipus or Saimiri sciureus CD3 epsilon. Callithrix jacchus and Saguinus oedipus are both new world primate belonging to the family of Callitrichidae, while Saimiri sciureus is a new world primate belonging to the family of Cebidae. Said binding domain may preferably be referred to in Table 5 as “12C” or “12C0”.

[0197] It is preferred for the antigen-binding molecule of the present invention that the third binding domain which binds to an extracellular epitope of the human and/or the Macaca CD3 epsilon chain comprises a VL region comprising CDR-L1, CDR-L2 and CDR-L3 selected from:

(a) CDR-L1 as depicted in SEQ ID NO: 27 of WO 2008/119567, CDR-L2 as depicted in SEQ ID NO: 28 of WO 2008/119567 and CDR-L3 as depicted in SEQ ID NO: 29 of WO 2008/119567;
(b) CDR-L1 as depicted in SEQ ID NO: 117 of WO 2008/119567, CDR-L2 as depicted in SEQ ID NO: 118 of WO 2008/119567 and CDR-L3 as depicted in SEQ ID NO: 119 of WO 2008/119567; and
(c) CDR-L1 as depicted in SEQ ID NO: 153 of WO 2008/119567, CDR-L2 as depicted in SEQ ID NO: 154 of WO 2008/119567 and CDR-L3 as depicted in SEQ ID NO: 155 of WO 2008/119567.

[0198] In a furthermore preferred embodiment of the antigen-binding molecule of the present invention, the third domain which binds to an extracellular epitope of the human and/or the Macaca CD3 epsilon chain comprises a VH region comprising CDR-H1, CDR-H2 and CDR-H3 selected from:

(a) CDR-H1 as depicted in SEQ ID NO: 12 of WO 2008/119567, CDR-H2 as depicted in SEQ ID NO: 13 of WO 2008/119567 and CDR-H3 as depicted in SEQ ID NO: 14 of WO 2008/119567;
(b) CDR-H1 as depicted in SEQ ID NO: 30 of WO 2008/119567, CDR-H2 as depicted in SEQ ID NO: 31 of WO 2008/119567 and CDR-H3 as depicted in SEQ ID NO: 32 of WO 2008/119567;
(c) CDR-H1 as depicted in SEQ ID NO: 48 of WO 2008/119567, CDR-H2 as depicted in SEQ ID NO: 49 of WO 2008/119567 and CDR-H3 as depicted in SEQ ID NO: 50 of WO 2008/119567;
(d) CDR-H1 as depicted in SEQ ID NO: 66 of WO 2008/119567, CDR-H2 as depicted in SEQ ID NO: 67 of WO 2008/119567 and CDR-H3 as depicted in SEQ ID NO: 68 of WO 2008/119567;
(e) CDR-H1 as depicted in SEQ ID NO: 84 of WO 2008/119567, CDR-H2 as depicted in SEQ ID NO: 85 of WO 2008/119567 and CDR-H3 as depicted in SEQ ID NO: 86 of WO 2008/119567;
(f) CDR-H1 as depicted in SEQ ID NO: 102 of WO 2008/119567, CDR-H2 as depicted in SEQ ID NO: 103 of WO 2008/119567 and CDR-H3 as depicted in SEQ ID NO: 104 of WO 2008/119567;
(g) CDR-H1 as depicted in SEQ ID NO: 120 of WO 2008/119567, CDR-H2 as depicted in SEQ ID NO: 121 of WO 2008/119567 and CDR-H3 as depicted in SEQ ID NO: 122 of WO 2008/119567;
(h) CDR-H1 as depicted in SEQ ID NO: 138 of WO 2008/119567, CDR-H2 as depicted in SEQ ID NO: 139 of WO 2008/119567 and CDR-H3 as depicted in SEQ ID NO: 140 of WO 2008/119567;
(i) CDR-H1 as depicted in SEQ ID NO: 156 of WO 2008/119567, CDR-H2 as depicted in SEQ ID NO: 157 of WO 2008/119567 and CDR-H3 as depicted in SEQ ID NO: 158 of WO 2008/119567; and
(j) CDR-H1 as depicted in SEQ ID NO: 174 of WO 2008/119567, CDR-H2 as depicted in SEQ ID NO: 175 of WO 2008/119567 and CDR-H3 as depicted in SEQ ID NO: 176 of WO 2008/119567.

[0199] In a preferred embodiment of the antigen-binding molecule of the invention the above described three groups of VL CDRs are combined with the above described ten groups of VH CDRs within the third binding domain to form (30) groups, each comprising CDR-L 1-3 and CDR-H1-3.

[0200] It is preferred for the antigen-binding molecule of the present invention that the third domain which binds to CD3 comprises a VL region selected from the group consisting of those depicted in SEQ ID NOs: 17, 21, 35, 39, 53, 57, 71, 75, 89, 93, 107, 111, 125, 129, 143, 147, 161, 165, 179 or 183 of WO 2008/119567 or as depicted in SEQ ID NO: 13 according to the present invention.

[0201] It is also preferred that the third domain which binds to CD3 comprises a VH region selected from the group consisting of those depicted in SEQ ID NO: 15, 19, 33, 37, 51, 55, 69, 73, 87, 91, 105, 109, 123, 127, 141, 145, 159, 163, 177 or 181 of WO 2008/119567 or as depicted in SEQ ID NO: 14.

[0202] More preferably, the antigen-binding molecule of the present invention is characterized by a third domain which binds to CD3 comprising a VL region and a VH region selected from the group consisting of:

(a) a VL region as depicted in SEQ ID NO: 17 or 21 of WO 2008/119567 and a VH region as depicted in SEQ ID NO: 15 or 19 of WO 2008/119567;
(b) a VL region as depicted in SEQ ID NO: 35 or 39 of WO 2008/119567 and a VH region as depicted in SEQ ID NO: 33 or 37 of WO 2008/119567;
(c) a VL region as depicted in SEQ ID NO: 53 or 57 of WO 2008/119567 and a VH region as depicted in SEQ ID NO: 51 or 55 of WO 2008/119567;
(d) a VL region as depicted in SEQ ID NO: 71 or 75 of WO 2008/119567 and a VH region as depicted in SEQ ID NO: 69 or 73 of WO 2008/119567;
(e) a VL region as depicted in SEQ ID NO: 89 or 93 of WO 2008/119567 and a VH region as depicted in SEQ ID NO: 87 or 91 of WO 2008/119567;
(f) a VL region as depicted in SEQ ID NO: 107 or 111 of WO 2008/119567 and a VH region as depicted in SEQ ID NO: 105 or 109 of WO 2008/119567;
(g) a VL region as depicted in SEQ ID NO: 125 or 129 of WO 2008/119567 and a VH region as depicted in SEQ ID NO: 123 or 127 of WO 2008/119567;
(h) a VL region as depicted in SEQ ID NO: 143 or 147 of WO 2008/119567 and a VH region as depicted in SEQ ID NO: 141 or 145 of WO 2008/119567;
(i) a VL region as depicted in SEQ ID NO: 161 or 165 of WO 2008/119567 and a VH region as depicted in SEQ ID NO: 159 or 163 of WO 2008/119567; and
(j) a VL region as depicted in SEQ ID NO: 179 or 183 of WO 2008/119567 and a VH region as depicted in SEQ ID NO: 177 or 181 of WO 2008/119567.

[0203] Also preferred in connection with the antigen-binding molecule of the present invention is a third domain which binds to CD3 comprising a VL region as depicted in SEQ ID NO: 13 and a VH region as depicted in SEQ ID NO: 14.

[0204] According to a preferred embodiment of the antigen-binding molecule of the present invention, the first and/or the third domain have the following format: The pairs of VH regions and VL regions are in the format of a single chain antibody (scFv). The VH and VL regions are arranged in the order VH-VL or VL-VH. It is preferred that the VH-region is positioned N-terminally of a linker sequence, and the VL-region is positioned C-terminally of the linker sequence.

[0205] A preferred embodiment of the above described antigen-binding molecule of the present invention is characterized by the third domain which binds to CD3 comprising an amino acid sequence selected from the group consisting of SEQ ID NOs: 23, 25, 41, 43, 59, 61, 77, 79, 95, 97, 113, 115, 131, 133, 149, 151, 167, 169, 185 or 187 of WO 2008/119567 or as depicted in SEQ ID NO: 15.

[0206] The invention further provides an antigen-binding molecule comprising or having an amino acid sequence (full bispecific antigen-binding molecule) selected from the group consisting of any of 673, 676, 679, 682, 685, 688, 691, 694, 697, 700, 703, 706, 709, 712, 715, 718, 721, 724, 727, 730, 733, 736, 739, 742, 745, 748, 751, 754, 757, 760, 763, 766, 769, 772, 775, 778, 781, 784, 787, 790, 793, 796, 799, 802, 805, 808, 811, 814, 817, 820, 823, 826, 829, 832, 835, 838, 841, 844, 847, 850, 853, 856, 859, 862, 865, 868, 871, 1437, 1440, 1443, 1446, 1449, 1452, 1455, 1458, 1461, 1464, 1467, 1470, 1473, 1476, 1479, 1482, 1485, 1488, 1499, 1667, 1670, 1673, 1676, 1679, 1682, 1685, 1688, 1691, 1694, 1697, 1700, 1703, 1706, 1709, 1712, 1715, 1718, 1721, 1724, 1727, 1730, 1733, 1736, 1739, 1742, 1745, 1748, 1751, 1754, 1757, 1760, 1763, 1766, 1769, 1772, 1775, 1778, 1781, 1784, 1787, 1790, 1793, 1796, 1799, 1802, 1805, 1808, 1811, 1814, 1817, 1820, 1823, 1826, 1829, 1838, 1851, 1864, 1877, 1890, 1903, 1916, 1933, 1946, 1959, 1972, 1985, 1998, 2011, 2024, 2037, 2050, 2063, 2076, 2089, 2102, 2115, 2128, 2141, 2154, 2167, 2180, 2194, 2206, 2219, 2232, 2245, 2258, 2262, 2270, 2271, 2280, 2281, 2290, 2291, 2300, 2301, 2310, 2311, 2320, 2321, 2330, 2331, 2340, 2341, 2350, 2351, 2360, 2361, 2370, 2371, 2380, 2381, 2390, 2391, 2400, 2401, 2410, 2411, 2420, 2421, 2430, 2431, 2440, 2441, 2450, 2451, 2460, 2461, 2470, 2471, 2480, 2481, 2490, 2491, 2500, 2501, 2510, 2511, 2520, 2521, 2530, 2531, 2540, 2541, 2550, 2551, 2560, 2561, 2570, 2571, 2580, 2581, 2590, 2591, 2600, 2601, 2610, 2611, 2620, 2621, 2630, 2631, 2640, 2641, 2650, 2651, 2660, 2661, 2670, 2671, 2680, 2681, 2690, 2691, 2700, 2701, 2710, 2711, 2720, 2721, 2730, 2731, 2740, 2741, 2750, 2751, 2760, 2761, 2770, 2771, 2780, 2781, 2790, 2791, 2800, 2801, 2810, 2811, 2820, 2821, 2830, 2831, 2840, 2841, 2850, 2851, 2860, 2861, 2870, 2871, 2880, 2881, 2890, 2891, 2900, 2901, 2910, 2911, 2920, 2921, 2930, 2931, 2940, 2941, 2950, 2951, 2960, 2961, 2970, 2971, 2980, 2981, 2990, 2991, 3000, 3001, 3010, 3011, 3020, 3021, 3030, 3031, 3040, 3041, 3050, 3051, 3060, 3061, 3070, 3071, 3080, 3081, 3090, 3091, 3100, 3101, 3110, 3111, 3120, 3121, 3130, 3131, 3140, 3141, 3150, 3151, 3160, 3161, 3170, 3171, 3180, 3181, 3190, 3191, 3200, 3201, 3210, 3211, 3220, 3221, 3231, 3240, 3241, 3250, 3251, 3260, 3261, 3270, 3271, 3280, 3281, 3290, 3291, 3300, 3301, 3310, 3311, 3320, 3321, 3330, 3331, 3340, 3341, 3344, 3345, 3356, 3367, 3378, 3389, 3400, 3411, 3422, 3433, 3444, 3455, 3466, 3477, 3488, 3499, 3510, 3521, 3532, 3543, 3554, 3565, 3576, 3579, 382, 3585, 3588, 3591, 3594, 3597, 3600, 3603, 3606, 3609, 3612, 3615, 3618, 3621, 3624, 3627, 3630, 3633, 3636, 3639, 3642, 3645, 3648, 3651, 3654, 3657, 3660, 3663, 3666, 3669, 3672, 3675, 3678, 3689, 3700, 3704, 3705, 3708, 3709, 3710, 3711, 3722, 3733, 3736, 3739, 3744, 3747, 3748, 3756, 3757, 3761, and 3762, preferably 1437, or having an amino acid sequence having at least 90, 91, 92, 93, 94 95, 96, 97, 98 or 99% identity to said sequences.

[0207] Covalent modifications of the antigen-binding molecules are also included within the scope of this invention, and are generally, but not always, done post-translationally. For example, several types of covalent modifications of the antigen-binding molecule are introduced into the molecule by reacting specific amino acid residues of the antigen-binding molecule with an organic derivatizing agent that is capable of reacting with selected side chains or the N- or C-terminal residues.

[0208] Cysteinyl residues most commonly are reacted with α-haloacetates (and corresponding amines), such as chloroacetic acid or chloroacetamide, to give carboxymethyl or carboxyamidomethyl derivatives. Cysteinyl residues also are derivatized by reaction with bromotrifluoroacetone, α-bromo-β-(5-imidozoyl)propionic acid, chloroacetyl phosphate, N-alkylmaleimides, 3-nitro-2-pyridyl disulfide, methyl 2-pyridyl disulfide, p-chloromercuribenzoate, 2-chloromercuri-4-nitrophenol, or chloro-7-nitrobenzo-2-oxa-1,3-diazole.

[0209] Histidyl residues are derivatized by reaction with diethylpyrocarbonate at pH 5.5-7.0 because this agent is relatively specific for the histidyl side chain. Para-bromophenacyl bromide also is useful; the reaction is preferably performed in 0.1 M sodium cacodylate at pH 6.0. Lysinyl and amino terminal residues are reacted with succinic or other carboxylic acid anhydrides. Derivatization with these agents has the effect of reversing the charge of the lysinyl residues. Other suitable reagents for derivatizing alpha-amino-containing residues include imidoesters such as methyl picolinimidate; pyridoxal phosphate; pyridoxal; chloroborohydride; trinitrobenzenesulfonic acid; O-methylisourea; 2,4-pentanedione; and transaminase-catalyzed reaction with glyoxylate.

[0210] Arginyl residues are modified by reaction with one or several conventional reagents, among them phenylglyoxal, 2,3-butanedione, 1,2-cyclohexanedione, and ninhydrin. Derivatization of arginine residues requires that the reaction be performed in alkaline conditions because of the high pKa of the guanidine functional group. Furthermore, these reagents may react with the groups of lysine as well as the arginine epsilon-amino group.

[0211] The specific modification of tyrosyl residues may be made, with particular interest in introducing spectral labels into tyrosyl residues by reaction with aromatic diazonium compounds or tetranitromethane. Most commonly, N-acetylimidizole and tetranitromethane are used to form O-acetyl tyrosyl species and 3-nitro derivatives, respectively. Tyrosyl residues are iodinated using ¹²⁵I or 1311 to prepare labeled proteins for use in radioimmunoassay, the chloramine T method described above being suitable.

[0212] Carboxyl side groups (aspartyl or glutamyl) are selectively modified by reaction with carbodiimides (R′—N═C═N—R′), where R and R′ are optionally different alkyl groups, such as 1-cyclohexyl-3-(2-morpholinyl-4-ethyl) carbodiimide or 1-ethyl-3-(4-azonia-4,4-dimethylpentyl) carbodiimide. Furthermore, aspartyl and glutamyl residues are converted to asparaginyl and glutaminyl residues by reaction with ammonium ions.

[0213] Derivatization with bifunctional agents is useful for crosslinking the antigen-binding molecules of the present invention to a water-insoluble support matrix or surface for use in a variety of methods. Commonly used crosslinking agents include, e.g., 1,1-bis(diazoacetyl)-2-phenylethane, glutaraldehyde, N-hydroxysuccinimide esters, for example, esters with 4-azidosalicylic acid, homobifunctional imidoesters, including disuccinimidyl esters such as 3,3′-dithiobis(succinimidylpropionate), and bifunctional maleimides such as bis-N-maleimido-1,8-octane. Derivatizing agents such as methyl-3-[(p-azidophenyl)dithio]propioimidate yield photoactivatable intermediates that are capable of forming crosslinks in the presence of light. Alternatively, reactive water-insoluble matrices such as cyanogen bromide-activated carbohydrates and the reactive substrates as described in U.S. Pat. Nos. 3,969,287; 3,691,016; 4,195,128; 4,247,642; 4,229,537; and 4,330,440 are employed for protein immobilization.

[0214] Glutaminyl and asparaginyl residues are frequently deamidated to the corresponding glutamyl and aspartyl residues, respectively. Alternatively, these residues are deamidated under mildly acidic conditions. Either form of these residues falls within the scope of this invention.

[0215] Other modifications include hydroxylation of proline and lysine, phosphorylation of hydroxyl groups of seryl or threonyl residues, methylation of the α-amino groups of lysine, arginine, and histidine side chains (T. E. Creighton, Proteins: Structure and Molecular Properties, W. H. Freeman & Co., San Francisco, 1983, pp. 79-86), acetylation of the N-terminal amine, and amidation of any C-terminal carboxyl group.

[0216] Another type of covalent modification of the antigen-binding molecules included within the scope of this invention comprises altering the glycosylation pattern of the protein. As is known in the art, glycosylation patterns can depend on both the sequence of the protein (e.g., the presence or absence of particular glycosylation amino acid residues, discussed below), or the host cell or organism in which the protein is produced. Particular expression systems are discussed below.

[0217] Glycosylation of polypeptides is typically either N-linked or O-linked. N-linked refers to the attachment of the carbohydrate moiety to the side chain of an asparagine residue. The tri-peptide sequences asparagine-X-serine and asparagine-X-threonine, where X is any amino acid except proline, are the recognition sequences for enzymatic attachment of the carbohydrate moiety to the asparagine side chain. Thus, the presence of either of these tri-peptide sequences in a polypeptide creates a potential glycosylation site. O-linked glycosylation refers to the attachment of one of the sugars N-acetylgalactosamine, galactose, or xylose, to a hydroxyamino acid, most commonly serine or threonine, although 5-hydroxyproline or 5-hydroxylysine may also be used.

[0218] Addition of glycosylation sites to the antigen-binding molecule is conveniently accomplished by altering the amino acid sequence such that it contains one or more of the above-described tri-peptide sequences (for N-linked glycosylation sites). The alteration may also be made by the addition of, or substitution by, one or more serine or threonine residues to the starting sequence (for O-linked glycosylation sites). For ease, the amino acid sequence of an antigen-binding molecule is preferably altered through changes at the DNA level, particularly by mutating the DNA encoding the polypeptide at preselected bases such that codons are generated that will translate into the desired amino acids.

[0219] Another means of increasing the number of carbohydrate moieties on the antigen-binding molecule is by chemical or enzymatic coupling of glycosides to the protein. These procedures are advantageous in that they do not require production of the protein in a host cell that has glycosylation capabilities for N- and O-linked glycosylation. Depending on the coupling mode used, the sugar(s) may be attached to (a) arginine and histidine, (b) free carboxyl groups, (c) free sulfhydryl groups such as those of cysteine, (d) free hydroxyl groups such as those of serine, threonine, or hydroxyproline, (e) aromatic residues such as those of phenylalanine, tyrosine, or tryptophan, or (f) the amide group of glutamine. These methods are described in WO 87/05330, and in Aplin and Wriston, 1981, CRC Crit. Rev. Biochem., pp. 259-306.

[0220] Removal of carbohydrate moieties present on the starting antigen-binding molecule may be accomplished chemically or enzymatically. Chemical deglycosylation requires exposure of the protein to the compound trifluoromethanesulfonic acid, or an equivalent compound. This treatment results in the cleavage of most or all sugars except the linking sugar (N-acetylglucosamine or N-acetylgalactosamine), while leaving the polypeptide intact. Chemical deglycosylation is described by Hakimuddin et al., 1987, Arch. Biochem. Biophys. 259:52 and by Edge et al., 1981, Anal. Biochem. 118:131. Enzymatic cleavage of carbohydrate moieties on polypeptides can be achieved by the use of a variety of endo- and exo-glycosidases as described by Thotakura et al., 1987, Meth. Enzymol. 138:350. Glycosylation at potential glycosylation sites may be prevented by the use of the compound tunicamycin as described by Duskin et al., 1982, J. Biol. Chem. 257:3105. Tunicamycin blocks the formation of protein-N-glycoside linkages.

[0221] Other modifications of the antigen-binding molecule are also contemplated herein. For example, another type of covalent modification of the antigen-binding molecule comprises linking the antigen-binding molecule to various non-proteinaceous polymers, including, but not limited to, various polyols such as polyethylene glycol, polypropylene glycol, polyoxyalkylenes, or copolymers of polyethylene glycol and polypropylene glycol, in the manner set forth in U.S. Pat. Nos. 4,640,835; 4,496,689; 4,301,144; 4,670,417; 4,791,192 or 4,179,337. In addition, as is known in the art, amino acid substitutions may be made in various positions within the antigen-binding molecule, e.g. in order to facilitate the addition of polymers such as PEG.

[0222] In some embodiments, the covalent modification of the antigen-binding molecules of the invention comprises the addition of one or more labels. The labelling group may be coupled to the antigen-binding molecule via spacer arms of various lengths to reduce potential steric hindrance. Various methods for labelling proteins are known in the art and can be used in performing the present invention. The term “label” or “labelling group” refers to any detectable label. In general, labels fall into a variety of classes, depending on the assay in which they are to be detected—the following examples include, but are not limited to:
[0223] a) isotopic labels, which may be radioactive or heavy isotopes, such as radioisotopes or radionuclides (e.g., ³H, ⁴C, ¹⁵N, ³⁵S, ⁸⁹Zr, ⁹⁰Y, ⁹⁹Tc, ¹¹¹In, ¹²⁵I, ¹³¹I)
[0224] b) magnetic labels (e.g., magnetic particles)
[0225] c) redox active moieties
[0226] d) optical dyes (including, but not limited to, chromophores, phosphors and fluorophores) such as fluorescent groups (e.g., FITC, rhodamine, lanthanide phosphors), chemiluminescent groups, and fluorophores which can be either “small molecule” fluors or proteinaceous fluors
[0227] e) enzymatic groups (e.g. horseradish peroxidase, β-galactosidase, luciferase, alkaline phosphatase)
[0228] f) biotinylated groups
[0229] g) predetermined polypeptide epitopes recognized by a secondary reporter (e.g., leucine zipper pair sequences, binding sides for secondary antibodies, metal binding domains, epitope tags, etc.)

[0230] By “fluorescent label” is meant any molecule that may be detected via its inherent fluorescent properties. Suitable fluorescent labels include, but are not limited to, fluorescein, rhodamine, tetramethylrhodamine, eosin, erythrosin, coumarin, methyl-coumarins, pyrene, Malacite green, stilbene, Lucifer Yellow, Cascade BlueJ, Texas Red, IAEDANS, EDANS, BODIPY FL, LC Red 640, Cy 5, Cy 5.5, LC Red 705, Oregon green, the Alexa-Fluor dyes (Alexa Fluor 350, Alexa Fluor 430, Alexa Fluor 488, Alexa Fluor 546, Alexa Fluor 568, Alexa Fluor 594, Alexa Fluor 633, Alexa Fluor 660, Alexa Fluor 680), Cascade Blue, Cascade Yellow and R-phycoerythrin (PE) (Molecular Probes, Eugene, Oreg.), FITC, Rhodamine, and Texas Red (Pierce, Rockford, Ill.), Cy5, Cy5.5, Cy7 (Amersham Life Science, Pittsburgh, Pa.). Suitable optical dyes, including fluorophores, are described in Molecular Probes Handbook by Richard P. Haugland.

[0231] Suitable proteinaceous fluorescent labels also include, but are not limited to, green fluorescent protein, including a Renilla, Ptilosarcus, or Aequorea species of GFP (Chalfie et al., 1994, Science 263:802-805), EGFP (Clontech Laboratories, Inc., Genbank Accession Number U55762), blue fluorescent protein (BFP, Quantum Biotechnologies, Inc. 1801 de Maisonneuve Blvd. West, 8th Floor, Montreal, Quebec, Canada H3H 1J9; Stauber, 1998, Biotechniques 24:462-471; Heim et al., 1996, Curr. Biol. 6:178-182), enhanced yellow fluorescent protein (EYFP, Clontech Laboratories, Inc.), luciferase (Ichiki et al., 1993, J. Immunol. 150:5408-5417), β galactosidase (Nolan et al., 1988, Proc. Natl. Acad. Sci. U.S.A. 85:2603-2607) and Renilla (WO92/15673, WO95/07463, WO98/14605, WO98/26277, WO99/49019, U.S. Pat. Nos. 5,292,658; 5,418,155; 5,683,888; 5,741,668; 5,777,079; 5,804,387; 5,874,304; 5,876,995; 5,925,558).

[0232] The antigen-binding molecule of the invention may also comprise additional domains, which are e.g. helpful in the isolation of the molecule or relate to an adapted pharmacokinetic profile of the molecule. Domains helpful for the isolation of an antigen-binding molecule may be selected from peptide motives or secondarily introduced moieties, which can be captured in an isolation method, e.g. an isolation column. Non-limiting embodiments of such additional domains comprise peptide motives known as Myc-tag, HAT-tag, HA-tag, TAP-tag, GST-tag, chitin binding domain (CBD-tag), maltose binding protein (MBP-tag), Flag-tag, Strep-tag and variants thereof (e.g. StrepII-tag) and His-tag. All herein disclosed antigen-binding molecules may comprise a His-tag domain, which is generally known as a repeat of consecutive His residues in the amino acid sequence of a molecule, preferably of five, and more preferably of six His residues (hexa-histidine). The His-tag may be located e.g. at the N- or C-terminus of the antigen-binding molecule, preferably it is located at the C-terminus. Most preferably, a hexa-histidine tag (HHHHHH) (SEQ ID NO:16) is linked via peptide bond to the C-terminus of the antigen-binding molecule according to the invention. Additionally, a conjugate system of PLGA-PEG-PLGA may be combined with a poly-histidine tag for sustained release application and improved pharmacokinetic profile.

[0233] Amino acid sequence modifications of the antigen-binding molecules described herein are also contemplated. For example, it may be desirable to improve the binding affinity and/or other biological properties of the antigen-binding molecule. Amino acid sequence variants of the antigen-binding molecules are prepared by introducing appropriate nucleotide changes into the antigen-binding molecules nucleic acid, or by peptide synthesis. All of the below described amino acidacid sequence modifications should result in an antigen-binding molecule which still retains the desired biological activity (binding to CS1, BCMA, CD20, CD22, FLT3, CD123, CLL1, MSLN, or EpCAM and to CD3) of the unmodified parental molecule.

[0234] The term “amino acid” or “amino acid residue” typically refers to an amino acid having its art recognized definition such as an amino acid selected from the group consisting of: alanine (Ala or A); arginine (Arg or R); asparagine (Asn or N); aspartic acid (Asp or D); cysteine (Cys or C); glutamine (GIn or Q); glutamic acid (GIu or E); glycine (GIy or G); histidine (His or H); isoleucine (He or I): leucine (Leu or L); lysine (Lys or K); methionine (Met or M); phenylalanine (Phe or F); pro line (Pro or P); serine (Ser or S); threonine (Thr or T); tryptophan (Trp or W); tyrosine (Tyr or Y); and valine (Val or V), although modified, synthetic, or rare amino acids may be used as desired. Generally, amino acids can be grouped as having a nonpolar side chain (e.g., Ala, Cys, He, Leu, Met, Phe, Pro, Val); a negatively charged side chain (e.g., Asp, GIu); a positively charged sidechain (e.g., Arg, His, Lys); or an uncharged polar side chain (e.g., Asn, Cys, GIn, GIy, His, Met, Phe, Ser, Thr, Trp, and Tyr).

[0235] Amino acid modifications include, for example, deletions from, and/or insertions into, and/or substitutions of, residues within the amino acid sequences of the antigen-binding molecules. Any combination of deletion, insertion, and substitution is made to arrive at the final construct, provided that the final construct possesses the desired characteristics. The amino acid changes also may alter post-translational processes of the antigen-binding molecules, such as changing the number or position of glycosylation sites.

[0236] For example, 1, 2, 3, 4, 5, or 6 amino acids may be inserted, substituted or deleted in each of the CDRs (of course, dependent on their length), while 1, 2, 3, 4, 5, 6, 7, 8, 9, 10, 11, 12, 13, 14, 15, 16, 17, 18, 19, 20, or 25 amino acids may be inserted, substituted or deleted in each of the FRs. Preferably, amino acid sequence insertions into the antigen-binding molecule include amino- and/or carboxyl-terminal fusions ranging in length from 1, 2, 3, 4, 5, 6, 7, 8, 9 or 10 residues to polypeptides containing a hundred or more residues, as well as intra-sequence insertions of single or multiple amino acid residues. Corresponding modifications may also performed within the third domain of the antigen-binding molecule of the invention. An insertional variant of the antigen-binding molecule of the invention includes the fusion to the N-terminus or to the C-terminus of the antigen-binding molecule of an enzyme or the fusion to a polypeptide.

[0237] The sites of greatest interest for substitutional mutagenesis include (but are not limited to) the CDRs of the heavy and/or light chain, in particular the hypervariable regions, but FR alterations in the heavy and/or light chain are also contemplated. The substitutions are preferably conservative substitutions as described herein. Preferably, 1, 2, 3, 4, 5, 6, 7, 8, 9, or 10 amino acids may be substituted in a CDR, while 1, 2, 3, 4, 5, 6, 7, 8, 9, 10, 11, 12, 13, 14, 15, 16, 17, 18, 19, 20, or 25 amino acids may be substituted in the framework regions (FRs), depending on the length of the CDR or FR. For example, if a CDR sequence encompasses 6 amino acids, it is envisaged that one, two or three of these amino acids are substituted. Similarly, if a CDR sequence encompasses 15 amino acids it is envisaged that one, two, three, four, five or six of these amino acids are substituted.

[0238] A useful method for identification of certain residues or regions of the antigen-binding molecules that are preferred locations for mutagenesis is called “alanine scanning mutagenesis” as described by Cunningham and Wells in Science, 244: 1081-1085 (1989). Here, a residue or group of target residues within the antigen-binding molecule is/are identified (e.g. charged residues such as arg, asp, his, lys, and glu) and replaced by a neutral or negatively charged amino acid (most preferably alanine or polyalanine) to affect the interaction of the amino acids with the epitope.

[0239] Those amino acid locations demonstrating functional sensitivity to the substitutions are then refined by introducing further or other variants at, or for, the sites of substitution. Thus, while the site or region for introducing an amino acid sequence variation is predetermined, the nature of the mutation per se needs not to be predetermined. For example, to analyze or optimize the performance of a mutation at a given site, alanine scanning or random mutagenesis may be conducted at a target codon or region, and the expressed antigen-binding molecule variants are screened for the optimal combination of desired activity. Techniques for making substitution mutations at predetermined sites in the DNA having a known sequence are well known, for example, M13 primer mutagenesis and PCR mutagenesis. Screening of the mutants is done using assays of antigen binding activities, such as CS1, BCMA, CD20, CD22, FLT3, CD123, CLL1, MSLN, or EpCAM or CD3 binding.

[0240] Generally, if amino acids are substituted in one or more or all of the CDRs of the heavy and/or light chain, it is preferred that the then-obtained “substituted” sequence is at least 60% or 65%, more preferably 70% or 75%, even more preferably 80% or 85%, and particularly preferably 90% or 95% identical to the “original” CDR sequence. This means that it is dependent of the length of the CDR to which degree it is identical to the “substituted” sequence. For example, a CDR having 5 amino acids is preferably 80% identical to its substituted sequence in order to have at least one amino acid substituted. Accordingly, the CDRs of the antigen-binding molecule may have different degrees of identity to their substituted sequences, e.g., CDRL1 may have 80%, while CDRL3 may have 90%.

[0241] Preferred substitutions (or replacements) are conservative substitutions. However, any substitution (including non-conservative substitution or one or more from the “exemplary substitutions” listed in Table 3, below) is envisaged as long as the antigen-binding molecule retains its capability to bind to CS1, BCMA, CD20, CD22, FLT3, CD123, CLL1, MSLN, or EpCAM via the first domain and to CD3 epsilon via the second domain and/or its CDRs have an identity to the then substituted sequence (at least 60% or 65%, more preferably 70% or 75%, even more preferably 80% or 85%, and particularly preferably 90% or 95% identical to the “original” CDR sequence).

[0242] Conservative substitutions are shown in Table 3 under the heading of “preferred substitutions”. If such substitutions result in a change in biological activity, then more substantial changes, denominated “exemplary substitutions” in Table 3, or as further described below in reference to amino acid classes, may be introduced and the products screened for a desired characteristic.

TABLE 3
Amino acid substitutions

| Original | Exemplary Substitutions | Preferred Substitutions |
|---|---|---|
| Ala (A) | val, leu, ile | Val |
| Arg (R) | lys, gln, asn | Lys |
| Asn (N) | gin, his, asp, lys, arg | Gln |
| Asp (D) | glu, asn | Glu |
| Cys (C) | ser, ala | ser |
| Gln (Q) | asn, glu | asn |
| Glu (E) | asp, gln | asp |
| Gly (G) | Ala | ala |
| His (H) | asn, gin, lys, arg | arg |
| Ile (I) | leu, val, met, ala, phe | leu |
| Leu (L) | norleucine, ile, val, met, ala | ile |
| Lys (K) | arg, gln, asn | arg |
| Met (M) | leu, phe, ile | leu |
| Phe (F) | leu, val, ile, ala, tyr | tyr |
| Pro (P) | Ala | ala |
| Ser (S) | Thr | thr |
| Thr (T) | Ser | ser |
| Trp (W) | tyr, phe | tyr |
| Tyr (Y) | trp, phe, thr, ser | phe |
| Val (V) | ile, leu, met, phe, ala | leu |

[0243] Substantial modifications in the biological properties of the antigen-binding molecule of the present invention are accomplished by selecting substitutions that differ significantly in their effect on maintaining (a) the structure of the polypeptide backbone in the area of the substitution, for example, as a sheet or helical conformation, (b) the charge or hydrophobicity of the molecule at the target site, or (c) the bulk of the side chain. Naturally occurring residues are divided into groups based on common side-chain properties: (1) hydrophobic: norleucine, met, ala, val, leu, ile; (2) neutral hydrophilic: cys, ser, thr; asn, gln (3) acidic: asp, glu; (4) basic: his, lys, arg; (5) residues that influence chain orientation: gly, pro; and (6) aromatic: trp, tyr, phe.

[0244] Non-conservative substitutions will entail exchanging a member of one of these classes for another class. Any cysteine residue not involved in maintaining the proper conformation of the antigen-binding molecule may be substituted, generally with serine, to improve the oxidative stability of the molecule and prevent aberrant crosslinking. Conversely, cysteine bond(s) may be added to the antibody to improve its stability (particularly where the antibody is an antibody fragment such as an Fv fragment).

[0245] For amino acid sequences, sequence identity and/or similarity is determined by using standard techniques known in the art, including, but not limited to, the local sequence identity algorithm of Smith and Waterman, 1981, Adv. Appl. Math. 2:482, the sequence identity alignment algorithm of Needleman and Wunsch, 1970, J. Mol. Biol. 48:443, the search for similarity method of Pearson and Lipman, 1988, Proc. Nat. Acad. Sci. U.S.A. 85:2444, computerized implementations of these algorithms (GAP, BESTFIT, FASTA, and TFASTA in the Wisconsin Genetics Software Package, Genetics Computer Group, 575 Science Drive, Madison, Wis.), the Best Fit sequence program described by Devereux et al., 1984, Nucl. Acid Res. 12:387-395, preferably using the default settings, or by inspection. Preferably, percent identity is calculated by FastDB based upon the following parameters: mismatch penalty of 1; gap penalty of 1; gap size penalty of 0.33; and joining penalty of 30, “Current Methods in Sequence Comparison and Analysis,” Macromolecule Sequencing and Synthesis, Selected Methods and Applications, pp 127-149 (1988), Alan R. Liss, Inc.

[0246] An example of a useful algorithm is PILEUP. PILEUP creates a multiple sequence alignment from a group of related sequences using progressive, pairwise alignments. It can also plot a tree showing the clustering relationships used to create the alignment. PILEUP uses a simplification of the progressive alignment method of Feng & Doolittle, 1987, J. Mol. Evol. 35:351-360; the method is similar to that described by Higgins and Sharp, 1989, CABJOS 5:151-153. Useful PILEUP parameters including a default gap weight of 3.00, a default gap length weight of 0.10, and weighted end gaps.

[0247] Another example of a useful algorithm is the BLAST algorithm, described in: Altschul et al., 1990, J. Mol. Biol. 215:403-410; Altschul et al., 1997, Nucleic Acids Res. 25:3389-3402; and Karin et al., 1993, Proc. Natl. Acad. Sci. U.S.A. 90:5873-5787. A particularly useful BLAST program is the WU-BLAST-2 program which was obtained from Altschul et al., 1996, Methods in Enzymology 266:460-480. WU-BLAST-2 uses several search parameters, most of which are set to the default values. The adjustable parameters are set with the following values: overlap span=1, overlap fraction=0.125, word threshold (T)=II. The HSP S and HSP S2 parameters are dynamic values and are established by the program itself depending upon the composition of the particular sequence and composition of the particular database against which the sequence of interest is being searched; however, the values may be adjusted to increase sensitivity.

[0248] An additional useful algorithm is gapped BLAST as reported by Altschul et al., 1993, Nucl. Acids Res. 25:3389-3402. Gapped BLAST uses BLOSUM-62 substitution scores; threshold T parameter set to 9; the two-hit method to trigger ungapped extensions, charges gap lengths of k a cost of 10+k; Xu set to 16, and Xg set to 40 for database search stage and to 67 for the output stage of the algorithms. Gapped alignments are triggered by a score corresponding to about 22 bits.

[0249] Generally, the amino acid homology, similarity, or identity between individual variant CDRs or VH/VL sequences are at least 60% to the sequences depicted herein, and more typically with preferably increasing homologies or identities of at least 65% or 70%, more preferably at least 75% or 80%, even more preferably at least 85%, 90%, 91%, 92%, 93%, 94%, 95%, 96%, 97%, 98%, 99%, and almost 100%. In a similar manner, “percent (%) nucleic acid sequence identity” with respect to the nucleic acid sequence of the binding proteins identified herein is defined as the percentage of nucleotide residues in a candidate sequence that are identical with the nucleotide residues in the coding sequence of the antigen-binding molecule. A specific method utilizes the BLASTN module of WU-BLAST-2 set to the default parameters, with overlap span and overlap fraction set to 1 and 0.125, respectively.

[0250] Generally, the nucleic acid sequence homology, similarity, or identity between the nucleotide sequences encoding individual variant CDRs or VH/VL sequences and the nucleotide sequences depicted herein are at least 60%, and more typically with preferably increasing homologies or identities of at least 65%, 70%, 75%, 80%, 81%, 82%, 83%, 84%, 85%, 86%, 87%, 88%, 89%, 90%, 91%, 92%, 93%, 94%, 95%, 96%, 97%, 98%, or 99%, and almost 100%. Thus, a “variant CDR” or a “variant VH/VL region” is one with the specified homology, similarity, or identity to the parent CDR/VH/VL of the invention, and shares biological function, including, but not limited to, at least 60%, 65%, 70%, 75%, 80%, 81%, 82%, 83%, 84%, 85%, 86%, 87%, 88%, 89%, 90%, 91%, 92%, 93%, 94%, 95%, 96%, 97%, 98%, or 99% of the specificity and/or activity of the parent CDR or VH/VL.

[0251] In one embodiment, the percentage of identity to human germline of the antigen-binding molecules according to the invention is ≥70% or ≥75%, more preferably ≥80% or ≥85%, even more preferably ≥90%, and most preferably ≥91%, ≥92%, ≥93%, ≥94%, ≥95% or even ≥96%. Identity to human antibody germline gene products is thought to be an important feature to reduce the risk of therapeutic proteins to elicit an immune response against the drug in the patient during treatment. Hwang & Foote (“Immunogenicity of engineered antibodies”; Methods 36 (2005) 3-10) demonstrate that the reduction of non-human portions of drug antigen-binding molecules leads to a decrease of risk to induce anti-drug antibodies in the patients during treatment. By comparing an exhaustive number of clinically evaluated antibody drugs and the respective immunogenicity data, the trend is shown that humanization of the V-regions of antibodies makes the protein less immunogenic (average 5.1% of patients) than antibodies carrying unaltered non-human V regions (average 23.59% of patients). A higher degree of identity to human sequences is hence desirable for V-region based protein therapeutics in the form of antigen-binding molecules. For this purpose of determining the germline identity, the V-regions of VL can be aligned with the amino acid sequences of human germline V segments and J segments (http://vbase.mrc-cpe.cam.ac.uk/) using Vector NTI software and the amino acid sequence calculated by dividing the identical amino acid residues by the total number of amino acid residues of the VL in percent. The same can be for the VH segments (http://vbase.mrc-cpe.cam.ac.uk/) with the exception that the VH CDR3 may be excluded due to its high diversity and a lack of existing human germline VH CDR3 alignment partners. Recombinant techniques can then be used to increase sequence identity to human antibody germline genes.

[0252] In a further embodiment, the bispecific antigen-binding molecules of the present invention exhibit high monomer yields under standard research scale conditions, e.g., in a standard two-step purification process. Preferably the monomer yield of the antigen-binding molecules according to the invention is ≥0.25 mg/L supernatant, more preferably ≥0.5 mg/L, even more preferably ≥1 mg/L, and most preferably ≥3 mg/L supernatant.

[0253] Likewise, the yield of the dimeric antigen-binding molecule isoforms and hence the monomer percentage (i.e., monomer: (monomer+dimer)) of the antigen-binding molecules can be determined. The productivity of monomeric and dimeric antigen-binding molecules and the calculated monomer percentage can e.g. be obtained in the SEC purification step of culture supernatant from standardized research-scale production in roller bottles. In one embodiment, the monomer percentage of the antigen-binding molecules is ≥80%, more preferably ≥85%, even more preferably ≥90%, and most preferably ≥95%.

[0254] In one embodiment, the antigen-binding molecules have a preferred plasma stability (ratio of EC50 with plasma to EC50 w/o plasma) of ≤5 or ≤4, more preferably ≤3.5 or ≤3, even more preferably ≤2.5 or ≤2, and most preferably ≤1.5 or ≤1. The plasma stability of an antigen-binding molecule can be tested by incubation of the construct in human plasma at 37° C. for 24 hours followed by EC50 determination in a ⁵¹chromium release cytotoxicity assay. The effector cells in the cytotoxicity assay can be stimulated enriched human CD8 positive T cells. Target cells can e.g. be CHO cells transfected with human CS1, BCMA, CD20, CD22, FLT3, CD123, CLL1, MSLN, or EpCAM. The effector to target cell (E:T) ratio can be chosen as 10:1 or 5:1. The human plasma pool used for this purpose is derived from the blood of healthy donors collected by EDTA coated syringes. Cellular components are removed by centrifugation and the upper plasma phase is collected and subsequently pooled. As control, antigen-binding molecules are diluted immediately prior to the cytotoxicity assay in RPMI-1640 medium. The plasma stability is calculated as ratio of EC50 (after plasma incubation) to EC50 (control).

[0255] It is furthermore preferred that the monomer to dimer conversion of antigen-binding molecules of the invention is low. The conversion can be measured under different conditions and analyzed by high performance size exclusion chromatography. For example, incubation of the monomeric isoforms of the antigen-binding molecules can be carried out for 7 days at 37° C. and concentrations of e.g. 100 μg/ml or 250 μg/ml in an incubator. Under these conditions, it is preferred that the antigen-binding molecules of the invention show a dimer percentage that is ≤5%, more preferably ≤4%, even more preferably ≤3%, even more preferably ≤2.5%, even more preferably ≤2%, even more preferably ≤1.5%, and most preferably ≤1% or ≤0.5% or even 0%.

[0256] It is also preferred that the bispecific antigen-binding molecules of the present invention present with very low dimer conversion after a number of freeze/thaw cycles. For example, the antigen-binding molecule monomer is adjusted to a concentration of 250 μg/ml e.g. in generic formulation buffer and subjected to three freeze/thaw cycles (freezing at −80° C. for 30 min followed by thawing for 30 min at room temperature), followed by high performance SEC to determine the percentage of initially monomeric antigen-binding molecule, which had been converted into dimeric antigen-binding molecule. Preferably the dimer percentages of the bispecific antigen-binding molecules are ≤5%, more preferably ≤4%, even more preferably ≤3%, even more preferably ≤2.5%, even more preferably ≤2%, even more preferably ≤1.5%, and most preferably ≤1% or even ≤0.5%, for example after three freeze/thaw cycles.

[0257] The bispecific antigen-binding molecules of the present invention preferably show a favorable thermostability with aggregation temperatures ≥45° C. or ≥50° C., more preferably ≥52° C. or ≥54° C., even more preferably ≥56° C. or ≥57° C., and most preferably ≥58° C. or ≥59° C. The thermostability parameter can be determined in terms of antibody aggregation temperature as follows: Antibody solution at a concentration 250 pg/ml is transferred into a single use cuvette and placed in a Dynamic Light Scattering (DLS) device. The sample is heated from 40° C. to 70° C. at a heating rate of 0.5° C./min with constant acquisition of the measured radius. Increase of radius indicating melting of the protein and aggregation is used to calculate the aggregation temperature of the antibody.

[0258] Alternatively, temperature melting curves can be determined by Differential Scanning Calorimetry (DSC) to determine intrinsic biophysical protein stabilities of the antigen-binding molecules. These experiments are performed using a MicroCal LLC (Northampton, Mass., USA) VP-DSC device. The energy uptake of a sample containing an antigen-binding molecule is recorded from 20° C. to 90° C. compared to a sample containing only the formulation buffer. The antigen-binding molecules are adjusted to a final concentration of 250 μg/ml e.g. in SEC running buffer. For recording of the respective melting curve, the overall sample temperature is increased stepwise. At each temperature T energy uptake of the sample and the formulation buffer reference is recorded. The difference in energy uptake Cp (kcal/mole/° C.) of the sample minus the reference is plotted against the respective temperature. The melting temperature is defined as the temperature at the first maximum of energy uptake.

[0259] The CS1, BCMA, CD20, CD22, FLT3, CD123, CLL1, MSLN, or EpCAMxCD3 bispecific antigen-binding molecules of the invention are also envisaged to have a turbidity (as measured by OD340 after concentration of purified monomeric antigen-binding molecule to 2.5 mg/ml and overnight incubation) of ≤0.2, preferably of ≤0.15, more preferably of ≤0.12, even more preferably of ≤0.1, and most preferably of ≤0.08.

[0260] In a further embodiment the antigen-binding molecule according to the invention is stable at physiologic or slightly lower pH, i.e. about pH 7.4 to 6.0. The more tolerant the antigen-binding molecule behaves at unphysiologic pH such as about pH 6.0, the higher is the recovery of the antigen-binding molecule eluted from an ion exchange column relative to the total amount of loaded protein. Recovery of the antigen-binding molecule from an ion (e.g., cation) exchange column at about pH 6.0 is preferably ≥30%, more preferably ≥40%, more preferably ≥50%, even more preferably ≥60%, even more preferably ≥70%, even more preferably ≥80%, even more preferably ≥90%, even more preferably ≥95%, and most preferably ≥99%.

[0261] It is furthermore envisaged that the bispecific antigen-binding molecules of the present invention exhibit therapeutic efficacy or anti-tumor activity. This can e.g. be assessed in a study as disclosed in the following generalized example of an advanced stage human tumor xenograft model:

[0262] On day 1 of the study, 5×10⁶ cells of a human target cell antigen (here: CS1, BCMA, CD20, CD22, FLT3, CD123, CLL1, MSLN, or EpCAM) positive cancer cell line are subcutaneously injected in the right dorsal flank of female NOD/SCID mice. When the mean tumor volume reaches about 100 mm3, in vitro expanded human CD3 positive T cells are transplanted into the mice by injection of about 2×10⁷ cells into the peritoneal cavity of the animals. Mice of vehicle control group 1 do not receive effector cells and are used as an untransplanted control for comparison with vehicle control group 2 (receiving effector cells) to monitor the impact of T cells alone on tumor growth. The antibody treatment starts when the mean tumor volume reaches about 200 mm³. The mean tumor size of each treatment group on the day of treatment start should not be statistically different from any other group (analysis of variance). Mice are treated with 0.5 mg/kg/day of a CS1, BCMA, CD20, CD22, FLT3, CD123, CLL1, MSLN, or EpCAMxCD3 bispecific antigen-binding molecule by intravenous bolus injection for about 15 to 20 days. Tumors are measured by caliper during the study and progress evaluated by intergroup comparison of tumor volumes (TV). The tumor growth inhibition T/C [%] is determined by calculating TV as T/C %=100×(median TV of analyzed group)/(median TV of control group 2).

[0263] The skilled person knows how to modify or adapt certain parameters of this study, such as the number of injected tumor cells, the site of injection, the number of transplanted human T cells, the amount of bispecific antigen-binding molecules to be administered, and the timelines, while still arriving at a meaningful and reproducible result. Preferably, the tumor growth inhibition T/C [%] is ≤70 or ≤60, more preferably ≤50 or ≤40, even more preferably ≤30 or ≤20 and most preferably ≤10 or ≤5 or even ≤2.5. Tumor growth inhibition is preferably close to 100%.

[0264] In a preferred embodiment of the antigen-binding molecule of the invention the antigen-binding molecule is a single chain antigen-binding molecule.

[0265] Also in a preferred embodiment of the antigen-binding molecule of the invention said third domain comprises in an amino to carboxyl order:
[0266] hinge-CH2-CH3-linker-hinge-CH2-CH3.

[0267] In one embodiment of the invention each of said polypeptide monomers of the third domain has an amino acid sequence that is at least 90% identical to a sequence selected from the group consisting of: SEQ ID NO: 17-24. In a preferred embodiment or the invention each of said polypeptide monomers has an amino acid sequence selected from SEQ ID NO: 17-24.

[0268] Also in one embodiment of the invention the CH2 domain of one or preferably each (both) polypeptide monomers of the third domain comprises an intra domain cysteine disulfide bridge. As known in the art the term “cysteine disulfide bridge” refers to a functional group with the general structure R—S—S—R. The linkage is also called an SS-bond or a disulfide bridge and is derived by the coupling of two thiol groups of cysteine residues. It is particularly preferred for the antigen-binding molecule of the invention that the cysteines forming the cysteine disulfide bridge in the mature antigen-binding molecule are introduced into the amino acid sequence of the CH2 domain corresponding to 309 and 321 (Kabat numbering).

[0269] In one embodiment of the invention a glycosylation site in Kabat position 314 of the CH2 domain is removed. It is preferred that this removal of the glycosylation site is achieved by a N314X substitution, wherein X is any amino acid excluding Q. Said substitution is preferably a N314G. In a more preferred embodiment, said CH2 domain additionally comprises the following substitutions (position according to Kabat) V321C and R309C (these substitutions introduce the intra domain cysteine disulfide bridge at Kabat positions 309 and 321).

[0270] It is assumed that the preferred features of the antigen-binding molecule of the invention compared e.g. to the bispecific heteroFc antigen-binding molecule known in the art (FIG. F1b) may be inter alia related to the introduction of the above described modifications in the CH2 domain. Thus, it is preferred for the construct of the invention that the CH2 domains in the third domain of the antigen-binding molecule of the invention comprise the intra domain cysteine disulfide bridge at Kabat positions 309 and 321 and/or the glycosylation site at Kabat position 314 is removed, preferably by a N314G substitution.

[0271] In a further preferred embodiment of the invention the CH2 domains in the third domain of the antigen-binding molecule of the invention comprise the intra domain cysteine disulfide bridge at Kabat positions 309 and 321 and the glycosylation site at Kabat position 314 is removed by a N314G substitution. Most preferably, the polypeptide monomer of the third domain of the antigen-binding molecule of the invention has an amino acid sequence selected from the group consisting of SEQ ID NO: 17 and 18.

[0272] In one embodiment the invention provides an antigen-binding molecule, wherein:
[0273] (i) the first domain comprises two antibody variable domains and the second domain comprises two antibody variable domains;
[0274] (ii) the first domain comprises one antibody variable domain and the second domain comprises two antibody variable domains;
[0275] (iii) the first domain comprises two antibody variable domains and the second domain comprises one antibody variable domain; or
[0276] (iv) the first domain comprises one antibody variable domain and the second domain comprises one antibody variable domain.

[0277] Accordingly, the first and the second domain may be binding domains comprising each two antibody variable domains such as a VH and a VL domain. Examples for such binding domains comprising two antibody variable domains where described herein above and comprise e.g. Fv fragments, scFv fragments or Fab fragments described herein above. Alternatively either one or both of those binding domains may comprise only a single variable domain. Examples for such single domain binding domains where described herein above and comprise e.g. nanobodies or single variable domain antibodies comprising merely one variable domain, which may be VHH, VH or VL, that specifically bind an antigen or epitope independently of other V regions or domains.

[0278] In a preferred embodiment of the antigen-binding molecule of the invention first and second domain are fused to the third domain via a peptide linker. Preferred peptide linker have been described herein above and are characterized by the amino acid sequence Gly-Gly-Gly-Gly-Ser, i.e. Gly₄Ser (SEQ ID NO: 1), or polymers thereof, i.e. (Gly₄Ser)x, where x is an integer of 1 or greater (e.g. 2 or 3). A particularly preferred linker for the fusion of the first and second domain to the third domain is depicted in SEQ ID NO: 1.

[0279] In a preferred embodiment the antigen-binding molecule of the invention is characterized to comprise in an amino to carboxyl order:
[0280] (a) the first domain;
[0281] (b) a peptide linker having an amino acid sequence selected from the group consisting of SEQ ID NO: 1-3;
[0282] (c) the second domain;
[0283] (d) a peptide linker having an amino acid sequence selected from the group consisting of SEQ ID NO: 1, 2, 3, 9, 10, 11 and 12;
[0284] (e) the first polypeptide monomer of the third domain;
[0285] (f) a peptide linker having an amino acid sequence selected from the group consisting of SEQ ID NO: 5, 6, 7 and 8; and
[0286] (g) the second polypeptide monomer of the third domain.

[0287] The antigen-binding molecule of the present invention comprises a first domain which binds to CS1, BCMA, CD20, CD22, FLT3, CD123, CLL1, MSLN, or EpCAM, preferably to the extracellular domain(s) (ECD) of CS1, BCMA, CD20, CD22, FLT3, CD123, CLL1, MSLN, or EpCAM. It is understood that the term “binding to the extracellular domain of CS1, BCMA, CD20, CD22, FLT3, CD123, CLL1, MSLN, or EpCAM”, in the context of the present invention, implies that the binding domain binds to CS1, BCMA, CD20, CD22, FLT3, CD123, CLL1, MSLN, or EpCAM expressed on the surface of a target cell. The first domain according to the invention hence preferably binds to CS1, BCMA, CD20, CD22, FLT3, CD123, CLL1, MSLN, or EpCAM when it is expressed by naturally expressing cells or cell lines, and/or by cells or cell lines transformed or (stably/transiently) transfected with CS1, BCMA, CD20, CD22, FLT3, CD123, CLL1, MSLN, or EpCAM. In a preferred embodiment the first binding domain also binds to CS1, BCMA, CD20, CD22, FLT3, CD123, CLL1, MSLN, or EpCAM when CS1, BCMA, CD20, CD22, FLT3, CD123, CLL1, MSLN, or EpCAM is used as a “target” or “ligand” molecule in an in vitro binding assay such as BIAcore or Scatchard. The “target cell” can be any prokaryotic or eukaryotic cell expressing CS1, BCMA, CD20, CD22, FLT3, CD123, CLL1, MSLN, or EpCAM on its surface; preferably the target cell is a cell that is part of the human or animal body, such as a specific CS1, BCMA, CD20, CD22, FLT3, CD123, CLL1, MSLN, or EpCAM expressing cancer or tumor cell.

[0288] Preferably, the first binding domain binds to human CS1, BCMA, CD20, CD22, FLT3, CD123, CLL1, MSLN, or EpCAM/CS1, BCMA, CD20, CD22, FLT3, CD123, CLL1, MSLN, or EpCAM ECD. In a further preferred embodiment, it binds to macaque CS1, BCMA, CD20, CD22, FLT3, CD123, CLL1, MSLN, or EpCAM/CS1, BCMA, CD20, CD22, FLT3, CD123, CLL1, MSLN, or EpCAM ECD. According to the most preferred embodiment, it binds to both the human and the macaque CS1, BCMA, CD20, CD22, FLT3, CD123, CLL1, MSLN, or EpCAM/CS1, BCMA, CD20, CD22, FLT3, CD123, CLL1, MSLN, or EpCAM ECD. The “CS1, BCMA, CD20, CD22, FLT3, CD123, CLL1, MSLN, or EpCAM extracellular domain” or “CS1, BCMA, CD20, CD22, FLT3, CD123, CLL1, MSLN, or EpCAM ECD” refers to the CS1, BCMA, CD20, CD22, FLT3, CD123, CLL1, MSLN, or EpCAM region or sequence which is essentially free of transmembrane and cytoplasmic domains of CS1, BCMA, CD20, CD22, FLT3, CD123, CLL1, MSLN, or EpCAM. It will be understood by the skilled artisan that the transmembrane domain identified for the CS1, BCMA, CD20, CD22, FLT3, CD123, CLL1, MSLN, or EpCAM polypeptide of the present invention is identified pursuant to criteria routinely employed in the art for identifying that type of hydrophobic domain. The exact boundaries of a transmembrane domain may vary but most likely by no more than about 5 amino acids at either end of the domain specifically mentioned herein.

[0289] Preferred binding domains which bind to CD3 are disclosed in WO 2010/037836, and WO 2011/121110. Any binding domain for CD3 described in these applications may be used in the context of the present invention.

[0290] In line with an embodiment of the present invention, multispecific antibody comprise a first and/or a second binding domain comprising a VH region comprising CDR-H1, CDR-H2 and CDR-H3 selected from CDR-H1, CDR-H2 and CDR-H3 selected from the group consisting of SEQ ID Nos: for CD123 33 to 35, 44 to 46, 55 to 57, 66 to 68, 77 to 79, 88 to 90, 99 to 101, 110 to 112, 121 to 123, 132 to 134, 143 to 145, 154 to 156, 165 to 167, 176 to 178, 187 to 189, 198 to 200,209 to 211,220 to 222, 231 to 233, 242 to 244, 253 to 255, 264 to 266, 275 to 277, 286 to 288, 297 to 299, 308 to 310, 319 to 321, 330 to 332, 341 to 343, 352 to 354, 363 to 365, 374 to 376, 385 to 387, 396 to 398, 407 to 409, 418 to 420, 429 to 431, 440 to 442, 451 to 453, 462 to 464, 473 to 475, 484 to 486, 495 to 497, 506 to 508, 517 to 519, 528 to 530, 539 to 541, 550 to 552, 561 to 563, 572 to 574, 583 to 585, 594 to 596, 605 to 607, 616 to 618, 627 to 629, for FLT3: 638 to 640, 649 to 651, 660 to 662, for CS1: 896 to 898, 907 to 909, 918 to 920, 929 to 931, 940 to 942, 951 to 953, 962 to 964, 973 to 975, 984 to 986, 995 to 997, 1006 to 1008, 1017 to 1019, 1028 to 1030, 1039 to 1041, 1050 to 1052, 1061 to 1063, 1072 to 1074, 1083 to 1085, 1094 to 1096, 1105 to 1107, 1116 to 1118, 1127 to 1129, 1138 to 1140, 1149 to 1151, 1160 to 1162, 1171 to 1173, 1182 to 1184, 1193 to 1195, 1204 to 1206, 1215 to 1217, 1226 to 1228, 1237 to 1239, 1248 to 1250, 1259 to 1261, 1270 to 1272, 1281 to 1283, 1292 to 1294, 1303 to 1305, 1314 to 1316, 1325 to 1327, 1336 to 1338, 1347 to 1349, 1358 to 1360, 1369 to 1371, 1380 to 1382, 1391 to 1393, for BCMA: 1402 to 1404, 1413 to 1415, 1424 to 1426, for CD22: 1489 to 1491, 1500 to 1502, 1511 to 1513, 1522 to 1524, 1533 to 1535, 1544 to 1546, for CD20: 1555 to 1557, 1566 to 1568, 1577 to 1579, 1588 to 1590, 1599 to 1601, 1610 to 1612, 1621 to 1623, 1632 to 1634, 1643 to 1645, and 1654 to 1656.

[0291] In line with an embodiment of the present invention, multispecific antibody comprise a first and/or a second binding domain comprising a VL region comprising CDR-L1, CDR-L2 and CDR-L3 selected from CDR-L1, CDR-L2 and CDR-L3 selected from the group consisting of SEQ ID Nos: for CD123: 36 to 38, 47 to 49, 58 to 60, 69 to 71, 80 to 82, 91 to 93, 102 to 104, 113 to 115, 124 to 126, 135 to 137, 146 to 148, 157 to 159, 168 to 170, 179 to 181, 190 to 192,201 to 203,212 to 214,223 to 225, 234 to 236, 245 to 247, 256 to 258, 267 to 269, 278 to 280, 289 to 291, 300 to 302, 311 to 313, 322 to 324, 333 to 335, 344 to 346, 355 to 357, 366 to 368, 377 to 379, 388 to 390, 399 to 401, 410 to 412, 421 to 423, 432 to 434, 443 to 445, 454 to 456, 465 to 467, 476 to 478, 487 to 489, 498 to 500, 509 to 511, 520 to 522, 531 to 533, 542 to 544, 553 to 555, 564 to 566, 575 to 577, 586 to 588, 597 to 599, 608 to 610, 619 to 621, 630 to 632, for FLT3: 641 to 643, 652 to 654, 663 to 665, for CS1: 899 to 901, 910 to 912, 921 to 923, 932 to 934, 943 to 945, 954 to 956, 965 to 967, 976 to 978, 987 to 989, 998 to 1000, 1009 to 1011, 1020 to 1022, 1031 to 1033, 1042 to 1043, 1053 to 1055, 1064 to 1066, 1075 to 1077, 1086 to 1088, 1097 to 1099, 1108 to 1110, 1119 to 1121, 1130 to 1132, 1141 to 1143, 1152 to 1154, 1163 to 1165, 1174 to 1176, 1185 to 1187, 1196 to 1198, 1207 to 1209, 1218 to 1220, 1229 to 1231, 1240 to 1242, 1251 to 1253, 1262 to 1264, 1273 to 1275, 1284 to 1286, 1295 to 1297, 1306 to 1308, 1317 to 1319, 1328 to 1330, 1339 to 1341, 1350 to 1352, 1361 to 1363, 1372 to 1374, 1383 to 1385, 1394 to 1396, for BCMA: 1405 to 1407, 1416 to 1418, 1427 to 1429, for CD22: 1492 to 1494, 1503 to 1505, 1514 to 1516, 1525 to 1527, 1536 to 1538, 1547 to 1549, for CD20: 1558 to 1560, 1569 to 1571, 1580 to 1582, 1591 to 1593, 1602 to 1604, 1613 to 1615, 1624 to 1626, 1635 to 1637, 1646 to 1648, and 1657 to 1659.

[0292] Also in line with an embodiment of the present invention, the multispecific antigen-binding molecule comprises a first and second binding domain comprising a VH region selected from the group consisting of SEQ ID Nos: for CD123: 39, 50, 61, 72, 83, 94, 105, 116, 127, 138, 149, 160, 171, 182, 193, 204, 215, 226, 237, 248, 259, 270, 281, 292, 303, 314, 325, 336, 347, 358, 369, 380, 391, 402, 413, 424, 435, 446, 457, 468, 479, 490, 501, 512, 523, 534, 545, 556, 567, 578, 589, 600, 611, 622, 633, for FLT3: 644, 655, 666, for CS1: 902, 913, 924, 935, 946, 957, 968, 979, 990, 1001, 1012, 1023, 1034, 1045, 1056, 1067, 1078, 1089, 1100, 1111, 1122, 1133, 1144, 1155, 1166, 1177, 1188, 1199, 1210, 1221, 1232, 1243, 1254, 1265, 1276, 1287, 1298, 1309, 1320, 1331, 1342, 1353, 1364, 1375, 1386, 1397, for BCMA: 1408, 1419, 1430, for CD20: 1495, 1506, 1517, 1528, 1539, for CD20: 1550, 1561, 1572, 1583, 1594, 1605, 1616, 1627, 1638, 1649, and 1660.

[0293] Also in line with an embodiment of the present invention, the multispecific antigen-binding molecule comprises a first and/or second binding domain comprising a VL region selected from the group consisting of SEQ ID Nos: for CD123: 40, 51, 62, 73, 84, 95, 106, 117, 128, 139, 150, 161, 172, 183, 194, 205, 216, 227, 238, 249, 260, 271, 282, 293, 304, 315, 326, 337, 348, 359, 370, 381, 392, 403, 414, 425, 436, 447, 458, 469, 480, 491, 502, 513, 524, 535, 546, 557, 568, 579, 590, 601, 612, 623, 634, for FLT3: 645, 656, 667, for CS1: 903, 914, 925, 936, 947, 958, 969, 980, 991, 1002, 1013, 1024, 1035, 1046, 1057, 1068, 1079, 1090, 1101, 1112, 1123, 1134, 1145, 1156, 1167, 1178, 1189, 1200, 1211, 1222, 1233, 1244, 1255, 1266, 1277, 1288, 1299, 1310, 1321, 1332, 1343, 1354, 1365, 1376, 1387, 1398, for BCMA: 1409, 1420, 1431, for CD20: 1496, 1507, 1518, 1529, 1540, 1551, for CD22: 1562, 1573, 1584, 1595, 1606, 1617, 1628, 1639, 1650, and 1661.

[0294] In line with this embodiment, the first and second domain which are fused via a peptide linker to a single chain polypeptide comprise a sequence selected from the group consisting of: SEQ ID NO for CD123 41, 52, 63, 74, 85, 96, 107, 118, 129, 140, 151, 162, 173, 184, 195, 206, 217, 228, 239, 250, 261, 272, 283, 294, 305, 316, 327, 338, 349, 360, 371, 382, 393, 404, 415, 426, 437, 448, 459, 470, 481, 492, 503, 514, 525, 536, 547, 558, 569, 580, 591, 602, 613, 624, 635, for FTL3: 646, 657, 668, for FLT3xCD123: 671, 674, 677, 680, 683, 686, 689, 692, 695, 698, 701, 704, 707, 710, 713, 716, 719, 722, 725, 728, 731, 734, 737, 740, 743, 746, 749, 752, 755, 758, 761, 764, 767, 770, 773, 776, 779, 782, 785, 788, 791, 794, 797, 800, 803, 806, 809, 812, 815, 818, 821, 824, 827, 830, 833, for CD123xFLT3: 836, 839, 842, 845, 848, 851, 854, 857, 860, 863, 866, 869, 872, 874, 876, 878, 880, 882, 884, 886, 888, 890, 892, 894, for CS1: 904, 915, 926, 937, 948, 959, 970, 981, 992, 1003, 1014, 1025, 1036, 1047, 1058, 1069, 1080, 1091, 1102, 1113, 1124, 1135, 1146, 1157, 1168, 1179, 1190, 1201, 1212, 1223, 1234, 1245, 1256, 1267, 1278, 1289, 1300, 1311, 1322, 1333, 1344, 1355, 1366, 1377, 1388, 1399, for BCMA: 1410, 1421, 1432, for CS1xBCMA: 1435, for BCMAxCS1: 1438, 1441, 1444, 1447, 1450, 1453, 1456, 1459, 1462, for CS1xBCMA: 1465, 1468, 1471, 1474, 1477, 1480, 1483, 1486, for CD22: 1497, 1508, 1519, 1530, 1541, 1552, for CD20: 1563, 1574, 1585, 1596, 1607, 1618, 1629, 1640, 1651, 1662, for CD22xCD20: 1665, 1668, 1671, 1674, 1677, 1680, 1683, 1686, 1689, 1692, 1695, 1698, 1701, 1704, 1707, 1710, 1713, 1716, 1719, 1722, 1725, 1728, 1731, 1734, 1737, 1740, 1743, 1746, 1749, 1752, for CD20xCD22: 1755, 1758, 1761, 1764, 1767, 1770, 1773, 1776, 1779, 1782, 1785, 1788, 1791, 1794, 1797, 1800, 1803, 1806, 1809, 1812, 1815, 1818, 1821, and 1824, preferably 1399 or 1435 In one aspect the antigen-binding molecule of the invention is characterized by having an amino acid sequence selected from the group consisting of: SEQ ID NO: for CD123: 42, 53, 64, 75, 86, 97, 108, 119, 130, 141, 152, 163, 174, 185, 196, 207, 218, 229, 240, 251, 262, 273, 284, 295, 306, 317, 328, 339, 350, 361, 372, 383, 394, 405, 416, 427, 438, 449, 460, 471, 482, 493, 504, 515, 526, 537, 548, 559, 570, 581, 592, 603, 614, 625, 636, for FLT3: 647, 658, 669, for FLT3xCD123: 672, 675, 678, 681, 684, 687, 690, 693, 696, 699, 702, 705, 708, 711, 714, 717, 720, 723, 726, 729, 732, 735, 738, 741, 744, 747, 750, 753, 756, 759, 762, 765, 768, 771, 774, 777, 780, 783, 786, 789, 792, 795, 798, 801, 804, 807, 810, 813, 816, 819, 822, 825, 828, 831, 834, for CD123xFLT3: 837, 840, 843, 846, 849, 852, 855, 858, 861, 864, 867, 870 873, 875, 877, 879, 881, 883, 885, 887, 889, 891, 893, 895, for CS1: 905, 916, 927, 938, 949, 960, 971, 982, 993, 1004, 1015, 1026, 1037, 1048, 1059, 1070, 1081, 1092, 1103, 1114, 1125, 1136, 1147, 1158, 1169, 1180, 1191, 1202, 1213, 1224, 1235, 1246, 1257, 1268, 1279, 1290, 1301, 1312, 1323, 1334, 1345, 1356, 1367, 1378, 1389, 1400, for BCMA: 1411, 1422, 1433, for CS1xBCMA: 1436, for BCMAxCS1: 1439, 1442, 1445, 1448, 1451, 1454, 1457, 1460, 1463, for CS1xBCMA: 1466, 1469, 1472, 1475, 1478, 1481, 1484, 1487, for CD22: 1498, 1509, 1520, 1531, 1542, 1553, for CD20: 1564, 1575, 1586, 1597, 1608, 1619, 1630, 1641, 1652, 1663, for CD22xCD20: 1666, 1669, 1672, 1675, 1678, 1681, 1684, 1687, 1690, 1693, 1696, 1699, 1702, 1705, 1708, 1711, 1714, 1717, 1720, 1723, 1726, 1729, 1732, 1735, 1738, 1741, 1744, 1747, 1750, 1753, and for CD20xCD22: 1756, 1759, 1762, 1765, 1768, 1771, 1774, 1777, 1780, 1783, 1786, 1789, 1792, 1795, 1798, 1801, 1804, 1807, 1810, 1813, 1816, 1819, 1822, and 1825, preferably 1400 or 1436.

[0295] The invention further provides a polynucleotide/nucleic acid molecule encoding an antigen-binding molecule of the invention. A polynucleotide is a biopolymer composed of 13 or more nucleotide monomers covalently bonded in a chain. DNA (such as cDNA) and RNA (such as mRNA) are examples of polynucleotides with distinct biological function. Nucleotides are organic molecules that serve as the monomers or subunits of nucleic acid molecules like DNA or RNA. The nucleic acid molecule or polynucleotide can be double stranded and single stranded, linear and circular. It is preferably comprised in a vector which is preferably comprised in a host cell. Said host cell is, e.g. after transformation or transfection with the vector or the polynucleotide of the invention, capable of expressing the antigen-binding molecule. For that purpose the polynucleotide or nucleic acid molecule is operatively linked with control sequences.

[0296] The genetic code is the set of rules by which information encoded within genetic material (nucleic acids) is translated into proteins. Biological decoding in living cells is accomplished by the ribosome which links amino acids in an order specified by mRNA, using tRNA molecules to carry amino acids and to read the mRNA three nucleotides at a time. The code defines how sequences of these nucleotide triplets, called codons, specify which amino acid will be added next during protein synthesis. With some exceptions, a three-nucleotide codon in a nucleic acid sequence specifies a single amino acid. Because the vast majority of genes are encoded with exactly the same code, this particular code is often referred to as the canonical or standard genetic code. While the genetic code determines the protein sequence for a given coding region, other genomic regions can influence when and where these proteins are produced.

[0297] Furthermore, the invention provides a vector comprising a polynucleotide/nucleic acid molecule of the invention. A vector is a nucleic acid molecule used as a vehicle to transfer (foreign) genetic material into a cell. The term “vector” encompasses—but is not restricted to—plasmids, viruses, cosmids and artificial chromosomes. In general, engineered vectors comprise an origin of replication, a multicloning site and a selectable marker. The vector itself is generally a nucleotide sequence, commonly a DNA sequence that comprises an insert (transgene) and a larger sequence that serves as the “backbone” of the vector. Modern vectors may encompass additional features besides the transgene insert and a backbone: promoter, genetic marker, antibiotic resistance, reporter gene, targeting sequence, protein purification tag. Vectors called expression vectors (expression constructs) specifically are for the expression of the transgene in the target cell, and generally have control sequences.

[0298] The term “control sequences” refers to DNA sequences necessary for the expression of an operably linked coding sequence in a particular host organism. The control sequences that are suitable for prokaryotes, for example, include a promoter, optionally an operator sequence, and a ribosome binding side. Eukaryotic cells are known to utilize promoters, polyadenylation signals, and enhancers.

[0299] A nucleic acid is “operably linked” when it is placed into a functional relationship with another nucleic acid sequence. For example, DNA for a presequence or secretory leader is operably linked to DNA for a polypeptide if it is expressed as a preprotein that participates in the secretion of the polypeptide; a promoter or enhancer is operably linked to a coding sequence if it affects the transcription of the sequence; or a ribosome binding side is operably linked to a coding sequence if it is positioned so as to facilitate translation. Generally, “operably linked” means that the DNA sequences being linked are contiguous, and, in the case of a secretory leader, contiguous and in reading phase. However, enhancers do not have to be contiguous. Linking is accomplished by ligation at convenient restriction sites. If such sites do not exist, the synthetic oligonucleotide adaptors or linkers are used in accordance with conventional practice.

[0300] “Transfection” is the process of deliberately introducing nucleic acid molecules or polynucleotides (including vectors) into target cells. The term is mostly used for non-viral methods in eukaryotic cells. Transduction is often used to describe virus-mediated transfer of nucleic acid molecules or polynucleotides. Transfection of animal cells typically involves opening transient pores or “holes” in the cell membrane, to allow the uptake of material. Transfection can be carried out using calcium phosphate, by electroporation, by cell squeezing or by mixing a cationic lipid with the material to produce liposomes, which fuse with the cell membrane and deposit their cargo inside.

[0301] The term “transformation” is used to describe non-viral transfer of nucleic acid molecules or polynucleotides (including vectors) into bacteria, and also into non-animal eukaryotic cells, including plant cells. Transformation is hence the genetic alteration of a bacterial or non-animal eukaryotic cell resulting from the direct uptake through the cell membrane(s) from its surroundings and subsequent incorporation of exogenous genetic material (nucleic acid molecules). Transformation can be effected by artificial means. For transformation to happen, cells or bacteria must be in a state of competence, which may occur as a time-limited response to environmental conditions such as starvation and cell density.

[0302] Moreover, the invention provides a host cell transformed or transfected with the polynucleotide/nucleic acid molecule or with the vector of the invention. As used herein, the terms “host cell” or “recipient cell” are intended to include any individual cell or cell culture that can be or has/have been recipients of vectors, exogenous nucleic acid molecules, and polynucleotides encoding the antigen-binding molecule of the present invention; and/or recipients of the antigen-binding molecule itself. The introduction of the respective material into the cell is carried out by way of transformation, transfection and the like. The term “host cell” is also intended to include progeny or potential progeny of a single cell. Because certain modifications may occur in succeeding generations due to either natural, accidental, or deliberate mutation or due to environmental influences, such progeny may not, in fact, be completely identical (in morphology or in genomic or total DNA complement) to the parent cell, but is still included within the scope of the term as used herein. Suitable host cells include prokaryotic or eukaryotic cells, and also include but are not limited to bacteria, yeast cells, fungi cells, plant cells, and animal cells such as insect cells and mammalian cells, e.g., murine, rat, macaque or human.

[0303] The antigen-binding molecule of the invention can be produced in bacteria. After expression, the antigen-binding molecule of the invention is isolated from the E. coli cell paste in a soluble fraction and can be purified through, e.g., affinity chromatography and/or size exclusion. Final purification can be carried out similar to the process for purifying antibody expressed e.g., in CHO cells.

[0304] In addition to prokaryotes, eukaryotic microbes such as filamentous fungi or yeast are suitable cloning or expression hosts for the antigen-binding molecule of the invention. Saccharomyces cerevisiae, or common baker's yeast, is the most commonly used among lower eukaryotic host microorganisms. However, a number of other genera, species, and strains are commonly available and useful herein, such as Schizosaccharomyces pombe, Kluyveromyces hosts such as K. lactis, K. fragilis (ATCC 12424), K. bulgaricus (ATCC 16045), K. wickeramii (ATCC 24178), K. waltii (ATCC 56500), K. drosophilarum (ATCC 36906), K. thermotolerans, and K. marxianus; yarrowia (EP 402 226); Pichia pastoris (EP 183 070); Candida; Trichoderma reesia (EP 244 234); Neurospora crassa; Schwanniomyces such as Schwanniomyces occidentalis; and filamentous fungi such as Neurospora, Penicillium, Tolypocladium, and Aspergillus hosts such as A. nidulans and A. niger.

[0305] Suitable host cells for the expression of glycosylated antigen-binding molecule of the invention are derived from multicellular organisms. Examples of invertebrate cells include plant and insect cells. Numerous baculoviral strains and variants and corresponding permissive insect host cells from hosts such as Spodoptera frugiperda (caterpillar), Aedes aegypti (mosquito), Aedes albopictus (mosquito), Drosophila melanogaster (fruit fly), and Bombyx mori have been identified. A variety of viral strains for transfection are publicly available, e.g., the L-1 variant of Autographa californica NPV and the Bm-5 strain of Bombyx mori NPV, and such viruses may be used as the virus herein according to the present invention, particularly for transfection of Spodopterafrugiperda cells.

[0306] Plant cell cultures of cotton, corn, potato, soybean, petunia, tomato, Arabidopsis and tobacco can also be used as hosts. Cloning and expression vectors useful in the production of proteins in plant cell culture are known to those of skill in the art. See e.g. Hiatt et al., Nature (1989) 342: 76-78, Owen et al. (1992) Bio/Technology 10: 790-794, Artsaenko et al. (1995) The Plant J 8: 745-750, and Fecker et al. (1996) Plant Mol Biol 32: 979-986.

[0307] However, interest has been greatest in vertebrate cells, and propagation of vertebrate cells in culture (tissue culture) has become a routine procedure. Examples of useful mammalian host cell lines are monkey kidney CV1 line transformed by SV40 (COS-7, ATCC CRL 1651); human embryonic kidney line (293 or 293 cells subcloned for growth in suspension culture, Graham et al., J. Gen Virol. 36: 59 (1977)); baby hamster kidney cells (BHK, ATCC CCL 10); Chinese hamster ovary cells/-DHFR (CHO, Urlaub et al., Proc. Natl. Acad. Sci. USA 77: 4216 (1980)); mouse sertoli cells (TM4, Mather, Biol. Reprod. 23: 243-251 (1980)); monkey kidney cells (CVI ATCC CCL 70); African green monkey kidney cells (VERO-76, ATCC CRL1587); human cervical carcinoma cells (HELA, ATCC CCL 2); canine kidney cells (MDCK, ATCC CCL 34); buffalo rat liver cells (BRL 3A, ATCC CRL 1442); human lung cells (W138, ATCC CCL 75); human liver cells (Hep G2,1413 8065); mouse mammary tumor (MMT 060562, ATCC CCL5 1); TRI cells (Mather et al., Annals N. Y Acad. Sci. (1982) 383: 44-68); MRC 5 cells; FS4 cells; and a human hepatoma line (Hep G2).

[0308] In a further embodiment the invention provides a process for the production of an antigen-binding molecule of the invention, said process comprising culturing a host cell of the invention under conditions allowing the expression of the antigen-binding molecule of the invention and recovering the produced antigen-binding molecule from the culture.

[0309] As used herein, the term “culturing” refers to the in vitro maintenance, differentiation, growth, proliferation and/or propagation of cells under suitable conditions in a medium. The term “expression” includes any step involved in the production of an antigen-binding molecule of the invention including, but not limited to, transcription, post-transcriptional modification, translation, post-translational modification, and secretion.

[0310] When using recombinant techniques, the antigen-binding molecule can be produced intracellularly, in the periplasmic space, or directly secreted into the medium. If the antigen-binding molecule is produced intracellularly, as a first step, the particulate debris, either host cells or lysed fragments, are removed, for example, by centrifugation or ultrafiltration. Carter et al., Bio/Technology 10: 163-167 (1992) describe a procedure for isolating antibodies which are secreted to the periplasmic space of E. coli. Briefly, cell paste is thawed in the presence of sodium acetate (pH 3.5), EDTA, and phenylmethylsulfonylfluoride (PMSF) over about 30 min. Cell debris can be removed by centrifugation. Where the antibody is secreted into the medium, supernatants from such expression systems are generally first concentrated using a commercially available protein concentration filter, for example, an Amicon or Millipore Pellicon ultrafiltration unit. A protease inhibitor such as PMSF may be included in any of the foregoing steps to inhibit proteolysis and antibiotics may be included to prevent the growth of adventitious contaminants.

[0311] The antigen-binding molecule of the invention prepared from the host cells can be recovered or purified using, for example, hydroxylapatite chromatography, gel electrophoresis, dialysis, and affinity chromatography. Other techniques for protein purification such as fractionation on an ion-exchange column, ethanol precipitation, Reverse Phase HPLC, chromatography on silica, chromatography on heparin SEPHAROSE™, chromatography on an anion or cation exchange resin (such as a polyaspartic acid column), chromato-focusing, SDS-PAGE, and ammonium sulfate precipitation are also available depending on the antibody to be recovered. Where the antigen-binding molecule of the invention comprises a CH3 domain, the Bakerbond ABX resin (J. T. Baker, Phillipsburg, N.J.) is useful for purification.

[0312] Affinity chromatography is a preferred purification technique. The matrix to which the affinity ligand is attached is most often agarose, but other matrices are available. Mechanically stable matrices such as controlled pore glass or poly (styrenedivinyl) benzene allow for faster flow rates and shorter processing times than can be achieved with agarose.

[0313] Moreover, the invention provides a pharmaceutical composition comprising an antigen-binding molecule of the invention or an antigen-binding molecule produced according to the process of the invention. It is preferred for the pharmaceutical composition of the invention that the homogeneity of the antigen-binding molecule is ≥80%, more preferably ≥81%, ≥82%, ≥83%, ≥84%, or ≥85%, further preferably ≥86%, ≥87%, ≥88%, ≥89%, or ≥90%, still further preferably, ≥91%, ≥92%, ≥93%, ≥94%, or ≥95% and most preferably ≥96%, ≥97%, ≥98% or ≥99%.

[0314] As used herein, the term “pharmaceutical composition” relates to a composition which is suitable for administration to a patient, preferably a human patient. The particularly preferred pharmaceutical composition of this invention comprises one or a plurality of the antigen-binding molecule(s) of the invention, preferably in a therapeutically effective amount. Preferably, the pharmaceutical composition further comprises suitable formulations of one or more (pharmaceutically effective) carriers, stabilizers, excipients, diluents, solubilizers, surfactants, emulsifiers, preservatives and/or adjuvants. Acceptable constituents of the composition are preferably nontoxic to recipients at the dosages and concentrations employed. Pharmaceutical compositions of the invention include, but are not limited to, liquid, frozen, and lyophilized compositions.

[0315] The inventive compositions may comprise a pharmaceutically acceptable carrier. In general, as used herein, “pharmaceutically acceptable carrier” means any and all aqueous and non-aqueous solutions, sterile solutions, solvents, buffers, e.g. phosphate buffered saline (PBS) solutions, water, suspensions, emulsions, such as oil/water emulsions, various types of wetting agents, liposomes, dispersion media and coatings, which are compatible with pharmaceutical administration, in particular with parenteral administration. The use of such media and agents in pharmaceutical compositions is well known in the art, and the compositions comprising such carriers can be formulated by well-known conventional methods.

[0316] Certain embodiments provide pharmaceutical compositions comprising the antigen-binding molecule of the invention and further one or more excipients such as those illustratively described in this section and elsewhere herein. Excipients can be used in the invention in this regard for a wide variety of purposes, such as adjusting physical, chemical, or biological properties of formulations, such as adjustment of viscosity, and or processes of the invention to improve effectiveness and or to stabilize such formulations and processes against degradation and spoilage due to, for instance, stresses that occur during manufacturing, shipping, storage, pre-use preparation, administration, and thereafter.

[0317] In certain embodiments, the pharmaceutical composition may contain formulation materials for the purpose of modifying, maintaining or preserving, e.g., the pH, osmolarity, viscosity, clarity, color, isotonicity, odor, sterility, stability, rate of dissolution or release, adsorption or penetration of the composition (see, REMINGTON'S PHARMACEUTICAL SCIENCES, 18″ Edition, (A. R. Genrmo, ed.), 1990, Mack Publishing Company). In such embodiments, suitable formulation materials may include, but are not limited to:
[0318] amino acids such as glycine, alanine, glutamine, asparagine, threonine, proline, 2-phenylalanine, including charged amino acids, preferably lysine, lysine acetate, arginine, glutamate and/or histidine
[0319] antimicrobials such as antibacterial and antifungal agents
[0320] antioxidants such as ascorbic acid, methionine, sodium sulfite or sodium hydrogen-sulfite;
[0321] buffers, buffer systems and buffering agents which are used to maintain the composition at physiological pH or at a slightly lower pH, preferably a lower pH of 4.0 to 6.5; examples of buffers are borate, bicarbonate, Tris-HCl, citrates, phosphates or other organic acids, succinate, phosphate, and histidine; for example Tris buffer of about pH 7.0-8.5;
[0322] non-aqueous solvents such as propylene glycol, polyethylene glycol, vegetable oils such as olive oil, and injectable organic esters such as ethyl oleate;
[0323] aqueous carriers including water, alcoholic/aqueous solutions, emulsions or suspensions, including saline and buffered media;
[0324] biodegradable polymers such as polyesters;
[0325] bulking agents such as mannitol or glycine;
[0326] chelating agents such as ethylenediamine tetraacetic acid (EDTA);
[0327] isotonic and absorption delaying agents;
[0328] complexing agents such as caffeine, polyvinylpyrrolidone, beta-cyclodextrin or hydroxypropyl-beta-cyclodextrin)
[0329] fillers;
[0330] monosaccharides; disaccharides; and other carbohydrates (such as glucose, mannose or dextrins);
[0331] carbohydrates may be non-reducing sugars, preferably trehalose, sucrose, octasulfate, sorbitol or xylitol;
[0332] (low molecular weight) proteins, polypeptides or proteinaceous carriers such as human or bovine serum albumin, gelatin or immunoglobulins, preferably of human origin;
[0333] coloring and flavouring agents;
[0334] sulfur containing reducing agents, such as glutathione, thioctic acid, sodium thioglycolate, thioglycerol, [alpha]-monothioglycerol, and sodium thio sulfate
[0335] diluting agents;
[0336] emulsifying agents;
[0337] hydrophilic polymers such as polyvinylpyrrolidone)
[0338] salt-forming counter-ions such as sodium;
[0339] preservatives such as antimicrobials, anti-oxidants, chelating agents, inert gases and the like;
[0340] examples are: benzalkonium chloride, benzoic acid, salicylic acid, thimerosal, phenethyl alcohol, methylparaben, propylparaben, chlorhexidine, sorbic acid or hydrogen peroxide);
[0341] metal complexes such as Zn-protein complexes;
[0342] solvents and co-solvents (such as glycerin, propylene glycol or polyethylene glycol);
[0343] sugars and sugar alcohols, such as trehalose, sucrose, octasulfate, mannitol, sorbitol or xylitol stachyose, mannose, sorbose, xylose, ribose, myoiisitose, galactose, lactitol, ribitol, myoinisitol, galactitol, glycerol, cyclitols (e.g., inositol), polyethylene glycol; and polyhydric sugar alcohols;
[0344] suspending agents;
[0345] surfactants or wetting agents such as pluronics, PEG, sorbitan esters, polysorbates such as polysorbate 20, polysorbate, triton, tromethamine, lecithin, cholesterol, tyloxapal; surfactants may be detergents, preferably with a molecular weight of >1.2 KD and/or a polyether, preferably with a molecular weight of >3 KD; non-limiting examples for preferred detergents are Tween 20, Tween 40, Tween 60, Tween 80 and Tween 85; non-limiting examples for preferred polyethers are PEG 3000, PEG 3350, PEG 4000 and PEG 5000;
[0346] stability enhancing agents such as sucrose or sorbitol;
[0347] tonicity enhancing agents such as alkali metal halides, preferably sodium or potassium chloride, mannitol sorbitol;
[0348] parenteral delivery vehicles including sodium chloride solution, Ringer's dextrose, dextrose and sodium chloride, lactated Ringer's, or fixed oils;
[0349] intravenous delivery vehicles including fluid and nutrient replenishers, electrolyte replenishers (such as those based on Ringer's dextrose).

[0350] In the context of the present invention, a pharmaceutical composition, which is preferably a liquid composition or may be a solid composition obtained by lyophilisation or may be a reconstituted liquid composition comprises

(a) an antigen-binding molecule comprising at least three domains, wherein:
a first domain binds to a target cell surface antigen and has an isoelectric point (pI) in the range of 4 to 9,5;
a second domain binds to a second antigen; and has a pI in the range of 8 to 10, preferably 8.5 to 9.0; and
optionally a third domain comprises two polypeptide monomers, each comprising a hinge, a CH2 domain and a CH3 domain, wherein said two polypeptide monomers are fused to each other via a peptide linker;
(b) at least one buffer agent;
(c) at least one saccharide; and
(d) at least one surfactant;
and wherein the pH of the pharmaceutical composition is in the range of 3.5 to 6.

[0351] It is further envisaged in the context of the present invention that the at least one buffer agent is present at a concentration range of 5 to 200 mM, more preferably at a concentration range of 10 to 50 mM. It is envisaged in the context of the present invention that the at least one saccharide is selected from the group consisting of monosaccharide, disaccharide, cyclic polysaccharide, sugar alcohol, linear branched dextran or linear non-branched dextran. It is also envisaged in the context of the present invention that the disaccharide is selected from the group consisting of sucrose, trehalose and mannitol, sorbitol, and combinations thereof. It is further envisaged in the context of the present invention that the sugar alcohol is sorbitol. It is envisaged in the context of the present invention that the at least one saccharide is present at a concentration in the range of 1 to 15% (m/V), preferably in a concentration range of 9 to 12% (m/V).

[0352] It is also envisaged in the context of the present invention that the at least one surfactant is selected from the group consisting of polysorbate 20, polysorbate 40, polysorbate 60, polysorbate 80, poloxamer 188, pluronic F68, triton X-100, polyoxyethylen, PEG 3350, PEG 4000 and combinations thereof. It is further envisaged in the context of the present invention that the at least one surfactant is present at a concentration in the range of 0.004 to 0.5% (m/V), preferably in the range of 0.001 to 0.01% (m/V). It is envisaged in the context of the present invention that the pH of the composition is in the range of 4.0 to 5.0, preferably 4.2. It is also envisaged in the context of the present invention that the pharmaceutical composition has an osmolarity in the range of 150 to 500 mOsm. It is further envisaged in the context of the present invention that the pharmaceutical composition further comprises an excipient selected from the group consisting of, one or more polyol and one or more amino acid. It is envisaged in the context of the present invention that said one or more excipient is present in the concentration range of 0.1 to 15% (w/V).

[0353] It is also envisaged in the context of the present invention that the pharmaceutical composition comprises

(a) the antigen-binding molecule as discussed above,
(b) 10 mM glutamate or acetate,
(c) 9% (m/V) sucrose or 6% (m/V) sucrose and 6% (m/V) hydroxypropyl-β-cyclodextrin,
(d) 0.01% (m/V) polysorbate 80
and wherein the pH of the liquid pharmaceutical composition is 4.2.

[0354] It is further envisaged in the context of the present invention that the antigen-binding molecule is present in a concentration range of 0.1 to 8 mg/ml, preferably of 0.2-2.5 mg/ml, more preferably of 0.25-1.0 mg/ml.

[0355] It is evident to those skilled in the art that the different constituents of the pharmaceutical composition (e.g., those listed above) can have different effects, for example, and amino acid can act as a buffer, a stabilizer and/or an antioxidant; mannitol can act as a bulking agent and/or a tonicity enhancing agent; sodium chloride can act as delivery vehicle and/or tonicity enhancing agent; etc.

[0356] It is envisaged that the composition of the invention may comprise, in addition to the polypeptide of the invention defined herein, further biologically active agents, depending on the intended use of the composition. Such agents may be drugs acting on the gastro-intestinal system, drugs acting as cytostatica, drugs preventing hyperurikemia, drugs inhibiting immunoreactions (e.g. corticosteroids), drugs modulating the inflammatory response, drugs acting on the circulatory system and/or agents such as cytokines known in the art. It is also envisaged that the antigen-binding molecule of the present invention is applied in a co-therapy, i.e., in combination with another anti-cancer medicament.

[0357] In certain embodiments, the optimal pharmaceutical composition will be determined by one skilled in the art depending upon, for example, the intended route of administration, delivery format and desired dosage. See, for example, REMINGTON'S PHARMACEUTICAL SCIENCES, supra. In certain embodiments, such compositions may influence the physical state, stability, rate of in vivo release and rate of in vivo clearance of the antigen-binding molecule of the invention. In certain embodiments, the primary vehicle or carrier in a pharmaceutical composition may be either aqueous or non-aqueous in nature. For example, a suitable vehicle or carrier may be water for injection, physiological saline solution or artificial cerebrospinal fluid, possibly supplemented with other materials common in compositions for parenteral administration. Neutral buffered saline or saline mixed with serum albumin are further exemplary vehicles. In certain embodiments, the antigen-binding molecule of the invention compositions may be prepared for storage by mixing the selected composition having the desired degree of purity with optional formulation agents (REMINGTON'S PHARMACEUTICAL SCIENCES, supra) in the form of a lyophilized cake or an aqueous solution. Further, in certain embodiments, the antigen-binding molecule of the invention may be formulated as a lyophilizate using appropriate excipients such as sucrose.

[0358] When parenteral administration is contemplated, the therapeutic compositions for use in this invention may be provided in the form of a pyrogen-free, parenterally acceptable aqueous solution comprising the desired antigen-binding molecule of the invention in a pharmaceutically acceptable vehicle. A particularly suitable vehicle for parenteral injection is sterile distilled water in which the antigen-binding molecule of the invention is formulated as a sterile, isotonic solution, properly preserved. In certain embodiments, the preparation can involve the formulation of the desired molecule with an agent, such as injectable microspheres, bio-erodible particles, polymeric compounds (such as polylactic acid or polyglycolic acid), beads or liposomes, that may provide controlled or sustained release of the product which can be delivered via depot injection. In certain embodiments, hyaluronic acid may also be used, having the effect of promoting sustained duration in the circulation. In certain embodiments, implantable drug delivery devices may be used to introduce the desired antigen-binding molecule.

[0359] Additional pharmaceutical compositions will be evident to those skilled in the art, including formulations involving the antigen-binding molecule of the invention in sustained- or controlled-delivery/release formulations. Techniques for formulating a variety of other sustained- or controlled-delivery means, such as liposome carriers, bio-erodible microparticles or porous beads and depot injections, are also known to those skilled in the art. See, for example, International Patent Application No. PCT/US93/00829, which describes controlled release of porous polymeric microparticles for delivery of pharmaceutical compositions. Sustained-release preparations may include semipermeable polymer matrices in the form of shaped articles, e.g., films, or microcapsules. Sustained release matrices may include polyesters, hydrogels, polylactides (as disclosed in U.S. Pat. No. 3,773,919 and European Patent Application Publication No. EP 058481), copolymers of L-glutamic acid and gamma ethyl-L-glutamate (Sidman et al., 1983, Biopolymers 2:547-556), poly (2-hydroxyethyl-methacrylate) (Langer et al., 1981, J. Biomed. Mater. Res. 15:167-277 and Langer, 1982, Chem. Tech. 12:98-105), ethylene vinyl acetate (Langer et al., 1981, supra) or poly-D(−)-3-hydroxybutyric acid (European Patent Application Publication No. EP 133,988). Sustained release compositions may also include liposomes that can be prepared by any of several methods known in the art. See, e.g., Eppstein et al., 1985, Proc. Natl. Acad. Sci. U.S.A. 82:3688-3692; European Patent Application Publication Nos. EP 036,676; EP 088,046 and EP 143,949.

[0360] The antigen-binding molecule may also be entrapped in microcapsules prepared, for example, by coacervation techniques or by interfacial polymerization (for example, hydroxymethylcellulose or gelatine-microcapsules and poly (methylmethacylate) microcapsules, respectively), in colloidal drug delivery systems (for example, liposomes, albumin microspheres, microemulsions, nanoparticles and nanocapsules), or in macroemulsions. Such techniques are disclosed in Remington's Pharmaceutical Sciences, 16th edition, Oslo, A., Ed., (1980).

[0361] Pharmaceutical compositions used for in vivo administration are typically provided as sterile preparations. Sterilization can be accomplished by filtration through sterile filtration membranes. When the composition is lyophilized, sterilization using this method may be conducted either prior to or following lyophilization and reconstitution. Compositions for parenteral administration can be stored in lyophilized form or in a solution. Parenteral compositions generally are placed into a container having a sterile access port, for example, an intravenous solution bag or vial having a stopper pierceable by a hypodermic injection needle.

[0362] Another aspect of the invention includes self-buffering antigen-binding molecule of the invention formulations, which can be used as pharmaceutical compositions, as described in international patent application WO 06138181A2 (PCT/US2006/022599). A variety of expositions are available on protein stabilization and formulation materials and methods useful in this regard, such as Arakawa et al., “Solvent interactions in pharmaceutical formulations,” Pharm Res. 8(3): 285-91 (1991); Kendrick et al., “Physical stabilization of proteins in aqueous solution” in: RATIONAL DESIGN OF STABLE PROTEIN FORMULATIONS: THEORY AND PRACTICE, Carpenter and Manning, eds. Pharmaceutical Biotechnology. 13: 61-84 (2002), and Randolph et al., “Surfactant-protein interactions”, Pharm Biotechnol. 13: 159-75 (2002), see particularly the parts pertinent to excipients and processes of the same for self-buffering protein formulations in accordance with the current invention, especially as to protein pharmaceutical products and processes for veterinary and/or human medical uses.

[0363] Salts may be used in accordance with certain embodiments of the invention to, for example, adjust the ionic strength and/or the isotonicity of a formulation and/or to improve the solubility and/or physical stability of a protein or other ingredient of a composition in accordance with the invention. As is well known, ions can stabilize the native state of proteins by binding to charged residues on the protein's surface and by shielding charged and polar groups in the protein and reducing the strength of their electrostatic interactions, attractive, and repulsive interactions. Ions also can stabilize the denatured state of a protein by binding to, in particular, the denatured peptide linkages (—CONH) of the protein. Furthermore, ionic interaction with charged and polar groups in a protein also can reduce intermolecular electrostatic interactions and, thereby, prevent or reduce protein aggregation and insolubility.

[0364] Ionic species differ significantly in their effects on proteins. A number of categorical rankings of ions and their effects on proteins have been developed that can be used in formulating pharmaceutical compositions in accordance with the invention. One example is the Hofmeister series, which ranks ionic and polar non-ionic solutes by their effect on the conformational stability of proteins in solution. Stabilizing solutes are referred to as “kosmotropic”. Destabilizing solutes are referred to as “chaotropic”. Kosmotropes commonly are used at high concentrations (e.g., >1 molar ammonium sulfate) to precipitate proteins from solution (“salting-out”). Chaotropes commonly are used to denture and/or to solubilize proteins (“salting-in”). The relative effectiveness of ions to “salt-in” and “salt-out” defines their position in the Hofmieister series.

[0365] Free amino acids can be used in the antigen-binding molecule of the invention formulations in accordance with various embodiments of the invention as bulking agents, stabilizers, and antioxidants, as well as other standard uses. Lysine, proline, serine, and alanine can be used for stabilizing proteins in a formulation. Glycine is useful in lyophilization to ensure correct cake structure and properties. Arginine may be useful to inhibit protein aggregation, in both liquid and lyophilized formulations. Methionine is useful as an antioxidant.

[0366] Polyols include sugars, e.g., mannitol, sucrose, and sorbitol and polyhydric alcohols such as, for instance, glycerol and propylene glycol, and, for purposes of discussion herein, polyethylene glycol (PEG) and related substances. Polyols are kosmotropic. They are useful stabilizing agents in both liquid and lyophilized formulations to protect proteins from physical and chemical degradation processes. Polyols also are useful for adjusting the tonicity of formulations. Among polyols useful in select embodiments of the invention is mannitol, commonly used to ensure structural stability of the cake in lyophilized formulations. It ensures structural stability to the cake. It is generally used with a lyoprotectant, e.g., sucrose. Sorbitol and sucrose are among preferred agents for adjusting tonicity and as stabilizers to protect against freeze-thaw stresses during transport or the preparation of bulks during the manufacturing process. Reducing sugars (which contain free aldehyde or ketone groups), such as glucose and lactose, can glycate surface lysine and arginine residues. Therefore, they generally are not among preferred polyols for use in accordance with the invention. In addition, sugars that form such reactive species, such as sucrose, which is hydrolyzed to fructose and glucose under acidic conditions, and consequently engenders glycation, also is not among preferred polyols of the invention in this regard. PEG is useful to stabilize proteins and as a cryoprotectant and can be used in the invention in this regard.

[0367] Embodiments of the antigen-binding molecule of the invention formulations further comprise surfactants. Protein molecules may be susceptible to adsorption on surfaces and to denaturation and consequent aggregation at air-liquid, solid-liquid, and liquid-liquid interfaces. These effects generally scale inversely with protein concentration. These deleterious interactions generally scale inversely with protein concentration and typically are exacerbated by physical agitation, such as that generated during the shipping and handling of a product. Surfactants routinely are used to prevent, minimize, or reduce surface adsorption. Useful surfactants in the invention in this regard include polysorbate 20, polysorbate 80, other fatty acid esters of sorbitan polyethoxylates, and poloxamer 188. Surfactants also are commonly used to control protein conformational stability. The use of surfactants in this regard is protein-specific since, any given surfactant typically will stabilize some proteins and destabilize others.

[0368] Polysorbates are susceptible to oxidative degradation and often, as supplied, contain sufficient quantities of peroxides to cause oxidation of protein residue side-chains, especially methionine. Consequently, polysorbates should be used carefully, and when used, should be employed at their lowest effective concentration. In this regard, polysorbates exemplify the general rule that excipients should be used in their lowest effective concentrations.

[0369] Embodiments of the antigen-binding molecule of the invention formulations further comprise one or more antioxidants. To some extent deleterious oxidation of proteins can be prevented in pharmaceutical formulations by maintaining proper levels of ambient oxygen and temperature and by avoiding exposure to light. Antioxidant excipients can be used as well to prevent oxidative degradation of proteins. Among useful antioxidants in this regard are reducing agents, oxygen/free-radical scavengers, and chelating agents. Antioxidants for use in therapeutic protein formulations in accordance with the invention preferably are water-soluble and maintain their activity throughout the shelf life of a product. EDTA is a preferred antioxidant in accordance with the invention in this regard. Antioxidants can damage proteins. For instance, reducing agents, such as glutathione in particular, can disrupt intramolecular disulfide linkages. Thus, antioxidants for use in the invention are selected to, among other things, eliminate or sufficiently reduce the possibility of themselves damaging proteins in the formulation.

[0370] Formulations in accordance with the invention may include metal ions that are protein co-factors and that are necessary to form protein coordination complexes, such as zinc necessary to form certain insulin suspensions. Metal ions also can inhibit some processes that degrade proteins. However, metal ions also catalyze physical and chemical processes that degrade proteins. Magnesium ions (10-120 mM) can be used to inhibit isomerization of aspartic acid to isoaspartic acid. Ca⁺² ions (up to 100 mM) can increase the stability of human deoxyribonuclease. Mg⁺², Mn⁺², and Zn+2 however, can destabilize rhDNase. Similarly, Ca⁺² and Sr⁺² can stabilize Factor VIII, it can be destabilized by Mg⁺², Mn⁺² and Zn⁺², Cu⁺² and Fe⁺², and its aggregation can be increased by Al⁺³ ions.

[0371] Embodiments of the antigen-binding molecule of the invention formulations further comprise one or more preservatives. Preservatives are necessary when developing multi-dose parenteral formulations that involve more than one extraction from the same container. Their primary function is to inhibit microbial growth and ensure product sterility throughout the shelf-life or term of use of the drug product. Commonly used preservatives include benzyl alcohol, phenol and m-cresol. Although preservatives have a long history of use with small-molecule parenterals, the development of protein formulations that includes preservatives can be challenging. Preservatives almost always have a destabilizing effect (aggregation) on proteins, and this has become a major factor in limiting their use in multi-dose protein formulations. To date, most protein drugs have been formulated for single-use only. However, when multi-dose formulations are possible, they have the added advantage of enabling patient convenience, and increased marketability. A good example is that of human growth hormone (hGH) where the development of preserved formulations has led to commercialization of more convenient, multi-use injection pen presentations. At least four such pen devices containing preserved formulations of hGH are currently available on the market. Norditropin (liquid, Novo Nordisk), Nutropin AQ (liquid, Genentech) & Genotropin (lyophilized—dual chamber cartridge, Pharmacia & Upjohn) contain phenol while Somatrope (Eli Lilly) is formulated with m-cresol. Several aspects need to be considered during the formulation and development of preserved dosage forms. The effective preservative concentration in the drug product must be optimized. This requires testing a given preservative in the dosage form with concentration ranges that confer anti-microbial effectiveness without compromising protein stability.

[0372] As may be expected, development of liquid formulations containing preservatives are more challenging than lyophilized formulations. Freeze-dried products can be lyophilized without the preservative and reconstituted with a preservative containing diluent at the time of use. This shortens the time for which a preservative is in contact with the protein, significantly minimizing the associated stability risks. With liquid formulations, preservative effectiveness and stability should be maintained over the entire product shelf-life (about 18 to 24 months). An important point to note is that preservative effectiveness should be demonstrated in the final formulation containing the active drug and all excipient components.

[0373] The antigen-binding molecules disclosed herein may also be formulated as immuno-liposomes. A “liposome” is a small vesicle composed of various types of lipids, phospholipids and/or surfactant which is useful for delivery of a drug to a mammal. The components of the liposome are commonly arranged in a bilayer formation, similar to the lipid arrangement of biological membranes. Liposomes containing the antigen-binding molecule are prepared by methods known in the art, such as described in Epstein et al., Proc. Natl. Acad. Sci. USA, 82: 3688 (1985); Hwang et al., Proc. Natl Acad. Sci. USA, 77: 4030 (1980); U.S. Pat. Nos. 4,485,045 and 4,544,545; and WO 97/38731. Liposomes with enhanced circulation time are disclosed in U.S. Pat. No. 5,013,556. Particularly useful liposomes can be generated by the reverse phase evaporation method with a lipid composition comprising phosphatidylcholine, cholesterol and PEG-derivatized phosphatidylethanolamine (PEG-PE). Liposomes are extruded through filters of defined pore size to yield liposomes with the desired diameter. Fab′ fragments of the antigen-binding molecule of the present invention can be conjugated to the liposomes as described in Martin et al. J. Biol. Chem. 257: 286-288 (1982) via a disulfide interchange reaction. A chemotherapeutic agent is optionally contained within the liposome. See Gabizon et al. J. National Cancer Inst. 81 (19) 1484 (1989).

[0374] Once the pharmaceutical composition has been formulated, it may be stored in sterile vials as a solution, suspension, gel, emulsion, solid, crystal, or as a dehydrated or lyophilized powder. Such formulations may be stored either in a ready-to-use form or in a form (e.g., lyophilized) that is reconstituted prior to administration.

[0375] The biological activity of the pharmaceutical composition defined herein can be determined for instance by cytotoxicity assays, as described in the following examples, in WO 99/54440 or by Schlereth et al. (Cancer Immunol. Immunother. 20 (2005), 1-12). “Efficacy” or “in vivo efficacy” as used herein refers to the response to therapy by the pharmaceutical composition of the invention, using e.g. standardized NCI response criteria. The success or in vivo efficacy of the therapy using a pharmaceutical composition of the invention refers to the effectiveness of the composition for its intended purpose, i.e. the ability of the composition to cause its desired effect, i.e. depletion of pathologic cells, e.g. tumor cells. The in vivo efficacy may be monitored by established standard methods for the respective disease entities including, but not limited to white blood cell counts, differentials, Fluorescence Activated Cell Sorting, bone marrow aspiration. In addition, various disease specific clinical chemistry parameters and other established standard methods may be used. Furthermore, computer-aided tomography, X-ray, nuclear magnetic resonance tomography (e.g. for National Cancer Institute-criteria based response assessment [Cheson B D, Homing S J, Coiffier B, Shipp M A, Fisher R I, Connors J M, Lister T A, Vose J, Grillo-Lopez A, Hagenbeek A, Cabanillas F, Klippensten D, Hiddemann W, Castellino R, Harris N L, Armitage J O, Carter W, Hoppe R, Canellos GP. Report of an international workshop to standardize response criteria for non-Hodgkin's lymphomas. NCI Sponsored International Working Group. J Clin Oncol. 1999 April; 17(4):1244]), positron-emission tomography scanning, white blood cell counts, differentials, Fluorescence Activated Cell Sorting, bone marrow aspiration, lymph node biopsies/histologies, and various lymphoma specific clinical chemistry parameters (e.g. lactate dehydrogenase) and other established standard methods may be used.

[0376] Another major challenge in the development of drugs such as the pharmaceutical composition of the invention is the predictable modulation of pharmacokinetic properties. To this end, a pharmacokinetic profile of the drug candidate, i.e. a profile of the pharmacokinetic parameters that affect the ability of a particular drug to treat a given condition, can be established. Pharmacokinetic parameters of the drug influencing the ability of a drug for treating a certain disease entity include, but are not limited to: half-life, volume of distribution, hepatic first-pass metabolism and the degree of blood serum binding. The efficacy of a given drug agent can be influenced by each of the parameters mentioned above. It is an envisaged characteristic of the antigen-binding molecules of the present invention provided with the specific FC modality that they comprise, for example, differences in pharmacokinetic behavior. A half-life extended targeting antigen-binding molecule according to the present invention preferably shows a surprisingly increased residence time in vivo in comparison to “canonical” non-HLE versions of said antigen-binding molecule.

[0377] “Half-life” means the time where 50% of an administered drug are eliminated through biological processes, e.g. metabolism, excretion, etc. By “hepatic first-pass metabolism” is meant the propensity of a drug to be metabolized upon first contact with the liver, i.e. during its first pass through the liver. “Volume of distribution” means the degree of retention of a drug throughout the various compartments of the body, like e.g. intracellular and extracellular spaces, tissues and organs, etc. and the distribution of the drug within these compartments. “Degree of blood serum binding” means the propensity of a drug to interact with and bind to blood serum proteins, such as albumin, leading to a reduction or loss of biological activity of the drug.

[0378] Pharmacokinetic parameters also include bioavailability, lag time (Tlag), Tmax, absorption rates, more onset and/or Cmax for a given amount of drug administered. “Bioavailability” means the amount of a drug in the blood compartment. “Lag time” means the time delay between the administration of the drug and its detection and measurability in blood or plasma. “Tmax” is the time after which maximal blood concentration of the drug is reached, and “Cmax” is the blood concentration maximally obtained with a given drug. The time to reach a blood or tissue concentration of the drug which is required for its biological effect is influenced by all parameters. Pharmacokinetic parameters of bispecific antigen-binding molecules exhibiting cross-species specificity, which may be determined in preclinical animal testing in non-chimpanzee primates as outlined above, are also set forth e.g. in the publication by Schlereth et al. (Cancer Immunol. Immunother. 20 (2005), 1-12).

[0379] In a preferred aspect of the invention the pharmaceutical composition is stable for at least four weeks at about −20° C. As apparent from the appended examples the quality of an antigen-binding molecule of the invention vs. the quality of corresponding state of the art antigen-binding molecules may be tested using different systems. Those tests are understood to be in line with the “ICH Harmonised Tripartite Guideline: Stability Testing of Biotechnological Biological Products Q5C and Specifications: Test procedures and Acceptance Criteria for Biotech Biotechnological Biological Products Q6B” and, thus are elected to provide a stability-indicating profile that provides certainty that changes in the identity, purity and potency of the product are detected. It is well accepted that the term purity is a relative term. Due to the effect of glycosylation, deamidation, or other heterogeneities, the absolute purity of a biotechnological/biological product should be typically assessed by more than one method and the purity value derived is method-dependent. For the purpose of stability testing, tests for purity should focus on methods for determination of degradation products.

[0380] For the assessment of the quality of a pharmaceutical composition comprising an antigen-binding molecule of the invention may be analyzed e.g. by analyzing the content of soluble aggregates in a solution (HMWS per size exclusion). It is preferred that stability for at least four weeks at about −20° C. is characterized by a content of less than 1.5% HMWS, preferably by less than 1% HMWS.

[0381] A preferred formulation for the antigen-binding molecule as a pharmaceutical composition may e.g. comprise the components of a formulation as described below:
[0382] Formulation:
   [0383] potassium phosphate, L-arginine hydrochloride, trehalose dihydrate, polysorbate 80 at pH 6.0

[0384] Other examples for the assessment of the stability of an antigen-binding molecule of the invention in form of a pharmaceutical composition are provided in the appended examples 4-12. In those examples embodiments of antigen-binding molecules of the invention are tested with respect to different stress conditions in different pharmaceutical formulations and the results compared with other half-life extending (HLE) formats of bispecific T cell engaging antigen-binding molecule known from the art. In general, it is envisaged that antigen-binding molecules provided with the specific FC modality according to the present invention are typically more stable over a broad range of stress conditions such as temperature and light stress, both compared to antigen-binding molecules provided with different HLE formats and without any HLE format (e.g. “canonical” antigen-binding molecules). Said temperature stability may relate both to decreased (below room temperature including freezing) and increased (above room temperature including temperatures up to or above body temperature) temperature. As the person skilled in the art will acknowledge, such improved stability with regard to stress, which is hardly avoidable in clinical practice, makes the antigen-binding molecule safer because less degradation products will occur in clinical practice. In consequence, said increased stability means increased safety.

[0385] One embodiment provides the antigen-binding molecule of the invention or the antigen-binding molecule produced according to the process of the invention for use in the prevention, treatment or amelioration of a cancer correlating with CS1, BCMA, CD20, CD22, FLT3, CD123, CLL1, MSLN, or EpCAM expression or CS1, BCMA, CD20, CD22, FLT3, CD123, CLL1, MSLN, or EpCAM overexpression, such as prostate cancer.

[0386] The formulations described herein are useful as pharmaceutical compositions in the treatment, amelioration and/or prevention of the pathological medical condition as described herein in a patient in need thereof. The term “treatment” refers to both therapeutic treatment and prophylactic or preventative measures. Treatment includes the application or administration of the formulation to the body, an isolated tissue, or cell from a patient who has a disease/disorder, a symptom of a disease/disorder, or a predisposition toward a disease/disorder, with the purpose to cure, heal, alleviate, relieve, alter, remedy, ameliorate, improve, or affect the disease, the symptom of the disease, or the predisposition toward the disease.

[0387] The term “amelioration” as used herein refers to any improvement of the disease state of a patient having a disease as specified herein below, by the administration of an antigen-binding molecule according to the invention to a subject in need thereof. Such an improvement may also be seen as a slowing or stopping of the progression of the patient's disease. The term “prevention” as used herein means the avoidance of the occurrence or re-occurrence of a patient having a tumor or cancer or a metastatic cancer as specified herein below, by the administration of an antigen-binding molecule according to the invention to a subject in need thereof.

[0388] The term “disease” refers to any condition that would benefit from treatment with the antigen-binding molecule or the pharmaceutic composition described herein. This includes chronic and acute disorders or diseases including those pathological conditions that predispose the mammal to the disease in question.

[0389] A “neoplasm” is an abnormal growth of tissue, usually but not always forming a mass. When also forming a mass, it is commonly referred to as a “tumor”. Neoplasms or tumors or can be benign, potentially malignant (pre-cancerous), or malignant. Malignant neoplasms are commonly called cancer. They usually invade and destroy the surrounding tissue and may form metastases, i.e., they spread to other parts, tissues or organs of the body. Hence, the term “metatstatic cancer” encompasses metastases to other tissues or organs than the one of the original tumor. Lymphomas and leukemias are lymphoid neoplasms. For the purposes of the present invention, they are also encompassed by the terms “tumor” or “cancer”.

[0390] The term “viral disease” describes diseases, which are the result of a viral infection of a subject.

[0391] The term “immunological disorder” as used herein describes in line with the common definition of this term immunological disorders such as autoimmune diseases, hypersensitivities, immune deficiencies.

[0392] In one embodiment the invention provides a method for the treatment or amelioration of a cancer correlating with CS1, BCMA, CD20, CD22, FLT3, CD123, CLL1, MSLN, or EpCAM expression or CS1, BCMA, CD20, CD22, FLT3, CD123, CLL1, MSLN, or EpCAM overexpression, comprising the step of administering to a subject in need thereof the antigen-binding molecule of the invention, or the antigen-binding molecule produced according to the process of the invention. The CS1, BCMA, CD20, CD22, FLT3, CD123, CLL1, MSLN, or EpCAMxCD3 bispecific single chain antibody is particularly advantageous for the therapy of cancer, preferably solid tumors, more preferably carcinomas and prostate cancer.

[0393] The terms “subject in need” or those “in need of treatment” includes those already with the disorder, as well as those in which the disorder is to be prevented. The subject in need or “patient” includes human and other mammalian subjects that receive either prophylactic or therapeutic treatment.

[0394] The antigen-binding molecule of the invention will generally be designed for specific routes and methods of administration, for specific dosages and frequencies of administration, for specific treatments of specific diseases, with ranges of bio-availability and persistence, among other things. The materials of the composition are preferably formulated in concentrations that are acceptable for the site of administration.

[0395] Formulations and compositions thus may be designed in accordance with the invention for delivery by any suitable route of administration. In the context of the present invention, the routes of administration include, but are not limited to
[0396] topical routes (such as epicutaneous, inhalational, nasal, opthalmic, auricular/aural, vaginal, mucosal);
[0397] enteral routes (such as oral, gastrointestinal, sublingual, sublabial, buccal, rectal); and
[0398] parenteral routes (such as intravenous, intraarterial, intraosseous, intramuscular, intracerebral, intracerebroventricular, epidural, intrathecal, subcutaneous, intraperitoneal, extra-amniotic, intraarticular, intracardiac, intradermal, intralesional, intrauterine, intravesical, intravitreal, transdermal, intranasal, transmucosal, intrasynovial, intraluminal).

[0399] The pharmaceutical compositions and the antigen-binding molecule of this invention are particularly useful for parenteral administration, e.g., subcutaneous or intravenous delivery, for example by injection such as bolus injection, or by infusion such as continuous infusion. Pharmaceutical compositions may be administered using a medical device. Examples of medical devices for administering pharmaceutical compositions are described in U.S. Pat. Nos. 4,475,196; 4,439,196; 4,447,224; 4,447, 233; 4,486,194; 4,487,603; 4,596,556; 4,790,824; 4,941,880; 5,064,413; 5,312,335; 5,312,335; 5,383,851; and 5,399,163.

[0400] In particular, the present invention provides for an uninterrupted administration of the suitable composition. As a non-limiting example, uninterrupted or substantially uninterrupted, i.e. continuous administration may be realized by a small pump system worn by the patient for metering the influx of therapeutic agent into the body of the patient. The pharmaceutical composition comprising the antigen-binding molecule of the invention can be administered by using said pump systems. Such pump systems are generally known in the art, and commonly rely on periodic exchange of cartridges containing the therapeutic agent to be infused. When exchanging the cartridge in such a pump system, a temporary interruption of the otherwise uninterrupted flow of therapeutic agent into the body of the patient may ensue. In such a case, the phase of administration prior to cartridge replacement and the phase of administration following cartridge replacement would still be considered within the meaning of the pharmaceutical means and methods of the invention together make up one “uninterrupted administration” of such therapeutic agent.

[0401] The continuous or uninterrupted administration of the antigen-binding molecules of the invention may be intravenous or subcutaneous by way of a fluid delivery device or small pump system including a fluid driving mechanism for driving fluid out of a reservoir and an actuating mechanism for actuating the driving mechanism. Pump systems for subcutaneous administration may include a needle or a cannula for penetrating the skin of a patient and delivering the suitable composition into the patient's body. Said pump systems may be directly fixed or attached to the skin of the patient independently of a vein, artery or blood vessel, thereby allowing a direct contact between the pump system and the skin of the patient. The pump system can be attached to the skin of the patient for 24 hours up to several days. The pump system may be of small size with a reservoir for small volumes. As a non-limiting example, the volume of the reservoir for the suitable pharmaceutical composition to be administered can be between 0.1 and 50 ml.

[0402] The continuous administration may also be transdermal by way of a patch worn on the skin and replaced at intervals. One of skill in the art is aware of patch systems for drug delivery suitable for this purpose. It is of note that transdermal administration is especially amenable to uninterrupted administration, as exchange of a first exhausted patch can advantageously be accomplished simultaneously with the placement of a new, second patch, for example on the surface of the skin immediately adjacent to the first exhausted patch and immediately prior to removal of the first exhausted patch. Issues of flow interruption or power cell failure do not arise.

[0403] If the pharmaceutical composition has been lyophilized, the lyophilized material is first reconstituted in an appropriate liquid prior to administration. The lyophilized material may be reconstituted in, e.g., bacteriostatic water for injection (BWFI), physiological saline, phosphate buffered saline (PBS), or the same formulation the protein had been in prior to lyophilization.

[0404] The compositions of the present invention can be administered to the subject at a suitable dose which can be determined e.g. by dose escalating studies by administration of increasing doses of the antigen-binding molecule of the invention exhibiting cross-species specificity described herein to non-chimpanzee primates, for instance macaques. As set forth above, the antigen-binding molecule of the invention exhibiting cross-species specificity described herein can be advantageously used in identical form in preclinical testing in non-chimpanzee primates and as drug in humans. The dosage regimen will be determined by the attending physician and clinical factors. As is well known in the medical arts, dosages for any one patient depend upon many factors, including the patient's size, body surface area, age, the particular compound to be administered, sex, time and route of administration, general health, and other drugs being administered concurrently.

[0405] The term “effective dose” or “effective dosage” is defined as an amount sufficient to achieve or at least partially achieve the desired effect. The term “therapeutically effective dose” is defined as an amount sufficient to cure or at least partially arrest the disease and its complications in a patient already suffering from the disease. Amounts or doses effective for this use will depend on the condition to be treated (the indication), the delivered antigen-binding molecule, the therapeutic context and objectives, the severity of the disease, prior therapy, the patient's clinical history and response to the therapeutic agent, the route of administration, the size (body weight, body surface or organ size) and/or condition (the age and general health) of the patient, and the general state of the patient's own immune system. The proper dose can be adjusted according to the judgment of the attending physician such that it can be administered to the patient once or over a series of administrations, and in order to obtain the optimal therapeutic effect.

[0406] A typical dosage may range from about 0.1 μg/kg to up to about 30 mg/kg or more, depending on the factors mentioned above. In specific embodiments, the dosage may range from 1.0 μg/kg up to about 20 mg/kg, optionally from 10 μg/kg up to about 10 mg/kg or from 100 μg/kg up to about 5 mg/kg.

[0407] A therapeutic effective amount of an antigen-binding molecule of the invention preferably results in a decrease in severity of disease symptoms, an increase in frequency or duration of disease symptom-free periods or a prevention of impairment or disability due to the disease affliction. For treating diseases correlating with CS1, BCMA, CD20, CD22, FLT3, CD123, CLL1, MSLN, or EpCAM expression as described herein above, a therapeutically effective amount of the antigen-binding molecule of the invention, here: an anti-CS1, BCMA, CD20, CD22, FLT3, CD123, CLL1, MSLN, or EpCAM/anti-CD3 antigen-binding molecule, preferably inhibits cell growth or tumor growth by at least about 20%, at least about 40%, at least about 50%, at least about 60%, at least about 70%, at least about 80%, or at least about 90% relative to untreated patients. The ability of a compound to inhibit tumor growth may be evaluated in an animal model predictive of efficacy

[0408] The pharmaceutical composition can be administered as a sole therapeutic or in combination with additional therapies such as anti-cancer therapies as needed, e.g. other proteinaceous and non-proteinaceous drugs. These drugs may be administered simultaneously with the composition comprising the antigen-binding molecule of the invention as defined herein or separately before or after administration of said antigen-binding molecule in timely defined intervals and doses.

[0409] The term “effective and non-toxic dose” as used herein refers to a tolerable dose of an inventive antigen-binding molecule which is high enough to cause depletion of pathologic cells, tumor elimination, tumor shrinkage or stabilization of disease without or essentially without major toxic effects. Such effective and non-toxic doses may be determined e.g. by dose escalation studies described in the art and should be below the dose inducing severe adverse side events (dose limiting toxicity, DLT).

[0410] The term “toxicity” as used herein refers to the toxic effects of a drug manifested in adverse events or severe adverse events. These side events may refer to a lack of tolerability of the drug in general and/or a lack of local tolerance after administration. Toxicity could also include teratogenic or carcinogenic effects caused by the drug.

[0411] The term “safety”, “in vivo safety” or “tolerability” as used herein defines the administration of a drug without inducing severe adverse events directly after administration (local tolerance) and during a longer period of application of the drug. “Safety”, “in vivo safety” or “tolerability” can be evaluated e.g. at regular intervals during the treatment and follow-up period. Measurements include clinical evaluation, e.g. organ manifestations, and screening of laboratory abnormalities. Clinical evaluation may be carried out and deviations to normal findings recorded/coded according to NCI-CTC and/or MedDRA standards. Organ manifestations may include criteria such as allergy/immunology, blood/bone marrow, cardiac arrhythmia, coagulation and the like, as set forth e.g. in the Common Terminology Criteria for adverse events v3.0 (CTCAE). Laboratory parameters which may be tested include for instance hematology, clinical chemistry, coagulation profile and urine analysis and examination of other body fluids such as serum, plasma, lymphoid or spinal fluid, liquor and the like. Safety can thus be assessed e.g. by physical examination, imaging techniques (i.e. ultrasound, x-ray, CT scans, Magnetic Resonance Imaging (MRI), other measures with technical devices (i.e. electrocardiogram), vital signs, by measuring laboratory parameters and recording adverse events. For example, adverse events in non-chimpanzee primates in the uses and methods according to the invention may be examined by histopathological and/or histochemical methods.

[0412] The above terms are also referred to e.g. in the Preclinical safety evaluation of biotechnology-derived pharmaceuticals S6; ICH Harmonised Tripartite Guideline; ICH Steering Committee meeting on Jul. 16, 1997.

[0413] Finally, the invention provides a kit comprising an antigen-binding molecule of the invention or produced according to the process of the invention, a pharmaceutical composition of the invention, a polynucleotide of the invention, a vector of the invention and/or a host cell of the invention.

[0414] In the context of the present invention, the term “kit” means two or more components—one of which corresponding to the antigen-binding molecule, the pharmaceutical composition, the vector or the host cell of the invention—packaged together in a container, recipient or otherwise. A kit can hence be described as a set of products and/or utensils that are sufficient to achieve a certain goal, which can be marketed as a single unit.

[0415] The kit may comprise one or more recipients (such as vials, ampoules, containers, syringes, bottles, bags) of any appropriate shape, size and material (preferably waterproof, e.g. plastic or glass) containing the antigen-binding molecule or the pharmaceutical composition of the present invention in an appropriate dosage for administration (see above). The kit may additionally contain directions for use (e.g. in the form of a leaflet or instruction manual), means for administering the antigen-binding molecule of the present invention such as a syringe, pump, infuser or the like, means for reconstituting the antigen-binding molecule of the invention and/or means for diluting the antigen-binding molecule of the invention.

[0416] The invention also provides kits for a single-dose administration unit. The kit of the invention may also contain a first recipient comprising a dried/lyophilized antigen-binding molecule and a second recipient comprising an aqueous formulation. In certain embodiments of this invention, kits containing single-chambered and multi-chambered pre-filled syringes (e.g., liquid syringes and lyosyringes) are provided.

[0417] It is noted that as used herein, the singular forms “a”, “an”, and “the”, include plural references unless the context clearly indicates otherwise. Thus, for example, reference to “a reagent” includes one or more of such different reagents and reference to “the method” includes reference to equivalent steps and methods known to those of ordinary skill in the art that could be modified or substituted for the methods described herein.

[0418] Unless otherwise indicated, the term “at least” preceding a series of elements is to be understood to refer to every element in the series. Those skilled in the art will recognize, or be able to ascertain using no more than routine experimentation, many equivalents to the specific embodiments of the invention described herein. Such equivalents are intended to be encompassed by the present invention.

[0419] The term “and/or” wherever used herein includes the meaning of “and”, “or” and “all or any other combination of the elements connected by said term”.

[0420] The term “about” or “approximately” as used herein means within 20%, preferably within 10%, and more preferably within 5% of a given value or range. It includes, however, also the concrete number, e.g., about 20 includes 20.

[0421] The term “less than” or “greater than” includes the concrete number. For example, less than 20 means less than or equal to. Similarly, more than or greater than means more than or equal to, or greater than or equal to, respectively.

[0422] Throughout this specification and the claims which follow, unless the context requires otherwise, the word “comprise”, and variations such as “comprises” and “comprising”, will be understood to imply the inclusion of a stated integer or step or group of integers or steps but not the exclusion of any other integer or step or group of integer or step. When used herein the term “comprising” can be substituted with the term “containing” or “including” or sometimes when used herein with the term “having”.

[0423] When used herein “consisting of” excludes any element, step, or ingredient not specified in the claim element. When used herein, “consisting essentially of” does not exclude materials or steps that do not materially affect the basic and novel characteristics of the claim.

[0424] In each instance herein any of the terms “comprising”, “consisting essentially of” and “consisting of” may be replaced with either of the other two terms.

[0425] It should be understood that this invention is not limited to the particular methodology, protocols, material, reagents, and substances, etc., described herein and as such can vary. The terminology used herein is for the purpose of describing particular embodiments only, and is not intended to limit the scope of the present invention, which is defined solely by the claims.

[0426] All publications and patents cited throughout the text of this specification (including all patents, patent applications, scientific publications, manufacturer's specifications, instructions, etc.), whether supra or infra, are hereby incorporated by reference in their entirety. Nothing herein is to be construed as an admission that the invention is not entitled to antedate such disclosure by virtue of prior invention. To the extent the material incorporated by reference contradicts or is inconsistent with this specification, the specification will supersede any such material.

[0427] A better understanding of the present invention and of its advantages will be obtained from the following examples, offered for illustrative purposes only. The examples are not intended to limit the scope of the present invention in any way.

### EXAMPLES

### Example 1: Modeling of Inter-Domain Space Dependent on Linker Length

[0428] A dual targeting MSLNxEpCAM HLE BiTE® molecule has been modelled for interdomain space at various linker lengths based on structural data of the complexed MSLN and of the extracellular portion of EpCAM as an example, which can be generalized to any multitargeting antigen-binding molecule according to the present invention. The linkers were modeled using the software tool “Coot” (version 0.3.3 MRC Laboratory of Molecular Biology, Cambridge, UK), starting from a model scFv (i.e. the crystal structure of I2C) and electron density used as guide in areas adjacent to the surface of the protein. Areas further than 5 Å away were modeled using the typical backbone peptide bond distance and regularized every 5 residue additions to maintain geometry. Linker length of several residues were thus constructed and patched onto the multitargeting HLE BiTE® model. The software suite Schrodinger (version 2019-2, Schrödinger, NY, US) was used to energy minimize models after introduction of the linker and to position the molecules in different regions while maintaining linker length and geometry to best mimic the most likely situation in reality. The linkers were allowed to extend to maximum, without compromising geometry, Hence, the modeling data is indicative for a minimum linker length that could, as a minimum, avoid steric hindrance upon full linker extension, wherein linker compares to a spring which can extend or wrap itself). Accordingly, a linker below a certain threshold, would not be able to avoid steric hindrance no matter how much it extends itself.

[0429] In a first model, a SGGGGS linker was modeled between the two target binding domains which are scFvs and a (GGGGS)3 linker between the VH and VL within the binding domains, respectively. Each linker was regularized and minimized. The SGGGGS linker was based on the theoretical and known ca-ca distance in the peptidic bond, corroborated by structure. The linker was conformationally probed (using MD) around a sphere with a radius of 19 Å, which corresponds to the extended linker (maximum length). Keeping the first binding domain, i.e. the anti-MSLN binding domain in the present example, fixed, three conformations are shown (FIGS. 3A, B and C) where the linker swings in different orthogonal directions and the resulting anti EpCAM scFv position is shown (linker conformation 1, 2 and 3, respectively). In case of linker position 3, a complete clash is observed, while in positions 1 and 2, no clash but is observed. However, the space is still not enough to accommodate the TAA2 EpCAM based on where the CDRs are located in the second binding domain of the multitargeting antigen-binding molecule. Hence, this result strongly indicates the need of a longer linker between the two target binding domains. If the skilled person used the size of target EpCAM as guide, one would predict a better linker to be one that has at least about 20 residues (i.e. 70 A divided by 3.8).

[0430] In order to better quantify what linker lengths would be expected to work and not to work in the context of a multitargeting antigen-binding molecule in the context of the present invention, as exemplified by a dual targeting MSLNxEpCAM HLE BiTE®, the linker length between the first and the second target binder was varied at 12, 18 and 30 amino acids and the resulting space between the two target binding domains was modeled as explained above with respect to conformation 2. In conclusion, lack of space renders a short linker solution such as a SGGGS linker between the two target binders according to the present invention a non-obvious choice for this setup of target binders in a multitargeting antigen-binding molecule, in particular a dual targeting BiTE® molecule. FIG. 4A shows that a linker of 12 aa (SGGGGSGGGGSG) offers a maximum available space of 39 to 50 Å which would not accommodate the target to be bound at 45 to 70 Å. Also, an 18 aa long linker (SGGGGSGGGGSGGGGSGG) with a maximum available space between binding domains in a setup as described herein of 54 to 60 Awould likely not allow binding to the second TAA2 of an exemplary size of 45 to 70 Å (FIG. 4B). In contrast, a 30 aa long linker would offer 84 to 94 Å of maximum space, thus safely allowing the target binder to bind its exemplified target EpCAM of about 45 to 70 Å. Thus, the skilled person would have chosen a linker length at least greater than 18 aa to ensure binding of the second TAA2 by the dual targeting MSLNxEpCAM HLE BiTE® molecule as an example for a multispecific antigen-binding molecule according to the present invention. FIGS. 4D to F show a comparable modeling for a dual targeting CD20xCD22 HLE BiTE (SEQ ID NO: 1817). CD20 epitope conformation is derived from PDB ID 6Y9A, and CD22 epitope conformation is derived from PDB ID 5VL3. The linker between the two target binders is GGGGS (Linker distance span: 3-8 Å, available CDR space for CD22 binding 35-40 Å) which is expected lead to a steric clash (D). For a linker (GGGGS)6, the linker distance span is larger, with available CDR space for the CD22 binding of 35-80 A (E). For a linker (GGGGS)10, the linker distance span is larger, with available CDR space for the CD22 binding of 35˜150 A (F). The situation in (E) and (F) is not supposed to lead to a steric clash and based on the modelling, would be preferred over (D), which is unexpectedly not the case as demonstrated in practical experiments. FIGS. 4G to I show a comparable modeling for a dual targeting CS1xCD22 HLE BiTE (SEQ ID NO: 1437). The linker between the two target binders is GGGGS (Linker distance span: 3-8 Å, available CDR space for BCMA binding 35˜40 A) which is prone to lead to a steric clash (G). For a linker (GGGGS)6, the linker distance span is larger, with available CDR space for the BCMA binding of 35-80 A (H). For a linker (GGGGS)10, the linker distance span is larger, with available CDR space for the BCMA binding of 35˜150 A (I). The situation in (H) and (I) is not supposed to lead to a steric clash and based on the modelling, would be preferred over (G), which is unexpectedly not the case as demonstrated in practical experiments.

### Example 2: Determination of Simultaneous Binding of Target Binding Domains of Multitargeting Antigen-Binding Molecules

[0431] Simultaneous dual binding was determined by electrically switchable nanolever measurements which were performed on a DRX2 instrument, using a multi-purpose 96 bp dual color biochip (switchSENSE® by Dynamic Biosensors GmbH; Planegg, Germany). Prior to kinetic experiments, target antigens EpCAM and MSLN were conjugated to 96 bp DNA Nanolevers (Dynamic Biosensors GmbH), target EpCAM to cNL-A96, complementary to DNA with green fluorophore, and target MSLN to cNL-B96, complementary to DNA with red fluorophore. All measurements were performed in running buffer HE140 (10 mM Hepes, 140 mM NaCl, 0.05% Tween20, 50 μM EDTA, 50 μM EGTA, pH7.4) at room temperature.

[0432] Kinetic measurements of a multitargeting antigen-binding molecule, i.e. the dual targeting EpCAMxMSLN HLE BiTE® molecule (SEQ ID NO: 3704) were performed in fluorescence proximity sensing mode using a standard kinetics assay from the switchBUILD software (Dynamic Biosensors GmbH) with several BiTE molecule concentrations. Therefore, the two DNA-linked antigens EpCAM and MSLN were mixed at an equal ratio and immobilized on the biochip to evaluate simultaneous binding of a dual targeting HLE BiTE® molecule to each antigen upon distinct detection of quenching of each fluorophore. Kinetic rate constants (K_{D}, kₒₙ and k_{off}) were calculated with the switchANALYSIS software (Dynamic Biosensors GmbH).

[0433] Results (FIG. 5A to F)

Binding kinetics of a dual targeting HLE BiTE® molecule to two antigens EpCAM and MSLN (SEQ ID NO: 3704) were determined on a DRX2 instrument, using a multi-purpose 96 bp dual color biochip immobilized with a mix of antigen EpCAM (target A) and MSLN (target B). It could be shown, that the dual targeting HLE BiTE® molecule binds to both antigens within one kinetic measurement. Furthermore, the presence of both antigens results in a biphasic dissociation of the HLE BiTE® molecule, with a faster dissociation k_{off,A} respectively k_{off,B} resulting from the binding to one target and a slower dissociation k_{off,AB} when bound to both antigens:

K_{D,A}=2.65±0.06 nM

k_{on,A}=1.72±0.03E+06M−1 s−1

k_{off,A}=4.55±0.08 E−03 s−1

K_{D,AB}=389±5 pM

k_{on,Ab}=1.87±0.03E+06M−1 s−1

k_{off,AB}=7.30±0.30E−04 s−1

K_{D,B}=4.51±0.05 nM

k_{on,B}=1.20±0.04E+07M−1 s−1

k_{off,B}=5.41±0.52 E−02 s−1

K_{D,AB}=39±1 pM

k_{on,AB}=1.50±0.04 E+07 M−1 s−1

k_{off,AB}=5.80±0.60 E−04 s−1

This leads to a higher overall binding strength, seen in the increase of KD values, KD,A 2.65 nM to KD,AB of 389 pM and KD,B 4.51 nM to KD,AB of 389 pM. This improvement of KD respectively the higher binding strength of the HLE BiTE® molecule, demonstrates the simultaneous binding of the two target binding domains.

### Example 3: Determination of Simultaneous Binding of CLL1 and FLT3 Target Binding Domains by Electrically Switchable Nanolever Measurement on Mixture of Targets

[0434] All Electrically switchable nanolever measurements were performed on a DRX2 instrument, using a bi-functional 96 bp dual color biochip (switchSENSE® by Dynamic Biosensors GmbH; Planegg, Germany). Prior to kinetic affinity experiments, target antigens C (CLL1) and D (FLT3) were conjugated to DNA nanolevers (Dynamic Biosensors GmbH). Target C to DNA nanolevers cNL-B42 and target D to DNA nanolevers cNL-B96. For dual binding assays, target D was additionally conjugated to cNL-B48 to present the two different targets simultaneously on one DNA nanolever.
Measurements were performed in running buffer HE140 (10 mM Hepes, 140 mM NaCl, 0.05% Tween20, 50 μM EDTA, 50 μM EGTA, pH7.4) at room temperature.

[0435] Kinetic measurements of the dual targeting BiTE molecule Y were performed in fluorescence proximity sensing mode using a standard kinetics assay from the switchBUILD software (Dynamic Biosensors GmbH) with several BiTE molecule concentrations. Kinetic rate constants (KD, kon and koff) were calculated with switchANALYSIS software (Dynamic Biosensors GmbH). For affinity measurements, antigen C (CLL1) and D (FLT3) were immobilized separately on the chip and binding of each target binding domain of the dual targeting BiTE molecule Y was evaluated based on the strength of fluorophore quenching. For dual binding assays, the two DNA-linked antigens C and D were mixed at a 1:1 ratio prior to immobilization on the chip and kinetic measurements were performed with dual targeting BiTE Molecule® (SEQ ID NO: 3736).

[0436] Results (FIG. 5G to J)

Binding kinetics to target antigen C and D of a dual targeting BiTE® molecule (SEQ ID NO: 3736) were determined on a DRX2 instrument, using a bi-functional 96 bp dual color biochip immobilized with either antigen C or D, or a 1:1 mix of both antigens. It could be shown that the dual targeting BiTE molecule binds to each antigen independently. On DNA nanolevers presenting both antigens, an increase in binding strength of the dual targeting BiTE® molecule could be measured, with an increase from KD,C 5.6 nM respectively KD,D 3.7 nM to KD,2 26.8 pM. This stronger binding of a dual targeting BiTE® molecule on a surface with both antigens demonstrates the simultaneous binding of the two target binding domains.

### Example 4: Determination of Simultaneous Binding of Target Binding Domains of Multitargeting CS1xBCMA Antigen-Binding Molecules

[0437] Simultaneous dual binding was determined by electrically switchable nanolever measurements which were performed on a DRX2 instrument, using a multi-purpose 96 bp dual color biochip (switchSENSE® by Dynamic Biosensors GmbH; Planegg, Germany). For measurements a DRX2 instrument and 96 bp multi-purpose biochips were used (Dynamic Biosensors GmbH). Prior to kinetic affinity experiments, target antigens CS1 and BCMA were conjugated to DNA nanolevers. Target CS1 was conjugated to DNA nanolevers cNL-B42 and target BCMA to DNA nanolevers cNL-A96. For avidity binding assays, target BCMA was additionally conjugated to cNL-B48 to present the two different targets simultaneously on one DNA nanolever.

[0438] Measurements were performed in running buffer HBS-EP (10 mM HEPES, 150 mM NaCl, 3 mM EDTA, 0.05% v/v Surfactant P20, pH 7.4) containing 0.05% Tween20 at room temperature. Kinetic measurements of a dual targeting CS1-BCMA bispecific antigen-binding molecule (SEQ ID NO: 1437) were performed in fluorescence proximity sensing mode using a standard kinetics assay from the switchBUILD software (Dynamic Biosensors GmbH) with several antibody concentrations. Kinetic rate constants (KD, kon and koff) were calculated with switchANALYSIS software (Dynamic Biosensors GmbH). For affinity measurements, antigens CS1 and BCMA were immobilized separately on a chip and binding of each target binding domain of the CS1-BCMA antigen-binding molecule was evaluated based on the strength of fluorophore quenching. For avidity binding assays, the two DNA-linked antigens CS1 and BCMA were mixed at a 1:1 ratio prior to immobilization on a chip and kinetic measurements were performed with the CS1-BCMA antigen-binding molecule.

[0439] Results (FIG. 5K to P)

Binding kinetics to target antigens CS1 and BCMA of the CS1-BCMA antigen-binding molecule were determined on a DRX2 instrument, using 96 bp multi-purpose biochips immobilized with either antigen CS1 or BCMA, or a 1:1 mix of both antigens.

Binding kinetics to target antigen CS1 K_{D,CS1}=892±60 pM

k_{on,CS1}=2.16±0.11 E+6 M−1 s−1

k_{off,CS1}=1.93±0.08 E−3 s−1

Binding kinetics to target antigen BCMA K_{D,BCMA}=1.27±0.30 nM

k_{on,BCMA}=1.30±0.08 E+6 M−1 s−1

k_{off,BCMA}=1.65±0.38 E−3 s−1

Binding kinetics to target antigens CS1 and BCMA K_{D,CS1BCMA}=10.3±0.80 pM

k_{on,CS1BCMA}=3.40±0.27 E+6 M−1 s−1

k_{off,CS1BCMA}=3.50±0.02 E−5 s−1

It could be shown that the CS1-BCMA antigen-binding molecule binds to each antigen independently. On DNA nanolevers presenting both antigens, an increase in binding strength of the CS1-BCMA T-cell engager molecule 1 could be measured, with an increase from K_{D,CS1} 892 pM respectively K_{D,BCMA}1.27 nM to K_{D,CS1BCMA} 10.3 pM. koff values changed from koff,CS1 1.93 E−3 s−1 respectively k_{off,BCMA} 1.65 E−3 s−1 to k_{offCS1BCMA} 3.50 E−5 s−1. This stronger binding of the CS1-BCMA antigen-binding molecule on a surface with both antigens demonstrates the simultaneous binding of the two target binding domains.

### Example 5: Re-Directed T Cell Lysis, Activation of T Cells, and Induction of Cytokines by the CS1 x BCMA Dual BiTE® Using ARH-77 Target Cells (Shown in FIG. 7A to C)

[0440] A) ARH-77 cells were co-cultured with human pan T cells at an effector-to-target (E:T) ratio of 10:1 for 48 hours in the absence or presence of the indicated BiTE® molecule over a dose range. Target cell lysis was measured by flow cytometry, as determined by loss of cell membrane integrity which was reflected by nuclear uptake of the SYTOX™ Blue dye in CFDA-SE-labeled target cells. The tested BiTE® molecules included the CS1 x BCMA Dual BiTE® (•) and the negative control EGFRvIII HLE BiTE® (▪).

[0441] B) Markers of activation were assessed in CD8 T cells by flow cytometry. ARH-77 cells were co-cultured with human pan T cells and the indicated BiTE® molecules as described in A). The percentage of CD8 T cells positive for each indicated marker at each concentration of BiTE® molecule was quantified. The antibody clone RPA-T8 was used to identify CD8 T cells. The antibody clone M-A251 was used to detect CD25 (▪ solid line, CS1 x BCMA Dual BiTE®; □ dashed line, EGFRvIII HLE BiTE®); the antibody clone FN50 was used to detect CD69 (▴ solid line, CS1 x BCMA Dual BiTE®; ▾ dashed line, EGFRvIII HLE BiTE®); the antibody clone EH12.2H7 was used to detect PD-1 (▾ solid line, CS1 x BCMA Dual BiTE®; ♦ dashed line, EGFRvIII HLE BiTE®); and the antibody clone 162.1 was used to detect CS1 (• solid line, CS1 x BCMA Dual BiTE®; ▪ dashed line, EGFRvIII HLE BiTE®).

[0442] The levels of C) IFNγ and D) TNFα released by T cells in response to BiTE® treatment were measured using the MSD® immunoassay. ARH-77 cells were co-cultured with human pan T cells and the CS1 x BCMA Dual BiTE® molecule as described in A), and cell supernatants were collected at 6 hours (• solid line, CS1 x BCMA Dual BiTE®; ▪ dashed line, EGFRvIII HLE BiTE®), 24 hours (▴ solid line, CS1 x BCMA Dual BiTE®; ▾ dashed line, EGFRvIII HLE BiTE®), and 48 hours (▾ solid line, CS1 x BCMA Dual BiTE®; ♦ dashed line, EGFRvIII HLE BiTE®).

### Example 6: Re-Directed T Cell Lysis, Activation of T Cells, and Induction of Cytokines by the CS1 x BCMA Dual BiTE® Using MM.1R Target Cells (FIG. 8)

[0443] A) MM.1R cells were co-cultured with human pan T cells at an effector-to-target (E:T) ratio of 10:1 for 48 hours in the absence or presence of the indicated BiTE® molecule over a dose range. Target cell lysis was measured by flow cytometry, as determined by loss of cell membrane integrity which was reflected by nuclear uptake of the SYTOX™ Blue dye in CFDA-SE-labeled target cells. The tested BiTE® molecules included the CS1 x BCMA Dual BiTE® (•) and the negative control EGFRvIII HLE BiTE® (▪).
B) Markers of activation were assessed in CD8 T cells by flow cytometry. MM.1R cells were co-cultured with human pan T cells and the indicated BiTE® molecules as described in A). The percentage of CD8 T cells positive for each indicated marker at each concentration of BiTE® molecule was quantified. The antibody clone RPA-T8 was used to identify CD8 T cells. The antibody clone M-A251 was used to detect CD25 (▪ solid line, CS1 x BCMA Dual BiTE®; □ dashed line, EGFRvIII HLE BiTE®); the antibody clone FN50 was used to detect CD69 (▴ solid line, CS1 x BCMA Dual BiTE®; ▾ dashed line, EGFRvIII HLE BiTE®); the antibody clone EH12.2H7 was used to detect PD-1 (▾ solid line, CS1 x BCMA Dual BiTE®; ♦ dashed line, EGFRvIII HLE BiTE®); and the antibody clone 162.1 was used to detect CS1 (• solid line, CS1 x BCMA Dual BiTE®; ▪ dashed line, EGFRvIII HLE BiTE®).

[0444] The levels of C) IFNγ and D) TNFα released by T cells in response to BiTE® treatment were measured using the MSD® immunoassay. MM.1R cells were co-cultured with human pan T cells and the CS1 x BCMA Dual BiTE® molecule as described in A), and cell supernatants were collected at 6 hours (• solid line, CS1 x BCMA Dual BiTE®; ▪ dashed line, EGFRvIII HLE BiTE®), 24 hours (▴ solid line, CS1 x BCMA Dual BiTE®; ▾ dashed line, EGFRvIII HLE BiTE®), and 48 hours (▾ solid line, CS1 x BCMA Dual BiTE®; ♦ dashed line, EGFRvIII HLE BiTE®).

### Example 7: Re-Directed T Cell Lysis by the CS1 x BCMA Dual BiTE®, CS1 Mono BiTE®, and BCMA Mono BiTE® Using ARH-77, MM.1R, OPM-2, and U266B1 Target Cells (FIG. 9)

[0445] A) ARH-77, B) MM.1R, C) OPM-2, and D) U266B1 cells were co-cultured with human pan T cells at an effector-to-target (E:T) ratio of 10:1 for 48 hours in the absence or presence of the indicated BiTE® molecule over a dose range. Target cell lysis was measured by flow cytometry, as determined by loss of cell membrane integrity which was reflected by nuclear uptake of the TO-PRO™-3 iodide dye in CFDA-SE-labeled target cells. The tested BiTE® molecules included the CS1 x BCMA Dual BiTE® (□), the CS1 Mono BiTE® alone (▪), the BCMA Mono BiTE® alone (▴), the CS1 Mono BiTE® combined with the BCMA Mono BiTE® in equimolar ratio (▪), and the negative control EGFRvIII HLE BiTE® (•). The dual BiTE® molecule proved to be more active than the combination of mono BiTE® molecules.

TABLE 4
Re-directed T cell lysis by the CS1 × BCMA Dual BiTE ®, CS1 Mono
BiTE ®, and BCMA Mono BiTE® using ARH-77, MM.1R, OPM-2,
and U266B1 target cells

| | EGFRvIII HLE | CS1 Mono | BCMA Mono | CS1 Mono BiTE ® + | CS1 × BCMA |
|---|---|---|---|---|---|
| EC₅₀ (pm) | BiTE ® | BiTE ® | BiTE ® | BCMA Mono BiTE ® | Dual BiTE ® |
| ARH-77 | Undetermined | 5.50 | 42.39 | 15.23 | 1.63 |
| MM.1R | Undetermined | 1.75 | 0.22 | 0.73 | 0.04 |
| OPM-2 | Undetermined | 12.35 | 19.29 | 20.27 | 3.07 |
| U266B1 | Undetermined | 31.67 | 7.62 | 13.53 | 3.29 |

### Example 8: Re-Directed T Cell Lysis by the CS1 x BCMA Dual BiTE®, CS1 Mono BiTE®, and BCMA Mono BiTE® in the Presence of Soluble CS1 and/or Soluble BCMA Using U266B1 Target Cells (FIG. 10)

[0446] U266B1 cells were co-cultured with human pan T cells at an effector-to-target (E:T) ratio of 10:1 for 48 hours in the absence or presence of the indicated BiTE® molecule over a dose range. Target cells were labeled with luciferase, which was used to monitor target cell lysis. Recombinant soluble protein corresponding to the extracellular domain of either human CS1 (sCS1; 0, 5, or 80 ng/mL) or human BCMA (sBCMA; 0, 100, or 2500 ng/mL) was added to the assay mix either alone or in combination as indicated. The tested BiTE® molecules included the CS1 x BCMA Dual BiTE® (□), the CS1 Mono BiTE® alone (▪), the BCMA Mono BiTE® alone (▴), the CS1 Mono BiTE® combined with the BCMA Mono BiTE® in equimolar ratio (▪), and the negative control EGFRvIII HLE BiTE® (•). FIG. 10A) No added protein; B) 5 ng/mL sCS1; C) 80 ng/mL sCS1; D) 100 ng/mL sBCMA; E) 2500 ng/mL sBCMA; F) 5 ng/mL sCS1+100 ng/mL sBCMA; and G) 80 ng/mL sCS1+2500 ng/mL sBCMA.

### Example 9: Re-Directed T Cell Lysis by the CS1 x BCMA Dual BiTE®, CS1 Mono Bite®, and BCMA Mono BiTE® in the Presence of Soluble CS1 and/or Soluble BCMA Using OPM-2 Target Cells (FIG. 11)

[0447] OPM-2 cells were co-cultured with human pan T cells at an effector-to-target (E:T) ratio of 10:1 for 48 hours in the absence or presence of the indicated BiTE® molecule over a dose range. Target cells were labeled with luciferase, which was used to monitor target cell lysis. Recombinant soluble protein corresponding to the extracellular domain of either human CS1 (sCS1; 0, 5, or 80 ng/mL) or human BCMA (sBCMA; 0, 100, or 2500 ng/mL) was added to the assay mix either alone or in combination as indicated. The tested BiTE® molecules included the CS1 x BCMA Dual BiTE® (□), the CS1 Mono BiTE® alone (▪), the BCMA Mono BiTE® alone (▴), the CS1 Mono BiTE® combined with the BCMA Mono BiTE® in equimolar ratio (▪), and the negative control EGFRvIII HLE BiTE® (•). FIG. 11A) No added protein; B) 5 ng/mL sCSI; C) 80 ng/mL sCSI; D) 100 ng/mL sBCMA; E) 2500 ng/mL sBCMA; F) 5 ng/mL sCS1+100 ng/mL sBCMA; and G) 80 ng/mL sCS1+2500 ng/mL sBCMA.

### Example 10: Re-Directed T Cell Lysis by the CS1 x BCMA Dual BiTE®, CS1 Mono BiTE®, and BCMA Mono BiTE® in the Presence of Soluble BCMA Using Three MM Target Cell Lines

[0448] U266B1, NCI-H929, or OPM-2 cells were co-cultured with human pan T cells at an effector-to-target (E:T) ratio of 10:1 for 48 hours in the absence or presence of the indicated BiTE® molecule over a dose range. Target cells were labeled with luciferase, which was used to monitor target cell lysis. Recombinant soluble protein corresponding to the extracellular domain of human BCMA (sBCMA; 0, 100, or 2500 ng/mL) was added to the assay. The tested BiTE® molecules included the CS1 x BCMA Dual BiTE® (□), the CS1 Mono BiTE® alone (▪), the BCMA Mono BiTE® alone (▴), and the negative control EGFRvIII HLE BiTE® (•). FIG. 12A) U266B1 target cells+no added protein; B) U266B1 target cells+100 ng/mL sBCMA; C) U266B1 target cells+2500 ng/mL sBCMA; D) NCI-H929 target cells+no added protein; E) NCI-H929 target cells+100 ng/mL sBCMA; F) NCI-H929 target cells+2500 ng/mL sBCMA; G) OPM-2 target cells+no added protein; H) OPM-2 target cells+100 ng/mL sBCMA; and I) OPM-2 target cells+2500 ng/mL sBCMA.

### Example 11: Re-Directed T Cell Lysis Using T Cell Sub-Populations by the CS1 x BCMA Dual BiTE®, CS1 Mono BiTE®, and BCMA Mono BiTE® Using U266B1 Target Cells (FIG. 13)

[0449] U266B1 cells were co-cultured with A) human pan T cells, B) purified CD4 T cells, or C) purified CD8 T cells at an effector-to-target (E:T) ratio of 10:1 for 48 hours in the absence or presence of the indicated BiTE® molecule over a dose range. Target cell lysis was measured by flow cytometry, as determined by loss of cell membrane integrity which was reflected by nuclear uptake of the TO-PRO™-3 iodide dye in CFDA-SE-labeled target cells. The tested BiTE® molecules included the CS1 x BCMA Dual BiTE® (□), the CS1 Mono BiTE® alone (▪), the BCMA Mono BiTE® alone (▴), the CS1 Mono BiTE® combined with the BCMA Mono BiTE® in equimolar ratio (▪), and the negative control EGFRvIII HLE BiTE® (•).

### Example 12: Re-Directed T Cell Lysis Using T Cell Sub-Populations by the CS1 x BCMA Dual BiTE® Using U266B1 Target Cells (FIG. 14)

[0450] A) U266B1 cells were co-cultured with human pan T cells (•, CS1 x BCMA Dual BiTE®; ∘, EGFRvIII HLE BiTE®), purified CD4 T cells (▪, CS1 x BCMA Dual BiTE®; □, EGFRvIII HLE BiTE®), or purified CD8 T cells (▴, CS1 x BCMA Dual BiTE®; □, EGFRvIII HLE BiTE®) at an effector-to-target (E:T) ratio of 10:1 for 48 hours in the absence or presence of the indicated BiTE® molecule over a dose range. Target cell lysis was measured by flow cytometry, as determined by loss of cell membrane integrity which was reflected by nuclear uptake of the TO-PRO™_3 iodide dye in CFDA-SE-labeled target cells.

### Example 13: Depletion of Bone Marrow in Cynomolgus Monkeys

[0451] Dual targeting CS1xBCMA antigen-binding molecule (SEQ ID NO: 1437) administered to cynomolgus monkeys is able to more completely deplete bone marrow as determined per J-Chain mRNA measurement than the respective mono BCMA and mono CS1 antigen-binding molecules according to the invention at the given doses which is desired in proliferative bone marrow diseases (FIG. 15).

### Example 14: Luciferase-Based Cytotoxicity Assay with Unstimulated Human PBMC Isolation of Effector Cells to Investigate Activity of Dual Targeting CD20xCD22 Antigen-Binding Molecules in Comparison to the Respective Mono Targeting Antigen-Binding Molecules

[0452] Human peripheral blood mononuclear cells (PBMC) were prepared by Ficoll density gradient centrifugation from enriched lymphocyte preparations (buffy coats), a side product of blood banks collecting blood for transfusions. Buffy coats were supplied by a local blood bank and PBMC were prepared on the day after blood collection. After Ficoll density centrifugation and extensive washes with Dulbecco's PBS (Gibco), remaining erythrocytes were removed from PBMC via incubation with erythrocyte lysis buffer (155 mM NH₄Cl, 10 mM KHCO₃, 100 μM EDTA). Remaining lymphocytes mainly encompass B and T lymphocytes, NK cells and monocytes. PBMC were kept in culture at 37° C./5% CO₂ in RPMI medium (Biochrom AG) with 10% FCS (Bio West).
Isolation of panT cells (CD3+) from PBMC
For isolation of panT cells, the Miltenyi human Pan T Cell Isolation Kit (#130-096-535) was used. PBMC were counted and centrifuged for 10 min at room temperature with 300×g. The supernatant was discarded and the cell pellet resuspended in MACS buffer (40 μL/10⁷ cells; Dulbecco's PBS+0.05% EDTA+0.5% FCS). 10 μl/10⁷ cells Pan T Cell Biotin-Antibody Cocktail were added, mixed and incubated at 4-8° C. for 5 min. After incubation 30 μl/10⁷ cells MACS buffer and 20 μl/10⁷ cells Pan T Cell MicroBead Cocktail were added, mixed and incubated at 4-8° C. for 10 min. PanT cells were then isolated using LS Columns (Milteny Biotec, #130-042-401). LS columns were placed in the magnetic field using a manual MACS Seperator. Colums were washed with 3 mL MACS buffer before loading cell suspension. After loading the cell suspension, the column was washed 3 times with 3 mL MACS buffer. The total flow-through containing unlabeled cells, representing enriched T cells, was collected. After isolation panT cells were washed with Dulbecco's PBS and adjusted to 1.2×10⁶ cells/mL and cultured in RPMI complete medium i.e. RPMI1640 (Biochrom AG, #FG1215) supplemented with 10% FBS (Bio West, #S1810), 1× non-essential amino acids (Biochrom AG, #K0293), 10 mM Hepes buffer (Biochrom AG, #L1613), 1 mM sodium pyruvate (Biochrom AG, #L0473) and 100 U/mL penicillin/streptomycin (Biochrom AG, #A2213) at 37° C., 5% CO₂ in an incubator until needed.

### Target Cell Preparation

[0453] Cells were harvested, spinned down and adjusted to 1.2×10⁵ cells/mL in complete RPMI medium. The vitality of cells was determined using Nucleocounter NC-250 (Chemometec) and Solution18 Dye containing Acridine Orange and DAPI (Chemometec).

### Luciferase Based Analysis

[0454] This assay was designed to quantify the lysis of target cells in the presence of serial dilutions of multi-specific antibody constructs. Equal volumes of Luciferase-positive target cells and effector cells (i.e., PBMC w/o CD14⁺; CD56⁺ cells) were mixed, resulting in an E:T cell ratio of 10:1. 42 μL of this suspension were transferred to each well of a 384-well plate. 8 μL of serial dilutions of the corresponding multi-specific antibody constructs and a negative control molecule (a CD3-based antibody construct recognizing an irrelevant target antigen) or RPMI complete medium as an additional negative control were added. The multi-specific antibody-mediated cytotoxic reaction proceeded for 48 hours in a 5% CO₂ humidified incubator. Then 25 μL substrate (Steady-Glo® Reagent, Promega) were transferred to the 384-well plate. Only living, Luciferase-positive cells react to the substrate and thus create a luminescence signal. Samples were measured with a SPARK microplate reader (TECAN) and analyzed by Spark Control Magellan software (TECAN).

### Percentage of Cytotoxicity was Calculated as Follows:

[0455]

$$Cytoxicity [ \% ] = ( 1 - \frac{R L {U}_{Sample}}{R L {U}_{N e g a t i v e - C ontrol}} ) \times 100 \\ RLU = relative light units \\ Negative ‐ Control = cells without multi ‐ specific antibody construct$$

Using GraphPad Prism 7.04 software (Graph Pad Software, San Diego), the percentage of cytotoxicity was plotted against the corresponding multi-specific antibody construct concentrations. Dose response curves were analyzed with the four parametric logistic regression models for evaluation of sigmoid dose response curves with fixed hill slope and EC50 values were calculated.
Following target cell lines were used for the Luciferase-based cytotoxicity assay:
Effector Cells: panT Cells
Target cells: Ramos wt (CD20+ and CD22+)

### Legend:

[0456] CD20-CD22 T-cell engager molecule 1: CD20 99-E5 CC x CD22 28B7 N65S CC x I2C0 x scFc
CD20-CD22 T-cell engager molecule 2: CD20 99-E5 CC x CD22 02-A5 CC x I2C0 x scFc (SEQ ID NO: 3344)
CD20-CD22 T-cell engager molecule 3: CD20 20-C6 CC x CD22 28B7 N65S CC x I2C0 x scFc (SEQ ID NO: 1790)
CD20 T-cell engager molecule 1 (CD20 only binding): CD20 99-E5 CC x I2C0 x scFc (SEQ ID NO: 1598)
CD20 T-cell engager molecule 2 (CD20 only binding): CD20 20-C6 CC x I2C0 x scFc (SEQ ID NO: 1576)
CD22 T-cell engager molecule 1 (CD22 only binding): CD22 28-B7 N65S CC x I2C0 x scFc (SEQ ID NO: 1510)
CD22 T-cell engager molecule 2 (CD22 only binding): CD22 02-A5 CC x I2C0 x scFc (SEQ ID NO: 3345)

### Results:

TABLE 5
EC50 values in pM of CD20-CD22 T-cell engager molecules compared
to equimolar mixtures of CD20 and CD22 T-cell engager molecules
on Ramos wt cells

| | EC50 | | EC50 | |
|---|---|---|---|---|
| | [pM] | | [pM] | |
| CD20-CD22 T-cell | 0.077 | vs. | 305 | CD20 T-cell engager molecule |
| engager molecule 1 | | | | 1 and CD22 T-cell engager |
| | | | | molecule 1 |
| CD20-CD22 T-cell | 0.079 | vs. | 24 | CD20 T-cell engager molecule |
| engager molecule 2 | | | | 1 and CD22 T-cell engager |
| | | | | molecule 2 |
| CD20-CD22 T-cell | 0.039 | vs. | 105 | CD20 T-cell engager molecule |
| engager molecule 3 | | | | 2 and CD22 T-cell engager |
| | | | | molecule 1 |

The tested dual targeting CD20-CD22 T-cell engager molecules 1, 2 and 3 (i.e. antigen-binding molecules) showed increased activity (lower EC50 values) on CD20/CD22 double positive Ramos wt cells compared to equimolar mixtures of corresponding CD20 and CD22 T-cell engager molecules on CD20/CD22 double positive Ramos wt cells (see FIG. 16 and Table 5).

### Example 15: Examination of Linker Length Flow Cytometry-Based Cytotoxicity Assay with Unstimulated panT Cells

### Isolation of Effector Cells

[0458] Human peripheral blood mononuclear cells (PBMC) were prepared by Ficoll density gradient centrifugation from enriched lymphocyte preparations (buffy coats), a side product of blood banks collecting blood for transfusions. Buffy coats were supplied by a local blood bank and PBMC were prepared on the day after blood collection. After Ficoll density centrifugation and extensive washes with Dulbecco's PBS (Gibco), remaining erythrocytes were removed from PBMC via incubation with erythrocyte lysis buffer (155 mM NH₄Cl, 10 mM KHCO₃, 100 μM EDTA). Remaining lymphocytes mainly encompass B and T lymphocytes, NK cells and monocytes. PBMC were kept in culture at 37° C./5% CO₂ in RPMI medium (Biochrom AG) with 10% FCS (Bio West).

[0459] Isolation of panT Cells (CD3+) from PBMC

For isolation of panT cells, the Miltenyi human Pan T Cell Isolation Kit (#130-096-535) was used. PBMC were counted and centrifuged for 10 min at room temperature with 300×g. The supernatant was discarded and the cell pellet resuspended in MACS buffer (40 μL/10⁷ cells; Dulbecco's PBS+0.05% EDTA+0.5% FCS). 10 μl/10⁷ cells Pan T Cell Biotin-Antibody Cocktail were added, mixed and incubated at 4-8° C. for 5 min. After incubation 30 μl/10⁷ cells MACS buffer and 20 μl/10⁷ cells Pan T Cell MicroBead Cocktail were added, mixed and incubated at 4-8° C. for 10 min. PanT cells were then isolated using LS Columns (Milteny Biotec, #130-042-401). LS columns were placed in the magnetic field using a manual MACS Seperator. Columns were washed with 3 mL MACS buffer before loading cell suspension. After loading the cell suspension, the column was washed 3 times with 3 mL MACS buffer. The total flow-through containing unlabeled cells, representing enriched T cells, was collected. After isolation panT cells were washed with Dulbecco's PBS and adjusted to 1.25×10⁶ cells/mL and cultured in RPMI complete medium i.e. RPMI1640 (Biochrom AG, #FG1215) supplemented with 10% FBS (Bio West, #S1810), 1× non-essential amino acids (Biochrom AG, #K0293), 10 mM Hepes buffer (Biochrom AG, #L1613), 1 mM sodium pyruvate (Biochrom AG, #L0473) and 100 U/mL penicillin/streptomycin (Biochrom AG, #A2213) at 37° C., 5% CO₂ in an incubator until needed.

[0460] Target Cell Labeling

For the analysis of cell lysis in flow cytometry assays, the fluorescent membrane dye DiOC₁₈ (DiO) (Thermo Fisher, #V22886) was used to label human- or macaque target transfected CHO cells as target cells and distinguish them from effector cells. Briefly, cells were harvested, washed once with PBS and adjusted to 10⁶ cell/mL in PBS containing 2% (v/v) FBS and the membrane dye DiO (5 μL/10⁶ cells). After incubation for 3 min at 37° C., cells were washed twice in complete RPMI medium and the cell number adjusted to 1.25×10⁵ cells/mL. The vitality of cells was determined using Nucleocounter NC-250 (Chemometec) and Solution18 Dye containing Acridine Orange and DAPI (Chemometec).

[0461] Flow Cytometry Based Analysis

This assay was designed to quantify the lysis of cyno or human target-transfected CHO cells in the presence of serial dilutions of bispecific antigen-binding molecules of the invention. Equal volumes of DiO-labeled target cells and effector cells (i.e. CD3⁺ panT cells) were mixed, resulting in an E:T cell ratio of 10:1. 160 μl of this suspension were transferred to each well of a 96-well plate. 40 μL of serial dilutions of the corresponding target(s) x CD3 antigen-binding molecules and a negative control bispecific (a CD3-based bispecific antibody construct recognizing an irrelevant target antigen) or RPMI complete medium as an additional negative control were added. The bispecific molecule-mediated cytotoxic reaction proceeded for 48 hours in a 7% CO₂ humidified incubator. Then cells were transferred to a new 96-well plate and loss of target cell membrane integrity was monitored by adding propidium iodide (PI) at a final concentration of 1 pg/mL. PI is a membrane impermeable dye that normally is excluded from viable cells, whereas dead cells take it up and become identifiable by fluorescent emission.
Samples were measured by flow cytometry on an iQue Plus (Intellicyt, now Sartorius) instrument and analyzed by Forecyt software (Intellicyt). Target cells were identified as DiO-positive cells. PI-negative target cells were classified as living target cells. Percentage of cytotoxicity was calculated according to the following formula:

$$Cytotoxicity [ \% ] = \frac{{n}_{dead target cells}}{{n}_{target cells}} \times 100 \\ n = number of events$$

Using GraphPad Prism 7.04 software (Graph Pad Software, San Diego), the percentage of cytotoxicity was plotted against the corresponding bispecific antibody construct concentrations. Dose response curves were analyzed with the four parametric logistic regression models for evaluation of sigmoid dose response curves with fixed hill slope and EC50 values were calculated.
Following target cell lines were used for the FACS-based cytotoxicity assay:
[0462] HCT 116-LUC wt (CDH3+ and MSLN+)
[0463] OPM-2 (BCMA+ and CS1+)
[0464] EOL-1 (CD123+ and FLT3+)

TABLE 6
Result for dual targeting BCMA-CSI T-cell engager molecules
(i.e. antigen-binding molecules) with different linkers, Effector cells:
panT cells Target cells: OPM-2

| | EC50 [pM] |
|---|---|
| BCMA-CS1 T-cell engager molecule 1 | 0.83 |
| BCMA-CS1 T-cell engager molecule 2 | 0.58 |
| BCMA-CS1 T-cell engager molecule 3 | 1.38 |

### Legend:

[0465] BCMA-CS1 T-cell engager molecule 1: CS PDL.12 LH CC x SG4S x BC A7 27-C4-G7 CC x I2C0 x scFc; with 6 AA linker (SEQ ID NO: 1437)
BCMA-CS1 T-cell engager molecule 2: CS PDL.12 LH CC x S(G4S)2 x BC A7 27-C4-G7 CC x I2C x scFc; with 11 AA linker (SEQ ID NO: 3761)
BCMA-CS1 T-cell engager molecule 3: CS PDL.12 LH CC x S(G4S)3 x BC A7 27-C4-G7 CC x I2C x scFc; with 16 AA linker (SEQ ID NO: 3762)
EGFRvIII T-cell engager molecule (non-binding): EGFRvIII CC x I2C0 x scFc

### Results for Dual Targeting BCMA-CS1 T-Cell Engager Molecules:

[0466] The tested BCMA-CS1 T-cell molecule 1 with 6 amino acid linker showed comparable EC50 values [pM] on OPM-2 cells as engager molecules 2 and 3 with longer linker variants (FIG. 17A).

TABLE 7
Results for dual targeting EpCAM-MSLN T cell engager molecules;
Effector cells: panT cells; Target cells: HCT 116 wt

| | EC50 [pM] |
|---|---|
| EpCAM-MSLN T-cell engager molecule 1 | 0.57 |
| EpCAM-MSLN T-cell engager molecule 2 | 0.25 |
| EpCAM-MSLN T-cell engager molecule 3 | 0.24 |

### Legend:

[0467] EpCAM-MSLN T-cell engager molecule 1: MSLN 4H6 CC x SG4S x EpCAM X1B x I2C0 x scFc with 6 AA linker (SEQ ID NO: 3705)
EpCAM-MSLN T-cell engager molecule 2: MSLN 4H6 CC x S(G4S)2 x EpCAM X1B x I2C0 x scFc with 11 AA linker (SEQ ID NO: 3710)
EpCAM-MSLN T-cell engager molecule 3: MSLN 4H6 CC x S(G4S)3 x EpCAM X1B x I2C0 x scFc with 16 AA linker (SEQ ID NO: 3711)
EGFRvIII T-cell engager molecule (non-binding): EGFRvIII CC x I2C0 x scFc

### Results for Dual Targeting EpCAM-MSLN T Cell Engager Molecules:

[0468] The tested EpCAM-MSLN T-cell engager molecules 2 and 3 with longer linker variants showed comparable EC50 values [pM] on HCT-116 cells as EpCAM-MSLN T-cell engager molecule 1 with original 6 amino acid linker (FIG. 17B).

TABLE 8
Results for dual targeting FLT3-CD123 T-cell engager
molecules: Effector cells: panT cells, Target cells: EOL-1

| | EC50 [pM] |
|---|---|
| CD123-FLT3 T-cell engager molecule 1 | 1.50 |
| CD123-FLT3 T-cell engager molecule 2 | 1.42 |
| CD123-FLT3 T-cell engager molecule 3 | 1.91 |

### Legend:

[0469] CD123-FLT3 T-cell engager molecule 1: FL 7-A8 CC x SG4S x CD123 24-B4-fNK CC x I2C0 x scFc; with 6 AA linker (SEQ ID NO: 3744)
CD123-FLT3 T-cell engager molecule 2: FL 7-A8 CC x S(G4S)2 x CD123 24-B4-fNK CC x I2C0 x scFc; with 11 AA linker (SEQ ID NO: 3747)
CD123-FLT3 T-cell engager molecule 3: FL 7-A8 CC x S(G4S)3 x CD123 24-B4-fNK CC x I2C0 x scFc; with 16 AA linker (SEQ ID NO: 3748)
EGFRvIII T-cell engager molecule (non-binding): EGFRvIII CC x I2C0 x scFc

### Results for Dual Targeting FLT3-CD123 T-Cell Engager Molecules:

[0470] The tested CD123-FLT3 T-cell engager molecules 2 and 3 with longer linker variants showed comparable EC50 values [pM] on OPM-2 cells as CD123-FLT3 T-cell engager molecule 1 with original 6 amino acid linker (FIG. 17C).

### Example 16: Comparability of Cytotoxic Activity Against CD22 Positive Cells by Both Mono and Dual Targeting Antigen-Binding Molecules

[0471] Flow Cytometry-Based Cytotoxicity Assay with Unstimulated panT Cells

### Isolation of Effector Cells

[0472] Human peripheral blood mononuclear cells (PBMC) were prepared by Ficoll density gradient centrifugation from enriched lymphocyte preparations (buffy coats), a side product of blood banks collecting blood for transfusions. Buffy coats were supplied by a local blood bank and PBMC were prepared on the day after blood collection. After Ficoll density centrifugation and extensive washes with Dulbecco's PBS (Gibco), remaining erythrocytes were removed from PBMC via incubation with erythrocyte lysis buffer (155 mM NH₄Cl, 10 mM KHCO₃, 100 μM EDTA). Remaining lymphocytes mainly encompass B and T lymphocytes, NK cells and monocytes. PBMC were kept in culture at 37° C./5% CO₂ in RPMI medium (Biochrom AG) with 10% FCS (Bio West).
Depletion of CD14⁺ and CD56⁺ cells
For depletion of CD14⁺ cells, human CD14 MicroBeads (Milteny Biotec, MACS, #130-050-201) were used, for depletion of NK cells human CD56 MicroBeads (MACS, #130-050-401). PBMC were counted and centrifuged for 10 min at room temperature with 300×g. The supernatant was discarded and the cell pellet resuspended in MACS isolation buffer (60 μL/10⁷ cells). CD14 MicroBeads and CD56 MicroBeads (20 μL/10⁷ cells) were added and incubated for 15 min at 4-8° C. The cells were washed with AutoMACS rinsing buffer (Milteny #130-091-222) (1-2 mL/10⁷ cells). After centrifugation (see above), supernatant was discarded and cells resuspended in MACS isolation buffer (500 μL/10⁸ cells). CD14/CD56 negative cells were then isolated using LS Columns (Milteny Biotec, #130-042-401). PBMC w/o CD14+/CD56+ cells were adjusted to 1.2×10⁶ cells/mL and cultured in RPMI complete medium i.e. RPMI1640 (Biochrom AG, #FG1215) supplemented with 10% FBS (Bio West, #S1810), 1× non-essential amino acids (Biochrom AG, #K0293), 10 mM Hepes buffer (Biochrom AG, #L1613), 1 mM sodium pyruvate (Biochrom AG, #L0473) and 100 U/mL penicillin/streptomycin (Biochrom AG, #A2213) at 37° C. in an incubator until needed.

### Target Cell Labeling

[0473] For the analysis of cell lysis in flow cytometry assays, the fluorescent membrane dye DiOC₁₈ (DiO) (Thermo Fisher, #V22886) was used to label human- or macaque target transfected CHO cells as target cells and distinguish them from effector cells. Briefly, cells were harvested, washed once with PBS and adjusted to 10⁶ cell/mL in PBS containing 2% (v/v) FBS and the membrane dye DiO (5 μL/10⁶ cells). After incubation for 3 min at 37° C., cells were washed twice in complete RPMI medium and the cell number adjusted to 1.25×10⁵ cells/mL. The vitality of cells was determined using Nucleocounter NC-250 (Chemometec) and Solution18 Dye containing Acridine Orange and DAPI (Chemometec).

### Flow Cytometry Based Analysis

[0474] This assay was designed to quantify the lysis of cyno or human target-transfected CHO cells in the presence of serial dilutions of bispecific antibody constructs. Equal volumes of DiO-labeled target cells and effector cells (i.e. CD3⁺ panT cells) were mixed, resulting in an E:T cell ratio of 10:1. 160 μl of this suspension were transferred to each well of a 96-well plate. 40 μL of serial dilutions of the corresponding target x CD3 bispecific antibody constructs and a negative control bispecific (a CD3-based bispecific antibody construct recognizing an irrelevant target antigen) or RPMI complete medium as an additional negative control were added. The bispecific antibody-mediated cytotoxic reaction proceeded for 48 hours in a 7% CO₂ humidified incubator. Then cells were transferred to a new 96-well plate and loss of target cell membrane integrity was monitored by adding propidium iodide (PI) at a final concentration of 1 μg/mL. PI is a membrane impermeable dye that normally is excluded from viable cells, whereas dead cells take it up and become identifiable by fluorescent emission.
Samples were measured by flow cytometry on an iQue Plus (Intellicyt, now Sartorius) instrument and analyzed by Forecyt software (Intellicyt). Target cells were identified as DiO-positive cells. PI-negative target cells were classified as living target cells. Percentage of cytotoxicity was calculated according to the following formula:

$$Cytotoxicity [ \% ] = \frac{{n}_{dead target cells}}{{n}_{target cells}} \times 100 \\ n = number of events$$

Using GraphPad Prism 7.04 software (Graph Pad Software, San Diego), the percentage of cytotoxicity was plotted against the corresponding bispecific antibody construct concentrations. Dose response curves were analyzed with the four parametric logistic regression models for evaluation of sigmoid dose response curves with fixed hill slope and EC50 values were calculated.
Following target cell lines were used for the FACS-based cytotoxicity assay:
[0475] Raji (CD20+ and CD22+)
[0476] Raji CRISPR CD20 #4 (CD20- and CD22+)

TABLE 9
Comparison of cytotoxicity of CD22 T-cell engager molecule 1 and
CD20-CD22 T-cell engager molecule 1 with Effector cells: human
unstimulated T cells, Target cells: Raji and Effector cells: human
unstimulated T cells, Target cells: Raji CRISPR CD20, respectively

| | EC50 [pM] |
|---|---|
| CD22 T-cell engager molecule 1 | 12.34 |
| CD20-CD22 T-cell engager molecule 1 | 11.1 |

### Legend:

[0477] CD22 T-cell engager molecule 1: CD22 28-B7 N65S CC x I2C0 x scFc (SEQ ID NO 1510)
CD20-CD22 T-cell engager molecule 1: CD20 20-C6 CC x CD22 28B7 N65S CC x I2C0 x scFc

### Results:

[0478] The tested CD22 T-cell engager molecule 1 showed comparable EC50 values [pM] on Raji cells (FIG. 18A) as CD20-CD22 T-cell engager molecule 1 on Raji CRISPR CD20 cells (FIG. 18B).

### Example 17 CD20 Epitope Mapping Epitope Clustering of Bispecific CD20 Antigen-Binding Molecules

### Construct Generation

[0479] The human CD20 protein extracellular region was divided into two parts: (1) extracellular loop 1 (ECL1), designated E1, and extracellular loop 2 (ECL2), designated E2. The extracellular loop 1 (E1) was further divided into two subparts, designated ElA and E1B. The extracellular loop 2 (E2) was further divided into four subparts, designated E2A, E2B, E2C and E2D.

TABLE 10
E1, E2 and the respective subparts E1A, E1B, E2A, E2B, E2C and
E2D have the following amino acid (aa) positions of the
human CD20 protein:

| Name | | |
|---|---|---|
| of | Amino acid | |
| Epitope | Region | Comment |
| E1 | aa 72 to 84 | Comprises E1A and E1B |
| E1A | aa 72 to 79 | IPAGIYAPI core epitope for Ofatumumab^{1 + 2}. |
| | | E1A comprises IPAGIYAP |
| E1B | aa 80 to 84 | PICVTV: ECL1 according to Uniprot P11836, |
| | | E1B comprises ICVTV |
| E2 | aa 142 to 188 | ECL2 according to Uniprot P11836 |
| E2A | aa 142 to 161 | FLKMESLNFIRAHT: core epitope of |
| | | Ofatumumab^{1 + 2}. E2A comprises: |
| | | KISHFLKMESLNFIRAHTPY |
| E2B | aa 162 to 166 | |
| E2C | aa 167 to 175 | CEPANPSEK: epitope of Rituximab² |
| E2D | aa 176 to 188 | |

¹Teeling et al., J Immunol 2006; 177:362-371;
²Klein et al., mAbs 5:1, 22-33; Jan/Feb 2013

[0480] The human/mouse chimeric proteins were generated by replacing domains E1; E2 or the respective subparts of the human CD20 protein with the corresponding regions from mouse CD20 protein. At the N-terminal end the human CD20 and human/mouse chimeric CD20 proteins contain a Strep II Twin Tag that is of no significance for the assay described here. At the C-terminal end CLL1 was fused via a 5xGS-linker as an expression proof. The protein sequence of each of the constructs described above is depicted in FIG. 19. Deoxyribonucleic acid (DNA) sequences encoding either full-length human CD20xCLL1, full-length mouse CD20XCLL1 protein or human/mouse chimeric CD20xCLL1 proteins were each cloned into a pEFdhfr vector and stably transfected into CHO dihydrofolate reductase-negative (DHFR−) cells.

[0481] Transfection

CHO DHFR-cells (1×106) were transfected using 82 μl of Nucleofector Solution DNA Transfection Reagent combined with 18 μl Supplement 1 both components of the Amaxa Cell Line Nucleofector Kit V and 2 μg of DNA encoding either the human CD20xCLL1 protein, the mouse CD20xCLL1 protein or chimeric human/mouse CD20xCLL1 proteins according to manufacturer's protocol. Cells were grown in RPMI Medium with supplements for 24 hours. Selection of adherent-growing cells expressing human, mouse or chimeric human/mouse CD20xCLL1 protein by nucleoside deprivation was done after 24 hours and cells were cultured in HyClone Medium with Pen/Strep at 37⁰ in a humidified incubator.

[0482] Flow Cytometry

To verify expression of the human CD20xCLL1 protein, the mouse CD20xCLL1 protein or chimeric human/mouse CD20xCLL1 proteins on stably transfected CHO, cells were incubated with 5 μg/mL of an anti-human CLL1 antibody (R&D Systems, clone 687317) and 1:100 dilution of PE-labeled anti mouse Fey secondary antibody (Jackson 115-116-071). Three different CD20 antibodies were used as a control. The human CD20xCLL1 protein, the mouse CD20xCLL1 protein or chimeric human/mouse CD20xCLL1 proteins were stained with 5 μg/ml of CD20 antibodies, clone MEM-97 (Abcam, ab8237) and clone B9E9 (Thermo Fisher, MA1-7636). CD20 antibody clone B-H2O (ab46892) was incubated with a 1:10 dilution. Binding of CD20 antibodies was detected with a 1:100 dilution of a PE-labeled anti-mouse Fey antibody (Jackson, 115-116-071). Expression of the mouse CD20xCLL1 protein on CHO cells was verified with 5 μg/ml of a PE-labeled anti-mouse CD20 antibody, clone SA275A11 (BioLegend, 150409).

[0483] To evaluate binding of several CD20 T-cell engager molecules to proteins expressed on the transfected cells, cells were incubated with 5 μg/mL of the respective T-cell engager molecules. Binding of these CD20-T cell engager molecules was detected using a 1:50 dilution of aPE-labeled anti-human Fey antibody. All antibodies were diluted in PBS with 2% FBS and all incubations were performed at 4° C. for 30 minutes. Washes were done using PBS with 2% FBS and the final suspension buffer prior to FACS analysis was also PBS with 2% FBS. Antibody binding was detected using a BD FACSCanto® II flow cytometer or with an Intellicyte IQe®. Changes in mean fluorescence were analyzed with BD FACSDiva®, v8.1, ForeCyt® and FlowJo®. Loss of the binding to the various human/mouse chimeric CD20 proteins was reflected as a decrease in signal detected by flow cytometry.

### Results

[0484] FIG. 19 depicts alignments of CD20xCLL1 protein sequences of human and mouse with epitope sections. The extracellular loop 1 (ECL1) of CD20 protein was designated E1, extracellular loop 2 (ECL2) was designated E2. For more refined epitope mapping, the extracellular loop 1 (ECL1) was further divided into ElA and E1B subparts and extracellular loop 2 (ECL2) was further divided into the subparts E2A, E2B, E2C or E2D.
For the epitope clustering, chimeric human/mouse CD20 proteins were generated in which regions of human CD20 protein were replaced with the corresponding regions from mouse CD20 protein. Because CD20 T cell engagers as disclosed herein (FIG. 20B) and known anti-human CD20 antibodies (FIG. 20A) do not bind mouse CD20 protein, the binding epitope region can be identified by systematically replacing sections of the human protein with the mouse protein (human/mouse CD20 chimeras) and determining which chimera is no longer recognized by the CD20 T-cell engagers or CD20 antibodies.

[0485] Human CD20, mouse CD20 and chimeric human/mouse CD20 proteins were stably expressed in CHO cells and binding of CD20-T Cell engager molecules (FIG. 20B) and known anti-human CD20 and anti-mouse CD20 antibodies for comparison (FIG. 20A) to surface-expressed proteins was assessed by flow cytometry (FIG. 20). Anti-human CD20 or anti-mouse CD20 antibodies were used to detect human and mouse CD20 in stably transfected CHO cells, respectively. Analysis of CD20-T cell engager binding to full length human and mouse CD20 and chimeric human/mouse CD20 proteins is described in Table 10 and FIG. 20B.

[0486] CD20 antigen-binding molecules of the present invention bound to cells expressing full length human CD20 protein, indicating it recognized the human extracellular domain. CD20-T cell engagers did not bind to cells expressing full length mouse CD20 protein, indicating it did not recognize the mouse extracellular domain. When binding to the domain-swapped proteins was evaluated, CD20-T cell engagers showed a variety of different binding patterns (Table 11 and FIG. 20). E.g. Z3L and B5K bound to human/mouse chimeric CD20 proteins containing the human E2, E2A and E2B domain. If the human E2, E2A or E2B domain was replaced with the mouse E2, E2A or E2B domain respectively, Z3L and B5K did not recognize the chimeric protein. Binding of Z3L and B5K was not affected by exchange of E1 or subparts of E1 (E1A and E1B), nor by exchange of E2C or E2D (subparts of E2).

[0487] Known CD20 antibodies B-H2O and MEM-97, for example, bound to human CD20 and human/mouse chimeric CD20 proteins containing the human E2 or subpart E2C. If the human E2 or subpart E2C was replaced with the mouse E2 or subpart E2C respectively, B-H2O and MEM-97 did not recognize the chimeric protein. Binding of B-H2O and MEM-97 was not affected by exchange of E1 or subparts of E1 (ElA and ElB), nor by exchange of E2A, E2B or E2D (subparts of E2).

### CONCLUSIONS

[0488] Sequence alignment of the CD20 protein shows each human sequence part (E1, E1A, E1B and E2, E2A, E2B, E2C and E2D) that was replaced with the corresponding mouse sequence and which amino acids differ between the two species.

[0489] CHO cells were transfected with human/mouse chimeric constructs and binding was assessed by flow cytometry. Control (secondary antibody only) is shown in light grey and CD20 antibody or CD20 T cell engager molecule binding is shown in darker grey. For the chimeric human/mouse CD20 proteins, human CD20 sequences for each epitope region (E1, E1A, E1B and E2, E2A, E2B, E2C, E2D) were individually replaced by mouse sequences. Each epitope region refers to the mouse portion of the chimeric molecule; e.g., E1 is a chimeric molecule for which the human E1 sequence has been replaced by the mouse E1 sequence, while the remaining sequence is human. Control anti-human CLL1 antibody (clone 687317) binding was used to verify expression of constructs. CD20-T cell engagers binds human, but not mouse full-length CD20 protein on CHO stable cell lines and show distintive binding patterns.

[0490] Hu: human CD20, huxCLL1: human CD20xCLL1, mu: mouse CD20, E1-E2D: human/mouse CD20 chimeric proteins.

TABLE 11
Epitope binding characteristics of representative CD20 and/or
CD22 antigen-binding molecules as disclosed herein

| Id | Molecule denomination | Epitope Cluster |
|---|---|---|
| T9J | CD20 43-B11 CC × I2C0 × scFc | E1A/E2ABC |
| U4U | CD20 97-H8_CC × CD22 77-A9 CC × | E1-A/E2-ABC |
| | I2C0 × scFc | |
| I8P | CD20 93-F7 CC × I2C0 × scFc | E1A/E2(A)BC |
| Y3N | CD20 01-C6-4_CC × CD22 28-B7 N655 | E1-AE2-(A)BC |
| | CC × I2C0 × scFc | |
| Z3L | CD22 29-H3 CC × CD20_29-F5_CC × | E2-AB |
| | I2C0 × scFc | |
| B5K | CD22 11-C3 CC × CD20_29-F5_CC × | E2-AB |
| | I2C0 × scFc | |
| C8V | CD22 29-H3 CC × CD20_99-G2_CC × | E1 (A)/E2-BC |
| | I2C0 × scFc | |
| G3P | CD20 99-E5_CC × CD22 28-B7 N655 | E1-(A)/E2-BC |
| | CC × I2C0 × scFc | |

### Example 18 Cytotoxic Activity Testing of Selected CD20 and/or CD22 Antigen-Binding Molecules

[0491] FACS based cytotoxicity assays testing CD2FxCD22 antigen-binding molecules U4U, Z3L, G3P, Y3N, B35K and C8V as disclosed herein on target cells CHO ff/Luc pCMV/hu orl CD22 vi pEFDHFR with Effector cells unstim. PBMC #263 (E:T-Ratio 50.000:5.000 S100 μl) in RPMI plus+10% FCS at a starting concentration of 160 nM and a dilution of 1:6 on F-bottom plate, on target cells CHO huCD2 pEFDHFR/ffLuc pCMV with Effector cells unstim. PBMC #263 (E:T-Ratio 50.000:5.000 S100 μl) in RPMI plus+10% FCS at a starting concentration of 160 nM and a dilution of 1:6 on F-bottom plate, and LUC based cytotoxicity assays testing CD20xCD22 antigen-binding molecule Y3N and CD20 antigen-binding molecules T9J and S3 as disclosed herein on target cells huCHO CD20+ Effector cells unstim. PBMC #773 (E:T-Ratio 25.000:2.500 S50 μl) in RPMI plus+100% FCS at a starting concentration of 160 nM and a dilution of 1:6 on 384-well F-bottom plate, and on target cells huCHO CD22+ Effector cells unstim. PBMC #773 (E:T-Ratio 25.000:2.500 S50 μl) in RPMI plus+10% FCS at a starting concentration of 160 nM and a dilution of 1:6 on 384-well F-bottom plate.

TABLE 12
The results of the above-described assays are summarized in the
table below.

| | EC50 |
|---|---|
| | [pM] |
| CHO huCD20 pEFDHFR/ffLuc pCMV | |
| CD20 97-H8_CC × CD22 77-A9 CC × I2C0 × scFc | 158.0 |
| U4U | |
| CD22 29-H3 CC × CD20_29-F5_CC × I2C0 × scFc | 31.7 |
| Z3L | |
| CD20 99-E5_CC × CD22 28-B7 N655 CC × I2C0 × scFc | 4.5 |
| G3P | |
| CD20 01-C6-4_CC × CD22 28-B7 N655 CC × I2C0 × scFc | 69.5 |
| Y3N | |
| CD22 11-C3 CC × CD20_29-F5_CC × I2C0 × scFc | 70.5 |
| B5K | |
| CD22 29-H3 CC × CD20_99-G2_CC × I2C0 × scFc | 64.8 |
| C8V | |
| CHO ff/Luc pCMV/hu orl CD22 v1 pEFDHFR | |
| CD20 97-H8_CC × CD22 77-A9 CC × I2C0 × scFc | 1043.6 |
| U4U | |
| CD22 29-H3 CC × CD20_29-F5_CC × I2C0 × scFc | 725.7 |
| Z3L | |
| CD20 99-E5_CC × CD22 28-B7 N655 CC × I2C0 × scFc | 41.0 |
| G3P | |
| CD20 01-C6-4_CC × CD22 28-B7 N655 CC × I2C0 × scFc | 60.0 |
| Y3N | |
| CD22 11-C3 CC × CD20_29-F5_CC × I2C0 × scFc | 44.9 |
| B5K | |
| CD22 29-H3 CC × CD20_99-G2_CC × I2C0 × scFc | 703.9 |
| C8V | |
| CHO huCD20 pEFDHFR/ffLuc pCMV | |
| CD20 01-C6-4 CC × CD22 28-B7 N655 CC × I2C0 × scFc Y3N | 1.0 |
| CD20 43-B11 CC × I2CO × scFc T9J | 311.1 |
| CD20 82-E2 CC × I2C0 × scFc S3E | 2.7 |
| CHO ff/Luc pCMV/hu orl CD22 v1 pEFDHFR | |
| CD20 01-C6-4 CC × CD22 28-B7 N655 CC × I2C0 × scFc Y3N | 0.3 |
| CD20 43-B11 CC × I2CO × scFcT9J | 20768.6 |
| CD20 82-E2 CC × I2CO × scFcS3E | 1238.9 |

TABLE 13
Correlation of epitope cluster and activity on CD20 positive target cells of different dual
targeting CD20 × CD22 antigen-binding molecules according to the present disclosure

| | Epitope | Epitope | | | | |
|---|---|---|---|---|---|---|
| | cluster | cluster | | | Activity | Activity |
| | parental | parental | experimental | Affinity | CHO | Raji |
| | Binder | Binder | sequence | huCD20 | huCD20 | CD20 |
| bispecifc dual targeting CD20 × CD22 molecule | CD20 | CD20 | identifier | [nM] | [pM] | [pM] |
| CD20 97-H8_CC × CD22 29-H3 CC × I2 CO × scFc | E1-A | E2-ABC | O4I | 70,51 | 112 | 529,0 |
| CD20 97-H8_CC × CD22 11-C3 CC × I2 CO × scFc | E1-A | E2-ABC | N5X | 124,14 | 160 | Flatline |
| CD20 97-H8_CC × CD22 02-C7 CC × I2 CO × scFc | E1-A | E2-ABC | M8Y | 133,93 | 464 | 607,3 |
| CD20 97-H8_CC × CD22 77-A9 CC × I2 CO × scFc | E1-A | E2-ABC | U4U | 84,20 | 158 | 642,4 |
| CD20 97-H8_CC × CD22 28-B7 N65S CC × I2 CO × | E1-A | E2-ABC | Q8Z | 69,68 | 63 | 195,7 |
| CD20 99-E5_CC × CD22 29-H3 CC × I2 CO × scFc | (E1)- | E2-BC | S3V | 76,41 | 5,4 | 8,4 |
| CD20 99-E5_CC × CD22 11-C3 CC × I2 CO × scFc | E1-(A) | E2-BC | Q8U | 103,25 | 10,3 | 14,7 |
| CD20 99-E5_CC × CD22 02-C7 CC × I2 CO × scFc | E1-(A) | E2-BC | X4F | 79,50 | 9,4 | 37,8 |
| CD20 99-E5_CC × CD22 77-A9 CC × I2 CO × scFc | E1-(A) | E2-BC | N9W | 195,30 | 7,3 | 15,9 |
| CD20 99-E5_CC × CD22 28-B7 CC × I2 CO × scFc | E1-(A) | E2-BC | G3P | 49,66 | 4,5 | 3,4 |
| CD20 01-C6-4_CC × CD22 29-H3 CC × I2 CO × scFc | E1-A | E2-(A)BC | Z1F | 122,50 | 48 | 75,3 |
| CD20 01-C6-4_CC × CD22 11-C3 CC × I2 CO × scFc | E1-A | E2-(A)BC | Z8O | 217,40 | 96 | 238,3 |
| CD20 01-C6-4_CC × CD22 02-C7 CC × I2 CO × scFc | E1-A | E2-(A)BC | I1B | 132,90 | 75 | 124,0 |
| CD20 01-C6-4_CC × CD22 77-A9 CC × I2 CO × scFc | E1-A | E2-(A)BC | T3W | 175,30 | 112 | 56,8 |
| CD20 01-C6-4_CC × CD22 28-B7 N65S CC × I2 CO | E1-A | E2-(A)BC | Y3N | 160,33 | 70 | 26,1 |
| CD20 13-D2_CC × CD22 29-H3 CC × I2 CO × scFc | E1-A | E2-(A)BC | D4A | 83,68 | 10,9 | 214,2 |
| CD20 13-D2_CC × CD22 11-C3 CC × I2 CO × scFc | E1-A | E2-(A)BC | G7N | 119,67 | 600 | 1520,4 |
| CD20 13-D2_CC × CD22 02-C7 CC × I2 CO × scFc | E1-A | E2-(A)BC | H7E | 85,87 | 226 | 275,4 |
| CD20 13-D2_CC × CD22 77-A9 CC × I2 CO × scFc | E1-A | E2-(A)BC | N1S | 158,90 | 398 | 1114,9 |
| CD20 13-D2_CC × CD22 28-B7 N65S CC × I2 CO × | E1-A | E2-(A)BC | T8X | 88,66 | 120 | 444,0 |
| CD20 20-D2_CC × CD22 29-H3 CC × I2 CO × scFc | | E2-AB | I5N | 0,76 | 0,8 | 2,0 |
| CD20 20-D2_CC × CD22 11-C3 CC × I2 CO × scFc | | E2-AB | F2I | 1,43 | 0,4 | 5,4 |
| CD20 20-D2_CC × CD22 02-C7 CC × I2 CO × scFc | | E2-AB | E5W | 0,98 | 0,2 | 2,5 |
| CD20 20-D2_CC × CD22 77-A9 CC × I2 CO × scFc | | E2-AB | N4P | 1,17 | 0,4 | 1,8 |
| CD20 20-D2_CC × CD22 28-B7 N65S CC × I2 CO × scFc | | E2-AB | B5W | 1,18 | 0,6 | 4,5 |

TABLE 14
Correlation of epitope cluster and activity on CD22 positive target cells of different dual
targeting CD20xCD22 antigen-binding molecules according to the present disclosure

| | Epitope | | | | |
|---|---|---|---|---|---|
| | cluster | experimental | Affinity | | |
| | parental | sequence | huCD22 | [symbol] ctivity CHO | Activity Raji |
| bispecific dual targeting CD20 x CD22 molecule | Binder CD22 | indentifier | [nM [symbol] | huCD22 [p [symbol] | CD22 [pM] |
| CD20 97-H8_CC × CD22 29-H3 CC × I2C0 × scFc | C2-1 | O4I | 0.18 | 112 | 21.3 |
| CD20 97-H8_CC × CD22 11-C3 CC × I2C0 × scFc | C2-5 | N5X | 15.92 | 160 | Flatline |
| CD20 97-H8_CC × CD22 02-C7 CC × I2C0 × scFc | C2-5 | M8Y | 8.99 | 464 | 2649.0 |
| CD20 97-H8_CC × CD22 77-A9 CC × I2C0 × scFc | C2-5 | U4U | 49.62 | 158 | Flatline |
| CD20 97-H8_CC × CD22 28-B7 N65S CC × I2C0 × | C2-1 | Q8Z | 0.14 | 63 | 14.3 |
| CD20 99-E5_CC × CD22 29-H3 CC × I2C0 × scFc | C2-1 | S3V | 0.27 | 5.4 | 46.7 |
| CD20 99-E5_CC × CD22 11-C3 CC × I2C0 × scFc | C2-5 | Q8U | 29.75 | 10.3 | Flatline |
| CD20 99-E5_CC × CD22 02-C7 CC × I2C0 × scFc | C2-5 | X3F | 8.88 | 9.4 | 1726.2 |
| CD20 99-E5_CC × CD22 77-A9 CC × I2C0 × scFc | C2-5 | N9W | 86.57 | 7.3 | Flatline |
| CD20 99-E5_CC × CD22 28-B7 N65S CC × I2C0 × [symbol] | C2-1 | G3P | 0.19 | 4.5 | 24.3 |
| CD20 01-C6-4_CC CD22 29-H3 CC × I2C0 × scFc | C2-1 | Z1F | 0.20 | 48 | 12.8 |
| CD20 01-C6-4_CC CD22 11-C3 CC × I2C0 × scFc | C2-5 | Z8O | 16.79 | 96 | Flatline |
| CD20 01-C6-4_CC CD22 02-C7 CC × I2C0 × scFc | C2-5 | I1B | 5.08 | 75 | 1673.9 |
| CD20 01-C6-4_CC CD22 77-A9 CC × I2C0 × scFc | C2-5 | T3W | 60.57 | 112 | Flatline |
| CD20 01-C6-4_CC CD22 28-B7 N65S CC × I2C0 | C2-1 | Y3N | 0.13 | 70 | 15.2 |
| CD20 13-D2_CC × CD22 29-H3 CC × I2C0 × scFc | C2-1 | D4A | 0.09 | 10.9 | 8.5 |
| CD20 13-D2_CC × CD22 11-C3 CC × I2C0 × scF | C2-5 | G7N | 12.66 | 600 | Flatline |
| CD20 13-D2_CC × CD22 02-C7 CC × I2C0 × scFc | C2-5 | H7N | 1.77 | 226 | 442.1 |
| CD20 13-D2_CC × CD22 77-A9 CC × I2C0 × scFc | C2-5 | N1S | 29.89 | 398 | Flatline |
| CD20 13-D2_CC × CD22 28-B7 N65S CC × I2C0 × | C2-1 | T8X | 0.14 | 230 | 14.2 |
| CD20 20-C6_CC × CD22 29-H3 CC × I2C0 × scFc | C2-1 | I5N | 0.15 | 0.9 | 12.0 |
| CD20 20-C6_CC × CD22 11-C3 CC × I2C0 × scFc | C2-5 | F2I | 3.22 | 0.4 | Flatline |
| CD20 20-C6_CC × CD22 02-C7 CC × I2C0 × scFc | C2-5 | E5W | 0.97 | 0.2 | 688.1 |
| CD20 20-C6_CC × CD22 77-A9 CC × I2C0 × scFc | C2-5 | N4P | 9.48 | 0.4 | Flatline |
| CD20 20-C6_CC × CD22 28-B7 N65S CC × I2C0 × [symbol] | C2-1 | BW5 | 0.13 | 0.6 | 11.1 |

[symbol]

indicates data missing or illegible when filed

Preferred molecules as disclosed herein are shown in Table 13. As it can be seen from Table 13, bispecific dual targeting CD20 x CD22 antigen-binding molecules which address the CD20 epitopes (i.) E1A and E2B and E2C or (ii.) E2A and E2B are particularly preferred in terms of superior on target cytotoxic activity. Preferred molecules as disclosed herein are shown in Table 14. As it can be seen from Table 14, bispecific dual targeting CD20 x CD22 antigen-binding molecules which address the CD22 epitope C2-1 are particularly preferred in terms of superior on target cytotoxic activity.

### Example 19: Selectivity Gap Through Dual Targeting Antigen-Binding Molecules in Different Formats

[0492] Three dual targeting CLL1xFLT3 antigen binding molecules with three different arrangements of domains have been tested for cytotoxic activity on huCHO FLT3 positive cells, huCHO CLL1 positive cells and double positive cells (DT): 1CL1 9-G4 CC x I2C0 x scFc x FL 4-E9 CC (X9G; format 1, with CLL1 TAA binding domain CD3 effector binding domain scFc HLE domain and FLT3 TAA domain in N to C order) CL1 9-G4 CC x FL 4-E9 CC x I2C0 x ScFc (C8O; format 2, with CLL1 TAA binding domain, FLT3 TAA domain, CD3 effector binding domain and scFc HLE domain in N to C order, SEQ ID NO: 3736), and CL1 9-G4 CC x ScFc x 4-E9 CC x I2C0 (Q1Y, format 3, with CLL1 TAA binding domain, scFc HLE domain, FLT3 TAA domain, and CD3 effector binding domain in N to C order). Results are represented in FIG. 24 and Table 15.

TABLE 15
Activity of dual targeting CLLxFLT3 antigen binding molecules with
EC50 values obtained on huCHO FLT3+ cells, huCHO CLL1+ cells and
double positive (DT 50:50) cells (from top to bottom, respectively).

| | |
|---|---|
| EC50 [pM] | factor |

CL1 9-G4 CC × I2CO × scFc × FL 4-E9 CC (X9G)
Format 1

| | |
|---|---|
| 457.3 | 79.5 |
| 202.8 | 35.2 |
| 5.8 | |

CL1 9-G4 CC × FL 4-E9 CC × I2CO × ScFc (C8O)
Format 2

| | |
|---|---|
| 197.5 | 23.3 |
| 291.2 | 34.4 |
| 8.5 | |

CL1 9-G4 CC × ScFc × 4-E9 CC × I2C0 (Q1Y)
Format 3

| | |
|---|---|
| 212.8 | 18.1 |
| 6383.2 | 542.0 |
| 11.8 | |

As it can be seen from the results, a selectivity gap can be achieved by dual targeting molecules of all three formats. Dual targeting antigen-binding molecules as described herein feature EC50 values of about 10 μM or below on cells positive for both targets while the such dual targeting molecules do not reach two digit pM EC50 values when employed with mono-targeting cells. This finding suggests that multitargeting molecules of the present invention do have selectivity gaps in terms of activity of at least factor 10, preferably at least factor 20 or even 30, which can beneficially be used to specifically address pathogenic target cells which express both targets and which can be bound at the same time by said molecules in order to trigger T-cell mediated cytotoxicity. Off-target toxicities and related side effects can thereby be reduced and a safer therapy can be provided based on the instantly described concept.

### Example 20 Stability of Multispecific Antigen-Binding Molecules with Two Target Binding Domains Versus Less Complex Bispecific Antigen-Binding Molecules with One Target Binding Domain

[0493] Thermal stability, monomer decrease after storage, monomer percentage after freeze thaw cycles and protein homogeneity were determined. Compared were either (i) CS1xBCMA multispecific antigen-binding molecules (mean including SEQ ID NO 1437) with (ii) CS1 bispecific antigen-binding molecules (mean of 28 constructs, including SEQ ID Nos 906 and 1401) and (iii) BCMA bispecific antigen-binding molecule (mean SEQ ID Nos 1412, 1423, 1434) or (iv) CD123xFLT3 multispecific antigen-binding molecules (mean of 46 constructs including SEQ ID Nos 673, 835, 838 and 871) with (v) FLT3 bispecific antigen-binding molecules (including SEQ ID Nos 648 and 670). The CD3 binder and the half-life extending scFc domain are identical, respectively.

[0494] Thermostability Measurement

Thermostability is measured by means of aggregation in dependence of temperature by dynamic light scattering (DLS). The bispecific antigen-binding molecule is provided in a buffer comprising citric acid, lysin-HCL, 4% trehalose at pH 7.0. The 200 μl of buffer comprising the bispecific antigen-binding molecule are transferred to a 96 well plate (Greiner bio-one) and measured by a Plate Reader II (Wyatt) while a temperature ramp at a rate of 0.04° C./min s run in the range from 40° C. to 70° C.

[0495] Monomer Decrease after 7 Day Storage

One sample (150 μl) comprising the construct to be analysed in a buffer at pH 7.0 is analysed by HP-SEC without storage. Two further samples are stored at 37° C. for 7 days. Thereafter, turbidity is determined at OD340 and the samples are analyed by HP-SEC (T7). The results are compared to determine a percental decrease.

[0496] Monomer Percentage after 3 Freeze/Thaw Cycles

One sample (150 μl) comprising the construct to be analysed in a buffer at pH 7.0 is analysed by UPLC (Waters) and for turbidity at OD340 without any freeze/thaw cycle. Two further samples are frozen at −80° C. are thawed and re-frozen to arrive at three freeze-thaw cycles. One cycle takes 30 min. Thereafter, turbidity is determined at OD340 and the samples are analyed by UPLC. The results are compared to determine a percental value, respectively.

[0497] Protein Homogeneity

Different folding states of antigen-binding molecules are determined by cation exchange chromatography (CIEX), wherein a high percental main peak stands for high protein homogeneity. 40 μl of sample (construct in buffer comprising citric acid, lysin, 4% trehalose at pH 7) are measured by a UPLC 7 (column Agilent Bi SCX, NP5, PK guard).

[0498] Results

TABLE 16
CS1 × BCMA and BC × CS1 multispecific antigen-binding molecule
improved stability

| | CS1 × BCMA/ | | |
|---|---|---|---|
| | BCMA × | CS1 | BCMA |
| Tested parameter | CS1 mean | mean | mean |
| Thermal Stability [° C.] | 56.2 | 54.2 | 52.0 |
| Monomer Decrease after 7 Day | 0.2 | 0.9 | 0.8 |
| Storage [%] | | | |
| Monomer Percentage after 3 Freeze/ | 100.0 | 99.6 | 100.0 |
| Thaw Cycles [% [symbol] | | | |
| Protein Homogeneity CIEX [% Main | 100.0 | 88.4 | 75.8 |
| Peak] | | | |

[symbol]

indicates data missing or illegible when filed

TABLE 17
CD123 × FLT3 multitargeting antigen-binding molecule improved
stability

| | CD123 × | |
|---|---|---|
| | FLT3 | FLT3 |
| Tested parameter | mean | mean |
| Thermal Stability [° C.] | 51.1 | 52.1 |
| Monomer Decrease after 7 Day Storage [%] | 0.00 | 4.1 |
| Monomer Percentage after 3 Freeze/Thaw Cycles [% [symbol] | 100 | 96.3 |
| Protein Homogeneity CIEX [% Main Peak] | 93.7 | 61.4 |

[symbol]

indicates data missing or illegible when filed

Lengthy table referenced here
US20220403035A1-20221222-T00001
Please refer to the end of the specification for access instructions.

LENGTHY TABLES
The patent application contains a lengthy table section. A copy of the table is available in electronic form from the USPTO web site (https://seqdata.uspto.gov/?pageRequest=docDetail&DocID=US20220403035A1). An electronic copy of the table will also be available from the USPTO upon request and payment of the fee set forth in 37 CFR 1.19(b)(3).

1. A multitargeting antigen-binding molecule comprising at least three binding domains, wherein
(i) the first binding domain comprises a paratope which immuno-specifically binds to a first target cell surface antigen (TAA1),
(ii) the second binding domain comprises a paratope which immuno-specifically binds to a second target cell surface antigen (TAA2), and
(iii) the third binding domain comprises a paratope which immune-specifically binds to an extracellular epitope of the human and/or the Macaca CD3ε chain,
wherein the first, second and third binding domain are arranged in an amino to carboxyl order, and wherein the first binding domain and the second binding domain are linked by a peptide linker having a length of 5 to 24, preferably 18 amino acids.

2. The multitargeting antigen-binding molecule of claim 1, wherein the antigen-binding molecule comprises a fourth domain which comprises two polypeptide monomers, each comprising a hinge, a CH2 and a CH3 domain, wherein said two polypeptide monomers are fused to each other via a peptide linker
wherein said forth domain preferably comprises in an amino to carboxyl order:
hinge-CH2-CH3-linker-hinge-CH2-CH3
and/or wherein preferably each of said polypeptide monomers in the fourth domain has an amino acid sequence that is at least 90% identical to a sequence selected from the group from the group consisting of: SEQ ID NO: 17-24, wherein preferably each of said polypeptide monomers has an amino acid sequence selected from SEQ ID NO: 17-24,
and/or wherein preferably the CH2 domain comprises an intra domain cysteine disulfide bridge,
and/or wherein the first, second, third and fourth binding domain are arranged in an amino to carboxyl order.

3. The multitargeting antigen-binding molecule of any of the preceding claims, wherein the antigen-binding molecule is a single chain antigen-binding molecule, preferably a multitargeting scFv antigen-binding molecule.

4. The multitargeting antigen-binding molecule of any of the preceding claims, wherein the peptide linker between the first binding domain and the second binding domain is selected from having a length of 5, 6, 7, 8, 9, 10, 11, 12, 13, 14, 15, 16, 17, 18, 19, 20, 21, 22 23, or 24 amino acids, preferably 5, 6, 7, 8, 9, 10, 11 or 12 amino acids, more preferably 6 amino acids.

5. The multitargeting antigen-binding molecule of any of the preceding claims, wherein the peptide linker between the first binding domain and the second binding domain is selected from the group consisting of S(G₄S)ₙ, (G₄S)ₙ, G₄ₙ, and G₅ₙ, wherein n equals 1, 2, 3 or 4, preferably n equals 1 or 2, more preferably SG₄S.

6. The multitargeting antigen-binding molecule of any of the preceding claims, wherein any of TAA1 and TAA2 is selected from the group consisting of CS1, BCMA, FLT3, CD123, CD20, CD22, EpCAM, MSLN, CDH3 and CLL1,
and/or wherein TAA1 and TAA2 are preferably not identical.

7. The multitargeting antigen-binding molecule of any of the preceding claims, wherein the first binding domains is capable of binding to TAA1 and the second binding domain is capable of binding to TAA2 simultaneously, preferably wherein TAA1 and TAA2 are on the same target cell.
and/or wherein TAA1 and TAA2, respectively, are preferably selected from the group consisting of CS1 and BCMA, BCMA and CS1, FLT3 and CD123, CD123 and FLT3, CD20 and CD22, CD22 and CD20, EpCAM and MSLN, MSLN and EpCAM, MSLN and CDH3, CDH3 and MSLN, FLT3 and CLL1, and CLL1 and FLT3.

8. The multitargeting antigen-binding molecule of claim 2, wherein
(i) the first and second domain comprise two antibody variable domains and the third domain comprises two antibody variable domains;
(ii) the first and second domain comprise one antibody variable domain and the third domain comprises two antibody variable domains;
(iii) the first and second domain comprise two antibody variable domains and the third domain comprises one antibody variable domain; or
(iv) the first domain comprises one antibody variable domain and the second domain comprises one antibody variable domain,
and/or wherein the first, second and third domain are preferably fused to the fourth domain via a peptide linker.

9. The multitargeting antigen-binding molecule according to any of the preceding claims, wherein the antigen-binding molecule comprises in an amino to carboxyl order:
(a) the first domain;
(b) a peptide linker preferably having an amino acid sequence selected from the group consisting of SEQ ID NOs: 1-4 and 9-12, preferably 11;
(c) the second domain,
(d) a peptide linker preferably having an amino acid sequence selected from the group consisting of SEQ ID NOs: 1-3; and
(e) the third domain,

10. The multitargeting antigen-binding molecule according to any of the preceding claims, wherein the antigen-binding molecule further comprises in an amino to carboxyl order:
(f) a peptide linker having an amino acid sequence selected from the group consisting of SEQ ID NOs: 1, 2, 3, 9, 10, 11 and 12.
(e) the first polypeptide monomer of the fourth domain;
(f) a peptide linker having an amino acid sequence selected from the group consisting of SEQ ID NOs: 5, 6, 7 and 8; and
(g) the second polypeptide monomer of the fourth domain.

11. The multitargeting antigen-binding molecule according to according to any of the preceding claims, wherein the first and second binding domain comprise a VH region comprising CDR-H1, CDR-H2 and CDR-H3 selected from the group consisting of SEQ ID Nos: 33 to 35, 44 to 46, 55 to 57, 66 to 68, 77 to 79, 88 to 90, 99 to 101, 110 to 112, 121 to 123, 132 to 134, 143 to 145, 154 to 156, 165 to 167, 176 to 178, 187 to 189, 198 to 200, 209 to 211, 220 to 222, 231 to 233, 242 to 244, 253 to 255, 264 to 266, 275 to 277, 286 to 288, 297 to 299, 308 to 310, 319 to 321, 330 to 332, 341 to 343, 352 to 354, 363 to 365, 374 to 376, 385 to 387, 396 to 398, 407 to 409, 418 to 420, 429 to 431, 440 to 442, 451 to 453, 462 to 464, 473 to 475, 484 to 486, 495 to 497, 506 to 508, 517 to 519, 528 to 530, 539 to 541, 550 to 552, 561 to 563, 572 to 574, 583 to 585, 594 to 596, 605 to 607, 616 to 618, 627 to 629, 638 to 640, 649 to 651, 660 to 662, 896 to 898, 907 to 909, 918 to 920, 929 to 931, 940 to 942, 951 to 953, 962 to 964, 973 to 975, 984 to 986, 995 to 997, 1006 to 1008, 1017 to 1019, 1028 to 1030, 1039 to 1041, 1050 to 1052, 1061 to 1063, 1072 to 1074, 1083 to 1085, 1094 to 1096, 1105 to 1107, 1116 to 1118, 1127 to 1129, 1138 to 1140, 1149 to 1151, 1160 to 1162, 1171 to 1173, 1182 to 1184, 1193 to 1195, 1204 to 1206, 1215 to 1217, 1226 to 1228, 1237 to 1239, 1248 to 1250, 1259 to 1261, 1270 to 1272, 1281 to 1283, 1292 to 1294, 1303 to 1305, 1314 to 1316, 1325 to 1327, 1336 to 1338, 1347 to 1349, 1358 to 1360, 1369 to 1371, 1380 to 1382, 1391 to 1393, 1402 to 1404, 1413 to 1415, 1424 to 1426, 1489 to 1491, 1500 to 1502, 1511 to 1513, 1522 to 1524, 1533 to 1535, 1544 to 1546, 1555 to 1557, 1566 to 1568, 1577 to 1579, 1588 to 1590, 1599 to 1601, 1610 to 1612, 1621 to 1623, 1632 to 1634, 1643 to 1645, 1654 to 1656, 1827 to 1829, 1840 to 1842, 1853 to 1855, 1866 to 1868, 1879 to 1881, 1892 to 1894, 11905 to 1907, 1922 to 1924, 1935 to 1937, 1948 to 1950, 1961 to 1963, 1974 to 1976, 1987 to 1989, 2000 to 2002, 2013 to 2015, 2026 to 2028, 2039 to 2041, 2052 to 2054, 2065 to 2067, 2078 to 2080, 2091 to 2093, 2104 to 2106, 2117 to 2119, 2130 to 2132, 2143 to 2145, 2156 to 2158, 2169 to 2171, 2182 to 2184, 2195 to 2197, 2208 to 2210, 2221 to 2223, 2234 to 2236, 2247 to 2249, 3346 to 3348, 3357 to 3359, 3368 to 3370, 3379 to 3381, 3390 to 3392, 3401 to 3403, 3412 to 3414, 3423 to 3425, 3434 to 3436, 3445 to 3447, 3456 to 3458, 3467 to 3469, 3478 to 3480, 3489 to 3491, 3500 to 3502, 3511 to 3513, 3522 to 3524, 3533 to 3535, 3544 to 3546, 3555 to 3557, 3566 to 3568, 3679 to 3681, 3690 to 3692, 3712 to 3714, 3723 to 3725.

12. The multitargeting antigen-binding molecule according to according to any of the preceding claims, wherein the first and second binding domain comprise a VL region comprising CDR-L1, CDR-L2 and CDR-L3 selected from CDR-L1, CDR-L2 and CDR-L3 selected from the group consisting of SEQ ID Nos: 36 to 38, 47 to 49, 58 to 60, 69 to 71, 80 to 82, 91 to 93, 102 to 104, 113 to 115, 124 to 126, 135 to 137, 146 to 148, 157 to 159, 168 to 170, 179 to 181, 190 to 192, 201 to 203, 212 to 214, 223 to 225, 234 to 236, 245 to 247, 256 to 258, 267 to 269, 278 to 280, 289 to 291, 300 to 302, 311 to 313, 322 to 324, 333 to 335, 344 to 346, 355 to 357, 366 to 368, 377 to 379, 388 to 390, 399 to 401, 410 to 412, 421 to 423, 432 to 434, 443 to 445, 454 to 456, 465 to 467, 476 to 478, 487 to 489, 498 to 500, 509 to 511, 520 to 522, 531 to 533, 542 to 544, 553 to 555, 564 to 566, 575 to 577, 586 to 588, 597 to 599, 608 to 610, 619 to 621, 630 to 632, 641 to 643, 652 to 654, 663 to 665, 899 to 901, 910 to 912, 921 to 923, 932 to 934, 943 to 945, 954 to 956, 965 to 967, 976 to 978, 987 to 989, 998 to 1000, 1009 to 1011, 1020 to 1022, 1031 to 1033, 1042 to 1043, 1053 to 1055, 1064 to 1066, 1075 to 1077, 1086 to 1088, 1097 to 1099, 1108 to 1110, 1119 to 1121, 1130 to 1132, 1141 to 1143, 1152 to 1154, 1163 to 1165, 1174 to 1176, 1185 to 1187, 1196 to 1198, 1207 to 1209, 1218 to 1220, 1229 to 1231, 1240 to 1242, 1251 to 1253, 1262 to 1264, 1273 to 1275, 1284 to 1286, 1295 to 1297, 1306 to 1308, 1317 to 1319, 1328 to 1330, 1339 to 1341, 1350 to 1352, 1361 to 1363, 1372 to 1374, 1383 to 1385, 1394 to 1396, 1405 to 1407, 1416 to 1418, 1427 to 1429, 1492 to 1494, 1503 to 1505, 1514 to 1516, 1525 to 1527, 1536 to 1538, 1547 to 1549, 1558 to 1560, 1569 to 1571, 1580 to 1582, 1591 to 1593, 1602 to 1604, 1613 to 1615, 1624 to 1626, 1635 to 1637, 1646 to 1648, 1657 to 1659, 1830 to 1832, 1843 to 1845, 1856 to 1858, 1869 to 1871, 1882 to 1884, 1895 to 1897, 1908 to 1910, 1925 to 1927, 1938 to 1940, 1951 to 1953, 1964 to 1966, 1977 to 1979, 1990 to 1992, 2003 to 2005, 2016 to 2018, 2029 to 2031, 2042 to 2044, 2055 to 2057, 2068 to 2070, 2081 to 2083, 2094 to 2096, 2107 to 2109, 2120 to 2122, 2133 to 2135, 2146 to 2148, 2159 to 2131, 2172 to 2174, 2085 to 2187, 2198 to 2200, 2211 to 2213, 2224 to 2226, 2237 to 2239, 2250 to 2252, 3349 to 3351, 3360 to 3362, 3371 to 3373, 3382 to 3384, 3393 to 3392, 3404 to 3406, 3415 to 3417, 3426 to 3428, 3437 to 3439, 3448 to 3450, 3459 to 3461, 3470 to 3472, 3481 to 3483, 3492 to 3494, 3503 to 3505, 3514 to 3516, 3525 to 3527, 3536 to 3538, 3547 to 3549, 3558 to 3560, 3569 to 3571, 3682 to 3684, 3693 to 3695, 3715 to 3717, and 3726 to 3728.

13. The multitargeting antigen-binding molecule according to according to any of the preceding claims, wherein the first and second binding domain comprise a VH region selected from the group consisting of SEQ ID Nos: 39, 50, 61, 72, 83, 94, 105, 116, 127, 138, 149, 160, 171, 182, 193, 204, 215, 226, 237, 248, 259, 270, 281, 292, 303, 314, 325, 336, 347, 358, 369, 380, 391, 402, 413, 424, 435, 446, 457, 468, 479, 490, 501, 512, 523, 534, 545, 556, 567, 578, 589, 600, 611, 622, 633, 644, 655, 666, 902, 913, 924, 935, 946, 957, 968, 979, 990, 1001, 1012, 1023, 1034, 1045, 1056, 1067, 1078, 1089, 1100, 1111, 1122, 1133, 1144, 1155, 1166, 1177, 1188, 1199, 1210, 1221, 1232, 1243, 1254, 1265, 1276, 1287, 1298, 1309, 1320, 1331, 1342, 1353, 1364, 1375, 1386, 1397, 1408, 1419, 1430, 1495, 1506, 1517, 1528, 1539, 1550, 1561, 1572, 1583, 1594, 1605, 1616, 1627, 1638, 1649, 1660, 1833, 1846, 1859, 1872, 1885, 1898, 1911, 1928, 1941, 1954, 1967, 1980, 1993, 2006, 2019, 2032, 2045, 2058, 2071, 2084, 2097, 2110, 2123, 2136, 2149, 2162, 2175, 2188, 2201, 2214, 2227, 2240, 2253, 3352, 3363, 3374, 3385, 3396, 3407, 3418, 3429, 3440, 3451, 3462, 3473, 3484, 3495, 3506, 3517, 3528, 3539, 3550, 3561, 3572, 3686, 3696, 3718, 3729.

14. The multitargeting antigen-binding molecule according to according to any of the preceding claims, wherein the first and second binding domain comprises a VL region selected from the group consisting of SEQ ID Nos: 40, 51, 62, 73, 84, 95, 106, 117, 128, 139, 150, 161, 172, 183, 194, 205, 216, 227, 238, 249, 260, 271, 282, 293, 304, 315, 326, 337, 348, 359, 370, 381, 392, 403, 414, 425, 436, 447, 458, 469, 480, 491, 502, 513, 524, 535, 546, 557, 568, 579, 590, 601, 612, 623, 634, 645, 656, 667, 903, 914, 925, 936, 947, 958, 969, 980, 991, 1002, 1013, 1024, 1035, 1046, 1057, 1068, 1079, 1090, 1101, 1112, 1123, 1134, 1145, 1156, 1167, 1178, 1189, 1200, 1211, 1222, 1233, 1244, 1255, 1266, 1277, 1288, 1299, 1310, 1321, 1332, 1343, 1354, 1365, 1376, 1387, 1398, 1409, 1420, 1431, 1496, 1507, 1518, 1529, 1540, 1551, 1562, 1573, 1584, 1595, 1606, 1617, 1628, 1639, 1650, 1661, 1834, 1847, 1860, 1873, 1886, 1899, 1912, 1929, 1942, 1955, 1968, 1981, 1994, 2007, 2020, 2033, 2046, 2059, 2072, 2085, 2098, 2111, 2124, 2137, 2150, 2163, 2176, 2189, 2202, 2215, 2228, 2241, 2254, 3353, 3364, 3375, 3386, 3397, 3408, 3419, 3430, 3441, 3452, 3463, 3474, 3485, 3496, 3507, 3518, 3529, 3540, 3551, 3562, 3573, 3685, 3697, 3719, and 3730.

15. The multitargeting antigen-binding molecule according to according to any of the preceding claims, wherein the first and/or second binding domain comprises a scFv sequence selected from the group consisting of SEQ ID Nos: 41, 52, 63, 74, 85, 96, 107, 118, 129, 140, 151, 162, 173, 184, 195, 206, 217, 228, 239, 250, 261, 272, 283, 294, 305, 316, 327, 338, 349, 360, 371, 382, 393, 404, 415, 426, 437, 448, 459, 470, 481, 492, 503, 514, 525, 536, 547, 558, 569, 580, 591, 602, 613, 624, 635, 646, 657, 668, 671, 674, 677, 680, 683, 686, 689, 692, 695, 698, 701, 704, 707, 710, 713, 716, 719, 722, 725, 728, 731, 734, 737, 740, 743, 746, 749, 752, 755, 758, 761, 764, 767, 770, 773, 776, 779, 782, 785, 788, 791, 794, 797, 800, 803, 806, 809, 812, 815, 818, 821, 824, 827, 830, 833, 836, 839, 842, 845, 848, 851, 854, 857, 860, 863, 866, 869, 872, 874, 876, 878, 880, 882, 884, 886, 888, 890, 892, 894, 904, 915, 926, 937, 948, 959, 970, 981, 992, 1003, 1014, 1025, 1036, 1047, 1058, 1069, 1080, 1091, 1102, 1113, 1124, 1135, 1146, 1157, 1168, 1179, 1190, 1201, 1212, 1223, 1234, 1245, 1256, 1267, 1278, 1289, 1300, 1311, 1322, 1333, 1344, 1355, 1366, 1377, 1388, 1399, 1410, 1421, 1432, 1435, 1438, 1441, 1444, 1447, 1450, 1453, 1456, 1459, 1462, 1465, 1468, 1471, 1474, 1477, 1480, 1483, 1486, 1497, 1508, 1519, 1530, 1541, 1552, 1563, 1574, 1585, 1596, 1607, 1618, 1629, 1640, 1651, 1662, 1665, 1668, 1671, 1674, 1677, 1680, 1683, 1686, 1689, 1692, 1695, 1698, 1701, 1704, 1707, 1710, 1713, 1716, 1719, 1722, 1725, 1728, 1731, 1734, 1737, 1740, 1743, 1746, 1749, 1752, 1755, 1758, 1761, 1764, 1767, 1770, 1773, 1776, 1779, 1782, 1785, 1788, 1791, 1794, 1797, 1800, 1803, 1806, 1809, 1812, 1815, 1818, 1821, 1824, 1835, 1848, 1861, 1874, 1887, 1900, 1913, 1930, 1943, 1956, 1969, 1982, 1995, 2008, 2021, 2034, 2047, 2060, 2073, 2086, 2099, 2112, 2125, 2138, 2151, 2164, 2177, 2190, 2203, 2216, 2229, 2242, 2255, 2264, 2265, 2274, 2275, 2284, 2285, 2294, 2295, 2304, 2305, 2314, 2315, 2324, 2325, 2334, 2335, 2344, 2345, 2354, 2355, 2364, 2365, 2374, 2375, 2384, 2385, 2394, 2395, 2404, 2405, 2414, 2415, 2424, 2425, 2434, 2435, 2444, 2445, 2454, 2455, 2464, 2465, 2474, 2475, 2484, 2485, 2494, 2495, 2504, 2505, 2514, 2515, 2524, 2525, 2534, 2535, 2544, 2545, 2554, 2555, 2564, 2565, 2574, 2575, 2584, 2585, 2594, 2595, 2604, 2605, 2614, 2615, 2624, 2625, 2634, 2635, 2644, 2645, 2654, 2655, 2664, 2665, 2674, 2675, 2684, 2685, 2694, 2695, 2704, 2705, 2714, 2715, 2724, 2725, 2734, 2735, 2744, 2745, 2754, 2755, 2764, 2765, 2774, 2775, 2784, 2785, 2794, 2795, 2804, 2805, 2814, 2815, 2824, 2825, 2834, 2835, 2844, 2845, 2854, 2855, 2864, 2865, 2874, 2875, 2884, 2885, 2894, 2895, 2904, 2905, 2914, 2915, 2914, 2925, 2934, 2935, 2944, 2945, 2954, 2955, 2964, 2965, 2974, 2975, 2984, 2985, 2994, 2995, 3004, 3005, 3014, 3015, 3024, 3025, 3034, 3035, 3044, 3045, 3054, 3055, 3064, 3065, 3074, 3075, 3084, 3085, 3094, 3095, 3104, 3105, 3114, 3115, 3124, 3125, 3134, 3135, 3144, 3145, 3154, 3155, 3164, 3165, 3174, 3175, 3184, 3185, 3194, 3195, 3204, 3205, 3214, 3215, 3224, 3225, 3234, 3235, 3244, 3245, 3254, 3255, 3264, 3265, 3274, 3275, 3284, 3285, 3294, 3295, 3304, 3305, 3314, 3315, 3324, 3325, 3334, 3335, 3354, 3365, 3376, 3387, 3398, 3409, 3420, 3431, 3442, 3453, 3464, 3475, 3486, 3497, 3508, 3519, 3530, 3541, 3552, 3563, 3574, 3577, 3580, 3583, 3586, 3589, 3592, 3595, 3598, 3601, 3604, 3607, 3610, 3613, 3616, 3619, 3622, 3625, 3628, 3631, 3634, 3637, 3640, 3643, 3646, 3649, 3652, 3655, 3658, 3661, 3664, 3667, 3670, 3673, 3676, 3687, 3698, 3701, 3706, 3720, 3731, 3734, 3737, 3740, 3749, and 3750, preferably 1399 or 1435.

16. The multitargeting antigen-binding molecule according to according to any of the preceding claims, wherein the construct comprises a first and/or second target binding domain together with a third effector binding domain, the two or three binding domains together having a sequence selected from the group consisting of SEQ ID Nos: 42, 53, 64, 75, 86, 97, 108, 119, 130, 141, 152, 163, 174, 185, 196, 207, 218, 229, 240, 251, 262, 273, 284, 295, 306, 317, 328, 339, 350, 361, 372, 383, 394, 405, 416, 427, 438, 449, 460, 471, 482, 493, 504, 515, 526, 537, 548, 559, 570, 581, 592, 603, 614, 625, 636, 647, 658, 669, 672, 675, 678, 681, 684, 687, 690, 693, 696, 699, 702, 705, 708, 711, 714, 717, 720, 723, 726, 729, 732, 735, 738, 741, 744, 747, 750, 753, 756, 759, 762, 765, 768, 771, 774, 777, 780, 783, 786, 789, 792, 795, 798, 801, 804, 807, 810, 813, 816, 819, 822, 825, 828, 831, 834, 837, 840, 843, 846, 849, 852, 855, 858, 861, 864, 867, 870 873, 875, 877, 879, 881, 883, 885, 887, 889, 891, 893, 895, 905, 916, 927, 938, 949, 960, 971, 982, 993, 1004, 1015, 1026, 1037, 1048, 1059, 1070, 1081, 1092, 1103, 1114, 1125, 1136, 1147, 1158, 1169, 1180, 1191, 1202, 1213, 1224, 1235, 1246, 1257, 1268, 1279, 1290, 1301, 1312, 1323, 1334, 1345, 1356, 1367, 1378, 1389, 1400, 1411, 1422, 1433, 1436, 1439, 1442, 1445, 1448, 1451, 1454, 1457, 1460, 1463, 1466, 1469, 1472, 1475, 1478, 1481, 1484, 1487, 1498, 1509, 1520, 1531, 1542, 1553, 1564, 1575, 1586, 1597, 1608, 1619, 1630, 1641, 1652, 1663, 1666, 1669, 1672, 1675, 1678, 1681, 1684, 1687, 1690, 1693, 1696, 1699, 1702, 1705, 1708, 1711, 1714, 1717, 1720, 1723, 1726, 1729, 1732, 1735, 1738, 1741, 1744, 1747, 1750, 1753, 1756, 1759, 1762, 1765, 1768, 1771, 1774, 1777, 1780, 1783, 1786, 1789, 1792, 1795, 1798, 1801, 1804, 1807, 1810, 1813, 1816, 1819, 1822, 1825, 1836, 1849, 1862, 1875, 1888, 1901, 1914, 1931, 1944, 1957, 1970, 1983, 1996, 2009, 2022, 2035, 2048, 2061, 2074, 2087, 2300, 2113, 2126, 2139, 2152, 2165, 2178, 2191, 2204, 2217, 2230, 2243, 2256, 2260, 2266, 2267, 2276, 2277, 2286, 2287, 2296, 2297, 2306, 2307, 2316, 2317, 2326, 2327, 2336, 2337, 2346, 2347, 2356, 2357, 2366, 2367, 2376, 2377, 2386, 2387, 2396, 2397, 2406, 2407, 2416, 2417, 2426, 2427, 2436, 2437, 2446, 2447, 2456, 2457, 2466, 2467, 2476, 2477, 2486, 2487, 2496, 2497, 2506, 2507, 2516, 2517, 2526, 2527, 2536, 2537, 2546, 2547, 2556, 2557, 2566, 2567, 2576, 2577, 2586, 2587, 2596, 2597, 2606, 2607, 2616, 2617, 2626, 2627, 2636, 2637, 2646, 2647, 2656, 2657, 2666, 2667, 2676, 2677, 2686, 2687, 2696, 2697, 2706, 2707, 2716, 2717, 2726, 2727, 2736, 2737, 2746, 2747, 2756, 2757, 2766, 2767, 2776, 2777, 2786, 2787, 2796, 2797, 2806, 2807, 2816, 2817, 2826, 2827, 2836, 2837, 2846, 2847, 2856, 2857, 2866, 2867, 2876, 2877, 2886, 2887, 2896, 2897, 2906, 2907, 2916, 2917, 2926, 2927, 2936, 2937, 2946, 2947, 2956, 2957, 2966, 2967, 2976, 2977, 2986, 2987, 2996, 2997, 3006, 3007, 3016, 3017, 3026, 3027, 3036, 3037, 3046, 3047, 3056, 3057, 3066, 3067, 3076, 3077, 3086, 3087, 3096, 3097, 3106, 3107, 3116, 3117, 3126, 3127, 3136, 3137, 3146, 3147, 3156, 3157, 3166, 3167, 3176, 3177, 3186, 3187, 3196, 3197, 3206, 3207, 3216, 3217, 3226, 3227, 3236, 3237, 3246, 3247, 3246, 3247, 3256, 3257, 3266, 3267, 3276, 3277, 3286, 3287, 3296, 3297, 3306, 3307, 3316, 3317, 3326, 3327, 3336, 3337, 3355, 3366, 3377, 3388, 3399, 3410, 3421, 3432, 3443, 3454, 3465, 3476, 3487, 3498, 3509, 3520, 3531, 3542, 3553, 3564, 3575, 3578, 3581, 3584, 3587, 3590, 3593, 3596, 3599, 3602, 3605, 3608, 3611, 3614, 3617, 3620, 3623, 3626, 3629, 3632, 3635, 3638, 3641, 3644, 3647, 3650, 3653, 3656, 3659, 3662, 3665, 3668, 3671, 3674, 3677, 3688, 3699, 3702, 3703, 3707, 3721, 3732, 3735, 3738, 3741, 3751, and 3752, preferably 1400 or 1436.

17. The multitargeting antigen-binding molecule according to according to any of the preceding claims, wherein the construct comprises a first, and/or second target binding domain together with a third effector binding domain and a fourth domain conferring extended half-life, the two or three binding domains and the forth domain together having a sequence selected from the group consisting of SEQ ID Nos: 43, 54, 65, 76, 87, 98, 109, 120, 131, 142, 153, 164, 175, 186, 197, 208, 219, 230, 241, 252, 263, 274, 285, 296, 307, 318, 329, 340, 351, 362, 373, 384, 395, 406, 417, 428, 439, 450, 461, 472, 483, 494, 505, 516, 527, 538, 549, 560, 571, 582, 593, 604, 615, 626, 637, 648, 659, 670, 673, 676, 679, 682, 685, 688, 691, 694, 697, 700, 703, 706, 709, 712, 715, 718, 721, 724, 727, 730, 733, 736, 739, 742, 745, 748, 751, 754, 757, 760, 763, 766, 769, 772, 775, 778, 781, 784, 787, 790, 793, 796, 799, 802, 805, 808, 811, 814, 817, 820, 823, 826, 829, 832, 835, 838, 841, 844, 847, 850, 853, 856, 859, 862, 865, 868, 871, 906, 917, 928, 939, 950, 961, 972, 983, 994, 1005, 1016, 1027, 1038, 1049, 1060, 1071, 1082, 1093, 1104, 1115, 1126, 1137, 1148, 1159, 1170, 1181, 1192, 1203, 1214, 1225, 1236, 1247, 1258, 1269, 1280, 1291, 1302, 1313, 1324, 1335, 1346, 1357, 1368, 1379, 1390, 1401, 1412, 1423, 1434, 1437, 1440, 1443, 1446, 1449, 1452, 1455, 1458, 1461, 1464, 1467, 1470, 1473, 1476, 1479, 1482, 1485, 1488, 1499, 1510, 1521, 1532, 1543, 1554, 1565, 1576, 1587, 1598, 1609, 1620, 1631, 1642, 1653, 1664, 1667, 1670, 1673, 1676, 1679, 1682, 1685, 1688, 1691, 1694, 1697, 1700, 1703, 1706, 1709, 1712, 1715, 1718, 1721, 1724, 1727, 1730, 1733, 1736, 1739, 1742, 1745, 1748, 1751, 1754, 1757, 1760, 1763, 1766, 1769, 1772, 1775, 1778, 1781, 1784, 1787, 1790, 1793, 1796, 1799, 1802, 1805, 1808, 1811, 1814, 1817, 1820, 1823, 1826, 1838, 1851, 1864, 1877, 1890, 1903, 1916, 1933, 1946, 1959, 1972, 1985, 1998, 2011, 2024, 2037, 2050, 2063, 2076, 2089, 2102, 2115, 2128, 2141, 2154, 2167, 2180, 2194, 2206, 2219, 2232, 2245, 2258, 2262, 2270, 2271, 2280, 2281, 2290, 2291, 2300, 2301, 2310, 2311, 2320, 2321, 2330, 2331, 2340, 2341, 2350, 2351, 2360, 2361, 2370, 2371, 2380, 2381, 2390, 2391, 2400, 2401, 2410, 2411, 2420, 2421, 2430, 2431, 2440, 2441, 2450, 2451, 2460, 2461, 2470, 2471, 2480, 2481, 2490, 2491, 2500, 2501, 2510, 2511, 2520, 2521, 2530, 2531, 2540, 2541, 2550, 2551, 2560, 2561, 2570, 2571, 2580, 2581, 2590, 2591, 2600, 2601, 2610, 2611, 2620, 2621, 2630, 2631, 2640, 2641, 2650, 2651, 2660, 2661, 2670, 2671, 2680, 2681, 2690, 2691, 2700, 2701, 2710, 2711, 2720, 2721, 2730, 2731, 2740, 2741, 2750, 2751, 2760, 2761, 2770, 2771, 2780, 2781, 2790, 2791, 2800, 2801, 2810, 2811, 2820, 2821, 2830, 2831, 2840, 2841, 2850, 2851, 2860, 2861, 2870, 2871, 2880, 2881, 2890, 2891, 2900, 2901, 2910, 2911, 2920, 2921, 2930, 2931, 2940, 2941, 2950, 2951, 2960, 2961, 2970, 2971, 2980, 2981, 2990, 2991, 3000, 3001, 3010, 3011, 3020, 3021, 3030, 3031, 3040, 3041, 3050, 3051, 3060, 3061, 3070, 3071, 3080, 3081, 3090, 3091, 3100, 3101, 3110, 3111, 3120, 3121, 3130, 3131, 3140, 3141, 3150, 3151, 3160, 3161, 3170, 3171, 3180, 3181, 3190, 3191, 3200, 3201, 3210, 3211, 3220, 3221, 3231, 3240, 3241, 3250, 3251, 3260, 3261, 3270, 3271, 3280, 3281, 3290, 3291, 3300, 3301, 3310, 3311, 3320, 3321, 3330, 3331, 3340, 3341, 3344, 3345, 3356, 3367, 3378, 3389, 3400, 3411, 3422, 3433, 3444, 3455, 3466, 3477, 3488, 3499, 3510, 3521, 3532, 3543, 3554, 3565, 3576, 3579, 382, 3585, 3588, 3591, 3594, 3597, 3600, 3603, 3606, 3609, 3612, 3615, 3618, 3621, 3624, 3627, 3630, 3633, 3636, 3639, 3642, 3645, 3648, 3651, 3654, 3657, 3660, 3663, 3666, 3669, 3672, 3675, 3678, 3689, 3700, 3704, 3705, 3708, 3709, 3710, 3711, 3722, 3733, 3736, 3739, 3744, 3747, 3748, 3756, 3757, 3761, and 3762, preferably 1401 or 1437.

18. A polynucleotide encoding an antigen-binding molecule as defined in any one of the preceding claims.

19. A vector comprising a polynucleotide as defined in claim 18.

20. A host cell transformed or transfected with the polynucleotide as defined in claim 18 or with the vector as defined in claim 19.

21. A process for the production of the bispecific antigen-binding molecule according to any of the preceding claims, said process comprising culturing a host cell as defined in claim 20 under conditions allowing the expression of the antigen-binding molecule as defined in any one of claims 1 to 17 and recovering the produced antigen-binding molecule from the culture.

22. A pharmaceutical composition comprising the bispecific antigen-binding molecule according to any one of claims 1 to 17, or produced according to the process of claim 21,
which is preferably stable for at least four weeks at about −20° C.

23. The multitargeting antigen-binding molecule according to any of the preceding claims, or produced according to the process of claim 21, for use in the prevention, treatment or amelioration of a disease selected from a proliferative disease, a tumorous disease, cancer or an immunological disorder,
preferably cancer,
more preferably multiple myeloma (MM), acute myeloid leukemia (AML), Non-Hodgkin lymphoma (NHL), Non-small-cell lung carcinoma (NSCLC) and Colorectal cancer (CRC).

24. A method for the treatment or amelioration of a proliferative disease, a tumorous disease, cancer, or an immunological disorder, comprising the step of administering to a subject in need thereof the bispecific antigen-binding molecule according to claim 1, or produced according to the process of claim 21, wherein the disease preferably is multiple myeloma (MM), acute myeloid leukemia (AML), Non-Hodgkin lymphoma (NHL), Non-small-cell lung carcinoma (NSCLC) and Colorectal cancer (CRC).

25. A kit comprising the multitargeting antigen-binding molecule according to any one of claims 1 to 17, or produced according to the process of claim 21, a polynucleotide as defined in claim 18, a vector as defined in claim 19, and/or a host cell as defined in claim 20.

26. A method for the treatment or amelioration of gastrointestinal cancer, comprising the step of administering to a subject in need thereof a multitargeting antigen-binding molecule directed against CS1, BCMA, CD20, CD22, FLT3, CD123, CLL1, MSLN, or EpCAM and CD3.

27. A multitargeting antigen-binding molecule directed against CS1, BCMA, CD20, CD22, FLT3, CD123, CLL1, MSLN, and/or EpCAM and CD3 for use in the treatment or amelioration of multiple myeloma (MM), acute myeloid leukemia (AML), Non-Hodgkin lymphoma (NHL), Non-small-cell lung carcinoma (NSCLC) and Colorectal cancer (CRC).

The application's sequence listing, which the Patent Office published only in electronic form, follows.

SEQUENCE LISTING (3762 sequences)

SEQ ID NO: 1 - protein, 5 aa, Artificial Sequence
  Synthetic
GGGGS

SEQ ID NO: 2 - protein, 10 aa, Artificial Sequence
  Synthetic
GGGGSGGGGS

SEQ ID NO: 3 - protein, 15 aa, Artificial Sequence
  Synthetic
GGGGSGGGGSGGGGS

SEQ ID NO: 4 - protein, 20 aa, Artificial Sequence
  Synthetic
GGGGSGGGGSGGGGSGGGGS

SEQ ID NO: 5 - protein, 25 aa, Artificial Sequence
  Synthetic
GGGGSGGGGSGGGGSGGGGSGGGGS

SEQ ID NO: 6 - protein, 30 aa, Artificial Sequence
  Synthetic
GGGGSGGGGSGGGGSGGGGSGGGGSGGGGS

SEQ ID NO: 7 - protein, 35 aa, Artificial Sequence
  Synthetic
GGGGSGGGGSGGGGSGGGGSGGGGSGGGGSGGGGS

SEQ ID NO: 8 - protein, 40 aa, Artificial Sequence
  Synthetic
GGGGSGGGGSGGGGSGGGGSGGGGSGGGGSGGGGSGGGGS

SEQ ID NO: 9 - protein, 6 aa, Artificial Sequence
  Synthetic
PGGGGS

SEQ ID NO: 10 - protein, 6 aa, Artificial Sequence
  Synthetic
PGGDGS

SEQ ID NO: 11 - protein, 6 aa, Artificial Sequence
  Synthetic
SGGGGS

SEQ ID NO: 12 - protein, 4 aa, Artificial Sequence
  Synthetic
GGGG

SEQ ID NO: 13 - protein, 109 aa, Artificial Sequence
  Synthetic
QTVVTQEPSLTVSPGGTVTLTCGSSTGAVTSGNYPNWVQQKPGQAPRGLIGGTKFLAPGTPARFSGSLLGGKAALTLSGVQPEDEAEYYCVLWYSNRWVFGGGTKLTVL

SEQ ID NO: 14 - protein, 125 aa, Artificial Sequence
  Synthetic
EVQLVESGGGLVQPGGSLRLSCAASGFTFNSYAMNWVRQAPGKGLEWVARIRSKYNNYATYYADSVKGRFTISRDDSKNTAYLQMNSLKTEDTAVYYCVRHGNFGNSYVSWWAYWGQGTLVTVSS

SEQ ID NO: 15 - protein, 249 aa, Artificial Sequence
  Synthetic
EVQLVESGGGLVQPGGSLRLSCAASGFTFNSYAMNWVRQAPGKGLEWVARIRSKYNNYATYYADSVKGRFTISRDDSKNTAYLQMNSLKTEDTAVYYCVRHGNFGNSYVSWWAYWGQGTLVTVSSGGGGSGGGGSGGGGSQTVVTQEPSLTVSPGGTVTLTCGSSTGAVTSGNYPNWVQQKPGQAPRGLIGGTKFLAPGTPARFSGSLLGGKAALTLSGVQPEDEAEYYCVLWYSNRWVFGGGTKLTVL

SEQ ID NO: 16 - protein, 6 aa, Artificial Sequence
  Synthetic
HHHHHH

SEQ ID NO: 17 - protein, 227 aa, Artificial Sequence
  Synthetic
DKTHTCPPCPAPELLGGPSVFLFPPKPKDTLMISRTPEVTCVVVDVSHEDPEVKFNWYVDGVEVHNAKTKPCEEQYGSTYRCVSVLTVLHQDWLNGKEYKCKVSNKALPAPIEKTISKAKGQPREPQVYTLPPSREEMTKNQVSLTCLVKGFYPSDIAVEWESNGQPENNYKTTPPVLDSDGSFFLYSKLTVDKSRWQQGNVFSCSVMHEALHNHYTQKSLSLSPGK

SEQ ID NO: 18 - protein, 225 aa, Artificial Sequence
  Synthetic
DKTHTCPPCPAPELLGGPSVFLFPPKPKDTLMISRTPEVTCVVVDVSHEDPEVKFNWYVDGVEVHNAKTKPCEEQYGSTYRCVSVLTVLHQDWLNGKEYKCKVSNKALPAPIEKTISKAKGQPREPQVYTLPPSREEMTKNQVSLTCLVKGFYPSDIAVEWESNGQPENNYKTTPPVLDSDGSFFLYSKLTVDKSRWQQGNVFSCSVMHEALHNHYTQKSLSLSP

SEQ ID NO: 19 - protein, 227 aa, Artificial Sequence
  Synthetic
DKTHTCPPCPAPELLGGPSVFLFPPKPKDTLMISRTPEVTCVVVDVSHEDPEVKFNWYVDGVEVHNAKTKPREEQYNSTYRVVSVLTVLHQDWLNGKEYKCKVSNKALPAPIEKTISKAKGQPREPQVYTLPPSREEMTKNQVSLTCLVKGFYPSDIAVEWESNGQPENNYKTTPPVLDSDGSFFLYSKLTVDKSRWQQGNVFSCSVMHEALHNHYTQKSLSLSPGK

SEQ ID NO: 20 - protein, 225 aa, Artificial Sequence
  Synthetic
DKTHTCPPCPAPELLGGPSVFLFPPKPKDTLMISRTPEVTCVVVDVSHEDPEVKFNWYVDGVEVHNAKTKPREEQYNSTYRVVSVLTVLHQDWLNGKEYKCKVSNKALPAPIEKTISKAKGQPREPQVYTLPPSREEMTKNQVSLTCLVKGFYPSDIAVEWESNGQPENNYKTTPPVLDSDGSFFLYSKLTVDKSRWQQGNVFSCSVMHEALHNHYTQKSLSLSP

SEQ ID NO: 21 - protein, 227 aa, Artificial Sequence
  Synthetic
DKTHTCPPCPAPELLGGPSVFLFPPKPKDTLMISRTPEVTCVVVDVSHEDPEVKFNWYVDGVEVHNAKTKPREEQYGSTYRVVSVLTVLHQDWLNGKEYKCKVSNKALPAPIEKTISKAKGQPREPQVYTLPPSREEMTKNQVSLTCLVKGFYPSDIAVEWESNGQPENNYKTTPPVLDSDGSFFLYSKLTVDKSRWQQGNVFSCSVMHEALHNHYTQKSLSLSPGK

SEQ ID NO: 22 - protein, 225 aa, Artificial Sequence
  Synthetic
DKTHTCPPCPAPELLGGPSVFLFPPKPKDTLMISRTPEVTCVVVDVSHEDPEVKFNWYVDGVEVHNAKTKPREEQYGSTYRVVSVLTVLHQDWLNGKEYKCKVSNKALPAPIEKTISKAKGQPREPQVYTLPPSREEMTKNQVSLTCLVKGFYPSDIAVEWESNGQPENNYKTTPPVLDSDGSFFLYSKLTVDKSRWQQGNVFSCSVMHEALHNHYTQKSLSLSP

SEQ ID NO: 23 - protein, 227 aa, Artificial Sequence
  Synthetic
DKTHTCPPCPAPELLGGPSVFLFPPKPKDTLMISRTPEVTCVVVDVSHEDPEVKFNWYVDGVEVHNAKTKPCEEQYNSTYRCVSVLTVLHQDWLNGKEYKCKVSNKALPAPIEKTISKAKGQPREPQVYTLPPSREEMTKNQVSLTCLVKGFYPSDIAVEWESNGQPENNYKTTPPVLDSDGSFFLYSKLTVDKSRWQQGNVFSCSVMHEALHNHYTQKSLSLSPGK

SEQ ID NO: 24 - protein, 225 aa, Artificial Sequence
  Synthetic
DKTHTCPPCPAPELLGGPSVFLFPPKPKDTLMISRTPEVTCVVVDVSHEDPEVKFNWYVDGVEVHNAKTKPCEEQYNSTYRCVSVLTVLHQDWLNGKEYKCKVSNKALPAPIEKTISKAKGQPREPQVYTLPPSREEMTKNQVSLTCLVKGFYPSDIAVEWESNGQPENNYKTTPPVLDSDGSFFLYSKLTVDKSRWQQGNVFSCSVMHEALHNHYTQKSLSLSP

SEQ ID NO: 25 - protein, 484 aa, Artificial Sequence
  Synthetic
DKTHTCPPCPAPELLGGPSVFLFPPKPKDTLMISRTPEVTCVVVDVSHEDPEVKFNWYVDGVEVHNAKTKPCEEQYGSTYRCVSVLTVLHQDWLNGKEYKCKVSNKALPAPIEKTISKAKGQPREPQVYTLPPSREEMTKNQVSLTCLVKGFYPSDIAVEWESNGQPENNYKTTPPVLDSDGSFFLYSKLTVDKSRWQQGNVFSCSVMHEALHNHYTQKSLSLSPGKGGGGSGGGGSGGGGSGGGGSGGGGSGGGGSDKTHTCPPCPAPELLGGPSVFLFPPKPKDTLMISRTPEVTCVVVDVSHEDPEVKFNWYVDGVEVHNAKTKPCEEQYGSTYRCVSVLTVLHQDWLNGKEYKCKVSNKALPAPIEKTISKAKGQPREPQVYTLPPSREEMTKNQVSLTCLVKGFYPSDIAVEWESNGQPENNYKTTPPVLDSDGSFFLYSKLTVDKSRWQQGNVFSCSVMHEALHNHYTQKSLSLSPGK

SEQ ID NO: 26 - protein, 480 aa, Artificial Sequence
  Synthetic
DKTHTCPPCPAPELLGGPSVFLFPPKPKDTLMISRTPEVTCVVVDVSHEDPEVKFNWYVDGVEVHNAKTKPCEEQYGSTYRCVSVLTVLHQDWLNGKEYKCKVSNKALPAPIEKTISKAKGQPREPQVYTLPPSREEMTKNQVSLTCLVKGFYPSDIAVEWESNGQPENNYKTTPPVLDSDGSFFLYSKLTVDKSRWQQGNVFSCSVMHEALHNHYTQKSLSLSPGGGGSGGGGSGGGGSGGGGSGGGGSGGGGSDKTHTCPPCPAPELLGGPSVFLFPPKPKDTLMISRTPEVTCVVVDVSHEDPEVKFNWYVDGVEVHNAKTKPCEEQYGSTYRCVSVLTVLHQDWLNGKEYKCKVSNKALPAPIEKTISKAKGQPREPQVYTLPPSREEMTKNQVSLTCLVKGFYPSDIAVEWESNGQPENNYKTTPPVLDSDGSFFLYSKLTVDKSRWQQGNVFSCSVMHEALHNHYTQKSLSLSP

SEQ ID NO: 27 - protein, 484 aa, Artificial Sequence
  Synthetic
DKTHTCPPCPAPELLGGPSVFLFPPKPKDTLMISRTPEVTCVVVDVSHEDPEVKFNWYVDGVEVHNAKTKPREEQYNSTYRVVSVLTVLHQDWLNGKEYKCKVSNKALPAPIEKTISKAKGQPREPQVYTLPPSREEMTKNQVSLTCLVKGFYPSDIAVEWESNGQPENNYKTTPPVLDSDGSFFLYSKLTVDKSRWQQGNVFSCSVMHEALHNHYTQKSLSLSPGKGGGGSGGGGSGGGGSGGGGSGGGGSGGGGSDKTHTCPPCPAPELLGGPSVFLFPPKPKDTLMISRTPEVTCVVVDVSHEDPEVKFNWYVDGVEVHNAKTKPREEQYNSTYRVVSVLTVLHQDWLNGKEYKCKVSNKALPAPIEKTISKAKGQPREPQVYTLPPSREEMTKNQVSLTCLVKGFYPSDIAVEWESNGQPENNYKTTPPVLDSDGSFFLYSKLTVDKSRWQQGNVFSCSVMHEALHNHYTQKSLSLSPGK

SEQ ID NO: 28 - protein, 480 aa, Artificial Sequence
  Synthetic
DKTHTCPPCPAPELLGGPSVFLFPPKPKDTLMISRTPEVTCVVVDVSHEDPEVKFNWYVDGVEVHNAKTKPREEQYNSTYRVVSVLTVLHQDWLNGKEYKCKVSNKALPAPIEKTISKAKGQPREPQVYTLPPSREEMTKNQVSLTCLVKGFYPSDIAVEWESNGQPENNYKTTPPVLDSDGSFFLYSKLTVDKSRWQQGNVFSCSVMHEALHNHYTQKSLSLSPGGGGSGGGGSGGGGSGGGGSGGGGSGGGGSDKTHTCPPCPAPELLGGPSVFLFPPKPKDTLMISRTPEVTCVVVDVSHEDPEVKFNWYVDGVEVHNAKTKPREEQYNSTYRVVSVLTVLHQDWLNGKEYKCKVSNKALPAPIEKTISKAKGQPREPQVYTLPPSREEMTKNQVSLTCLVKGFYPSDIAVEWESNGQPENNYKTTPPVLDSDGSFFLYSKLTVDKSRWQQGNVFSCSVMHEALHNHYTQKSLSLSP

SEQ ID NO: 29 - protein, 484 aa, Artificial Sequence
  Synthetic
DKTHTCPPCPAPELLGGPSVFLFPPKPKDTLMISRTPEVTCVVVDVSHEDPEVKFNWYVDGVEVHNAKTKPREEQYGSTYRVVSVLTVLHQDWLNGKEYKCKVSNKALPAPIEKTISKAKGQPREPQVYTLPPSREEMTKNQVSLTCLVKGFYPSDIAVEWESNGQPENNYKTTPPVLDSDGSFFLYSKLTVDKSRWQQGNVFSCSVMHEALHNHYTQKSLSLSPGKGGGGSGGGGSGGGGSGGGGSGGGGSGGGGSDKTHTCPPCPAPELLGGPSVFLFPPKPKDTLMISRTPEVTCVVVDVSHEDPEVKFNWYVDGVEVHNAKTKPREEQYGSTYRVVSVLTVLHQDWLNGKEYKCKVSNKALPAPIEKTISKAKGQPREPQVYTLPPSREEMTKNQVSLTCLVKGFYPSDIAVEWESNGQPENNYKTTPPVLDSDGSFFLYSKLTVDKSRWQQGNVFSCSVMHEALHNHYTQKSLSLSPGK

SEQ ID NO: 30 - protein, 480 aa, Artificial Sequence
  Synthetic
DKTHTCPPCPAPELLGGPSVFLFPPKPKDTLMISRTPEVTCVVVDVSHEDPEVKFNWYVDGVEVHNAKTKPREEQYGSTYRVVSVLTVLHQDWLNGKEYKCKVSNKALPAPIEKTISKAKGQPREPQVYTLPPSREEMTKNQVSLTCLVKGFYPSDIAVEWESNGQPENNYKTTPPVLDSDGSFFLYSKLTVDKSRWQQGNVFSCSVMHEALHNHYTQKSLSLSPGGGGSGGGGSGGGGSGGGGSGGGGSGGGGSDKTHTCPPCPAPELLGGPSVFLFPPKPKDTLMISRTPEVTCVVVDVSHEDPEVKFNWYVDGVEVHNAKTKPREEQYGSTYRVVSVLTVLHQDWLNGKEYKCKVSNKALPAPIEKTISKAKGQPREPQVYTLPPSREEMTKNQVSLTCLVKGFYPSDIAVEWESNGQPENNYKTTPPVLDSDGSFFLYSKLTVDKSRWQQGNVFSCSVMHEALHNHYTQKSLSLSP

SEQ ID NO: 31 - protein, 484 aa, Artificial Sequence
  Synthetic
DKTHTCPPCPAPELLGGPSVFLFPPKPKDTLMISRTPEVTCVVVDVSHEDPEVKFNWYVDGVEVHNAKTKPCEEQYNSTYRCVSVLTVLHQDWLNGKEYKCKVSNKALPAPIEKTISKAKGQPREPQVYTLPPSREEMTKNQVSLTCLVKGFYPSDIAVEWESNGQPENNYKTTPPVLDSDGSFFLYSKLTVDKSRWQQGNVFSCSVMHEALHNHYTQKSLSLSPGKGGGGSGGGGSGGGGSGGGGSGGGGSGGGGSDKTHTCPPCPAPELLGGPSVFLFPPKPKDTLMISRTPEVTCVVVDVSHEDPEVKFNWYVDGVEVHNAKTKPCEEQYNSTYRCVSVLTVLHQDWLNGKEYKCKVSNKALPAPIEKTISKAKGQPREPQVYTLPPSREEMTKNQVSLTCLVKGFYPSDIAVEWESNGQPENNYKTTPPVLDSDGSFFLYSKLTVDKSRWQQGNVFSCSVMHEALHNHYTQKSLSLSPGK

SEQ ID NO: 32 - protein, 480 aa, Artificial Sequence
  Synthetic
DKTHTCPPCPAPELLGGPSVFLFPPKPKDTLMISRTPEVTCVVVDVSHEDPEVKFNWYVDGVEVHNAKTKPCEEQYNSTYRCVSVLTVLHQDWLNGKEYKCKVSNKALPAPIEKTISKAKGQPREPQVYTLPPSREEMTKNQVSLTCLVKGFYPSDIAVEWESNGQPENNYKTTPPVLDSDGSFFLYSKLTVDKSRWQQGNVFSCSVMHEALHNHYTQKSLSLSPGGGGSGGGGSGGGGSGGGGSGGGGSGGGGSDKTHTCPPCPAPELLGGPSVFLFPPKPKDTLMISRTPEVTCVVVDVSHEDPEVKFNWYVDGVEVHNAKTKPCEEQYNSTYRCVSVLTVLHQDWLNGKEYKCKVSNKALPAPIEKTISKAKGQPREPQVYTLPPSREEMTKNQVSLTCLVKGFYPSDIAVEWESNGQPENNYKTTPPVLDSDGSFFLYSKLTVDKSRWQQGNVFSCSVMHEALHNHYTQKSLSLSP

SEQ ID NO: 33 - protein, 5 aa, Artificial Sequence
  Synthetic
HYAMS

SEQ ID NO: 34 - protein, 17 aa, Artificial Sequence
  Synthetic
AVSGGGDKTLYADAVKG

SEQ ID NO: 35 - protein, 10 aa, Artificial Sequence
  Synthetic
LRGFYYGMDV

SEQ ID NO: 36 - protein, 16 aa, Artificial Sequence
  Synthetic
RSSQSLLHSNKYNYLD

SEQ ID NO: 37 - protein, 7 aa, Artificial Sequence
  Synthetic
LGSNRAS

SEQ ID NO: 38 - protein, 10 aa, Artificial Sequence
  Synthetic
MQALQTPPIT

SEQ ID NO: 39 - protein, 119 aa, Artificial Sequence
  Synthetic
EVQLLESGGGLVQPGGSLRLSCAASGFTFSHYAMSWVRQAPGKCLEWVSAVSGGGDKTLYADAVKGRFTISRDNSKNTLFLQMNSLRAEDTAIYYCARLRGFYYGMDVWGQGTTVTVSS

SEQ ID NO: 40 - protein, 113 aa, Artificial Sequence
  Synthetic
DIVLTQSPLSLPVTPGEPASISCRSSQSLLHSNKYNYLDWYLQKPGQSPQLLIYLGSNRASGVPDRFSGSGSGTDFTLKISRVEAEDVGVYYCMQALQTPPITFGCGTRLEIK

SEQ ID NO: 41 - protein, 247 aa, Artificial Sequence
  Synthetic
EVQLLESGGGLVQPGGSLRLSCAASGFTFSHYAMSWVRQAPGKCLEWVSAVSGGGDKTLYADAVKGRFTISRDNSKNTLFLQMNSLRAEDTAIYYCARLRGFYYGMDVWGQGTTVTVSSGGGGSGGGGSGGGGSDIVLTQSPLSLPVTPGEPASISCRSSQSLLHSNKYNYLDWYLQKPGQSPQLLIYLGSNRASGVPDRFSGSGSGTDFTLKISRVEAEDVGVYYCMQALQTPPITFGCGTRLEIK

SEQ ID NO: 42 - protein, 502 aa, Artificial Sequence
  Synthetic
EVQLLESGGGLVQPGGSLRLSCAASGFTFSHYAMSWVRQAPGKCLEWVSAVSGGGDKTLYADAVKGRFTISRDNSKNTLFLQMNSLRAEDTAIYYCARLRGFYYGMDVWGQGTTVTVSSGGGGSGGGGSGGGGSDIVLTQSPLSLPVTPGEPASISCRSSQSLLHSNKYNYLDWYLQKPGQSPQLLIYLGSNRASGVPDRFSGSGSGTDFTLKISRVEAEDVGVYYCMQALQTPPITFGCGTRLEIKSGGGGSEVQLVESGGGLVQPGGSLKLSCAASGFTFNKYAMNWVRQAPGKGLEWVARIRSKYNNYATYYADSVKDRFTISRDDSKNTAYLQMNNLKTEDTAVYYCVRHGNFGNSYISYWAYWGQGTLVTVSSGGGGSGGGGSGGGGSQTVVTQEPSLTVSPGGTVTLTCGSSTGAVTSGNYPNWVQQKPGQAPRGLIGGTKFLAPGTPARFSGSLLGGKAALTLSGVQPEDEAEYYCVLWYSNRWVFGGGTKLTVL

SEQ ID NO: 43 - protein, 990 aa, Artificial Sequence
  Synthetic
EVQLLESGGGLVQPGGSLRLSCAASGFTFSHYAMSWVRQAPGKCLEWVSAVSGGGDKTLYADAVKGRFTISRDNSKNTLFLQMNSLRAEDTAIYYCARLRGFYYGMDVWGQGTTVTVSSGGGGSGGGGSGGGGSDIVLTQSPLSLPVTPGEPASISCRSSQSLLHSNKYNYLDWYLQKPGQSPQLLIYLGSNRASGVPDRFSGSGSGTDFTLKISRVEAEDVGVYYCMQALQTPPITFGCGTRLEIKSGGGGSEVQLVESGGGLVQPGGSLKLSCAASGFTFNKYAMNWVRQAPGKGLEWVARIRSKYNNYATYYADSVKDRFTISRDDSKNTAYLQMNNLKTEDTAVYYCVRHGNFGNSYISYWAYWGQGTLVTVSSGGGGSGGGGSGGGGSQTVVTQEPSLTVSPGGTVTLTCGSSTGAVTSGNYPNWVQQKPGQAPRGLIGGTKFLAPGTPARFSGSLLGGKAALTLSGVQPEDEAEYYCVLWYSNRWVFGGGTKLTVLGGGGDKTHTCPPCPAPELLGGPSVFLFPPKPKDTLMISRTPEVTCVVVDVSHEDPEVKFNWYVDGVEVHNAKTKPCEEQYGSTYRCVSVLTVLHQDWLNGKEYKCKVSNKALPAPIEKTISKAKGQPREPQVYTLPPSREEMTKNQVSLTCLVKGFYPSDIAVEWESNGQPENNYKTTPPVLDSDGSFFLYSKLTVDKSRWQQGNVFSCSVMHEALHNHYTQKSLSLSPGKGGGGSGGGGSGGGGSGGGGSGGGGSGGGGSDKTHTCPPCPAPELLGGPSVFLFPPKPKDTLMISRTPEVTCVVVDVSHEDPEVKFNWYVDGVEVHNAKTKPCEEQYGSTYRCVSVLTVLHQDWLNGKEYKCKVSNKALPAPIEKTISKAKGQPREPQVYTLPPSREEMTKNQVSLTCLVKGFYPSDIAVEWESNGQPENNYKTTPPVLDSDGSFFLYSKLTVDKSRWQQGNVFSCSVMHEALHNHYTQKSLSLSPGK

SEQ ID NO: 44 - protein, 5 aa, Artificial Sequence
  Synthetic
HYAMS

SEQ ID NO: 45 - protein, 17 aa, Artificial Sequence
  Synthetic
AISGGGDRTFYADSVKG

SEQ ID NO: 46 - protein, 10 aa, Artificial Sequence
  Synthetic
LRGFYYGMDV

SEQ ID NO: 47 - protein, 16 aa, Artificial Sequence
  Synthetic
RSSQSLLHSNGYNYLD

SEQ ID NO: 48 - protein, 7 aa, Artificial Sequence
  Synthetic
LGSNRAS

SEQ ID NO: 49 - protein, 9 aa, Artificial Sequence
  Synthetic
MQGTHWPHT

SEQ ID NO: 50 - protein, 119 aa, Artificial Sequence
  Synthetic
EVQLLESGGGLVQPGGSLRLSCAASGFTFSHYAMSWVRQAPGKCLEWVSAISGGGDRTFYADSVKGRFTVSRDNSKNTLYLQMNSLRAEDTAVYYCAKLRGFYYGMDVWGQGTTVTVSS

SEQ ID NO: 51 - protein, 112 aa, Artificial Sequence
  Synthetic
DIVMTQSPLSLPVTPGEPASISCRSSQSLLHSNGYNYLDWYLQQPGQSPQLLIYLGSNRASGVPDRFSASGSGTDFTLKISRVEAEDVGVYYCMQGTHWPHTFGCGTKVDIK

SEQ ID NO: 52 - protein, 246 aa, Artificial Sequence
  Synthetic
EVQLLESGGGLVQPGGSLRLSCAASGFTFSHYAMSWVRQAPGKCLEWVSAISGGGDRTFYADSVKGRFTVSRDNSKNTLYLQMNSLRAEDTAVYYCAKLRGFYYGMDVWGQGTTVTVSSGGGGSGGGGSGGGGSDIVMTQSPLSLPVTPGEPASISCRSSQSLLHSNGYNYLDWYLQQPGQSPQLLIYLGSNRASGVPDRFSASGSGTDFTLKISRVEAEDVGVYYCMQGTHWPHTFGCGTKVDIK

SEQ ID NO: 53 - protein, 501 aa, Artificial Sequence
  Synthetic
EVQLLESGGGLVQPGGSLRLSCAASGFTFSHYAMSWVRQAPGKCLEWVSAISGGGDRTFYADSVKGRFTVSRDNSKNTLYLQMNSLRAEDTAVYYCAKLRGFYYGMDVWGQGTTVTVSSGGGGSGGGGSGGGGSDIVMTQSPLSLPVTPGEPASISCRSSQSLLHSNGYNYLDWYLQQPGQSPQLLIYLGSNRASGVPDRFSASGSGTDFTLKISRVEAEDVGVYYCMQGTHWPHTFGCGTKVDIKSGGGGSEVQLVESGGGLVQPGGSLKLSCAASGFTFNKYAMNWVRQAPGKGLEWVARIRSKYNNYATYYADSVKDRFTISRDDSKNTAYLQMNNLKTEDTAVYYCVRHGNFGNSYISYWAYWGQGTLVTVSSGGGGSGGGGSGGGGSQTVVTQEPSLTVSPGGTVTLTCGSSTGAVTSGNYPNWVQQKPGQAPRGLIGGTKFLAPGTPARFSGSLLGGKAALTLSGVQPEDEAEYYCVLWYSNRWVFGGGTKLTVL

SEQ ID NO: 54 - protein, 989 aa, Artificial Sequence
  Synthetic
EVQLLESGGGLVQPGGSLRLSCAASGFTFSHYAMSWVRQAPGKCLEWVSAISGGGDRTFYADSVKGRFTVSRDNSKNTLYLQMNSLRAEDTAVYYCAKLRGFYYGMDVWGQGTTVTVSSGGGGSGGGGSGGGGSDIVMTQSPLSLPVTPGEPASISCRSSQSLLHSNGYNYLDWYLQQPGQSPQLLIYLGSNRASGVPDRFSASGSGTDFTLKISRVEAEDVGVYYCMQGTHWPHTFGCGTKVDIKSGGGGSEVQLVESGGGLVQPGGSLKLSCAASGFTFNKYAMNWVRQAPGKGLEWVARIRSKYNNYATYYADSVKDRFTISRDDSKNTAYLQMNNLKTEDTAVYYCVRHGNFGNSYISYWAYWGQGTLVTVSSGGGGSGGGGSGGGGSQTVVTQEPSLTVSPGGTVTLTCGSSTGAVTSGNYPNWVQQKPGQAPRGLIGGTKFLAPGTPARFSGSLLGGKAALTLSGVQPEDEAEYYCVLWYSNRWVFGGGTKLTVLGGGGDKTHTCPPCPAPELLGGPSVFLFPPKPKDTLMISRTPEVTCVVVDVSHEDPEVKFNWYVDGVEVHNAKTKPCEEQYGSTYRCVSVLTVLHQDWLNGKEYKCKVSNKALPAPIEKTISKAKGQPREPQVYTLPPSREEMTKNQVSLTCLVKGFYPSDIAVEWESNGQPENNYKTTPPVLDSDGSFFLYSKLTVDKSRWQQGNVFSCSVMHEALHNHYTQKSLSLSPGKGGGGSGGGGSGGGGSGGGGSGGGGSGGGGSDKTHTCPPCPAPELLGGPSVFLFPPKPKDTLMISRTPEVTCVVVDVSHEDPEVKFNWYVDGVEVHNAKTKPCEEQYGSTYRCVSVLTVLHQDWLNGKEYKCKVSNKALPAPIEKTISKAKGQPREPQVYTLPPSREEMTKNQVSLTCLVKGFYPSDIAVEWESNGQPENNYKTTPPVLDSDGSFFLYSKLTVDKSRWQQGNVFSCSVMHEALHNHYTQKSLSLSPGK

SEQ ID NO: 55 - protein, 5 aa, Artificial Sequence
  Synthetic
HYAMS

SEQ ID NO: 56 - protein, 17 aa, Artificial Sequence
  Synthetic
AISGGGDRTFYADAVKG

SEQ ID NO: 57 - protein, 10 aa, Artificial Sequence
  Synthetic
LRGFYYGMDV

SEQ ID NO: 58 - protein, 16 aa, Artificial Sequence
  Synthetic
RSSQSLLHSQGYNYLD

SEQ ID NO: 59 - protein, 7 aa, Artificial Sequence
  Synthetic
LGSNRAS

SEQ ID NO: 60 - protein, 9 aa, Artificial Sequence
  Synthetic
MQGTHWPHT

SEQ ID NO: 61 - protein, 119 aa, Artificial Sequence
  Synthetic
EVQLLESGGGLVQPGGSLRLSCAASGFTFSHYAMSWVRQAPGKCLEWVSAISGGGDRTFYADAVKGRFTVSRDNSKNTLYLQMNSLRAEDTAVYYCAKLRGFYYGMDVWGQGTTVTVSS

SEQ ID NO: 62 - protein, 112 aa, Artificial Sequence
  Synthetic
DIVMTQSPLSLPVTPGEPASISCRSSQSLLHSQGYNYLDWYLQQPGQSPQLLIYLGSNRASGVPDRFSASGSGTDFTLKISRVEAEDVGVYYCMQGTHWPHTFGCGTKVDIK

SEQ ID NO: 63 - protein, 246 aa, Artificial Sequence
  Synthetic
EVQLLESGGGLVQPGGSLRLSCAASGFTFSHYAMSWVRQAPGKCLEWVSAISGGGDRTFYADAVKGRFTVSRDNSKNTLYLQMNSLRAEDTAVYYCAKLRGFYYGMDVWGQGTTVTVSSGGGGSGGGGSGGGGSDIVMTQSPLSLPVTPGEPASISCRSSQSLLHSQGYNYLDWYLQQPGQSPQLLIYLGSNRASGVPDRFSASGSGTDFTLKISRVEAEDVGVYYCMQGTHWPHTFGCGTKVDIK

SEQ ID NO: 64 - protein, 501 aa, Artificial Sequence
  Synthetic
EVQLLESGGGLVQPGGSLRLSCAASGFTFSHYAMSWVRQAPGKCLEWVSAISGGGDRTFYADAVKGRFTVSRDNSKNTLYLQMNSLRAEDTAVYYCAKLRGFYYGMDVWGQGTTVTVSSGGGGSGGGGSGGGGSDIVMTQSPLSLPVTPGEPASISCRSSQSLLHSQGYNYLDWYLQQPGQSPQLLIYLGSNRASGVPDRFSASGSGTDFTLKISRVEAEDVGVYYCMQGTHWPHTFGCGTKVDIKSGGGGSEVQLVESGGGLVQPGGSLKLSCAASGFTFNKYAMNWVRQAPGKGLEWVARIRSKYNNYATYYADSVKDRFTISRDDSKNTAYLQMNNLKTEDTAVYYCVRHGNFGNSYISYWAYWGQGTLVTVSSGGGGSGGGGSGGGGSQTVVTQEPSLTVSPGGTVTLTCGSSTGAVTSGNYPNWVQQKPGQAPRGLIGGTKFLAPGTPARFSGSLLGGKAALTLSGVQPEDEAEYYCVLWYSNRWVFGGGTKLTVL

SEQ ID NO: 65 - protein, 989 aa, Artificial Sequence
  Synthetic
EVQLLESGGGLVQPGGSLRLSCAASGFTFSHYAMSWVRQAPGKCLEWVSAISGGGDRTFYADAVKGRFTVSRDNSKNTLYLQMNSLRAEDTAVYYCAKLRGFYYGMDVWGQGTTVTVSSGGGGSGGGGSGGGGSDIVMTQSPLSLPVTPGEPASISCRSSQSLLHSQGYNYLDWYLQQPGQSPQLLIYLGSNRASGVPDRFSASGSGTDFTLKISRVEAEDVGVYYCMQGTHWPHTFGCGTKVDIKSGGGGSEVQLVESGGGLVQPGGSLKLSCAASGFTFNKYAMNWVRQAPGKGLEWVARIRSKYNNYATYYADSVKDRFTISRDDSKNTAYLQMNNLKTEDTAVYYCVRHGNFGNSYISYWAYWGQGTLVTVSSGGGGSGGGGSGGGGSQTVVTQEPSLTVSPGGTVTLTCGSSTGAVTSGNYPNWVQQKPGQAPRGLIGGTKFLAPGTPARFSGSLLGGKAALTLSGVQPEDEAEYYCVLWYSNRWVFGGGTKLTVLGGGGDKTHTCPPCPAPELLGGPSVFLFPPKPKDTLMISRTPEVTCVVVDVSHEDPEVKFNWYVDGVEVHNAKTKPCEEQYGSTYRCVSVLTVLHQDWLNGKEYKCKVSNKALPAPIEKTISKAKGQPREPQVYTLPPSREEMTKNQVSLTCLVKGFYPSDIAVEWESNGQPENNYKTTPPVLDSDGSFFLYSKLTVDKSRWQQGNVFSCSVMHEALHNHYTQKSLSLSPGKGGGGSGGGGSGGGGSGGGGSGGGGSGGGGSDKTHTCPPCPAPELLGGPSVFLFPPKPKDTLMISRTPEVTCVVVDVSHEDPEVKFNWYVDGVEVHNAKTKPCEEQYGSTYRCVSVLTVLHQDWLNGKEYKCKVSNKALPAPIEKTISKAKGQPREPQVYTLPPSREEMTKNQVSLTCLVKGFYPSDIAVEWESNGQPENNYKTTPPVLDSDGSFFLYSKLTVDKSRWQQGNVFSCSVMHEALHNHYTQKSLSLSPGK

SEQ ID NO: 66 - protein, 5 aa, Artificial Sequence
  Synthetic
HYAMS

SEQ ID NO: 67 - protein, 17 aa, Artificial Sequence
  Synthetic
AISGGGDRTFYADAVKG

SEQ ID NO: 68 - protein, 10 aa, Artificial Sequence
  Synthetic
LRGFYYGMDV

SEQ ID NO: 69 - protein, 16 aa, Artificial Sequence
  Synthetic
RSSQSLLHSNAYNYLD

SEQ ID NO: 70 - protein, 7 aa, Artificial Sequence
  Synthetic
LGSNRAS

SEQ ID NO: 71 - protein, 9 aa, Artificial Sequence
  Synthetic
MQGTHWPHT

SEQ ID NO: 72 - protein, 119 aa, Artificial Sequence; identical to SEQ ID NO: 61
  Synthetic

SEQ ID NO: 73 - protein, 112 aa, Artificial Sequence
  Synthetic
DIVMTQSPLSLPVTPGEPASISCRSSQSLLHSNAYNYLDWYLQQPGQSPQLLIYLGSNRASGVPDRFSASGSGTDFTLKISRVEAEDVGVYYCMQGTHWPHTFGCGTKVDIK

SEQ ID NO: 74 - protein, 246 aa, Artificial Sequence
  Synthetic
EVQLLESGGGLVQPGGSLRLSCAASGFTFSHYAMSWVRQAPGKCLEWVSAISGGGDRTFYADAVKGRFTVSRDNSKNTLYLQMNSLRAEDTAVYYCAKLRGFYYGMDVWGQGTTVTVSSGGGGSGGGGSGGGGSDIVMTQSPLSLPVTPGEPASISCRSSQSLLHSNAYNYLDWYLQQPGQSPQLLIYLGSNRASGVPDRFSASGSGTDFTLKISRVEAEDVGVYYCMQGTHWPHTFGCGTKVDIK

SEQ ID NO: 75 - protein, 501 aa, Artificial Sequence
  Synthetic
EVQLLESGGGLVQPGGSLRLSCAASGFTFSHYAMSWVRQAPGKCLEWVSAISGGGDRTFYADAVKGRFTVSRDNSKNTLYLQMNSLRAEDTAVYYCAKLRGFYYGMDVWGQGTTVTVSSGGGGSGGGGSGGGGSDIVMTQSPLSLPVTPGEPASISCRSSQSLLHSNAYNYLDWYLQQPGQSPQLLIYLGSNRASGVPDRFSASGSGTDFTLKISRVEAEDVGVYYCMQGTHWPHTFGCGTKVDIKSGGGGSEVQLVESGGGLVQPGGSLKLSCAASGFTFNKYAMNWVRQAPGKGLEWVARIRSKYNNYATYYADSVKDRFTISRDDSKNTAYLQMNNLKTEDTAVYYCVRHGNFGNSYISYWAYWGQGTLVTVSSGGGGSGGGGSGGGGSQTVVTQEPSLTVSPGGTVTLTCGSSTGAVTSGNYPNWVQQKPGQAPRGLIGGTKFLAPGTPARFSGSLLGGKAALTLSGVQPEDEAEYYCVLWYSNRWVFGGGTKLTVL

SEQ ID NO: 76 - protein, 989 aa, Artificial Sequence
  Synthetic
EVQLLESGGGLVQPGGSLRLSCAASGFTFSHYAMSWVRQAPGKCLEWVSAISGGGDRTFYADAVKGRFTVSRDNSKNTLYLQMNSLRAEDTAVYYCAKLRGFYYGMDVWGQGTTVTVSSGGGGSGGGGSGGGGSDIVMTQSPLSLPVTPGEPASISCRSSQSLLHSNAYNYLDWYLQQPGQSPQLLIYLGSNRASGVPDRFSASGSGTDFTLKISRVEAEDVGVYYCMQGTHWPHTFGCGTKVDIKSGGGGSEVQLVESGGGLVQPGGSLKLSCAASGFTFNKYAMNWVRQAPGKGLEWVARIRSKYNNYATYYADSVKDRFTISRDDSKNTAYLQMNNLKTEDTAVYYCVRHGNFGNSYISYWAYWGQGTLVTVSSGGGGSGGGGSGGGGSQTVVTQEPSLTVSPGGTVTLTCGSSTGAVTSGNYPNWVQQKPGQAPRGLIGGTKFLAPGTPARFSGSLLGGKAALTLSGVQPEDEAEYYCVLWYSNRWVFGGGTKLTVLGGGGDKTHTCPPCPAPELLGGPSVFLFPPKPKDTLMISRTPEVTCVVVDVSHEDPEVKFNWYVDGVEVHNAKTKPCEEQYGSTYRCVSVLTVLHQDWLNGKEYKCKVSNKALPAPIEKTISKAKGQPREPQVYTLPPSREEMTKNQVSLTCLVKGFYPSDIAVEWESNGQPENNYKTTPPVLDSDGSFFLYSKLTVDKSRWQQGNVFSCSVMHEALHNHYTQKSLSLSPGKGGGGSGGGGSGGGGSGGGGSGGGGSGGGGSDKTHTCPPCPAPELLGGPSVFLFPPKPKDTLMISRTPEVTCVVVDVSHEDPEVKFNWYVDGVEVHNAKTKPCEEQYGSTYRCVSVLTVLHQDWLNGKEYKCKVSNKALPAPIEKTISKAKGQPREPQVYTLPPSREEMTKNQVSLTCLVKGFYPSDIAVEWESNGQPENNYKTTPPVLDSDGSFFLYSKLTVDKSRWQQGNVFSCSVMHEALHNHYTQKSLSLSPGK

SEQ ID NO: 77 - protein, 5 aa, Artificial Sequence
  Synthetic
SYAMS

SEQ ID NO: 78 - protein, 17 aa, Artificial Sequence
  Synthetic
TVSGGGDRTYYADAVKG

SEQ ID NO: 79 - protein, 13 aa, Artificial Sequence
  Synthetic
NRGEGTTFYGMGA

SEQ ID NO: 80 - protein, 16 aa, Artificial Sequence
  Synthetic
RSSQSLLHSQAYNYLD

SEQ ID NO: 81 - protein, 7 aa, Artificial Sequence
  Synthetic
LGSNRAS

SEQ ID NO: 82 - protein, 9 aa, Artificial Sequence
  Synthetic
MQALQTPLT

SEQ ID NO: 83 - protein, 122 aa, Artificial Sequence
  Synthetic
EVQLLESGGGLVQPGGSLRLSCAASGFSFNSYAMSWVRQAPGKCLEWVSTVSGGGDRTYYADAVKGRFTISRDNSKNTLYLQMNSLRAEDTAVYYCAKNRGEGTTFYGMGAWGQGTMVTVSS

SEQ ID NO: 84 - protein, 112 aa, Artificial Sequence
  Synthetic
DIVLTQSPLSLPVTPGEPASISCRSSQSLLHSQAYNYLDWYLQKPGQSPQLLIYLGSNRASGVPDRFSGSGSGTDFTLKISRVEAEDVGVYYCMQALQTPLTFGCGTKVDIK

SEQ ID NO: 85 - protein, 249 aa, Artificial Sequence
  Synthetic
EVQLLESGGGLVQPGGSLRLSCAASGFSFNSYAMSWVRQAPGKCLEWVSTVSGGGDRTYYADAVKGRFTISRDNSKNTLYLQMNSLRAEDTAVYYCAKNRGEGTTFYGMGAWGQGTMVTVSSGGGGSGGGGSGGGGSDIVLTQSPLSLPVTPGEPASISCRSSQSLLHSQAYNYLDWYLQKPGQSPQLLIYLGSNRASGVPDRFSGSGSGTDFTLKISRVEAEDVGVYYCMQALQTPLTFGCGTKVDIK

SEQ ID NO: 86 - protein, 504 aa, Artificial Sequence
  Synthetic
EVQLLESGGGLVQPGGSLRLSCAASGFSFNSYAMSWVRQAPGKCLEWVSTVSGGGDRTYYADAVKGRFTISRDNSKNTLYLQMNSLRAEDTAVYYCAKNRGEGTTFYGMGAWGQGTMVTVSSGGGGSGGGGSGGGGSDIVLTQSPLSLPVTPGEPASISCRSSQSLLHSQAYNYLDWYLQKPGQSPQLLIYLGSNRASGVPDRFSGSGSGTDFTLKISRVEAEDVGVYYCMQALQTPLTFGCGTKVDIKSGGGGSEVQLVESGGGLVQPGGSLKLSCAASGFTFNKYAMNWVRQAPGKGLEWVARIRSKYNNYATYYADSVKDRFTISRDDSKNTAYLQMNNLKTEDTAVYYCVRHGNFGNSYISYWAYWGQGTLVTVSSGGGGSGGGGSGGGGSQTVVTQEPSLTVSPGGTVTLTCGSSTGAVTSGNYPNWVQQKPGQAPRGLIGGTKFLAPGTPARFSGSLLGGKAALTLSGVQPEDEAEYYCVLWYSNRWVFGGGTKLTVL

SEQ ID NO: 87 - protein, 992 aa, Artificial Sequence
  Synthetic
EVQLLESGGGLVQPGGSLRLSCAASGFSFNSYAMSWVRQAPGKCLEWVSTVSGGGDRTYYADAVKGRFTISRDNSKNTLYLQMNSLRAEDTAVYYCAKNRGEGTTFYGMGAWGQGTMVTVSSGGGGSGGGGSGGGGSDIVLTQSPLSLPVTPGEPASISCRSSQSLLHSQAYNYLDWYLQKPGQSPQLLIYLGSNRASGVPDRFSGSGSGTDFTLKISRVEAEDVGVYYCMQALQTPLTFGCGTKVDIKSGGGGSEVQLVESGGGLVQPGGSLKLSCAASGFTFNKYAMNWVRQAPGKGLEWVARIRSKYNNYATYYADSVKDRFTISRDDSKNTAYLQMNNLKTEDTAVYYCVRHGNFGNSYISYWAYWGQGTLVTVSSGGGGSGGGGSGGGGSQTVVTQEPSLTVSPGGTVTLTCGSSTGAVTSGNYPNWVQQKPGQAPRGLIGGTKFLAPGTPARFSGSLLGGKAALTLSGVQPEDEAEYYCVLWYSNRWVFGGGTKLTVLGGGGDKTHTCPPCPAPELLGGPSVFLFPPKPKDTLMISRTPEVTCVVVDVSHEDPEVKFNWYVDGVEVHNAKTKPCEEQYGSTYRCVSVLTVLHQDWLNGKEYKCKVSNKALPAPIEKTISKAKGQPREPQVYTLPPSREEMTKNQVSLTCLVKGFYPSDIAVEWESNGQPENNYKTTPPVLDSDGSFFLYSKLTVDKSRWQQGNVFSCSVMHEALHNHYTQKSLSLSPGKGGGGSGGGGSGGGGSGGGGSGGGGSGGGGSDKTHTCPPCPAPELLGGPSVFLFPPKPKDTLMISRTPEVTCVVVDVSHEDPEVKFNWYVDGVEVHNAKTKPCEEQYGSTYRCVSVLTVLHQDWLNGKEYKCKVSNKALPAPIEKTISKAKGQPREPQVYTLPPSREEMTKNQVSLTCLVKGFYPSDIAVEWESNGQPENNYKTTPPVLDSDGSFFLYSKLTVDKSRWQQGNVFSCSVMHEALHNHYTQKSLSLSPGK

SEQ ID NO: 88 - protein, 5 aa, Artificial Sequence
  Synthetic
SYAMS

SEQ ID NO: 89 - protein, 17 aa, Artificial Sequence
  Synthetic
TVSGGGDRTYYADAVKG

SEQ ID NO: 90 - protein, 13 aa, Artificial Sequence
  Synthetic
NRGEGTTFYGMGA

SEQ ID NO: 91 - protein, 16 aa, Artificial Sequence
  Synthetic
RSSQSLLHSNAYNYLD

SEQ ID NO: 92 - protein, 7 aa, Artificial Sequence
  Synthetic
LGSNRAS

SEQ ID NO: 93 - protein, 9 aa, Artificial Sequence
  Synthetic
MQALQTPLT

SEQ ID NO: 94 - protein, 122 aa, Artificial Sequence; identical to SEQ ID NO: 83
  Synthetic

SEQ ID NO: 95 - protein, 112 aa, Artificial Sequence
  Synthetic
DIVLTQSPLSLPVTPGEPASISCRSSQSLLHSNAYNYLDWYLQKPGQSPQLLIYLGSNRASGVPDRFSGSGSGTDFTLKISRVEAEDVGVYYCMQALQTPLTFGCGTKVDIK

SEQ ID NO: 96 - protein, 249 aa, Artificial Sequence
  Synthetic
EVQLLESGGGLVQPGGSLRLSCAASGFSFNSYAMSWVRQAPGKCLEWVSTVSGGGDRTYYADAVKGRFTISRDNSKNTLYLQMNSLRAEDTAVYYCAKNRGEGTTFYGMGAWGQGTMVTVSSGGGGSGGGGSGGGGSDIVLTQSPLSLPVTPGEPASISCRSSQSLLHSNAYNYLDWYLQKPGQSPQLLIYLGSNRASGVPDRFSGSGSGTDFTLKISRVEAEDVGVYYCMQALQTPLTFGCGTKVDIK

SEQ ID NO: 97 - protein, 504 aa, Artificial Sequence
  Synthetic
EVQLLESGGGLVQPGGSLRLSCAASGFSFNSYAMSWVRQAPGKCLEWVSTVSGGGDRTYYADAVKGRFTISRDNSKNTLYLQMNSLRAEDTAVYYCAKNRGEGTTFYGMGAWGQGTMVTVSSGGGGSGGGGSGGGGSDIVLTQSPLSLPVTPGEPASISCRSSQSLLHSNAYNYLDWYLQKPGQSPQLLIYLGSNRASGVPDRFSGSGSGTDFTLKISRVEAEDVGVYYCMQALQTPLTFGCGTKVDIKSGGGGSEVQLVESGGGLVQPGGSLKLSCAASGFTFNKYAMNWVRQAPGKGLEWVARIRSKYNNYATYYADSVKDRFTISRDDSKNTAYLQMNNLKTEDTAVYYCVRHGNFGNSYISYWAYWGQGTLVTVSSGGGGSGGGGSGGGGSQTVVTQEPSLTVSPGGTVTLTCGSSTGAVTSGNYPNWVQQKPGQAPRGLIGGTKFLAPGTPARFSGSLLGGKAALTLSGVQPEDEAEYYCVLWYSNRWVFGGGTKLTVL

SEQ ID NO: 98 - protein, 992 aa, Artificial Sequence
  Synthetic
EVQLLESGGGLVQPGGSLRLSCAASGFSFNSYAMSWVRQAPGKCLEWVSTVSGGGDRTYYADAVKGRFTISRDNSKNTLYLQMNSLRAEDTAVYYCAKNRGEGTTFYGMGAWGQGTMVTVSSGGGGSGGGGSGGGGSDIVLTQSPLSLPVTPGEPASISCRSSQSLLHSNAYNYLDWYLQKPGQSPQLLIYLGSNRASGVPDRFSGSGSGTDFTLKISRVEAEDVGVYYCMQALQTPLTFGCGTKVDIKSGGGGSEVQLVESGGGLVQPGGSLKLSCAASGFTFNKYAMNWVRQAPGKGLEWVARIRSKYNNYATYYADSVKDRFTISRDDSKNTAYLQMNNLKTEDTAVYYCVRHGNFGNSYISYWAYWGQGTLVTVSSGGGGSGGGGSGGGGSQTVVTQEPSLTVSPGGTVTLTCGSSTGAVTSGNYPNWVQQKPGQAPRGLIGGTKFLAPGTPARFSGSLLGGKAALTLSGVQPEDEAEYYCVLWYSNRWVFGGGTKLTVLGGGGDKTHTCPPCPAPELLGGPSVFLFPPKPKDTLMISRTPEVTCVVVDVSHEDPEVKFNWYVDGVEVHNAKTKPCEEQYGSTYRCVSVLTVLHQDWLNGKEYKCKVSNKALPAPIEKTISKAKGQPREPQVYTLPPSREEMTKNQVSLTCLVKGFYPSDIAVEWESNGQPENNYKTTPPVLDSDGSFFLYSKLTVDKSRWQQGNVFSCSVMHEALHNHYTQKSLSLSPGKGGGGSGGGGSGGGGSGGGGSGGGGSGGGGSDKTHTCPPCPAPELLGGPSVFLFPPKPKDTLMISRTPEVTCVVVDVSHEDPEVKFNWYVDGVEVHNAKTKPCEEQYGSTYRCVSVLTVLHQDWLNGKEYKCKVSNKALPAPIEKTISKAKGQPREPQVYTLPPSREEMTKNQVSLTCLVKGFYPSDIAVEWESNGQPENNYKTTPPVLDSDGSFFLYSKLTVDKSRWQQGNVFSCSVMHEALHNHYTQKSLSLSPGK

SEQ ID NO: 99 - protein, 5 aa, Artificial Sequence
  Synthetic
HYAMS

SEQ ID NO: 100 - protein, 17 aa, Artificial Sequence
  Synthetic
AISGSGGSTYYADAVKG

SEQ ID NO: 101 - protein, 12 aa, Artificial Sequence
  Synthetic
VRGIGTFYGMDV

SEQ ID NO: 102 - protein, 16 aa, Artificial Sequence
  Synthetic
RSSQSLLHSQGYNYLD

SEQ ID NO: 103 - protein, 7 aa, Artificial Sequence
  Synthetic
LGSNRAS

SEQ ID NO: 104 - protein, 9 aa, Artificial Sequence
  Synthetic
MQALQTPIT

SEQ ID NO: 105 - protein, 121 aa, Artificial Sequence
  Synthetic
EVQLLESGGGLVQPGGSLRLSCAASGFTFSHYAMSWVRQVPGKCLEWVSAISGSGGSTYYADAVKGRFTISRDNSKNTLYLQMNSLRAEDTAVYYCAKVRGIGTFYGMDVWGQGTTVTVSS

SEQ ID NO: 106 - protein, 112 aa, Artificial Sequence
  Synthetic
DIVMTQSPLSLSVTPGQPASISCRSSQSLLHSQGYNYLDWYLQKPGQSPQLLIYLGSNRASGVPDRFSGSGSGTDFTLKISRVEAEDVGVYYCMQALQTPITFGCGTRLEIK

SEQ ID NO: 107 - protein, 248 aa, Artificial Sequence
  Synthetic
EVQLLESGGGLVQPGGSLRLSCAASGFTFSHYAMSWVRQVPGKCLEWVSAISGSGGSTYYADAVKGRFTISRDNSKNTLYLQMNSLRAEDTAVYYCAKVRGIGTFYGMDVWGQGTTVTVSSGGGGSGGGGSGGGGSDIVMTQSPLSLSVTPGQPASISCRSSQSLLHSQGYNYLDWYLQKPGQSPQLLIYLGSNRASGVPDRFSGSGSGTDFTLKISRVEAEDVGVYYCMQALQTPITFGCGTRLEIK

SEQ ID NO: 108 - protein, 503 aa, Artificial Sequence
  Synthetic
EVQLLESGGGLVQPGGSLRLSCAASGFTFSHYAMSWVRQVPGKCLEWVSAISGSGGSTYYADAVKGRFTISRDNSKNTLYLQMNSLRAEDTAVYYCAKVRGIGTFYGMDVWGQGTTVTVSSGGGGSGGGGSGGGGSDIVMTQSPLSLSVTPGQPASISCRSSQSLLHSQGYNYLDWYLQKPGQSPQLLIYLGSNRASGVPDRFSGSGSGTDFTLKISRVEAEDVGVYYCMQALQTPITFGCGTRLEIKSGGGGSEVQLVESGGGLVQPGGSLKLSCAASGFTFNKYAMNWVRQAPGKGLEWVARIRSKYNNYATYYADSVKDRFTISRDDSKNTAYLQMNNLKTEDTAVYYCVRHGNFGNSYISYWAYWGQGTLVTVSSGGGGSGGGGSGGGGSQTVVTQEPSLTVSPGGTVTLTCGSSTGAVTSGNYPNWVQQKPGQAPRGLIGGTKFLAPGTPARFSGSLLGGKAALTLSGVQPEDEAEYYCVLWYSNRWVFGGGTKLTVL

SEQ ID NO: 109 - protein, 991 aa, Artificial Sequence
  Synthetic
EVQLLESGGGLVQPGGSLRLSCAASGFTFSHYAMSWVRQVPGKCLEWVSAISGSGGSTYYADAVKGRFTISRDNSKNTLYLQMNSLRAEDTAVYYCAKVRGIGTFYGMDVWGQGTTVTVSSGGGGSGGGGSGGGGSDIVMTQSPLSLSVTPGQPASISCRSSQSLLHSQGYNYLDWYLQKPGQSPQLLIYLGSNRASGVPDRFSGSGSGTDFTLKISRVEAEDVGVYYCMQALQTPITFGCGTRLEIKSGGGGSEVQLVESGGGLVQPGGSLKLSCAASGFTFNKYAMNWVRQAPGKGLEWVARIRSKYNNYATYYADSVKDRFTISRDDSKNTAYLQMNNLKTEDTAVYYCVRHGNFGNSYISYWAYWGQGTLVTVSSGGGGSGGGGSGGGGSQTVVTQEPSLTVSPGGTVTLTCGSSTGAVTSGNYPNWVQQKPGQAPRGLIGGTKFLAPGTPARFSGSLLGGKAALTLSGVQPEDEAEYYCVLWYSNRWVFGGGTKLTVLGGGGDKTHTCPPCPAPELLGGPSVFLFPPKPKDTLMISRTPEVTCVVVDVSHEDPEVKFNWYVDGVEVHNAKTKPCEEQYGSTYRCVSVLTVLHQDWLNGKEYKCKVSNKALPAPIEKTISKAKGQPREPQVYTLPPSREEMTKNQVSLTCLVKGFYPSDIAVEWESNGQPENNYKTTPPVLDSDGSFFLYSKLTVDKSRWQQGNVFSCSVMHEALHNHYTQKSLSLSPGKGGGGSGGGGSGGGGSGGGGSGGGGSGGGGSDKTHTCPPCPAPELLGGPSVFLFPPKPKDTLMISRTPEVTCVVVDVSHEDPEVKFNWYVDGVEVHNAKTKPCEEQYGSTYRCVSVLTVLHQDWLNGKEYKCKVSNKALPAPIEKTISKAKGQPREPQVYTLPPSREEMTKNQVSLTCLVKGFYPSDIAVEWESNGQPENNYKTTPPVLDSDGSFFLYSKLTVDKSRWQQGNVFSCSVMHEALHNHYTQKSLSLSPGK

SEQ ID NO: 110 - protein, 5 aa, Artificial Sequence
  Synthetic
HYAMS

SEQ ID NO: 111 - protein, 17 aa, Artificial Sequence
  Synthetic
VIDASGGSTYYADAVKG

SEQ ID NO: 112 - protein, 12 aa, Artificial Sequence
  Synthetic
VRGIGTFYGMDV

SEQ ID NO: 113 - protein, 16 aa, Artificial Sequence
  Synthetic
RSSQSLLHSQGYNYLD

SEQ ID NO: 114 - protein, 7 aa, Artificial Sequence
  Synthetic
LGSNRAS

SEQ ID NO: 115 - protein, 9 aa, Artificial Sequence
  Synthetic
MQALQTPLS

SEQ ID NO: 116 - protein, 121 aa, Artificial Sequence
  Synthetic
EVQLLESGGGLVQPGGSLRLSCAASGFTFSHYAMSWVRQTPGKCLEWVSVIDASGGSTYYADAVKGRFTISRDNSKNTLYLQMNSLRAEDTAVYYCAKVRGIGTFYGMDVWGQGTTVTVSS

SEQ ID NO: 117 - protein, 112 aa, Artificial Sequence
  Synthetic
DIVMTQTPLSLPVTPGEPASISCRSSQSLLHSQGYNYLDWYLQKPGQSPQLLIYLGSNRASGVPDRFSGSGSGTDFTLKISRVEAEDVGVYYCMQALQTPLSFGCGTKVEIK

SEQ ID NO: 118 - protein, 248 aa, Artificial Sequence
  Synthetic
EVQLLESGGGLVQPGGSLRLSCAASGFTFSHYAMSWVRQTPGKCLEWVSVIDASGGSTYYADAVKGRFTISRDNSKNTLYLQMNSLRAEDTAVYYCAKVRGIGTFYGMDVWGQGTTVTVSSGGGGSGGGGSGGGGSDIVMTQTPLSLPVTPGEPASISCRSSQSLLHSQGYNYLDWYLQKPGQSPQLLIYLGSNRASGVPDRFSGSGSGTDFTLKISRVEAEDVGVYYCMQALQTPLSFGCGTKVEIK

SEQ ID NO: 119 - protein, 503 aa, Artificial Sequence
  Synthetic
EVQLLESGGGLVQPGGSLRLSCAASGFTFSHYAMSWVRQTPGKCLEWVSVIDASGGSTYYADAVKGRFTISRDNSKNTLYLQMNSLRAEDTAVYYCAKVRGIGTFYGMDVWGQGTTVTVSSGGGGSGGGGSGGGGSDIVMTQTPLSLPVTPGEPASISCRSSQSLLHSQGYNYLDWYLQKPGQSPQLLIYLGSNRASGVPDRFSGSGSGTDFTLKISRVEAEDVGVYYCMQALQTPLSFGCGTKVEIKSGGGGSEVQLVESGGGLVQPGGSLKLSCAASGFTFNKYAMNWVRQAPGKGLEWVARIRSKYNNYATYYADSVKDRFTISRDDSKNTAYLQMNNLKTEDTAVYYCVRHGNFGNSYISYWAYWGQGTLVTVSSGGGGSGGGGSGGGGSQTVVTQEPSLTVSPGGTVTLTCGSSTGAVTSGNYPNWVQQKPGQAPRGLIGGTKFLAPGTPARFSGSLLGGKAALTLSGVQPEDEAEYYCVLWYSNRWVFGGGTKLTVL

SEQ ID NO: 120 - protein, 991 aa, Artificial Sequence
  Synthetic
EVQLLESGGGLVQPGGSLRLSCAASGFTFSHYAMSWVRQTPGKCLEWVSVIDASGGSTYYADAVKGRFTISRDNSKNTLYLQMNSLRAEDTAVYYCAKVRGIGTFYGMDVWGQGTTVTVSSGGGGSGGGGSGGGGSDIVMTQTPLSLPVTPGEPASISCRSSQSLLHSQGYNYLDWYLQKPGQSPQLLIYLGSNRASGVPDRFSGSGSGTDFTLKISRVEAEDVGVYYCMQALQTPLSFGCGTKVEIKSGGGGSEVQLVESGGGLVQPGGSLKLSCAASGFTFNKYAMNWVRQAPGKGLEWVARIRSKYNNYATYYADSVKDRFTISRDDSKNTAYLQMNNLKTEDTAVYYCVRHGNFGNSYISYWAYWGQGTLVTVSSGGGGSGGGGSGGGGSQTVVTQEPSLTVSPGGTVTLTCGSSTGAVTSGNYPNWVQQKPGQAPRGLIGGTKFLAPGTPARFSGSLLGGKAALTLSGVQPEDEAEYYCVLWYSNRWVFGGGTKLTVLGGGGDKTHTCPPCPAPELLGGPSVFLFPPKPKDTLMISRTPEVTCVVVDVSHEDPEVKFNWYVDGVEVHNAKTKPCEEQYGSTYRCVSVLTVLHQDWLNGKEYKCKVSNKALPAPIEKTISKAKGQPREPQVYTLPPSREEMTKNQVSLTCLVKGFYPSDIAVEWESNGQPENNYKTTPPVLDSDGSFFLYSKLTVDKSRWQQGNVFSCSVMHEALHNHYTQKSLSLSPGKGGGGSGGGGSGGGGSGGGGSGGGGSGGGGSDKTHTCPPCPAPELLGGPSVFLFPPKPKDTLMISRTPEVTCVVVDVSHEDPEVKFNWYVDGVEVHNAKTKPCEEQYGSTYRCVSVLTVLHQDWLNGKEYKCKVSNKALPAPIEKTISKAKGQPREPQVYTLPPSREEMTKNQVSLTCLVKGFYPSDIAVEWESNGQPENNYKTTPPVLDSDGSFFLYSKLTVDKSRWQQGNVFSCSVMHEALHNHYTQKSLSLSPGK

SEQ ID NO: 121 - protein, 5 aa, Artificial Sequence
  Synthetic
HYAMS

SEQ ID NO: 122 - protein, 17 aa, Artificial Sequence
  Synthetic
VIDASGGNTYYADSVKG

SEQ ID NO: 123 - protein, 12 aa, Artificial Sequence
  Synthetic
VRGIGTFYGMDV

SEQ ID NO: 124 - protein, 16 aa, Artificial Sequence
  Synthetic
RSSQSLLHSQGYNYLD

SEQ ID NO: 125 - protein, 7 aa, Artificial Sequence
  Synthetic
LGSNRAS

SEQ ID NO: 126 - protein, 9 aa, Artificial Sequence
  Synthetic
MQALQTPLS

SEQ ID NO: 127 - protein, 121 aa, Artificial Sequence
  Synthetic
EVQLLESGGGLVQPGGSLRLSCAASGFTFSHYAMSWVRQTPGKCLEWVSVIDASGGNTYYADSVKGRFTISRDNSKNTLYLQMNSLRAEDTAVYYCAKVRGIGTFYGMDVWGQGTTVTVSS

SEQ ID NO: 128 - protein, 112 aa, Artificial Sequence; identical to SEQ ID NO: 117
  Synthetic

SEQ ID NO: 129 - protein, 248 aa, Artificial Sequence
  Synthetic
EVQLLESGGGLVQPGGSLRLSCAASGFTFSHYAMSWVRQTPGKCLEWVSVIDASGGNTYYADSVKGRFTISRDNSKNTLYLQMNSLRAEDTAVYYCAKVRGIGTFYGMDVWGQGTTVTVSSGGGGSGGGGSGGGGSDIVMTQTPLSLPVTPGEPASISCRSSQSLLHSQGYNYLDWYLQKPGQSPQLLIYLGSNRASGVPDRFSGSGSGTDFTLKISRVEAEDVGVYYCMQALQTPLSFGCGTKVEIK

SEQ ID NO: 130 - protein, 503 aa, Artificial Sequence
  Synthetic
EVQLLESGGGLVQPGGSLRLSCAASGFTFSHYAMSWVRQTPGKCLEWVSVIDASGGNTYYADSVKGRFTISRDNSKNTLYLQMNSLRAEDTAVYYCAKVRGIGTFYGMDVWGQGTTVTVSSGGGGSGGGGSGGGGSDIVMTQTPLSLPVTPGEPASISCRSSQSLLHSQGYNYLDWYLQKPGQSPQLLIYLGSNRASGVPDRFSGSGSGTDFTLKISRVEAEDVGVYYCMQALQTPLSFGCGTKVEIKSGGGGSEVQLVESGGGLVQPGGSLKLSCAASGFTFNKYAMNWVRQAPGKGLEWVARIRSKYNNYATYYADSVKDRFTISRDDSKNTAYLQMNNLKTEDTAVYYCVRHGNFGNSYISYWAYWGQGTLVTVSSGGGGSGGGGSGGGGSQTVVTQEPSLTVSPGGTVTLTCGSSTGAVTSGNYPNWVQQKPGQAPRGLIGGTKFLAPGTPARFSGSLLGGKAALTLSGVQPEDEAEYYCVLWYSNRWVFGGGTKLTVL

SEQ ID NO: 131 - protein, 991 aa, Artificial Sequence
  Synthetic
EVQLLESGGGLVQPGGSLRLSCAASGFTFSHYAMSWVRQTPGKCLEWVSVIDASGGNTYYADSVKGRFTISRDNSKNTLYLQMNSLRAEDTAVYYCAKVRGIGTFYGMDVWGQGTTVTVSSGGGGSGGGGSGGGGSDIVMTQTPLSLPVTPGEPASISCRSSQSLLHSQGYNYLDWYLQKPGQSPQLLIYLGSNRASGVPDRFSGSGSGTDFTLKISRVEAEDVGVYYCMQALQTPLSFGCGTKVEIKSGGGGSEVQLVESGGGLVQPGGSLKLSCAASGFTFNKYAMNWVRQAPGKGLEWVARIRSKYNNYATYYADSVKDRFTISRDDSKNTAYLQMNNLKTEDTAVYYCVRHGNFGNSYISYWAYWGQGTLVTVSSGGGGSGGGGSGGGGSQTVVTQEPSLTVSPGGTVTLTCGSSTGAVTSGNYPNWVQQKPGQAPRGLIGGTKFLAPGTPARFSGSLLGGKAALTLSGVQPEDEAEYYCVLWYSNRWVFGGGTKLTVLGGGGDKTHTCPPCPAPELLGGPSVFLFPPKPKDTLMISRTPEVTCVVVDVSHEDPEVKFNWYVDGVEVHNAKTKPCEEQYGSTYRCVSVLTVLHQDWLNGKEYKCKVSNKALPAPIEKTISKAKGQPREPQVYTLPPSREEMTKNQVSLTCLVKGFYPSDIAVEWESNGQPENNYKTTPPVLDSDGSFFLYSKLTVDKSRWQQGNVFSCSVMHEALHNHYTQKSLSLSPGKGGGGSGGGGSGGGGSGGGGSGGGGSGGGGSDKTHTCPPCPAPELLGGPSVFLFPPKPKDTLMISRTPEVTCVVVDVSHEDPEVKFNWYVDGVEVHNAKTKPCEEQYGSTYRCVSVLTVLHQDWLNGKEYKCKVSNKALPAPIEKTISKAKGQPREPQVYTLPPSREEMTKNQVSLTCLVKGFYPSDIAVEWESNGQPENNYKTTPPVLDSDGSFFLYSKLTVDKSRWQQGNVFSCSVMHEALHNHYTQKSLSLSPGK

SEQ ID NO: 132 - protein, 5 aa, Artificial Sequence
  Synthetic
HYAMS

SEQ ID NO: 133 - protein, 17 aa, Artificial Sequence
  Synthetic
VIDGSGGNTYYADSVKG

SEQ ID NO: 134 - protein, 12 aa, Artificial Sequence
  Synthetic
VRGIGTFYGMDV

SEQ ID NO: 135 - protein, 16 aa, Artificial Sequence
  Synthetic
RSSQSLLHSNGYNYLD

SEQ ID NO: 136 - protein, 7 aa, Artificial Sequence
  Synthetic
LGSNRAS

SEQ ID NO: 137 - protein, 9 aa, Artificial Sequence
  Synthetic
MQALQTPSS

SEQ ID NO: 138 - protein, 121 aa, Artificial Sequence
  Synthetic
EVQLLESGGGLVQPGGSLRLSCAASGFTFSHYAMSWVRQTPGKCLEWVSVIDGSGGNTYYADSVKGRFTISRDNSKNTLYLQMNSLRAEDTAVYYCAKVRGIGTFYGMDVWGQGTTVTVSS

SEQ ID NO: 139 - protein, 112 aa, Artificial Sequence
  Synthetic
DIVMTQTPLSLPVTPGEPASISCRSSQSLLHSNGYNYLDWYLQKPGQSPQLLIYLGSNRASGVPDRFSGSGSGTDFTLKISRVEAEDVGVYYCMQALQTPSSFGCGTKVEIK

SEQ ID NO: 140 - protein, 248 aa, Artificial Sequence
  Synthetic
EVQLLESGGGLVQPGGSLRLSCAASGFTFSHYAMSWVRQTPGKCLEWVSVIDGSGGNTYYADSVKGRFTISRDNSKNTLYLQMNSLRAEDTAVYYCAKVRGIGTFYGMDVWGQGTTVTVSSGGGGSGGGGSGGGGSDIVMTQTPLSLPVTPGEPASISCRSSQSLLHSNGYNYLDWYLQKPGQSPQLLIYLGSNRASGVPDRFSGSGSGTDFTLKISRVEAEDVGVYYCMQALQTPSSFGCGTKVEIK

SEQ ID NO: 141 - protein, 503 aa, Artificial Sequence
  Synthetic
EVQLLESGGGLVQPGGSLRLSCAASGFTFSHYAMSWVRQTPGKCLEWVSVIDGSGGNTYYADSVKGRFTISRDNSKNTLYLQMNSLRAEDTAVYYCAKVRGIGTFYGMDVWGQGTTVTVSSGGGGSGGGGSGGGGSDIVMTQTPLSLPVTPGEPASISCRSSQSLLHSNGYNYLDWYLQKPGQSPQLLIYLGSNRASGVPDRFSGSGSGTDFTLKISRVEAEDVGVYYCMQALQTPSSFGCGTKVEIKSGGGGSEVQLVESGGGLVQPGGSLKLSCAASGFTFNKYAMNWVRQAPGKGLEWVARIRSKYNNYATYYADSVKDRFTISRDDSKNTAYLQMNNLKTEDTAVYYCVRHGNFGNSYISYWAYWGQGTLVTVSSGGGGSGGGGSGGGGSQTVVTQEPSLTVSPGGTVTLTCGSSTGAVTSGNYPNWVQQKPGQAPRGLIGGTKFLAPGTPARFSGSLLGGKAALTLSGVQPEDEAEYYCVLWYSNRWVFGGGTKLTVL

SEQ ID NO: 142 - protein, 991 aa, Artificial Sequence
  Synthetic
EVQLLESGGGLVQPGGSLRLSCAASGFTFSHYAMSWVRQTPGKCLEWVSVIDGSGGNTYYADSVKGRFTISRDNSKNTLYLQMNSLRAEDTAVYYCAKVRGIGTFYGMDVWGQGTTVTVSSGGGGSGGGGSGGGGSDIVMTQTPLSLPVTPGEPASISCRSSQSLLHSNGYNYLDWYLQKPGQSPQLLIYLGSNRASGVPDRFSGSGSGTDFTLKISRVEAEDVGVYYCMQALQTPSSFGCGTKVEIKSGGGGSEVQLVESGGGLVQPGGSLKLSCAASGFTFNKYAMNWVRQAPGKGLEWVARIRSKYNNYATYYADSVKDRFTISRDDSKNTAYLQMNNLKTEDTAVYYCVRHGNFGNSYISYWAYWGQGTLVTVSSGGGGSGGGGSGGGGSQTVVTQEPSLTVSPGGTVTLTCGSSTGAVTSGNYPNWVQQKPGQAPRGLIGGTKFLAPGTPARFSGSLLGGKAALTLSGVQPEDEAEYYCVLWYSNRWVFGGGTKLTVLGGGGDKTHTCPPCPAPELLGGPSVFLFPPKPKDTLMISRTPEVTCVVVDVSHEDPEVKFNWYVDGVEVHNAKTKPCEEQYGSTYRCVSVLTVLHQDWLNGKEYKCKVSNKALPAPIEKTISKAKGQPREPQVYTLPPSREEMTKNQVSLTCLVKGFYPSDIAVEWESNGQPENNYKTTPPVLDSDGSFFLYSKLTVDKSRWQQGNVFSCSVMHEALHNHYTQKSLSLSPGKGGGGSGGGGSGGGGSGGGGSGGGGSGGGGSDKTHTCPPCPAPELLGGPSVFLFPPKPKDTLMISRTPEVTCVVVDVSHEDPEVKFNWYVDGVEVHNAKTKPCEEQYGSTYRCVSVLTVLHQDWLNGKEYKCKVSNKALPAPIEKTISKAKGQPREPQVYTLPPSREEMTKNQVSLTCLVKGFYPSDIAVEWESNGQPENNYKTTPPVLDSDGSFFLYSKLTVDKSRWQQGNVFSCSVMHEALHNHYTQKSLSLSPGK

SEQ ID NO: 143 - protein, 5 aa, Artificial Sequence
  Synthetic
HYAMN

SEQ ID NO: 144 - protein, 17 aa, Artificial Sequence
  Synthetic
AVSGGGDRTLYADSVKG

SEQ ID NO: 145 - protein, 10 aa, Artificial Sequence
  Synthetic
LRGFYYGMDV

SEQ ID NO: 146 - protein, 16 aa, Artificial Sequence
  Synthetic
RSSQSLLHSNGYNYLD

SEQ ID NO: 147 - protein, 7 aa, Artificial Sequence
  Synthetic
LGSNRAS

SEQ ID NO: 148 - protein, 8 aa, Artificial Sequence
  Synthetic
MQALQTLT

SEQ ID NO: 149 - protein, 119 aa, Artificial Sequence
  Synthetic
EVQLLESGGGLVQPGGSLRLSCAASGFTFSHYAMNWVRQAPGKCLEWVSAVSGGGDRTLYADSVKGRFTISRDNSKNTLFLQMNSLRAEDTAIYYCARLRGFYYGMDVWGQGTAVTVSS

SEQ ID NO: 150 - protein, 111 aa, Artificial Sequence
  Synthetic
DIVMTQSPLSLPVTPGEPASISCRSSQSLLHSNGYNYLDWYLQKPGQSPQLLIYLGSNRASGVPDRFSGSGSGTDFTLKISRVEAEDVGVYYCMQALQTLTFGCGTKVDIK

SEQ ID NO: 151 - protein, 245 aa, Artificial Sequence
  Synthetic
EVQLLESGGGLVQPGGSLRLSCAASGFTFSHYAMNWVRQAPGKCLEWVSAVSGGGDRTLYADSVKGRFTISRDNSKNTLFLQMNSLRAEDTAIYYCARLRGFYYGMDVWGQGTAVTVSSGGGGSGGGGSGGGGSDIVMTQSPLSLPVTPGEPASISCRSSQSLLHSNGYNYLDWYLQKPGQSPQLLIYLGSNRASGVPDRFSGSGSGTDFTLKISRVEAEDVGVYYCMQALQTLTFGCGTKVDIK

SEQ ID NO: 152 - protein, 500 aa, Artificial Sequence
  Synthetic
EVQLLESGGGLVQPGGSLRLSCAASGFTFSHYAMNWVRQAPGKCLEWVSAVSGGGDRTLYADSVKGRFTISRDNSKNTLFLQMNSLRAEDTAIYYCARLRGFYYGMDVWGQGTAVTVSSGGGGSGGGGSGGGGSDIVMTQSPLSLPVTPGEPASISCRSSQSLLHSNGYNYLDWYLQKPGQSPQLLIYLGSNRASGVPDRFSGSGSGTDFTLKISRVEAEDVGVYYCMQALQTLTFGCGTKVDIKSGGGGSEVQLVESGGGLVQPGGSLKLSCAASGFTFNKYAMNWVRQAPGKGLEWVARIRSKYNNYATYYADSVKDRFTISRDDSKNTAYLQMNNLKTEDTAVYYCVRHGNFGNSYISYWAYWGQGTLVTVSSGGGGSGGGGSGGGGSQTVVTQEPSLTVSPGGTVTLTCGSSTGAVTSGNYPNWVQQKPGQAPRGLIGGTKFLAPGTPARFSGSLLGGKAALTLSGVQPEDEAEYYCVLWYSNRWVFGGGTKLTVL

SEQ ID NO: 153 - protein, 988 aa, Artificial Sequence
  Synthetic
EVQLLESGGGLVQPGGSLRLSCAASGFTFSHYAMNWVRQAPGKCLEWVSAVSGGGDRTLYADSVKGRFTISRDNSKNTLFLQMNSLRAEDTAIYYCARLRGFYYGMDVWGQGTAVTVSSGGGGSGGGGSGGGGSDIVMTQSPLSLPVTPGEPASISCRSSQSLLHSNGYNYLDWYLQKPGQSPQLLIYLGSNRASGVPDRFSGSGSGTDFTLKISRVEAEDVGVYYCMQALQTLTFGCGTKVDIKSGGGGSEVQLVESGGGLVQPGGSLKLSCAASGFTFNKYAMNWVRQAPGKGLEWVARIRSKYNNYATYYADSVKDRFTISRDDSKNTAYLQMNNLKTEDTAVYYCVRHGNFGNSYISYWAYWGQGTLVTVSSGGGGSGGGGSGGGGSQTVVTQEPSLTVSPGGTVTLTCGSSTGAVTSGNYPNWVQQKPGQAPRGLIGGTKFLAPGTPARFSGSLLGGKAALTLSGVQPEDEAEYYCVLWYSNRWVFGGGTKLTVLGGGGDKTHTCPPCPAPELLGGPSVFLFPPKPKDTLMISRTPEVTCVVVDVSHEDPEVKFNWYVDGVEVHNAKTKPCEEQYGSTYRCVSVLTVLHQDWLNGKEYKCKVSNKALPAPIEKTISKAKGQPREPQVYTLPPSREEMTKNQVSLTCLVKGFYPSDIAVEWESNGQPENNYKTTPPVLDSDGSFFLYSKLTVDKSRWQQGNVFSCSVMHEALHNHYTQKSLSLSPGKGGGGSGGGGSGGGGSGGGGSGGGGSGGGGSDKTHTCPPCPAPELLGGPSVFLFPPKPKDTLMISRTPEVTCVVVDVSHEDPEVKFNWYVDGVEVHNAKTKPCEEQYGSTYRCVSVLTVLHQDWLNGKEYKCKVSNKALPAPIEKTISKAKGQPREPQVYTLPPSREEMTKNQVSLTCLVKGFYPSDIAVEWESNGQPENNYKTTPPVLDSDGSFFLYSKLTVDKSRWQQGNVFSCSVMHEALHNHYTQKSLSLSPGK

SEQ ID NO: 154 - protein, 5 aa, Artificial Sequence
  Synthetic
HYAMS

SEQ ID NO: 155 - protein, 17 aa, Artificial Sequence
  Synthetic
VIDGSGGNTYYADSVKG

SEQ ID NO: 156 - protein, 12 aa, Artificial Sequence
  Synthetic
VRGIGTFYGMDV

SEQ ID NO: 157 - protein, 16 aa, Artificial Sequence
  Synthetic
RSSQSLLHSNGYNYLD

SEQ ID NO: 158 - protein, 7 aa, Artificial Sequence
  Synthetic
LGSNRAS

SEQ ID NO: 159 - protein, 9 aa, Artificial Sequence
  Synthetic
MQALQTPLT

SEQ ID NO: 160 - protein, 121 aa, Artificial Sequence
  Synthetic
EVQLLESGGGLVQPGGSLRLSCAASGFTFSHYAMSWVRQVPGKCLEWVSVIDGSGGNTYYADSVKGRFTISRDNSKNTLFLQMSSLRAEDTAVYYCAKVRGIGTFYGMDVWGQGTTVTVSS

SEQ ID NO: 161 - protein, 112 aa, Artificial Sequence
  Synthetic
DIVMTQTPLSLPVTPGEPASISCRSSQSLLHSNGYNYLDWYLQKPGQSPQLLIYLGSNRASGVPNRFSGSGSGTDFTLKISRVEAEDVGVYYCMQALQTPLTFGCGTKVEIK

SEQ ID NO: 162 - protein, 248 aa, Artificial Sequence
  Synthetic
EVQLLESGGGLVQPGGSLRLSCAASGFTFSHYAMSWVRQVPGKCLEWVSVIDGSGGNTYYADSVKGRFTISRDNSKNTLFLQMSSLRAEDTAVYYCAKVRGIGTFYGMDVWGQGTTVTVSSGGGGSGGGGSGGGGSDIVMTQTPLSLPVTPGEPASISCRSSQSLLHSNGYNYLDWYLQKPGQSPQLLIYLGSNRASGVPNRFSGSGSGTDFTLKISRVEAEDVGVYYCMQALQTPLTFGCGTKVEIK

SEQ ID NO: 163 - protein, 503 aa, Artificial Sequence
  Synthetic
EVQLLESGGGLVQPGGSLRLSCAASGFTFSHYAMSWVRQVPGKCLEWVSVIDGSGGNTYYADSVKGRFTISRDNSKNTLFLQMSSLRAEDTAVYYCAKVRGIGTFYGMDVWGQGTTVTVSSGGGGSGGGGSGGGGSDIVMTQTPLSLPVTPGEPASISCRSSQSLLHSNGYNYLDWYLQKPGQSPQLLIYLGSNRASGVPNRFSGSGSGTDFTLKISRVEAEDVGVYYCMQALQTPLTFGCGTKVEIKSGGGGSEVQLVESGGGLVQPGGSLKLSCAASGFTFNKYAMNWVRQAPGKGLEWVARIRSKYNNYATYYADSVKDRFTISRDDSKNTAYLQMNNLKTEDTAVYYCVRHGNFGNSYISYWAYWGQGTLVTVSSGGGGSGGGGSGGGGSQTVVTQEPSLTVSPGGTVTLTCGSSTGAVTSGNYPNWVQQKPGQAPRGLIGGTKFLAPGTPARFSGSLLGGKAALTLSGVQPEDEAEYYCVLWYSNRWVFGGGTKLTVL

SEQ ID NO: 164 - protein, 991 aa, Artificial Sequence
  Synthetic
EVQLLESGGGLVQPGGSLRLSCAASGFTFSHYAMSWVRQVPGKCLEWVSVIDGSGGNTYYADSVKGRFTISRDNSKNTLFLQMSSLRAEDTAVYYCAKVRGIGTFYGMDVWGQGTTVTVSSGGGGSGGGGSGGGGSDIVMTQTPLSLPVTPGEPASISCRSSQSLLHSNGYNYLDWYLQKPGQSPQLLIYLGSNRASGVPNRFSGSGSGTDFTLKISRVEAEDVGVYYCMQALQTPLTFGCGTKVEIKSGGGGSEVQLVESGGGLVQPGGSLKLSCAASGFTFNKYAMNWVRQAPGKGLEWVARIRSKYNNYATYYADSVKDRFTISRDDSKNTAYLQMNNLKTEDTAVYYCVRHGNFGNSYISYWAYWGQGTLVTVSSGGGGSGGGGSGGGGSQTVVTQEPSLTVSPGGTVTLTCGSSTGAVTSGNYPNWVQQKPGQAPRGLIGGTKFLAPGTPARFSGSLLGGKAALTLSGVQPEDEAEYYCVLWYSNRWVFGGGTKLTVLGGGGDKTHTCPPCPAPELLGGPSVFLFPPKPKDTLMISRTPEVTCVVVDVSHEDPEVKFNWYVDGVEVHNAKTKPCEEQYGSTYRCVSVLTVLHQDWLNGKEYKCKVSNKALPAPIEKTISKAKGQPREPQVYTLPPSREEMTKNQVSLTCLVKGFYPSDIAVEWESNGQPENNYKTTPPVLDSDGSFFLYSKLTVDKSRWQQGNVFSCSVMHEALHNHYTQKSLSLSPGKGGGGSGGGGSGGGGSGGGGSGGGGSGGGGSDKTHTCPPCPAPELLGGPSVFLFPPKPKDTLMISRTPEVTCVVVDVSHEDPEVKFNWYVDGVEVHNAKTKPCEEQYGSTYRCVSVLTVLHQDWLNGKEYKCKVSNKALPAPIEKTISKAKGQPREPQVYTLPPSREEMTKNQVSLTCLVKGFYPSDIAVEWESNGQPENNYKTTPPVLDSDGSFFLYSKLTVDKSRWQQGNVFSCSVMHEALHNHYTQKSLSLSPGK

SEQ ID NO: 165 - protein, 7 aa, Artificial Sequence
  Synthetic
GGGYYWS

SEQ ID NO: 166 - protein, 16 aa, Artificial Sequence
  Synthetic
YIYYSGSTNYNPSLKS

SEQ ID NO: 167 - protein, 11 aa, Artificial Sequence
  Synthetic
DQGSSSDAFDI

SEQ ID NO: 168 - protein, 12 aa, Artificial Sequence
  Synthetic
RASQSVSSSYLA

SEQ ID NO: 169 - protein, 7 aa, Artificial Sequence
  Synthetic
GASSRAT

SEQ ID NO: 170 - protein, 9 aa, Artificial Sequence
  Synthetic
QQYGSSPLT

SEQ ID NO: 171 - protein, 121 aa, Artificial Sequence
  Synthetic
QVQLQESGPGLVKPSETLSLTCTVSGGSVSGGGYYWSWIRQPPGKCLEWIGYIYYSGSTNYNPSLKSRVTMSVGPSKNQFSLKLRSVTAADTAVYYCARDQGSSSDAFDIWGQGTMVTVSS

SEQ ID NO: 172 - protein, 108 aa, Artificial Sequence
  Synthetic
EIVLTQSPGTLSLSPGERATLSCRASQSVSSSYLAWYQQKPGQAPRLLIYGASSRATGIPDRFSGSGSGTDFTLTISRLEPEDFAVYYCQQYGSSPLTFGCGTKVEIK

SEQ ID NO: 173 - protein, 244 aa, Artificial Sequence
  Synthetic
QVQLQESGPGLVKPSETLSLTCTVSGGSVSGGGYYWSWIRQPPGKCLEWIGYIYYSGSTNYNPSLKSRVTMSVGPSKNQFSLKLRSVTAADTAVYYCARDQGSSSDAFDIWGQGTMVTVSSGGGGSGGGGSGGGGSEIVLTQSPGTLSLSPGERATLSCRASQSVSSSYLAWYQQKPGQAPRLLIYGASSRATGIPDRFSGSGSGTDFTLTISRLEPEDFAVYYCQQYGSSPLTFGCGTKVEIK

SEQ ID NO: 174 - protein, 499 aa, Artificial Sequence
  Synthetic
QVQLQESGPGLVKPSETLSLTCTVSGGSVSGGGYYWSWIRQPPGKCLEWIGYIYYSGSTNYNPSLKSRVTMSVGPSKNQFSLKLRSVTAADTAVYYCARDQGSSSDAFDIWGQGTMVTVSSGGGGSGGGGSGGGGSEIVLTQSPGTLSLSPGERATLSCRASQSVSSSYLAWYQQKPGQAPRLLIYGASSRATGIPDRFSGSGSGTDFTLTISRLEPEDFAVYYCQQYGSSPLTFGCGTKVEIKSGGGGSEVQLVESGGGLVQPGGSLKLSCAASGFTFNKYAMNWVRQAPGKGLEWVARIRSKYNNYATYYADSVKDRFTISRDDSKNTAYLQMNNLKTEDTAVYYCVRHGNFGNSYISYWAYWGQGTLVTVSSGGGGSGGGGSGGGGSQTVVTQEPSLTVSPGGTVTLTCGSSTGAVTSGNYPNWVQQKPGQAPRGLIGGTKFLAPGTPARFSGSLLGGKAALTLSGVQPEDEAEYYCVLWYSNRWVFGGGTKLTVL

SEQ ID NO: 175 - protein, 987 aa, Artificial Sequence
  Synthetic
QVQLQESGPGLVKPSETLSLTCTVSGGSVSGGGYYWSWIRQPPGKCLEWIGYIYYSGSTNYNPSLKSRVTMSVGPSKNQFSLKLRSVTAADTAVYYCARDQGSSSDAFDIWGQGTMVTVSSGGGGSGGGGSGGGGSEIVLTQSPGTLSLSPGERATLSCRASQSVSSSYLAWYQQKPGQAPRLLIYGASSRATGIPDRFSGSGSGTDFTLTISRLEPEDFAVYYCQQYGSSPLTFGCGTKVEIKSGGGGSEVQLVESGGGLVQPGGSLKLSCAASGFTFNKYAMNWVRQAPGKGLEWVARIRSKYNNYATYYADSVKDRFTISRDDSKNTAYLQMNNLKTEDTAVYYCVRHGNFGNSYISYWAYWGQGTLVTVSSGGGGSGGGGSGGGGSQTVVTQEPSLTVSPGGTVTLTCGSSTGAVTSGNYPNWVQQKPGQAPRGLIGGTKFLAPGTPARFSGSLLGGKAALTLSGVQPEDEAEYYCVLWYSNRWVFGGGTKLTVLGGGGDKTHTCPPCPAPELLGGPSVFLFPPKPKDTLMISRTPEVTCVVVDVSHEDPEVKFNWYVDGVEVHNAKTKPCEEQYGSTYRCVSVLTVLHQDWLNGKEYKCKVSNKALPAPIEKTISKAKGQPREPQVYTLPPSREEMTKNQVSLTCLVKGFYPSDIAVEWESNGQPENNYKTTPPVLDSDGSFFLYSKLTVDKSRWQQGNVFSCSVMHEALHNHYTQKSLSLSPGKGGGGSGGGGSGGGGSGGGGSGGGGSGGGGSDKTHTCPPCPAPELLGGPSVFLFPPKPKDTLMISRTPEVTCVVVDVSHEDPEVKFNWYVDGVEVHNAKTKPCEEQYGSTYRCVSVLTVLHQDWLNGKEYKCKVSNKALPAPIEKTISKAKGQPREPQVYTLPPSREEMTKNQVSLTCLVKGFYPSDIAVEWESNGQPENNYKTTPPVLDSDGSFFLYSKLTVDKSRWQQGNVFSCSVMHEALHNHYTQKSLSLSPGK

SEQ ID NO: 176 - protein, 7 aa, Artificial Sequence
  Synthetic
GGGYYWS

SEQ ID NO: 177 - protein, 16 aa, Artificial Sequence
  Synthetic
YIYYSGSTNYNPSLKS

SEQ ID NO: 178 - protein, 11 aa, Artificial Sequence
  Synthetic
DQGSSSDAFDI

SEQ ID NO: 179 - protein, 17 aa, Artificial Sequence
  Synthetic
KSSQSVLYSSNNKNYLA

SEQ ID NO: 180 - protein, 7 aa, Artificial Sequence
  Synthetic
WASTRES

SEQ ID NO: 181 - protein, 9 aa, Artificial Sequence
  Synthetic
QQYYSTPFT

SEQ ID NO: 182 - protein, 121 aa, Artificial Sequence; identical to SEQ ID NO: 171
  Synthetic

SEQ ID NO: 183 - protein, 113 aa, Artificial Sequence
  Synthetic
DIVMTQSPDSLAVSLGERATINCKSSQSVLYSSNNKNYLAWYQQKPGQPPKLLIYWASTRESGVPDRFSGSGSGTDFTLTISSLQAEDVAVYYCQQYYSTPFTFGCGTKVDIK

SEQ ID NO: 184 - protein, 249 aa, Artificial Sequence
  Synthetic
QVQLQESGPGLVKPSETLSLTCTVSGGSVSGGGYYWSWIRQPPGKCLEWIGYIYYSGSTNYNPSLKSRVTMSVGPSKNQFSLKLRSVTAADTAVYYCARDQGSSSDAFDIWGQGTMVTVSSGGGGSGGGGSGGGGSDIVMTQSPDSLAVSLGERATINCKSSQSVLYSSNNKNYLAWYQQKPGQPPKLLIYWASTRESGVPDRFSGSGSGTDFTLTISSLQAEDVAVYYCQQYYSTPFTFGCGTKVDIK

SEQ ID NO: 185 - protein, 504 aa, Artificial Sequence
  Synthetic
QVQLQESGPGLVKPSETLSLTCTVSGGSVSGGGYYWSWIRQPPGKCLEWIGYIYYSGSTNYNPSLKSRVTMSVGPSKNQFSLKLRSVTAADTAVYYCARDQGSSSDAFDIWGQGTMVTVSSGGGGSGGGGSGGGGSDIVMTQSPDSLAVSLGERATINCKSSQSVLYSSNNKNYLAWYQQKPGQPPKLLIYWASTRESGVPDRFSGSGSGTDFTLTISSLQAEDVAVYYCQQYYSTPFTFGCGTKVDIKSGGGGSEVQLVESGGGLVQPGGSLKLSCAASGFTFNKYAMNWVRQAPGKGLEWVARIRSKYNNYATYYADSVKDRFTISRDDSKNTAYLQMNNLKTEDTAVYYCVRHGNFGNSYISYWAYWGQGTLVTVSSGGGGSGGGGSGGGGSQTVVTQEPSLTVSPGGTVTLTCGSSTGAVTSGNYPNWVQQKPGQAPRGLIGGTKFLAPGTPARFSGSLLGGKAALTLSGVQPEDEAEYYCVLWYSNRWVFGGGTKLTVL

SEQ ID NO: 186 - protein, 992 aa, Artificial Sequence
  Synthetic
QVQLQESGPGLVKPSETLSLTCTVSGGSVSGGGYYWSWIRQPPGKCLEWIGYIYYSGSTNYNPSLKSRVTMSVGPSKNQFSLKLRSVTAADTAVYYCARDQGSSSDAFDIWGQGTMVTVSSGGGGSGGGGSGGGGSDIVMTQSPDSLAVSLGERATINCKSSQSVLYSSNNKNYLAWYQQKPGQPPKLLIYWASTRESGVPDRFSGSGSGTDFTLTISSLQAEDVAVYYCQQYYSTPFTFGCGTKVDIKSGGGGSEVQLVESGGGLVQPGGSLKLSCAASGFTFNKYAMNWVRQAPGKGLEWVARIRSKYNNYATYYADSVKDRFTISRDDSKNTAYLQMNNLKTEDTAVYYCVRHGNFGNSYISYWAYWGQGTLVTVSSGGGGSGGGGSGGGGSQTVVTQEPSLTVSPGGTVTLTCGSSTGAVTSGNYPNWVQQKPGQAPRGLIGGTKFLAPGTPARFSGSLLGGKAALTLSGVQPEDEAEYYCVLWYSNRWVFGGGTKLTVLGGGGDKTHTCPPCPAPELLGGPSVFLFPPKPKDTLMISRTPEVTCVVVDVSHEDPEVKFNWYVDGVEVHNAKTKPCEEQYGSTYRCVSVLTVLHQDWLNGKEYKCKVSNKALPAPIEKTISKAKGQPREPQVYTLPPSREEMTKNQVSLTCLVKGFYPSDIAVEWESNGQPENNYKTTPPVLDSDGSFFLYSKLTVDKSRWQQGNVFSCSVMHEALHNHYTQKSLSLSPGKGGGGSGGGGSGGGGSGGGGSGGGGSGGGGSDKTHTCPPCPAPELLGGPSVFLFPPKPKDTLMISRTPEVTCVVVDVSHEDPEVKFNWYVDGVEVHNAKTKPCEEQYGSTYRCVSVLTVLHQDWLNGKEYKCKVSNKALPAPIEKTISKAKGQPREPQVYTLPPSREEMTKNQVSLTCLVKGFYPSDIAVEWESNGQPENNYKTTPPVLDSDGSFFLYSKLTVDKSRWQQGNVFSCSVMHEALHNHYTQKSLSLSPGK

SEQ ID NO: 187 - protein, 5 aa, Artificial Sequence
  Synthetic
HYAMS

SEQ ID NO: 188 - protein, 17 aa, Artificial Sequence
  Synthetic
AVSGGGDKTLYADSVKG

SEQ ID NO: 189 - protein, 10 aa, Artificial Sequence
  Synthetic
LRGFYYGMDV

SEQ ID NO: 190 - protein, 16 aa, Artificial Sequence
  Synthetic
RSSQSLLHSNGYNYLD

SEQ ID NO: 191 - protein, 7 aa, Artificial Sequence
  Synthetic
LGSNRAS

SEQ ID NO: 192 - protein, 9 aa, Artificial Sequence
  Synthetic
MQALQTALT

SEQ ID NO: 193 - protein, 119 aa, Artificial Sequence
  Synthetic
EVQLLESGGGLVQPGGSLRLSCAASGFTFSHYAMSWVRQAPGKCLEWVSAVSGGGDKTLYADSVKGRFTISRDNSKNTLFLQMNSLRAEDTAIYYCARLRGFYYGMDVWGQGTTVTVSS

SEQ ID NO: 194 - protein, 112 aa, Artificial Sequence
  Synthetic
DIVLTQSPLSLPVTPGEPASISCRSSQSLLHSNGYNYLDWYLQKPGQSPQLLIYLGSNRASGVPDRFSGSGSGTDFTLKISRVEAEDVGVYYCMQALQTALTFGCGTKVEIK

SEQ ID NO: 195 - protein, 246 aa, Artificial Sequence
  Synthetic
EVQLLESGGGLVQPGGSLRLSCAASGFTFSHYAMSWVRQAPGKCLEWVSAVSGGGDKTLYADSVKGRFTISRDNSKNTLFLQMNSLRAEDTAIYYCARLRGFYYGMDVWGQGTTVTVSSGGGGSGGGGSGGGGSDIVLTQSPLSLPVTPGEPASISCRSSQSLLHSNGYNYLDWYLQKPGQSPQLLIYLGSNRASGVPDRFSGSGSGTDFTLKISRVEAEDVGVYYCMQALQTALTFGCGTKVEIK

SEQ ID NO: 196 - protein, 501 aa, Artificial Sequence
  Synthetic
EVQLLESGGGLVQPGGSLRLSCAASGFTFSHYAMSWVRQAPGKCLEWVSAVSGGGDKTLYADSVKGRFTISRDNSKNTLFLQMNSLRAEDTAIYYCARLRGFYYGMDVWGQGTTVTVSSGGGGSGGGGSGGGGSDIVLTQSPLSLPVTPGEPASISCRSSQSLLHSNGYNYLDWYLQKPGQSPQLLIYLGSNRASGVPDRFSGSGSGTDFTLKISRVEAEDVGVYYCMQALQTALTFGCGTKVEIKSGGGGSEVQLVESGGGLVQPGGSLKLSCAASGFTFNKYAMNWVRQAPGKGLEWVARIRSKYNNYATYYADSVKDRFTISRDDSKNTAYLQMNNLKTEDTAVYYCVRHGNFGNSYISYWAYWGQGTLVTVSSGGGGSGGGGSGGGGSQTVVTQEPSLTVSPGGTVTLTCGSSTGAVTSGNYPNWVQQKPGQAPRGLIGGTKFLAPGTPARFSGSLLGGKAALTLSGVQPEDEAEYYCVLWYSNRWVFGGGTKLTVL

SEQ ID NO: 197 - protein, 989 aa, Artificial Sequence
  Synthetic
EVQLLESGGGLVQPGGSLRLSCAASGFTFSHYAMSWVRQAPGKCLEWVSAVSGGGDKTLYADSVKGRFTISRDNSKNTLFLQMNSLRAEDTAIYYCARLRGFYYGMDVWGQGTTVTVSSGGGGSGGGGSGGGGSDIVLTQSPLSLPVTPGEPASISCRSSQSLLHSNGYNYLDWYLQKPGQSPQLLIYLGSNRASGVPDRFSGSGSGTDFTLKISRVEAEDVGVYYCMQALQTALTFGCGTKVEIKSGGGGSEVQLVESGGGLVQPGGSLKLSCAASGFTFNKYAMNWVRQAPGKGLEWVARIRSKYNNYATYYADSVKDRFTISRDDSKNTAYLQMNNLKTEDTAVYYCVRHGNFGNSYISYWAYWGQGTLVTVSSGGGGSGGGGSGGGGSQTVVTQEPSLTVSPGGTVTLTCGSSTGAVTSGNYPNWVQQKPGQAPRGLIGGTKFLAPGTPARFSGSLLGGKAALTLSGVQPEDEAEYYCVLWYSNRWVFGGGTKLTVLGGGGDKTHTCPPCPAPELLGGPSVFLFPPKPKDTLMISRTPEVTCVVVDVSHEDPEVKFNWYVDGVEVHNAKTKPCEEQYGSTYRCVSVLTVLHQDWLNGKEYKCKVSNKALPAPIEKTISKAKGQPREPQVYTLPPSREEMTKNQVSLTCLVKGFYPSDIAVEWESNGQPENNYKTTPPVLDSDGSFFLYSKLTVDKSRWQQGNVFSCSVMHEALHNHYTQKSLSLSPGKGGGGSGGGGSGGGGSGGGGSGGGGSGGGGSDKTHTCPPCPAPELLGGPSVFLFPPKPKDTLMISRTPEVTCVVVDVSHEDPEVKFNWYVDGVEVHNAKTKPCEEQYGSTYRCVSVLTVLHQDWLNGKEYKCKVSNKALPAPIEKTISKAKGQPREPQVYTLPPSREEMTKNQVSLTCLVKGFYPSDIAVEWESNGQPENNYKTTPPVLDSDGSFFLYSKLTVDKSRWQQGNVFSCSVMHEALHNHYTQKSLSLSPGK

SEQ ID NO: 198 - protein, 5 aa, Artificial Sequence
  Synthetic
HYAMS

SEQ ID NO: 199 - protein, 17 aa, Artificial Sequence
  Synthetic
AISGGGDRTFYADSVKG

SEQ ID NO: 200 - protein, 10 aa, Artificial Sequence
  Synthetic
DRGYYYGMDV

SEQ ID NO: 201 - protein, 16 aa, Artificial Sequence
  Synthetic
RSSQSLLRNNGYNYLD

SEQ ID NO: 202 - protein, 7 aa, Artificial Sequence
  Synthetic
LGSNRAS

SEQ ID NO: 203 - protein, 9 aa, Artificial Sequence
  Synthetic
MQALQTPFT

SEQ ID NO: 204 - protein, 119 aa, Artificial Sequence
  Synthetic
EVQLLESGGALVQPGGSLRLSCAASGFTFSHYAMSWVRQAPGKCLEWVSAISGGGDRTFYADSVKGRFTISRDNSKNTLYLQLNSLRAEDTAVYFCAKDRGYYYGMDVWGQGTTVTVSS

SEQ ID NO: 205 - protein, 112 aa, Artificial Sequence
  Synthetic
DIVMTQSPLSLPVTPGEPASISCRSSQSLLRNNGYNYLDWYLQKPGQSPYLLIYLGSNRASGVPDRFSGSGSGTDFTLKISRVEAEDVGVYYCMQALQTPFTFGCGTKVEIK

SEQ ID NO: 206 - protein, 246 aa, Artificial Sequence
  Synthetic
EVQLLESGGALVQPGGSLRLSCAASGFTFSHYAMSWVRQAPGKCLEWVSAISGGGDRTFYADSVKGRFTISRDNSKNTLYLQLNSLRAEDTAVYFCAKDRGYYYGMDVWGQGTTVTVSSGGGGSGGGGSGGGGSDIVMTQSPLSLPVTPGEPASISCRSSQSLLRNNGYNYLDWYLQKPGQSPYLLIYLGSNRASGVPDRFSGSGSGTDFTLKISRVEAEDVGVYYCMQALQTPFTFGCGTKVEIK

SEQ ID NO: 207 - protein, 501 aa, Artificial Sequence
  Synthetic
EVQLLESGGALVQPGGSLRLSCAASGFTFSHYAMSWVRQAPGKCLEWVSAISGGGDRTFYADSVKGRFTISRDNSKNTLYLQLNSLRAEDTAVYFCAKDRGYYYGMDVWGQGTTVTVSSGGGGSGGGGSGGGGSDIVMTQSPLSLPVTPGEPASISCRSSQSLLRNNGYNYLDWYLQKPGQSPYLLIYLGSNRASGVPDRFSGSGSGTDFTLKISRVEAEDVGVYYCMQALQTPFTFGCGTKVEIKSGGGGSEVQLVESGGGLVQPGGSLKLSCAASGFTFNKYAMNWVRQAPGKGLEWVARIRSKYNNYATYYADSVKDRFTISRDDSKNTAYLQMNNLKTEDTAVYYCVRHGNFGNSYISYWAYWGQGTLVTVSSGGGGSGGGGSGGGGSQTVVTQEPSLTVSPGGTVTLTCGSSTGAVTSGNYPNWVQQKPGQAPRGLIGGTKFLAPGTPARFSGSLLGGKAALTLSGVQPEDEAEYYCVLWYSNRWVFGGGTKLTVL

SEQ ID NO: 208 - protein, 989 aa, Artificial Sequence
  Synthetic
EVQLLESGGALVQPGGSLRLSCAASGFTFSHYAMSWVRQAPGKCLEWVSAISGGGDRTFYADSVKGRFTISRDNSKNTLYLQLNSLRAEDTAVYFCAKDRGYYYGMDVWGQGTTVTVSSGGGGSGGGGSGGGGSDIVMTQSPLSLPVTPGEPASISCRSSQSLLRNNGYNYLDWYLQKPGQSPYLLIYLGSNRASGVPDRFSGSGSGTDFTLKISRVEAEDVGVYYCMQALQTPFTFGCGTKVEIKSGGGGSEVQLVESGGGLVQPGGSLKLSCAASGFTFNKYAMNWVRQAPGKGLEWVARIRSKYNNYATYYADSVKDRFTISRDDSKNTAYLQMNNLKTEDTAVYYCVRHGNFGNSYISYWAYWGQGTLVTVSSGGGGSGGGGSGGGGSQTVVTQEPSLTVSPGGTVTLTCGSSTGAVTSGNYPNWVQQKPGQAPRGLIGGTKFLAPGTPARFSGSLLGGKAALTLSGVQPEDEAEYYCVLWYSNRWVFGGGTKLTVLGGGGDKTHTCPPCPAPELLGGPSVFLFPPKPKDTLMISRTPEVTCVVVDVSHEDPEVKFNWYVDGVEVHNAKTKPCEEQYGSTYRCVSVLTVLHQDWLNGKEYKCKVSNKALPAPIEKTISKAKGQPREPQVYTLPPSREEMTKNQVSLTCLVKGFYPSDIAVEWESNGQPENNYKTTPPVLDSDGSFFLYSKLTVDKSRWQQGNVFSCSVMHEALHNHYTQKSLSLSPGKGGGGSGGGGSGGGGSGGGGSGGGGSGGGGSDKTHTCPPCPAPELLGGPSVFLFPPKPKDTLMISRTPEVTCVVVDVSHEDPEVKFNWYVDGVEVHNAKTKPCEEQYGSTYRCVSVLTVLHQDWLNGKEYKCKVSNKALPAPIEKTISKAKGQPREPQVYTLPPSREEMTKNQVSLTCLVKGFYPSDIAVEWESNGQPENNYKTTPPVLDSDGSFFLYSKLTVDKSRWQQGNVFSCSVMHEALHNHYTQKSLSLSPGK

SEQ ID NO: 209 - protein, 5 aa, Artificial Sequence
  Synthetic
HYAMN

SEQ ID NO: 210 - protein, 17 aa, Artificial Sequence
  Synthetic
AISGGGDGTYYADSVKG

SEQ ID NO: 211 - protein, 10 aa, Artificial Sequence
  Synthetic
PRGYYYGMDV

SEQ ID NO: 212 - protein, 16 aa, Artificial Sequence
  Synthetic
RSSQSLLRDNGYNYLD

SEQ ID NO: 213 - protein, 7 aa, Artificial Sequence
  Synthetic
LGSYRAS

SEQ ID NO: 214 - protein, 9 aa, Artificial Sequence
  Synthetic
MQALQTPFT

SEQ ID NO: 215 - protein, 119 aa, Artificial Sequence
  Synthetic
EVQLLESGGGLVQPGVSLRLSCAASGFTFSHYAMNWVRQAPGKCLEWVSAISGGGDGTYYADSVKGRFTISRDNSKNTLYLQMNSLRAEDTAVYYCAKPRGYYYGMDVWGQGTTVTVSS

SEQ ID NO: 216 - protein, 112 aa, Artificial Sequence
  Synthetic
DIVLTQSPLSLPVTPGEPASISCRSSQSLLRDNGYNYLDWYLQKPGQSPQLLIYLGSYRASGVPDRFSGSGSGTDFTLKISRVEAEDVGVYYCMQALQTPFTFGCGTKVEIK

SEQ ID NO: 217 - protein, 246 aa, Artificial Sequence
  Synthetic
EVQLLESGGGLVQPGVSLRLSCAASGFTFSHYAMNWVRQAPGKCLEWVSAISGGGDGTYYADSVKGRFTISRDNSKNTLYLQMNSLRAEDTAVYYCAKPRGYYYGMDVWGQGTTVTVSSGGGGSGGGGSGGGGSDIVLTQSPLSLPVTPGEPASISCRSSQSLLRDNGYNYLDWYLQKPGQSPQLLIYLGSYRASGVPDRFSGSGSGTDFTLKISRVEAEDVGVYYCMQALQTPFTFGCGTKVEIK

SEQ ID NO: 218 - protein, 501 aa, Artificial Sequence
  Synthetic
EVQLLESGGGLVQPGVSLRLSCAASGFTFSHYAMNWVRQAPGKCLEWVSAISGGGDGTYYADSVKGRFTISRDNSKNTLYLQMNSLRAEDTAVYYCAKPRGYYYGMDVWGQGTTVTVSSGGGGSGGGGSGGGGSDIVLTQSPLSLPVTPGEPASISCRSSQSLLRDNGYNYLDWYLQKPGQSPQLLIYLGSYRASGVPDRFSGSGSGTDFTLKISRVEAEDVGVYYCMQALQTPFTFGCGTKVEIKSGGGGSEVQLVESGGGLVQPGGSLKLSCAASGFTFNKYAMNWVRQAPGKGLEWVARIRSKYNNYATYYADSVKDRFTISRDDSKNTAYLQMNNLKTEDTAVYYCVRHGNFGNSYISYWAYWGQGTLVTVSSGGGGSGGGGSGGGGSQTVVTQEPSLTVSPGGTVTLTCGSSTGAVTSGNYPNWVQQKPGQAPRGLIGGTKFLAPGTPARFSGSLLGGKAALTLSGVQPEDEAEYYCVLWYSNRWVFGGGTKLTVL

SEQ ID NO: 219 - protein, 989 aa, Artificial Sequence
  Synthetic
EVQLLESGGGLVQPGVSLRLSCAASGFTFSHYAMNWVRQAPGKCLEWVSAISGGGDGTYYADSVKGRFTISRDNSKNTLYLQMNSLRAEDTAVYYCAKPRGYYYGMDVWGQGTTVTVSSGGGGSGGGGSGGGGSDIVLTQSPLSLPVTPGEPASISCRSSQSLLRDNGYNYLDWYLQKPGQSPQLLIYLGSYRASGVPDRFSGSGSGTDFTLKISRVEAEDVGVYYCMQALQTPFTFGCGTKVEIKSGGGGSEVQLVESGGGLVQPGGSLKLSCAASGFTFNKYAMNWVRQAPGKGLEWVARIRSKYNNYATYYADSVKDRFTISRDDSKNTAYLQMNNLKTEDTAVYYCVRHGNFGNSYISYWAYWGQGTLVTVSSGGGGSGGGGSGGGGSQTVVTQEPSLTVSPGGTVTLTCGSSTGAVTSGNYPNWVQQKPGQAPRGLIGGTKFLAPGTPARFSGSLLGGKAALTLSGVQPEDEAEYYCVLWYSNRWVFGGGTKLTVLGGGGDKTHTCPPCPAPELLGGPSVFLFPPKPKDTLMISRTPEVTCVVVDVSHEDPEVKFNWYVDGVEVHNAKTKPCEEQYGSTYRCVSVLTVLHQDWLNGKEYKCKVSNKALPAPIEKTISKAKGQPREPQVYTLPPSREEMTKNQVSLTCLVKGFYPSDIAVEWESNGQPENNYKTTPPVLDSDGSFFLYSKLTVDKSRWQQGNVFSCSVMHEALHNHYTQKSLSLSPGKGGGGSGGGGSGGGGSGGGGSGGGGSGGGGSDKTHTCPPCPAPELLGGPSVFLFPPKPKDTLMISRTPEVTCVVVDVSHEDPEVKFNWYVDGVEVHNAKTKPCEEQYGSTYRCVSVLTVLHQDWLNGKEYKCKVSNKALPAPIEKTISKAKGQPREPQVYTLPPSREEMTKNQVSLTCLVKGFYPSDIAVEWESNGQPENNYKTTPPVLDSDGSFFLYSKLTVDKSRWQQGNVFSCSVMHEALHNHYTQKSLSLSPGK

SEQ ID NO: 220 - protein, 5 aa, Artificial Sequence
  Synthetic
TYGMH

SEQ ID NO: 221 - protein, 17 aa, Artificial Sequence
  Synthetic
FISYDASHKYYADAVKG

SEQ ID NO: 222 - protein, 13 aa, Artificial Sequence
  Synthetic
GELWGYYYYGMDV

SEQ ID NO: 223 - protein, 11 aa, Artificial Sequence
  Synthetic
QASQDISNYLN

SEQ ID NO: 224 - protein, 7 aa, Artificial Sequence
  Synthetic
DASNLET

SEQ ID NO: 225 - protein, 9 aa, Artificial Sequence
  Synthetic
QQYDDLPLT

SEQ ID NO: 226 - protein, 122 aa, Artificial Sequence
  Synthetic
QVQLVESGGGVVQPGRSLRLSCEASGFTFSTYGMHWVRQAPGKCQEWVAFISYDASHKYYADAVKGRFTVSRDNSKNTLDLQMNSLRAEDTAVYYCARGELWGYYYYGMDVWGQGTTVTVSS

SEQ ID NO: 227 - protein, 107 aa, Artificial Sequence
  Synthetic
DIQMTQSPSSLSASVGDRVTITCQASQDISNYLNWYQQKPGKAPKLLIYDASNLETGVPSRFSGSGSGTDFTFTISSLQPEDFATYYCQQYDDLPLTFGCGTKVEIK

SEQ ID NO: 228 - protein, 244 aa, Artificial Sequence
  Synthetic
QVQLVESGGGVVQPGRSLRLSCEASGFTFSTYGMHWVRQAPGKCQEWVAFISYDASHKYYADAVKGRFTVSRDNSKNTLDLQMNSLRAEDTAVYYCARGELWGYYYYGMDVWGQGTTVTVSSGGGGSGGGGSGGGGSDIQMTQSPSSLSASVGDRVTITCQASQDISNYLNWYQQKPGKAPKLLIYDASNLETGVPSRFSGSGSGTDFTFTISSLQPEDFATYYCQQYDDLPLTFGCGTKVEIK

SEQ ID NO: 229 - protein, 499 aa, Artificial Sequence
  Synthetic
QVQLVESGGGVVQPGRSLRLSCEASGFTFSTYGMHWVRQAPGKCQEWVAFISYDASHKYYADAVKGRFTVSRDNSKNTLDLQMNSLRAEDTAVYYCARGELWGYYYYGMDVWGQGTTVTVSSGGGGSGGGGSGGGGSDIQMTQSPSSLSASVGDRVTITCQASQDISNYLNWYQQKPGKAPKLLIYDASNLETGVPSRFSGSGSGTDFTFTISSLQPEDFATYYCQQYDDLPLTFGCGTKVEIKSGGGGSEVQLVESGGGLVQPGGSLKLSCAASGFTFNKYAMNWVRQAPGKGLEWVARIRSKYNNYATYYADSVKDRFTISRDDSKNTAYLQMNNLKTEDTAVYYCVRHGNFGNSYISYWAYWGQGTLVTVSSGGGGSGGGGSGGGGSQTVVTQEPSLTVSPGGTVTLTCGSSTGAVTSGNYPNWVQQKPGQAPRGLIGGTKFLAPGTPARFSGSLLGGKAALTLSGVQPEDEAEYYCVLWYSNRWVFGGGTKLTVL

SEQ ID NO: 230 - protein, 987 aa, Artificial Sequence
  Synthetic
QVQLVESGGGVVQPGRSLRLSCEASGFTFSTYGMHWVRQAPGKCQEWVAFISYDASHKYYADAVKGRFTVSRDNSKNTLDLQMNSLRAEDTAVYYCARGELWGYYYYGMDVWGQGTTVTVSSGGGGSGGGGSGGGGSDIQMTQSPSSLSASVGDRVTITCQASQDISNYLNWYQQKPGKAPKLLIYDASNLETGVPSRFSGSGSGTDFTFTISSLQPEDFATYYCQQYDDLPLTFGCGTKVEIKSGGGGSEVQLVESGGGLVQPGGSLKLSCAASGFTFNKYAMNWVRQAPGKGLEWVARIRSKYNNYATYYADSVKDRFTISRDDSKNTAYLQMNNLKTEDTAVYYCVRHGNFGNSYISYWAYWGQGTLVTVSSGGGGSGGGGSGGGGSQTVVTQEPSLTVSPGGTVTLTCGSSTGAVTSGNYPNWVQQKPGQAPRGLIGGTKFLAPGTPARFSGSLLGGKAALTLSGVQPEDEAEYYCVLWYSNRWVFGGGTKLTVLGGGGDKTHTCPPCPAPELLGGPSVFLFPPKPKDTLMISRTPEVTCVVVDVSHEDPEVKFNWYVDGVEVHNAKTKPCEEQYGSTYRCVSVLTVLHQDWLNGKEYKCKVSNKALPAPIEKTISKAKGQPREPQVYTLPPSREEMTKNQVSLTCLVKGFYPSDIAVEWESNGQPENNYKTTPPVLDSDGSFFLYSKLTVDKSRWQQGNVFSCSVMHEALHNHYTQKSLSLSPGKGGGGSGGGGSGGGGSGGGGSGGGGSGGGGSDKTHTCPPCPAPELLGGPSVFLFPPKPKDTLMISRTPEVTCVVVDVSHEDPEVKFNWYVDGVEVHNAKTKPCEEQYGSTYRCVSVLTVLHQDWLNGKEYKCKVSNKALPAPIEKTISKAKGQPREPQVYTLPPSREEMTKNQVSLTCLVKGFYPSDIAVEWESNGQPENNYKTTPPVLDSDGSFFLYSKLTVDKSRWQQGNVFSCSVMHEALHNHYTQKSLSLSPGK

SEQ ID NO: 231 - protein, 5 aa, Artificial Sequence
  Synthetic
TYGMH

SEQ ID NO: 232 - protein, 17 aa, Artificial Sequence
  Synthetic
FISYDASHKYYAESVKG

SEQ ID NO: 233 - protein, 13 aa, Artificial Sequence
  Synthetic
GELWGYYYYGMDV

SEQ ID NO: 234 - protein, 11 aa, Artificial Sequence
  Synthetic
QASQDISNYLN

SEQ ID NO: 235 - protein, 7 aa, Artificial Sequence
  Synthetic
DASNLET

SEQ ID NO: 236 - protein, 9 aa, Artificial Sequence
  Synthetic
QQYDDLPLT

SEQ ID NO: 237 - protein, 122 aa, Artificial Sequence
  Synthetic
QVQLVESGGGVVQPGRSLRLSCEASGFTFSTYGMHWVRQAPGKCQEWVAFISYDASHKYYAESVKGRFTVSRDNSKNTLDLQMNSLRAEDTAVYYCARGELWGYYYYGMDVWGQGTTVTVSS

SEQ ID NO: 238 - protein, 107 aa, Artificial Sequence; identical to SEQ ID NO: 227
  Synthetic

SEQ ID NO: 239 - protein, 244 aa, Artificial Sequence
  Synthetic
QVQLVESGGGVVQPGRSLRLSCEASGFTFSTYGMHWVRQAPGKCQEWVAFISYDASHKYYAESVKGRFTVSRDNSKNTLDLQMNSLRAEDTAVYYCARGELWGYYYYGMDVWGQGTTVTVSSGGGGSGGGGSGGGGSDIQMTQSPSSLSASVGDRVTITCQASQDISNYLNWYQQKPGKAPKLLIYDASNLETGVPSRFSGSGSGTDFTFTISSLQPEDFATYYCQQYDDLPLTFGCGTKVEIK

SEQ ID NO: 240 - protein, 499 aa, Artificial Sequence
  Synthetic
QVQLVESGGGVVQPGRSLRLSCEASGFTFSTYGMHWVRQAPGKCQEWVAFISYDASHKYYAESVKGRFTVSRDNSKNTLDLQMNSLRAEDTAVYYCARGELWGYYYYGMDVWGQGTTVTVSSGGGGSGGGGSGGGGSDIQMTQSPSSLSASVGDRVTITCQASQDISNYLNWYQQKPGKAPKLLIYDASNLETGVPSRFSGSGSGTDFTFTISSLQPEDFATYYCQQYDDLPLTFGCGTKVEIKSGGGGSEVQLVESGGGLVQPGGSLKLSCAASGFTFNKYAMNWVRQAPGKGLEWVARIRSKYNNYATYYADSVKDRFTISRDDSKNTAYLQMNNLKTEDTAVYYCVRHGNFGNSYISYWAYWGQGTLVTVSSGGGGSGGGGSGGGGSQTVVTQEPSLTVSPGGTVTLTCGSSTGAVTSGNYPNWVQQKPGQAPRGLIGGTKFLAPGTPARFSGSLLGGKAALTLSGVQPEDEAEYYCVLWYSNRWVFGGGTKLTVL

SEQ ID NO: 241 - protein, 987 aa, Artificial Sequence
  Synthetic
QVQLVESGGGVVQPGRSLRLSCEASGFTFSTYGMHWVRQAPGKCQEWVAFISYDASHKYYAESVKGRFTVSRDNSKNTLDLQMNSLRAEDTAVYYCARGELWGYYYYGMDVWGQGTTVTVSSGGGGSGGGGSGGGGSDIQMTQSPSSLSASVGDRVTITCQASQDISNYLNWYQQKPGKAPKLLIYDASNLETGVPSRFSGSGSGTDFTFTISSLQPEDFATYYCQQYDDLPLTFGCGTKVEIKSGGGGSEVQLVESGGGLVQPGGSLKLSCAASGFTFNKYAMNWVRQAPGKGLEWVARIRSKYNNYATYYADSVKDRFTISRDDSKNTAYLQMNNLKTEDTAVYYCVRHGNFGNSYISYWAYWGQGTLVTVSSGGGGSGGGGSGGGGSQTVVTQEPSLTVSPGGTVTLTCGSSTGAVTSGNYPNWVQQKPGQAPRGLIGGTKFLAPGTPARFSGSLLGGKAALTLSGVQPEDEAEYYCVLWYSNRWVFGGGTKLTVLGGGGDKTHTCPPCPAPELLGGPSVFLFPPKPKDTLMISRTPEVTCVVVDVSHEDPEVKFNWYVDGVEVHNAKTKPCEEQYGSTYRCVSVLTVLHQDWLNGKEYKCKVSNKALPAPIEKTISKAKGQPREPQVYTLPPSREEMTKNQVSLTCLVKGFYPSDIAVEWESNGQPENNYKTTPPVLDSDGSFFLYSKLTVDKSRWQQGNVFSCSVMHEALHNHYTQKSLSLSPGKGGGGSGGGGSGGGGSGGGGSGGGGSGGGGSDKTHTCPPCPAPELLGGPSVFLFPPKPKDTLMISRTPEVTCVVVDVSHEDPEVKFNWYVDGVEVHNAKTKPCEEQYGSTYRCVSVLTVLHQDWLNGKEYKCKVSNKALPAPIEKTISKAKGQPREPQVYTLPPSREEMTKNQVSLTCLVKGFYPSDIAVEWESNGQPENNYKTTPPVLDSDGSFFLYSKLTVDKSRWQQGNVFSCSVMHEALHNHYTQKSLSLSPGK

SEQ ID NO: 242 - protein, 5 aa, Artificial Sequence
  Synthetic
TYGMH

SEQ ID NO: 243 - protein, 17 aa, Artificial Sequence
  Synthetic
FISYDASHKYYADSVKG

SEQ ID NO: 244 - protein, 13 aa, Artificial Sequence
  Synthetic
GELWGYYYYGMDV

SEQ ID NO: 245 - protein, 11 aa, Artificial Sequence
  Synthetic
QASQDISNYLN

SEQ ID NO: 246 - protein, 7 aa, Artificial Sequence
  Synthetic
DASNLET

SEQ ID NO: 247 - protein, 9 aa, Artificial Sequence
  Synthetic
QQYDDLPLT

SEQ ID NO: 248 - protein, 122 aa, Artificial Sequence
  Synthetic
QVQLVESGGGVVQPGRSLRLSCEASGFTFSTYGMHWVRQAPGKCQEWVAFISYDASHKYYADSVKGRFTVSRDNSKNTLDLQMNSLRAEDTAVYYCARGELWGYYYYGMDVWGQGTTVTVSS

SEQ ID NO: 249 - protein, 107 aa, Artificial Sequence; identical to SEQ ID NO: 227
  Synthetic

SEQ ID NO: 250 - protein, 244 aa, Artificial Sequence
  Synthetic
QVQLVESGGGVVQPGRSLRLSCEASGFTFSTYGMHWVRQAPGKCQEWVAFISYDASHKYYADSVKGRFTVSRDNSKNTLDLQMNSLRAEDTAVYYCARGELWGYYYYGMDVWGQGTTVTVSSGGGGSGGGGSGGGGSDIQMTQSPSSLSASVGDRVTITCQASQDISNYLNWYQQKPGKAPKLLIYDASNLETGVPSRFSGSGSGTDFTFTISSLQPEDFATYYCQQYDDLPLTFGCGTKVEIK

SEQ ID NO: 251 - protein, 499 aa, Artificial Sequence
  Synthetic
QVQLVESGGGVVQPGRSLRLSCEASGFTFSTYGMHWVRQAPGKCQEWVAFISYDASHKYYADSVKGRFTVSRDNSKNTLDLQMNSLRAEDTAVYYCARGELWGYYYYGMDVWGQGTTVTVSSGGGGSGGGGSGGGGSDIQMTQSPSSLSASVGDRVTITCQASQDISNYLNWYQQKPGKAPKLLIYDASNLETGVPSRFSGSGSGTDFTFTISSLQPEDFATYYCQQYDDLPLTFGCGTKVEIKSGGGGSEVQLVESGGGLVQPGGSLKLSCAASGFTFNKYAMNWVRQAPGKGLEWVARIRSKYNNYATYYADSVKDRFTISRDDSKNTAYLQMNNLKTEDTAVYYCVRHGNFGNSYISYWAYWGQGTLVTVSSGGGGSGGGGSGGGGSQTVVTQEPSLTVSPGGTVTLTCGSSTGAVTSGNYPNWVQQKPGQAPRGLIGGTKFLAPGTPARFSGSLLGGKAALTLSGVQPEDEAEYYCVLWYSNRWVFGGGTKLTVL

SEQ ID NO: 252 - protein, 987 aa, Artificial Sequence
  Synthetic
QVQLVESGGGVVQPGRSLRLSCEASGFTFSTYGMHWVRQAPGKCQEWVAFISYDASHKYYADSVKGRFTVSRDNSKNTLDLQMNSLRAEDTAVYYCARGELWGYYYYGMDVWGQGTTVTVSSGGGGSGGGGSGGGGSDIQMTQSPSSLSASVGDRVTITCQASQDISNYLNWYQQKPGKAPKLLIYDASNLETGVPSRFSGSGSGTDFTFTISSLQPEDFATYYCQQYDDLPLTFGCGTKVEIKSGGGGSEVQLVESGGGLVQPGGSLKLSCAASGFTFNKYAMNWVRQAPGKGLEWVARIRSKYNNYATYYADSVKDRFTISRDDSKNTAYLQMNNLKTEDTAVYYCVRHGNFGNSYISYWAYWGQGTLVTVSSGGGGSGGGGSGGGGSQTVVTQEPSLTVSPGGTVTLTCGSSTGAVTSGNYPNWVQQKPGQAPRGLIGGTKFLAPGTPARFSGSLLGGKAALTLSGVQPEDEAEYYCVLWYSNRWVFGGGTKLTVLGGGGDKTHTCPPCPAPELLGGPSVFLFPPKPKDTLMISRTPEVTCVVVDVSHEDPEVKFNWYVDGVEVHNAKTKPCEEQYGSTYRCVSVLTVLHQDWLNGKEYKCKVSNKALPAPIEKTISKAKGQPREPQVYTLPPSREEMTKNQVSLTCLVKGFYPSDIAVEWESNGQPENNYKTTPPVLDSDGSFFLYSKLTVDKSRWQQGNVFSCSVMHEALHNHYTQKSLSLSPGKGGGGSGGGGSGGGGSGGGGSGGGGSGGGGSDKTHTCPPCPAPELLGGPSVFLFPPKPKDTLMISRTPEVTCVVVDVSHEDPEVKFNWYVDGVEVHNAKTKPCEEQYGSTYRCVSVLTVLHQDWLNGKEYKCKVSNKALPAPIEKTISKAKGQPREPQVYTLPPSREEMTKNQVSLTCLVKGFYPSDIAVEWESNGQPENNYKTTPPVLDSDGSFFLYSKLTVDKSRWQQGNVFSCSVMHEALHNHYTQKSLSLSPGK

SEQ ID NO: 253 - protein, 5 aa, Artificial Sequence
  Synthetic
TYGMH

SEQ ID NO: 254 - protein, 17 aa, Artificial Sequence
  Synthetic
FISYDGSHKYYADSVKG

SEQ ID NO: 255 - protein, 13 aa, Artificial Sequence
  Synthetic
GELWGYYYYGMDV

SEQ ID NO: 256 - protein, 11 aa, Artificial Sequence
  Synthetic
QASQDISNYLN

SEQ ID NO: 257 - protein, 7 aa, Artificial Sequence
  Synthetic
DASNLET

SEQ ID NO: 258 - protein, 9 aa, Artificial Sequence
  Synthetic
QQYDDLPLT

SEQ ID NO: 259 - protein, 122 aa, Artificial Sequence
  Synthetic
QVQLVESGGGVVQPGRSLRLSCEASGFTFSTYGMHWVRQAPGKCQEWVAFISYDGSHKYYADSVKGRFTVSRDNSKNTLDLQMNSLRAEDTAVYYCARGELWGYYYYGMDVWGQGTTVTVSS

SEQ ID NO: 260 - protein, 107 aa, Artificial Sequence; identical to SEQ ID NO: 227
  Synthetic

SEQ ID NO: 261 - protein, 244 aa, Artificial Sequence
  Synthetic
QVQLVESGGGVVQPGRSLRLSCEASGFTFSTYGMHWVRQAPGKCQEWVAFISYDGSHKYYADSVKGRFTVSRDNSKNTLDLQMNSLRAEDTAVYYCARGELWGYYYYGMDVWGQGTTVTVSSGGGGSGGGGSGGGGSDIQMTQSPSSLSASVGDRVTITCQASQDISNYLNWYQQKPGKAPKLLIYDASNLETGVPSRFSGSGSGTDFTFTISSLQPEDFATYYCQQYDDLPLTFGCGTKVEIK

SEQ ID NO: 262 - protein, 499 aa, Artificial Sequence
  Synthetic
QVQLVESGGGVVQPGRSLRLSCEASGFTFSTYGMHWVRQAPGKCQEWVAFISYDGSHKYYADSVKGRFTVSRDNSKNTLDLQMNSLRAEDTAVYYCARGELWGYYYYGMDVWGQGTTVTVSSGGGGSGGGGSGGGGSDIQMTQSPSSLSASVGDRVTITCQASQDISNYLNWYQQKPGKAPKLLIYDASNLETGVPSRFSGSGSGTDFTFTISSLQPEDFATYYCQQYDDLPLTFGCGTKVEIKSGGGGSEVQLVESGGGLVQPGGSLKLSCAASGFTFNKYAMNWVRQAPGKGLEWVARIRSKYNNYATYYADSVKDRFTISRDDSKNTAYLQMNNLKTEDTAVYYCVRHGNFGNSYISYWAYWGQGTLVTVSSGGGGSGGGGSGGGGSQTVVTQEPSLTVSPGGTVTLTCGSSTGAVTSGNYPNWVQQKPGQAPRGLIGGTKFLAPGTPARFSGSLLGGKAALTLSGVQPEDEAEYYCVLWYSNRWVFGGGTKLTVL

SEQ ID NO: 263 - protein, 987 aa, Artificial Sequence
  Synthetic
QVQLVESGGGVVQPGRSLRLSCEASGFTFSTYGMHWVRQAPGKCQEWVAFISYDGSHKYYADSVKGRFTVSRDNSKNTLDLQMNSLRAEDTAVYYCARGELWGYYYYGMDVWGQGTTVTVSSGGGGSGGGGSGGGGSDIQMTQSPSSLSASVGDRVTITCQASQDISNYLNWYQQKPGKAPKLLIYDASNLETGVPSRFSGSGSGTDFTFTISSLQPEDFATYYCQQYDDLPLTFGCGTKVEIKSGGGGSEVQLVESGGGLVQPGGSLKLSCAASGFTFNKYAMNWVRQAPGKGLEWVARIRSKYNNYATYYADSVKDRFTISRDDSKNTAYLQMNNLKTEDTAVYYCVRHGNFGNSYISYWAYWGQGTLVTVSSGGGGSGGGGSGGGGSQTVVTQEPSLTVSPGGTVTLTCGSSTGAVTSGNYPNWVQQKPGQAPRGLIGGTKFLAPGTPARFSGSLLGGKAALTLSGVQPEDEAEYYCVLWYSNRWVFGGGTKLTVLGGGGDKTHTCPPCPAPELLGGPSVFLFPPKPKDTLMISRTPEVTCVVVDVSHEDPEVKFNWYVDGVEVHNAKTKPCEEQYGSTYRCVSVLTVLHQDWLNGKEYKCKVSNKALPAPIEKTISKAKGQPREPQVYTLPPSREEMTKNQVSLTCLVKGFYPSDIAVEWESNGQPENNYKTTPPVLDSDGSFFLYSKLTVDKSRWQQGNVFSCSVMHEALHNHYTQKSLSLSPGKGGGGSGGGGSGGGGSGGGGSGGGGSGGGGSDKTHTCPPCPAPELLGGPSVFLFPPKPKDTLMISRTPEVTCVVVDVSHEDPEVKFNWYVDGVEVHNAKTKPCEEQYGSTYRCVSVLTVLHQDWLNGKEYKCKVSNKALPAPIEKTISKAKGQPREPQVYTLPPSREEMTKNQVSLTCLVKGFYPSDIAVEWESNGQPENNYKTTPPVLDSDGSFFLYSKLTVDKSRWQQGNVFSCSVMHEALHNHYTQKSLSLSPGK

SEQ ID NO: 264 - protein, 5 aa, Artificial Sequence
  Synthetic
HYAMS

SEQ ID NO: 265 - protein, 17 aa, Artificial Sequence
  Synthetic
AISGGGDTTFYADSVKG

SEQ ID NO: 266 - protein, 10 aa, Artificial Sequence
  Synthetic
DRGYYYGMDV

SEQ ID NO: 267 - protein, 16 aa, Artificial Sequence
  Synthetic
RSSQSLLRTNGYNYLD

SEQ ID NO: 268 - protein, 7 aa, Artificial Sequence
  Synthetic
LGSNRAS

SEQ ID NO: 269 - protein, 9 aa, Artificial Sequence
  Synthetic
MQALQSPYT

SEQ ID NO: 270 - protein, 119 aa, Artificial Sequence
  Synthetic
EVQLLESGGGLVQPGGSLRLSCAASGFTFSHYAMSWVRQAPGKCLEWVSAISGGGDTTFYADSVKGRFTFSRDNSRNTLYLQMNSLRAEDTAVYYCVKDRGYYYGMDVWGQGTTVTVSS

SEQ ID NO: 271 - protein, 112 aa, Artificial Sequence
  Synthetic
DIVMTQTPLSLPVTPGEPASISCRSSQSLLRTNGYNYLDWYLQKPGQSPQLLIYLGSNRASGVPDRFSGSGSGTDFTLKISRVEAEDVGVYYCMQALQSPYTFGCGTKLEIK

SEQ ID NO: 272 - protein, 246 aa, Artificial Sequence
  Synthetic
EVQLLESGGGLVQPGGSLRLSCAASGFTFSHYAMSWVRQAPGKCLEWVSAISGGGDTTFYADSVKGRFTFSRDNSRNTLYLQMNSLRAEDTAVYYCVKDRGYYYGMDVWGQGTTVTVSSGGGGSGGGGSGGGGSDIVMTQTPLSLPVTPGEPASISCRSSQSLLRTNGYNYLDWYLQKPGQSPQLLIYLGSNRASGVPDRFSGSGSGTDFTLKISRVEAEDVGVYYCMQALQSPYTFGCGTKLEIK

SEQ ID NO: 273 - protein, 501 aa, Artificial Sequence
  Synthetic
EVQLLESGGGLVQPGGSLRLSCAASGFTFSHYAMSWVRQAPGKCLEWVSAISGGGDTTFYADSVKGRFTFSRDNSRNTLYLQMNSLRAEDTAVYYCVKDRGYYYGMDVWGQGTTVTVSSGGGGSGGGGSGGGGSDIVMTQTPLSLPVTPGEPASISCRSSQSLLRTNGYNYLDWYLQKPGQSPQLLIYLGSNRASGVPDRFSGSGSGTDFTLKISRVEAEDVGVYYCMQALQSPYTFGCGTKLEIKSGGGGSEVQLVESGGGLVQPGGSLKLSCAASGFTFNKYAMNWVRQAPGKGLEWVARIRSKYNNYATYYADSVKDRFTISRDDSKNTAYLQMNNLKTEDTAVYYCVRHGNFGNSYISYWAYWGQGTLVTVSSGGGGSGGGGSGGGGSQTVVTQEPSLTVSPGGTVTLTCGSSTGAVTSGNYPNWVQQKPGQAPRGLIGGTKFLAPGTPARFSGSLLGGKAALTLSGVQPEDEAEYYCVLWYSNRWVFGGGTKLTVL

SEQ ID NO: 274 - protein, 989 aa, Artificial Sequence
  Synthetic
EVQLLESGGGLVQPGGSLRLSCAASGFTFSHYAMSWVRQAPGKCLEWVSAISGGGDTTFYADSVKGRFTFSRDNSRNTLYLQMNSLRAEDTAVYYCVKDRGYYYGMDVWGQGTTVTVSSGGGGSGGGGSGGGGSDIVMTQTPLSLPVTPGEPASISCRSSQSLLRTNGYNYLDWYLQKPGQSPQLLIYLGSNRASGVPDRFSGSGSGTDFTLKISRVEAEDVGVYYCMQALQSPYTFGCGTKLEIKSGGGGSEVQLVESGGGLVQPGGSLKLSCAASGFTFNKYAMNWVRQAPGKGLEWVARIRSKYNNYATYYADSVKDRFTISRDDSKNTAYLQMNNLKTEDTAVYYCVRHGNFGNSYISYWAYWGQGTLVTVSSGGGGSGGGGSGGGGSQTVVTQEPSLTVSPGGTVTLTCGSSTGAVTSGNYPNWVQQKPGQAPRGLIGGTKFLAPGTPARFSGSLLGGKAALTLSGVQPEDEAEYYCVLWYSNRWVFGGGTKLTVLGGGGDKTHTCPPCPAPELLGGPSVFLFPPKPKDTLMISRTPEVTCVVVDVSHEDPEVKFNWYVDGVEVHNAKTKPCEEQYGSTYRCVSVLTVLHQDWLNGKEYKCKVSNKALPAPIEKTISKAKGQPREPQVYTLPPSREEMTKNQVSLTCLVKGFYPSDIAVEWESNGQPENNYKTTPPVLDSDGSFFLYSKLTVDKSRWQQGNVFSCSVMHEALHNHYTQKSLSLSPGKGGGGSGGGGSGGGGSGGGGSGGGGSGGGGSDKTHTCPPCPAPELLGGPSVFLFPPKPKDTLMISRTPEVTCVVVDVSHEDPEVKFNWYVDGVEVHNAKTKPCEEQYGSTYRCVSVLTVLHQDWLNGKEYKCKVSNKALPAPIEKTISKAKGQPREPQVYTLPPSREEMTKNQVSLTCLVKGFYPSDIAVEWESNGQPENNYKTTPPVLDSDGSFFLYSKLTVDKSRWQQGNVFSCSVMHEALHNHYTQKSLSLSPGK

SEQ ID NO: 275 - protein, 5 aa, Artificial Sequence
  Synthetic
HYAMS

SEQ ID NO: 276 - protein, 17 aa, Artificial Sequence
  Synthetic
AISGGGDTTFYADSVKG

SEQ ID NO: 277 - protein, 10 aa, Artificial Sequence
  Synthetic
DRGYYYGMDV

SEQ ID NO: 278 - protein, 16 aa, Artificial Sequence
  Synthetic
RSSQSLLRTQGYNYLD

SEQ ID NO: 279 - protein, 7 aa, Artificial Sequence
  Synthetic
LGSNRAS

SEQ ID NO: 280 - protein, 9 aa, Artificial Sequence
  Synthetic
MQALQSPYT

SEQ ID NO: 281 - protein, 119 aa, Artificial Sequence; identical to SEQ ID NO: 270
  Synthetic

SEQ ID NO: 282 - protein, 112 aa, Artificial Sequence
  Synthetic
DIVMTQTPLSLPVTPGEPASISCRSSQSLLRTQGYNYLDWYLQKPGQSPQLLIYLGSNRASGVPDRFSGSGSGTDFTLKISRVEAEDVGVYYCMQALQSPYTFGCGTKLEIK

SEQ ID NO: 283 - protein, 246 aa, Artificial Sequence
  Synthetic
EVQLLESGGGLVQPGGSLRLSCAASGFTFSHYAMSWVRQAPGKCLEWVSAISGGGDTTFYADSVKGRFTFSRDNSRNTLYLQMNSLRAEDTAVYYCVKDRGYYYGMDVWGQGTTVTVSSGGGGSGGGGSGGGGSDIVMTQTPLSLPVTPGEPASISCRSSQSLLRTQGYNYLDWYLQKPGQSPQLLIYLGSNRASGVPDRFSGSGSGTDFTLKISRVEAEDVGVYYCMQALQSPYTFGCGTKLEIK

SEQ ID NO: 284 - protein, 501 aa, Artificial Sequence
  Synthetic
EVQLLESGGGLVQPGGSLRLSCAASGFTFSHYAMSWVRQAPGKCLEWVSAISGGGDTTFYADSVKGRFTFSRDNSRNTLYLQMNSLRAEDTAVYYCVKDRGYYYGMDVWGQGTTVTVSSGGGGSGGGGSGGGGSDIVMTQTPLSLPVTPGEPASISCRSSQSLLRTQGYNYLDWYLQKPGQSPQLLIYLGSNRASGVPDRFSGSGSGTDFTLKISRVEAEDVGVYYCMQALQSPYTFGCGTKLEIKSGGGGSEVQLVESGGGLVQPGGSLKLSCAASGFTFNKYAMNWVRQAPGKGLEWVARIRSKYNNYATYYADSVKDRFTISRDDSKNTAYLQMNNLKTEDTAVYYCVRHGNFGNSYISYWAYWGQGTLVTVSSGGGGSGGGGSGGGGSQTVVTQEPSLTVSPGGTVTLTCGSSTGAVTSGNYPNWVQQKPGQAPRGLIGGTKFLAPGTPARFSGSLLGGKAALTLSGVQPEDEAEYYCVLWYSNRWVFGGGTKLTVL

SEQ ID NO: 285 - protein, 989 aa, Artificial Sequence
  Synthetic
EVQLLESGGGLVQPGGSLRLSCAASGFTFSHYAMSWVRQAPGKCLEWVSAISGGGDTTFYADSVKGRFTFSRDNSRNTLYLQMNSLRAEDTAVYYCVKDRGYYYGMDVWGQGTTVTVSSGGGGSGGGGSGGGGSDIVMTQTPLSLPVTPGEPASISCRSSQSLLRTQGYNYLDWYLQKPGQSPQLLIYLGSNRASGVPDRFSGSGSGTDFTLKISRVEAEDVGVYYCMQALQSPYTFGCGTKLEIKSGGGGSEVQLVESGGGLVQPGGSLKLSCAASGFTFNKYAMNWVRQAPGKGLEWVARIRSKYNNYATYYADSVKDRFTISRDDSKNTAYLQMNNLKTEDTAVYYCVRHGNFGNSYISYWAYWGQGTLVTVSSGGGGSGGGGSGGGGSQTVVTQEPSLTVSPGGTVTLTCGSSTGAVTSGNYPNWVQQKPGQAPRGLIGGTKFLAPGTPARFSGSLLGGKAALTLSGVQPEDEAEYYCVLWYSNRWVFGGGTKLTVLGGGGDKTHTCPPCPAPELLGGPSVFLFPPKPKDTLMISRTPEVTCVVVDVSHEDPEVKFNWYVDGVEVHNAKTKPCEEQYGSTYRCVSVLTVLHQDWLNGKEYKCKVSNKALPAPIEKTISKAKGQPREPQVYTLPPSREEMTKNQVSLTCLVKGFYPSDIAVEWESNGQPENNYKTTPPVLDSDGSFFLYSKLTVDKSRWQQGNVFSCSVMHEALHNHYTQKSLSLSPGKGGGGSGGGGSGGGGSGGGGSGGGGSGGGGSDKTHTCPPCPAPELLGGPSVFLFPPKPKDTLMISRTPEVTCVVVDVSHEDPEVKFNWYVDGVEVHNAKTKPCEEQYGSTYRCVSVLTVLHQDWLNGKEYKCKVSNKALPAPIEKTISKAKGQPREPQVYTLPPSREEMTKNQVSLTCLVKGFYPSDIAVEWESNGQPENNYKTTPPVLDSDGSFFLYSKLTVDKSRWQQGNVFSCSVMHEALHNHYTQKSLSLSPGK

SEQ ID NO: 286 - protein, 7 aa, Artificial Sequence
  Synthetic
SGGYYWS

SEQ ID NO: 287 - protein, 16 aa, Artificial Sequence
  Synthetic
YIYYSGNTYYNPSLKS

SEQ ID NO: 288 - protein, 8 aa, Artificial Sequence
  Synthetic
LQDSVFDY

SEQ ID NO: 289 - protein, 14 aa, Artificial Sequence
  Synthetic
TGTSSDVGGYNYVS

SEQ ID NO: 290 - protein, 7 aa, Artificial Sequence
  Synthetic
EVSNRPS

SEQ ID NO: 291 - protein, 11 aa, Artificial Sequence
  Synthetic
SSYTSSSTLVV

SEQ ID NO: 292 - protein, 118 aa, Artificial Sequence
  Synthetic
QVQLQESGPGLVKPSQTLSLTCTVSGGSISSGGYYWSWIRQHPGKCLEWIGYIYYSGNTYYNPSLKSRVTISVDTSKNQFSLKLSSVTAADTAVYYCARLQDSVFDYWGQGTLVTVSS

SEQ ID NO: 293 - protein, 111 aa, Artificial Sequence
  Synthetic
QSALTQPASVSGSPGQSITISCTGTSSDVGGYNYVSWYQQHPGKAPKLMIFEVSNRPSGVSNRFSGSKSGNTASLTISGLQAEDEADYYCSSYTSSSTLVVFGCGTKLTVL

SEQ ID NO: 294 - protein, 244 aa, Artificial Sequence
  Synthetic
QVQLQESGPGLVKPSQTLSLTCTVSGGSISSGGYYWSWIRQHPGKCLEWIGYIYYSGNTYYNPSLKSRVTISVDTSKNQFSLKLSSVTAADTAVYYCARLQDSVFDYWGQGTLVTVSSGGGGSGGGGSGGGGSQSALTQPASVSGSPGQSITISCTGTSSDVGGYNYVSWYQQHPGKAPKLMIFEVSNRPSGVSNRFSGSKSGNTASLTISGLQAEDEADYYCSSYTSSSTLVVFGCGTKLTVL

SEQ ID NO: 295 - protein, 499 aa, Artificial Sequence
  Synthetic
QVQLQESGPGLVKPSQTLSLTCTVSGGSISSGGYYWSWIRQHPGKCLEWIGYIYYSGNTYYNPSLKSRVTISVDTSKNQFSLKLSSVTAADTAVYYCARLQDSVFDYWGQGTLVTVSSGGGGSGGGGSGGGGSQSALTQPASVSGSPGQSITISCTGTSSDVGGYNYVSWYQQHPGKAPKLMIFEVSNRPSGVSNRFSGSKSGNTASLTISGLQAEDEADYYCSSYTSSSTLVVFGCGTKLTVLSGGGGSEVQLVESGGGLVQPGGSLKLSCAASGFTFNKYAMNWVRQAPGKGLEWVARIRSKYNNYATYYADSVKDRFTISRDDSKNTAYLQMNNLKTEDTAVYYCVRHGNFGNSYISYWAYWGQGTLVTVSSGGGGSGGGGSGGGGSQTVVTQEPSLTVSPGGTVTLTCGSSTGAVTSGNYPNWVQQKPGQAPRGLIGGTKFLAPGTPARFSGSLLGGKAALTLSGVQPEDEAEYYCVLWYSNRWVFGGGTKLTVL

SEQ ID NO: 296 - protein, 987 aa, Artificial Sequence
  Synthetic
QVQLQESGPGLVKPSQTLSLTCTVSGGSISSGGYYWSWIRQHPGKCLEWIGYIYYSGNTYYNPSLKSRVTISVDTSKNQFSLKLSSVTAADTAVYYCARLQDSVFDYWGQGTLVTVSSGGGGSGGGGSGGGGSQSALTQPASVSGSPGQSITISCTGTSSDVGGYNYVSWYQQHPGKAPKLMIFEVSNRPSGVSNRFSGSKSGNTASLTISGLQAEDEADYYCSSYTSSSTLVVFGCGTKLTVLSGGGGSEVQLVESGGGLVQPGGSLKLSCAASGFTFNKYAMNWVRQAPGKGLEWVARIRSKYNNYATYYADSVKDRFTISRDDSKNTAYLQMNNLKTEDTAVYYCVRHGNFGNSYISYWAYWGQGTLVTVSSGGGGSGGGGSGGGGSQTVVTQEPSLTVSPGGTVTLTCGSSTGAVTSGNYPNWVQQKPGQAPRGLIGGTKFLAPGTPARFSGSLLGGKAALTLSGVQPEDEAEYYCVLWYSNRWVFGGGTKLTVLGGGGDKTHTCPPCPAPELLGGPSVFLFPPKPKDTLMISRTPEVTCVVVDVSHEDPEVKFNWYVDGVEVHNAKTKPCEEQYGSTYRCVSVLTVLHQDWLNGKEYKCKVSNKALPAPIEKTISKAKGQPREPQVYTLPPSREEMTKNQVSLTCLVKGFYPSDIAVEWESNGQPENNYKTTPPVLDSDGSFFLYSKLTVDKSRWQQGNVFSCSVMHEALHNHYTQKSLSLSPGKGGGGSGGGGSGGGGSGGGGSGGGGSGGGGSDKTHTCPPCPAPELLGGPSVFLFPPKPKDTLMISRTPEVTCVVVDVSHEDPEVKFNWYVDGVEVHNAKTKPCEEQYGSTYRCVSVLTVLHQDWLNGKEYKCKVSNKALPAPIEKTISKAKGQPREPQVYTLPPSREEMTKNQVSLTCLVKGFYPSDIAVEWESNGQPENNYKTTPPVLDSDGSFFLYSKLTVDKSRWQQGNVFSCSVMHEALHNHYTQKSLSLSPGK

SEQ ID NO: 297 - protein, 7 aa, Artificial Sequence
  Synthetic
SGGYYWS

SEQ ID NO: 298 - protein, 16 aa, Artificial Sequence
  Synthetic
YIYYSGNTYYNPSLKS

SEQ ID NO: 299 - protein, 8 aa, Artificial Sequence
  Synthetic
LQDSVFDY

SEQ ID NO: 300 - protein, 14 aa, Artificial Sequence
  Synthetic
TGTSSDVGGYNYVS

SEQ ID NO: 301 - protein, 7 aa, Artificial Sequence
  Synthetic
EVSNRPS

SEQ ID NO: 302 - protein, 11 aa, Artificial Sequence
  Synthetic
SSYTSSSTLVV

SEQ ID NO: 303 - protein, 118 aa, Artificial Sequence; identical to SEQ ID NO: 292
  Synthetic

SEQ ID NO: 304 - protein, 111 aa, Artificial Sequence
  Synthetic
QSALTQPPSASGSPGQSITISCTGTSSDVGGYNYVSWYQQHPGKAPKLMIYEVSNRPSGVSNRFSGSKSGNTASLTISGLQAEDEADYYCSSYTSSSTLVVFGCGTKLTVL

SEQ ID NO: 305 - protein, 244 aa, Artificial Sequence
  Synthetic
QVQLQESGPGLVKPSQTLSLTCTVSGGSISSGGYYWSWIRQHPGKCLEWIGYIYYSGNTYYNPSLKSRVTISVDTSKNQFSLKLSSVTAADTAVYYCARLQDSVFDYWGQGTLVTVSSGGGGSGGGGSGGGGSQSALTQPPSASGSPGQSITISCTGTSSDVGGYNYVSWYQQHPGKAPKLMIYEVSNRPSGVSNRFSGSKSGNTASLTISGLQAEDEADYYCSSYTSSSTLVVFGCGTKLTVL

SEQ ID NO: 306 - protein, 499 aa, Artificial Sequence
  Synthetic
QVQLQESGPGLVKPSQTLSLTCTVSGGSISSGGYYWSWIRQHPGKCLEWIGYIYYSGNTYYNPSLKSRVTISVDTSKNQFSLKLSSVTAADTAVYYCARLQDSVFDYWGQGTLVTVSSGGGGSGGGGSGGGGSQSALTQPPSASGSPGQSITISCTGTSSDVGGYNYVSWYQQHPGKAPKLMIYEVSNRPSGVSNRFSGSKSGNTASLTISGLQAEDEADYYCSSYTSSSTLVVFGCGTKLTVLSGGGGSEVQLVESGGGLVQPGGSLKLSCAASGFTFNKYAMNWVRQAPGKGLEWVARIRSKYNNYATYYADSVKDRFTISRDDSKNTAYLQMNNLKTEDTAVYYCVRHGNFGNSYISYWAYWGQGTLVTVSSGGGGSGGGGSGGGGSQTVVTQEPSLTVSPGGTVTLTCGSSTGAVTSGNYPNWVQQKPGQAPRGLIGGTKFLAPGTPARFSGSLLGGKAALTLSGVQPEDEAEYYCVLWYSNRWVFGGGTKLTVL

SEQ ID NO: 307 - protein, 987 aa, Artificial Sequence
  Synthetic
QVQLQESGPGLVKPSQTLSLTCTVSGGSISSGGYYWSWIRQHPGKCLEWIGYIYYSGNTYYNPSLKSRVTISVDTSKNQFSLKLSSVTAADTAVYYCARLQDSVFDYWGQGTLVTVSSGGGGSGGGGSGGGGSQSALTQPPSASGSPGQSITISCTGTSSDVGGYNYVSWYQQHPGKAPKLMIYEVSNRPSGVSNRFSGSKSGNTASLTISGLQAEDEADYYCSSYTSSSTLVVFGCGTKLTVLSGGGGSEVQLVESGGGLVQPGGSLKLSCAASGFTFNKYAMNWVRQAPGKGLEWVARIRSKYNNYATYYADSVKDRFTISRDDSKNTAYLQMNNLKTEDTAVYYCVRHGNFGNSYISYWAYWGQGTLVTVSSGGGGSGGGGSGGGGSQTVVTQEPSLTVSPGGTVTLTCGSSTGAVTSGNYPNWVQQKPGQAPRGLIGGTKFLAPGTPARFSGSLLGGKAALTLSGVQPEDEAEYYCVLWYSNRWVFGGGTKLTVLGGGGDKTHTCPPCPAPELLGGPSVFLFPPKPKDTLMISRTPEVTCVVVDVSHEDPEVKFNWYVDGVEVHNAKTKPCEEQYGSTYRCVSVLTVLHQDWLNGKEYKCKVSNKALPAPIEKTISKAKGQPREPQVYTLPPSREEMTKNQVSLTCLVKGFYPSDIAVEWESNGQPENNYKTTPPVLDSDGSFFLYSKLTVDKSRWQQGNVFSCSVMHEALHNHYTQKSLSLSPGKGGGGSGGGGSGGGGSGGGGSGGGGSGGGGSDKTHTCPPCPAPELLGGPSVFLFPPKPKDTLMISRTPEVTCVVVDVSHEDPEVKFNWYVDGVEVHNAKTKPCEEQYGSTYRCVSVLTVLHQDWLNGKEYKCKVSNKALPAPIEKTISKAKGQPREPQVYTLPPSREEMTKNQVSLTCLVKGFYPSDIAVEWESNGQPENNYKTTPPVLDSDGSFFLYSKLTVDKSRWQQGNVFSCSVMHEALHNHYTQKSLSLSPGK

SEQ ID NO: 308 - protein, 7 aa, Artificial Sequence
  Synthetic
SGGYYWS

SEQ ID NO: 309 - protein, 16 aa, Artificial Sequence
  Synthetic
YIYYRGNAYYNPSLKS

SEQ ID NO: 310 - protein, 8 aa, Artificial Sequence
  Synthetic
LQESVFDY

SEQ ID NO: 311 - protein, 14 aa, Artificial Sequence
  Synthetic
TGTSSDVGGYNYVS

SEQ ID NO: 312 - protein, 7 aa, Artificial Sequence
  Synthetic
EVSNRPS

SEQ ID NO: 313 - protein, 11 aa, Artificial Sequence
  Synthetic
SSYTSSSTLVV

SEQ ID NO: 314 - protein, 118 aa, Artificial Sequence
  Synthetic
QVQLQESGPGLVKPSQTLSLTCTVSGGSISSGGYYWSWIRQHPGKCLEWIGYIYYRGNAYYNPSLKSRVTISVDTSKNQFSLKLSSVTAADTAVYYCATLQESVFDYWGQGTLVTVSS

SEQ ID NO: 315 - protein, 111 aa, Artificial Sequence
  Synthetic
QSALTQPASVSGSPGQSITISCTGTSSDVGGYNYVSWYQQHPGKAPKLMIYEVSNRPSGVSNRFSGSKSGNTASLTISGLQAEDEADYYCSSYTSSSTLVVFGCGTKLTVL

SEQ ID NO: 316 - protein, 244 aa, Artificial Sequence
  Synthetic
QVQLQESGPGLVKPSQTLSLTCTVSGGSISSGGYYWSWIRQHPGKCLEWIGYIYYRGNAYYNPSLKSRVTISVDTSKNQFSLKLSSVTAADTAVYYCATLQESVFDYWGQGTLVTVSSGGGGSGGGGSGGGGSQSALTQPASVSGSPGQSITISCTGTSSDVGGYNYVSWYQQHPGKAPKLMIYEVSNRPSGVSNRFSGSKSGNTASLTISGLQAEDEADYYCSSYTSSSTLVVFGCGTKLTVL

SEQ ID NO: 317 - protein, 499 aa, Artificial Sequence
  Synthetic
QVQLQESGPGLVKPSQTLSLTCTVSGGSISSGGYYWSWIRQHPGKCLEWIGYIYYRGNAYYNPSLKSRVTISVDTSKNQFSLKLSSVTAADTAVYYCATLQESVFDYWGQGTLVTVSSGGGGSGGGGSGGGGSQSALTQPASVSGSPGQSITISCTGTSSDVGGYNYVSWYQQHPGKAPKLMIYEVSNRPSGVSNRFSGSKSGNTASLTISGLQAEDEADYYCSSYTSSSTLVVFGCGTKLTVLSGGGGSEVQLVESGGGLVQPGGSLKLSCAASGFTFNKYAMNWVRQAPGKGLEWVARIRSKYNNYATYYADSVKDRFTISRDDSKNTAYLQMNNLKTEDTAVYYCVRHGNFGNSYISYWAYWGQGTLVTVSSGGGGSGGGGSGGGGSQTVVTQEPSLTVSPGGTVTLTCGSSTGAVTSGNYPNWVQQKPGQAPRGLIGGTKFLAPGTPARFSGSLLGGKAALTLSGVQPEDEAEYYCVLWYSNRWVFGGGTKLTVL

SEQ ID NO: 318 - protein, 987 aa, Artificial Sequence
  Synthetic
QVQLQESGPGLVKPSQTLSLTCTVSGGSISSGGYYWSWIRQHPGKCLEWIGYIYYRGNAYYNPSLKSRVTISVDTSKNQFSLKLSSVTAADTAVYYCATLQESVFDYWGQGTLVTVSSGGGGSGGGGSGGGGSQSALTQPASVSGSPGQSITISCTGTSSDVGGYNYVSWYQQHPGKAPKLMIYEVSNRPSGVSNRFSGSKSGNTASLTISGLQAEDEADYYCSSYTSSSTLVVFGCGTKLTVLSGGGGSEVQLVESGGGLVQPGGSLKLSCAASGFTFNKYAMNWVRQAPGKGLEWVARIRSKYNNYATYYADSVKDRFTISRDDSKNTAYLQMNNLKTEDTAVYYCVRHGNFGNSYISYWAYWGQGTLVTVSSGGGGSGGGGSGGGGSQTVVTQEPSLTVSPGGTVTLTCGSSTGAVTSGNYPNWVQQKPGQAPRGLIGGTKFLAPGTPARFSGSLLGGKAALTLSGVQPEDEAEYYCVLWYSNRWVFGGGTKLTVLGGGGDKTHTCPPCPAPELLGGPSVFLFPPKPKDTLMISRTPEVTCVVVDVSHEDPEVKFNWYVDGVEVHNAKTKPCEEQYGSTYRCVSVLTVLHQDWLNGKEYKCKVSNKALPAPIEKTISKAKGQPREPQVYTLPPSREEMTKNQVSLTCLVKGFYPSDIAVEWESNGQPENNYKTTPPVLDSDGSFFLYSKLTVDKSRWQQGNVFSCSVMHEALHNHYTQKSLSLSPGKGGGGSGGGGSGGGGSGGGGSGGGGSGGGGSDKTHTCPPCPAPELLGGPSVFLFPPKPKDTLMISRTPEVTCVVVDVSHEDPEVKFNWYVDGVEVHNAKTKPCEEQYGSTYRCVSVLTVLHQDWLNGKEYKCKVSNKALPAPIEKTISKAKGQPREPQVYTLPPSREEMTKNQVSLTCLVKGFYPSDIAVEWESNGQPENNYKTTPPVLDSDGSFFLYSKLTVDKSRWQQGNVFSCSVMHEALHNHYTQKSLSLSPGK

SEQ ID NO: 319 - protein, 5 aa, Artificial Sequence
  Synthetic
SDSMS

SEQ ID NO: 320 - protein, 17 aa, Artificial Sequence
  Synthetic
SIRSSNSYIYYRDSVKG

SEQ ID NO: 321 - protein, 18 aa, Artificial Sequence
  Synthetic
ERDYYDSGGYYYGDAFDI

SEQ ID NO: 322 - protein, 17 aa, Artificial Sequence
  Synthetic
KSSQSVLYSSNNKNYLA

SEQ ID NO: 323 - protein, 7 aa, Artificial Sequence
  Synthetic
WASTRES

SEQ ID NO: 324 - protein, 9 aa, Artificial Sequence
  Synthetic
QQYYSTPIT

SEQ ID NO: 325 - protein, 127 aa, Artificial Sequence
  Synthetic
EVQLVESGGGLVKPGGSLRLSCVASGFILSSDSMSWVRQAPGKCLEWVSSIRSSNSYIYYRDSVKGRFTISRDNAKNSLYLQMDSLRAEDTAVYFCARERDYYDSGGYYYGDAFDIWGQGTMVTVSS

SEQ ID NO: 326 - protein, 113 aa, Artificial Sequence
  Synthetic
DIVMTQSPDSLAVSLGERATINCKSSQSVLYSSNNKNYLAWYQQKPGQPPKLLIYWASTRESGVPDRFSGSGSGTDFTLTISSLQAEDVAVYYCQQYYSTPITFGCGTRLEIK

SEQ ID NO: 327 - protein, 255 aa, Artificial Sequence
  Synthetic
EVQLVESGGGLVKPGGSLRLSCVASGFILSSDSMSWVRQAPGKCLEWVSSIRSSNSYIYYRDSVKGRFTISRDNAKNSLYLQMDSLRAEDTAVYFCARERDYYDSGGYYYGDAFDIWGQGTMVTVSSGGGGSGGGGSGGGGSDIVMTQSPDSLAVSLGERATINCKSSQSVLYSSNNKNYLAWYQQKPGQPPKLLIYWASTRESGVPDRFSGSGSGTDFTLTISSLQAEDVAVYYCQQYYSTPITFGCGTRLEIK

SEQ ID NO: 328 - protein, 510 aa, Artificial Sequence
  Synthetic
EVQLVESGGGLVKPGGSLRLSCVASGFILSSDSMSWVRQAPGKCLEWVSSIRSSNSYIYYRDSVKGRFTISRDNAKNSLYLQMDSLRAEDTAVYFCARERDYYDSGGYYYGDAFDIWGQGTMVTVSSGGGGSGGGGSGGGGSDIVMTQSPDSLAVSLGERATINCKSSQSVLYSSNNKNYLAWYQQKPGQPPKLLIYWASTRESGVPDRFSGSGSGTDFTLTISSLQAEDVAVYYCQQYYSTPITFGCGTRLEIKSGGGGSEVQLVESGGGLVQPGGSLKLSCAASGFTFNKYAMNWVRQAPGKGLEWVARIRSKYNNYATYYADSVKDRFTISRDDSKNTAYLQMNNLKTEDTAVYYCVRHGNFGNSYISYWAYWGQGTLVTVSSGGGGSGGGGSGGGGSQTVVTQEPSLTVSPGGTVTLTCGSSTGAVTSGNYPNWVQQKPGQAPRGLIGGTKFLAPGTPARFSGSLLGGKAALTLSGVQPEDEAEYYCVLWYSNRWVFGGGTKLTVL

SEQ ID NO: 329 - protein, 998 aa, Artificial Sequence
  Synthetic
EVQLVESGGGLVKPGGSLRLSCVASGFILSSDSMSWVRQAPGKCLEWVSSIRSSNSYIYYRDSVKGRFTISRDNAKNSLYLQMDSLRAEDTAVYFCARERDYYDSGGYYYGDAFDIWGQGTMVTVSSGGGGSGGGGSGGGGSDIVMTQSPDSLAVSLGERATINCKSSQSVLYSSNNKNYLAWYQQKPGQPPKLLIYWASTRESGVPDRFSGSGSGTDFTLTISSLQAEDVAVYYCQQYYSTPITFGCGTRLEIKSGGGGSEVQLVESGGGLVQPGGSLKLSCAASGFTFNKYAMNWVRQAPGKGLEWVARIRSKYNNYATYYADSVKDRFTISRDDSKNTAYLQMNNLKTEDTAVYYCVRHGNFGNSYISYWAYWGQGTLVTVSSGGGGSGGGGSGGGGSQTVVTQEPSLTVSPGGTVTLTCGSSTGAVTSGNYPNWVQQKPGQAPRGLIGGTKFLAPGTPARFSGSLLGGKAALTLSGVQPEDEAEYYCVLWYSNRWVFGGGTKLTVLGGGGDKTHTCPPCPAPELLGGPSVFLFPPKPKDTLMISRTPEVTCVVVDVSHEDPEVKFNWYVDGVEVHNAKTKPCEEQYGSTYRCVSVLTVLHQDWLNGKEYKCKVSNKALPAPIEKTISKAKGQPREPQVYTLPPSREEMTKNQVSLTCLVKGFYPSDIAVEWESNGQPENNYKTTPPVLDSDGSFFLYSKLTVDKSRWQQGNVFSCSVMHEALHNHYTQKSLSLSPGKGGGGSGGGGSGGGGSGGGGSGGGGSGGGGSDKTHTCPPCPAPELLGGPSVFLFPPKPKDTLMISRTPEVTCVVVDVSHEDPEVKFNWYVDGVEVHNAKTKPCEEQYGSTYRCVSVLTVLHQDWLNGKEYKCKVSNKALPAPIEKTISKAKGQPREPQVYTLPPSREEMTKNQVSLTCLVKGFYPSDIAVEWESNGQPENNYKTTPPVLDSDGSFFLYSKLTVDKSRWQQGNVFSCSVMHEALHNHYTQKSLSLSPGK

SEQ ID NO: 330 - protein, 5 aa, Artificial Sequence
  Synthetic
SDAMS

SEQ ID NO: 331 - protein, 17 aa, Artificial Sequence
  Synthetic
SIRSSNSYIYYRDAVKG

SEQ ID NO: 332 - protein, 18 aa, Artificial Sequence
  Synthetic
ERDYYDAGGYYYGDAFDI

SEQ ID NO: 333 - protein, 17 aa, Artificial Sequence
  Synthetic
KSSQSVLYSSNNKNYLA

SEQ ID NO: 334 - protein, 7 aa, Artificial Sequence
  Synthetic
WASTRES

SEQ ID NO: 335 - protein, 9 aa, Artificial Sequence
  Synthetic
QQYYSTPIT

SEQ ID NO: 336 - protein, 127 aa, Artificial Sequence
  Synthetic
EVQLVESGGGLVKPGGSLRLSCVASGFILSSDAMSWVRQAPGKCLEWVSSIRSSNSYIYYRDAVKGRFTISRDNAKNSLYLQMDSLRAEDTAVYFCARERDYYDAGGYYYGDAFDIWGQGTMVTVSS

SEQ ID NO: 337 - protein, 113 aa, Artificial Sequence; identical to SEQ ID NO: 326
  Synthetic

SEQ ID NO: 338 - protein, 255 aa, Artificial Sequence
  Synthetic
EVQLVESGGGLVKPGGSLRLSCVASGFILSSDAMSWVRQAPGKCLEWVSSIRSSNSYIYYRDAVKGRFTISRDNAKNSLYLQMDSLRAEDTAVYFCARERDYYDAGGYYYGDAFDIWGQGTMVTVSSGGGGSGGGGSGGGGSDIVMTQSPDSLAVSLGERATINCKSSQSVLYSSNNKNYLAWYQQKPGQPPKLLIYWASTRESGVPDRFSGSGSGTDFTLTISSLQAEDVAVYYCQQYYSTPITFGCGTRLEIK

SEQ ID NO: 339 - protein, 510 aa, Artificial Sequence
  Synthetic
EVQLVESGGGLVKPGGSLRLSCVASGFILSSDAMSWVRQAPGKCLEWVSSIRSSNSYIYYRDAVKGRFTISRDNAKNSLYLQMDSLRAEDTAVYFCARERDYYDAGGYYYGDAFDIWGQGTMVTVSSGGGGSGGGGSGGGGSDIVMTQSPDSLAVSLGERATINCKSSQSVLYSSNNKNYLAWYQQKPGQPPKLLIYWASTRESGVPDRFSGSGSGTDFTLTISSLQAEDVAVYYCQQYYSTPITFGCGTRLEIKSGGGGSEVQLVESGGGLVQPGGSLKLSCAASGFTFNKYAMNWVRQAPGKGLEWVARIRSKYNNYATYYADSVKDRFTISRDDSKNTAYLQMNNLKTEDTAVYYCVRHGNFGNSYISYWAYWGQGTLVTVSSGGGGSGGGGSGGGGSQTVVTQEPSLTVSPGGTVTLTCGSSTGAVTSGNYPNWVQQKPGQAPRGLIGGTKFLAPGTPARFSGSLLGGKAALTLSGVQPEDEAEYYCVLWYSNRWVFGGGTKLTVL

SEQ ID NO: 340 - protein, 998 aa, Artificial Sequence
  Synthetic
EVQLVESGGGLVKPGGSLRLSCVASGFILSSDAMSWVRQAPGKCLEWVSSIRSSNSYIYYRDAVKGRFTISRDNAKNSLYLQMDSLRAEDTAVYFCARERDYYDAGGYYYGDAFDIWGQGTMVTVSSGGGGSGGGGSGGGGSDIVMTQSPDSLAVSLGERATINCKSSQSVLYSSNNKNYLAWYQQKPGQPPKLLIYWASTRESGVPDRFSGSGSGTDFTLTISSLQAEDVAVYYCQQYYSTPITFGCGTRLEIKSGGGGSEVQLVESGGGLVQPGGSLKLSCAASGFTFNKYAMNWVRQAPGKGLEWVARIRSKYNNYATYYADSVKDRFTISRDDSKNTAYLQMNNLKTEDTAVYYCVRHGNFGNSYISYWAYWGQGTLVTVSSGGGGSGGGGSGGGGSQTVVTQEPSLTVSPGGTVTLTCGSSTGAVTSGNYPNWVQQKPGQAPRGLIGGTKFLAPGTPARFSGSLLGGKAALTLSGVQPEDEAEYYCVLWYSNRWVFGGGTKLTVLGGGGDKTHTCPPCPAPELLGGPSVFLFPPKPKDTLMISRTPEVTCVVVDVSHEDPEVKFNWYVDGVEVHNAKTKPCEEQYGSTYRCVSVLTVLHQDWLNGKEYKCKVSNKALPAPIEKTISKAKGQPREPQVYTLPPSREEMTKNQVSLTCLVKGFYPSDIAVEWESNGQPENNYKTTPPVLDSDGSFFLYSKLTVDKSRWQQGNVFSCSVMHEALHNHYTQKSLSLSPGKGGGGSGGGGSGGGGSGGGGSGGGGSGGGGSDKTHTCPPCPAPELLGGPSVFLFPPKPKDTLMISRTPEVTCVVVDVSHEDPEVKFNWYVDGVEVHNAKTKPCEEQYGSTYRCVSVLTVLHQDWLNGKEYKCKVSNKALPAPIEKTISKAKGQPREPQVYTLPPSREEMTKNQVSLTCLVKGFYPSDIAVEWESNGQPENNYKTTPPVLDSDGSFFLYSKLTVDKSRWQQGNVFSCSVMHEALHNHYTQKSLSLSPGK

SEQ ID NO: 341 - protein, 5 aa, Artificial Sequence
  Synthetic
SNSMS

SEQ ID NO: 342 - protein, 17 aa, Artificial Sequence
  Synthetic
SIRSSNSYIYYRNSVKG

SEQ ID NO: 343 - protein, 18 aa, Artificial Sequence
  Synthetic
ERDYYNSGGYYYGDAFDI

SEQ ID NO: 344 - protein, 17 aa, Artificial Sequence
  Synthetic
KSSQSVLYSSNNKNYLA

SEQ ID NO: 345 - protein, 7 aa, Artificial Sequence
  Synthetic
WASTRES

SEQ ID NO: 346 - protein, 9 aa, Artificial Sequence
  Synthetic
QQYYSTPIT

SEQ ID NO: 347 - protein, 127 aa, Artificial Sequence
  Synthetic
EVQLVESGGGLVKPGGSLRLSCVASGFILSSNSMSWVRQAPGKCLEWVSSIRSSNSYIYYRNSVKGRFTISRDNAKNSLYLQMDSLRAEDTAVYFCARERDYYNSGGYYYGDAFDIWGQGTMVTVSS

SEQ ID NO: 348 - protein, 113 aa, Artificial Sequence; identical to SEQ ID NO: 326
  Synthetic

SEQ ID NO: 349 - protein, 255 aa, Artificial Sequence
  Synthetic
EVQLVESGGGLVKPGGSLRLSCVASGFILSSNSMSWVRQAPGKCLEWVSSIRSSNSYIYYRNSVKGRFTISRDNAKNSLYLQMDSLRAEDTAVYFCARERDYYNSGGYYYGDAFDIWGQGTMVTVSSGGGGSGGGGSGGGGSDIVMTQSPDSLAVSLGERATINCKSSQSVLYSSNNKNYLAWYQQKPGQPPKLLIYWASTRESGVPDRFSGSGSGTDFTLTISSLQAEDVAVYYCQQYYSTPITFGCGTRLEIK

SEQ ID NO: 350 - protein, 510 aa, Artificial Sequence
  Synthetic
EVQLVESGGGLVKPGGSLRLSCVASGFILSSNSMSWVRQAPGKCLEWVSSIRSSNSYIYYRNSVKGRFTISRDNAKNSLYLQMDSLRAEDTAVYFCARERDYYNSGGYYYGDAFDIWGQGTMVTVSSGGGGSGGGGSGGGGSDIVMTQSPDSLAVSLGERATINCKSSQSVLYSSNNKNYLAWYQQKPGQPPKLLIYWASTRESGVPDRFSGSGSGTDFTLTISSLQAEDVAVYYCQQYYSTPITFGCGTRLEIKSGGGGSEVQLVESGGGLVQPGGSLKLSCAASGFTFNKYAMNWVRQAPGKGLEWVARIRSKYNNYATYYADSVKDRFTISRDDSKNTAYLQMNNLKTEDTAVYYCVRHGNFGNSYISYWAYWGQGTLVTVSSGGGGSGGGGSGGGGSQTVVTQEPSLTVSPGGTVTLTCGSSTGAVTSGNYPNWVQQKPGQAPRGLIGGTKFLAPGTPARFSGSLLGGKAALTLSGVQPEDEAEYYCVLWYSNRWVFGGGTKLTVL

SEQ ID NO: 351 - protein, 998 aa, Artificial Sequence
  Synthetic
EVQLVESGGGLVKPGGSLRLSCVASGFILSSNSMSWVRQAPGKCLEWVSSIRSSNSYIYYRNSVKGRFTISRDNAKNSLYLQMDSLRAEDTAVYFCARERDYYNSGGYYYGDAFDIWGQGTMVTVSSGGGGSGGGGSGGGGSDIVMTQSPDSLAVSLGERATINCKSSQSVLYSSNNKNYLAWYQQKPGQPPKLLIYWASTRESGVPDRFSGSGSGTDFTLTISSLQAEDVAVYYCQQYYSTPITFGCGTRLEIKSGGGGSEVQLVESGGGLVQPGGSLKLSCAASGFTFNKYAMNWVRQAPGKGLEWVARIRSKYNNYATYYADSVKDRFTISRDDSKNTAYLQMNNLKTEDTAVYYCVRHGNFGNSYISYWAYWGQGTLVTVSSGGGGSGGGGSGGGGSQTVVTQEPSLTVSPGGTVTLTCGSSTGAVTSGNYPNWVQQKPGQAPRGLIGGTKFLAPGTPARFSGSLLGGKAALTLSGVQPEDEAEYYCVLWYSNRWVFGGGTKLTVLGGGGDKTHTCPPCPAPELLGGPSVFLFPPKPKDTLMISRTPEVTCVVVDVSHEDPEVKFNWYVDGVEVHNAKTKPCEEQYGSTYRCVSVLTVLHQDWLNGKEYKCKVSNKALPAPIEKTISKAKGQPREPQVYTLPPSREEMTKNQVSLTCLVKGFYPSDIAVEWESNGQPENNYKTTPPVLDSDGSFFLYSKLTVDKSRWQQGNVFSCSVMHEALHNHYTQKSLSLSPGKGGGGSGGGGSGGGGSGGGGSGGGGSGGGGSDKTHTCPPCPAPELLGGPSVFLFPPKPKDTLMISRTPEVTCVVVDVSHEDPEVKFNWYVDGVEVHNAKTKPCEEQYGSTYRCVSVLTVLHQDWLNGKEYKCKVSNKALPAPIEKTISKAKGQPREPQVYTLPPSREEMTKNQVSLTCLVKGFYPSDIAVEWESNGQPENNYKTTPPVLDSDGSFFLYSKLTVDKSRWQQGNVFSCSVMHEALHNHYTQKSLSLSPGK

SEQ ID NO: 352 - protein, 7 aa, Artificial Sequence
  Synthetic
SGGYYWS

SEQ ID NO: 353 - protein, 16 aa, Artificial Sequence
  Synthetic
YIYYRGNAYYNPSLKS

SEQ ID NO: 354 - protein, 8 aa, Artificial Sequence
  Synthetic
LQESVFDY

SEQ ID NO: 355 - protein, 14 aa, Artificial Sequence
  Synthetic
TGTSSDVGGYNYVS

SEQ ID NO: 356 - protein, 7 aa, Artificial Sequence
  Synthetic
EVSNRPS

SEQ ID NO: 357 - protein, 10 aa, Artificial Sequence
  Synthetic
SSYTSSSTLV

SEQ ID NO: 358 - protein, 118 aa, Artificial Sequence; identical to SEQ ID NO: 314
  Synthetic

SEQ ID NO: 359 - protein, 110 aa, Artificial Sequence
  Synthetic
QSALTQPASVSGSPGQSITISCTGTSSDVGGYNYVSWYQQHPGKAPKLMIYEVSNRPSGVSNRFSGSKSGNTASLTISGLQAEDEADYYCSSYTSSSTLVVGCGTKLTVL

SEQ ID NO: 360 - protein, 243 aa, Artificial Sequence
  Synthetic
QVQLQESGPGLVKPSQTLSLTCTVSGGSISSGGYYWSWIRQHPGKCLEWIGYIYYRGNAYYNPSLKSRVTISVDTSKNQFSLKLSSVTAADTAVYYCATLQESVFDYWGQGTLVTVSSGGGGSGGGGSGGGGSQSALTQPASVSGSPGQSITISCTGTSSDVGGYNYVSWYQQHPGKAPKLMIYEVSNRPSGVSNRFSGSKSGNTASLTISGLQAEDEADYYCSSYTSSSTLVVGCGTKLTVL

SEQ ID NO: 361 - protein, 498 aa, Artificial Sequence
  Synthetic
QVQLQESGPGLVKPSQTLSLTCTVSGGSISSGGYYWSWIRQHPGKCLEWIGYIYYRGNAYYNPSLKSRVTISVDTSKNQFSLKLSSVTAADTAVYYCATLQESVFDYWGQGTLVTVSSGGGGSGGGGSGGGGSQSALTQPASVSGSPGQSITISCTGTSSDVGGYNYVSWYQQHPGKAPKLMIYEVSNRPSGVSNRFSGSKSGNTASLTISGLQAEDEADYYCSSYTSSSTLVVGCGTKLTVLSGGGGSEVQLVESGGGLVQPGGSLKLSCAASGFTFNKYAMNWVRQAPGKGLEWVARIRSKYNNYATYYADSVKDRFTISRDDSKNTAYLQMNNLKTEDTAVYYCVRHGNFGNSYISYWAYWGQGTLVTVSSGGGGSGGGGSGGGGSQTVVTQEPSLTVSPGGTVTLTCGSSTGAVTSGNYPNWVQQKPGQAPRGLIGGTKFLAPGTPARFSGSLLGGKAALTLSGVQPEDEAEYYCVLWYSNRWVFGGGTKLTVL

SEQ ID NO: 362 - protein, 986 aa, Artificial Sequence
  Synthetic
QVQLQESGPGLVKPSQTLSLTCTVSGGSISSGGYYWSWIRQHPGKCLEWIGYIYYRGNAYYNPSLKSRVTISVDTSKNQFSLKLSSVTAADTAVYYCATLQESVFDYWGQGTLVTVSSGGGGSGGGGSGGGGSQSALTQPASVSGSPGQSITISCTGTSSDVGGYNYVSWYQQHPGKAPKLMIYEVSNRPSGVSNRFSGSKSGNTASLTISGLQAEDEADYYCSSYTSSSTLVVGCGTKLTVLSGGGGSEVQLVESGGGLVQPGGSLKLSCAASGFTFNKYAMNWVRQAPGKGLEWVARIRSKYNNYATYYADSVKDRFTISRDDSKNTAYLQMNNLKTEDTAVYYCVRHGNFGNSYISYWAYWGQGTLVTVSSGGGGSGGGGSGGGGSQTVVTQEPSLTVSPGGTVTLTCGSSTGAVTSGNYPNWVQQKPGQAPRGLIGGTKFLAPGTPARFSGSLLGGKAALTLSGVQPEDEAEYYCVLWYSNRWVFGGGTKLTVLGGGGDKTHTCPPCPAPELLGGPSVFLFPPKPKDTLMISRTPEVTCVVVDVSHEDPEVKFNWYVDGVEVHNAKTKPCEEQYGSTYRCVSVLTVLHQDWLNGKEYKCKVSNKALPAPIEKTISKAKGQPREPQVYTLPPSREEMTKNQVSLTCLVKGFYPSDIAVEWESNGQPENNYKTTPPVLDSDGSFFLYSKLTVDKSRWQQGNVFSCSVMHEALHNHYTQKSLSLSPGKGGGGSGGGGSGGGGSGGGGSGGGGSGGGGSDKTHTCPPCPAPELLGGPSVFLFPPKPKDTLMISRTPEVTCVVVDVSHEDPEVKFNWYVDGVEVHNAKTKPCEEQYGSTYRCVSVLTVLHQDWLNGKEYKCKVSNKALPAPIEKTISKAKGQPREPQVYTLPPSREEMTKNQVSLTCLVKGFYPSDIAVEWESNGQPENNYKTTPPVLDSDGSFFLYSKLTVDKSRWQQGNVFSCSVMHEALHNHYTQKSLSLSPGK

SEQ ID NO: 363 - protein, 7 aa, Artificial Sequence
  Synthetic
SGGYYWS

SEQ ID NO: 364 - protein, 16 aa, Artificial Sequence
  Synthetic
YIYYRGNTYYNPSLKS

SEQ ID NO: 365 - protein, 8 aa, Artificial Sequence
  Synthetic
LQESVFDY

SEQ ID NO: 366 - protein, 14 aa, Artificial Sequence
  Synthetic
TGTSSDVGGYNYVS

SEQ ID NO: 367 - protein, 7 aa, Artificial Sequence
  Synthetic
EVSNRPS

SEQ ID NO: 368 - protein, 11 aa, Artificial Sequence
  Synthetic
SSYTSSSTLVV

SEQ ID NO: 369 - protein, 118 aa, Artificial Sequence
  Synthetic
QVQLQESGPGLVKPSQTLSLTCTVSGGSISSGGYYWSWIRQHPGKCLEWIGYIYYRGNTYYNPSLKSRVTISVDTSKNQFSLKLSSVTAADTAVYYCATLQESVFDYWGQGTLVTVSS

SEQ ID NO: 370 - protein, 111 aa, Artificial Sequence; identical to SEQ ID NO: 315
  Synthetic

SEQ ID NO: 371 - protein, 244 aa, Artificial Sequence
  Synthetic
QVQLQESGPGLVKPSQTLSLTCTVSGGSISSGGYYWSWIRQHPGKCLEWIGYIYYRGNTYYNPSLKSRVTISVDTSKNQFSLKLSSVTAADTAVYYCATLQESVFDYWGQGTLVTVSSGGGGSGGGGSGGGGSQSALTQPASVSGSPGQSITISCTGTSSDVGGYNYVSWYQQHPGKAPKLMIYEVSNRPSGVSNRFSGSKSGNTASLTISGLQAEDEADYYCSSYTSSSTLVVFGCGTKLTVL

SEQ ID NO: 372 - protein, 499 aa, Artificial Sequence
  Synthetic
QVQLQESGPGLVKPSQTLSLTCTVSGGSISSGGYYWSWIRQHPGKCLEWIGYIYYRGNTYYNPSLKSRVTISVDTSKNQFSLKLSSVTAADTAVYYCATLQESVFDYWGQGTLVTVSSGGGGSGGGGSGGGGSQSALTQPASVSGSPGQSITISCTGTSSDVGGYNYVSWYQQHPGKAPKLMIYEVSNRPSGVSNRFSGSKSGNTASLTISGLQAEDEADYYCSSYTSSSTLVVFGCGTKLTVLSGGGGSEVQLVESGGGLVQPGGSLKLSCAASGFTFNKYAMNWVRQAPGKGLEWVARIRSKYNNYATYYADSVKDRFTISRDDSKNTAYLQMNNLKTEDTAVYYCVRHGNFGNSYISYWAYWGQGTLVTVSSGGGGSGGGGSGGGGSQTVVTQEPSLTVSPGGTVTLTCGSSTGAVTSGNYPNWVQQKPGQAPRGLIGGTKFLAPGTPARFSGSLLGGKAALTLSGVQPEDEAEYYCVLWYSNRWVFGGGTKLTVL

SEQ ID NO: 373 - protein, 987 aa, Artificial Sequence
  Synthetic
QVQLQESGPGLVKPSQTLSLTCTVSGGSISSGGYYWSWIRQHPGKCLEWIGYIYYRGNTYYNPSLKSRVTISVDTSKNQFSLKLSSVTAADTAVYYCATLQESVFDYWGQGTLVTVSSGGGGSGGGGSGGGGSQSALTQPASVSGSPGQSITISCTGTSSDVGGYNYVSWYQQHPGKAPKLMIYEVSNRPSGVSNRFSGSKSGNTASLTISGLQAEDEADYYCSSYTSSSTLVVFGCGTKLTVLSGGGGSEVQLVESGGGLVQPGGSLKLSCAASGFTFNKYAMNWVRQAPGKGLEWVARIRSKYNNYATYYADSVKDRFTISRDDSKNTAYLQMNNLKTEDTAVYYCVRHGNFGNSYISYWAYWGQGTLVTVSSGGGGSGGGGSGGGGSQTVVTQEPSLTVSPGGTVTLTCGSSTGAVTSGNYPNWVQQKPGQAPRGLIGGTKFLAPGTPARFSGSLLGGKAALTLSGVQPEDEAEYYCVLWYSNRWVFGGGTKLTVLGGGGDKTHTCPPCPAPELLGGPSVFLFPPKPKDTLMISRTPEVTCVVVDVSHEDPEVKFNWYVDGVEVHNAKTKPCEEQYGSTYRCVSVLTVLHQDWLNGKEYKCKVSNKALPAPIEKTISKAKGQPREPQVYTLPPSREEMTKNQVSLTCLVKGFYPSDIAVEWESNGQPENNYKTTPPVLDSDGSFFLYSKLTVDKSRWQQGNVFSCSVMHEALHNHYTQKSLSLSPGKGGGGSGGGGSGGGGSGGGGSGGGGSGGGGSDKTHTCPPCPAPELLGGPSVFLFPPKPKDTLMISRTPEVTCVVVDVSHEDPEVKFNWYVDGVEVHNAKTKPCEEQYGSTYRCVSVLTVLHQDWLNGKEYKCKVSNKALPAPIEKTISKAKGQPREPQVYTLPPSREEMTKNQVSLTCLVKGFYPSDIAVEWESNGQPENNYKTTPPVLDSDGSFFLYSKLTVDKSRWQQGNVFSCSVMHEALHNHYTQKSLSLSPGK

SEQ ID NO: 374 - protein, 7 aa, Artificial Sequence
  Synthetic
SGGYYWS

SEQ ID NO: 375 - protein, 16 aa, Artificial Sequence
  Synthetic
YIYYRGNTYYNPSLKS

SEQ ID NO: 376 - protein, 8 aa, Artificial Sequence
  Synthetic
LQDSVFDH

SEQ ID NO: 377 - protein, 14 aa, Artificial Sequence
  Synthetic
TGTSSDVGSYNLVS

SEQ ID NO: 378 - protein, 7 aa, Artificial Sequence
  Synthetic
EVSNRPS

SEQ ID NO: 379 - protein, 11 aa, Artificial Sequence
  Synthetic
SSYTSSSTLVV

SEQ ID NO: 380 - protein, 118 aa, Artificial Sequence
  Synthetic
QVQLQESGPGLVKPSQTLSLTCTVSGGSISSGGYYWSWIRQHPGKCLEWIGYIYYRGNTYYNPSLKSRTTISVDTSKNQFSLKLSSVTAADAAVYYCARLQDSVFDHWGQGTLVTVSS

SEQ ID NO: 381 - protein, 111 aa, Artificial Sequence
  Synthetic
QSALTQPPSASGSPGQSITISCTGTSSDVGSYNLVSWYQQHPGKAPKLMIYEVSNRPSGVSNRFSGSKSGNTASLTISGLQAEDEADYYCSSYTSSSTLVVFGCGTKLTVL

SEQ ID NO: 382 - protein, 244 aa, Artificial Sequence
  Synthetic
QVQLQESGPGLVKPSQTLSLTCTVSGGSISSGGYYWSWIRQHPGKCLEWIGYIYYRGNTYYNPSLKSRTTISVDTSKNQFSLKLSSVTAADAAVYYCARLQDSVFDHWGQGTLVTVSSGGGGSGGGGSGGGGSQSALTQPPSASGSPGQSITISCTGTSSDVGSYNLVSWYQQHPGKAPKLMIYEVSNRPSGVSNRFSGSKSGNTASLTISGLQAEDEADYYCSSYTSSSTLVVFGCGTKLTVL

SEQ ID NO: 383 - protein, 499 aa, Artificial Sequence
  Synthetic
QVQLQESGPGLVKPSQTLSLTCTVSGGSISSGGYYWSWIRQHPGKCLEWIGYIYYRGNTYYNPSLKSRTTISVDTSKNQFSLKLSSVTAADAAVYYCARLQDSVFDHWGQGTLVTVSSGGGGSGGGGSGGGGSQSALTQPPSASGSPGQSITISCTGTSSDVGSYNLVSWYQQHPGKAPKLMIYEVSNRPSGVSNRFSGSKSGNTASLTISGLQAEDEADYYCSSYTSSSTLVVFGCGTKLTVLSGGGGSEVQLVESGGGLVQPGGSLKLSCAASGFTFNKYAMNWVRQAPGKGLEWVARIRSKYNNYATYYADSVKDRFTISRDDSKNTAYLQMNNLKTEDTAVYYCVRHGNFGNSYISYWAYWGQGTLVTVSSGGGGSGGGGSGGGGSQTVVTQEPSLTVSPGGTVTLTCGSSTGAVTSGNYPNWVQQKPGQAPRGLIGGTKFLAPGTPARFSGSLLGGKAALTLSGVQPEDEAEYYCVLWYSNRWVFGGGTKLTVL

SEQ ID NO: 384 - protein, 987 aa, Artificial Sequence
  Synthetic
QVQLQESGPGLVKPSQTLSLTCTVSGGSISSGGYYWSWIRQHPGKCLEWIGYIYYRGNTYYNPSLKSRTTISVDTSKNQFSLKLSSVTAADAAVYYCARLQDSVFDHWGQGTLVTVSSGGGGSGGGGSGGGGSQSALTQPPSASGSPGQSITISCTGTSSDVGSYNLVSWYQQHPGKAPKLMIYEVSNRPSGVSNRFSGSKSGNTASLTISGLQAEDEADYYCSSYTSSSTLVVFGCGTKLTVLSGGGGSEVQLVESGGGLVQPGGSLKLSCAASGFTFNKYAMNWVRQAPGKGLEWVARIRSKYNNYATYYADSVKDRFTISRDDSKNTAYLQMNNLKTEDTAVYYCVRHGNFGNSYISYWAYWGQGTLVTVSSGGGGSGGGGSGGGGSQTVVTQEPSLTVSPGGTVTLTCGSSTGAVTSGNYPNWVQQKPGQAPRGLIGGTKFLAPGTPARFSGSLLGGKAALTLSGVQPEDEAEYYCVLWYSNRWVFGGGTKLTVLGGGGDKTHTCPPCPAPELLGGPSVFLFPPKPKDTLMISRTPEVTCVVVDVSHEDPEVKFNWYVDGVEVHNAKTKPCEEQYGSTYRCVSVLTVLHQDWLNGKEYKCKVSNKALPAPIEKTISKAKGQPREPQVYTLPPSREEMTKNQVSLTCLVKGFYPSDIAVEWESNGQPENNYKTTPPVLDSDGSFFLYSKLTVDKSRWQQGNVFSCSVMHEALHNHYTQKSLSLSPGKGGGGSGGGGSGGGGSGGGGSGGGGSGGGGSDKTHTCPPCPAPELLGGPSVFLFPPKPKDTLMISRTPEVTCVVVDVSHEDPEVKFNWYVDGVEVHNAKTKPCEEQYGSTYRCVSVLTVLHQDWLNGKEYKCKVSNKALPAPIEKTISKAKGQPREPQVYTLPPSREEMTKNQVSLTCLVKGFYPSDIAVEWESNGQPENNYKTTPPVLDSDGSFFLYSKLTVDKSRWQQGNVFSCSVMHEALHNHYTQKSLSLSPGK

SEQ ID NO: 385 - protein, 5 aa, Artificial Sequence
  Synthetic
HYAMT

SEQ ID NO: 386 - protein, 17 aa, Artificial Sequence
  Synthetic
AISGGGDTTFYADSVKG

SEQ ID NO: 387 - protein, 10 aa, Artificial Sequence
  Synthetic
DRGYYYGMDV

SEQ ID NO: 388 - protein, 16 aa, Artificial Sequence
  Synthetic
RSSQSLLRTNGYNYLD

SEQ ID NO: 389 - protein, 7 aa, Artificial Sequence
  Synthetic
LGSNRAS

SEQ ID NO: 390 - protein, 9 aa, Artificial Sequence
  Synthetic
MQALQSPYT

SEQ ID NO: 391 - protein, 119 aa, Artificial Sequence
  Synthetic
EVQLLESGGGLVQPGGSLRLSCAASGFTFSHYAMTWVRQAPGKCLEWVSAISGGGDTTFYADSVKGRFTFSRDNSRNTLYLQMNSLRAEDTAVYYCVKDRGYYYGMDVWGQGTTVTVSS

SEQ ID NO: 392 - protein, 112 aa, Artificial Sequence; identical to SEQ ID NO: 271
  Synthetic

SEQ ID NO: 393 - protein, 246 aa, Artificial Sequence
  Synthetic
EVQLLESGGGLVQPGGSLRLSCAASGFTFSHYAMTWVRQAPGKCLEWVSAISGGGDTTFYADSVKGRFTFSRDNSRNTLYLQMNSLRAEDTAVYYCVKDRGYYYGMDVWGQGTTVTVSSGGGGSGGGGSGGGGSDIVMTQTPLSLPVTPGEPASISCRSSQSLLRTNGYNYLDWYLQKPGQSPQLLIYLGSNRASGVPDRFSGSGSGTDFTLKISRVEAEDVGVYYCMQALQSPYTFGCGTKLEIK

SEQ ID NO: 394 - protein, 501 aa, Artificial Sequence
  Synthetic
EVQLLESGGGLVQPGGSLRLSCAASGFTFSHYAMTWVRQAPGKCLEWVSAISGGGDTTFYADSVKGRFTFSRDNSRNTLYLQMNSLRAEDTAVYYCVKDRGYYYGMDVWGQGTTVTVSSGGGGSGGGGSGGGGSDIVMTQTPLSLPVTPGEPASISCRSSQSLLRTNGYNYLDWYLQKPGQSPQLLIYLGSNRASGVPDRFSGSGSGTDFTLKISRVEAEDVGVYYCMQALQSPYTFGCGTKLEIKSGGGGSEVQLVESGGGLVQPGGSLKLSCAASGFTFNKYAMNWVRQAPGKGLEWVARIRSKYNNYATYYADSVKDRFTISRDDSKNTAYLQMNNLKTEDTAVYYCVRHGNFGNSYISYWAYWGQGTLVTVSSGGGGSGGGGSGGGGSQTVVTQEPSLTVSPGGTVTLTCGSSTGAVTSGNYPNWVQQKPGQAPRGLIGGTKFLAPGTPARFSGSLLGGKAALTLSGVQPEDEAEYYCVLWYSNRWVFGGGTKLTVL

SEQ ID NO: 395 - protein, 989 aa, Artificial Sequence
  Synthetic
EVQLLESGGGLVQPGGSLRLSCAASGFTFSHYAMTWVRQAPGKCLEWVSAISGGGDTTFYADSVKGRFTFSRDNSRNTLYLQMNSLRAEDTAVYYCVKDRGYYYGMDVWGQGTTVTVSSGGGGSGGGGSGGGGSDIVMTQTPLSLPVTPGEPASISCRSSQSLLRTNGYNYLDWYLQKPGQSPQLLIYLGSNRASGVPDRFSGSGSGTDFTLKISRVEAEDVGVYYCMQALQSPYTFGCGTKLEIKSGGGGSEVQLVESGGGLVQPGGSLKLSCAASGFTFNKYAMNWVRQAPGKGLEWVARIRSKYNNYATYYADSVKDRFTISRDDSKNTAYLQMNNLKTEDTAVYYCVRHGNFGNSYISYWAYWGQGTLVTVSSGGGGSGGGGSGGGGSQTVVTQEPSLTVSPGGTVTLTCGSSTGAVTSGNYPNWVQQKPGQAPRGLIGGTKFLAPGTPARFSGSLLGGKAALTLSGVQPEDEAEYYCVLWYSNRWVFGGGTKLTVLGGGGDKTHTCPPCPAPELLGGPSVFLFPPKPKDTLMISRTPEVTCVVVDVSHEDPEVKFNWYVDGVEVHNAKTKPCEEQYGSTYRCVSVLTVLHQDWLNGKEYKCKVSNKALPAPIEKTISKAKGQPREPQVYTLPPSREEMTKNQVSLTCLVKGFYPSDIAVEWESNGQPENNYKTTPPVLDSDGSFFLYSKLTVDKSRWQQGNVFSCSVMHEALHNHYTQKSLSLSPGKGGGGSGGGGSGGGGSGGGGSGGGGSGGGGSDKTHTCPPCPAPELLGGPSVFLFPPKPKDTLMISRTPEVTCVVVDVSHEDPEVKFNWYVDGVEVHNAKTKPCEEQYGSTYRCVSVLTVLHQDWLNGKEYKCKVSNKALPAPIEKTISKAKGQPREPQVYTLPPSREEMTKNQVSLTCLVKGFYPSDIAVEWESNGQPENNYKTTPPVLDSDGSFFLYSKLTVDKSRWQQGNVFSCSVMHEALHNHYTQKSLSLSPGK

SEQ ID NO: 396 - protein, 5 aa, Artificial Sequence
  Synthetic
HYAMS

SEQ ID NO: 397 - protein, 17 aa, Artificial Sequence
  Synthetic
AISGSGGSTYYADAVKG

SEQ ID NO: 398 - protein, 12 aa, Artificial Sequence
  Synthetic
VRGIGTFYGMDV

SEQ ID NO: 399 - protein, 16 aa, Artificial Sequence
  Synthetic
RSSQSLLHSNKYNYLD

SEQ ID NO: 400 - protein, 7 aa, Artificial Sequence
  Synthetic
LGSNRAS

SEQ ID NO: 401 - protein, 9 aa, Artificial Sequence
  Synthetic
MQALQTPIT

SEQ ID NO: 402 - protein, 121 aa, Artificial Sequence; identical to SEQ ID NO: 105
  Synthetic

SEQ ID NO: 403 - protein, 112 aa, Artificial Sequence
  Synthetic
DIVMTQSPLSLSVTPGQPASISCRSSQSLLHSNKYNYLDWYLQKPGQSPQLLIYLGSNRASGVPDRFSGSGSGTDFTLKISRVEAEDVGVYYCMQALQTPITFGCGTRLEIK

SEQ ID NO: 404 - protein, 248 aa, Artificial Sequence
  Synthetic
EVQLLESGGGLVQPGGSLRLSCAASGFTFSHYAMSWVRQVPGKCLEWVSAISGSGGSTYYADAVKGRFTISRDNSKNTLYLQMNSLRAEDTAVYYCAKVRGIGTFYGMDVWGQGTTVTVSSGGGGSGGGGSGGGGSDIVMTQSPLSLSVTPGQPASISCRSSQSLLHSNKYNYLDWYLQKPGQSPQLLIYLGSNRASGVPDRFSGSGSGTDFTLKISRVEAEDVGVYYCMQALQTPITFGCGTRLEIK

SEQ ID NO: 405 - protein, 503 aa, Artificial Sequence
  Synthetic
EVQLLESGGGLVQPGGSLRLSCAASGFTFSHYAMSWVRQVPGKCLEWVSAISGSGGSTYYADAVKGRFTISRDNSKNTLYLQMNSLRAEDTAVYYCAKVRGIGTFYGMDVWGQGTTVTVSSGGGGSGGGGSGGGGSDIVMTQSPLSLSVTPGQPASISCRSSQSLLHSNKYNYLDWYLQKPGQSPQLLIYLGSNRASGVPDRFSGSGSGTDFTLKISRVEAEDVGVYYCMQALQTPITFGCGTRLEIKSGGGGSEVQLVESGGGLVQPGGSLKLSCAASGFTFNKYAMNWVRQAPGKGLEWVARIRSKYNNYATYYADSVKDRFTISRDDSKNTAYLQMNNLKTEDTAVYYCVRHGNFGNSYISYWAYWGQGTLVTVSSGGGGSGGGGSGGGGSQTVVTQEPSLTVSPGGTVTLTCGSSTGAVTSGNYPNWVQQKPGQAPRGLIGGTKFLAPGTPARFSGSLLGGKAALTLSGVQPEDEAEYYCVLWYSNRWVFGGGTKLTVL

SEQ ID NO: 406 - protein, 991 aa, Artificial Sequence
  Synthetic
EVQLLESGGGLVQPGGSLRLSCAASGFTFSHYAMSWVRQVPGKCLEWVSAISGSGGSTYYADAVKGRFTISRDNSKNTLYLQMNSLRAEDTAVYYCAKVRGIGTFYGMDVWGQGTTVTVSSGGGGSGGGGSGGGGSDIVMTQSPLSLSVTPGQPASISCRSSQSLLHSNKYNYLDWYLQKPGQSPQLLIYLGSNRASGVPDRFSGSGSGTDFTLKISRVEAEDVGVYYCMQALQTPITFGCGTRLEIKSGGGGSEVQLVESGGGLVQPGGSLKLSCAASGFTFNKYAMNWVRQAPGKGLEWVARIRSKYNNYATYYADSVKDRFTISRDDSKNTAYLQMNNLKTEDTAVYYCVRHGNFGNSYISYWAYWGQGTLVTVSSGGGGSGGGGSGGGGSQTVVTQEPSLTVSPGGTVTLTCGSSTGAVTSGNYPNWVQQKPGQAPRGLIGGTKFLAPGTPARFSGSLLGGKAALTLSGVQPEDEAEYYCVLWYSNRWVFGGGTKLTVLGGGGDKTHTCPPCPAPELLGGPSVFLFPPKPKDTLMISRTPEVTCVVVDVSHEDPEVKFNWYVDGVEVHNAKTKPCEEQYGSTYRCVSVLTVLHQDWLNGKEYKCKVSNKALPAPIEKTISKAKGQPREPQVYTLPPSREEMTKNQVSLTCLVKGFYPSDIAVEWESNGQPENNYKTTPPVLDSDGSFFLYSKLTVDKSRWQQGNVFSCSVMHEALHNHYTQKSLSLSPGKGGGGSGGGGSGGGGSGGGGSGGGGSGGGGSDKTHTCPPCPAPELLGGPSVFLFPPKPKDTLMISRTPEVTCVVVDVSHEDPEVKFNWYVDGVEVHNAKTKPCEEQYGSTYRCVSVLTVLHQDWLNGKEYKCKVSNKALPAPIEKTISKAKGQPREPQVYTLPPSREEMTKNQVSLTCLVKGFYPSDIAVEWESNGQPENNYKTTPPVLDSDGSFFLYSKLTVDKSRWQQGNVFSCSVMHEALHNHYTQKSLSLSPGK

SEQ ID NO: 407 - protein, 5 aa, Artificial Sequence
  Synthetic
HYAMS

SEQ ID NO: 408 - protein, 17 aa, Artificial Sequence
  Synthetic
VIDASGGSTYYADAVKG

SEQ ID NO: 409 - protein, 12 aa, Artificial Sequence
  Synthetic
VRGIGTFYGMDV

SEQ ID NO: 410 - protein, 16 aa, Artificial Sequence
  Synthetic
RSSQSLLHSNKYNYLD

SEQ ID NO: 411 - protein, 7 aa, Artificial Sequence
  Synthetic
LGSNRAS

SEQ ID NO: 412 - protein, 9 aa, Artificial Sequence
  Synthetic
MQALQTPLS

SEQ ID NO: 413 - protein, 121 aa, Artificial Sequence; identical to SEQ ID NO: 116
  Synthetic

SEQ ID NO: 414 - protein, 112 aa, Artificial Sequence
  Synthetic
DIVMTQTPLSLPVTPGEPASISCRSSQSLLHSNKYNYLDWYLQKPGQSPQLLIYLGSNRASGVPDRFSGSGSGTDFTLKISRVEAEDVGVYYCMQALQTPLSFGCGTKVEIK

SEQ ID NO: 415 - protein, 248 aa, Artificial Sequence
  Synthetic
EVQLLESGGGLVQPGGSLRLSCAASGFTFSHYAMSWVRQTPGKCLEWVSVIDASGGSTYYADAVKGRFTISRDNSKNTLYLQMNSLRAEDTAVYYCAKVRGIGTFYGMDVWGQGTTVTVSSGGGGSGGGGSGGGGSDIVMTQTPLSLPVTPGEPASISCRSSQSLLHSNKYNYLDWYLQKPGQSPQLLIYLGSNRASGVPDRFSGSGSGTDFTLKISRVEAEDVGVYYCMQALQTPLSFGCGTKVEIK

SEQ ID NO: 416 - protein, 503 aa, Artificial Sequence
  Synthetic
EVQLLESGGGLVQPGGSLRLSCAASGFTFSHYAMSWVRQTPGKCLEWVSVIDASGGSTYYADAVKGRFTISRDNSKNTLYLQMNSLRAEDTAVYYCAKVRGIGTFYGMDVWGQGTTVTVSSGGGGSGGGGSGGGGSDIVMTQTPLSLPVTPGEPASISCRSSQSLLHSNKYNYLDWYLQKPGQSPQLLIYLGSNRASGVPDRFSGSGSGTDFTLKISRVEAEDVGVYYCMQALQTPLSFGCGTKVEIKSGGGGSEVQLVESGGGLVQPGGSLKLSCAASGFTFNKYAMNWVRQAPGKGLEWVARIRSKYNNYATYYADSVKDRFTISRDDSKNTAYLQMNNLKTEDTAVYYCVRHGNFGNSYISYWAYWGQGTLVTVSSGGGGSGGGGSGGGGSQTVVTQEPSLTVSPGGTVTLTCGSSTGAVTSGNYPNWVQQKPGQAPRGLIGGTKFLAPGTPARFSGSLLGGKAALTLSGVQPEDEAEYYCVLWYSNRWVFGGGTKLTVL

SEQ ID NO: 417 - protein, 991 aa, Artificial Sequence
  Synthetic
EVQLLESGGGLVQPGGSLRLSCAASGFTFSHYAMSWVRQTPGKCLEWVSVIDASGGSTYYADAVKGRFTISRDNSKNTLYLQMNSLRAEDTAVYYCAKVRGIGTFYGMDVWGQGTTVTVSSGGGGSGGGGSGGGGSDIVMTQTPLSLPVTPGEPASISCRSSQSLLHSNKYNYLDWYLQKPGQSPQLLIYLGSNRASGVPDRFSGSGSGTDFTLKISRVEAEDVGVYYCMQALQTPLSFGCGTKVEIKSGGGGSEVQLVESGGGLVQPGGSLKLSCAASGFTFNKYAMNWVRQAPGKGLEWVARIRSKYNNYATYYADSVKDRFTISRDDSKNTAYLQMNNLKTEDTAVYYCVRHGNFGNSYISYWAYWGQGTLVTVSSGGGGSGGGGSGGGGSQTVVTQEPSLTVSPGGTVTLTCGSSTGAVTSGNYPNWVQQKPGQAPRGLIGGTKFLAPGTPARFSGSLLGGKAALTLSGVQPEDEAEYYCVLWYSNRWVFGGGTKLTVLGGGGDKTHTCPPCPAPELLGGPSVFLFPPKPKDTLMISRTPEVTCVVVDVSHEDPEVKFNWYVDGVEVHNAKTKPCEEQYGSTYRCVSVLTVLHQDWLNGKEYKCKVSNKALPAPIEKTISKAKGQPREPQVYTLPPSREEMTKNQVSLTCLVKGFYPSDIAVEWESNGQPENNYKTTPPVLDSDGSFFLYSKLTVDKSRWQQGNVFSCSVMHEALHNHYTQKSLSLSPGKGGGGSGGGGSGGGGSGGGGSGGGGSGGGGSDKTHTCPPCPAPELLGGPSVFLFPPKPKDTLMISRTPEVTCVVVDVSHEDPEVKFNWYVDGVEVHNAKTKPCEEQYGSTYRCVSVLTVLHQDWLNGKEYKCKVSNKALPAPIEKTISKAKGQPREPQVYTLPPSREEMTKNQVSLTCLVKGFYPSDIAVEWESNGQPENNYKTTPPVLDSDGSFFLYSKLTVDKSRWQQGNVFSCSVMHEALHNHYTQKSLSLSPGK

SEQ ID NO: 418 - protein, 5 aa, Artificial Sequence
  Synthetic
HYAMS

SEQ ID NO: 419 - protein, 17 aa, Artificial Sequence
  Synthetic
VISGSGGNTYYADSVKG

SEQ ID NO: 420 - protein, 12 aa, Artificial Sequence
  Synthetic
VRGIGTFYGMDV

SEQ ID NO: 421 - protein, 16 aa, Artificial Sequence
  Synthetic
RSSQSLLHSNKYNYLD

SEQ ID NO: 422 - protein, 7 aa, Artificial Sequence
  Synthetic
LGSNRAS

SEQ ID NO: 423 - protein, 9 aa, Artificial Sequence
  Synthetic
MQALQTPLS

SEQ ID NO: 424 - protein, 121 aa, Artificial Sequence
  Synthetic
EVQLLESGGGLVQPGGSLRLSCAASGFTFSHYAMSWVRQTPGKCLEWVSVISGSGGNTYYADSVKGRFTISRDNSKNTLYLQMNSLRAEDTAVYYCAKVRGIGTFYGMDVWGQGTTVTVSS

SEQ ID NO: 425 - protein, 112 aa, Artificial Sequence; identical to SEQ ID NO: 414
  Synthetic

SEQ ID NO: 426 - protein, 248 aa, Artificial Sequence
  Synthetic
EVQLLESGGGLVQPGGSLRLSCAASGFTFSHYAMSWVRQTPGKCLEWVSVISGSGGNTYYADSVKGRFTISRDNSKNTLYLQMNSLRAEDTAVYYCAKVRGIGTFYGMDVWGQGTTVTVSSGGGGSGGGGSGGGGSDIVMTQTPLSLPVTPGEPASISCRSSQSLLHSNKYNYLDWYLQKPGQSPQLLIYLGSNRASGVPDRFSGSGSGTDFTLKISRVEAEDVGVYYCMQALQTPLSFGCGTKVEIK

SEQ ID NO: 427 - protein, 503 aa, Artificial Sequence
  Synthetic
EVQLLESGGGLVQPGGSLRLSCAASGFTFSHYAMSWVRQTPGKCLEWVSVISGSGGNTYYADSVKGRFTISRDNSKNTLYLQMNSLRAEDTAVYYCAKVRGIGTFYGMDVWGQGTTVTVSSGGGGSGGGGSGGGGSDIVMTQTPLSLPVTPGEPASISCRSSQSLLHSNKYNYLDWYLQKPGQSPQLLIYLGSNRASGVPDRFSGSGSGTDFTLKISRVEAEDVGVYYCMQALQTPLSFGCGTKVEIKSGGGGSEVQLVESGGGLVQPGGSLKLSCAASGFTFNKYAMNWVRQAPGKGLEWVARIRSKYNNYATYYADSVKDRFTISRDDSKNTAYLQMNNLKTEDTAVYYCVRHGNFGNSYISYWAYWGQGTLVTVSSGGGGSGGGGSGGGGSQTVVTQEPSLTVSPGGTVTLTCGSSTGAVTSGNYPNWVQQKPGQAPRGLIGGTKFLAPGTPARFSGSLLGGKAALTLSGVQPEDEAEYYCVLWYSNRWVFGGGTKLTVL

SEQ ID NO: 428 - protein, 991 aa, Artificial Sequence
  Synthetic
EVQLLESGGGLVQPGGSLRLSCAASGFTFSHYAMSWVRQTPGKCLEWVSVISGSGGNTYYADSVKGRFTISRDNSKNTLYLQMNSLRAEDTAVYYCAKVRGIGTFYGMDVWGQGTTVTVSSGGGGSGGGGSGGGGSDIVMTQTPLSLPVTPGEPASISCRSSQSLLHSNKYNYLDWYLQKPGQSPQLLIYLGSNRASGVPDRFSGSGSGTDFTLKISRVEAEDVGVYYCMQALQTPLSFGCGTKVEIKSGGGGSEVQLVESGGGLVQPGGSLKLSCAASGFTFNKYAMNWVRQAPGKGLEWVARIRSKYNNYATYYADSVKDRFTISRDDSKNTAYLQMNNLKTEDTAVYYCVRHGNFGNSYISYWAYWGQGTLVTVSSGGGGSGGGGSGGGGSQTVVTQEPSLTVSPGGTVTLTCGSSTGAVTSGNYPNWVQQKPGQAPRGLIGGTKFLAPGTPARFSGSLLGGKAALTLSGVQPEDEAEYYCVLWYSNRWVFGGGTKLTVLGGGGDKTHTCPPCPAPELLGGPSVFLFPPKPKDTLMISRTPEVTCVVVDVSHEDPEVKFNWYVDGVEVHNAKTKPCEEQYGSTYRCVSVLTVLHQDWLNGKEYKCKVSNKALPAPIEKTISKAKGQPREPQVYTLPPSREEMTKNQVSLTCLVKGFYPSDIAVEWESNGQPENNYKTTPPVLDSDGSFFLYSKLTVDKSRWQQGNVFSCSVMHEALHNHYTQKSLSLSPGKGGGGSGGGGSGGGGSGGGGSGGGGSGGGGSDKTHTCPPCPAPELLGGPSVFLFPPKPKDTLMISRTPEVTCVVVDVSHEDPEVKFNWYVDGVEVHNAKTKPCEEQYGSTYRCVSVLTVLHQDWLNGKEYKCKVSNKALPAPIEKTISKAKGQPREPQVYTLPPSREEMTKNQVSLTCLVKGFYPSDIAVEWESNGQPENNYKTTPPVLDSDGSFFLYSKLTVDKSRWQQGNVFSCSVMHEALHNHYTQKSLSLSPGK

SEQ ID NO: 429 - protein, 5 aa, Artificial Sequence
  Synthetic
HYAMS

SEQ ID NO: 430 - protein, 17 aa, Artificial Sequence
  Synthetic
VIDGSGGSTYYADSVKG

SEQ ID NO: 431 - protein, 12 aa, Artificial Sequence
  Synthetic
VRGIGTFYGMDV

SEQ ID NO: 432 - protein, 16 aa, Artificial Sequence
  Synthetic
RSSQSLLHSNLYNYLD

SEQ ID NO: 433 - protein, 7 aa, Artificial Sequence
  Synthetic
LGSNRAS

SEQ ID NO: 434 - protein, 9 aa, Artificial Sequence
  Synthetic
MQALQTPLS

SEQ ID NO: 435 - protein, 121 aa, Artificial Sequence
  Synthetic
EVQLLESGGGLVQPGGSLRLSCAASGFTFSHYAMSWVRQTPGKCLEWVSVIDGSGGSTYYADSVKGRFTISRDNSKNTLYLQMNSLRAEDTAVYYCAKVRGIGTFYGMDVWGQGTTVTVSS

SEQ ID NO: 436 - protein, 112 aa, Artificial Sequence
  Synthetic
DIVMTQTPLSLPVTPGEPASISCRSSQSLLHSNLYNYLDWYLQKPGQSPQLLIYLGSNRASGVPDRFSGSGSGTDFTLKISRVEAEDVGVYYCMQALQTPLSFGCGTKVEIK

SEQ ID NO: 437 - protein, 248 aa, Artificial Sequence
  Synthetic
EVQLLESGGGLVQPGGSLRLSCAASGFTFSHYAMSWVRQTPGKCLEWVSVIDGSGGSTYYADSVKGRFTISRDNSKNTLYLQMNSLRAEDTAVYYCAKVRGIGTFYGMDVWGQGTTVTVSSGGGGSGGGGSGGGGSDIVMTQTPLSLPVTPGEPASISCRSSQSLLHSNLYNYLDWYLQKPGQSPQLLIYLGSNRASGVPDRFSGSGSGTDFTLKISRVEAEDVGVYYCMQALQTPLSFGCGTKVEIK

SEQ ID NO: 438 - protein, 503 aa, Artificial Sequence
  Synthetic
EVQLLESGGGLVQPGGSLRLSCAASGFTFSHYAMSWVRQTPGKCLEWVSVIDGSGGSTYYADSVKGRFTISRDNSKNTLYLQMNSLRAEDTAVYYCAKVRGIGTFYGMDVWGQGTTVTVSSGGGGSGGGGSGGGGSDIVMTQTPLSLPVTPGEPASISCRSSQSLLHSNLYNYLDWYLQKPGQSPQLLIYLGSNRASGVPDRFSGSGSGTDFTLKISRVEAEDVGVYYCMQALQTPLSFGCGTKVEIKSGGGGSEVQLVESGGGLVQPGGSLKLSCAASGFTFNKYAMNWVRQAPGKGLEWVARIRSKYNNYATYYADSVKDRFTISRDDSKNTAYLQMNNLKTEDTAVYYCVRHGNFGNSYISYWAYWGQGTLVTVSSGGGGSGGGGSGGGGSQTVVTQEPSLTVSPGGTVTLTCGSSTGAVTSGNYPNWVQQKPGQAPRGLIGGTKFLAPGTPARFSGSLLGGKAALTLSGVQPEDEAEYYCVLWYSNRWVFGGGTKLTVL

SEQ ID NO: 439 - protein, 991 aa, Artificial Sequence
  Synthetic
EVQLLESGGGLVQPGGSLRLSCAASGFTFSHYAMSWVRQTPGKCLEWVSVIDGSGGSTYYADSVKGRFTISRDNSKNTLYLQMNSLRAEDTAVYYCAKVRGIGTFYGMDVWGQGTTVTVSSGGGGSGGGGSGGGGSDIVMTQTPLSLPVTPGEPASISCRSSQSLLHSNLYNYLDWYLQKPGQSPQLLIYLGSNRASGVPDRFSGSGSGTDFTLKISRVEAEDVGVYYCMQALQTPLSFGCGTKVEIKSGGGGSEVQLVESGGGLVQPGGSLKLSCAASGFTFNKYAMNWVRQAPGKGLEWVARIRSKYNNYATYYADSVKDRFTISRDDSKNTAYLQMNNLKTEDTAVYYCVRHGNFGNSYISYWAYWGQGTLVTVSSGGGGSGGGGSGGGGSQTVVTQEPSLTVSPGGTVTLTCGSSTGAVTSGNYPNWVQQKPGQAPRGLIGGTKFLAPGTPARFSGSLLGGKAALTLSGVQPEDEAEYYCVLWYSNRWVFGGGTKLTVLGGGGDKTHTCPPCPAPELLGGPSVFLFPPKPKDTLMISRTPEVTCVVVDVSHEDPEVKFNWYVDGVEVHNAKTKPCEEQYGSTYRCVSVLTVLHQDWLNGKEYKCKVSNKALPAPIEKTISKAKGQPREPQVYTLPPSREEMTKNQVSLTCLVKGFYPSDIAVEWESNGQPENNYKTTPPVLDSDGSFFLYSKLTVDKSRWQQGNVFSCSVMHEALHNHYTQKSLSLSPGKGGGGSGGGGSGGGGSGGGGSGGGGSGGGGSDKTHTCPPCPAPELLGGPSVFLFPPKPKDTLMISRTPEVTCVVVDVSHEDPEVKFNWYVDGVEVHNAKTKPCEEQYGSTYRCVSVLTVLHQDWLNGKEYKCKVSNKALPAPIEKTISKAKGQPREPQVYTLPPSREEMTKNQVSLTCLVKGFYPSDIAVEWESNGQPENNYKTTPPVLDSDGSFFLYSKLTVDKSRWQQGNVFSCSVMHEALHNHYTQKSLSLSPGK

SEQ ID NO: 440 - protein, 5 aa, Artificial Sequence
  Synthetic
HYAMN

SEQ ID NO: 441 - protein, 17 aa, Artificial Sequence
  Synthetic
AVSGGGDRTLYADAVKG

SEQ ID NO: 442 - protein, 10 aa, Artificial Sequence
  Synthetic
LRGFYYGMDV

SEQ ID NO: 443 - protein, 16 aa, Artificial Sequence
  Synthetic
RSSQSLLHSNKYNYLD

SEQ ID NO: 444 - protein, 7 aa, Artificial Sequence
  Synthetic
LGSNRAS

SEQ ID NO: 445 - protein, 8 aa, Artificial Sequence
  Synthetic
MQALQTLT

SEQ ID NO: 446 - protein, 119 aa, Artificial Sequence
  Synthetic
EVQLLESGGGLVQPGGSLRLSCAASGFTFSHYAMNWVRQAPGKCLEWVSAVSGGGDRTLYADAVKGRFTISRDNSKNTLFLQMNSLRAEDTAIYYCARLRGFYYGMDVWGQGTAVTVSS

SEQ ID NO: 447 - protein, 111 aa, Artificial Sequence
  Synthetic
DIVMTQSPLSLPVTPGEPASISCRSSQSLLHSNKYNYLDWYLQKPGQSPQLLIYLGSNRASGVPDRFSGSGSGTDFTLKISRVEAEDVGVYYCMQALQTLTFGCGTKVDIK

SEQ ID NO: 448 - protein, 245 aa, Artificial Sequence
  Synthetic
EVQLLESGGGLVQPGGSLRLSCAASGFTFSHYAMNWVRQAPGKCLEWVSAVSGGGDRTLYADAVKGRFTISRDNSKNTLFLQMNSLRAEDTAIYYCARLRGFYYGMDVWGQGTAVTVSSGGGGSGGGGSGGGGSDIVMTQSPLSLPVTPGEPASISCRSSQSLLHSNKYNYLDWYLQKPGQSPQLLIYLGSNRASGVPDRFSGSGSGTDFTLKISRVEAEDVGVYYCMQALQTLTFGCGTKVDIK

SEQ ID NO: 449 - protein, 500 aa, Artificial Sequence
  Synthetic
EVQLLESGGGLVQPGGSLRLSCAASGFTFSHYAMNWVRQAPGKCLEWVSAVSGGGDRTLYADAVKGRFTISRDNSKNTLFLQMNSLRAEDTAIYYCARLRGFYYGMDVWGQGTAVTVSSGGGGSGGGGSGGGGSDIVMTQSPLSLPVTPGEPASISCRSSQSLLHSNKYNYLDWYLQKPGQSPQLLIYLGSNRASGVPDRFSGSGSGTDFTLKISRVEAEDVGVYYCMQALQTLTFGCGTKVDIKSGGGGSEVQLVESGGGLVQPGGSLKLSCAASGFTFNKYAMNWVRQAPGKGLEWVARIRSKYNNYATYYADSVKDRFTISRDDSKNTAYLQMNNLKTEDTAVYYCVRHGNFGNSYISYWAYWGQGTLVTVSSGGGGSGGGGSGGGGSQTVVTQEPSLTVSPGGTVTLTCGSSTGAVTSGNYPNWVQQKPGQAPRGLIGGTKFLAPGTPARFSGSLLGGKAALTLSGVQPEDEAEYYCVLWYSNRWVFGGGTKLTVL

SEQ ID NO: 450 - protein, 988 aa, Artificial Sequence
  Synthetic
EVQLLESGGGLVQPGGSLRLSCAASGFTFSHYAMNWVRQAPGKCLEWVSAVSGGGDRTLYADAVKGRFTISRDNSKNTLFLQMNSLRAEDTAIYYCARLRGFYYGMDVWGQGTAVTVSSGGGGSGGGGSGGGGSDIVMTQSPLSLPVTPGEPASISCRSSQSLLHSNKYNYLDWYLQKPGQSPQLLIYLGSNRASGVPDRFSGSGSGTDFTLKISRVEAEDVGVYYCMQALQTLTFGCGTKVDIKSGGGGSEVQLVESGGGLVQPGGSLKLSCAASGFTFNKYAMNWVRQAPGKGLEWVARIRSKYNNYATYYADSVKDRFTISRDDSKNTAYLQMNNLKTEDTAVYYCVRHGNFGNSYISYWAYWGQGTLVTVSSGGGGSGGGGSGGGGSQTVVTQEPSLTVSPGGTVTLTCGSSTGAVTSGNYPNWVQQKPGQAPRGLIGGTKFLAPGTPARFSGSLLGGKAALTLSGVQPEDEAEYYCVLWYSNRWVFGGGTKLTVLGGGGDKTHTCPPCPAPELLGGPSVFLFPPKPKDTLMISRTPEVTCVVVDVSHEDPEVKFNWYVDGVEVHNAKTKPCEEQYGSTYRCVSVLTVLHQDWLNGKEYKCKVSNKALPAPIEKTISKAKGQPREPQVYTLPPSREEMTKNQVSLTCLVKGFYPSDIAVEWESNGQPENNYKTTPPVLDSDGSFFLYSKLTVDKSRWQQGNVFSCSVMHEALHNHYTQKSLSLSPGKGGGGSGGGGSGGGGSGGGGSGGGGSGGGGSDKTHTCPPCPAPELLGGPSVFLFPPKPKDTLMISRTPEVTCVVVDVSHEDPEVKFNWYVDGVEVHNAKTKPCEEQYGSTYRCVSVLTVLHQDWLNGKEYKCKVSNKALPAPIEKTISKAKGQPREPQVYTLPPSREEMTKNQVSLTCLVKGFYPSDIAVEWESNGQPENNYKTTPPVLDSDGSFFLYSKLTVDKSRWQQGNVFSCSVMHEALHNHYTQKSLSLSPGK

SEQ ID NO: 451 - protein, 5 aa, Artificial Sequence
  Synthetic
HYAMS

SEQ ID NO: 452 - protein, 17 aa, Artificial Sequence
  Synthetic
AISGGGDATFYADAVKG

SEQ ID NO: 453 - protein, 10 aa, Artificial Sequence
  Synthetic
DRGYYYGMDV

SEQ ID NO: 454 - protein, 16 aa, Artificial Sequence
  Synthetic
RSSQSLLRTNKYNYLD

SEQ ID NO: 455 - protein, 7 aa, Artificial Sequence
  Synthetic
LGSNRAS

SEQ ID NO: 456 - protein, 9 aa, Artificial Sequence
  Synthetic
MQALQSPYT

SEQ ID NO: 457 - protein, 119 aa, Artificial Sequence
  Synthetic
EVQLLESGGGLVQPGGSLRLSCAASGFTFSHYAMSWVRQAPGKCLEWVSAISGGGDATFYADAVKGRFTFSRDNSRNTLYLQMNSLRAEDTAVYYCVKDRGYYYGMDVWGQGTTVTVSS

SEQ ID NO: 458 - protein, 112 aa, Artificial Sequence
  Synthetic
DIVMTQTPLSLPVTPGEPASISCRSSQSLLRTNKYNYLDWYLQKPGQSPQLLIYLGSNRASGVPDRFSGSGSGTDFTLKISRVEAEDVGVYYCMQALQSPYTFGCGTKLEIK

SEQ ID NO: 459 - protein, 246 aa, Artificial Sequence
  Synthetic
EVQLLESGGGLVQPGGSLRLSCAASGFTFSHYAMSWVRQAPGKCLEWVSAISGGGDATFYADAVKGRFTFSRDNSRNTLYLQMNSLRAEDTAVYYCVKDRGYYYGMDVWGQGTTVTVSSGGGGSGGGGSGGGGSDIVMTQTPLSLPVTPGEPASISCRSSQSLLRTNKYNYLDWYLQKPGQSPQLLIYLGSNRASGVPDRFSGSGSGTDFTLKISRVEAEDVGVYYCMQALQSPYTFGCGTKLEIK

SEQ ID NO: 460 - protein, 501 aa, Artificial Sequence
  Synthetic
EVQLLESGGGLVQPGGSLRLSCAASGFTFSHYAMSWVRQAPGKCLEWVSAISGGGDATFYADAVKGRFTFSRDNSRNTLYLQMNSLRAEDTAVYYCVKDRGYYYGMDVWGQGTTVTVSSGGGGSGGGGSGGGGSDIVMTQTPLSLPVTPGEPASISCRSSQSLLRTNKYNYLDWYLQKPGQSPQLLIYLGSNRASGVPDRFSGSGSGTDFTLKISRVEAEDVGVYYCMQALQSPYTFGCGTKLEIKSGGGGSEVQLVESGGGLVQPGGSLKLSCAASGFTFNKYAMNWVRQAPGKGLEWVARIRSKYNNYATYYADSVKDRFTISRDDSKNTAYLQMNNLKTEDTAVYYCVRHGNFGNSYISYWAYWGQGTLVTVSSGGGGSGGGGSGGGGSQTVVTQEPSLTVSPGGTVTLTCGSSTGAVTSGNYPNWVQQKPGQAPRGLIGGTKFLAPGTPARFSGSLLGGKAALTLSGVQPEDEAEYYCVLWYSNRWVFGGGTKLTVL

SEQ ID NO: 461 - protein, 989 aa, Artificial Sequence
  Synthetic
EVQLLESGGGLVQPGGSLRLSCAASGFTFSHYAMSWVRQAPGKCLEWVSAISGGGDATFYADAVKGRFTFSRDNSRNTLYLQMNSLRAEDTAVYYCVKDRGYYYGMDVWGQGTTVTVSSGGGGSGGGGSGGGGSDIVMTQTPLSLPVTPGEPASISCRSSQSLLRTNKYNYLDWYLQKPGQSPQLLIYLGSNRASGVPDRFSGSGSGTDFTLKISRVEAEDVGVYYCMQALQSPYTFGCGTKLEIKSGGGGSEVQLVESGGGLVQPGGSLKLSCAASGFTFNKYAMNWVRQAPGKGLEWVARIRSKYNNYATYYADSVKDRFTISRDDSKNTAYLQMNNLKTEDTAVYYCVRHGNFGNSYISYWAYWGQGTLVTVSSGGGGSGGGGSGGGGSQTVVTQEPSLTVSPGGTVTLTCGSSTGAVTSGNYPNWVQQKPGQAPRGLIGGTKFLAPGTPARFSGSLLGGKAALTLSGVQPEDEAEYYCVLWYSNRWVFGGGTKLTVLGGGGDKTHTCPPCPAPELLGGPSVFLFPPKPKDTLMISRTPEVTCVVVDVSHEDPEVKFNWYVDGVEVHNAKTKPCEEQYGSTYRCVSVLTVLHQDWLNGKEYKCKVSNKALPAPIEKTISKAKGQPREPQVYTLPPSREEMTKNQVSLTCLVKGFYPSDIAVEWESNGQPENNYKTTPPVLDSDGSFFLYSKLTVDKSRWQQGNVFSCSVMHEALHNHYTQKSLSLSPGKGGGGSGGGGSGGGGSGGGGSGGGGSGGGGSDKTHTCPPCPAPELLGGPSVFLFPPKPKDTLMISRTPEVTCVVVDVSHEDPEVKFNWYVDGVEVHNAKTKPCEEQYGSTYRCVSVLTVLHQDWLNGKEYKCKVSNKALPAPIEKTISKAKGQPREPQVYTLPPSREEMTKNQVSLTCLVKGFYPSDIAVEWESNGQPENNYKTTPPVLDSDGSFFLYSKLTVDKSRWQQGNVFSCSVMHEALHNHYTQKSLSLSPGK

SEQ ID NO: 462 - protein, 5 aa, Artificial Sequence
  Synthetic
HYAMS

SEQ ID NO: 463 - protein, 17 aa, Artificial Sequence
  Synthetic
AISGGGDTTFYADSVKG

SEQ ID NO: 464 - protein, 10 aa, Artificial Sequence
  Synthetic
DRGYYYGMDV

SEQ ID NO: 465 - protein, 16 aa, Artificial Sequence
  Synthetic
RSSQSLLRTNLYNYLD

SEQ ID NO: 466 - protein, 7 aa, Artificial Sequence
  Synthetic
LGSNRAS

SEQ ID NO: 467 - protein, 9 aa, Artificial Sequence
  Synthetic
MQALQSPYT

SEQ ID NO: 468 - protein, 119 aa, Artificial Sequence; identical to SEQ ID NO: 270
  Synthetic

SEQ ID NO: 469 - protein, 112 aa, Artificial Sequence
  Synthetic
DIVMTQTPLSLPVTPGEPASISCRSSQSLLRTNLYNYLDWYLQKPGQSPQLLIYLGSNRASGVPDRFSGSGSGTDFTLKISRVEAEDVGVYYCMQALQSPYTFGCGTKLEIK

SEQ ID NO: 470 - protein, 246 aa, Artificial Sequence
  Synthetic
EVQLLESGGGLVQPGGSLRLSCAASGFTFSHYAMSWVRQAPGKCLEWVSAISGGGDTTFYADSVKGRFTFSRDNSRNTLYLQMNSLRAEDTAVYYCVKDRGYYYGMDVWGQGTTVTVSSGGGGSGGGGSGGGGSDIVMTQTPLSLPVTPGEPASISCRSSQSLLRTNLYNYLDWYLQKPGQSPQLLIYLGSNRASGVPDRFSGSGSGTDFTLKISRVEAEDVGVYYCMQALQSPYTFGCGTKLEIK

SEQ ID NO: 471 - protein, 501 aa, Artificial Sequence
  Synthetic
EVQLLESGGGLVQPGGSLRLSCAASGFTFSHYAMSWVRQAPGKCLEWVSAISGGGDTTFYADSVKGRFTFSRDNSRNTLYLQMNSLRAEDTAVYYCVKDRGYYYGMDVWGQGTTVTVSSGGGGSGGGGSGGGGSDIVMTQTPLSLPVTPGEPASISCRSSQSLLRTNLYNYLDWYLQKPGQSPQLLIYLGSNRASGVPDRFSGSGSGTDFTLKISRVEAEDVGVYYCMQALQSPYTFGCGTKLEIKSGGGGSEVQLVESGGGLVQPGGSLKLSCAASGFTFNKYAMNWVRQAPGKGLEWVARIRSKYNNYATYYADSVKDRFTISRDDSKNTAYLQMNNLKTEDTAVYYCVRHGNFGNSYISYWAYWGQGTLVTVSSGGGGSGGGGSGGGGSQTVVTQEPSLTVSPGGTVTLTCGSSTGAVTSGNYPNWVQQKPGQAPRGLIGGTKFLAPGTPARFSGSLLGGKAALTLSGVQPEDEAEYYCVLWYSNRWVFGGGTKLTVL

SEQ ID NO: 472 - protein, 989 aa, Artificial Sequence
  Synthetic
EVQLLESGGGLVQPGGSLRLSCAASGFTFSHYAMSWVRQAPGKCLEWVSAISGGGDTTFYADSVKGRFTFSRDNSRNTLYLQMNSLRAEDTAVYYCVKDRGYYYGMDVWGQGTTVTVSSGGGGSGGGGSGGGGSDIVMTQTPLSLPVTPGEPASISCRSSQSLLRTNLYNYLDWYLQKPGQSPQLLIYLGSNRASGVPDRFSGSGSGTDFTLKISRVEAEDVGVYYCMQALQSPYTFGCGTKLEIKSGGGGSEVQLVESGGGLVQPGGSLKLSCAASGFTFNKYAMNWVRQAPGKGLEWVARIRSKYNNYATYYADSVKDRFTISRDDSKNTAYLQMNNLKTEDTAVYYCVRHGNFGNSYISYWAYWGQGTLVTVSSGGGGSGGGGSGGGGSQTVVTQEPSLTVSPGGTVTLTCGSSTGAVTSGNYPNWVQQKPGQAPRGLIGGTKFLAPGTPARFSGSLLGGKAALTLSGVQPEDEAEYYCVLWYSNRWVFGGGTKLTVLGGGGDKTHTCPPCPAPELLGGPSVFLFPPKPKDTLMISRTPEVTCVVVDVSHEDPEVKFNWYVDGVEVHNAKTKPCEEQYGSTYRCVSVLTVLHQDWLNGKEYKCKVSNKALPAPIEKTISKAKGQPREPQVYTLPPSREEMTKNQVSLTCLVKGFYPSDIAVEWESNGQPENNYKTTPPVLDSDGSFFLYSKLTVDKSRWQQGNVFSCSVMHEALHNHYTQKSLSLSPGKGGGGSGGGGSGGGGSGGGGSGGGGSGGGGSDKTHTCPPCPAPELLGGPSVFLFPPKPKDTLMISRTPEVTCVVVDVSHEDPEVKFNWYVDGVEVHNAKTKPCEEQYGSTYRCVSVLTVLHQDWLNGKEYKCKVSNKALPAPIEKTISKAKGQPREPQVYTLPPSREEMTKNQVSLTCLVKGFYPSDIAVEWESNGQPENNYKTTPPVLDSDGSFFLYSKLTVDKSRWQQGNVFSCSVMHEALHNHYTQKSLSLSPGK

SEQ ID NO: 473 - protein, 5 aa, Artificial Sequence
  Synthetic
NYAMS

SEQ ID NO: 474 - protein, 17 aa, Artificial Sequence
  Synthetic
TISGGGDHSYNADAVKG

SEQ ID NO: 475 - protein, 10 aa, Artificial Sequence
  Synthetic
QRGYYYGMDV

SEQ ID NO: 476 - protein, 16 aa, Artificial Sequence
  Synthetic
RSSQSLLHSNKYNYLD

SEQ ID NO: 477 - protein, 7 aa, Artificial Sequence
  Synthetic
LGSDRAS

SEQ ID NO: 478 - protein, 8 aa, Artificial Sequence
  Synthetic
MHALQPLT

SEQ ID NO: 479 - protein, 119 aa, Artificial Sequence
  Synthetic
EVQLLESGGGLVQPGGSLRLSCAASGFTFSNYAMSWVRQAPGKCLEWVSTISGGGDHSYNADAVKGRFTISRDNSKNTLYLQMNSLRAEDTAVYYCAKQRGYYYGMDVWGQGTTVTVSS

SEQ ID NO: 480 - protein, 111 aa, Artificial Sequence
  Synthetic
DIVLTQSPLSLPVTPGEPASISCRSSQSLLHSNKYNYLDWYLQKPGQSPQLLVYLGSDRASGVPDRFSGSGSGTDFTLKISRVEAEDVGVYYCMHALQPLTFGCGTKVEIK

SEQ ID NO: 481 - protein, 245 aa, Artificial Sequence
  Synthetic
EVQLLESGGGLVQPGGSLRLSCAASGFTFSNYAMSWVRQAPGKCLEWVSTISGGGDHSYNADAVKGRFTISRDNSKNTLYLQMNSLRAEDTAVYYCAKQRGYYYGMDVWGQGTTVTVSSGGGGSGGGGSGGGGSDIVLTQSPLSLPVTPGEPASISCRSSQSLLHSNKYNYLDWYLQKPGQSPQLLVYLGSDRASGVPDRFSGSGSGTDFTLKISRVEAEDVGVYYCMHALQPLTFGCGTKVEIK

SEQ ID NO: 482 - protein, 500 aa, Artificial Sequence
  Synthetic
EVQLLESGGGLVQPGGSLRLSCAASGFTFSNYAMSWVRQAPGKCLEWVSTISGGGDHSYNADAVKGRFTISRDNSKNTLYLQMNSLRAEDTAVYYCAKQRGYYYGMDVWGQGTTVTVSSGGGGSGGGGSGGGGSDIVLTQSPLSLPVTPGEPASISCRSSQSLLHSNKYNYLDWYLQKPGQSPQLLVYLGSDRASGVPDRFSGSGSGTDFTLKISRVEAEDVGVYYCMHALQPLTFGCGTKVEIKSGGGGSEVQLVESGGGLVQPGGSLKLSCAASGFTFNKYAMNWVRQAPGKGLEWVARIRSKYNNYATYYADSVKDRFTISRDDSKNTAYLQMNNLKTEDTAVYYCVRHGNFGNSYISYWAYWGQGTLVTVSSGGGGSGGGGSGGGGSQTVVTQEPSLTVSPGGTVTLTCGSSTGAVTSGNYPNWVQQKPGQAPRGLIGGTKFLAPGTPARFSGSLLGGKAALTLSGVQPEDEAEYYCVLWYSNRWVFGGGTKLTVL

SEQ ID NO: 483 - protein, 988 aa, Artificial Sequence
  Synthetic
EVQLLESGGGLVQPGGSLRLSCAASGFTFSNYAMSWVRQAPGKCLEWVSTISGGGDHSYNADAVKGRFTISRDNSKNTLYLQMNSLRAEDTAVYYCAKQRGYYYGMDVWGQGTTVTVSSGGGGSGGGGSGGGGSDIVLTQSPLSLPVTPGEPASISCRSSQSLLHSNKYNYLDWYLQKPGQSPQLLVYLGSDRASGVPDRFSGSGSGTDFTLKISRVEAEDVGVYYCMHALQPLTFGCGTKVEIKSGGGGSEVQLVESGGGLVQPGGSLKLSCAASGFTFNKYAMNWVRQAPGKGLEWVARIRSKYNNYATYYADSVKDRFTISRDDSKNTAYLQMNNLKTEDTAVYYCVRHGNFGNSYISYWAYWGQGTLVTVSSGGGGSGGGGSGGGGSQTVVTQEPSLTVSPGGTVTLTCGSSTGAVTSGNYPNWVQQKPGQAPRGLIGGTKFLAPGTPARFSGSLLGGKAALTLSGVQPEDEAEYYCVLWYSNRWVFGGGTKLTVLGGGGDKTHTCPPCPAPELLGGPSVFLFPPKPKDTLMISRTPEVTCVVVDVSHEDPEVKFNWYVDGVEVHNAKTKPCEEQYGSTYRCVSVLTVLHQDWLNGKEYKCKVSNKALPAPIEKTISKAKGQPREPQVYTLPPSREEMTKNQVSLTCLVKGFYPSDIAVEWESNGQPENNYKTTPPVLDSDGSFFLYSKLTVDKSRWQQGNVFSCSVMHEALHNHYTQKSLSLSPGKGGGGSGGGGSGGGGSGGGGSGGGGSGGGGSDKTHTCPPCPAPELLGGPSVFLFPPKPKDTLMISRTPEVTCVVVDVSHEDPEVKFNWYVDGVEVHNAKTKPCEEQYGSTYRCVSVLTVLHQDWLNGKEYKCKVSNKALPAPIEKTISKAKGQPREPQVYTLPPSREEMTKNQVSLTCLVKGFYPSDIAVEWESNGQPENNYKTTPPVLDSDGSFFLYSKLTVDKSRWQQGNVFSCSVMHEALHNHYTQKSLSLSPGK

SEQ ID NO: 484 - protein, 5 aa, Artificial Sequence
  Synthetic
NYAMS

SEQ ID NO: 485 - protein, 17 aa, Artificial Sequence
  Synthetic
TISGGGDHSYNADSVKG

SEQ ID NO: 486 - protein, 10 aa, Artificial Sequence
  Synthetic
QRGYYYGMDV

SEQ ID NO: 487 - protein, 16 aa, Artificial Sequence
  Synthetic
RSSQSLLHSNKYNYLD

SEQ ID NO: 488 - protein, 7 aa, Artificial Sequence
  Synthetic
LGSDRAS

SEQ ID NO: 489 - protein, 8 aa, Artificial Sequence
  Synthetic
MHALQPLT

SEQ ID NO: 490 - protein, 119 aa, Artificial Sequence
  Synthetic
EVQLLESGGGLVQPGGSLRLSCAASGFTFSNYAMSWVRQAPGKCLEWVSTISGGGDHSYNADSVKGRFTISRDNSKNTLYLQMNSLRAEDTAVYYCAKQRGYYYGMDVWGQGTTVTVSS

SEQ ID NO: 491 - protein, 111 aa, Artificial Sequence; identical to SEQ ID NO: 480
  Synthetic

SEQ ID NO: 492 - protein, 245 aa, Artificial Sequence
  Synthetic
EVQLLESGGGLVQPGGSLRLSCAASGFTFSNYAMSWVRQAPGKCLEWVSTISGGGDHSYNADSVKGRFTISRDNSKNTLYLQMNSLRAEDTAVYYCAKQRGYYYGMDVWGQGTTVTVSSGGGGSGGGGSGGGGSDIVLTQSPLSLPVTPGEPASISCRSSQSLLHSNKYNYLDWYLQKPGQSPQLLVYLGSDRASGVPDRFSGSGSGTDFTLKISRVEAEDVGVYYCMHALQPLTFGCGTKVEIK

SEQ ID NO: 493 - protein, 500 aa, Artificial Sequence
  Synthetic
EVQLLESGGGLVQPGGSLRLSCAASGFTFSNYAMSWVRQAPGKCLEWVSTISGGGDHSYNADSVKGRFTISRDNSKNTLYLQMNSLRAEDTAVYYCAKQRGYYYGMDVWGQGTTVTVSSGGGGSGGGGSGGGGSDIVLTQSPLSLPVTPGEPASISCRSSQSLLHSNKYNYLDWYLQKPGQSPQLLVYLGSDRASGVPDRFSGSGSGTDFTLKISRVEAEDVGVYYCMHALQPLTFGCGTKVEIKSGGGGSEVQLVESGGGLVQPGGSLKLSCAASGFTFNKYAMNWVRQAPGKGLEWVARIRSKYNNYATYYADSVKDRFTISRDDSKNTAYLQMNNLKTEDTAVYYCVRHGNFGNSYISYWAYWGQGTLVTVSSGGGGSGGGGSGGGGSQTVVTQEPSLTVSPGGTVTLTCGSSTGAVTSGNYPNWVQQKPGQAPRGLIGGTKFLAPGTPARFSGSLLGGKAALTLSGVQPEDEAEYYCVLWYSNRWVFGGGTKLTVL

SEQ ID NO: 494 - protein, 988 aa, Artificial Sequence
  Synthetic
EVQLLESGGGLVQPGGSLRLSCAASGFTFSNYAMSWVRQAPGKCLEWVSTISGGGDHSYNADSVKGRFTISRDNSKNTLYLQMNSLRAEDTAVYYCAKQRGYYYGMDVWGQGTTVTVSSGGGGSGGGGSGGGGSDIVLTQSPLSLPVTPGEPASISCRSSQSLLHSNKYNYLDWYLQKPGQSPQLLVYLGSDRASGVPDRFSGSGSGTDFTLKISRVEAEDVGVYYCMHALQPLTFGCGTKVEIKSGGGGSEVQLVESGGGLVQPGGSLKLSCAASGFTFNKYAMNWVRQAPGKGLEWVARIRSKYNNYATYYADSVKDRFTISRDDSKNTAYLQMNNLKTEDTAVYYCVRHGNFGNSYISYWAYWGQGTLVTVSSGGGGSGGGGSGGGGSQTVVTQEPSLTVSPGGTVTLTCGSSTGAVTSGNYPNWVQQKPGQAPRGLIGGTKFLAPGTPARFSGSLLGGKAALTLSGVQPEDEAEYYCVLWYSNRWVFGGGTKLTVLGGGGDKTHTCPPCPAPELLGGPSVFLFPPKPKDTLMISRTPEVTCVVVDVSHEDPEVKFNWYVDGVEVHNAKTKPCEEQYGSTYRCVSVLTVLHQDWLNGKEYKCKVSNKALPAPIEKTISKAKGQPREPQVYTLPPSREEMTKNQVSLTCLVKGFYPSDIAVEWESNGQPENNYKTTPPVLDSDGSFFLYSKLTVDKSRWQQGNVFSCSVMHEALHNHYTQKSLSLSPGKGGGGSGGGGSGGGGSGGGGSGGGGSGGGGSDKTHTCPPCPAPELLGGPSVFLFPPKPKDTLMISRTPEVTCVVVDVSHEDPEVKFNWYVDGVEVHNAKTKPCEEQYGSTYRCVSVLTVLHQDWLNGKEYKCKVSNKALPAPIEKTISKAKGQPREPQVYTLPPSREEMTKNQVSLTCLVKGFYPSDIAVEWESNGQPENNYKTTPPVLDSDGSFFLYSKLTVDKSRWQQGNVFSCSVMHEALHNHYTQKSLSLSPGK

SEQ ID NO: 495 - protein, 5 aa, Artificial Sequence
  Synthetic
HYAMS

SEQ ID NO: 496 - protein, 17 aa, Artificial Sequence
  Synthetic
AISGGGDRTFYADAVKG

SEQ ID NO: 497 - protein, 10 aa, Artificial Sequence
  Synthetic
LRGFYYGMDV

SEQ ID NO: 498 - protein, 16 aa, Artificial Sequence
  Synthetic
RSSQSLLHSNKYNYLD

SEQ ID NO: 499 - protein, 7 aa, Artificial Sequence
  Synthetic
LGSNRAS

SEQ ID NO: 500 - protein, 9 aa, Artificial Sequence
  Synthetic
MQGTHWPHT

SEQ ID NO: 501 - protein, 119 aa, Artificial Sequence; identical to SEQ ID NO: 61
  Synthetic

SEQ ID NO: 502 - protein, 112 aa, Artificial Sequence
  Synthetic
DIVMTQSPLSLPVTPGEPASISCRSSQSLLHSNKYNYLDWYLQQPGQSPQLLIYLGSNRASGVPDRFSASGSGTDFTLKISRVEAEDVGVYYCMQGTHWPHTFGCGTKVDIK

SEQ ID NO: 503 - protein, 246 aa, Artificial Sequence
  Synthetic
EVQLLESGGGLVQPGGSLRLSCAASGFTFSHYAMSWVRQAPGKCLEWVSAISGGGDRTFYADAVKGRFTVSRDNSKNTLYLQMNSLRAEDTAVYYCAKLRGFYYGMDVWGQGTTVTVSSGGGGSGGGGSGGGGSDIVMTQSPLSLPVTPGEPASISCRSSQSLLHSNKYNYLDWYLQQPGQSPQLLIYLGSNRASGVPDRFSASGSGTDFTLKISRVEAEDVGVYYCMQGTHWPHTFGCGTKVDIK

SEQ ID NO: 504 - protein, 501 aa, Artificial Sequence
  Synthetic
EVQLLESGGGLVQPGGSLRLSCAASGFTFSHYAMSWVRQAPGKCLEWVSAISGGGDRTFYADAVKGRFTVSRDNSKNTLYLQMNSLRAEDTAVYYCAKLRGFYYGMDVWGQGTTVTVSSGGGGSGGGGSGGGGSDIVMTQSPLSLPVTPGEPASISCRSSQSLLHSNKYNYLDWYLQQPGQSPQLLIYLGSNRASGVPDRFSASGSGTDFTLKISRVEAEDVGVYYCMQGTHWPHTFGCGTKVDIKSGGGGSEVQLVESGGGLVQPGGSLKLSCAASGFTFNKYAMNWVRQAPGKGLEWVARIRSKYNNYATYYADSVKDRFTISRDDSKNTAYLQMNNLKTEDTAVYYCVRHGNFGNSYISYWAYWGQGTLVTVSSGGGGSGGGGSGGGGSQTVVTQEPSLTVSPGGTVTLTCGSSTGAVTSGNYPNWVQQKPGQAPRGLIGGTKFLAPGTPARFSGSLLGGKAALTLSGVQPEDEAEYYCVLWYSNRWVFGGGTKLTVL

SEQ ID NO: 505 - protein, 989 aa, Artificial Sequence
  Synthetic
EVQLLESGGGLVQPGGSLRLSCAASGFTFSHYAMSWVRQAPGKCLEWVSAISGGGDRTFYADAVKGRFTVSRDNSKNTLYLQMNSLRAEDTAVYYCAKLRGFYYGMDVWGQGTTVTVSSGGGGSGGGGSGGGGSDIVMTQSPLSLPVTPGEPASISCRSSQSLLHSNKYNYLDWYLQQPGQSPQLLIYLGSNRASGVPDRFSASGSGTDFTLKISRVEAEDVGVYYCMQGTHWPHTFGCGTKVDIKSGGGGSEVQLVESGGGLVQPGGSLKLSCAASGFTFNKYAMNWVRQAPGKGLEWVARIRSKYNNYATYYADSVKDRFTISRDDSKNTAYLQMNNLKTEDTAVYYCVRHGNFGNSYISYWAYWGQGTLVTVSSGGGGSGGGGSGGGGSQTVVTQEPSLTVSPGGTVTLTCGSSTGAVTSGNYPNWVQQKPGQAPRGLIGGTKFLAPGTPARFSGSLLGGKAALTLSGVQPEDEAEYYCVLWYSNRWVFGGGTKLTVLGGGGDKTHTCPPCPAPELLGGPSVFLFPPKPKDTLMISRTPEVTCVVVDVSHEDPEVKFNWYVDGVEVHNAKTKPCEEQYGSTYRCVSVLTVLHQDWLNGKEYKCKVSNKALPAPIEKTISKAKGQPREPQVYTLPPSREEMTKNQVSLTCLVKGFYPSDIAVEWESNGQPENNYKTTPPVLDSDGSFFLYSKLTVDKSRWQQGNVFSCSVMHEALHNHYTQKSLSLSPGKGGGGSGGGGSGGGGSGGGGSGGGGSGGGGSDKTHTCPPCPAPELLGGPSVFLFPPKPKDTLMISRTPEVTCVVVDVSHEDPEVKFNWYVDGVEVHNAKTKPCEEQYGSTYRCVSVLTVLHQDWLNGKEYKCKVSNKALPAPIEKTISKAKGQPREPQVYTLPPSREEMTKNQVSLTCLVKGFYPSDIAVEWESNGQPENNYKTTPPVLDSDGSFFLYSKLTVDKSRWQQGNVFSCSVMHEALHNHYTQKSLSLSPGK

SEQ ID NO: 506 - protein, 5 aa, Artificial Sequence
  Synthetic
HYAMS

SEQ ID NO: 507 - protein, 17 aa, Artificial Sequence
  Synthetic
AISGGGDRTFYADSVKG

SEQ ID NO: 508 - protein, 10 aa, Artificial Sequence
  Synthetic
LRGFYYGMDV

SEQ ID NO: 509 - protein, 16 aa, Artificial Sequence
  Synthetic
RSSQSLLHSNLYNYLD

SEQ ID NO: 510 - protein, 7 aa, Artificial Sequence
  Synthetic
LGSNRAS

SEQ ID NO: 511 - protein, 9 aa, Artificial Sequence
  Synthetic
MQGTHWPHT

SEQ ID NO: 512 - protein, 119 aa, Artificial Sequence; identical to SEQ ID NO: 50
  Synthetic

SEQ ID NO: 513 - protein, 112 aa, Artificial Sequence
  Synthetic
DIVMTQSPLSLPVTPGEPASISCRSSQSLLHSNLYNYLDWYLQQPGQSPQLLIYLGSNRASGVPDRFSASGSGTDFTLKISRVEAEDVGVYYCMQGTHWPHTFGCGTKVDIK

SEQ ID NO: 514 - protein, 246 aa, Artificial Sequence
  Synthetic
EVQLLESGGGLVQPGGSLRLSCAASGFTFSHYAMSWVRQAPGKCLEWVSAISGGGDRTFYADSVKGRFTVSRDNSKNTLYLQMNSLRAEDTAVYYCAKLRGFYYGMDVWGQGTTVTVSSGGGGSGGGGSGGGGSDIVMTQSPLSLPVTPGEPASISCRSSQSLLHSNLYNYLDWYLQQPGQSPQLLIYLGSNRASGVPDRFSASGSGTDFTLKISRVEAEDVGVYYCMQGTHWPHTFGCGTKVDIK

SEQ ID NO: 515 - protein, 501 aa, Artificial Sequence
  Synthetic
EVQLLESGGGLVQPGGSLRLSCAASGFTFSHYAMSWVRQAPGKCLEWVSAISGGGDRTFYADSVKGRFTVSRDNSKNTLYLQMNSLRAEDTAVYYCAKLRGFYYGMDVWGQGTTVTVSSGGGGSGGGGSGGGGSDIVMTQSPLSLPVTPGEPASISCRSSQSLLHSNLYNYLDWYLQQPGQSPQLLIYLGSNRASGVPDRFSASGSGTDFTLKISRVEAEDVGVYYCMQGTHWPHTFGCGTKVDIKSGGGGSEVQLVESGGGLVQPGGSLKLSCAASGFTFNKYAMNWVRQAPGKGLEWVARIRSKYNNYATYYADSVKDRFTISRDDSKNTAYLQMNNLKTEDTAVYYCVRHGNFGNSYISYWAYWGQGTLVTVSSGGGGSGGGGSGGGGSQTVVTQEPSLTVSPGGTVTLTCGSSTGAVTSGNYPNWVQQKPGQAPRGLIGGTKFLAPGTPARFSGSLLGGKAALTLSGVQPEDEAEYYCVLWYSNRWVFGGGTKLTVL

SEQ ID NO: 516 - protein, 989 aa, Artificial Sequence
  Synthetic
EVQLLESGGGLVQPGGSLRLSCAASGFTFSHYAMSWVRQAPGKCLEWVSAISGGGDRTFYADSVKGRFTVSRDNSKNTLYLQMNSLRAEDTAVYYCAKLRGFYYGMDVWGQGTTVTVSSGGGGSGGGGSGGGGSDIVMTQSPLSLPVTPGEPASISCRSSQSLLHSNLYNYLDWYLQQPGQSPQLLIYLGSNRASGVPDRFSASGSGTDFTLKISRVEAEDVGVYYCMQGTHWPHTFGCGTKVDIKSGGGGSEVQLVESGGGLVQPGGSLKLSCAASGFTFNKYAMNWVRQAPGKGLEWVARIRSKYNNYATYYADSVKDRFTISRDDSKNTAYLQMNNLKTEDTAVYYCVRHGNFGNSYISYWAYWGQGTLVTVSSGGGGSGGGGSGGGGSQTVVTQEPSLTVSPGGTVTLTCGSSTGAVTSGNYPNWVQQKPGQAPRGLIGGTKFLAPGTPARFSGSLLGGKAALTLSGVQPEDEAEYYCVLWYSNRWVFGGGTKLTVLGGGGDKTHTCPPCPAPELLGGPSVFLFPPKPKDTLMISRTPEVTCVVVDVSHEDPEVKFNWYVDGVEVHNAKTKPCEEQYGSTYRCVSVLTVLHQDWLNGKEYKCKVSNKALPAPIEKTISKAKGQPREPQVYTLPPSREEMTKNQVSLTCLVKGFYPSDIAVEWESNGQPENNYKTTPPVLDSDGSFFLYSKLTVDKSRWQQGNVFSCSVMHEALHNHYTQKSLSLSPGKGGGGSGGGGSGGGGSGGGGSGGGGSGGGGSDKTHTCPPCPAPELLGGPSVFLFPPKPKDTLMISRTPEVTCVVVDVSHEDPEVKFNWYVDGVEVHNAKTKPCEEQYGSTYRCVSVLTVLHQDWLNGKEYKCKVSNKALPAPIEKTISKAKGQPREPQVYTLPPSREEMTKNQVSLTCLVKGFYPSDIAVEWESNGQPENNYKTTPPVLDSDGSFFLYSKLTVDKSRWQQGNVFSCSVMHEALHNHYTQKSLSLSPGK

SEQ ID NO: 517 - protein, 5 aa, Artificial Sequence
  Synthetic
SYAMS

SEQ ID NO: 518 - protein, 17 aa, Artificial Sequence
  Synthetic
TVSGGGDRTYYADAVKG

SEQ ID NO: 519 - protein, 13 aa, Artificial Sequence
  Synthetic
NRGEGTTFYGMGA

SEQ ID NO: 520 - protein, 16 aa, Artificial Sequence
  Synthetic
RSSQSLLHSNLYNYLD

SEQ ID NO: 521 - protein, 7 aa, Artificial Sequence
  Synthetic
LGSNRAS

SEQ ID NO: 522 - protein, 9 aa, Artificial Sequence
  Synthetic
MQALQTPLT

SEQ ID NO: 523 - protein, 122 aa, Artificial Sequence; identical to SEQ ID NO: 83
  Synthetic

SEQ ID NO: 524 - protein, 112 aa, Artificial Sequence
  Synthetic
DIVLTQSPLSLPVTPGEPASISCRSSQSLLHSNLYNYLDWYLQKPGQSPQLLIYLGSNRASGVPDRFSGSGSGTDFTLKISRVEAEDVGVYYCMQALQTPLTFGCGTKVDIK

SEQ ID NO: 525 - protein, 249 aa, Artificial Sequence
  Synthetic
EVQLLESGGGLVQPGGSLRLSCAASGFSFNSYAMSWVRQAPGKCLEWVSTVSGGGDRTYYADAVKGRFTISRDNSKNTLYLQMNSLRAEDTAVYYCAKNRGEGTTFYGMGAWGQGTMVTVSSGGGGSGGGGSGGGGSDIVLTQSPLSLPVTPGEPASISCRSSQSLLHSNLYNYLDWYLQKPGQSPQLLIYLGSNRASGVPDRFSGSGSGTDFTLKISRVEAEDVGVYYCMQALQTPLTFGCGTKVDIK

SEQ ID NO: 526 - protein, 504 aa, Artificial Sequence
  Synthetic
EVQLLESGGGLVQPGGSLRLSCAASGFSFNSYAMSWVRQAPGKCLEWVSTVSGGGDRTYYADAVKGRFTISRDNSKNTLYLQMNSLRAEDTAVYYCAKNRGEGTTFYGMGAWGQGTMVTVSSGGGGSGGGGSGGGGSDIVLTQSPLSLPVTPGEPASISCRSSQSLLHSNLYNYLDWYLQKPGQSPQLLIYLGSNRASGVPDRFSGSGSGTDFTLKISRVEAEDVGVYYCMQALQTPLTFGCGTKVDIKSGGGGSEVQLVESGGGLVQPGGSLKLSCAASGFTFNKYAMNWVRQAPGKGLEWVARIRSKYNNYATYYADSVKDRFTISRDDSKNTAYLQMNNLKTEDTAVYYCVRHGNFGNSYISYWAYWGQGTLVTVSSGGGGSGGGGSGGGGSQTVVTQEPSLTVSPGGTVTLTCGSSTGAVTSGNYPNWVQQKPGQAPRGLIGGTKFLAPGTPARFSGSLLGGKAALTLSGVQPEDEAEYYCVLWYSNRWVFGGGTKLTVL

SEQ ID NO: 527 - protein, 992 aa, Artificial Sequence
  Synthetic
EVQLLESGGGLVQPGGSLRLSCAASGFSFNSYAMSWVRQAPGKCLEWVSTVSGGGDRTYYADAVKGRFTISRDNSKNTLYLQMNSLRAEDTAVYYCAKNRGEGTTFYGMGAWGQGTMVTVSSGGGGSGGGGSGGGGSDIVLTQSPLSLPVTPGEPASISCRSSQSLLHSNLYNYLDWYLQKPGQSPQLLIYLGSNRASGVPDRFSGSGSGTDFTLKISRVEAEDVGVYYCMQALQTPLTFGCGTKVDIKSGGGGSEVQLVESGGGLVQPGGSLKLSCAASGFTFNKYAMNWVRQAPGKGLEWVARIRSKYNNYATYYADSVKDRFTISRDDSKNTAYLQMNNLKTEDTAVYYCVRHGNFGNSYISYWAYWGQGTLVTVSSGGGGSGGGGSGGGGSQTVVTQEPSLTVSPGGTVTLTCGSSTGAVTSGNYPNWVQQKPGQAPRGLIGGTKFLAPGTPARFSGSLLGGKAALTLSGVQPEDEAEYYCVLWYSNRWVFGGGTKLTVLGGGGDKTHTCPPCPAPELLGGPSVFLFPPKPKDTLMISRTPEVTCVVVDVSHEDPEVKFNWYVDGVEVHNAKTKPCEEQYGSTYRCVSVLTVLHQDWLNGKEYKCKVSNKALPAPIEKTISKAKGQPREPQVYTLPPSREEMTKNQVSLTCLVKGFYPSDIAVEWESNGQPENNYKTTPPVLDSDGSFFLYSKLTVDKSRWQQGNVFSCSVMHEALHNHYTQKSLSLSPGKGGGGSGGGGSGGGGSGGGGSGGGGSGGGGSDKTHTCPPCPAPELLGGPSVFLFPPKPKDTLMISRTPEVTCVVVDVSHEDPEVKFNWYVDGVEVHNAKTKPCEEQYGSTYRCVSVLTVLHQDWLNGKEYKCKVSNKALPAPIEKTISKAKGQPREPQVYTLPPSREEMTKNQVSLTCLVKGFYPSDIAVEWESNGQPENNYKTTPPVLDSDGSFFLYSKLTVDKSRWQQGNVFSCSVMHEALHNHYTQKSLSLSPGK

SEQ ID NO: 528 - protein, 5 aa, Artificial Sequence
  Synthetic
SYAMS

SEQ ID NO: 529 - protein, 17 aa, Artificial Sequence
  Synthetic
TVSGGGDRTYYADSVKG

SEQ ID NO: 530 - protein, 13 aa, Artificial Sequence
  Synthetic
NRGEGTTFYGMGA

SEQ ID NO: 531 - protein, 16 aa, Artificial Sequence
  Synthetic
RSSQSLLHSNKYNYLD

SEQ ID NO: 532 - protein, 7 aa, Artificial Sequence
  Synthetic
LGSNRAS

SEQ ID NO: 533 - protein, 9 aa, Artificial Sequence
  Synthetic
MQALQTPLT

SEQ ID NO: 534 - protein, 122 aa, Artificial Sequence
  Synthetic
EVQLLESGGGLVQPGGSLRLSCAASGFSFNSYAMSWVRQAPGKCLEWVSTVSGGGDRTYYADSVKGRFTISRDNSKNTLYLQMNSLRAEDTAVYYCAKNRGEGTTFYGMGAWGQGTMVTVSS

SEQ ID NO: 535 - protein, 112 aa, Artificial Sequence
  Synthetic
DIVLTQSPLSLPVTPGEPASISCRSSQSLLHSNKYNYLDWYLQKPGQSPQLLIYLGSNRASGVPDRFSGSGSGTDFTLKISRVEAEDVGVYYCMQALQTPLTFGCGTKVDIK

SEQ ID NO: 536 - protein, 249 aa, Artificial Sequence
  Synthetic
EVQLLESGGGLVQPGGSLRLSCAASGFSFNSYAMSWVRQAPGKCLEWVSTVSGGGDRTYYADSVKGRFTISRDNSKNTLYLQMNSLRAEDTAVYYCAKNRGEGTTFYGMGAWGQGTMVTVSSGGGGSGGGGSGGGGSDIVLTQSPLSLPVTPGEPASISCRSSQSLLHSNKYNYLDWYLQKPGQSPQLLIYLGSNRASGVPDRFSGSGSGTDFTLKISRVEAEDVGVYYCMQALQTPLTFGCGTKVDIK

SEQ ID NO: 537 - protein, 504 aa, Artificial Sequence
  Synthetic
EVQLLESGGGLVQPGGSLRLSCAASGFSFNSYAMSWVRQAPGKCLEWVSTVSGGGDRTYYADSVKGRFTISRDNSKNTLYLQMNSLRAEDTAVYYCAKNRGEGTTFYGMGAWGQGTMVTVSSGGGGSGGGGSGGGGSDIVLTQSPLSLPVTPGEPASISCRSSQSLLHSNKYNYLDWYLQKPGQSPQLLIYLGSNRASGVPDRFSGSGSGTDFTLKISRVEAEDVGVYYCMQALQTPLTFGCGTKVDIKSGGGGSEVQLVESGGGLVQPGGSLKLSCAASGFTFNKYAMNWVRQAPGKGLEWVARIRSKYNNYATYYADSVKDRFTISRDDSKNTAYLQMNNLKTEDTAVYYCVRHGNFGNSYISYWAYWGQGTLVTVSSGGGGSGGGGSGGGGSQTVVTQEPSLTVSPGGTVTLTCGSSTGAVTSGNYPNWVQQKPGQAPRGLIGGTKFLAPGTPARFSGSLLGGKAALTLSGVQPEDEAEYYCVLWYSNRWVFGGGTKLTVL

SEQ ID NO: 538 - protein, 992 aa, Artificial Sequence
  Synthetic
EVQLLESGGGLVQPGGSLRLSCAASGFSFNSYAMSWVRQAPGKCLEWVSTVSGGGDRTYYADSVKGRFTISRDNSKNTLYLQMNSLRAEDTAVYYCAKNRGEGTTFYGMGAWGQGTMVTVSSGGGGSGGGGSGGGGSDIVLTQSPLSLPVTPGEPASISCRSSQSLLHSNKYNYLDWYLQKPGQSPQLLIYLGSNRASGVPDRFSGSGSGTDFTLKISRVEAEDVGVYYCMQALQTPLTFGCGTKVDIKSGGGGSEVQLVESGGGLVQPGGSLKLSCAASGFTFNKYAMNWVRQAPGKGLEWVARIRSKYNNYATYYADSVKDRFTISRDDSKNTAYLQMNNLKTEDTAVYYCVRHGNFGNSYISYWAYWGQGTLVTVSSGGGGSGGGGSGGGGSQTVVTQEPSLTVSPGGTVTLTCGSSTGAVTSGNYPNWVQQKPGQAPRGLIGGTKFLAPGTPARFSGSLLGGKAALTLSGVQPEDEAEYYCVLWYSNRWVFGGGTKLTVLGGGGDKTHTCPPCPAPELLGGPSVFLFPPKPKDTLMISRTPEVTCVVVDVSHEDPEVKFNWYVDGVEVHNAKTKPCEEQYGSTYRCVSVLTVLHQDWLNGKEYKCKVSNKALPAPIEKTISKAKGQPREPQVYTLPPSREEMTKNQVSLTCLVKGFYPSDIAVEWESNGQPENNYKTTPPVLDSDGSFFLYSKLTVDKSRWQQGNVFSCSVMHEALHNHYTQKSLSLSPGKGGGGSGGGGSGGGGSGGGGSGGGGSGGGGSDKTHTCPPCPAPELLGGPSVFLFPPKPKDTLMISRTPEVTCVVVDVSHEDPEVKFNWYVDGVEVHNAKTKPCEEQYGSTYRCVSVLTVLHQDWLNGKEYKCKVSNKALPAPIEKTISKAKGQPREPQVYTLPPSREEMTKNQVSLTCLVKGFYPSDIAVEWESNGQPENNYKTTPPVLDSDGSFFLYSKLTVDKSRWQQGNVFSCSVMHEALHNHYTQKSLSLSPGK

SEQ ID NO: 539 - protein, 5 aa, Artificial Sequence
  Synthetic
HYAMN

SEQ ID NO: 540 - protein, 17 aa, Artificial Sequence
  Synthetic
AVSGGGDRTLYADSVKG

SEQ ID NO: 541 - protein, 10 aa, Artificial Sequence
  Synthetic
LRGFYYGMDV

SEQ ID NO: 542 - protein, 16 aa, Artificial Sequence
  Synthetic
RSSQSLLHSNKYNYLD

SEQ ID NO: 543 - protein, 7 aa, Artificial Sequence
  Synthetic
LGSNRAS

SEQ ID NO: 544 - protein, 8 aa, Artificial Sequence
  Synthetic
MQALQTLT

SEQ ID NO: 545 - protein, 119 aa, Artificial Sequence; identical to SEQ ID NO: 149
  Synthetic

SEQ ID NO: 546 - protein, 111 aa, Artificial Sequence; identical to SEQ ID NO: 447
  Synthetic

SEQ ID NO: 547 - protein, 245 aa, Artificial Sequence
  Synthetic
EVQLLESGGGLVQPGGSLRLSCAASGFTFSHYAMNWVRQAPGKCLEWVSAVSGGGDRTLYADSVKGRFTISRDNSKNTLFLQMNSLRAEDTAIYYCARLRGFYYGMDVWGQGTAVTVSSGGGGSGGGGSGGGGSDIVMTQSPLSLPVTPGEPASISCRSSQSLLHSNKYNYLDWYLQKPGQSPQLLIYLGSNRASGVPDRFSGSGSGTDFTLKISRVEAEDVGVYYCMQALQTLTFGCGTKVDIK

SEQ ID NO: 548 - protein, 500 aa, Artificial Sequence
  Synthetic
EVQLLESGGGLVQPGGSLRLSCAASGFTFSHYAMNWVRQAPGKCLEWVSAVSGGGDRTLYADSVKGRFTISRDNSKNTLFLQMNSLRAEDTAIYYCARLRGFYYGMDVWGQGTAVTVSSGGGGSGGGGSGGGGSDIVMTQSPLSLPVTPGEPASISCRSSQSLLHSNKYNYLDWYLQKPGQSPQLLIYLGSNRASGVPDRFSGSGSGTDFTLKISRVEAEDVGVYYCMQALQTLTFGCGTKVDIKSGGGGSEVQLVESGGGLVQPGGSLKLSCAASGFTFNKYAMNWVRQAPGKGLEWVARIRSKYNNYATYYADSVKDRFTISRDDSKNTAYLQMNNLKTEDTAVYYCVRHGNFGNSYISYWAYWGQGTLVTVSSGGGGSGGGGSGGGGSQTVVTQEPSLTVSPGGTVTLTCGSSTGAVTSGNYPNWVQQKPGQAPRGLIGGTKFLAPGTPARFSGSLLGGKAALTLSGVQPEDEAEYYCVLWYSNRWVFGGGTKLTVL

SEQ ID NO: 549 - protein, 988 aa, Artificial Sequence
  Synthetic
EVQLLESGGGLVQPGGSLRLSCAASGFTFSHYAMNWVRQAPGKCLEWVSAVSGGGDRTLYADSVKGRFTISRDNSKNTLFLQMNSLRAEDTAIYYCARLRGFYYGMDVWGQGTAVTVSSGGGGSGGGGSGGGGSDIVMTQSPLSLPVTPGEPASISCRSSQSLLHSNKYNYLDWYLQKPGQSPQLLIYLGSNRASGVPDRFSGSGSGTDFTLKISRVEAEDVGVYYCMQALQTLTFGCGTKVDIKSGGGGSEVQLVESGGGLVQPGGSLKLSCAASGFTFNKYAMNWVRQAPGKGLEWVARIRSKYNNYATYYADSVKDRFTISRDDSKNTAYLQMNNLKTEDTAVYYCVRHGNFGNSYISYWAYWGQGTLVTVSSGGGGSGGGGSGGGGSQTVVTQEPSLTVSPGGTVTLTCGSSTGAVTSGNYPNWVQQKPGQAPRGLIGGTKFLAPGTPARFSGSLLGGKAALTLSGVQPEDEAEYYCVLWYSNRWVFGGGTKLTVLGGGGDKTHTCPPCPAPELLGGPSVFLFPPKPKDTLMISRTPEVTCVVVDVSHEDPEVKFNWYVDGVEVHNAKTKPCEEQYGSTYRCVSVLTVLHQDWLNGKEYKCKVSNKALPAPIEKTISKAKGQPREPQVYTLPPSREEMTKNQVSLTCLVKGFYPSDIAVEWESNGQPENNYKTTPPVLDSDGSFFLYSKLTVDKSRWQQGNVFSCSVMHEALHNHYTQKSLSLSPGKGGGGSGGGGSGGGGSGGGGSGGGGSGGGGSDKTHTCPPCPAPELLGGPSVFLFPPKPKDTLMISRTPEVTCVVVDVSHEDPEVKFNWYVDGVEVHNAKTKPCEEQYGSTYRCVSVLTVLHQDWLNGKEYKCKVSNKALPAPIEKTISKAKGQPREPQVYTLPPSREEMTKNQVSLTCLVKGFYPSDIAVEWESNGQPENNYKTTPPVLDSDGSFFLYSKLTVDKSRWQQGNVFSCSVMHEALHNHYTQKSLSLSPGK

SEQ ID NO: 550 - protein, 5 aa, Artificial Sequence
  Synthetic
HYAMS

SEQ ID NO: 551 - protein, 17 aa, Artificial Sequence
  Synthetic
AISGGGDATYYADAVKG

SEQ ID NO: 552 - protein, 10 aa, Artificial Sequence
  Synthetic
DRGYYYGMAV

SEQ ID NO: 553 - protein, 16 aa, Artificial Sequence
  Synthetic
RSSQSLLRSNKYNYLD

SEQ ID NO: 554 - protein, 7 aa, Artificial Sequence
  Synthetic
LGSNRAS

SEQ ID NO: 555 - protein, 9 aa, Artificial Sequence
  Synthetic
MQALQTPLT

SEQ ID NO: 556 - protein, 119 aa, Artificial Sequence
  Synthetic
EVQLLESGGGLVQPGGSLRLSCAASGFTFSHYAMSWVRQAPGKCLEWVSAISGGGDATYYADAVKGRFTISRDNSKNTLYLQMSSLRAEDTAVYYCAKDRGYYYGMAVWGQGTTVTVSS

SEQ ID NO: 557 - protein, 112 aa, Artificial Sequence
  Synthetic
DIVMTQTPLSLPVTPGEPASISCRSSQSLLRSNKYNYLDWYLQKPGQSPQLLIYLGSNRASGVPDRFSGSGSGTDFTLKISRVEAEDVGVYYCMQALQTPLTFGCGTKVEIK

SEQ ID NO: 558 - protein, 246 aa, Artificial Sequence
  Synthetic
EVQLLESGGGLVQPGGSLRLSCAASGFTFSHYAMSWVRQAPGKCLEWVSAISGGGDATYYADAVKGRFTISRDNSKNTLYLQMSSLRAEDTAVYYCAKDRGYYYGMAVWGQGTTVTVSSGGGGSGGGGSGGGGSDIVMTQTPLSLPVTPGEPASISCRSSQSLLRSNKYNYLDWYLQKPGQSPQLLIYLGSNRASGVPDRFSGSGSGTDFTLKISRVEAEDVGVYYCMQALQTPLTFGCGTKVEIK

SEQ ID NO: 559 - protein, 501 aa, Artificial Sequence
  Synthetic
EVQLLESGGGLVQPGGSLRLSCAASGFTFSHYAMSWVRQAPGKCLEWVSAISGGGDATYYADAVKGRFTISRDNSKNTLYLQMSSLRAEDTAVYYCAKDRGYYYGMAVWGQGTTVTVSSGGGGSGGGGSGGGGSDIVMTQTPLSLPVTPGEPASISCRSSQSLLRSNKYNYLDWYLQKPGQSPQLLIYLGSNRASGVPDRFSGSGSGTDFTLKISRVEAEDVGVYYCMQALQTPLTFGCGTKVEIKSGGGGSEVQLVESGGGLVQPGGSLKLSCAASGFTFNKYAMNWVRQAPGKGLEWVARIRSKYNNYATYYADSVKDRFTISRDDSKNTAYLQMNNLKTEDTAVYYCVRHGNFGNSYISYWAYWGQGTLVTVSSGGGGSGGGGSGGGGSQTVVTQEPSLTVSPGGTVTLTCGSSTGAVTSGNYPNWVQQKPGQAPRGLIGGTKFLAPGTPARFSGSLLGGKAALTLSGVQPEDEAEYYCVLWYSNRWVFGGGTKLTVL

SEQ ID NO: 560 - protein, 989 aa, Artificial Sequence
  Synthetic
EVQLLESGGGLVQPGGSLRLSCAASGFTFSHYAMSWVRQAPGKCLEWVSAISGGGDATYYADAVKGRFTISRDNSKNTLYLQMSSLRAEDTAVYYCAKDRGYYYGMAVWGQGTTVTVSSGGGGSGGGGSGGGGSDIVMTQTPLSLPVTPGEPASISCRSSQSLLRSNKYNYLDWYLQKPGQSPQLLIYLGSNRASGVPDRFSGSGSGTDFTLKISRVEAEDVGVYYCMQALQTPLTFGCGTKVEIKSGGGGSEVQLVESGGGLVQPGGSLKLSCAASGFTFNKYAMNWVRQAPGKGLEWVARIRSKYNNYATYYADSVKDRFTISRDDSKNTAYLQMNNLKTEDTAVYYCVRHGNFGNSYISYWAYWGQGTLVTVSSGGGGSGGGGSGGGGSQTVVTQEPSLTVSPGGTVTLTCGSSTGAVTSGNYPNWVQQKPGQAPRGLIGGTKFLAPGTPARFSGSLLGGKAALTLSGVQPEDEAEYYCVLWYSNRWVFGGGTKLTVLGGGGDKTHTCPPCPAPELLGGPSVFLFPPKPKDTLMISRTPEVTCVVVDVSHEDPEVKFNWYVDGVEVHNAKTKPCEEQYGSTYRCVSVLTVLHQDWLNGKEYKCKVSNKALPAPIEKTISKAKGQPREPQVYTLPPSREEMTKNQVSLTCLVKGFYPSDIAVEWESNGQPENNYKTTPPVLDSDGSFFLYSKLTVDKSRWQQGNVFSCSVMHEALHNHYTQKSLSLSPGKGGGGSGGGGSGGGGSGGGGSGGGGSGGGGSDKTHTCPPCPAPELLGGPSVFLFPPKPKDTLMISRTPEVTCVVVDVSHEDPEVKFNWYVDGVEVHNAKTKPCEEQYGSTYRCVSVLTVLHQDWLNGKEYKCKVSNKALPAPIEKTISKAKGQPREPQVYTLPPSREEMTKNQVSLTCLVKGFYPSDIAVEWESNGQPENNYKTTPPVLDSDGSFFLYSKLTVDKSRWQQGNVFSCSVMHEALHNHYTQKSLSLSPGK

SEQ ID NO: 561 - protein, 5 aa, Artificial Sequence
  Synthetic
HYAMS

SEQ ID NO: 562 - protein, 17 aa, Artificial Sequence
  Synthetic
AISGGGDATYYADSVKG

SEQ ID NO: 563 - protein, 10 aa, Artificial Sequence
  Synthetic
DRGYYYGMAV

SEQ ID NO: 564 - protein, 16 aa, Artificial Sequence
  Synthetic
RSSQSLLRSNKYNYLD

SEQ ID NO: 565 - protein, 7 aa, Artificial Sequence
  Synthetic
LGSNRAS

SEQ ID NO: 566 - protein, 9 aa, Artificial Sequence
  Synthetic
MQALQTPLT

SEQ ID NO: 567 - protein, 119 aa, Artificial Sequence
  Synthetic
EVQLLESGGGLVQPGGSLRLSCAASGFTFSHYAMSWVRQAPGKCLEWVSAISGGGDATYYADSVKGRFTISRDNSKNTLYLQMSSLRAEDTAVYYCAKDRGYYYGMAVWGQGTTVTVSS

SEQ ID NO: 568 - protein, 112 aa, Artificial Sequence; identical to SEQ ID NO: 557
  Synthetic

SEQ ID NO: 569 - protein, 246 aa, Artificial Sequence
  Synthetic
EVQLLESGGGLVQPGGSLRLSCAASGFTFSHYAMSWVRQAPGKCLEWVSAISGGGDATYYADSVKGRFTISRDNSKNTLYLQMSSLRAEDTAVYYCAKDRGYYYGMAVWGQGTTVTVSSGGGGSGGGGSGGGGSDIVMTQTPLSLPVTPGEPASISCRSSQSLLRSNKYNYLDWYLQKPGQSPQLLIYLGSNRASGVPDRFSGSGSGTDFTLKISRVEAEDVGVYYCMQALQTPLTFGCGTKVEIK

SEQ ID NO: 570 - protein, 501 aa, Artificial Sequence
  Synthetic
EVQLLESGGGLVQPGGSLRLSCAASGFTFSHYAMSWVRQAPGKCLEWVSAISGGGDATYYADSVKGRFTISRDNSKNTLYLQMSSLRAEDTAVYYCAKDRGYYYGMAVWGQGTTVTVSSGGGGSGGGGSGGGGSDIVMTQTPLSLPVTPGEPASISCRSSQSLLRSNKYNYLDWYLQKPGQSPQLLIYLGSNRASGVPDRFSGSGSGTDFTLKISRVEAEDVGVYYCMQALQTPLTFGCGTKVEIKSGGGGSEVQLVESGGGLVQPGGSLKLSCAASGFTFNKYAMNWVRQAPGKGLEWVARIRSKYNNYATYYADSVKDRFTISRDDSKNTAYLQMNNLKTEDTAVYYCVRHGNFGNSYISYWAYWGQGTLVTVSSGGGGSGGGGSGGGGSQTVVTQEPSLTVSPGGTVTLTCGSSTGAVTSGNYPNWVQQKPGQAPRGLIGGTKFLAPGTPARFSGSLLGGKAALTLSGVQPEDEAEYYCVLWYSNRWVFGGGTKLTVL

SEQ ID NO: 571 - protein, 989 aa, Artificial Sequence
  Synthetic
EVQLLESGGGLVQPGGSLRLSCAASGFTFSHYAMSWVRQAPGKCLEWVSAISGGGDATYYADSVKGRFTISRDNSKNTLYLQMSSLRAEDTAVYYCAKDRGYYYGMAVWGQGTTVTVSSGGGGSGGGGSGGGGSDIVMTQTPLSLPVTPGEPASISCRSSQSLLRSNKYNYLDWYLQKPGQSPQLLIYLGSNRASGVPDRFSGSGSGTDFTLKISRVEAEDVGVYYCMQALQTPLTFGCGTKVEIKSGGGGSEVQLVESGGGLVQPGGSLKLSCAASGFTFNKYAMNWVRQAPGKGLEWVARIRSKYNNYATYYADSVKDRFTISRDDSKNTAYLQMNNLKTEDTAVYYCVRHGNFGNSYISYWAYWGQGTLVTVSSGGGGSGGGGSGGGGSQTVVTQEPSLTVSPGGTVTLTCGSSTGAVTSGNYPNWVQQKPGQAPRGLIGGTKFLAPGTPARFSGSLLGGKAALTLSGVQPEDEAEYYCVLWYSNRWVFGGGTKLTVLGGGGDKTHTCPPCPAPELLGGPSVFLFPPKPKDTLMISRTPEVTCVVVDVSHEDPEVKFNWYVDGVEVHNAKTKPCEEQYGSTYRCVSVLTVLHQDWLNGKEYKCKVSNKALPAPIEKTISKAKGQPREPQVYTLPPSREEMTKNQVSLTCLVKGFYPSDIAVEWESNGQPENNYKTTPPVLDSDGSFFLYSKLTVDKSRWQQGNVFSCSVMHEALHNHYTQKSLSLSPGKGGGGSGGGGSGGGGSGGGGSGGGGSGGGGSDKTHTCPPCPAPELLGGPSVFLFPPKPKDTLMISRTPEVTCVVVDVSHEDPEVKFNWYVDGVEVHNAKTKPCEEQYGSTYRCVSVLTVLHQDWLNGKEYKCKVSNKALPAPIEKTISKAKGQPREPQVYTLPPSREEMTKNQVSLTCLVKGFYPSDIAVEWESNGQPENNYKTTPPVLDSDGSFFLYSKLTVDKSRWQQGNVFSCSVMHEALHNHYTQKSLSLSPGK

SEQ ID NO: 572 - protein, 5 aa, Artificial Sequence
  Synthetic
HYAMS

SEQ ID NO: 573 - protein, 17 aa, Artificial Sequence
  Synthetic
AVSGGGDKTLYADSVKG

SEQ ID NO: 574 - protein, 10 aa, Artificial Sequence
  Synthetic
LRGFYYGMDV

SEQ ID NO: 575 - protein, 16 aa, Artificial Sequence
  Synthetic
RSSQSLLHSNKYNYLD

SEQ ID NO: 576 - protein, 7 aa, Artificial Sequence
  Synthetic
LGSNRAS

SEQ ID NO: 577 - protein, 10 aa, Artificial Sequence
  Synthetic
MQALQTPPIT

SEQ ID NO: 578 - protein, 119 aa, Artificial Sequence; identical to SEQ ID NO: 193
  Synthetic

SEQ ID NO: 579 - protein, 113 aa, Artificial Sequence; identical to SEQ ID NO: 40
  Synthetic

SEQ ID NO: 580 - protein, 247 aa, Artificial Sequence
  Synthetic
EVQLLESGGGLVQPGGSLRLSCAASGFTFSHYAMSWVRQAPGKCLEWVSAVSGGGDKTLYADSVKGRFTISRDNSKNTLFLQMNSLRAEDTAIYYCARLRGFYYGMDVWGQGTTVTVSSGGGGSGGGGSGGGGSDIVLTQSPLSLPVTPGEPASISCRSSQSLLHSNKYNYLDWYLQKPGQSPQLLIYLGSNRASGVPDRFSGSGSGTDFTLKISRVEAEDVGVYYCMQALQTPPITFGCGTRLEIK

SEQ ID NO: 581 - protein, 502 aa, Artificial Sequence
  Synthetic
EVQLLESGGGLVQPGGSLRLSCAASGFTFSHYAMSWVRQAPGKCLEWVSAVSGGGDKTLYADSVKGRFTISRDNSKNTLFLQMNSLRAEDTAIYYCARLRGFYYGMDVWGQGTTVTVSSGGGGSGGGGSGGGGSDIVLTQSPLSLPVTPGEPASISCRSSQSLLHSNKYNYLDWYLQKPGQSPQLLIYLGSNRASGVPDRFSGSGSGTDFTLKISRVEAEDVGVYYCMQALQTPPITFGCGTRLEIKSGGGGSEVQLVESGGGLVQPGGSLKLSCAASGFTFNKYAMNWVRQAPGKGLEWVARIRSKYNNYATYYADSVKDRFTISRDDSKNTAYLQMNNLKTEDTAVYYCVRHGNFGNSYISYWAYWGQGTLVTVSSGGGGSGGGGSGGGGSQTVVTQEPSLTVSPGGTVTLTCGSSTGAVTSGNYPNWVQQKPGQAPRGLIGGTKFLAPGTPARFSGSLLGGKAALTLSGVQPEDEAEYYCVLWYSNRWVFGGGTKLTVL

SEQ ID NO: 582 - protein, 990 aa, Artificial Sequence
  Synthetic
EVQLLESGGGLVQPGGSLRLSCAASGFTFSHYAMSWVRQAPGKCLEWVSAVSGGGDKTLYADSVKGRFTISRDNSKNTLFLQMNSLRAEDTAIYYCARLRGFYYGMDVWGQGTTVTVSSGGGGSGGGGSGGGGSDIVLTQSPLSLPVTPGEPASISCRSSQSLLHSNKYNYLDWYLQKPGQSPQLLIYLGSNRASGVPDRFSGSGSGTDFTLKISRVEAEDVGVYYCMQALQTPPITFGCGTRLEIKSGGGGSEVQLVESGGGLVQPGGSLKLSCAASGFTFNKYAMNWVRQAPGKGLEWVARIRSKYNNYATYYADSVKDRFTISRDDSKNTAYLQMNNLKTEDTAVYYCVRHGNFGNSYISYWAYWGQGTLVTVSSGGGGSGGGGSGGGGSQTVVTQEPSLTVSPGGTVTLTCGSSTGAVTSGNYPNWVQQKPGQAPRGLIGGTKFLAPGTPARFSGSLLGGKAALTLSGVQPEDEAEYYCVLWYSNRWVFGGGTKLTVLGGGGDKTHTCPPCPAPELLGGPSVFLFPPKPKDTLMISRTPEVTCVVVDVSHEDPEVKFNWYVDGVEVHNAKTKPCEEQYGSTYRCVSVLTVLHQDWLNGKEYKCKVSNKALPAPIEKTISKAKGQPREPQVYTLPPSREEMTKNQVSLTCLVKGFYPSDIAVEWESNGQPENNYKTTPPVLDSDGSFFLYSKLTVDKSRWQQGNVFSCSVMHEALHNHYTQKSLSLSPGKGGGGSGGGGSGGGGSGGGGSGGGGSGGGGSDKTHTCPPCPAPELLGGPSVFLFPPKPKDTLMISRTPEVTCVVVDVSHEDPEVKFNWYVDGVEVHNAKTKPCEEQYGSTYRCVSVLTVLHQDWLNGKEYKCKVSNKALPAPIEKTISKAKGQPREPQVYTLPPSREEMTKNQVSLTCLVKGFYPSDIAVEWESNGQPENNYKTTPPVLDSDGSFFLYSKLTVDKSRWQQGNVFSCSVMHEALHNHYTQKSLSLSPGK

SEQ ID NO: 583 - protein, 7 aa, Artificial Sequence
  Synthetic
SGGYYWS

SEQ ID NO: 584 - protein, 16 aa, Artificial Sequence
  Synthetic
YIYYSGNKYYNPSLKS

SEQ ID NO: 585 - protein, 8 aa, Artificial Sequence
  Synthetic
LQESVFDY

SEQ ID NO: 586 - protein, 14 aa, Artificial Sequence
  Synthetic
TGTSSDVGGYNYVS

SEQ ID NO: 587 - protein, 7 aa, Artificial Sequence
  Synthetic
EVSNRPS

SEQ ID NO: 588 - protein, 11 aa, Artificial Sequence
  Synthetic
SSYTSSSTLVV

SEQ ID NO: 589 - protein, 118 aa, Artificial Sequence
  Synthetic
QVQLQESGPGLVKPSQTLSLTCTVSGGSISSGGYYWSWIRQHPGKCLEWIGYIYYSGNKYYNPSLKSRVTISVDTSKNQFSLKLSSVTAADTAVYYCARLQESVFDYWGQGTLVTVSS

SEQ ID NO: 590 - protein, 111 aa, Artificial Sequence; identical to SEQ ID NO: 304
  Synthetic

SEQ ID NO: 591 - protein, 244 aa, Artificial Sequence
  Synthetic
QVQLQESGPGLVKPSQTLSLTCTVSGGSISSGGYYWSWIRQHPGKCLEWIGYIYYSGNKYYNPSLKSRVTISVDTSKNQFSLKLSSVTAADTAVYYCARLQESVFDYWGQGTLVTVSSGGGGSGGGGSGGGGSQSALTQPPSASGSPGQSITISCTGTSSDVGGYNYVSWYQQHPGKAPKLMIYEVSNRPSGVSNRFSGSKSGNTASLTISGLQAEDEADYYCSSYTSSSTLVVFGCGTKLTVL

SEQ ID NO: 592 - protein, 499 aa, Artificial Sequence
  Synthetic
QVQLQESGPGLVKPSQTLSLTCTVSGGSISSGGYYWSWIRQHPGKCLEWIGYIYYSGNKYYNPSLKSRVTISVDTSKNQFSLKLSSVTAADTAVYYCARLQESVFDYWGQGTLVTVSSGGGGSGGGGSGGGGSQSALTQPPSASGSPGQSITISCTGTSSDVGGYNYVSWYQQHPGKAPKLMIYEVSNRPSGVSNRFSGSKSGNTASLTISGLQAEDEADYYCSSYTSSSTLVVFGCGTKLTVLSGGGGSEVQLVESGGGLVQPGGSLKLSCAASGFTFNKYAMNWVRQAPGKGLEWVARIRSKYNNYATYYADSVKDRFTISRDDSKNTAYLQMNNLKTEDTAVYYCVRHGNFGNSYISYWAYWGQGTLVTVSSGGGGSGGGGSGGGGSQTVVTQEPSLTVSPGGTVTLTCGSSTGAVTSGNYPNWVQQKPGQAPRGLIGGTKFLAPGTPARFSGSLLGGKAALTLSGVQPEDEAEYYCVLWYSNRWVFGGGTKLTVL

SEQ ID NO: 593 - protein, 987 aa, Artificial Sequence
  Synthetic
QVQLQESGPGLVKPSQTLSLTCTVSGGSISSGGYYWSWIRQHPGKCLEWIGYIYYSGNKYYNPSLKSRVTISVDTSKNQFSLKLSSVTAADTAVYYCARLQESVFDYWGQGTLVTVSSGGGGSGGGGSGGGGSQSALTQPPSASGSPGQSITISCTGTSSDVGGYNYVSWYQQHPGKAPKLMIYEVSNRPSGVSNRFSGSKSGNTASLTISGLQAEDEADYYCSSYTSSSTLVVFGCGTKLTVLSGGGGSEVQLVESGGGLVQPGGSLKLSCAASGFTFNKYAMNWVRQAPGKGLEWVARIRSKYNNYATYYADSVKDRFTISRDDSKNTAYLQMNNLKTEDTAVYYCVRHGNFGNSYISYWAYWGQGTLVTVSSGGGGSGGGGSGGGGSQTVVTQEPSLTVSPGGTVTLTCGSSTGAVTSGNYPNWVQQKPGQAPRGLIGGTKFLAPGTPARFSGSLLGGKAALTLSGVQPEDEAEYYCVLWYSNRWVFGGGTKLTVLGGGGDKTHTCPPCPAPELLGGPSVFLFPPKPKDTLMISRTPEVTCVVVDVSHEDPEVKFNWYVDGVEVHNAKTKPCEEQYGSTYRCVSVLTVLHQDWLNGKEYKCKVSNKALPAPIEKTISKAKGQPREPQVYTLPPSREEMTKNQVSLTCLVKGFYPSDIAVEWESNGQPENNYKTTPPVLDSDGSFFLYSKLTVDKSRWQQGNVFSCSVMHEALHNHYTQKSLSLSPGKGGGGSGGGGSGGGGSGGGGSGGGGSGGGGSDKTHTCPPCPAPELLGGPSVFLFPPKPKDTLMISRTPEVTCVVVDVSHEDPEVKFNWYVDGVEVHNAKTKPCEEQYGSTYRCVSVLTVLHQDWLNGKEYKCKVSNKALPAPIEKTISKAKGQPREPQVYTLPPSREEMTKNQVSLTCLVKGFYPSDIAVEWESNGQPENNYKTTPPVLDSDGSFFLYSKLTVDKSRWQQGNVFSCSVMHEALHNHYTQKSLSLSPGK

SEQ ID NO: 594 - protein, 7 aa, Artificial Sequence
  Synthetic
SGGYYWS

SEQ ID NO: 595 - protein, 16 aa, Artificial Sequence
  Synthetic
YIYYRGNKYYNPSLKS

SEQ ID NO: 596 - protein, 8 aa, Artificial Sequence
  Synthetic
LQESVFDY

SEQ ID NO: 597 - protein, 14 aa, Artificial Sequence
  Synthetic
TGTSSDVGGYNYVS

SEQ ID NO: 598 - protein, 7 aa, Artificial Sequence
  Synthetic
EVSNRPS

SEQ ID NO: 599 - protein, 11 aa, Artificial Sequence
  Synthetic
SSYTSSSTLVV

SEQ ID NO: 600 - protein, 118 aa, Artificial Sequence
  Synthetic
QVQLQESGPGLVKPSQTLSLTCTVSGGSISSGGYYWSWIRQHPGKCLEWIGYIYYRGNKYYNPSLKSRVTISVDTSKNQFSLKLSSVTAADTAVYYCATLQESVFDYWGQGTLVTVSS

SEQ ID NO: 601 - protein, 111 aa, Artificial Sequence; identical to SEQ ID NO: 315
  Synthetic

SEQ ID NO: 602 - protein, 244 aa, Artificial Sequence
  Synthetic
QVQLQESGPGLVKPSQTLSLTCTVSGGSISSGGYYWSWIRQHPGKCLEWIGYIYYRGNKYYNPSLKSRVTISVDTSKNQFSLKLSSVTAADTAVYYCATLQESVFDYWGQGTLVTVSSGGGGSGGGGSGGGGSQSALTQPASVSGSPGQSITISCTGTSSDVGGYNYVSWYQQHPGKAPKLMIYEVSNRPSGVSNRFSGSKSGNTASLTISGLQAEDEADYYCSSYTSSSTLVVFGCGTKLTVL

SEQ ID NO: 603 - protein, 499 aa, Artificial Sequence
  Synthetic
QVQLQESGPGLVKPSQTLSLTCTVSGGSISSGGYYWSWIRQHPGKCLEWIGYIYYRGNKYYNPSLKSRVTISVDTSKNQFSLKLSSVTAADTAVYYCATLQESVFDYWGQGTLVTVSSGGGGSGGGGSGGGGSQSALTQPASVSGSPGQSITISCTGTSSDVGGYNYVSWYQQHPGKAPKLMIYEVSNRPSGVSNRFSGSKSGNTASLTISGLQAEDEADYYCSSYTSSSTLVVFGCGTKLTVLSGGGGSEVQLVESGGGLVQPGGSLKLSCAASGFTFNKYAMNWVRQAPGKGLEWVARIRSKYNNYATYYADSVKDRFTISRDDSKNTAYLQMNNLKTEDTAVYYCVRHGNFGNSYISYWAYWGQGTLVTVSSGGGGSGGGGSGGGGSQTVVTQEPSLTVSPGGTVTLTCGSSTGAVTSGNYPNWVQQKPGQAPRGLIGGTKFLAPGTPARFSGSLLGGKAALTLSGVQPEDEAEYYCVLWYSNRWVFGGGTKLTVL

SEQ ID NO: 604 - protein, 987 aa, Artificial Sequence
  Synthetic
QVQLQESGPGLVKPSQTLSLTCTVSGGSISSGGYYWSWIRQHPGKCLEWIGYIYYRGNKYYNPSLKSRVTISVDTSKNQFSLKLSSVTAADTAVYYCATLQESVFDYWGQGTLVTVSSGGGGSGGGGSGGGGSQSALTQPASVSGSPGQSITISCTGTSSDVGGYNYVSWYQQHPGKAPKLMIYEVSNRPSGVSNRFSGSKSGNTASLTISGLQAEDEADYYCSSYTSSSTLVVFGCGTKLTVLSGGGGSEVQLVESGGGLVQPGGSLKLSCAASGFTFNKYAMNWVRQAPGKGLEWVARIRSKYNNYATYYADSVKDRFTISRDDSKNTAYLQMNNLKTEDTAVYYCVRHGNFGNSYISYWAYWGQGTLVTVSSGGGGSGGGGSGGGGSQTVVTQEPSLTVSPGGTVTLTCGSSTGAVTSGNYPNWVQQKPGQAPRGLIGGTKFLAPGTPARFSGSLLGGKAALTLSGVQPEDEAEYYCVLWYSNRWVFGGGTKLTVLGGGGDKTHTCPPCPAPELLGGPSVFLFPPKPKDTLMISRTPEVTCVVVDVSHEDPEVKFNWYVDGVEVHNAKTKPCEEQYGSTYRCVSVLTVLHQDWLNGKEYKCKVSNKALPAPIEKTISKAKGQPREPQVYTLPPSREEMTKNQVSLTCLVKGFYPSDIAVEWESNGQPENNYKTTPPVLDSDGSFFLYSKLTVDKSRWQQGNVFSCSVMHEALHNHYTQKSLSLSPGKGGGGSGGGGSGGGGSGGGGSGGGGSGGGGSDKTHTCPPCPAPELLGGPSVFLFPPKPKDTLMISRTPEVTCVVVDVSHEDPEVKFNWYVDGVEVHNAKTKPCEEQYGSTYRCVSVLTVLHQDWLNGKEYKCKVSNKALPAPIEKTISKAKGQPREPQVYTLPPSREEMTKNQVSLTCLVKGFYPSDIAVEWESNGQPENNYKTTPPVLDSDGSFFLYSKLTVDKSRWQQGNVFSCSVMHEALHNHYTQKSLSLSPGK

SEQ ID NO: 605 - protein, 7 aa, Artificial Sequence
  Synthetic
SGGYYWS

SEQ ID NO: 606 - protein, 16 aa, Artificial Sequence
  Synthetic
YIYYRGNKYYNPSLKS

SEQ ID NO: 607 - protein, 8 aa, Artificial Sequence
  Synthetic
LQESVFDY

SEQ ID NO: 608 - protein, 14 aa, Artificial Sequence
  Synthetic
TGTSSDVGGYNYVS

SEQ ID NO: 609 - protein, 7 aa, Artificial Sequence
  Synthetic
EVSNRPS

SEQ ID NO: 610 - protein, 10 aa, Artificial Sequence
  Synthetic
SSYTSSSTLV

SEQ ID NO: 611 - protein, 118 aa, Artificial Sequence; identical to SEQ ID NO: 600
  Synthetic

SEQ ID NO: 612 - protein, 110 aa, Artificial Sequence; identical to SEQ ID NO: 359
  Synthetic

SEQ ID NO: 613 - protein, 243 aa, Artificial Sequence
  Synthetic
QVQLQESGPGLVKPSQTLSLTCTVSGGSISSGGYYWSWIRQHPGKCLEWIGYIYYRGNKYYNPSLKSRVTISVDTSKNQFSLKLSSVTAADTAVYYCATLQESVFDYWGQGTLVTVSSGGGGSGGGGSGGGGSQSALTQPASVSGSPGQSITISCTGTSSDVGGYNYVSWYQQHPGKAPKLMIYEVSNRPSGVSNRFSGSKSGNTASLTISGLQAEDEADYYCSSYTSSSTLVVGCGTKLTVL

SEQ ID NO: 614 - protein, 498 aa, Artificial Sequence
  Synthetic
QVQLQESGPGLVKPSQTLSLTCTVSGGSISSGGYYWSWIRQHPGKCLEWIGYIYYRGNKYYNPSLKSRVTISVDTSKNQFSLKLSSVTAADTAVYYCATLQESVFDYWGQGTLVTVSSGGGGSGGGGSGGGGSQSALTQPASVSGSPGQSITISCTGTSSDVGGYNYVSWYQQHPGKAPKLMIYEVSNRPSGVSNRFSGSKSGNTASLTISGLQAEDEADYYCSSYTSSSTLVVGCGTKLTVLSGGGGSEVQLVESGGGLVQPGGSLKLSCAASGFTFNKYAMNWVRQAPGKGLEWVARIRSKYNNYATYYADSVKDRFTISRDDSKNTAYLQMNNLKTEDTAVYYCVRHGNFGNSYISYWAYWGQGTLVTVSSGGGGSGGGGSGGGGSQTVVTQEPSLTVSPGGTVTLTCGSSTGAVTSGNYPNWVQQKPGQAPRGLIGGTKFLAPGTPARFSGSLLGGKAALTLSGVQPEDEAEYYCVLWYSNRWVFGGGTKLTVL

SEQ ID NO: 615 - protein, 986 aa, Artificial Sequence
  Synthetic
QVQLQESGPGLVKPSQTLSLTCTVSGGSISSGGYYWSWIRQHPGKCLEWIGYIYYRGNKYYNPSLKSRVTISVDTSKNQFSLKLSSVTAADTAVYYCATLQESVFDYWGQGTLVTVSSGGGGSGGGGSGGGGSQSALTQPASVSGSPGQSITISCTGTSSDVGGYNYVSWYQQHPGKAPKLMIYEVSNRPSGVSNRFSGSKSGNTASLTISGLQAEDEADYYCSSYTSSSTLVVGCGTKLTVLSGGGGSEVQLVESGGGLVQPGGSLKLSCAASGFTFNKYAMNWVRQAPGKGLEWVARIRSKYNNYATYYADSVKDRFTISRDDSKNTAYLQMNNLKTEDTAVYYCVRHGNFGNSYISYWAYWGQGTLVTVSSGGGGSGGGGSGGGGSQTVVTQEPSLTVSPGGTVTLTCGSSTGAVTSGNYPNWVQQKPGQAPRGLIGGTKFLAPGTPARFSGSLLGGKAALTLSGVQPEDEAEYYCVLWYSNRWVFGGGTKLTVLGGGGDKTHTCPPCPAPELLGGPSVFLFPPKPKDTLMISRTPEVTCVVVDVSHEDPEVKFNWYVDGVEVHNAKTKPCEEQYGSTYRCVSVLTVLHQDWLNGKEYKCKVSNKALPAPIEKTISKAKGQPREPQVYTLPPSREEMTKNQVSLTCLVKGFYPSDIAVEWESNGQPENNYKTTPPVLDSDGSFFLYSKLTVDKSRWQQGNVFSCSVMHEALHNHYTQKSLSLSPGKGGGGSGGGGSGGGGSGGGGSGGGGSGGGGSDKTHTCPPCPAPELLGGPSVFLFPPKPKDTLMISRTPEVTCVVVDVSHEDPEVKFNWYVDGVEVHNAKTKPCEEQYGSTYRCVSVLTVLHQDWLNGKEYKCKVSNKALPAPIEKTISKAKGQPREPQVYTLPPSREEMTKNQVSLTCLVKGFYPSDIAVEWESNGQPENNYKTTPPVLDSDGSFFLYSKLTVDKSRWQQGNVFSCSVMHEALHNHYTQKSLSLSPGK

SEQ ID NO: 616 - protein, 5 aa, Artificial Sequence
  Synthetic
HYAMT

SEQ ID NO: 617 - protein, 17 aa, Artificial Sequence
  Synthetic
AISGGGDATFYADAVKG

SEQ ID NO: 618 - protein, 10 aa, Artificial Sequence
  Synthetic
DRGYYYGMDV

SEQ ID NO: 619 - protein, 16 aa, Artificial Sequence
  Synthetic
RSSQSLLRTNKYNYLD

SEQ ID NO: 620 - protein, 7 aa, Artificial Sequence
  Synthetic
LGSNRAS

SEQ ID NO: 621 - protein, 9 aa, Artificial Sequence
  Synthetic
MQALQSPYT

SEQ ID NO: 622 - protein, 119 aa, Artificial Sequence
  Synthetic
EVQLLESGGGLVQPGGSLRLSCAASGFTFSHYAMTWVRQAPGKCLEWVSAISGGGDATFYADAVKGRFTFSRDNSRNTLYLQMNSLRAEDTAVYYCVKDRGYYYGMDVWGQGTTVTVSS

SEQ ID NO: 623 - protein, 112 aa, Artificial Sequence; identical to SEQ ID NO: 458
  Synthetic

SEQ ID NO: 624 - protein, 246 aa, Artificial Sequence
  Synthetic
EVQLLESGGGLVQPGGSLRLSCAASGFTFSHYAMTWVRQAPGKCLEWVSAISGGGDATFYADAVKGRFTFSRDNSRNTLYLQMNSLRAEDTAVYYCVKDRGYYYGMDVWGQGTTVTVSSGGGGSGGGGSGGGGSDIVMTQTPLSLPVTPGEPASISCRSSQSLLRTNKYNYLDWYLQKPGQSPQLLIYLGSNRASGVPDRFSGSGSGTDFTLKISRVEAEDVGVYYCMQALQSPYTFGCGTKLEIK

SEQ ID NO: 625 - protein, 501 aa, Artificial Sequence
  Synthetic
EVQLLESGGGLVQPGGSLRLSCAASGFTFSHYAMTWVRQAPGKCLEWVSAISGGGDATFYADAVKGRFTFSRDNSRNTLYLQMNSLRAEDTAVYYCVKDRGYYYGMDVWGQGTTVTVSSGGGGSGGGGSGGGGSDIVMTQTPLSLPVTPGEPASISCRSSQSLLRTNKYNYLDWYLQKPGQSPQLLIYLGSNRASGVPDRFSGSGSGTDFTLKISRVEAEDVGVYYCMQALQSPYTFGCGTKLEIKSGGGGSEVQLVESGGGLVQPGGSLKLSCAASGFTFNKYAMNWVRQAPGKGLEWVARIRSKYNNYATYYADSVKDRFTISRDDSKNTAYLQMNNLKTEDTAVYYCVRHGNFGNSYISYWAYWGQGTLVTVSSGGGGSGGGGSGGGGSQTVVTQEPSLTVSPGGTVTLTCGSSTGAVTSGNYPNWVQQKPGQAPRGLIGGTKFLAPGTPARFSGSLLGGKAALTLSGVQPEDEAEYYCVLWYSNRWVFGGGTKLTVL

SEQ ID NO: 626 - protein, 989 aa, Artificial Sequence
  Synthetic
EVQLLESGGGLVQPGGSLRLSCAASGFTFSHYAMTWVRQAPGKCLEWVSAISGGGDATFYADAVKGRFTFSRDNSRNTLYLQMNSLRAEDTAVYYCVKDRGYYYGMDVWGQGTTVTVSSGGGGSGGGGSGGGGSDIVMTQTPLSLPVTPGEPASISCRSSQSLLRTNKYNYLDWYLQKPGQSPQLLIYLGSNRASGVPDRFSGSGSGTDFTLKISRVEAEDVGVYYCMQALQSPYTFGCGTKLEIKSGGGGSEVQLVESGGGLVQPGGSLKLSCAASGFTFNKYAMNWVRQAPGKGLEWVARIRSKYNNYATYYADSVKDRFTISRDDSKNTAYLQMNNLKTEDTAVYYCVRHGNFGNSYISYWAYWGQGTLVTVSSGGGGSGGGGSGGGGSQTVVTQEPSLTVSPGGTVTLTCGSSTGAVTSGNYPNWVQQKPGQAPRGLIGGTKFLAPGTPARFSGSLLGGKAALTLSGVQPEDEAEYYCVLWYSNRWVFGGGTKLTVLGGGGDKTHTCPPCPAPELLGGPSVFLFPPKPKDTLMISRTPEVTCVVVDVSHEDPEVKFNWYVDGVEVHNAKTKPCEEQYGSTYRCVSVLTVLHQDWLNGKEYKCKVSNKALPAPIEKTISKAKGQPREPQVYTLPPSREEMTKNQVSLTCLVKGFYPSDIAVEWESNGQPENNYKTTPPVLDSDGSFFLYSKLTVDKSRWQQGNVFSCSVMHEALHNHYTQKSLSLSPGKGGGGSGGGGSGGGGSGGGGSGGGGSGGGGSDKTHTCPPCPAPELLGGPSVFLFPPKPKDTLMISRTPEVTCVVVDVSHEDPEVKFNWYVDGVEVHNAKTKPCEEQYGSTYRCVSVLTVLHQDWLNGKEYKCKVSNKALPAPIEKTISKAKGQPREPQVYTLPPSREEMTKNQVSLTCLVKGFYPSDIAVEWESNGQPENNYKTTPPVLDSDGSFFLYSKLTVDKSRWQQGNVFSCSVMHEALHNHYTQKSLSLSPGK

SEQ ID NO: 627 - protein, 5 aa, Artificial Sequence
  Synthetic
HYAMT

SEQ ID NO: 628 - protein, 17 aa, Artificial Sequence
  Synthetic
AISGGGDTTFYADSVKG

SEQ ID NO: 629 - protein, 10 aa, Artificial Sequence
  Synthetic
DRGYYYGMDV

SEQ ID NO: 630 - protein, 16 aa, Artificial Sequence
  Synthetic
RSSQSLLRTNKYNYLD

SEQ ID NO: 631 - protein, 7 aa, Artificial Sequence
  Synthetic
LGSNRAS

SEQ ID NO: 632 - protein, 9 aa, Artificial Sequence
  Synthetic
MQALQSPYT

SEQ ID NO: 633 - protein, 119 aa, Artificial Sequence; identical to SEQ ID NO: 391
  Synthetic

SEQ ID NO: 634 - protein, 112 aa, Artificial Sequence; identical to SEQ ID NO: 458
  Synthetic

SEQ ID NO: 635 - protein, 246 aa, Artificial Sequence
  Synthetic
EVQLLESGGGLVQPGGSLRLSCAASGFTFSHYAMTWVRQAPGKCLEWVSAISGGGDTTFYADSVKGRFTFSRDNSRNTLYLQMNSLRAEDTAVYYCVKDRGYYYGMDVWGQGTTVTVSSGGGGSGGGGSGGGGSDIVMTQTPLSLPVTPGEPASISCRSSQSLLRTNKYNYLDWYLQKPGQSPQLLIYLGSNRASGVPDRFSGSGSGTDFTLKISRVEAEDVGVYYCMQALQSPYTFGCGTKLEIK

SEQ ID NO: 636 - protein, 501 aa, Artificial Sequence
  Synthetic
EVQLLESGGGLVQPGGSLRLSCAASGFTFSHYAMTWVRQAPGKCLEWVSAISGGGDTTFYADSVKGRFTFSRDNSRNTLYLQMNSLRAEDTAVYYCVKDRGYYYGMDVWGQGTTVTVSSGGGGSGGGGSGGGGSDIVMTQTPLSLPVTPGEPASISCRSSQSLLRTNKYNYLDWYLQKPGQSPQLLIYLGSNRASGVPDRFSGSGSGTDFTLKISRVEAEDVGVYYCMQALQSPYTFGCGTKLEIKSGGGGSEVQLVESGGGLVQPGGSLKLSCAASGFTFNKYAMNWVRQAPGKGLEWVARIRSKYNNYATYYADSVKDRFTISRDDSKNTAYLQMNNLKTEDTAVYYCVRHGNFGNSYISYWAYWGQGTLVTVSSGGGGSGGGGSGGGGSQTVVTQEPSLTVSPGGTVTLTCGSSTGAVTSGNYPNWVQQKPGQAPRGLIGGTKFLAPGTPARFSGSLLGGKAALTLSGVQPEDEAEYYCVLWYSNRWVFGGGTKLTVL

SEQ ID NO: 637 - protein, 989 aa, Artificial Sequence
  Synthetic
EVQLLESGGGLVQPGGSLRLSCAASGFTFSHYAMTWVRQAPGKCLEWVSAISGGGDTTFYADSVKGRFTFSRDNSRNTLYLQMNSLRAEDTAVYYCVKDRGYYYGMDVWGQGTTVTVSSGGGGSGGGGSGGGGSDIVMTQTPLSLPVTPGEPASISCRSSQSLLRTNKYNYLDWYLQKPGQSPQLLIYLGSNRASGVPDRFSGSGSGTDFTLKISRVEAEDVGVYYCMQALQSPYTFGCGTKLEIKSGGGGSEVQLVESGGGLVQPGGSLKLSCAASGFTFNKYAMNWVRQAPGKGLEWVARIRSKYNNYATYYADSVKDRFTISRDDSKNTAYLQMNNLKTEDTAVYYCVRHGNFGNSYISYWAYWGQGTLVTVSSGGGGSGGGGSGGGGSQTVVTQEPSLTVSPGGTVTLTCGSSTGAVTSGNYPNWVQQKPGQAPRGLIGGTKFLAPGTPARFSGSLLGGKAALTLSGVQPEDEAEYYCVLWYSNRWVFGGGTKLTVLGGGGDKTHTCPPCPAPELLGGPSVFLFPPKPKDTLMISRTPEVTCVVVDVSHEDPEVKFNWYVDGVEVHNAKTKPCEEQYGSTYRCVSVLTVLHQDWLNGKEYKCKVSNKALPAPIEKTISKAKGQPREPQVYTLPPSREEMTKNQVSLTCLVKGFYPSDIAVEWESNGQPENNYKTTPPVLDSDGSFFLYSKLTVDKSRWQQGNVFSCSVMHEALHNHYTQKSLSLSPGKGGGGSGGGGSGGGGSGGGGSGGGGSGGGGSDKTHTCPPCPAPELLGGPSVFLFPPKPKDTLMISRTPEVTCVVVDVSHEDPEVKFNWYVDGVEVHNAKTKPCEEQYGSTYRCVSVLTVLHQDWLNGKEYKCKVSNKALPAPIEKTISKAKGQPREPQVYTLPPSREEMTKNQVSLTCLVKGFYPSDIAVEWESNGQPENNYKTTPPVLDSDGSFFLYSKLTVDKSRWQQGNVFSCSVMHEALHNHYTQKSLSLSPGK

SEQ ID NO: 638 - protein, 7 aa, Artificial Sequence
  Synthetic
NARMGVS

SEQ ID NO: 639 - protein, 16 aa, Artificial Sequence
  Synthetic
HIFSNDEKSYSTSLKN

SEQ ID NO: 640 - protein, 14 aa, Artificial Sequence
  Synthetic
IVGYGSGWYGFFDY

SEQ ID NO: 641 - protein, 11 aa, Artificial Sequence
  Synthetic
RASQGIRNDLG

SEQ ID NO: 642 - protein, 7 aa, Artificial Sequence
  Synthetic
AASTLQS

SEQ ID NO: 643 - protein, 9 aa, Artificial Sequence
  Synthetic
LQHNSYPLT

SEQ ID NO: 644 - protein, 124 aa, Artificial Sequence
  Synthetic
QVTLKESGPTLVKPTETLTLTCTLSGFSLNNARMGVSWIRQPPGKCLEWLAHIFSNDEKSYSTSLKNRLTISKDSSKTQVVLTMTNVDPVDTATYYCARIVGYGSGWYGFFDYWGQGTLVTVSS

SEQ ID NO: 645 - protein, 107 aa, Artificial Sequence
  Synthetic
DIQMTQSPSSLSASVGDRVTITCRASQGIRNDLGWYQQKPGKAPKRLIYAASTLQSGVPSRFSGSGSGTEFTLTISSLQPEDFATYYCLQHNSYPLTFGCGTKVEIK

SEQ ID NO: 646 - protein, 247 aa, Artificial Sequence
  Synthetic
QVTLKESGPTLVKPTETLTLTCTLSGFSLNNARMGVSWIRQPPGKCLEWLAHIFSNDEKSYSTSLKNRLTISKDSSKTQVVLTMTNVDPVDTATYYCARIVGYGSGWYGFFDYWGQGTLVTVSSGGGGSGGGGSGGGGSDIQMTQSPSSLSASVGDRVTITCRASQGIRNDLGWYQQKPGKAPKRLIYAASTLQSGVPSRFSGSGSGTEFTLTISSLQPEDFATYYCLQHNSYPLTFGCGTKVEIKS

SEQ ID NO: 647 - protein, 501 aa, Artificial Sequence
  Synthetic
QVTLKESGPTLVKPTETLTLTCTLSGFSLNNARMGVSWIRQPPGKCLEWLAHIFSNDEKSYSTSLKNRLTISKDSSKTQVVLTMTNVDPVDTATYYCARIVGYGSGWYGFFDYWGQGTLVTVSSGGGGSGGGGSGGGGSDIQMTQSPSSLSASVGDRVTITCRASQGIRNDLGWYQQKPGKAPKRLIYAASTLQSGVPSRFSGSGSGTEFTLTISSLQPEDFATYYCLQHNSYPLTFGCGTKVEIKSGGGGSEVQLVESGGGLVQPGGSLKLSCAASGFTFNKYAMNWVRQAPGKGLEWVARIRSKYNNYATYYADSVKDRFTISRDDSKNTAYLQMNNLKTEDTAVYYCVRHGNFGNSYISYWAYWGQGTLVTVSSGGGGSGGGGSGGGGSQTVVTQEPSLTVSPGGTVTLTCGSSTGAVTSGNYPNWVQQKPGQAPRGLIGGTKFLAPGTPARFSGSLLGGKAALTLSGVQPEDEAEYYCVLWYSNRWVFGGGTKLTVL

SEQ ID NO: 648 - protein, 989 aa, Artificial Sequence
  Synthetic
QVTLKESGPTLVKPTETLTLTCTLSGFSLNNARMGVSWIRQPPGKCLEWLAHIFSNDEKSYSTSLKNRLTISKDSSKTQVVLTMTNVDPVDTATYYCARIVGYGSGWYGFFDYWGQGTLVTVSSGGGGSGGGGSGGGGSDIQMTQSPSSLSASVGDRVTITCRASQGIRNDLGWYQQKPGKAPKRLIYAASTLQSGVPSRFSGSGSGTEFTLTISSLQPEDFATYYCLQHNSYPLTFGCGTKVEIKSGGGGSEVQLVESGGGLVQPGGSLKLSCAASGFTFNKYAMNWVRQAPGKGLEWVARIRSKYNNYATYYADSVKDRFTISRDDSKNTAYLQMNNLKTEDTAVYYCVRHGNFGNSYISYWAYWGQGTLVTVSSGGGGSGGGGSGGGGSQTVVTQEPSLTVSPGGTVTLTCGSSTGAVTSGNYPNWVQQKPGQAPRGLIGGTKFLAPGTPARFSGSLLGGKAALTLSGVQPEDEAEYYCVLWYSNRWVFGGGTKLTVLGGGGDKTHTCPPCPAPELLGGPSVFLFPPKPKDTLMISRTPEVTCVVVDVSHEDPEVKFNWYVDGVEVHNAKTKPCEEQYGSTYRCVSVLTVLHQDWLNGKEYKCKVSNKALPAPIEKTISKAKGQPREPQVYTLPPSREEMTKNQVSLTCLVKGFYPSDIAVEWESNGQPENNYKTTPPVLDSDGSFFLYSKLTVDKSRWQQGNVFSCSVMHEALHNHYTQKSLSLSPGKGGGGSGGGGSGGGGSGGGGSGGGGSGGGGSDKTHTCPPCPAPELLGGPSVFLFPPKPKDTLMISRTPEVTCVVVDVSHEDPEVKFNWYVDGVEVHNAKTKPCEEQYGSTYRCVSVLTVLHQDWLNGKEYKCKVSNKALPAPIEKTISKAKGQPREPQVYTLPPSREEMTKNQVSLTCLVKGFYPSDIAVEWESNGQPENNYKTTPPVLDSDGSFFLYSKLTVDKSRWQQGNVFSCSVMHEALHNHYTQKSLSLSPGK

SEQ ID NO: 649 - protein, 7 aa, Artificial Sequence
  Synthetic
NARMGVS

SEQ ID NO: 650 - protein, 16 aa, Artificial Sequence
  Synthetic
HIFSNDEKSYSTSLKS

SEQ ID NO: 651 - protein, 14 aa, Artificial Sequence
  Synthetic
MPEYSSGWSGAFDI

SEQ ID NO: 652 - protein, 11 aa, Artificial Sequence
  Synthetic
RASQDIGYDLG

SEQ ID NO: 653 - protein, 7 aa, Artificial Sequence
  Synthetic
AASTLQS

SEQ ID NO: 654 - protein, 9 aa, Artificial Sequence
  Synthetic
LQHNSFPWT

SEQ ID NO: 655 - protein, 124 aa, Artificial Sequence
  Synthetic
QVTLKESGPALVKPTETLTLTCTVSGFSFRNARMGVSWIRQPPGKALEWLAHIFSNDEKSYSTSLKSRLTISKDTSKSQVVLTLTNMDPVDTATYFCARMPEYSSGWSGAFDIWGQGTMVTVSS

SEQ ID NO: 656 - protein, 107 aa, Artificial Sequence
  Synthetic
DIQMTQSPSSLSASVGDRVTITCRASQDIGYDLGWYQQKPGKAPKRLIYAASTLQSGVPSRFSGSGSGTEFTLIISSLQPEDFATYYCLQHNSFPWTFGQGTKVEIK

SEQ ID NO: 657 - protein, 247 aa, Artificial Sequence
  Synthetic
QVTLKESGPALVKPTETLTLTCTVSGFSFRNARMGVSWIRQPPGKALEWLAHIFSNDEKSYSTSLKSRLTISKDTSKSQVVLTLTNMDPVDTATYFCARMPEYSSGWSGAFDIWGQGTMVTVSSGGGGSGGGGSGGGGSDIQMTQSPSSLSASVGDRVTITCRASQDIGYDLGWYQQKPGKAPKRLIYAASTLQSGVPSRFSGSGSGTEFTLIISSLQPEDFATYYCLQHNSFPWTFGQGTKVEIKS

SEQ ID NO: 658 - protein, 501 aa, Artificial Sequence
  Synthetic
QVTLKESGPALVKPTETLTLTCTVSGFSFRNARMGVSWIRQPPGKALEWLAHIFSNDEKSYSTSLKSRLTISKDTSKSQVVLTLTNMDPVDTATYFCARMPEYSSGWSGAFDIWGQGTMVTVSSGGGGSGGGGSGGGGSDIQMTQSPSSLSASVGDRVTITCRASQDIGYDLGWYQQKPGKAPKRLIYAASTLQSGVPSRFSGSGSGTEFTLIISSLQPEDFATYYCLQHNSFPWTFGQGTKVEIKSGGGGSEVQLVESGGGLVQPGGSLKLSCAASGFTFNKYAMNWVRQAPGKGLEWVARIRSKYNNYATYYADSVKDRFTISRDDSKNTAYLQMNNLKTEDTAVYYCVRHGNFGNSYISYWAYWGQGTLVTVSSGGGGSGGGGSGGGGSQTVVTQEPSLTVSPGGTVTLTCGSSTGAVTSGNYPNWVQQKPGQAPRGLIGGTKFLAPGTPARFSGSLLGGKAALTLSGVQPEDEAEYYCVLWYSNRWVFGGGTKLTVL

SEQ ID NO: 659 - protein, 989 aa, Artificial Sequence
  Synthetic
QVTLKESGPALVKPTETLTLTCTVSGFSFRNARMGVSWIRQPPGKALEWLAHIFSNDEKSYSTSLKSRLTISKDTSKSQVVLTLTNMDPVDTATYFCARMPEYSSGWSGAFDIWGQGTMVTVSSGGGGSGGGGSGGGGSDIQMTQSPSSLSASVGDRVTITCRASQDIGYDLGWYQQKPGKAPKRLIYAASTLQSGVPSRFSGSGSGTEFTLIISSLQPEDFATYYCLQHNSFPWTFGQGTKVEIKSGGGGSEVQLVESGGGLVQPGGSLKLSCAASGFTFNKYAMNWVRQAPGKGLEWVARIRSKYNNYATYYADSVKDRFTISRDDSKNTAYLQMNNLKTEDTAVYYCVRHGNFGNSYISYWAYWGQGTLVTVSSGGGGSGGGGSGGGGSQTVVTQEPSLTVSPGGTVTLTCGSSTGAVTSGNYPNWVQQKPGQAPRGLIGGTKFLAPGTPARFSGSLLGGKAALTLSGVQPEDEAEYYCVLWYSNRWVFGGGTKLTVLGGGGDKTHTCPPCPAPELLGGPSVFLFPPKPKDTLMISRTPEVTCVVVDVSHEDPEVKFNWYVDGVEVHNAKTKPCEEQYGSTYRCVSVLTVLHQDWLNGKEYKCKVSNKALPAPIEKTISKAKGQPREPQVYTLPPSREEMTKNQVSLTCLVKGFYPSDIAVEWESNGQPENNYKTTPPVLDSDGSFFLYSKLTVDKSRWQQGNVFSCSVMHEALHNHYTQKSLSLSPGKGGGGSGGGGSGGGGSGGGGSGGGGSGGGGSDKTHTCPPCPAPELLGGPSVFLFPPKPKDTLMISRTPEVTCVVVDVSHEDPEVKFNWYVDGVEVHNAKTKPCEEQYGSTYRCVSVLTVLHQDWLNGKEYKCKVSNKALPAPIEKTISKAKGQPREPQVYTLPPSREEMTKNQVSLTCLVKGFYPSDIAVEWESNGQPENNYKTTPPVLDSDGSFFLYSKLTVDKSRWQQGNVFSCSVMHEALHNHYTQKSLSLSPGK

SEQ ID NO: 660 - protein, 7 aa, Artificial Sequence
  Synthetic
NARMAVS

SEQ ID NO: 661 - protein, 16 aa, Artificial Sequence
  Synthetic
HIFSNDEKSYSTSLKS

SEQ ID NO: 662 - protein, 14 aa, Artificial Sequence
  Synthetic
IVGYGTGWYGFFDY

SEQ ID NO: 663 - protein, 11 aa, Artificial Sequence
  Synthetic
RASQGIRNDLA

SEQ ID NO: 664 - protein, 7 aa, Artificial Sequence
  Synthetic
AASSLQS

SEQ ID NO: 665 - protein, 9 aa, Artificial Sequence
  Synthetic
LQHNSYPLT

SEQ ID NO: 666 - protein, 124 aa, Artificial Sequence
  Synthetic
QVTLKESGPALVKPTETLTLTCTLSGFSLNNARMAVSWIRQPPGKCLEWLAHIFSNDEKSYSTSLKSRLTISKDTSKSQVVLTMTNMDPEDTATYYCARIVGYGTGWYGFFDYWGQGILVTVSS

SEQ ID NO: 667 - protein, 107 aa, Artificial Sequence
  Synthetic
DIQMTQSPSSLSASVGDRVTITCRASQGIRNDLAWYQQKPGKAPKRLIYAASSLQSGVPSRFSGSGSGTEFTLTISSLQPEDFATYYCLQHNSYPLTFGCGTKVEIK

SEQ ID NO: 668 - protein, 247 aa, Artificial Sequence
  Synthetic
QVTLKESGPALVKPTETLTLTCTLSGFSLNNARMAVSWIRQPPGKCLEWLAHIFSNDEKSYSTSLKSRLTISKDTSKSQVVLTMTNMDPEDTATYYCARIVGYGTGWYGFFDYWGQGILVTVSSGGGGSGGGGSGGGGSDIQMTQSPSSLSASVGDRVTITCRASQGIRNDLAWYQQKPGKAPKRLIYAASSLQSGVPSRFSGSGSGTEFTLTISSLQPEDFATYYCLQHNSYPLTFGCGTKVEIKS

SEQ ID NO: 669 - protein, 501 aa, Artificial Sequence
  Synthetic
QVTLKESGPALVKPTETLTLTCTLSGFSLNNARMAVSWIRQPPGKCLEWLAHIFSNDEKSYSTSLKSRLTISKDTSKSQVVLTMTNMDPEDTATYYCARIVGYGTGWYGFFDYWGQGILVTVSSGGGGSGGGGSGGGGSDIQMTQSPSSLSASVGDRVTITCRASQGIRNDLAWYQQKPGKAPKRLIYAASSLQSGVPSRFSGSGSGTEFTLTISSLQPEDFATYYCLQHNSYPLTFGCGTKVEIKSGGGGSEVQLVESGGGLVQPGGSLKLSCAASGFTFNKYAMNWVRQAPGKGLEWVARIRSKYNNYATYYADSVKDRFTISRDDSKNTAYLQMNNLKTEDTAVYYCVRHGNFGNSYISYWAYWGQGTLVTVSSGGGGSGGGGSGGGGSQTVVTQEPSLTVSPGGTVTLTCGSSTGAVTSGNYPNWVQQKPGQAPRGLIGGTKFLAPGTPARFSGSLLGGKAALTLSGVQPEDEAEYYCVLWYSNRWVFGGGTKLTVL

SEQ ID NO: 670 - protein, 989 aa, Artificial Sequence
  Synthetic
QVTLKESGPALVKPTETLTLTCTLSGFSLNNARMAVSWIRQPPGKCLEWLAHIFSNDEKSYSTSLKSRLTISKDTSKSQVVLTMTNMDPEDTATYYCARIVGYGTGWYGFFDYWGQGILVTVSSGGGGSGGGGSGGGGSDIQMTQSPSSLSASVGDRVTITCRASQGIRNDLAWYQQKPGKAPKRLIYAASSLQSGVPSRFSGSGSGTEFTLTISSLQPEDFATYYCLQHNSYPLTFGCGTKVEIKSGGGGSEVQLVESGGGLVQPGGSLKLSCAASGFTFNKYAMNWVRQAPGKGLEWVARIRSKYNNYATYYADSVKDRFTISRDDSKNTAYLQMNNLKTEDTAVYYCVRHGNFGNSYISYWAYWGQGTLVTVSSGGGGSGGGGSGGGGSQTVVTQEPSLTVSPGGTVTLTCGSSTGAVTSGNYPNWVQQKPGQAPRGLIGGTKFLAPGTPARFSGSLLGGKAALTLSGVQPEDEAEYYCVLWYSNRWVFGGGTKLTVLGGGGDKTHTCPPCPAPELLGGPSVFLFPPKPKDTLMISRTPEVTCVVVDVSHEDPEVKFNWYVDGVEVHNAKTKPCEEQYGSTYRCVSVLTVLHQDWLNGKEYKCKVSNKALPAPIEKTISKAKGQPREPQVYTLPPSREEMTKNQVSLTCLVKGFYPSDIAVEWESNGQPENNYKTTPPVLDSDGSFFLYSKLTVDKSRWQQGNVFSCSVMHEALHNHYTQKSLSLSPGKGGGGSGGGGSGGGGSGGGGSGGGGSGGGGSDKTHTCPPCPAPELLGGPSVFLFPPKPKDTLMISRTPEVTCVVVDVSHEDPEVKFNWYVDGVEVHNAKTKPCEEQYGSTYRCVSVLTVLHQDWLNGKEYKCKVSNKALPAPIEKTISKAKGQPREPQVYTLPPSREEMTKNQVSLTCLVKGFYPSDIAVEWESNGQPENNYKTTPPVLDSDGSFFLYSKLTVDKSRWQQGNVFSCSVMHEALHNHYTQKSLSLSPGK

SEQ ID NO: 671 - protein, 499 aa, Artificial Sequence
  Synthetic
QVTLKESGPTLVKPTETLTLTCTLSGFSLNNARMGVSWIRQPPGKCLEWLAHIFSNDEKSYSTSLKNRLTISKDSSKTQVVLTMTNVDPVDTATYYCARIVGYGSGWYGFFDYWGQGTLVTVSSGGGGSGGGGSGGGGSDIQMTQSPSSLSASVGDRVTITCRASQGIRNDLGWYQQKPGKAPKRLIYAASTLQSGVPSRFSGSGSGTEFTLTISSLQPEDFATYYCLQHNSYPLTFGCGTKVEIKSGGGGSEVQLLESGGGLVQPGGSLRLSCAASGFTFSHYAMSWVRQAPGKCLEWVSAVSGGGDKTLYADAVKGRFTISRDNSKNTLFLQMNSLRAEDTAIYYCARLRGFYYGMDVWGQGTTVTVSSGGGGSGGGGSGGGGSDIVLTQSPLSLPVTPGEPASISCRSSQSLLHSNKYNYLDWYLQKPGQSPQLLIYLGSNRASGVPDRFSGSGSGTDFTLKISRVEAEDVGVYYCMQALQTPPITFGCGTRLEIK

SEQ ID NO: 672 - protein, 754 aa, Artificial Sequence
  Synthetic
QVTLKESGPTLVKPTETLTLTCTLSGFSLNNARMGVSWIRQPPGKCLEWLAHIFSNDEKSYSTSLKNRLTISKDSSKTQVVLTMTNVDPVDTATYYCARIVGYGSGWYGFFDYWGQGTLVTVSSGGGGSGGGGSGGGGSDIQMTQSPSSLSASVGDRVTITCRASQGIRNDLGWYQQKPGKAPKRLIYAASTLQSGVPSRFSGSGSGTEFTLTISSLQPEDFATYYCLQHNSYPLTFGCGTKVEIKSGGGGSEVQLLESGGGLVQPGGSLRLSCAASGFTFSHYAMSWVRQAPGKCLEWVSAVSGGGDKTLYADAVKGRFTISRDNSKNTLFLQMNSLRAEDTAIYYCARLRGFYYGMDVWGQGTTVTVSSGGGGSGGGGSGGGGSDIVLTQSPLSLPVTPGEPASISCRSSQSLLHSNKYNYLDWYLQKPGQSPQLLIYLGSNRASGVPDRFSGSGSGTDFTLKISRVEAEDVGVYYCMQALQTPPITFGCGTRLEIKSGGGGSEVQLVESGGGLVQPGGSLKLSCAASGFTFNKYAMNWVRQAPGKGLEWVARIRSKYNNYATYYADSVKDRFTISRDDSKNTAYLQMNNLKTEDTAVYYCVRHGNFGNSYISYWAYWGQGTLVTVSSGGGGSGGGGSGGGGSQTVVTQEPSLTVSPGGTVTLTCGSSTGAVTSGNYPNWVQQKPGQAPRGLIGGTKFLAPGTPARFSGSLLGGKAALTLSGVQPEDEAEYYCVLWYSNRWVFGGGTKLTVL

SEQ ID NO: 673 - protein, 1242 aa, Artificial Sequence
  Synthetic
QVTLKESGPTLVKPTETLTLTCTLSGFSLNNARMGVSWIRQPPGKCLEWLAHIFSNDEKSYSTSLKNRLTISKDSSKTQVVLTMTNVDPVDTATYYCARIVGYGSGWYGFFDYWGQGTLVTVSSGGGGSGGGGSGGGGSDIQMTQSPSSLSASVGDRVTITCRASQGIRNDLGWYQQKPGKAPKRLIYAASTLQSGVPSRFSGSGSGTEFTLTISSLQPEDFATYYCLQHNSYPLTFGCGTKVEIKSGGGGSEVQLLESGGGLVQPGGSLRLSCAASGFTFSHYAMSWVRQAPGKCLEWVSAVSGGGDKTLYADAVKGRFTISRDNSKNTLFLQMNSLRAEDTAIYYCARLRGFYYGMDVWGQGTTVTVSSGGGGSGGGGSGGGGSDIVLTQSPLSLPVTPGEPASISCRSSQSLLHSNKYNYLDWYLQKPGQSPQLLIYLGSNRASGVPDRFSGSGSGTDFTLKISRVEAEDVGVYYCMQALQTPPITFGCGTRLEIKSGGGGSEVQLVESGGGLVQPGGSLKLSCAASGFTFNKYAMNWVRQAPGKGLEWVARIRSKYNNYATYYADSVKDRFTISRDDSKNTAYLQMNNLKTEDTAVYYCVRHGNFGNSYISYWAYWGQGTLVTVSSGGGGSGGGGSGGGGSQTVVTQEPSLTVSPGGTVTLTCGSSTGAVTSGNYPNWVQQKPGQAPRGLIGGTKFLAPGTPARFSGSLLGGKAALTLSGVQPEDEAEYYCVLWYSNRWVFGGGTKLTVLGGGGDKTHTCPPCPAPELLGGPSVFLFPPKPKDTLMISRTPEVTCVVVDVSHEDPEVKFNWYVDGVEVHNAKTKPCEEQYGSTYRCVSVLTVLHQDWLNGKEYKCKVSNKALPAPIEKTISKAKGQPREPQVYTLPPSREEMTKNQVSLTCLVKGFYPSDIAVEWESNGQPENNYKTTPPVLDSDGSFFLYSKLTVDKSRWQQGNVFSCSVMHEALHNHYTQKSLSLSPGKGGGGSGGGGSGGGGSGGGGSGGGGSGGGGSDKTHTCPPCPAPELLGGPSVFLFPPKPKDTLMISRTPEVTCVVVDVSHEDPEVKFNWYVDGVEVHNAKTKPCEEQYGSTYRCVSVLTVLHQDWLNGKEYKCKVSNKALPAPIEKTISKAKGQPREPQVYTLPPSREEMTKNQVSLTCLVKGFYPSDIAVEWESNGQPENNYKTTPPVLDSDGSFFLYSKLTVDKSRWQQGNVFSCSVMHEALHNHYTQKSLSLSPGK

SEQ ID NO: 674 - protein, 498 aa, Artificial Sequence
  Synthetic
QVTLKESGPTLVKPTETLTLTCTLSGFSLNNARMGVSWIRQPPGKCLEWLAHIFSNDEKSYSTSLKNRLTISKDSSKTQVVLTMTNVDPVDTATYYCARIVGYGSGWYGFFDYWGQGTLVTVSSGGGGSGGGGSGGGGSDIQMTQSPSSLSASVGDRVTITCRASQGIRNDLGWYQQKPGKAPKRLIYAASTLQSGVPSRFSGSGSGTEFTLTISSLQPEDFATYYCLQHNSYPLTFGCGTKVEIKSGGGGSEVQLLESGGGLVQPGGSLRLSCAASGFTFSHYAMSWVRQAPGKCLEWVSAISGGGDRTFYADSVKGRFTVSRDNSKNTLYLQMNSLRAEDTAVYYCAKLRGFYYGMDVWGQGTTVTVSSGGGGSGGGGSGGGGSDIVMTQSPLSLPVTPGEPASISCRSSQSLLHSNGYNYLDWYLQQPGQSPQLLIYLGSNRASGVPDRFSASGSGTDFTLKISRVEAEDVGVYYCMQGTHWPHTFGCGTKVDIK

SEQ ID NO: 675 - protein, 753 aa, Artificial Sequence
  Synthetic
QVTLKESGPTLVKPTETLTLTCTLSGFSLNNARMGVSWIRQPPGKCLEWLAHIFSNDEKSYSTSLKNRLTISKDSSKTQVVLTMTNVDPVDTATYYCARIVGYGSGWYGFFDYWGQGTLVTVSSGGGGSGGGGSGGGGSDIQMTQSPSSLSASVGDRVTITCRASQGIRNDLGWYQQKPGKAPKRLIYAASTLQSGVPSRFSGSGSGTEFTLTISSLQPEDFATYYCLQHNSYPLTFGCGTKVEIKSGGGGSEVQLLESGGGLVQPGGSLRLSCAASGFTFSHYAMSWVRQAPGKCLEWVSAISGGGDRTFYADSVKGRFTVSRDNSKNTLYLQMNSLRAEDTAVYYCAKLRGFYYGMDVWGQGTTVTVSSGGGGSGGGGSGGGGSDIVMTQSPLSLPVTPGEPASISCRSSQSLLHSNGYNYLDWYLQQPGQSPQLLIYLGSNRASGVPDRFSASGSGTDFTLKISRVEAEDVGVYYCMQGTHWPHTFGCGTKVDIKSGGGGSEVQLVESGGGLVQPGGSLKLSCAASGFTFNKYAMNWVRQAPGKGLEWVARIRSKYNNYATYYADSVKDRFTISRDDSKNTAYLQMNNLKTEDTAVYYCVRHGNFGNSYISYWAYWGQGTLVTVSSGGGGSGGGGSGGGGSQTVVTQEPSLTVSPGGTVTLTCGSSTGAVTSGNYPNWVQQKPGQAPRGLIGGTKFLAPGTPARFSGSLLGGKAALTLSGVQPEDEAEYYCVLWYSNRWVFGGGTKLTVL

SEQ ID NO: 676 - protein, 1241 aa, Artificial Sequence
  Synthetic
QVTLKESGPTLVKPTETLTLTCTLSGFSLNNARMGVSWIRQPPGKCLEWLAHIFSNDEKSYSTSLKNRLTISKDSSKTQVVLTMTNVDPVDTATYYCARIVGYGSGWYGFFDYWGQGTLVTVSSGGGGSGGGGSGGGGSDIQMTQSPSSLSASVGDRVTITCRASQGIRNDLGWYQQKPGKAPKRLIYAASTLQSGVPSRFSGSGSGTEFTLTISSLQPEDFATYYCLQHNSYPLTFGCGTKVEIKSGGGGSEVQLLESGGGLVQPGGSLRLSCAASGFTFSHYAMSWVRQAPGKCLEWVSAISGGGDRTFYADSVKGRFTVSRDNSKNTLYLQMNSLRAEDTAVYYCAKLRGFYYGMDVWGQGTTVTVSSGGGGSGGGGSGGGGSDIVMTQSPLSLPVTPGEPASISCRSSQSLLHSNGYNYLDWYLQQPGQSPQLLIYLGSNRASGVPDRFSASGSGTDFTLKISRVEAEDVGVYYCMQGTHWPHTFGCGTKVDIKSGGGGSEVQLVESGGGLVQPGGSLKLSCAASGFTFNKYAMNWVRQAPGKGLEWVARIRSKYNNYATYYADSVKDRFTISRDDSKNTAYLQMNNLKTEDTAVYYCVRHGNFGNSYISYWAYWGQGTLVTVSSGGGGSGGGGSGGGGSQTVVTQEPSLTVSPGGTVTLTCGSSTGAVTSGNYPNWVQQKPGQAPRGLIGGTKFLAPGTPARFSGSLLGGKAALTLSGVQPEDEAEYYCVLWYSNRWVFGGGTKLTVLGGGGDKTHTCPPCPAPELLGGPSVFLFPPKPKDTLMISRTPEVTCVVVDVSHEDPEVKFNWYVDGVEVHNAKTKPCEEQYGSTYRCVSVLTVLHQDWLNGKEYKCKVSNKALPAPIEKTISKAKGQPREPQVYTLPPSREEMTKNQVSLTCLVKGFYPSDIAVEWESNGQPENNYKTTPPVLDSDGSFFLYSKLTVDKSRWQQGNVFSCSVMHEALHNHYTQKSLSLSPGKGGGGSGGGGSGGGGSGGGGSGGGGSGGGGSDKTHTCPPCPAPELLGGPSVFLFPPKPKDTLMISRTPEVTCVVVDVSHEDPEVKFNWYVDGVEVHNAKTKPCEEQYGSTYRCVSVLTVLHQDWLNGKEYKCKVSNKALPAPIEKTISKAKGQPREPQVYTLPPSREEMTKNQVSLTCLVKGFYPSDIAVEWESNGQPENNYKTTPPVLDSDGSFFLYSKLTVDKSRWQQGNVFSCSVMHEALHNHYTQKSLSLSPGK

SEQ ID NO: 677 - protein, 498 aa, Artificial Sequence
  Synthetic
QVTLKESGPTLVKPTETLTLTCTLSGFSLNNARMGVSWIRQPPGKCLEWLAHIFSNDEKSYSTSLKNRLTISKDSSKTQVVLTMTNVDPVDTATYYCARIVGYGSGWYGFFDYWGQGTLVTVSSGGGGSGGGGSGGGGSDIQMTQSPSSLSASVGDRVTITCRASQGIRNDLGWYQQKPGKAPKRLIYAASTLQSGVPSRFSGSGSGTEFTLTISSLQPEDFATYYCLQHNSYPLTFGCGTKVEIKSGGGGSEVQLLESGGGLVQPGGSLRLSCAASGFTFSHYAMSWVRQAPGKCLEWVSAISGGGDRTFYADAVKGRFTVSRDNSKNTLYLQMNSLRAEDTAVYYCAKLRGFYYGMDVWGQGTTVTVSSGGGGSGGGGSGGGGSDIVMTQSPLSLPVTPGEPASISCRSSQSLLHSQGYNYLDWYLQQPGQSPQLLIYLGSNRASGVPDRFSASGSGTDFTLKISRVEAEDVGVYYCMQGTHWPHTFGCGTKVDIK

SEQ ID NO: 678 - protein, 753 aa, Artificial Sequence
  Synthetic
QVTLKESGPTLVKPTETLTLTCTLSGFSLNNARMGVSWIRQPPGKCLEWLAHIFSNDEKSYSTSLKNRLTISKDSSKTQVVLTMTNVDPVDTATYYCARIVGYGSGWYGFFDYWGQGTLVTVSSGGGGSGGGGSGGGGSDIQMTQSPSSLSASVGDRVTITCRASQGIRNDLGWYQQKPGKAPKRLIYAASTLQSGVPSRFSGSGSGTEFTLTISSLQPEDFATYYCLQHNSYPLTFGCGTKVEIKSGGGGSEVQLLESGGGLVQPGGSLRLSCAASGFTFSHYAMSWVRQAPGKCLEWVSAISGGGDRTFYADAVKGRFTVSRDNSKNTLYLQMNSLRAEDTAVYYCAKLRGFYYGMDVWGQGTTVTVSSGGGGSGGGGSGGGGSDIVMTQSPLSLPVTPGEPASISCRSSQSLLHSQGYNYLDWYLQQPGQSPQLLIYLGSNRASGVPDRFSASGSGTDFTLKISRVEAEDVGVYYCMQGTHWPHTFGCGTKVDIKSGGGGSEVQLVESGGGLVQPGGSLKLSCAASGFTFNKYAMNWVRQAPGKGLEWVARIRSKYNNYATYYADSVKDRFTISRDDSKNTAYLQMNNLKTEDTAVYYCVRHGNFGNSYISYWAYWGQGTLVTVSSGGGGSGGGGSGGGGSQTVVTQEPSLTVSPGGTVTLTCGSSTGAVTSGNYPNWVQQKPGQAPRGLIGGTKFLAPGTPARFSGSLLGGKAALTLSGVQPEDEAEYYCVLWYSNRWVFGGGTKLTVL

SEQ ID NO: 679 - protein, 1241 aa, Artificial Sequence
  Synthetic
QVTLKESGPTLVKPTETLTLTCTLSGFSLNNARMGVSWIRQPPGKCLEWLAHIFSNDEKSYSTSLKNRLTISKDSSKTQVVLTMTNVDPVDTATYYCARIVGYGSGWYGFFDYWGQGTLVTVSSGGGGSGGGGSGGGGSDIQMTQSPSSLSASVGDRVTITCRASQGIRNDLGWYQQKPGKAPKRLIYAASTLQSGVPSRFSGSGSGTEFTLTISSLQPEDFATYYCLQHNSYPLTFGCGTKVEIKSGGGGSEVQLLESGGGLVQPGGSLRLSCAASGFTFSHYAMSWVRQAPGKCLEWVSAISGGGDRTFYADAVKGRFTVSRDNSKNTLYLQMNSLRAEDTAVYYCAKLRGFYYGMDVWGQGTTVTVSSGGGGSGGGGSGGGGSDIVMTQSPLSLPVTPGEPASISCRSSQSLLHSQGYNYLDWYLQQPGQSPQLLIYLGSNRASGVPDRFSASGSGTDFTLKISRVEAEDVGVYYCMQGTHWPHTFGCGTKVDIKSGGGGSEVQLVESGGGLVQPGGSLKLSCAASGFTFNKYAMNWVRQAPGKGLEWVARIRSKYNNYATYYADSVKDRFTISRDDSKNTAYLQMNNLKTEDTAVYYCVRHGNFGNSYISYWAYWGQGTLVTVSSGGGGSGGGGSGGGGSQTVVTQEPSLTVSPGGTVTLTCGSSTGAVTSGNYPNWVQQKPGQAPRGLIGGTKFLAPGTPARFSGSLLGGKAALTLSGVQPEDEAEYYCVLWYSNRWVFGGGTKLTVLGGGGDKTHTCPPCPAPELLGGPSVFLFPPKPKDTLMISRTPEVTCVVVDVSHEDPEVKFNWYVDGVEVHNAKTKPCEEQYGSTYRCVSVLTVLHQDWLNGKEYKCKVSNKALPAPIEKTISKAKGQPREPQVYTLPPSREEMTKNQVSLTCLVKGFYPSDIAVEWESNGQPENNYKTTPPVLDSDGSFFLYSKLTVDKSRWQQGNVFSCSVMHEALHNHYTQKSLSLSPGKGGGGSGGGGSGGGGSGGGGSGGGGSGGGGSDKTHTCPPCPAPELLGGPSVFLFPPKPKDTLMISRTPEVTCVVVDVSHEDPEVKFNWYVDGVEVHNAKTKPCEEQYGSTYRCVSVLTVLHQDWLNGKEYKCKVSNKALPAPIEKTISKAKGQPREPQVYTLPPSREEMTKNQVSLTCLVKGFYPSDIAVEWESNGQPENNYKTTPPVLDSDGSFFLYSKLTVDKSRWQQGNVFSCSVMHEALHNHYTQKSLSLSPGK

SEQ ID NO: 680 - protein, 498 aa, Artificial Sequence
  Synthetic
QVTLKESGPTLVKPTETLTLTCTLSGFSLNNARMGVSWIRQPPGKCLEWLAHIFSNDEKSYSTSLKNRLTISKDSSKTQVVLTMTNVDPVDTATYYCARIVGYGSGWYGFFDYWGQGTLVTVSSGGGGSGGGGSGGGGSDIQMTQSPSSLSASVGDRVTITCRASQGIRNDLGWYQQKPGKAPKRLIYAASTLQSGVPSRFSGSGSGTEFTLTISSLQPEDFATYYCLQHNSYPLTFGCGTKVEIKSGGGGSEVQLLESGGGLVQPGGSLRLSCAASGFTFSHYAMSWVRQAPGKCLEWVSAISGGGDRTFYADAVKGRFTVSRDNSKNTLYLQMNSLRAEDTAVYYCAKLRGFYYGMDVWGQGTTVTVSSGGGGSGGGGSGGGGSDIVMTQSPLSLPVTPGEPASISCRSSQSLLHSNAYNYLDWYLQQPGQSPQLLIYLGSNRASGVPDRFSASGSGTDFTLKISRVEAEDVGVYYCMQGTHWPHTFGCGTKVDIK

SEQ ID NO: 681 - protein, 753 aa, Artificial Sequence
  Synthetic
QVTLKESGPTLVKPTETLTLTCTLSGFSLNNARMGVSWIRQPPGKCLEWLAHIFSNDEKSYSTSLKNRLTISKDSSKTQVVLTMTNVDPVDTATYYCARIVGYGSGWYGFFDYWGQGTLVTVSSGGGGSGGGGSGGGGSDIQMTQSPSSLSASVGDRVTITCRASQGIRNDLGWYQQKPGKAPKRLIYAASTLQSGVPSRFSGSGSGTEFTLTISSLQPEDFATYYCLQHNSYPLTFGCGTKVEIKSGGGGSEVQLLESGGGLVQPGGSLRLSCAASGFTFSHYAMSWVRQAPGKCLEWVSAISGGGDRTFYADAVKGRFTVSRDNSKNTLYLQMNSLRAEDTAVYYCAKLRGFYYGMDVWGQGTTVTVSSGGGGSGGGGSGGGGSDIVMTQSPLSLPVTPGEPASISCRSSQSLLHSNAYNYLDWYLQQPGQSPQLLIYLGSNRASGVPDRFSASGSGTDFTLKISRVEAEDVGVYYCMQGTHWPHTFGCGTKVDIKSGGGGSEVQLVESGGGLVQPGGSLKLSCAASGFTFNKYAMNWVRQAPGKGLEWVARIRSKYNNYATYYADSVKDRFTISRDDSKNTAYLQMNNLKTEDTAVYYCVRHGNFGNSYISYWAYWGQGTLVTVSSGGGGSGGGGSGGGGSQTVVTQEPSLTVSPGGTVTLTCGSSTGAVTSGNYPNWVQQKPGQAPRGLIGGTKFLAPGTPARFSGSLLGGKAALTLSGVQPEDEAEYYCVLWYSNRWVFGGGTKLTVL

SEQ ID NO: 682 - protein, 1241 aa, Artificial Sequence
  Synthetic
QVTLKESGPTLVKPTETLTLTCTLSGFSLNNARMGVSWIRQPPGKCLEWLAHIFSNDEKSYSTSLKNRLTISKDSSKTQVVLTMTNVDPVDTATYYCARIVGYGSGWYGFFDYWGQGTLVTVSSGGGGSGGGGSGGGGSDIQMTQSPSSLSASVGDRVTITCRASQGIRNDLGWYQQKPGKAPKRLIYAASTLQSGVPSRFSGSGSGTEFTLTISSLQPEDFATYYCLQHNSYPLTFGCGTKVEIKSGGGGSEVQLLESGGGLVQPGGSLRLSCAASGFTFSHYAMSWVRQAPGKCLEWVSAISGGGDRTFYADAVKGRFTVSRDNSKNTLYLQMNSLRAEDTAVYYCAKLRGFYYGMDVWGQGTTVTVSSGGGGSGGGGSGGGGSDIVMTQSPLSLPVTPGEPASISCRSSQSLLHSNAYNYLDWYLQQPGQSPQLLIYLGSNRASGVPDRFSASGSGTDFTLKISRVEAEDVGVYYCMQGTHWPHTFGCGTKVDIKSGGGGSEVQLVESGGGLVQPGGSLKLSCAASGFTFNKYAMNWVRQAPGKGLEWVARIRSKYNNYATYYADSVKDRFTISRDDSKNTAYLQMNNLKTEDTAVYYCVRHGNFGNSYISYWAYWGQGTLVTVSSGGGGSGGGGSGGGGSQTVVTQEPSLTVSPGGTVTLTCGSSTGAVTSGNYPNWVQQKPGQAPRGLIGGTKFLAPGTPARFSGSLLGGKAALTLSGVQPEDEAEYYCVLWYSNRWVFGGGTKLTVLGGGGDKTHTCPPCPAPELLGGPSVFLFPPKPKDTLMISRTPEVTCVVVDVSHEDPEVKFNWYVDGVEVHNAKTKPCEEQYGSTYRCVSVLTVLHQDWLNGKEYKCKVSNKALPAPIEKTISKAKGQPREPQVYTLPPSREEMTKNQVSLTCLVKGFYPSDIAVEWESNGQPENNYKTTPPVLDSDGSFFLYSKLTVDKSRWQQGNVFSCSVMHEALHNHYTQKSLSLSPGKGGGGSGGGGSGGGGSGGGGSGGGGSGGGGSDKTHTCPPCPAPELLGGPSVFLFPPKPKDTLMISRTPEVTCVVVDVSHEDPEVKFNWYVDGVEVHNAKTKPCEEQYGSTYRCVSVLTVLHQDWLNGKEYKCKVSNKALPAPIEKTISKAKGQPREPQVYTLPPSREEMTKNQVSLTCLVKGFYPSDIAVEWESNGQPENNYKTTPPVLDSDGSFFLYSKLTVDKSRWQQGNVFSCSVMHEALHNHYTQKSLSLSPGK

SEQ ID NO: 683 - protein, 501 aa, Artificial Sequence
  Synthetic
QVTLKESGPTLVKPTETLTLTCTLSGFSLNNARMGVSWIRQPPGKCLEWLAHIFSNDEKSYSTSLKNRLTISKDSSKTQVVLTMTNVDPVDTATYYCARIVGYGSGWYGFFDYWGQGTLVTVSSGGGGSGGGGSGGGGSDIQMTQSPSSLSASVGDRVTITCRASQGIRNDLGWYQQKPGKAPKRLIYAASTLQSGVPSRFSGSGSGTEFTLTISSLQPEDFATYYCLQHNSYPLTFGCGTKVEIKSGGGGSEVQLLESGGGLVQPGGSLRLSCAASGFSFNSYAMSWVRQAPGKCLEWVSTVSGGGDRTYYADAVKGRFTISRDNSKNTLYLQMNSLRAEDTAVYYCAKNRGEGTTFYGMGAWGQGTMVTVSSGGGGSGGGGSGGGGSDIVLTQSPLSLPVTPGEPASISCRSSQSLLHSQAYNYLDWYLQKPGQSPQLLIYLGSNRASGVPDRFSGSGSGTDFTLKISRVEAEDVGVYYCMQALQTPLTFGCGTKVDIK

SEQ ID NO: 684 - protein, 756 aa, Artificial Sequence
  Synthetic
QVTLKESGPTLVKPTETLTLTCTLSGFSLNNARMGVSWIRQPPGKCLEWLAHIFSNDEKSYSTSLKNRLTISKDSSKTQVVLTMTNVDPVDTATYYCARIVGYGSGWYGFFDYWGQGTLVTVSSGGGGSGGGGSGGGGSDIQMTQSPSSLSASVGDRVTITCRASQGIRNDLGWYQQKPGKAPKRLIYAASTLQSGVPSRFSGSGSGTEFTLTISSLQPEDFATYYCLQHNSYPLTFGCGTKVEIKSGGGGSEVQLLESGGGLVQPGGSLRLSCAASGFSFNSYAMSWVRQAPGKCLEWVSTVSGGGDRTYYADAVKGRFTISRDNSKNTLYLQMNSLRAEDTAVYYCAKNRGEGTTFYGMGAWGQGTMVTVSSGGGGSGGGGSGGGGSDIVLTQSPLSLPVTPGEPASISCRSSQSLLHSQAYNYLDWYLQKPGQSPQLLIYLGSNRASGVPDRFSGSGSGTDFTLKISRVEAEDVGVYYCMQALQTPLTFGCGTKVDIKSGGGGSEVQLVESGGGLVQPGGSLKLSCAASGFTFNKYAMNWVRQAPGKGLEWVARIRSKYNNYATYYADSVKDRFTISRDDSKNTAYLQMNNLKTEDTAVYYCVRHGNFGNSYISYWAYWGQGTLVTVSSGGGGSGGGGSGGGGSQTVVTQEPSLTVSPGGTVTLTCGSSTGAVTSGNYPNWVQQKPGQAPRGLIGGTKFLAPGTPARFSGSLLGGKAALTLSGVQPEDEAEYYCVLWYSNRWVFGGGTKLTVL

SEQ ID NO: 685 - protein, 1244 aa, Artificial Sequence
  Synthetic
QVTLKESGPTLVKPTETLTLTCTLSGFSLNNARMGVSWIRQPPGKCLEWLAHIFSNDEKSYSTSLKNRLTISKDSSKTQVVLTMTNVDPVDTATYYCARIVGYGSGWYGFFDYWGQGTLVTVSSGGGGSGGGGSGGGGSDIQMTQSPSSLSASVGDRVTITCRASQGIRNDLGWYQQKPGKAPKRLIYAASTLQSGVPSRFSGSGSGTEFTLTISSLQPEDFATYYCLQHNSYPLTFGCGTKVEIKSGGGGSEVQLLESGGGLVQPGGSLRLSCAASGFSFNSYAMSWVRQAPGKCLEWVSTVSGGGDRTYYADAVKGRFTISRDNSKNTLYLQMNSLRAEDTAVYYCAKNRGEGTTFYGMGAWGQGTMVTVSSGGGGSGGGGSGGGGSDIVLTQSPLSLPVTPGEPASISCRSSQSLLHSQAYNYLDWYLQKPGQSPQLLIYLGSNRASGVPDRFSGSGSGTDFTLKISRVEAEDVGVYYCMQALQTPLTFGCGTKVDIKSGGGGSEVQLVESGGGLVQPGGSLKLSCAASGFTFNKYAMNWVRQAPGKGLEWVARIRSKYNNYATYYADSVKDRFTISRDDSKNTAYLQMNNLKTEDTAVYYCVRHGNFGNSYISYWAYWGQGTLVTVSSGGGGSGGGGSGGGGSQTVVTQEPSLTVSPGGTVTLTCGSSTGAVTSGNYPNWVQQKPGQAPRGLIGGTKFLAPGTPARFSGSLLGGKAALTLSGVQPEDEAEYYCVLWYSNRWVFGGGTKLTVLGGGGDKTHTCPPCPAPELLGGPSVFLFPPKPKDTLMISRTPEVTCVVVDVSHEDPEVKFNWYVDGVEVHNAKTKPCEEQYGSTYRCVSVLTVLHQDWLNGKEYKCKVSNKALPAPIEKTISKAKGQPREPQVYTLPPSREEMTKNQVSLTCLVKGFYPSDIAVEWESNGQPENNYKTTPPVLDSDGSFFLYSKLTVDKSRWQQGNVFSCSVMHEALHNHYTQKSLSLSPGKGGGGSGGGGSGGGGSGGGGSGGGGSGGGGSDKTHTCPPCPAPELLGGPSVFLFPPKPKDTLMISRTPEVTCVVVDVSHEDPEVKFNWYVDGVEVHNAKTKPCEEQYGSTYRCVSVLTVLHQDWLNGKEYKCKVSNKALPAPIEKTISKAKGQPREPQVYTLPPSREEMTKNQVSLTCLVKGFYPSDIAVEWESNGQPENNYKTTPPVLDSDGSFFLYSKLTVDKSRWQQGNVFSCSVMHEALHNHYTQKSLSLSPGK

SEQ ID NO: 686 - protein, 501 aa, Artificial Sequence
  Synthetic
QVTLKESGPTLVKPTETLTLTCTLSGFSLNNARMGVSWIRQPPGKCLEWLAHIFSNDEKSYSTSLKNRLTISKDSSKTQVVLTMTNVDPVDTATYYCARIVGYGSGWYGFFDYWGQGTLVTVSSGGGGSGGGGSGGGGSDIQMTQSPSSLSASVGDRVTITCRASQGIRNDLGWYQQKPGKAPKRLIYAASTLQSGVPSRFSGSGSGTEFTLTISSLQPEDFATYYCLQHNSYPLTFGCGTKVEIKSGGGGSEVQLLESGGGLVQPGGSLRLSCAASGFSFNSYAMSWVRQAPGKCLEWVSTVSGGGDRTYYADAVKGRFTISRDNSKNTLYLQMNSLRAEDTAVYYCAKNRGEGTTFYGMGAWGQGTMVTVSSGGGGSGGGGSGGGGSDIVLTQSPLSLPVTPGEPASISCRSSQSLLHSNAYNYLDWYLQKPGQSPQLLIYLGSNRASGVPDRFSGSGSGTDFTLKISRVEAEDVGVYYCMQALQTPLTFGCGTKVDIK

SEQ ID NO: 687 - protein, 756 aa, Artificial Sequence
  Synthetic
QVTLKESGPTLVKPTETLTLTCTLSGFSLNNARMGVSWIRQPPGKCLEWLAHIFSNDEKSYSTSLKNRLTISKDSSKTQVVLTMTNVDPVDTATYYCARIVGYGSGWYGFFDYWGQGTLVTVSSGGGGSGGGGSGGGGSDIQMTQSPSSLSASVGDRVTITCRASQGIRNDLGWYQQKPGKAPKRLIYAASTLQSGVPSRFSGSGSGTEFTLTISSLQPEDFATYYCLQHNSYPLTFGCGTKVEIKSGGGGSEVQLLESGGGLVQPGGSLRLSCAASGFSFNSYAMSWVRQAPGKCLEWVSTVSGGGDRTYYADAVKGRFTISRDNSKNTLYLQMNSLRAEDTAVYYCAKNRGEGTTFYGMGAWGQGTMVTVSSGGGGSGGGGSGGGGSDIVLTQSPLSLPVTPGEPASISCRSSQSLLHSNAYNYLDWYLQKPGQSPQLLIYLGSNRASGVPDRFSGSGSGTDFTLKISRVEAEDVGVYYCMQALQTPLTFGCGTKVDIKSGGGGSEVQLVESGGGLVQPGGSLKLSCAASGFTFNKYAMNWVRQAPGKGLEWVARIRSKYNNYATYYADSVKDRFTISRDDSKNTAYLQMNNLKTEDTAVYYCVRHGNFGNSYISYWAYWGQGTLVTVSSGGGGSGGGGSGGGGSQTVVTQEPSLTVSPGGTVTLTCGSSTGAVTSGNYPNWVQQKPGQAPRGLIGGTKFLAPGTPARFSGSLLGGKAALTLSGVQPEDEAEYYCVLWYSNRWVFGGGTKLTVL

SEQ ID NO: 688 - protein, 1244 aa, Artificial Sequence
  Synthetic
QVTLKESGPTLVKPTETLTLTCTLSGFSLNNARMGVSWIRQPPGKCLEWLAHIFSNDEKSYSTSLKNRLTISKDSSKTQVVLTMTNVDPVDTATYYCARIVGYGSGWYGFFDYWGQGTLVTVSSGGGGSGGGGSGGGGSDIQMTQSPSSLSASVGDRVTITCRASQGIRNDLGWYQQKPGKAPKRLIYAASTLQSGVPSRFSGSGSGTEFTLTISSLQPEDFATYYCLQHNSYPLTFGCGTKVEIKSGGGGSEVQLLESGGGLVQPGGSLRLSCAASGFSFNSYAMSWVRQAPGKCLEWVSTVSGGGDRTYYADAVKGRFTISRDNSKNTLYLQMNSLRAEDTAVYYCAKNRGEGTTFYGMGAWGQGTMVTVSSGGGGSGGGGSGGGGSDIVLTQSPLSLPVTPGEPASISCRSSQSLLHSNAYNYLDWYLQKPGQSPQLLIYLGSNRASGVPDRFSGSGSGTDFTLKISRVEAEDVGVYYCMQALQTPLTFGCGTKVDIKSGGGGSEVQLVESGGGLVQPGGSLKLSCAASGFTFNKYAMNWVRQAPGKGLEWVARIRSKYNNYATYYADSVKDRFTISRDDSKNTAYLQMNNLKTEDTAVYYCVRHGNFGNSYISYWAYWGQGTLVTVSSGGGGSGGGGSGGGGSQTVVTQEPSLTVSPGGTVTLTCGSSTGAVTSGNYPNWVQQKPGQAPRGLIGGTKFLAPGTPARFSGSLLGGKAALTLSGVQPEDEAEYYCVLWYSNRWVFGGGTKLTVLGGGGDKTHTCPPCPAPELLGGPSVFLFPPKPKDTLMISRTPEVTCVVVDVSHEDPEVKFNWYVDGVEVHNAKTKPCEEQYGSTYRCVSVLTVLHQDWLNGKEYKCKVSNKALPAPIEKTISKAKGQPREPQVYTLPPSREEMTKNQVSLTCLVKGFYPSDIAVEWESNGQPENNYKTTPPVLDSDGSFFLYSKLTVDKSRWQQGNVFSCSVMHEALHNHYTQKSLSLSPGKGGGGSGGGGSGGGGSGGGGSGGGGSGGGGSDKTHTCPPCPAPELLGGPSVFLFPPKPKDTLMISRTPEVTCVVVDVSHEDPEVKFNWYVDGVEVHNAKTKPCEEQYGSTYRCVSVLTVLHQDWLNGKEYKCKVSNKALPAPIEKTISKAKGQPREPQVYTLPPSREEMTKNQVSLTCLVKGFYPSDIAVEWESNGQPENNYKTTPPVLDSDGSFFLYSKLTVDKSRWQQGNVFSCSVMHEALHNHYTQKSLSLSPGK

SEQ ID NO: 689 - protein, 500 aa, Artificial Sequence
  Synthetic
QVTLKESGPTLVKPTETLTLTCTLSGFSLNNARMGVSWIRQPPGKCLEWLAHIFSNDEKSYSTSLKNRLTISKDSSKTQVVLTMTNVDPVDTATYYCARIVGYGSGWYGFFDYWGQGTLVTVSSGGGGSGGGGSGGGGSDIQMTQSPSSLSASVGDRVTITCRASQGIRNDLGWYQQKPGKAPKRLIYAASTLQSGVPSRFSGSGSGTEFTLTISSLQPEDFATYYCLQHNSYPLTFGCGTKVEIKSGGGGSEVQLLESGGGLVQPGGSLRLSCAASGFTFSHYAMSWVRQVPGKCLEWVSAISGSGGSTYYADAVKGRFTISRDNSKNTLYLQMNSLRAEDTAVYYCAKVRGIGTFYGMDVWGQGTTVTVSSGGGGSGGGGSGGGGSDIVMTQSPLSLSVTPGQPASISCRSSQSLLHSQGYNYLDWYLQKPGQSPQLLIYLGSNRASGVPDRFSGSGSGTDFTLKISRVEAEDVGVYYCMQALQTPITFGCGTRLEIK

SEQ ID NO: 690 - protein, 755 aa, Artificial Sequence
  Synthetic
QVTLKESGPTLVKPTETLTLTCTLSGFSLNNARMGVSWIRQPPGKCLEWLAHIFSNDEKSYSTSLKNRLTISKDSSKTQVVLTMTNVDPVDTATYYCARIVGYGSGWYGFFDYWGQGTLVTVSSGGGGSGGGGSGGGGSDIQMTQSPSSLSASVGDRVTITCRASQGIRNDLGWYQQKPGKAPKRLIYAASTLQSGVPSRFSGSGSGTEFTLTISSLQPEDFATYYCLQHNSYPLTFGCGTKVEIKSGGGGSEVQLLESGGGLVQPGGSLRLSCAASGFTFSHYAMSWVRQVPGKCLEWVSAISGSGGSTYYADAVKGRFTISRDNSKNTLYLQMNSLRAEDTAVYYCAKVRGIGTFYGMDVWGQGTTVTVSSGGGGSGGGGSGGGGSDIVMTQSPLSLSVTPGQPASISCRSSQSLLHSQGYNYLDWYLQKPGQSPQLLIYLGSNRASGVPDRFSGSGSGTDFTLKISRVEAEDVGVYYCMQALQTPITFGCGTRLEIKSGGGGSEVQLVESGGGLVQPGGSLKLSCAASGFTFNKYAMNWVRQAPGKGLEWVARIRSKYNNYATYYADSVKDRFTISRDDSKNTAYLQMNNLKTEDTAVYYCVRHGNFGNSYISYWAYWGQGTLVTVSSGGGGSGGGGSGGGGSQTVVTQEPSLTVSPGGTVTLTCGSSTGAVTSGNYPNWVQQKPGQAPRGLIGGTKFLAPGTPARFSGSLLGGKAALTLSGVQPEDEAEYYCVLWYSNRWVFGGGTKLTVL

SEQ ID NO: 691 - protein, 1243 aa, Artificial Sequence
  Synthetic
QVTLKESGPTLVKPTETLTLTCTLSGFSLNNARMGVSWIRQPPGKCLEWLAHIFSNDEKSYSTSLKNRLTISKDSSKTQVVLTMTNVDPVDTATYYCARIVGYGSGWYGFFDYWGQGTLVTVSSGGGGSGGGGSGGGGSDIQMTQSPSSLSASVGDRVTITCRASQGIRNDLGWYQQKPGKAPKRLIYAASTLQSGVPSRFSGSGSGTEFTLTISSLQPEDFATYYCLQHNSYPLTFGCGTKVEIKSGGGGSEVQLLESGGGLVQPGGSLRLSCAASGFTFSHYAMSWVRQVPGKCLEWVSAISGSGGSTYYADAVKGRFTISRDNSKNTLYLQMNSLRAEDTAVYYCAKVRGIGTFYGMDVWGQGTTVTVSSGGGGSGGGGSGGGGSDIVMTQSPLSLSVTPGQPASISCRSSQSLLHSQGYNYLDWYLQKPGQSPQLLIYLGSNRASGVPDRFSGSGSGTDFTLKISRVEAEDVGVYYCMQALQTPITFGCGTRLEIKSGGGGSEVQLVESGGGLVQPGGSLKLSCAASGFTFNKYAMNWVRQAPGKGLEWVARIRSKYNNYATYYADSVKDRFTISRDDSKNTAYLQMNNLKTEDTAVYYCVRHGNFGNSYISYWAYWGQGTLVTVSSGGGGSGGGGSGGGGSQTVVTQEPSLTVSPGGTVTLTCGSSTGAVTSGNYPNWVQQKPGQAPRGLIGGTKFLAPGTPARFSGSLLGGKAALTLSGVQPEDEAEYYCVLWYSNRWVFGGGTKLTVLGGGGDKTHTCPPCPAPELLGGPSVFLFPPKPKDTLMISRTPEVTCVVVDVSHEDPEVKFNWYVDGVEVHNAKTKPCEEQYGSTYRCVSVLTVLHQDWLNGKEYKCKVSNKALPAPIEKTISKAKGQPREPQVYTLPPSREEMTKNQVSLTCLVKGFYPSDIAVEWESNGQPENNYKTTPPVLDSDGSFFLYSKLTVDKSRWQQGNVFSCSVMHEALHNHYTQKSLSLSPGKGGGGSGGGGSGGGGSGGGGSGGGGSGGGGSDKTHTCPPCPAPELLGGPSVFLFPPKPKDTLMISRTPEVTCVVVDVSHEDPEVKFNWYVDGVEVHNAKTKPCEEQYGSTYRCVSVLTVLHQDWLNGKEYKCKVSNKALPAPIEKTISKAKGQPREPQVYTLPPSREEMTKNQVSLTCLVKGFYPSDIAVEWESNGQPENNYKTTPPVLDSDGSFFLYSKLTVDKSRWQQGNVFSCSVMHEALHNHYTQKSLSLSPGK

SEQ ID NO: 692 - protein, 500 aa, Artificial Sequence
  Synthetic
QVTLKESGPTLVKPTETLTLTCTLSGFSLNNARMGVSWIRQPPGKCLEWLAHIFSNDEKSYSTSLKNRLTISKDSSKTQVVLTMTNVDPVDTATYYCARIVGYGSGWYGFFDYWGQGTLVTVSSGGGGSGGGGSGGGGSDIQMTQSPSSLSASVGDRVTITCRASQGIRNDLGWYQQKPGKAPKRLIYAASTLQSGVPSRFSGSGSGTEFTLTISSLQPEDFATYYCLQHNSYPLTFGCGTKVEIKSGGGGSEVQLLESGGGLVQPGGSLRLSCAASGFTFSHYAMSWVRQTPGKCLEWVSVIDASGGSTYYADAVKGRFTISRDNSKNTLYLQMNSLRAEDTAVYYCAKVRGIGTFYGMDVWGQGTTVTVSSGGGGSGGGGSGGGGSDIVMTQTPLSLPVTPGEPASISCRSSQSLLHSQGYNYLDWYLQKPGQSPQLLIYLGSNRASGVPDRFSGSGSGTDFTLKISRVEAEDVGVYYCMQALQTPLSFGCGTKVEIK

SEQ ID NO: 693 - protein, 755 aa, Artificial Sequence
  Synthetic
QVTLKESGPTLVKPTETLTLTCTLSGFSLNNARMGVSWIRQPPGKCLEWLAHIFSNDEKSYSTSLKNRLTISKDSSKTQVVLTMTNVDPVDTATYYCARIVGYGSGWYGFFDYWGQGTLVTVSSGGGGSGGGGSGGGGSDIQMTQSPSSLSASVGDRVTITCRASQGIRNDLGWYQQKPGKAPKRLIYAASTLQSGVPSRFSGSGSGTEFTLTISSLQPEDFATYYCLQHNSYPLTFGCGTKVEIKSGGGGSEVQLLESGGGLVQPGGSLRLSCAASGFTFSHYAMSWVRQTPGKCLEWVSVIDASGGSTYYADAVKGRFTISRDNSKNTLYLQMNSLRAEDTAVYYCAKVRGIGTFYGMDVWGQGTTVTVSSGGGGSGGGGSGGGGSDIVMTQTPLSLPVTPGEPASISCRSSQSLLHSQGYNYLDWYLQKPGQSPQLLIYLGSNRASGVPDRFSGSGSGTDFTLKISRVEAEDVGVYYCMQALQTPLSFGCGTKVEIKSGGGGSEVQLVESGGGLVQPGGSLKLSCAASGFTFNKYAMNWVRQAPGKGLEWVARIRSKYNNYATYYADSVKDRFTISRDDSKNTAYLQMNNLKTEDTAVYYCVRHGNFGNSYISYWAYWGQGTLVTVSSGGGGSGGGGSGGGGSQTVVTQEPSLTVSPGGTVTLTCGSSTGAVTSGNYPNWVQQKPGQAPRGLIGGTKFLAPGTPARFSGSLLGGKAALTLSGVQPEDEAEYYCVLWYSNRWVFGGGTKLTVL

SEQ ID NO: 694 - protein, 1243 aa, Artificial Sequence
  Synthetic
QVTLKESGPTLVKPTETLTLTCTLSGFSLNNARMGVSWIRQPPGKCLEWLAHIFSNDEKSYSTSLKNRLTISKDSSKTQVVLTMTNVDPVDTATYYCARIVGYGSGWYGFFDYWGQGTLVTVSSGGGGSGGGGSGGGGSDIQMTQSPSSLSASVGDRVTITCRASQGIRNDLGWYQQKPGKAPKRLIYAASTLQSGVPSRFSGSGSGTEFTLTISSLQPEDFATYYCLQHNSYPLTFGCGTKVEIKSGGGGSEVQLLESGGGLVQPGGSLRLSCAASGFTFSHYAMSWVRQTPGKCLEWVSVIDASGGSTYYADAVKGRFTISRDNSKNTLYLQMNSLRAEDTAVYYCAKVRGIGTFYGMDVWGQGTTVTVSSGGGGSGGGGSGGGGSDIVMTQTPLSLPVTPGEPASISCRSSQSLLHSQGYNYLDWYLQKPGQSPQLLIYLGSNRASGVPDRFSGSGSGTDFTLKISRVEAEDVGVYYCMQALQTPLSFGCGTKVEIKSGGGGSEVQLVESGGGLVQPGGSLKLSCAASGFTFNKYAMNWVRQAPGKGLEWVARIRSKYNNYATYYADSVKDRFTISRDDSKNTAYLQMNNLKTEDTAVYYCVRHGNFGNSYISYWAYWGQGTLVTVSSGGGGSGGGGSGGGGSQTVVTQEPSLTVSPGGTVTLTCGSSTGAVTSGNYPNWVQQKPGQAPRGLIGGTKFLAPGTPARFSGSLLGGKAALTLSGVQPEDEAEYYCVLWYSNRWVFGGGTKLTVLGGGGDKTHTCPPCPAPELLGGPSVFLFPPKPKDTLMISRTPEVTCVVVDVSHEDPEVKFNWYVDGVEVHNAKTKPCEEQYGSTYRCVSVLTVLHQDWLNGKEYKCKVSNKALPAPIEKTISKAKGQPREPQVYTLPPSREEMTKNQVSLTCLVKGFYPSDIAVEWESNGQPENNYKTTPPVLDSDGSFFLYSKLTVDKSRWQQGNVFSCSVMHEALHNHYTQKSLSLSPGKGGGGSGGGGSGGGGSGGGGSGGGGSGGGGSDKTHTCPPCPAPELLGGPSVFLFPPKPKDTLMISRTPEVTCVVVDVSHEDPEVKFNWYVDGVEVHNAKTKPCEEQYGSTYRCVSVLTVLHQDWLNGKEYKCKVSNKALPAPIEKTISKAKGQPREPQVYTLPPSREEMTKNQVSLTCLVKGFYPSDIAVEWESNGQPENNYKTTPPVLDSDGSFFLYSKLTVDKSRWQQGNVFSCSVMHEALHNHYTQKSLSLSPGK

SEQ ID NO: 695 - protein, 500 aa, Artificial Sequence
  Synthetic
QVTLKESGPTLVKPTETLTLTCTLSGFSLNNARMGVSWIRQPPGKCLEWLAHIFSNDEKSYSTSLKNRLTISKDSSKTQVVLTMTNVDPVDTATYYCARIVGYGSGWYGFFDYWGQGTLVTVSSGGGGSGGGGSGGGGSDIQMTQSPSSLSASVGDRVTITCRASQGIRNDLGWYQQKPGKAPKRLIYAASTLQSGVPSRFSGSGSGTEFTLTISSLQPEDFATYYCLQHNSYPLTFGCGTKVEIKSGGGGSEVQLLESGGGLVQPGGSLRLSCAASGFTFSHYAMSWVRQTPGKCLEWVSVIDASGGNTYYADSVKGRFTISRDNSKNTLYLQMNSLRAEDTAVYYCAKVRGIGTFYGMDVWGQGTTVTVSSGGGGSGGGGSGGGGSDIVMTQTPLSLPVTPGEPASISCRSSQSLLHSQGYNYLDWYLQKPGQSPQLLIYLGSNRASGVPDRFSGSGSGTDFTLKISRVEAEDVGVYYCMQALQTPLSFGCGTKVEIK

SEQ ID NO: 696 - protein, 755 aa, Artificial Sequence
  Synthetic
QVTLKESGPTLVKPTETLTLTCTLSGFSLNNARMGVSWIRQPPGKCLEWLAHIFSNDEKSYSTSLKNRLTISKDSSKTQVVLTMTNVDPVDTATYYCARIVGYGSGWYGFFDYWGQGTLVTVSSGGGGSGGGGSGGGGSDIQMTQSPSSLSASVGDRVTITCRASQGIRNDLGWYQQKPGKAPKRLIYAASTLQSGVPSRFSGSGSGTEFTLTISSLQPEDFATYYCLQHNSYPLTFGCGTKVEIKSGGGGSEVQLLESGGGLVQPGGSLRLSCAASGFTFSHYAMSWVRQTPGKCLEWVSVIDASGGNTYYADSVKGRFTISRDNSKNTLYLQMNSLRAEDTAVYYCAKVRGIGTFYGMDVWGQGTTVTVSSGGGGSGGGGSGGGGSDIVMTQTPLSLPVTPGEPASISCRSSQSLLHSQGYNYLDWYLQKPGQSPQLLIYLGSNRASGVPDRFSGSGSGTDFTLKISRVEAEDVGVYYCMQALQTPLSFGCGTKVEIKSGGGGSEVQLVESGGGLVQPGGSLKLSCAASGFTFNKYAMNWVRQAPGKGLEWVARIRSKYNNYATYYADSVKDRFTISRDDSKNTAYLQMNNLKTEDTAVYYCVRHGNFGNSYISYWAYWGQGTLVTVSSGGGGSGGGGSGGGGSQTVVTQEPSLTVSPGGTVTLTCGSSTGAVTSGNYPNWVQQKPGQAPRGLIGGTKFLAPGTPARFSGSLLGGKAALTLSGVQPEDEAEYYCVLWYSNRWVFGGGTKLTVL

SEQ ID NO: 697 - protein, 1243 aa, Artificial Sequence
  Synthetic
QVTLKESGPTLVKPTETLTLTCTLSGFSLNNARMGVSWIRQPPGKCLEWLAHIFSNDEKSYSTSLKNRLTISKDSSKTQVVLTMTNVDPVDTATYYCARIVGYGSGWYGFFDYWGQGTLVTVSSGGGGSGGGGSGGGGSDIQMTQSPSSLSASVGDRVTITCRASQGIRNDLGWYQQKPGKAPKRLIYAASTLQSGVPSRFSGSGSGTEFTLTISSLQPEDFATYYCLQHNSYPLTFGCGTKVEIKSGGGGSEVQLLESGGGLVQPGGSLRLSCAASGFTFSHYAMSWVRQTPGKCLEWVSVIDASGGNTYYADSVKGRFTISRDNSKNTLYLQMNSLRAEDTAVYYCAKVRGIGTFYGMDVWGQGTTVTVSSGGGGSGGGGSGGGGSDIVMTQTPLSLPVTPGEPASISCRSSQSLLHSQGYNYLDWYLQKPGQSPQLLIYLGSNRASGVPDRFSGSGSGTDFTLKISRVEAEDVGVYYCMQALQTPLSFGCGTKVEIKSGGGGSEVQLVESGGGLVQPGGSLKLSCAASGFTFNKYAMNWVRQAPGKGLEWVARIRSKYNNYATYYADSVKDRFTISRDDSKNTAYLQMNNLKTEDTAVYYCVRHGNFGNSYISYWAYWGQGTLVTVSSGGGGSGGGGSGGGGSQTVVTQEPSLTVSPGGTVTLTCGSSTGAVTSGNYPNWVQQKPGQAPRGLIGGTKFLAPGTPARFSGSLLGGKAALTLSGVQPEDEAEYYCVLWYSNRWVFGGGTKLTVLGGGGDKTHTCPPCPAPELLGGPSVFLFPPKPKDTLMISRTPEVTCVVVDVSHEDPEVKFNWYVDGVEVHNAKTKPCEEQYGSTYRCVSVLTVLHQDWLNGKEYKCKVSNKALPAPIEKTISKAKGQPREPQVYTLPPSREEMTKNQVSLTCLVKGFYPSDIAVEWESNGQPENNYKTTPPVLDSDGSFFLYSKLTVDKSRWQQGNVFSCSVMHEALHNHYTQKSLSLSPGKGGGGSGGGGSGGGGSGGGGSGGGGSGGGGSDKTHTCPPCPAPELLGGPSVFLFPPKPKDTLMISRTPEVTCVVVDVSHEDPEVKFNWYVDGVEVHNAKTKPCEEQYGSTYRCVSVLTVLHQDWLNGKEYKCKVSNKALPAPIEKTISKAKGQPREPQVYTLPPSREEMTKNQVSLTCLVKGFYPSDIAVEWESNGQPENNYKTTPPVLDSDGSFFLYSKLTVDKSRWQQGNVFSCSVMHEALHNHYTQKSLSLSPGK

SEQ ID NO: 698 - protein, 500 aa, Artificial Sequence
  Synthetic
QVTLKESGPTLVKPTETLTLTCTLSGFSLNNARMGVSWIRQPPGKCLEWLAHIFSNDEKSYSTSLKNRLTISKDSSKTQVVLTMTNVDPVDTATYYCARIVGYGSGWYGFFDYWGQGTLVTVSSGGGGSGGGGSGGGGSDIQMTQSPSSLSASVGDRVTITCRASQGIRNDLGWYQQKPGKAPKRLIYAASTLQSGVPSRFSGSGSGTEFTLTISSLQPEDFATYYCLQHNSYPLTFGCGTKVEIKSGGGGSEVQLLESGGGLVQPGGSLRLSCAASGFTFSHYAMSWVRQTPGKCLEWVSVIDGSGGNTYYADSVKGRFTISRDNSKNTLYLQMNSLRAEDTAVYYCAKVRGIGTFYGMDVWGQGTTVTVSSGGGGSGGGGSGGGGSDIVMTQTPLSLPVTPGEPASISCRSSQSLLHSNGYNYLDWYLQKPGQSPQLLIYLGSNRASGVPDRFSGSGSGTDFTLKISRVEAEDVGVYYCMQALQTPSSFGCGTKVEIK

SEQ ID NO: 699 - protein, 755 aa, Artificial Sequence
  Synthetic
QVTLKESGPTLVKPTETLTLTCTLSGFSLNNARMGVSWIRQPPGKCLEWLAHIFSNDEKSYSTSLKNRLTISKDSSKTQVVLTMTNVDPVDTATYYCARIVGYGSGWYGFFDYWGQGTLVTVSSGGGGSGGGGSGGGGSDIQMTQSPSSLSASVGDRVTITCRASQGIRNDLGWYQQKPGKAPKRLIYAASTLQSGVPSRFSGSGSGTEFTLTISSLQPEDFATYYCLQHNSYPLTFGCGTKVEIKSGGGGSEVQLLESGGGLVQPGGSLRLSCAASGFTFSHYAMSWVRQTPGKCLEWVSVIDGSGGNTYYADSVKGRFTISRDNSKNTLYLQMNSLRAEDTAVYYCAKVRGIGTFYGMDVWGQGTTVTVSSGGGGSGGGGSGGGGSDIVMTQTPLSLPVTPGEPASISCRSSQSLLHSNGYNYLDWYLQKPGQSPQLLIYLGSNRASGVPDRFSGSGSGTDFTLKISRVEAEDVGVYYCMQALQTPSSFGCGTKVEIKSGGGGSEVQLVESGGGLVQPGGSLKLSCAASGFTFNKYAMNWVRQAPGKGLEWVARIRSKYNNYATYYADSVKDRFTISRDDSKNTAYLQMNNLKTEDTAVYYCVRHGNFGNSYISYWAYWGQGTLVTVSSGGGGSGGGGSGGGGSQTVVTQEPSLTVSPGGTVTLTCGSSTGAVTSGNYPNWVQQKPGQAPRGLIGGTKFLAPGTPARFSGSLLGGKAALTLSGVQPEDEAEYYCVLWYSNRWVFGGGTKLTVL

SEQ ID NO: 700 - protein, 1243 aa, Artificial Sequence
  Synthetic
QVTLKESGPTLVKPTETLTLTCTLSGFSLNNARMGVSWIRQPPGKCLEWLAHIFSNDEKSYSTSLKNRLTISKDSSKTQVVLTMTNVDPVDTATYYCARIVGYGSGWYGFFDYWGQGTLVTVSSGGGGSGGGGSGGGGSDIQMTQSPSSLSASVGDRVTITCRASQGIRNDLGWYQQKPGKAPKRLIYAASTLQSGVPSRFSGSGSGTEFTLTISSLQPEDFATYYCLQHNSYPLTFGCGTKVEIKSGGGGSEVQLLESGGGLVQPGGSLRLSCAASGFTFSHYAMSWVRQTPGKCLEWVSVIDGSGGNTYYADSVKGRFTISRDNSKNTLYLQMNSLRAEDTAVYYCAKVRGIGTFYGMDVWGQGTTVTVSSGGGGSGGGGSGGGGSDIVMTQTPLSLPVTPGEPASISCRSSQSLLHSNGYNYLDWYLQKPGQSPQLLIYLGSNRASGVPDRFSGSGSGTDFTLKISRVEAEDVGVYYCMQALQTPSSFGCGTKVEIKSGGGGSEVQLVESGGGLVQPGGSLKLSCAASGFTFNKYAMNWVRQAPGKGLEWVARIRSKYNNYATYYADSVKDRFTISRDDSKNTAYLQMNNLKTEDTAVYYCVRHGNFGNSYISYWAYWGQGTLVTVSSGGGGSGGGGSGGGGSQTVVTQEPSLTVSPGGTVTLTCGSSTGAVTSGNYPNWVQQKPGQAPRGLIGGTKFLAPGTPARFSGSLLGGKAALTLSGVQPEDEAEYYCVLWYSNRWVFGGGTKLTVLGGGGDKTHTCPPCPAPELLGGPSVFLFPPKPKDTLMISRTPEVTCVVVDVSHEDPEVKFNWYVDGVEVHNAKTKPCEEQYGSTYRCVSVLTVLHQDWLNGKEYKCKVSNKALPAPIEKTISKAKGQPREPQVYTLPPSREEMTKNQVSLTCLVKGFYPSDIAVEWESNGQPENNYKTTPPVLDSDGSFFLYSKLTVDKSRWQQGNVFSCSVMHEALHNHYTQKSLSLSPGKGGGGSGGGGSGGGGSGGGGSGGGGSGGGGSDKTHTCPPCPAPELLGGPSVFLFPPKPKDTLMISRTPEVTCVVVDVSHEDPEVKFNWYVDGVEVHNAKTKPCEEQYGSTYRCVSVLTVLHQDWLNGKEYKCKVSNKALPAPIEKTISKAKGQPREPQVYTLPPSREEMTKNQVSLTCLVKGFYPSDIAVEWESNGQPENNYKTTPPVLDSDGSFFLYSKLTVDKSRWQQGNVFSCSVMHEALHNHYTQKSLSLSPGK

SEQ ID NO: 701 - protein, 497 aa, Artificial Sequence
  Synthetic
QVTLKESGPTLVKPTETLTLTCTLSGFSLNNARMGVSWIRQPPGKCLEWLAHIFSNDEKSYSTSLKNRLTISKDSSKTQVVLTMTNVDPVDTATYYCARIVGYGSGWYGFFDYWGQGTLVTVSSGGGGSGGGGSGGGGSDIQMTQSPSSLSASVGDRVTITCRASQGIRNDLGWYQQKPGKAPKRLIYAASTLQSGVPSRFSGSGSGTEFTLTISSLQPEDFATYYCLQHNSYPLTFGCGTKVEIKSGGGGSEVQLLESGGGLVQPGGSLRLSCAASGFTFSHYAMNWVRQAPGKCLEWVSAVSGGGDRTLYADSVKGRFTISRDNSKNTLFLQMNSLRAEDTAIYYCARLRGFYYGMDVWGQGTAVTVSSGGGGSGGGGSGGGGSDIVMTQSPLSLPVTPGEPASISCRSSQSLLHSNGYNYLDWYLQKPGQSPQLLIYLGSNRASGVPDRFSGSGSGTDFTLKISRVEAEDVGVYYCMQALQTLTFGCGTKVDIK

SEQ ID NO: 702 - protein, 752 aa, Artificial Sequence
  Synthetic
QVTLKESGPTLVKPTETLTLTCTLSGFSLNNARMGVSWIRQPPGKCLEWLAHIFSNDEKSYSTSLKNRLTISKDSSKTQVVLTMTNVDPVDTATYYCARIVGYGSGWYGFFDYWGQGTLVTVSSGGGGSGGGGSGGGGSDIQMTQSPSSLSASVGDRVTITCRASQGIRNDLGWYQQKPGKAPKRLIYAASTLQSGVPSRFSGSGSGTEFTLTISSLQPEDFATYYCLQHNSYPLTFGCGTKVEIKSGGGGSEVQLLESGGGLVQPGGSLRLSCAASGFTFSHYAMNWVRQAPGKCLEWVSAVSGGGDRTLYADSVKGRFTISRDNSKNTLFLQMNSLRAEDTAIYYCARLRGFYYGMDVWGQGTAVTVSSGGGGSGGGGSGGGGSDIVMTQSPLSLPVTPGEPASISCRSSQSLLHSNGYNYLDWYLQKPGQSPQLLIYLGSNRASGVPDRFSGSGSGTDFTLKISRVEAEDVGVYYCMQALQTLTFGCGTKVDIKSGGGGSEVQLVESGGGLVQPGGSLKLSCAASGFTFNKYAMNWVRQAPGKGLEWVARIRSKYNNYATYYADSVKDRFTISRDDSKNTAYLQMNNLKTEDTAVYYCVRHGNFGNSYISYWAYWGQGTLVTVSSGGGGSGGGGSGGGGSQTVVTQEPSLTVSPGGTVTLTCGSSTGAVTSGNYPNWVQQKPGQAPRGLIGGTKFLAPGTPARFSGSLLGGKAALTLSGVQPEDEAEYYCVLWYSNRWVFGGGTKLTVL

SEQ ID NO: 703 - protein, 1240 aa, Artificial Sequence
  Synthetic
QVTLKESGPTLVKPTETLTLTCTLSGFSLNNARMGVSWIRQPPGKCLEWLAHIFSNDEKSYSTSLKNRLTISKDSSKTQVVLTMTNVDPVDTATYYCARIVGYGSGWYGFFDYWGQGTLVTVSSGGGGSGGGGSGGGGSDIQMTQSPSSLSASVGDRVTITCRASQGIRNDLGWYQQKPGKAPKRLIYAASTLQSGVPSRFSGSGSGTEFTLTISSLQPEDFATYYCLQHNSYPLTFGCGTKVEIKSGGGGSEVQLLESGGGLVQPGGSLRLSCAASGFTFSHYAMNWVRQAPGKCLEWVSAVSGGGDRTLYADSVKGRFTISRDNSKNTLFLQMNSLRAEDTAIYYCARLRGFYYGMDVWGQGTAVTVSSGGGGSGGGGSGGGGSDIVMTQSPLSLPVTPGEPASISCRSSQSLLHSNGYNYLDWYLQKPGQSPQLLIYLGSNRASGVPDRFSGSGSGTDFTLKISRVEAEDVGVYYCMQALQTLTFGCGTKVDIKSGGGGSEVQLVESGGGLVQPGGSLKLSCAASGFTFNKYAMNWVRQAPGKGLEWVARIRSKYNNYATYYADSVKDRFTISRDDSKNTAYLQMNNLKTEDTAVYYCVRHGNFGNSYISYWAYWGQGTLVTVSSGGGGSGGGGSGGGGSQTVVTQEPSLTVSPGGTVTLTCGSSTGAVTSGNYPNWVQQKPGQAPRGLIGGTKFLAPGTPARFSGSLLGGKAALTLSGVQPEDEAEYYCVLWYSNRWVFGGGTKLTVLGGGGDKTHTCPPCPAPELLGGPSVFLFPPKPKDTLMISRTPEVTCVVVDVSHEDPEVKFNWYVDGVEVHNAKTKPCEEQYGSTYRCVSVLTVLHQDWLNGKEYKCKVSNKALPAPIEKTISKAKGQPREPQVYTLPPSREEMTKNQVSLTCLVKGFYPSDIAVEWESNGQPENNYKTTPPVLDSDGSFFLYSKLTVDKSRWQQGNVFSCSVMHEALHNHYTQKSLSLSPGKGGGGSGGGGSGGGGSGGGGSGGGGSGGGGSDKTHTCPPCPAPELLGGPSVFLFPPKPKDTLMISRTPEVTCVVVDVSHEDPEVKFNWYVDGVEVHNAKTKPCEEQYGSTYRCVSVLTVLHQDWLNGKEYKCKVSNKALPAPIEKTISKAKGQPREPQVYTLPPSREEMTKNQVSLTCLVKGFYPSDIAVEWESNGQPENNYKTTPPVLDSDGSFFLYSKLTVDKSRWQQGNVFSCSVMHEALHNHYTQKSLSLSPGK

SEQ ID NO: 704 - protein, 500 aa, Artificial Sequence
  Synthetic
QVTLKESGPTLVKPTETLTLTCTLSGFSLNNARMGVSWIRQPPGKCLEWLAHIFSNDEKSYSTSLKNRLTISKDSSKTQVVLTMTNVDPVDTATYYCARIVGYGSGWYGFFDYWGQGTLVTVSSGGGGSGGGGSGGGGSDIQMTQSPSSLSASVGDRVTITCRASQGIRNDLGWYQQKPGKAPKRLIYAASTLQSGVPSRFSGSGSGTEFTLTISSLQPEDFATYYCLQHNSYPLTFGCGTKVEIKSGGGGSEVQLLESGGGLVQPGGSLRLSCAASGFTFSHYAMSWVRQVPGKCLEWVSVIDGSGGNTYYADSVKGRFTISRDNSKNTLFLQMSSLRAEDTAVYYCAKVRGIGTFYGMDVWGQGTTVTVSSGGGGSGGGGSGGGGSDIVMTQTPLSLPVTPGEPASISCRSSQSLLHSNGYNYLDWYLQKPGQSPQLLIYLGSNRASGVPNRFSGSGSGTDFTLKISRVEAEDVGVYYCMQALQTPLTFGCGTKVEIK

SEQ ID NO: 705 - protein, 755 aa, Artificial Sequence
  Synthetic
QVTLKESGPTLVKPTETLTLTCTLSGFSLNNARMGVSWIRQPPGKCLEWLAHIFSNDEKSYSTSLKNRLTISKDSSKTQVVLTMTNVDPVDTATYYCARIVGYGSGWYGFFDYWGQGTLVTVSSGGGGSGGGGSGGGGSDIQMTQSPSSLSASVGDRVTITCRASQGIRNDLGWYQQKPGKAPKRLIYAASTLQSGVPSRFSGSGSGTEFTLTISSLQPEDFATYYCLQHNSYPLTFGCGTKVEIKSGGGGSEVQLLESGGGLVQPGGSLRLSCAASGFTFSHYAMSWVRQVPGKCLEWVSVIDGSGGNTYYADSVKGRFTISRDNSKNTLFLQMSSLRAEDTAVYYCAKVRGIGTFYGMDVWGQGTTVTVSSGGGGSGGGGSGGGGSDIVMTQTPLSLPVTPGEPASISCRSSQSLLHSNGYNYLDWYLQKPGQSPQLLIYLGSNRASGVPNRFSGSGSGTDFTLKISRVEAEDVGVYYCMQALQTPLTFGCGTKVEIKSGGGGSEVQLVESGGGLVQPGGSLKLSCAASGFTFNKYAMNWVRQAPGKGLEWVARIRSKYNNYATYYADSVKDRFTISRDDSKNTAYLQMNNLKTEDTAVYYCVRHGNFGNSYISYWAYWGQGTLVTVSSGGGGSGGGGSGGGGSQTVVTQEPSLTVSPGGTVTLTCGSSTGAVTSGNYPNWVQQKPGQAPRGLIGGTKFLAPGTPARFSGSLLGGKAALTLSGVQPEDEAEYYCVLWYSNRWVFGGGTKLTVL

SEQ ID NO: 706 - protein, 1243 aa, Artificial Sequence
  Synthetic
QVTLKESGPTLVKPTETLTLTCTLSGFSLNNARMGVSWIRQPPGKCLEWLAHIFSNDEKSYSTSLKNRLTISKDSSKTQVVLTMTNVDPVDTATYYCARIVGYGSGWYGFFDYWGQGTLVTVSSGGGGSGGGGSGGGGSDIQMTQSPSSLSASVGDRVTITCRASQGIRNDLGWYQQKPGKAPKRLIYAASTLQSGVPSRFSGSGSGTEFTLTISSLQPEDFATYYCLQHNSYPLTFGCGTKVEIKSGGGGSEVQLLESGGGLVQPGGSLRLSCAASGFTFSHYAMSWVRQVPGKCLEWVSVIDGSGGNTYYADSVKGRFTISRDNSKNTLFLQMSSLRAEDTAVYYCAKVRGIGTFYGMDVWGQGTTVTVSSGGGGSGGGGSGGGGSDIVMTQTPLSLPVTPGEPASISCRSSQSLLHSNGYNYLDWYLQKPGQSPQLLIYLGSNRASGVPNRFSGSGSGTDFTLKISRVEAEDVGVYYCMQALQTPLTFGCGTKVEIKSGGGGSEVQLVESGGGLVQPGGSLKLSCAASGFTFNKYAMNWVRQAPGKGLEWVARIRSKYNNYATYYADSVKDRFTISRDDSKNTAYLQMNNLKTEDTAVYYCVRHGNFGNSYISYWAYWGQGTLVTVSSGGGGSGGGGSGGGGSQTVVTQEPSLTVSPGGTVTLTCGSSTGAVTSGNYPNWVQQKPGQAPRGLIGGTKFLAPGTPARFSGSLLGGKAALTLSGVQPEDEAEYYCVLWYSNRWVFGGGTKLTVLGGGGDKTHTCPPCPAPELLGGPSVFLFPPKPKDTLMISRTPEVTCVVVDVSHEDPEVKFNWYVDGVEVHNAKTKPCEEQYGSTYRCVSVLTVLHQDWLNGKEYKCKVSNKALPAPIEKTISKAKGQPREPQVYTLPPSREEMTKNQVSLTCLVKGFYPSDIAVEWESNGQPENNYKTTPPVLDSDGSFFLYSKLTVDKSRWQQGNVFSCSVMHEALHNHYTQKSLSLSPGKGGGGSGGGGSGGGGSGGGGSGGGGSGGGGSDKTHTCPPCPAPELLGGPSVFLFPPKPKDTLMISRTPEVTCVVVDVSHEDPEVKFNWYVDGVEVHNAKTKPCEEQYGSTYRCVSVLTVLHQDWLNGKEYKCKVSNKALPAPIEKTISKAKGQPREPQVYTLPPSREEMTKNQVSLTCLVKGFYPSDIAVEWESNGQPENNYKTTPPVLDSDGSFFLYSKLTVDKSRWQQGNVFSCSVMHEALHNHYTQKSLSLSPGK

SEQ ID NO: 707 - protein, 496 aa, Artificial Sequence
  Synthetic
QVTLKESGPTLVKPTETLTLTCTLSGFSLNNARMGVSWIRQPPGKCLEWLAHIFSNDEKSYSTSLKNRLTISKDSSKTQVVLTMTNVDPVDTATYYCARIVGYGSGWYGFFDYWGQGTLVTVSSGGGGSGGGGSGGGGSDIQMTQSPSSLSASVGDRVTITCRASQGIRNDLGWYQQKPGKAPKRLIYAASTLQSGVPSRFSGSGSGTEFTLTISSLQPEDFATYYCLQHNSYPLTFGCGTKVEIKSGGGGSQVQLQESGPGLVKPSETLSLTCTVSGGSVSGGGYYWSWIRQPPGKCLEWIGYIYYSGSTNYNPSLKSRVTMSVGPSKNQFSLKLRSVTAADTAVYYCARDQGSSSDAFDIWGQGTMVTVSSGGGGSGGGGSGGGGSEIVLTQSPGTLSLSPGERATLSCRASQSVSSSYLAWYQQKPGQAPRLLIYGASSRATGIPDRFSGSGSGTDFTLTISRLEPEDFAVYYCQQYGSSPLTFGCGTKVEIK

SEQ ID NO: 708 - protein, 751 aa, Artificial Sequence
  Synthetic
QVTLKESGPTLVKPTETLTLTCTLSGFSLNNARMGVSWIRQPPGKCLEWLAHIFSNDEKSYSTSLKNRLTISKDSSKTQVVLTMTNVDPVDTATYYCARIVGYGSGWYGFFDYWGQGTLVTVSSGGGGSGGGGSGGGGSDIQMTQSPSSLSASVGDRVTITCRASQGIRNDLGWYQQKPGKAPKRLIYAASTLQSGVPSRFSGSGSGTEFTLTISSLQPEDFATYYCLQHNSYPLTFGCGTKVEIKSGGGGSQVQLQESGPGLVKPSETLSLTCTVSGGSVSGGGYYWSWIRQPPGKCLEWIGYIYYSGSTNYNPSLKSRVTMSVGPSKNQFSLKLRSVTAADTAVYYCARDQGSSSDAFDIWGQGTMVTVSSGGGGSGGGGSGGGGSEIVLTQSPGTLSLSPGERATLSCRASQSVSSSYLAWYQQKPGQAPRLLIYGASSRATGIPDRFSGSGSGTDFTLTISRLEPEDFAVYYCQQYGSSPLTFGCGTKVEIKSGGGGSEVQLVESGGGLVQPGGSLKLSCAASGFTFNKYAMNWVRQAPGKGLEWVARIRSKYNNYATYYADSVKDRFTISRDDSKNTAYLQMNNLKTEDTAVYYCVRHGNFGNSYISYWAYWGQGTLVTVSSGGGGSGGGGSGGGGSQTVVTQEPSLTVSPGGTVTLTCGSSTGAVTSGNYPNWVQQKPGQAPRGLIGGTKFLAPGTPARFSGSLLGGKAALTLSGVQPEDEAEYYCVLWYSNRWVFGGGTKLTVL

SEQ ID NO: 709 - protein, 1239 aa, Artificial Sequence
  Synthetic
QVTLKESGPTLVKPTETLTLTCTLSGFSLNNARMGVSWIRQPPGKCLEWLAHIFSNDEKSYSTSLKNRLTISKDSSKTQVVLTMTNVDPVDTATYYCARIVGYGSGWYGFFDYWGQGTLVTVSSGGGGSGGGGSGGGGSDIQMTQSPSSLSASVGDRVTITCRASQGIRNDLGWYQQKPGKAPKRLIYAASTLQSGVPSRFSGSGSGTEFTLTISSLQPEDFATYYCLQHNSYPLTFGCGTKVEIKSGGGGSQVQLQESGPGLVKPSETLSLTCTVSGGSVSGGGYYWSWIRQPPGKCLEWIGYIYYSGSTNYNPSLKSRVTMSVGPSKNQFSLKLRSVTAADTAVYYCARDQGSSSDAFDIWGQGTMVTVSSGGGGSGGGGSGGGGSEIVLTQSPGTLSLSPGERATLSCRASQSVSSSYLAWYQQKPGQAPRLLIYGASSRATGIPDRFSGSGSGTDFTLTISRLEPEDFAVYYCQQYGSSPLTFGCGTKVEIKSGGGGSEVQLVESGGGLVQPGGSLKLSCAASGFTFNKYAMNWVRQAPGKGLEWVARIRSKYNNYATYYADSVKDRFTISRDDSKNTAYLQMNNLKTEDTAVYYCVRHGNFGNSYISYWAYWGQGTLVTVSSGGGGSGGGGSGGGGSQTVVTQEPSLTVSPGGTVTLTCGSSTGAVTSGNYPNWVQQKPGQAPRGLIGGTKFLAPGTPARFSGSLLGGKAALTLSGVQPEDEAEYYCVLWYSNRWVFGGGTKLTVLGGGGDKTHTCPPCPAPELLGGPSVFLFPPKPKDTLMISRTPEVTCVVVDVSHEDPEVKFNWYVDGVEVHNAKTKPCEEQYGSTYRCVSVLTVLHQDWLNGKEYKCKVSNKALPAPIEKTISKAKGQPREPQVYTLPPSREEMTKNQVSLTCLVKGFYPSDIAVEWESNGQPENNYKTTPPVLDSDGSFFLYSKLTVDKSRWQQGNVFSCSVMHEALHNHYTQKSLSLSPGKGGGGSGGGGSGGGGSGGGGSGGGGSGGGGSDKTHTCPPCPAPELLGGPSVFLFPPKPKDTLMISRTPEVTCVVVDVSHEDPEVKFNWYVDGVEVHNAKTKPCEEQYGSTYRCVSVLTVLHQDWLNGKEYKCKVSNKALPAPIEKTISKAKGQPREPQVYTLPPSREEMTKNQVSLTCLVKGFYPSDIAVEWESNGQPENNYKTTPPVLDSDGSFFLYSKLTVDKSRWQQGNVFSCSVMHEALHNHYTQKSLSLSPGK

SEQ ID NO: 710 - protein, 501 aa, Artificial Sequence
  Synthetic
QVTLKESGPTLVKPTETLTLTCTLSGFSLNNARMGVSWIRQPPGKCLEWLAHIFSNDEKSYSTSLKNRLTISKDSSKTQVVLTMTNVDPVDTATYYCARIVGYGSGWYGFFDYWGQGTLVTVSSGGGGSGGGGSGGGGSDIQMTQSPSSLSASVGDRVTITCRASQGIRNDLGWYQQKPGKAPKRLIYAASTLQSGVPSRFSGSGSGTEFTLTISSLQPEDFATYYCLQHNSYPLTFGCGTKVEIKSGGGGSQVQLQESGPGLVKPSETLSLTCTVSGGSVSGGGYYWSWIRQPPGKCLEWIGYIYYSGSTNYNPSLKSRVTMSVGPSKNQFSLKLRSVTAADTAVYYCARDQGSSSDAFDIWGQGTMVTVSSGGGGSGGGGSGGGGSDIVMTQSPDSLAVSLGERATINCKSSQSVLYSSNNKNYLAWYQQKPGQPPKLLIYWASTRESGVPDRFSGSGSGTDFTLTISSLQAEDVAVYYCQQYYSTPFTFGCGTKVDIK

SEQ ID NO: 711 - protein, 756 aa, Artificial Sequence
  Synthetic
QVTLKESGPTLVKPTETLTLTCTLSGFSLNNARMGVSWIRQPPGKCLEWLAHIFSNDEKSYSTSLKNRLTISKDSSKTQVVLTMTNVDPVDTATYYCARIVGYGSGWYGFFDYWGQGTLVTVSSGGGGSGGGGSGGGGSDIQMTQSPSSLSASVGDRVTITCRASQGIRNDLGWYQQKPGKAPKRLIYAASTLQSGVPSRFSGSGSGTEFTLTISSLQPEDFATYYCLQHNSYPLTFGCGTKVEIKSGGGGSQVQLQESGPGLVKPSETLSLTCTVSGGSVSGGGYYWSWIRQPPGKCLEWIGYIYYSGSTNYNPSLKSRVTMSVGPSKNQFSLKLRSVTAADTAVYYCARDQGSSSDAFDIWGQGTMVTVSSGGGGSGGGGSGGGGSDIVMTQSPDSLAVSLGERATINCKSSQSVLYSSNNKNYLAWYQQKPGQPPKLLIYWASTRESGVPDRFSGSGSGTDFTLTISSLQAEDVAVYYCQQYYSTPFTFGCGTKVDIKSGGGGSEVQLVESGGGLVQPGGSLKLSCAASGFTFNKYAMNWVRQAPGKGLEWVARIRSKYNNYATYYADSVKDRFTISRDDSKNTAYLQMNNLKTEDTAVYYCVRHGNFGNSYISYWAYWGQGTLVTVSSGGGGSGGGGSGGGGSQTVVTQEPSLTVSPGGTVTLTCGSSTGAVTSGNYPNWVQQKPGQAPRGLIGGTKFLAPGTPARFSGSLLGGKAALTLSGVQPEDEAEYYCVLWYSNRWVFGGGTKLTVL

SEQ ID NO: 712 - protein, 1244 aa, Artificial Sequence
  Synthetic
QVTLKESGPTLVKPTETLTLTCTLSGFSLNNARMGVSWIRQPPGKCLEWLAHIFSNDEKSYSTSLKNRLTISKDSSKTQVVLTMTNVDPVDTATYYCARIVGYGSGWYGFFDYWGQGTLVTVSSGGGGSGGGGSGGGGSDIQMTQSPSSLSASVGDRVTITCRASQGIRNDLGWYQQKPGKAPKRLIYAASTLQSGVPSRFSGSGSGTEFTLTISSLQPEDFATYYCLQHNSYPLTFGCGTKVEIKSGGGGSQVQLQESGPGLVKPSETLSLTCTVSGGSVSGGGYYWSWIRQPPGKCLEWIGYIYYSGSTNYNPSLKSRVTMSVGPSKNQFSLKLRSVTAADTAVYYCARDQGSSSDAFDIWGQGTMVTVSSGGGGSGGGGSGGGGSDIVMTQSPDSLAVSLGERATINCKSSQSVLYSSNNKNYLAWYQQKPGQPPKLLIYWASTRESGVPDRFSGSGSGTDFTLTISSLQAEDVAVYYCQQYYSTPFTFGCGTKVDIKSGGGGSEVQLVESGGGLVQPGGSLKLSCAASGFTFNKYAMNWVRQAPGKGLEWVARIRSKYNNYATYYADSVKDRFTISRDDSKNTAYLQMNNLKTEDTAVYYCVRHGNFGNSYISYWAYWGQGTLVTVSSGGGGSGGGGSGGGGSQTVVTQEPSLTVSPGGTVTLTCGSSTGAVTSGNYPNWVQQKPGQAPRGLIGGTKFLAPGTPARFSGSLLGGKAALTLSGVQPEDEAEYYCVLWYSNRWVFGGGTKLTVLGGGGDKTHTCPPCPAPELLGGPSVFLFPPKPKDTLMISRTPEVTCVVVDVSHEDPEVKFNWYVDGVEVHNAKTKPCEEQYGSTYRCVSVLTVLHQDWLNGKEYKCKVSNKALPAPIEKTISKAKGQPREPQVYTLPPSREEMTKNQVSLTCLVKGFYPSDIAVEWESNGQPENNYKTTPPVLDSDGSFFLYSKLTVDKSRWQQGNVFSCSVMHEALHNHYTQKSLSLSPGKGGGGSGGGGSGGGGSGGGGSGGGGSGGGGSDKTHTCPPCPAPELLGGPSVFLFPPKPKDTLMISRTPEVTCVVVDVSHEDPEVKFNWYVDGVEVHNAKTKPCEEQYGSTYRCVSVLTVLHQDWLNGKEYKCKVSNKALPAPIEKTISKAKGQPREPQVYTLPPSREEMTKNQVSLTCLVKGFYPSDIAVEWESNGQPENNYKTTPPVLDSDGSFFLYSKLTVDKSRWQQGNVFSCSVMHEALHNHYTQKSLSLSPGK

SEQ ID NO: 713 - protein, 498 aa, Artificial Sequence
  Synthetic
QVTLKESGPTLVKPTETLTLTCTLSGFSLNNARMGVSWIRQPPGKCLEWLAHIFSNDEKSYSTSLKNRLTISKDSSKTQVVLTMTNVDPVDTATYYCARIVGYGSGWYGFFDYWGQGTLVTVSSGGGGSGGGGSGGGGSDIQMTQSPSSLSASVGDRVTITCRASQGIRNDLGWYQQKPGKAPKRLIYAASTLQSGVPSRFSGSGSGTEFTLTISSLQPEDFATYYCLQHNSYPLTFGCGTKVEIKSGGGGSEVQLLESGGGLVQPGGSLRLSCAASGFTFSHYAMSWVRQAPGKCLEWVSAVSGGGDKTLYADSVKGRFTISRDNSKNTLFLQMNSLRAEDTAIYYCARLRGFYYGMDVWGQGTTVTVSSGGGGSGGGGSGGGGSDIVLTQSPLSLPVTPGEPASISCRSSQSLLHSNGYNYLDWYLQKPGQSPQLLIYLGSNRASGVPDRFSGSGSGTDFTLKISRVEAEDVGVYYCMQALQTALTFGCGTKVEIK

SEQ ID NO: 714 - protein, 753 aa, Artificial Sequence
  Synthetic
QVTLKESGPTLVKPTETLTLTCTLSGFSLNNARMGVSWIRQPPGKCLEWLAHIFSNDEKSYSTSLKNRLTISKDSSKTQVVLTMTNVDPVDTATYYCARIVGYGSGWYGFFDYWGQGTLVTVSSGGGGSGGGGSGGGGSDIQMTQSPSSLSASVGDRVTITCRASQGIRNDLGWYQQKPGKAPKRLIYAASTLQSGVPSRFSGSGSGTEFTLTISSLQPEDFATYYCLQHNSYPLTFGCGTKVEIKSGGGGSEVQLLESGGGLVQPGGSLRLSCAASGFTFSHYAMSWVRQAPGKCLEWVSAVSGGGDKTLYADSVKGRFTISRDNSKNTLFLQMNSLRAEDTAIYYCARLRGFYYGMDVWGQGTTVTVSSGGGGSGGGGSGGGGSDIVLTQSPLSLPVTPGEPASISCRSSQSLLHSNGYNYLDWYLQKPGQSPQLLIYLGSNRASGVPDRFSGSGSGTDFTLKISRVEAEDVGVYYCMQALQTALTFGCGTKVEIKSGGGGSEVQLVESGGGLVQPGGSLKLSCAASGFTFNKYAMNWVRQAPGKGLEWVARIRSKYNNYATYYADSVKDRFTISRDDSKNTAYLQMNNLKTEDTAVYYCVRHGNFGNSYISYWAYWGQGTLVTVSSGGGGSGGGGSGGGGSQTVVTQEPSLTVSPGGTVTLTCGSSTGAVTSGNYPNWVQQKPGQAPRGLIGGTKFLAPGTPARFSGSLLGGKAALTLSGVQPEDEAEYYCVLWYSNRWVFGGGTKLTVL

SEQ ID NO: 715 - protein, 1241 aa, Artificial Sequence
  Synthetic
QVTLKESGPTLVKPTETLTLTCTLSGFSLNNARMGVSWIRQPPGKCLEWLAHIFSNDEKSYSTSLKNRLTISKDSSKTQVVLTMTNVDPVDTATYYCARIVGYGSGWYGFFDYWGQGTLVTVSSGGGGSGGGGSGGGGSDIQMTQSPSSLSASVGDRVTITCRASQGIRNDLGWYQQKPGKAPKRLIYAASTLQSGVPSRFSGSGSGTEFTLTISSLQPEDFATYYCLQHNSYPLTFGCGTKVEIKSGGGGSEVQLLESGGGLVQPGGSLRLSCAASGFTFSHYAMSWVRQAPGKCLEWVSAVSGGGDKTLYADSVKGRFTISRDNSKNTLFLQMNSLRAEDTAIYYCARLRGFYYGMDVWGQGTTVTVSSGGGGSGGGGSGGGGSDIVLTQSPLSLPVTPGEPASISCRSSQSLLHSNGYNYLDWYLQKPGQSPQLLIYLGSNRASGVPDRFSGSGSGTDFTLKISRVEAEDVGVYYCMQALQTALTFGCGTKVEIKSGGGGSEVQLVESGGGLVQPGGSLKLSCAASGFTFNKYAMNWVRQAPGKGLEWVARIRSKYNNYATYYADSVKDRFTISRDDSKNTAYLQMNNLKTEDTAVYYCVRHGNFGNSYISYWAYWGQGTLVTVSSGGGGSGGGGSGGGGSQTVVTQEPSLTVSPGGTVTLTCGSSTGAVTSGNYPNWVQQKPGQAPRGLIGGTKFLAPGTPARFSGSLLGGKAALTLSGVQPEDEAEYYCVLWYSNRWVFGGGTKLTVLGGGGDKTHTCPPCPAPELLGGPSVFLFPPKPKDTLMISRTPEVTCVVVDVSHEDPEVKFNWYVDGVEVHNAKTKPCEEQYGSTYRCVSVLTVLHQDWLNGKEYKCKVSNKALPAPIEKTISKAKGQPREPQVYTLPPSREEMTKNQVSLTCLVKGFYPSDIAVEWESNGQPENNYKTTPPVLDSDGSFFLYSKLTVDKSRWQQGNVFSCSVMHEALHNHYTQKSLSLSPGKGGGGSGGGGSGGGGSGGGGSGGGGSGGGGSDKTHTCPPCPAPELLGGPSVFLFPPKPKDTLMISRTPEVTCVVVDVSHEDPEVKFNWYVDGVEVHNAKTKPCEEQYGSTYRCVSVLTVLHQDWLNGKEYKCKVSNKALPAPIEKTISKAKGQPREPQVYTLPPSREEMTKNQVSLTCLVKGFYPSDIAVEWESNGQPENNYKTTPPVLDSDGSFFLYSKLTVDKSRWQQGNVFSCSVMHEALHNHYTQKSLSLSPGK

SEQ ID NO: 716 - protein, 498 aa, Artificial Sequence
  Synthetic
QVTLKESGPTLVKPTETLTLTCTLSGFSLNNARMGVSWIRQPPGKCLEWLAHIFSNDEKSYSTSLKNRLTISKDSSKTQVVLTMTNVDPVDTATYYCARIVGYGSGWYGFFDYWGQGTLVTVSSGGGGSGGGGSGGGGSDIQMTQSPSSLSASVGDRVTITCRASQGIRNDLGWYQQKPGKAPKRLIYAASTLQSGVPSRFSGSGSGTEFTLTISSLQPEDFATYYCLQHNSYPLTFGCGTKVEIKSGGGGSEVQLLESGGALVQPGGSLRLSCAASGFTFSHYAMSWVRQAPGKCLEWVSAISGGGDRTFYADSVKGRFTISRDNSKNTLYLQLNSLRAEDTAVYFCAKDRGYYYGMDVWGQGTTVTVSSGGGGSGGGGSGGGGSDIVMTQSPLSLPVTPGEPASISCRSSQSLLRNNGYNYLDWYLQKPGQSPYLLIYLGSNRASGVPDRFSGSGSGTDFTLKISRVEAEDVGVYYCMQALQTPFTFGCGTKVEIK

SEQ ID NO: 717 - protein, 753 aa, Artificial Sequence
  Synthetic
QVTLKESGPTLVKPTETLTLTCTLSGFSLNNARMGVSWIRQPPGKCLEWLAHIFSNDEKSYSTSLKNRLTISKDSSKTQVVLTMTNVDPVDTATYYCARIVGYGSGWYGFFDYWGQGTLVTVSSGGGGSGGGGSGGGGSDIQMTQSPSSLSASVGDRVTITCRASQGIRNDLGWYQQKPGKAPKRLIYAASTLQSGVPSRFSGSGSGTEFTLTISSLQPEDFATYYCLQHNSYPLTFGCGTKVEIKSGGGGSEVQLLESGGALVQPGGSLRLSCAASGFTFSHYAMSWVRQAPGKCLEWVSAISGGGDRTFYADSVKGRFTISRDNSKNTLYLQLNSLRAEDTAVYFCAKDRGYYYGMDVWGQGTTVTVSSGGGGSGGGGSGGGGSDIVMTQSPLSLPVTPGEPASISCRSSQSLLRNNGYNYLDWYLQKPGQSPYLLIYLGSNRASGVPDRFSGSGSGTDFTLKISRVEAEDVGVYYCMQALQTPFTFGCGTKVEIKSGGGGSEVQLVESGGGLVQPGGSLKLSCAASGFTFNKYAMNWVRQAPGKGLEWVARIRSKYNNYATYYADSVKDRFTISRDDSKNTAYLQMNNLKTEDTAVYYCVRHGNFGNSYISYWAYWGQGTLVTVSSGGGGSGGGGSGGGGSQTVVTQEPSLTVSPGGTVTLTCGSSTGAVTSGNYPNWVQQKPGQAPRGLIGGTKFLAPGTPARFSGSLLGGKAALTLSGVQPEDEAEYYCVLWYSNRWVFGGGTKLTVL

SEQ ID NO: 718 - protein, 1241 aa, Artificial Sequence
  Synthetic
QVTLKESGPTLVKPTETLTLTCTLSGFSLNNARMGVSWIRQPPGKCLEWLAHIFSNDEKSYSTSLKNRLTISKDSSKTQVVLTMTNVDPVDTATYYCARIVGYGSGWYGFFDYWGQGTLVTVSSGGGGSGGGGSGGGGSDIQMTQSPSSLSASVGDRVTITCRASQGIRNDLGWYQQKPGKAPKRLIYAASTLQSGVPSRFSGSGSGTEFTLTISSLQPEDFATYYCLQHNSYPLTFGCGTKVEIKSGGGGSEVQLLESGGALVQPGGSLRLSCAASGFTFSHYAMSWVRQAPGKCLEWVSAISGGGDRTFYADSVKGRFTISRDNSKNTLYLQLNSLRAEDTAVYFCAKDRGYYYGMDVWGQGTTVTVSSGGGGSGGGGSGGGGSDIVMTQSPLSLPVTPGEPASISCRSSQSLLRNNGYNYLDWYLQKPGQSPYLLIYLGSNRASGVPDRFSGSGSGTDFTLKISRVEAEDVGVYYCMQALQTPFTFGCGTKVEIKSGGGGSEVQLVESGGGLVQPGGSLKLSCAASGFTFNKYAMNWVRQAPGKGLEWVARIRSKYNNYATYYADSVKDRFTISRDDSKNTAYLQMNNLKTEDTAVYYCVRHGNFGNSYISYWAYWGQGTLVTVSSGGGGSGGGGSGGGGSQTVVTQEPSLTVSPGGTVTLTCGSSTGAVTSGNYPNWVQQKPGQAPRGLIGGTKFLAPGTPARFSGSLLGGKAALTLSGVQPEDEAEYYCVLWYSNRWVFGGGTKLTVLGGGGDKTHTCPPCPAPELLGGPSVFLFPPKPKDTLMISRTPEVTCVVVDVSHEDPEVKFNWYVDGVEVHNAKTKPCEEQYGSTYRCVSVLTVLHQDWLNGKEYKCKVSNKALPAPIEKTISKAKGQPREPQVYTLPPSREEMTKNQVSLTCLVKGFYPSDIAVEWESNGQPENNYKTTPPVLDSDGSFFLYSKLTVDKSRWQQGNVFSCSVMHEALHNHYTQKSLSLSPGKGGGGSGGGGSGGGGSGGGGSGGGGSGGGGSDKTHTCPPCPAPELLGGPSVFLFPPKPKDTLMISRTPEVTCVVVDVSHEDPEVKFNWYVDGVEVHNAKTKPCEEQYGSTYRCVSVLTVLHQDWLNGKEYKCKVSNKALPAPIEKTISKAKGQPREPQVYTLPPSREEMTKNQVSLTCLVKGFYPSDIAVEWESNGQPENNYKTTPPVLDSDGSFFLYSKLTVDKSRWQQGNVFSCSVMHEALHNHYTQKSLSLSPGK

SEQ ID NO: 719 - protein, 498 aa, Artificial Sequence
  Synthetic
QVTLKESGPTLVKPTETLTLTCTLSGFSLNNARMGVSWIRQPPGKCLEWLAHIFSNDEKSYSTSLKNRLTISKDSSKTQVVLTMTNVDPVDTATYYCARIVGYGSGWYGFFDYWGQGTLVTVSSGGGGSGGGGSGGGGSDIQMTQSPSSLSASVGDRVTITCRASQGIRNDLGWYQQKPGKAPKRLIYAASTLQSGVPSRFSGSGSGTEFTLTISSLQPEDFATYYCLQHNSYPLTFGCGTKVEIKSGGGGSEVQLLESGGGLVQPGVSLRLSCAASGFTFSHYAMNWVRQAPGKCLEWVSAISGGGDGTYYADSVKGRFTISRDNSKNTLYLQMNSLRAEDTAVYYCAKPRGYYYGMDVWGQGTTVTVSSGGGGSGGGGSGGGGSDIVLTQSPLSLPVTPGEPASISCRSSQSLLRDNGYNYLDWYLQKPGQSPQLLIYLGSYRASGVPDRFSGSGSGTDFTLKISRVEAEDVGVYYCMQALQTPFTFGCGTKVEIK

SEQ ID NO: 720 - protein, 753 aa, Artificial Sequence
  Synthetic
QVTLKESGPTLVKPTETLTLTCTLSGFSLNNARMGVSWIRQPPGKCLEWLAHIFSNDEKSYSTSLKNRLTISKDSSKTQVVLTMTNVDPVDTATYYCARIVGYGSGWYGFFDYWGQGTLVTVSSGGGGSGGGGSGGGGSDIQMTQSPSSLSASVGDRVTITCRASQGIRNDLGWYQQKPGKAPKRLIYAASTLQSGVPSRFSGSGSGTEFTLTISSLQPEDFATYYCLQHNSYPLTFGCGTKVEIKSGGGGSEVQLLESGGGLVQPGVSLRLSCAASGFTFSHYAMNWVRQAPGKCLEWVSAISGGGDGTYYADSVKGRFTISRDNSKNTLYLQMNSLRAEDTAVYYCAKPRGYYYGMDVWGQGTTVTVSSGGGGSGGGGSGGGGSDIVLTQSPLSLPVTPGEPASISCRSSQSLLRDNGYNYLDWYLQKPGQSPQLLIYLGSYRASGVPDRFSGSGSGTDFTLKISRVEAEDVGVYYCMQALQTPFTFGCGTKVEIKSGGGGSEVQLVESGGGLVQPGGSLKLSCAASGFTFNKYAMNWVRQAPGKGLEWVARIRSKYNNYATYYADSVKDRFTISRDDSKNTAYLQMNNLKTEDTAVYYCVRHGNFGNSYISYWAYWGQGTLVTVSSGGGGSGGGGSGGGGSQTVVTQEPSLTVSPGGTVTLTCGSSTGAVTSGNYPNWVQQKPGQAPRGLIGGTKFLAPGTPARFSGSLLGGKAALTLSGVQPEDEAEYYCVLWYSNRWVFGGGTKLTVL

SEQ ID NO: 721 - protein, 1241 aa, Artificial Sequence
  Synthetic
QVTLKESGPTLVKPTETLTLTCTLSGFSLNNARMGVSWIRQPPGKCLEWLAHIFSNDEKSYSTSLKNRLTISKDSSKTQVVLTMTNVDPVDTATYYCARIVGYGSGWYGFFDYWGQGTLVTVSSGGGGSGGGGSGGGGSDIQMTQSPSSLSASVGDRVTITCRASQGIRNDLGWYQQKPGKAPKRLIYAASTLQSGVPSRFSGSGSGTEFTLTISSLQPEDFATYYCLQHNSYPLTFGCGTKVEIKSGGGGSEVQLLESGGGLVQPGVSLRLSCAASGFTFSHYAMNWVRQAPGKCLEWVSAISGGGDGTYYADSVKGRFTISRDNSKNTLYLQMNSLRAEDTAVYYCAKPRGYYYGMDVWGQGTTVTVSSGGGGSGGGGSGGGGSDIVLTQSPLSLPVTPGEPASISCRSSQSLLRDNGYNYLDWYLQKPGQSPQLLIYLGSYRASGVPDRFSGSGSGTDFTLKISRVEAEDVGVYYCMQALQTPFTFGCGTKVEIKSGGGGSEVQLVESGGGLVQPGGSLKLSCAASGFTFNKYAMNWVRQAPGKGLEWVARIRSKYNNYATYYADSVKDRFTISRDDSKNTAYLQMNNLKTEDTAVYYCVRHGNFGNSYISYWAYWGQGTLVTVSSGGGGSGGGGSGGGGSQTVVTQEPSLTVSPGGTVTLTCGSSTGAVTSGNYPNWVQQKPGQAPRGLIGGTKFLAPGTPARFSGSLLGGKAALTLSGVQPEDEAEYYCVLWYSNRWVFGGGTKLTVLGGGGDKTHTCPPCPAPELLGGPSVFLFPPKPKDTLMISRTPEVTCVVVDVSHEDPEVKFNWYVDGVEVHNAKTKPCEEQYGSTYRCVSVLTVLHQDWLNGKEYKCKVSNKALPAPIEKTISKAKGQPREPQVYTLPPSREEMTKNQVSLTCLVKGFYPSDIAVEWESNGQPENNYKTTPPVLDSDGSFFLYSKLTVDKSRWQQGNVFSCSVMHEALHNHYTQKSLSLSPGKGGGGSGGGGSGGGGSGGGGSGGGGSGGGGSDKTHTCPPCPAPELLGGPSVFLFPPKPKDTLMISRTPEVTCVVVDVSHEDPEVKFNWYVDGVEVHNAKTKPCEEQYGSTYRCVSVLTVLHQDWLNGKEYKCKVSNKALPAPIEKTISKAKGQPREPQVYTLPPSREEMTKNQVSLTCLVKGFYPSDIAVEWESNGQPENNYKTTPPVLDSDGSFFLYSKLTVDKSRWQQGNVFSCSVMHEALHNHYTQKSLSLSPGK

SEQ ID NO: 722 - protein, 496 aa, Artificial Sequence
  Synthetic
QVTLKESGPTLVKPTETLTLTCTLSGFSLNNARMGVSWIRQPPGKCLEWLAHIFSNDEKSYSTSLKNRLTISKDSSKTQVVLTMTNVDPVDTATYYCARIVGYGSGWYGFFDYWGQGTLVTVSSGGGGSGGGGSGGGGSDIQMTQSPSSLSASVGDRVTITCRASQGIRNDLGWYQQKPGKAPKRLIYAASTLQSGVPSRFSGSGSGTEFTLTISSLQPEDFATYYCLQHNSYPLTFGCGTKVEIKSGGGGSQVQLVESGGGVVQPGRSLRLSCEASGFTFSTYGMHWVRQAPGKCQEWVAFISYDASHKYYADAVKGRFTVSRDNSKNTLDLQMNSLRAEDTAVYYCARGELWGYYYYGMDVWGQGTTVTVSSGGGGSGGGGSGGGGSDIQMTQSPSSLSASVGDRVTITCQASQDISNYLNWYQQKPGKAPKLLIYDASNLETGVPSRFSGSGSGTDFTFTISSLQPEDFATYYCQQYDDLPLTFGCGTKVEIK

SEQ ID NO: 723 - protein, 751 aa, Artificial Sequence
  Synthetic
QVTLKESGPTLVKPTETLTLTCTLSGFSLNNARMGVSWIRQPPGKCLEWLAHIFSNDEKSYSTSLKNRLTISKDSSKTQVVLTMTNVDPVDTATYYCARIVGYGSGWYGFFDYWGQGTLVTVSSGGGGSGGGGSGGGGSDIQMTQSPSSLSASVGDRVTITCRASQGIRNDLGWYQQKPGKAPKRLIYAASTLQSGVPSRFSGSGSGTEFTLTISSLQPEDFATYYCLQHNSYPLTFGCGTKVEIKSGGGGSQVQLVESGGGVVQPGRSLRLSCEASGFTFSTYGMHWVRQAPGKCQEWVAFISYDASHKYYADAVKGRFTVSRDNSKNTLDLQMNSLRAEDTAVYYCARGELWGYYYYGMDVWGQGTTVTVSSGGGGSGGGGSGGGGSDIQMTQSPSSLSASVGDRVTITCQASQDISNYLNWYQQKPGKAPKLLIYDASNLETGVPSRFSGSGSGTDFTFTISSLQPEDFATYYCQQYDDLPLTFGCGTKVEIKSGGGGSEVQLVESGGGLVQPGGSLKLSCAASGFTFNKYAMNWVRQAPGKGLEWVARIRSKYNNYATYYADSVKDRFTISRDDSKNTAYLQMNNLKTEDTAVYYCVRHGNFGNSYISYWAYWGQGTLVTVSSGGGGSGGGGSGGGGSQTVVTQEPSLTVSPGGTVTLTCGSSTGAVTSGNYPNWVQQKPGQAPRGLIGGTKFLAPGTPARFSGSLLGGKAALTLSGVQPEDEAEYYCVLWYSNRWVFGGGTKLTVL

SEQ ID NO: 724 - protein, 1239 aa, Artificial Sequence
  Synthetic
QVTLKESGPTLVKPTETLTLTCTLSGFSLNNARMGVSWIRQPPGKCLEWLAHIFSNDEKSYSTSLKNRLTISKDSSKTQVVLTMTNVDPVDTATYYCARIVGYGSGWYGFFDYWGQGTLVTVSSGGGGSGGGGSGGGGSDIQMTQSPSSLSASVGDRVTITCRASQGIRNDLGWYQQKPGKAPKRLIYAASTLQSGVPSRFSGSGSGTEFTLTISSLQPEDFATYYCLQHNSYPLTFGCGTKVEIKSGGGGSQVQLVESGGGVVQPGRSLRLSCEASGFTFSTYGMHWVRQAPGKCQEWVAFISYDASHKYYADAVKGRFTVSRDNSKNTLDLQMNSLRAEDTAVYYCARGELWGYYYYGMDVWGQGTTVTVSSGGGGSGGGGSGGGGSDIQMTQSPSSLSASVGDRVTITCQASQDISNYLNWYQQKPGKAPKLLIYDASNLETGVPSRFSGSGSGTDFTFTISSLQPEDFATYYCQQYDDLPLTFGCGTKVEIKSGGGGSEVQLVESGGGLVQPGGSLKLSCAASGFTFNKYAMNWVRQAPGKGLEWVARIRSKYNNYATYYADSVKDRFTISRDDSKNTAYLQMNNLKTEDTAVYYCVRHGNFGNSYISYWAYWGQGTLVTVSSGGGGSGGGGSGGGGSQTVVTQEPSLTVSPGGTVTLTCGSSTGAVTSGNYPNWVQQKPGQAPRGLIGGTKFLAPGTPARFSGSLLGGKAALTLSGVQPEDEAEYYCVLWYSNRWVFGGGTKLTVLGGGGDKTHTCPPCPAPELLGGPSVFLFPPKPKDTLMISRTPEVTCVVVDVSHEDPEVKFNWYVDGVEVHNAKTKPCEEQYGSTYRCVSVLTVLHQDWLNGKEYKCKVSNKALPAPIEKTISKAKGQPREPQVYTLPPSREEMTKNQVSLTCLVKGFYPSDIAVEWESNGQPENNYKTTPPVLDSDGSFFLYSKLTVDKSRWQQGNVFSCSVMHEALHNHYTQKSLSLSPGKGGGGSGGGGSGGGGSGGGGSGGGGSGGGGSDKTHTCPPCPAPELLGGPSVFLFPPKPKDTLMISRTPEVTCVVVDVSHEDPEVKFNWYVDGVEVHNAKTKPCEEQYGSTYRCVSVLTVLHQDWLNGKEYKCKVSNKALPAPIEKTISKAKGQPREPQVYTLPPSREEMTKNQVSLTCLVKGFYPSDIAVEWESNGQPENNYKTTPPVLDSDGSFFLYSKLTVDKSRWQQGNVFSCSVMHEALHNHYTQKSLSLSPGK

SEQ ID NO: 725 - protein, 496 aa, Artificial Sequence
  Synthetic
QVTLKESGPTLVKPTETLTLTCTLSGFSLNNARMGVSWIRQPPGKCLEWLAHIFSNDEKSYSTSLKNRLTISKDSSKTQVVLTMTNVDPVDTATYYCARIVGYGSGWYGFFDYWGQGTLVTVSSGGGGSGGGGSGGGGSDIQMTQSPSSLSASVGDRVTITCRASQGIRNDLGWYQQKPGKAPKRLIYAASTLQSGVPSRFSGSGSGTEFTLTISSLQPEDFATYYCLQHNSYPLTFGCGTKVEIKSGGGGSQVQLVESGGGVVQPGRSLRLSCEASGFTFSTYGMHWVRQAPGKCQEWVAFISYDASHKYYAESVKGRFTVSRDNSKNTLDLQMNSLRAEDTAVYYCARGELWGYYYYGMDVWGQGTTVTVSSGGGGSGGGGSGGGGSDIQMTQSPSSLSASVGDRVTITCQASQDISNYLNWYQQKPGKAPKLLIYDASNLETGVPSRFSGSGSGTDFTFTISSLQPEDFATYYCQQYDDLPLTFGCGTKVEIK

SEQ ID NO: 726 - protein, 751 aa, Artificial Sequence
  Synthetic
QVTLKESGPTLVKPTETLTLTCTLSGFSLNNARMGVSWIRQPPGKCLEWLAHIFSNDEKSYSTSLKNRLTISKDSSKTQVVLTMTNVDPVDTATYYCARIVGYGSGWYGFFDYWGQGTLVTVSSGGGGSGGGGSGGGGSDIQMTQSPSSLSASVGDRVTITCRASQGIRNDLGWYQQKPGKAPKRLIYAASTLQSGVPSRFSGSGSGTEFTLTISSLQPEDFATYYCLQHNSYPLTFGCGTKVEIKSGGGGSQVQLVESGGGVVQPGRSLRLSCEASGFTFSTYGMHWVRQAPGKCQEWVAFISYDASHKYYAESVKGRFTVSRDNSKNTLDLQMNSLRAEDTAVYYCARGELWGYYYYGMDVWGQGTTVTVSSGGGGSGGGGSGGGGSDIQMTQSPSSLSASVGDRVTITCQASQDISNYLNWYQQKPGKAPKLLIYDASNLETGVPSRFSGSGSGTDFTFTISSLQPEDFATYYCQQYDDLPLTFGCGTKVEIKSGGGGSEVQLVESGGGLVQPGGSLKLSCAASGFTFNKYAMNWVRQAPGKGLEWVARIRSKYNNYATYYADSVKDRFTISRDDSKNTAYLQMNNLKTEDTAVYYCVRHGNFGNSYISYWAYWGQGTLVTVSSGGGGSGGGGSGGGGSQTVVTQEPSLTVSPGGTVTLTCGSSTGAVTSGNYPNWVQQKPGQAPRGLIGGTKFLAPGTPARFSGSLLGGKAALTLSGVQPEDEAEYYCVLWYSNRWVFGGGTKLTVL

SEQ ID NO: 727 - protein, 1239 aa, Artificial Sequence
  Synthetic
QVTLKESGPTLVKPTETLTLTCTLSGFSLNNARMGVSWIRQPPGKCLEWLAHIFSNDEKSYSTSLKNRLTISKDSSKTQVVLTMTNVDPVDTATYYCARIVGYGSGWYGFFDYWGQGTLVTVSSGGGGSGGGGSGGGGSDIQMTQSPSSLSASVGDRVTITCRASQGIRNDLGWYQQKPGKAPKRLIYAASTLQSGVPSRFSGSGSGTEFTLTISSLQPEDFATYYCLQHNSYPLTFGCGTKVEIKSGGGGSQVQLVESGGGVVQPGRSLRLSCEASGFTFSTYGMHWVRQAPGKCQEWVAFISYDASHKYYAESVKGRFTVSRDNSKNTLDLQMNSLRAEDTAVYYCARGELWGYYYYGMDVWGQGTTVTVSSGGGGSGGGGSGGGGSDIQMTQSPSSLSASVGDRVTITCQASQDISNYLNWYQQKPGKAPKLLIYDASNLETGVPSRFSGSGSGTDFTFTISSLQPEDFATYYCQQYDDLPLTFGCGTKVEIKSGGGGSEVQLVESGGGLVQPGGSLKLSCAASGFTFNKYAMNWVRQAPGKGLEWVARIRSKYNNYATYYADSVKDRFTISRDDSKNTAYLQMNNLKTEDTAVYYCVRHGNFGNSYISYWAYWGQGTLVTVSSGGGGSGGGGSGGGGSQTVVTQEPSLTVSPGGTVTLTCGSSTGAVTSGNYPNWVQQKPGQAPRGLIGGTKFLAPGTPARFSGSLLGGKAALTLSGVQPEDEAEYYCVLWYSNRWVFGGGTKLTVLGGGGDKTHTCPPCPAPELLGGPSVFLFPPKPKDTLMISRTPEVTCVVVDVSHEDPEVKFNWYVDGVEVHNAKTKPCEEQYGSTYRCVSVLTVLHQDWLNGKEYKCKVSNKALPAPIEKTISKAKGQPREPQVYTLPPSREEMTKNQVSLTCLVKGFYPSDIAVEWESNGQPENNYKTTPPVLDSDGSFFLYSKLTVDKSRWQQGNVFSCSVMHEALHNHYTQKSLSLSPGKGGGGSGGGGSGGGGSGGGGSGGGGSGGGGSDKTHTCPPCPAPELLGGPSVFLFPPKPKDTLMISRTPEVTCVVVDVSHEDPEVKFNWYVDGVEVHNAKTKPCEEQYGSTYRCVSVLTVLHQDWLNGKEYKCKVSNKALPAPIEKTISKAKGQPREPQVYTLPPSREEMTKNQVSLTCLVKGFYPSDIAVEWESNGQPENNYKTTPPVLDSDGSFFLYSKLTVDKSRWQQGNVFSCSVMHEALHNHYTQKSLSLSPGK

SEQ ID NO: 728 - protein, 496 aa, Artificial Sequence
  Synthetic
QVTLKESGPTLVKPTETLTLTCTLSGFSLNNARMGVSWIRQPPGKCLEWLAHIFSNDEKSYSTSLKNRLTISKDSSKTQVVLTMTNVDPVDTATYYCARIVGYGSGWYGFFDYWGQGTLVTVSSGGGGSGGGGSGGGGSDIQMTQSPSSLSASVGDRVTITCRASQGIRNDLGWYQQKPGKAPKRLIYAASTLQSGVPSRFSGSGSGTEFTLTISSLQPEDFATYYCLQHNSYPLTFGCGTKVEIKSGGGGSQVQLVESGGGVVQPGRSLRLSCEASGFTFSTYGMHWVRQAPGKCQEWVAFISYDASHKYYADSVKGRFTVSRDNSKNTLDLQMNSLRAEDTAVYYCARGELWGYYYYGMDVWGQGTTVTVSSGGGGSGGGGSGGGGSDIQMTQSPSSLSASVGDRVTITCQASQDISNYLNWYQQKPGKAPKLLIYDASNLETGVPSRFSGSGSGTDFTFTISSLQPEDFATYYCQQYDDLPLTFGCGTKVEIK

SEQ ID NO: 729 - protein, 751 aa, Artificial Sequence
  Synthetic
QVTLKESGPTLVKPTETLTLTCTLSGFSLNNARMGVSWIRQPPGKCLEWLAHIFSNDEKSYSTSLKNRLTISKDSSKTQVVLTMTNVDPVDTATYYCARIVGYGSGWYGFFDYWGQGTLVTVSSGGGGSGGGGSGGGGSDIQMTQSPSSLSASVGDRVTITCRASQGIRNDLGWYQQKPGKAPKRLIYAASTLQSGVPSRFSGSGSGTEFTLTISSLQPEDFATYYCLQHNSYPLTFGCGTKVEIKSGGGGSQVQLVESGGGVVQPGRSLRLSCEASGFTFSTYGMHWVRQAPGKCQEWVAFISYDASHKYYADSVKGRFTVSRDNSKNTLDLQMNSLRAEDTAVYYCARGELWGYYYYGMDVWGQGTTVTVSSGGGGSGGGGSGGGGSDIQMTQSPSSLSASVGDRVTITCQASQDISNYLNWYQQKPGKAPKLLIYDASNLETGVPSRFSGSGSGTDFTFTISSLQPEDFATYYCQQYDDLPLTFGCGTKVEIKSGGGGSEVQLVESGGGLVQPGGSLKLSCAASGFTFNKYAMNWVRQAPGKGLEWVARIRSKYNNYATYYADSVKDRFTISRDDSKNTAYLQMNNLKTEDTAVYYCVRHGNFGNSYISYWAYWGQGTLVTVSSGGGGSGGGGSGGGGSQTVVTQEPSLTVSPGGTVTLTCGSSTGAVTSGNYPNWVQQKPGQAPRGLIGGTKFLAPGTPARFSGSLLGGKAALTLSGVQPEDEAEYYCVLWYSNRWVFGGGTKLTVL

SEQ ID NO: 730 - protein, 1239 aa, Artificial Sequence
  Synthetic
QVTLKESGPTLVKPTETLTLTCTLSGFSLNNARMGVSWIRQPPGKCLEWLAHIFSNDEKSYSTSLKNRLTISKDSSKTQVVLTMTNVDPVDTATYYCARIVGYGSGWYGFFDYWGQGTLVTVSSGGGGSGGGGSGGGGSDIQMTQSPSSLSASVGDRVTITCRASQGIRNDLGWYQQKPGKAPKRLIYAASTLQSGVPSRFSGSGSGTEFTLTISSLQPEDFATYYCLQHNSYPLTFGCGTKVEIKSGGGGSQVQLVESGGGVVQPGRSLRLSCEASGFTFSTYGMHWVRQAPGKCQEWVAFISYDASHKYYADSVKGRFTVSRDNSKNTLDLQMNSLRAEDTAVYYCARGELWGYYYYGMDVWGQGTTVTVSSGGGGSGGGGSGGGGSDIQMTQSPSSLSASVGDRVTITCQASQDISNYLNWYQQKPGKAPKLLIYDASNLETGVPSRFSGSGSGTDFTFTISSLQPEDFATYYCQQYDDLPLTFGCGTKVEIKSGGGGSEVQLVESGGGLVQPGGSLKLSCAASGFTFNKYAMNWVRQAPGKGLEWVARIRSKYNNYATYYADSVKDRFTISRDDSKNTAYLQMNNLKTEDTAVYYCVRHGNFGNSYISYWAYWGQGTLVTVSSGGGGSGGGGSGGGGSQTVVTQEPSLTVSPGGTVTLTCGSSTGAVTSGNYPNWVQQKPGQAPRGLIGGTKFLAPGTPARFSGSLLGGKAALTLSGVQPEDEAEYYCVLWYSNRWVFGGGTKLTVLGGGGDKTHTCPPCPAPELLGGPSVFLFPPKPKDTLMISRTPEVTCVVVDVSHEDPEVKFNWYVDGVEVHNAKTKPCEEQYGSTYRCVSVLTVLHQDWLNGKEYKCKVSNKALPAPIEKTISKAKGQPREPQVYTLPPSREEMTKNQVSLTCLVKGFYPSDIAVEWESNGQPENNYKTTPPVLDSDGSFFLYSKLTVDKSRWQQGNVFSCSVMHEALHNHYTQKSLSLSPGKGGGGSGGGGSGGGGSGGGGSGGGGSGGGGSDKTHTCPPCPAPELLGGPSVFLFPPKPKDTLMISRTPEVTCVVVDVSHEDPEVKFNWYVDGVEVHNAKTKPCEEQYGSTYRCVSVLTVLHQDWLNGKEYKCKVSNKALPAPIEKTISKAKGQPREPQVYTLPPSREEMTKNQVSLTCLVKGFYPSDIAVEWESNGQPENNYKTTPPVLDSDGSFFLYSKLTVDKSRWQQGNVFSCSVMHEALHNHYTQKSLSLSPGK

SEQ ID NO: 731 - protein, 496 aa, Artificial Sequence
  Synthetic
QVTLKESGPTLVKPTETLTLTCTLSGFSLNNARMGVSWIRQPPGKCLEWLAHIFSNDEKSYSTSLKNRLTISKDSSKTQVVLTMTNVDPVDTATYYCARIVGYGSGWYGFFDYWGQGTLVTVSSGGGGSGGGGSGGGGSDIQMTQSPSSLSASVGDRVTITCRASQGIRNDLGWYQQKPGKAPKRLIYAASTLQSGVPSRFSGSGSGTEFTLTISSLQPEDFATYYCLQHNSYPLTFGCGTKVEIKSGGGGSQVQLVESGGGVVQPGRSLRLSCEASGFTFSTYGMHWVRQAPGKCQEWVAFISYDGSHKYYADSVKGRFTVSRDNSKNTLDLQMNSLRAEDTAVYYCARGELWGYYYYGMDVWGQGTTVTVSSGGGGSGGGGSGGGGSDIQMTQSPSSLSASVGDRVTITCQASQDISNYLNWYQQKPGKAPKLLIYDASNLETGVPSRFSGSGSGTDFTFTISSLQPEDFATYYCQQYDDLPLTFGCGTKVEIK

SEQ ID NO: 732 - protein, 751 aa, Artificial Sequence
  Synthetic
QVTLKESGPTLVKPTETLTLTCTLSGFSLNNARMGVSWIRQPPGKCLEWLAHIFSNDEKSYSTSLKNRLTISKDSSKTQVVLTMTNVDPVDTATYYCARIVGYGSGWYGFFDYWGQGTLVTVSSGGGGSGGGGSGGGGSDIQMTQSPSSLSASVGDRVTITCRASQGIRNDLGWYQQKPGKAPKRLIYAASTLQSGVPSRFSGSGSGTEFTLTISSLQPEDFATYYCLQHNSYPLTFGCGTKVEIKSGGGGSQVQLVESGGGVVQPGRSLRLSCEASGFTFSTYGMHWVRQAPGKCQEWVAFISYDGSHKYYADSVKGRFTVSRDNSKNTLDLQMNSLRAEDTAVYYCARGELWGYYYYGMDVWGQGTTVTVSSGGGGSGGGGSGGGGSDIQMTQSPSSLSASVGDRVTITCQASQDISNYLNWYQQKPGKAPKLLIYDASNLETGVPSRFSGSGSGTDFTFTISSLQPEDFATYYCQQYDDLPLTFGCGTKVEIKSGGGGSEVQLVESGGGLVQPGGSLKLSCAASGFTFNKYAMNWVRQAPGKGLEWVARIRSKYNNYATYYADSVKDRFTISRDDSKNTAYLQMNNLKTEDTAVYYCVRHGNFGNSYISYWAYWGQGTLVTVSSGGGGSGGGGSGGGGSQTVVTQEPSLTVSPGGTVTLTCGSSTGAVTSGNYPNWVQQKPGQAPRGLIGGTKFLAPGTPARFSGSLLGGKAALTLSGVQPEDEAEYYCVLWYSNRWVFGGGTKLTVL

SEQ ID NO: 733 - protein, 1239 aa, Artificial Sequence
  Synthetic
QVTLKESGPTLVKPTETLTLTCTLSGFSLNNARMGVSWIRQPPGKCLEWLAHIFSNDEKSYSTSLKNRLTISKDSSKTQVVLTMTNVDPVDTATYYCARIVGYGSGWYGFFDYWGQGTLVTVSSGGGGSGGGGSGGGGSDIQMTQSPSSLSASVGDRVTITCRASQGIRNDLGWYQQKPGKAPKRLIYAASTLQSGVPSRFSGSGSGTEFTLTISSLQPEDFATYYCLQHNSYPLTFGCGTKVEIKSGGGGSQVQLVESGGGVVQPGRSLRLSCEASGFTFSTYGMHWVRQAPGKCQEWVAFISYDGSHKYYADSVKGRFTVSRDNSKNTLDLQMNSLRAEDTAVYYCARGELWGYYYYGMDVWGQGTTVTVSSGGGGSGGGGSGGGGSDIQMTQSPSSLSASVGDRVTITCQASQDISNYLNWYQQKPGKAPKLLIYDASNLETGVPSRFSGSGSGTDFTFTISSLQPEDFATYYCQQYDDLPLTFGCGTKVEIKSGGGGSEVQLVESGGGLVQPGGSLKLSCAASGFTFNKYAMNWVRQAPGKGLEWVARIRSKYNNYATYYADSVKDRFTISRDDSKNTAYLQMNNLKTEDTAVYYCVRHGNFGNSYISYWAYWGQGTLVTVSSGGGGSGGGGSGGGGSQTVVTQEPSLTVSPGGTVTLTCGSSTGAVTSGNYPNWVQQKPGQAPRGLIGGTKFLAPGTPARFSGSLLGGKAALTLSGVQPEDEAEYYCVLWYSNRWVFGGGTKLTVLGGGGDKTHTCPPCPAPELLGGPSVFLFPPKPKDTLMISRTPEVTCVVVDVSHEDPEVKFNWYVDGVEVHNAKTKPCEEQYGSTYRCVSVLTVLHQDWLNGKEYKCKVSNKALPAPIEKTISKAKGQPREPQVYTLPPSREEMTKNQVSLTCLVKGFYPSDIAVEWESNGQPENNYKTTPPVLDSDGSFFLYSKLTVDKSRWQQGNVFSCSVMHEALHNHYTQKSLSLSPGKGGGGSGGGGSGGGGSGGGGSGGGGSGGGGSDKTHTCPPCPAPELLGGPSVFLFPPKPKDTLMISRTPEVTCVVVDVSHEDPEVKFNWYVDGVEVHNAKTKPCEEQYGSTYRCVSVLTVLHQDWLNGKEYKCKVSNKALPAPIEKTISKAKGQPREPQVYTLPPSREEMTKNQVSLTCLVKGFYPSDIAVEWESNGQPENNYKTTPPVLDSDGSFFLYSKLTVDKSRWQQGNVFSCSVMHEALHNHYTQKSLSLSPGK

SEQ ID NO: 734 - protein, 498 aa, Artificial Sequence
  Synthetic
QVTLKESGPTLVKPTETLTLTCTLSGFSLNNARMGVSWIRQPPGKCLEWLAHIFSNDEKSYSTSLKNRLTISKDSSKTQVVLTMTNVDPVDTATYYCARIVGYGSGWYGFFDYWGQGTLVTVSSGGGGSGGGGSGGGGSDIQMTQSPSSLSASVGDRVTITCRASQGIRNDLGWYQQKPGKAPKRLIYAASTLQSGVPSRFSGSGSGTEFTLTISSLQPEDFATYYCLQHNSYPLTFGCGTKVEIKSGGGGSEVQLLESGGGLVQPGGSLRLSCAASGFTFSHYAMSWVRQAPGKCLEWVSAISGGGDTTFYADSVKGRFTFSRDNSRNTLYLQMNSLRAEDTAVYYCVKDRGYYYGMDVWGQGTTVTVSSGGGGSGGGGSGGGGSDIVMTQTPLSLPVTPGEPASISCRSSQSLLRTNGYNYLDWYLQKPGQSPQLLIYLGSNRASGVPDRFSGSGSGTDFTLKISRVEAEDVGVYYCMQALQSPYTFGCGTKLEIK

SEQ ID NO: 735 - protein, 753 aa, Artificial Sequence
  Synthetic
QVTLKESGPTLVKPTETLTLTCTLSGFSLNNARMGVSWIRQPPGKCLEWLAHIFSNDEKSYSTSLKNRLTISKDSSKTQVVLTMTNVDPVDTATYYCARIVGYGSGWYGFFDYWGQGTLVTVSSGGGGSGGGGSGGGGSDIQMTQSPSSLSASVGDRVTITCRASQGIRNDLGWYQQKPGKAPKRLIYAASTLQSGVPSRFSGSGSGTEFTLTISSLQPEDFATYYCLQHNSYPLTFGCGTKVEIKSGGGGSEVQLLESGGGLVQPGGSLRLSCAASGFTFSHYAMSWVRQAPGKCLEWVSAISGGGDTTFYADSVKGRFTFSRDNSRNTLYLQMNSLRAEDTAVYYCVKDRGYYYGMDVWGQGTTVTVSSGGGGSGGGGSGGGGSDIVMTQTPLSLPVTPGEPASISCRSSQSLLRTNGYNYLDWYLQKPGQSPQLLIYLGSNRASGVPDRFSGSGSGTDFTLKISRVEAEDVGVYYCMQALQSPYTFGCGTKLEIKSGGGGSEVQLVESGGGLVQPGGSLKLSCAASGFTFNKYAMNWVRQAPGKGLEWVARIRSKYNNYATYYADSVKDRFTISRDDSKNTAYLQMNNLKTEDTAVYYCVRHGNFGNSYISYWAYWGQGTLVTVSSGGGGSGGGGSGGGGSQTVVTQEPSLTVSPGGTVTLTCGSSTGAVTSGNYPNWVQQKPGQAPRGLIGGTKFLAPGTPARFSGSLLGGKAALTLSGVQPEDEAEYYCVLWYSNRWVFGGGTKLTVL

SEQ ID NO: 736 - protein, 1241 aa, Artificial Sequence
  Synthetic
QVTLKESGPTLVKPTETLTLTCTLSGFSLNNARMGVSWIRQPPGKCLEWLAHIFSNDEKSYSTSLKNRLTISKDSSKTQVVLTMTNVDPVDTATYYCARIVGYGSGWYGFFDYWGQGTLVTVSSGGGGSGGGGSGGGGSDIQMTQSPSSLSASVGDRVTITCRASQGIRNDLGWYQQKPGKAPKRLIYAASTLQSGVPSRFSGSGSGTEFTLTISSLQPEDFATYYCLQHNSYPLTFGCGTKVEIKSGGGGSEVQLLESGGGLVQPGGSLRLSCAASGFTFSHYAMSWVRQAPGKCLEWVSAISGGGDTTFYADSVKGRFTFSRDNSRNTLYLQMNSLRAEDTAVYYCVKDRGYYYGMDVWGQGTTVTVSSGGGGSGGGGSGGGGSDIVMTQTPLSLPVTPGEPASISCRSSQSLLRTNGYNYLDWYLQKPGQSPQLLIYLGSNRASGVPDRFSGSGSGTDFTLKISRVEAEDVGVYYCMQALQSPYTFGCGTKLEIKSGGGGSEVQLVESGGGLVQPGGSLKLSCAASGFTFNKYAMNWVRQAPGKGLEWVARIRSKYNNYATYYADSVKDRFTISRDDSKNTAYLQMNNLKTEDTAVYYCVRHGNFGNSYISYWAYWGQGTLVTVSSGGGGSGGGGSGGGGSQTVVTQEPSLTVSPGGTVTLTCGSSTGAVTSGNYPNWVQQKPGQAPRGLIGGTKFLAPGTPARFSGSLLGGKAALTLSGVQPEDEAEYYCVLWYSNRWVFGGGTKLTVLGGGGDKTHTCPPCPAPELLGGPSVFLFPPKPKDTLMISRTPEVTCVVVDVSHEDPEVKFNWYVDGVEVHNAKTKPCEEQYGSTYRCVSVLTVLHQDWLNGKEYKCKVSNKALPAPIEKTISKAKGQPREPQVYTLPPSREEMTKNQVSLTCLVKGFYPSDIAVEWESNGQPENNYKTTPPVLDSDGSFFLYSKLTVDKSRWQQGNVFSCSVMHEALHNHYTQKSLSLSPGKGGGGSGGGGSGGGGSGGGGSGGGGSGGGGSDKTHTCPPCPAPELLGGPSVFLFPPKPKDTLMISRTPEVTCVVVDVSHEDPEVKFNWYVDGVEVHNAKTKPCEEQYGSTYRCVSVLTVLHQDWLNGKEYKCKVSNKALPAPIEKTISKAKGQPREPQVYTLPPSREEMTKNQVSLTCLVKGFYPSDIAVEWESNGQPENNYKTTPPVLDSDGSFFLYSKLTVDKSRWQQGNVFSCSVMHEALHNHYTQKSLSLSPGK

SEQ ID NO: 737 - protein, 498 aa, Artificial Sequence
  Synthetic
QVTLKESGPTLVKPTETLTLTCTLSGFSLNNARMGVSWIRQPPGKCLEWLAHIFSNDEKSYSTSLKNRLTISKDSSKTQVVLTMTNVDPVDTATYYCARIVGYGSGWYGFFDYWGQGTLVTVSSGGGGSGGGGSGGGGSDIQMTQSPSSLSASVGDRVTITCRASQGIRNDLGWYQQKPGKAPKRLIYAASTLQSGVPSRFSGSGSGTEFTLTISSLQPEDFATYYCLQHNSYPLTFGCGTKVEIKSGGGGSEVQLLESGGGLVQPGGSLRLSCAASGFTFSHYAMSWVRQAPGKCLEWVSAISGGGDTTFYADSVKGRFTFSRDNSRNTLYLQMNSLRAEDTAVYYCVKDRGYYYGMDVWGQGTTVTVSSGGGGSGGGGSGGGGSDIVMTQTPLSLPVTPGEPASISCRSSQSLLRTQGYNYLDWYLQKPGQSPQLLIYLGSNRASGVPDRFSGSGSGTDFTLKISRVEAEDVGVYYCMQALQSPYTFGCGTKLEIK

SEQ ID NO: 738 - protein, 753 aa, Artificial Sequence
  Synthetic
QVTLKESGPTLVKPTETLTLTCTLSGFSLNNARMGVSWIRQPPGKCLEWLAHIFSNDEKSYSTSLKNRLTISKDSSKTQVVLTMTNVDPVDTATYYCARIVGYGSGWYGFFDYWGQGTLVTVSSGGGGSGGGGSGGGGSDIQMTQSPSSLSASVGDRVTITCRASQGIRNDLGWYQQKPGKAPKRLIYAASTLQSGVPSRFSGSGSGTEFTLTISSLQPEDFATYYCLQHNSYPLTFGCGTKVEIKSGGGGSEVQLLESGGGLVQPGGSLRLSCAASGFTFSHYAMSWVRQAPGKCLEWVSAISGGGDTTFYADSVKGRFTFSRDNSRNTLYLQMNSLRAEDTAVYYCVKDRGYYYGMDVWGQGTTVTVSSGGGGSGGGGSGGGGSDIVMTQTPLSLPVTPGEPASISCRSSQSLLRTQGYNYLDWYLQKPGQSPQLLIYLGSNRASGVPDRFSGSGSGTDFTLKISRVEAEDVGVYYCMQALQSPYTFGCGTKLEIKSGGGGSEVQLVESGGGLVQPGGSLKLSCAASGFTFNKYAMNWVRQAPGKGLEWVARIRSKYNNYATYYADSVKDRFTISRDDSKNTAYLQMNNLKTEDTAVYYCVRHGNFGNSYISYWAYWGQGTLVTVSSGGGGSGGGGSGGGGSQTVVTQEPSLTVSPGGTVTLTCGSSTGAVTSGNYPNWVQQKPGQAPRGLIGGTKFLAPGTPARFSGSLLGGKAALTLSGVQPEDEAEYYCVLWYSNRWVFGGGTKLTVL

SEQ ID NO: 739 - protein, 1241 aa, Artificial Sequence
  Synthetic
QVTLKESGPTLVKPTETLTLTCTLSGFSLNNARMGVSWIRQPPGKCLEWLAHIFSNDEKSYSTSLKNRLTISKDSSKTQVVLTMTNVDPVDTATYYCARIVGYGSGWYGFFDYWGQGTLVTVSSGGGGSGGGGSGGGGSDIQMTQSPSSLSASVGDRVTITCRASQGIRNDLGWYQQKPGKAPKRLIYAASTLQSGVPSRFSGSGSGTEFTLTISSLQPEDFATYYCLQHNSYPLTFGCGTKVEIKSGGGGSEVQLLESGGGLVQPGGSLRLSCAASGFTFSHYAMSWVRQAPGKCLEWVSAISGGGDTTFYADSVKGRFTFSRDNSRNTLYLQMNSLRAEDTAVYYCVKDRGYYYGMDVWGQGTTVTVSSGGGGSGGGGSGGGGSDIVMTQTPLSLPVTPGEPASISCRSSQSLLRTQGYNYLDWYLQKPGQSPQLLIYLGSNRASGVPDRFSGSGSGTDFTLKISRVEAEDVGVYYCMQALQSPYTFGCGTKLEIKSGGGGSEVQLVESGGGLVQPGGSLKLSCAASGFTFNKYAMNWVRQAPGKGLEWVARIRSKYNNYATYYADSVKDRFTISRDDSKNTAYLQMNNLKTEDTAVYYCVRHGNFGNSYISYWAYWGQGTLVTVSSGGGGSGGGGSGGGGSQTVVTQEPSLTVSPGGTVTLTCGSSTGAVTSGNYPNWVQQKPGQAPRGLIGGTKFLAPGTPARFSGSLLGGKAALTLSGVQPEDEAEYYCVLWYSNRWVFGGGTKLTVLGGGGDKTHTCPPCPAPELLGGPSVFLFPPKPKDTLMISRTPEVTCVVVDVSHEDPEVKFNWYVDGVEVHNAKTKPCEEQYGSTYRCVSVLTVLHQDWLNGKEYKCKVSNKALPAPIEKTISKAKGQPREPQVYTLPPSREEMTKNQVSLTCLVKGFYPSDIAVEWESNGQPENNYKTTPPVLDSDGSFFLYSKLTVDKSRWQQGNVFSCSVMHEALHNHYTQKSLSLSPGKGGGGSGGGGSGGGGSGGGGSGGGGSGGGGSDKTHTCPPCPAPELLGGPSVFLFPPKPKDTLMISRTPEVTCVVVDVSHEDPEVKFNWYVDGVEVHNAKTKPCEEQYGSTYRCVSVLTVLHQDWLNGKEYKCKVSNKALPAPIEKTISKAKGQPREPQVYTLPPSREEMTKNQVSLTCLVKGFYPSDIAVEWESNGQPENNYKTTPPVLDSDGSFFLYSKLTVDKSRWQQGNVFSCSVMHEALHNHYTQKSLSLSPGK

SEQ ID NO: 740 - protein, 496 aa, Artificial Sequence
  Synthetic
QVTLKESGPTLVKPTETLTLTCTLSGFSLNNARMGVSWIRQPPGKCLEWLAHIFSNDEKSYSTSLKNRLTISKDSSKTQVVLTMTNVDPVDTATYYCARIVGYGSGWYGFFDYWGQGTLVTVSSGGGGSGGGGSGGGGSDIQMTQSPSSLSASVGDRVTITCRASQGIRNDLGWYQQKPGKAPKRLIYAASTLQSGVPSRFSGSGSGTEFTLTISSLQPEDFATYYCLQHNSYPLTFGCGTKVEIKSGGGGSQVQLQESGPGLVKPSQTLSLTCTVSGGSISSGGYYWSWIRQHPGKCLEWIGYIYYSGNTYYNPSLKSRVTISVDTSKNQFSLKLSSVTAADTAVYYCARLQDSVFDYWGQGTLVTVSSGGGGSGGGGSGGGGSQSALTQPASVSGSPGQSITISCTGTSSDVGGYNYVSWYQQHPGKAPKLMIFEVSNRPSGVSNRFSGSKSGNTASLTISGLQAEDEADYYCSSYTSSSTLVVFGCGTKLTVL

SEQ ID NO: 741 - protein, 751 aa, Artificial Sequence
  Synthetic
QVTLKESGPTLVKPTETLTLTCTLSGFSLNNARMGVSWIRQPPGKCLEWLAHIFSNDEKSYSTSLKNRLTISKDSSKTQVVLTMTNVDPVDTATYYCARIVGYGSGWYGFFDYWGQGTLVTVSSGGGGSGGGGSGGGGSDIQMTQSPSSLSASVGDRVTITCRASQGIRNDLGWYQQKPGKAPKRLIYAASTLQSGVPSRFSGSGSGTEFTLTISSLQPEDFATYYCLQHNSYPLTFGCGTKVEIKSGGGGSQVQLQESGPGLVKPSQTLSLTCTVSGGSISSGGYYWSWIRQHPGKCLEWIGYIYYSGNTYYNPSLKSRVTISVDTSKNQFSLKLSSVTAADTAVYYCARLQDSVFDYWGQGTLVTVSSGGGGSGGGGSGGGGSQSALTQPASVSGSPGQSITISCTGTSSDVGGYNYVSWYQQHPGKAPKLMIFEVSNRPSGVSNRFSGSKSGNTASLTISGLQAEDEADYYCSSYTSSSTLVVFGCGTKLTVLSGGGGSEVQLVESGGGLVQPGGSLKLSCAASGFTFNKYAMNWVRQAPGKGLEWVARIRSKYNNYATYYADSVKDRFTISRDDSKNTAYLQMNNLKTEDTAVYYCVRHGNFGNSYISYWAYWGQGTLVTVSSGGGGSGGGGSGGGGSQTVVTQEPSLTVSPGGTVTLTCGSSTGAVTSGNYPNWVQQKPGQAPRGLIGGTKFLAPGTPARFSGSLLGGKAALTLSGVQPEDEAEYYCVLWYSNRWVFGGGTKLTVL

SEQ ID NO: 742 - protein, 1239 aa, Artificial Sequence
  Synthetic
QVTLKESGPTLVKPTETLTLTCTLSGFSLNNARMGVSWIRQPPGKCLEWLAHIFSNDEKSYSTSLKNRLTISKDSSKTQVVLTMTNVDPVDTATYYCARIVGYGSGWYGFFDYWGQGTLVTVSSGGGGSGGGGSGGGGSDIQMTQSPSSLSASVGDRVTITCRASQGIRNDLGWYQQKPGKAPKRLIYAASTLQSGVPSRFSGSGSGTEFTLTISSLQPEDFATYYCLQHNSYPLTFGCGTKVEIKSGGGGSQVQLQESGPGLVKPSQTLSLTCTVSGGSISSGGYYWSWIRQHPGKCLEWIGYIYYSGNTYYNPSLKSRVTISVDTSKNQFSLKLSSVTAADTAVYYCARLQDSVFDYWGQGTLVTVSSGGGGSGGGGSGGGGSQSALTQPASVSGSPGQSITISCTGTSSDVGGYNYVSWYQQHPGKAPKLMIFEVSNRPSGVSNRFSGSKSGNTASLTISGLQAEDEADYYCSSYTSSSTLVVFGCGTKLTVLSGGGGSEVQLVESGGGLVQPGGSLKLSCAASGFTFNKYAMNWVRQAPGKGLEWVARIRSKYNNYATYYADSVKDRFTISRDDSKNTAYLQMNNLKTEDTAVYYCVRHGNFGNSYISYWAYWGQGTLVTVSSGGGGSGGGGSGGGGSQTVVTQEPSLTVSPGGTVTLTCGSSTGAVTSGNYPNWVQQKPGQAPRGLIGGTKFLAPGTPARFSGSLLGGKAALTLSGVQPEDEAEYYCVLWYSNRWVFGGGTKLTVLGGGGDKTHTCPPCPAPELLGGPSVFLFPPKPKDTLMISRTPEVTCVVVDVSHEDPEVKFNWYVDGVEVHNAKTKPCEEQYGSTYRCVSVLTVLHQDWLNGKEYKCKVSNKALPAPIEKTISKAKGQPREPQVYTLPPSREEMTKNQVSLTCLVKGFYPSDIAVEWESNGQPENNYKTTPPVLDSDGSFFLYSKLTVDKSRWQQGNVFSCSVMHEALHNHYTQKSLSLSPGKGGGGSGGGGSGGGGSGGGGSGGGGSGGGGSDKTHTCPPCPAPELLGGPSVFLFPPKPKDTLMISRTPEVTCVVVDVSHEDPEVKFNWYVDGVEVHNAKTKPCEEQYGSTYRCVSVLTVLHQDWLNGKEYKCKVSNKALPAPIEKTISKAKGQPREPQVYTLPPSREEMTKNQVSLTCLVKGFYPSDIAVEWESNGQPENNYKTTPPVLDSDGSFFLYSKLTVDKSRWQQGNVFSCSVMHEALHNHYTQKSLSLSPGK

SEQ ID NO: 743 - protein, 496 aa, Artificial Sequence
  Synthetic
QVTLKESGPTLVKPTETLTLTCTLSGFSLNNARMGVSWIRQPPGKCLEWLAHIFSNDEKSYSTSLKNRLTISKDSSKTQVVLTMTNVDPVDTATYYCARIVGYGSGWYGFFDYWGQGTLVTVSSGGGGSGGGGSGGGGSDIQMTQSPSSLSASVGDRVTITCRASQGIRNDLGWYQQKPGKAPKRLIYAASTLQSGVPSRFSGSGSGTEFTLTISSLQPEDFATYYCLQHNSYPLTFGCGTKVEIKSGGGGSQVQLQESGPGLVKPSQTLSLTCTVSGGSISSGGYYWSWIRQHPGKCLEWIGYIYYSGNTYYNPSLKSRVTISVDTSKNQFSLKLSSVTAADTAVYYCARLQDSVFDYWGQGTLVTVSSGGGGSGGGGSGGGGSQSALTQPPSASGSPGQSITISCTGTSSDVGGYNYVSWYQQHPGKAPKLMIYEVSNRPSGVSNRFSGSKSGNTASLTISGLQAEDEADYYCSSYTSSSTLVVFGCGTKLTVL

SEQ ID NO: 744 - protein, 751 aa, Artificial Sequence
  Synthetic
QVTLKESGPTLVKPTETLTLTCTLSGFSLNNARMGVSWIRQPPGKCLEWLAHIFSNDEKSYSTSLKNRLTISKDSSKTQVVLTMTNVDPVDTATYYCARIVGYGSGWYGFFDYWGQGTLVTVSSGGGGSGGGGSGGGGSDIQMTQSPSSLSASVGDRVTITCRASQGIRNDLGWYQQKPGKAPKRLIYAASTLQSGVPSRFSGSGSGTEFTLTISSLQPEDFATYYCLQHNSYPLTFGCGTKVEIKSGGGGSQVQLQESGPGLVKPSQTLSLTCTVSGGSISSGGYYWSWIRQHPGKCLEWIGYIYYSGNTYYNPSLKSRVTISVDTSKNQFSLKLSSVTAADTAVYYCARLQDSVFDYWGQGTLVTVSSGGGGSGGGGSGGGGSQSALTQPPSASGSPGQSITISCTGTSSDVGGYNYVSWYQQHPGKAPKLMIYEVSNRPSGVSNRFSGSKSGNTASLTISGLQAEDEADYYCSSYTSSSTLVVFGCGTKLTVLSGGGGSEVQLVESGGGLVQPGGSLKLSCAASGFTFNKYAMNWVRQAPGKGLEWVARIRSKYNNYATYYADSVKDRFTISRDDSKNTAYLQMNNLKTEDTAVYYCVRHGNFGNSYISYWAYWGQGTLVTVSSGGGGSGGGGSGGGGSQTVVTQEPSLTVSPGGTVTLTCGSSTGAVTSGNYPNWVQQKPGQAPRGLIGGTKFLAPGTPARFSGSLLGGKAALTLSGVQPEDEAEYYCVLWYSNRWVFGGGTKLTVL

SEQ ID NO: 745 - protein, 1239 aa, Artificial Sequence
  Synthetic
QVTLKESGPTLVKPTETLTLTCTLSGFSLNNARMGVSWIRQPPGKCLEWLAHIFSNDEKSYSTSLKNRLTISKDSSKTQVVLTMTNVDPVDTATYYCARIVGYGSGWYGFFDYWGQGTLVTVSSGGGGSGGGGSGGGGSDIQMTQSPSSLSASVGDRVTITCRASQGIRNDLGWYQQKPGKAPKRLIYAASTLQSGVPSRFSGSGSGTEFTLTISSLQPEDFATYYCLQHNSYPLTFGCGTKVEIKSGGGGSQVQLQESGPGLVKPSQTLSLTCTVSGGSISSGGYYWSWIRQHPGKCLEWIGYIYYSGNTYYNPSLKSRVTISVDTSKNQFSLKLSSVTAADTAVYYCARLQDSVFDYWGQGTLVTVSSGGGGSGGGGSGGGGSQSALTQPPSASGSPGQSITISCTGTSSDVGGYNYVSWYQQHPGKAPKLMIYEVSNRPSGVSNRFSGSKSGNTASLTISGLQAEDEADYYCSSYTSSSTLVVFGCGTKLTVLSGGGGSEVQLVESGGGLVQPGGSLKLSCAASGFTFNKYAMNWVRQAPGKGLEWVARIRSKYNNYATYYADSVKDRFTISRDDSKNTAYLQMNNLKTEDTAVYYCVRHGNFGNSYISYWAYWGQGTLVTVSSGGGGSGGGGSGGGGSQTVVTQEPSLTVSPGGTVTLTCGSSTGAVTSGNYPNWVQQKPGQAPRGLIGGTKFLAPGTPARFSGSLLGGKAALTLSGVQPEDEAEYYCVLWYSNRWVFGGGTKLTVLGGGGDKTHTCPPCPAPELLGGPSVFLFPPKPKDTLMISRTPEVTCVVVDVSHEDPEVKFNWYVDGVEVHNAKTKPCEEQYGSTYRCVSVLTVLHQDWLNGKEYKCKVSNKALPAPIEKTISKAKGQPREPQVYTLPPSREEMTKNQVSLTCLVKGFYPSDIAVEWESNGQPENNYKTTPPVLDSDGSFFLYSKLTVDKSRWQQGNVFSCSVMHEALHNHYTQKSLSLSPGKGGGGSGGGGSGGGGSGGGGSGGGGSGGGGSDKTHTCPPCPAPELLGGPSVFLFPPKPKDTLMISRTPEVTCVVVDVSHEDPEVKFNWYVDGVEVHNAKTKPCEEQYGSTYRCVSVLTVLHQDWLNGKEYKCKVSNKALPAPIEKTISKAKGQPREPQVYTLPPSREEMTKNQVSLTCLVKGFYPSDIAVEWESNGQPENNYKTTPPVLDSDGSFFLYSKLTVDKSRWQQGNVFSCSVMHEALHNHYTQKSLSLSPGK

SEQ ID NO: 746 - protein, 496 aa, Artificial Sequence
  Synthetic
QVTLKESGPTLVKPTETLTLTCTLSGFSLNNARMGVSWIRQPPGKCLEWLAHIFSNDEKSYSTSLKNRLTISKDSSKTQVVLTMTNVDPVDTATYYCARIVGYGSGWYGFFDYWGQGTLVTVSSGGGGSGGGGSGGGGSDIQMTQSPSSLSASVGDRVTITCRASQGIRNDLGWYQQKPGKAPKRLIYAASTLQSGVPSRFSGSGSGTEFTLTISSLQPEDFATYYCLQHNSYPLTFGCGTKVEIKSGGGGSQVQLQESGPGLVKPSQTLSLTCTVSGGSISSGGYYWSWIRQHPGKCLEWIGYIYYRGNAYYNPSLKSRVTISVDTSKNQFSLKLSSVTAADTAVYYCATLQESVFDYWGQGTLVTVSSGGGGSGGGGSGGGGSQSALTQPASVSGSPGQSITISCTGTSSDVGGYNYVSWYQQHPGKAPKLMIYEVSNRPSGVSNRFSGSKSGNTASLTISGLQAEDEADYYCSSYTSSSTLVVFGCGTKLTVL

SEQ ID NO: 747 - protein, 751 aa, Artificial Sequence
  Synthetic
QVTLKESGPTLVKPTETLTLTCTLSGFSLNNARMGVSWIRQPPGKCLEWLAHIFSNDEKSYSTSLKNRLTISKDSSKTQVVLTMTNVDPVDTATYYCARIVGYGSGWYGFFDYWGQGTLVTVSSGGGGSGGGGSGGGGSDIQMTQSPSSLSASVGDRVTITCRASQGIRNDLGWYQQKPGKAPKRLIYAASTLQSGVPSRFSGSGSGTEFTLTISSLQPEDFATYYCLQHNSYPLTFGCGTKVEIKSGGGGSQVQLQESGPGLVKPSQTLSLTCTVSGGSISSGGYYWSWIRQHPGKCLEWIGYIYYRGNAYYNPSLKSRVTISVDTSKNQFSLKLSSVTAADTAVYYCATLQESVFDYWGQGTLVTVSSGGGGSGGGGSGGGGSQSALTQPASVSGSPGQSITISCTGTSSDVGGYNYVSWYQQHPGKAPKLMIYEVSNRPSGVSNRFSGSKSGNTASLTISGLQAEDEADYYCSSYTSSSTLVVFGCGTKLTVLSGGGGSEVQLVESGGGLVQPGGSLKLSCAASGFTFNKYAMNWVRQAPGKGLEWVARIRSKYNNYATYYADSVKDRFTISRDDSKNTAYLQMNNLKTEDTAVYYCVRHGNFGNSYISYWAYWGQGTLVTVSSGGGGSGGGGSGGGGSQTVVTQEPSLTVSPGGTVTLTCGSSTGAVTSGNYPNWVQQKPGQAPRGLIGGTKFLAPGTPARFSGSLLGGKAALTLSGVQPEDEAEYYCVLWYSNRWVFGGGTKLTVL

SEQ ID NO: 748 - protein, 1239 aa, Artificial Sequence
  Synthetic
QVTLKESGPTLVKPTETLTLTCTLSGFSLNNARMGVSWIRQPPGKCLEWLAHIFSNDEKSYSTSLKNRLTISKDSSKTQVVLTMTNVDPVDTATYYCARIVGYGSGWYGFFDYWGQGTLVTVSSGGGGSGGGGSGGGGSDIQMTQSPSSLSASVGDRVTITCRASQGIRNDLGWYQQKPGKAPKRLIYAASTLQSGVPSRFSGSGSGTEFTLTISSLQPEDFATYYCLQHNSYPLTFGCGTKVEIKSGGGGSQVQLQESGPGLVKPSQTLSLTCTVSGGSISSGGYYWSWIRQHPGKCLEWIGYIYYRGNAYYNPSLKSRVTISVDTSKNQFSLKLSSVTAADTAVYYCATLQESVFDYWGQGTLVTVSSGGGGSGGGGSGGGGSQSALTQPASVSGSPGQSITISCTGTSSDVGGYNYVSWYQQHPGKAPKLMIYEVSNRPSGVSNRFSGSKSGNTASLTISGLQAEDEADYYCSSYTSSSTLVVFGCGTKLTVLSGGGGSEVQLVESGGGLVQPGGSLKLSCAASGFTFNKYAMNWVRQAPGKGLEWVARIRSKYNNYATYYADSVKDRFTISRDDSKNTAYLQMNNLKTEDTAVYYCVRHGNFGNSYISYWAYWGQGTLVTVSSGGGGSGGGGSGGGGSQTVVTQEPSLTVSPGGTVTLTCGSSTGAVTSGNYPNWVQQKPGQAPRGLIGGTKFLAPGTPARFSGSLLGGKAALTLSGVQPEDEAEYYCVLWYSNRWVFGGGTKLTVLGGGGDKTHTCPPCPAPELLGGPSVFLFPPKPKDTLMISRTPEVTCVVVDVSHEDPEVKFNWYVDGVEVHNAKTKPCEEQYGSTYRCVSVLTVLHQDWLNGKEYKCKVSNKALPAPIEKTISKAKGQPREPQVYTLPPSREEMTKNQVSLTCLVKGFYPSDIAVEWESNGQPENNYKTTPPVLDSDGSFFLYSKLTVDKSRWQQGNVFSCSVMHEALHNHYTQKSLSLSPGKGGGGSGGGGSGGGGSGGGGSGGGGSGGGGSDKTHTCPPCPAPELLGGPSVFLFPPKPKDTLMISRTPEVTCVVVDVSHEDPEVKFNWYVDGVEVHNAKTKPCEEQYGSTYRCVSVLTVLHQDWLNGKEYKCKVSNKALPAPIEKTISKAKGQPREPQVYTLPPSREEMTKNQVSLTCLVKGFYPSDIAVEWESNGQPENNYKTTPPVLDSDGSFFLYSKLTVDKSRWQQGNVFSCSVMHEALHNHYTQKSLSLSPGK

SEQ ID NO: 749 - protein, 507 aa, Artificial Sequence
  Synthetic
QVTLKESGPTLVKPTETLTLTCTLSGFSLNNARMGVSWIRQPPGKCLEWLAHIFSNDEKSYSTSLKNRLTISKDSSKTQVVLTMTNVDPVDTATYYCARIVGYGSGWYGFFDYWGQGTLVTVSSGGGGSGGGGSGGGGSDIQMTQSPSSLSASVGDRVTITCRASQGIRNDLGWYQQKPGKAPKRLIYAASTLQSGVPSRFSGSGSGTEFTLTISSLQPEDFATYYCLQHNSYPLTFGCGTKVEIKSGGGGSEVQLVESGGGLVKPGGSLRLSCVASGFILSSDSMSWVRQAPGKCLEWVSSIRSSNSYIYYRDSVKGRFTISRDNAKNSLYLQMDSLRAEDTAVYFCARERDYYDSGGYYYGDAFDIWGQGTMVTVSSGGGGSGGGGSGGGGSDIVMTQSPDSLAVSLGERATINCKSSQSVLYSSNNKNYLAWYQQKPGQPPKLLIYWASTRESGVPDRFSGSGSGTDFTLTISSLQAEDVAVYYCQQYYSTPITFGCGTRLEIK

SEQ ID NO: 750 - protein, 762 aa, Artificial Sequence
  Synthetic
QVTLKESGPTLVKPTETLTLTCTLSGFSLNNARMGVSWIRQPPGKCLEWLAHIFSNDEKSYSTSLKNRLTISKDSSKTQVVLTMTNVDPVDTATYYCARIVGYGSGWYGFFDYWGQGTLVTVSSGGGGSGGGGSGGGGSDIQMTQSPSSLSASVGDRVTITCRASQGIRNDLGWYQQKPGKAPKRLIYAASTLQSGVPSRFSGSGSGTEFTLTISSLQPEDFATYYCLQHNSYPLTFGCGTKVEIKSGGGGSEVQLVESGGGLVKPGGSLRLSCVASGFILSSDSMSWVRQAPGKCLEWVSSIRSSNSYIYYRDSVKGRFTISRDNAKNSLYLQMDSLRAEDTAVYFCARERDYYDSGGYYYGDAFDIWGQGTMVTVSSGGGGSGGGGSGGGGSDIVMTQSPDSLAVSLGERATINCKSSQSVLYSSNNKNYLAWYQQKPGQPPKLLIYWASTRESGVPDRFSGSGSGTDFTLTISSLQAEDVAVYYCQQYYSTPITFGCGTRLEIKSGGGGSEVQLVESGGGLVQPGGSLKLSCAASGFTFNKYAMNWVRQAPGKGLEWVARIRSKYNNYATYYADSVKDRFTISRDDSKNTAYLQMNNLKTEDTAVYYCVRHGNFGNSYISYWAYWGQGTLVTVSSGGGGSGGGGSGGGGSQTVVTQEPSLTVSPGGTVTLTCGSSTGAVTSGNYPNWVQQKPGQAPRGLIGGTKFLAPGTPARFSGSLLGGKAALTLSGVQPEDEAEYYCVLWYSNRWVFGGGTKLTVL

SEQ ID NO: 751 - protein, 1250 aa, Artificial Sequence
  Synthetic
QVTLKESGPTLVKPTETLTLTCTLSGFSLNNARMGVSWIRQPPGKCLEWLAHIFSNDEKSYSTSLKNRLTISKDSSKTQVVLTMTNVDPVDTATYYCARIVGYGSGWYGFFDYWGQGTLVTVSSGGGGSGGGGSGGGGSDIQMTQSPSSLSASVGDRVTITCRASQGIRNDLGWYQQKPGKAPKRLIYAASTLQSGVPSRFSGSGSGTEFTLTISSLQPEDFATYYCLQHNSYPLTFGCGTKVEIKSGGGGSEVQLVESGGGLVKPGGSLRLSCVASGFILSSDSMSWVRQAPGKCLEWVSSIRSSNSYIYYRDSVKGRFTISRDNAKNSLYLQMDSLRAEDTAVYFCARERDYYDSGGYYYGDAFDIWGQGTMVTVSSGGGGSGGGGSGGGGSDIVMTQSPDSLAVSLGERATINCKSSQSVLYSSNNKNYLAWYQQKPGQPPKLLIYWASTRESGVPDRFSGSGSGTDFTLTISSLQAEDVAVYYCQQYYSTPITFGCGTRLEIKSGGGGSEVQLVESGGGLVQPGGSLKLSCAASGFTFNKYAMNWVRQAPGKGLEWVARIRSKYNNYATYYADSVKDRFTISRDDSKNTAYLQMNNLKTEDTAVYYCVRHGNFGNSYISYWAYWGQGTLVTVSSGGGGSGGGGSGGGGSQTVVTQEPSLTVSPGGTVTLTCGSSTGAVTSGNYPNWVQQKPGQAPRGLIGGTKFLAPGTPARFSGSLLGGKAALTLSGVQPEDEAEYYCVLWYSNRWVFGGGTKLTVLGGGGDKTHTCPPCPAPELLGGPSVFLFPPKPKDTLMISRTPEVTCVVVDVSHEDPEVKFNWYVDGVEVHNAKTKPCEEQYGSTYRCVSVLTVLHQDWLNGKEYKCKVSNKALPAPIEKTISKAKGQPREPQVYTLPPSREEMTKNQVSLTCLVKGFYPSDIAVEWESNGQPENNYKTTPPVLDSDGSFFLYSKLTVDKSRWQQGNVFSCSVMHEALHNHYTQKSLSLSPGKGGGGSGGGGSGGGGSGGGGSGGGGSGGGGSDKTHTCPPCPAPELLGGPSVFLFPPKPKDTLMISRTPEVTCVVVDVSHEDPEVKFNWYVDGVEVHNAKTKPCEEQYGSTYRCVSVLTVLHQDWLNGKEYKCKVSNKALPAPIEKTISKAKGQPREPQVYTLPPSREEMTKNQVSLTCLVKGFYPSDIAVEWESNGQPENNYKTTPPVLDSDGSFFLYSKLTVDKSRWQQGNVFSCSVMHEALHNHYTQKSLSLSPGK

SEQ ID NO: 752 - protein, 507 aa, Artificial Sequence
  Synthetic
QVTLKESGPTLVKPTETLTLTCTLSGFSLNNARMGVSWIRQPPGKCLEWLAHIFSNDEKSYSTSLKNRLTISKDSSKTQVVLTMTNVDPVDTATYYCARIVGYGSGWYGFFDYWGQGTLVTVSSGGGGSGGGGSGGGGSDIQMTQSPSSLSASVGDRVTITCRASQGIRNDLGWYQQKPGKAPKRLIYAASTLQSGVPSRFSGSGSGTEFTLTISSLQPEDFATYYCLQHNSYPLTFGCGTKVEIKSGGGGSEVQLVESGGGLVKPGGSLRLSCVASGFILSSDAMSWVRQAPGKCLEWVSSIRSSNSYIYYRDAVKGRFTISRDNAKNSLYLQMDSLRAEDTAVYFCARERDYYDAGGYYYGDAFDIWGQGTMVTVSSGGGGSGGGGSGGGGSDIVMTQSPDSLAVSLGERATINCKSSQSVLYSSNNKNYLAWYQQKPGQPPKLLIYWASTRESGVPDRFSGSGSGTDFTLTISSLQAEDVAVYYCQQYYSTPITFGCGTRLEIK

SEQ ID NO: 753 - protein, 762 aa, Artificial Sequence
  Synthetic
QVTLKESGPTLVKPTETLTLTCTLSGFSLNNARMGVSWIRQPPGKCLEWLAHIFSNDEKSYSTSLKNRLTISKDSSKTQVVLTMTNVDPVDTATYYCARIVGYGSGWYGFFDYWGQGTLVTVSSGGGGSGGGGSGGGGSDIQMTQSPSSLSASVGDRVTITCRASQGIRNDLGWYQQKPGKAPKRLIYAASTLQSGVPSRFSGSGSGTEFTLTISSLQPEDFATYYCLQHNSYPLTFGCGTKVEIKSGGGGSEVQLVESGGGLVKPGGSLRLSCVASGFILSSDAMSWVRQAPGKCLEWVSSIRSSNSYIYYRDAVKGRFTISRDNAKNSLYLQMDSLRAEDTAVYFCARERDYYDAGGYYYGDAFDIWGQGTMVTVSSGGGGSGGGGSGGGGSDIVMTQSPDSLAVSLGERATINCKSSQSVLYSSNNKNYLAWYQQKPGQPPKLLIYWASTRESGVPDRFSGSGSGTDFTLTISSLQAEDVAVYYCQQYYSTPITFGCGTRLEIKSGGGGSEVQLVESGGGLVQPGGSLKLSCAASGFTFNKYAMNWVRQAPGKGLEWVARIRSKYNNYATYYADSVKDRFTISRDDSKNTAYLQMNNLKTEDTAVYYCVRHGNFGNSYISYWAYWGQGTLVTVSSGGGGSGGGGSGGGGSQTVVTQEPSLTVSPGGTVTLTCGSSTGAVTSGNYPNWVQQKPGQAPRGLIGGTKFLAPGTPARFSGSLLGGKAALTLSGVQPEDEAEYYCVLWYSNRWVFGGGTKLTVL

SEQ ID NO: 754 - protein, 1250 aa, Artificial Sequence
  Synthetic
QVTLKESGPTLVKPTETLTLTCTLSGFSLNNARMGVSWIRQPPGKCLEWLAHIFSNDEKSYSTSLKNRLTISKDSSKTQVVLTMTNVDPVDTATYYCARIVGYGSGWYGFFDYWGQGTLVTVSSGGGGSGGGGSGGGGSDIQMTQSPSSLSASVGDRVTITCRASQGIRNDLGWYQQKPGKAPKRLIYAASTLQSGVPSRFSGSGSGTEFTLTISSLQPEDFATYYCLQHNSYPLTFGCGTKVEIKSGGGGSEVQLVESGGGLVKPGGSLRLSCVASGFILSSDAMSWVRQAPGKCLEWVSSIRSSNSYIYYRDAVKGRFTISRDNAKNSLYLQMDSLRAEDTAVYFCARERDYYDAGGYYYGDAFDIWGQGTMVTVSSGGGGSGGGGSGGGGSDIVMTQSPDSLAVSLGERATINCKSSQSVLYSSNNKNYLAWYQQKPGQPPKLLIYWASTRESGVPDRFSGSGSGTDFTLTISSLQAEDVAVYYCQQYYSTPITFGCGTRLEIKSGGGGSEVQLVESGGGLVQPGGSLKLSCAASGFTFNKYAMNWVRQAPGKGLEWVARIRSKYNNYATYYADSVKDRFTISRDDSKNTAYLQMNNLKTEDTAVYYCVRHGNFGNSYISYWAYWGQGTLVTVSSGGGGSGGGGSGGGGSQTVVTQEPSLTVSPGGTVTLTCGSSTGAVTSGNYPNWVQQKPGQAPRGLIGGTKFLAPGTPARFSGSLLGGKAALTLSGVQPEDEAEYYCVLWYSNRWVFGGGTKLTVLGGGGDKTHTCPPCPAPELLGGPSVFLFPPKPKDTLMISRTPEVTCVVVDVSHEDPEVKFNWYVDGVEVHNAKTKPCEEQYGSTYRCVSVLTVLHQDWLNGKEYKCKVSNKALPAPIEKTISKAKGQPREPQVYTLPPSREEMTKNQVSLTCLVKGFYPSDIAVEWESNGQPENNYKTTPPVLDSDGSFFLYSKLTVDKSRWQQGNVFSCSVMHEALHNHYTQKSLSLSPGKGGGGSGGGGSGGGGSGGGGSGGGGSGGGGSDKTHTCPPCPAPELLGGPSVFLFPPKPKDTLMISRTPEVTCVVVDVSHEDPEVKFNWYVDGVEVHNAKTKPCEEQYGSTYRCVSVLTVLHQDWLNGKEYKCKVSNKALPAPIEKTISKAKGQPREPQVYTLPPSREEMTKNQVSLTCLVKGFYPSDIAVEWESNGQPENNYKTTPPVLDSDGSFFLYSKLTVDKSRWQQGNVFSCSVMHEALHNHYTQKSLSLSPGK

SEQ ID NO: 755 - protein, 507 aa, Artificial Sequence
  Synthetic
QVTLKESGPTLVKPTETLTLTCTLSGFSLNNARMGVSWIRQPPGKCLEWLAHIFSNDEKSYSTSLKNRLTISKDSSKTQVVLTMTNVDPVDTATYYCARIVGYGSGWYGFFDYWGQGTLVTVSSGGGGSGGGGSGGGGSDIQMTQSPSSLSASVGDRVTITCRASQGIRNDLGWYQQKPGKAPKRLIYAASTLQSGVPSRFSGSGSGTEFTLTISSLQPEDFATYYCLQHNSYPLTFGCGTKVEIKSGGGGSEVQLVESGGGLVKPGGSLRLSCVASGFILSSNSMSWVRQAPGKCLEWVSSIRSSNSYIYYRNSVKGRFTISRDNAKNSLYLQMDSLRAEDTAVYFCARERDYYNSGGYYYGDAFDIWGQGTMVTVSSGGGGSGGGGSGGGGSDIVMTQSPDSLAVSLGERATINCKSSQSVLYSSNNKNYLAWYQQKPGQPPKLLIYWASTRESGVPDRFSGSGSGTDFTLTISSLQAEDVAVYYCQQYYSTPITFGCGTRLEIK

SEQ ID NO: 756 - protein, 762 aa, Artificial Sequence
  Synthetic
QVTLKESGPTLVKPTETLTLTCTLSGFSLNNARMGVSWIRQPPGKCLEWLAHIFSNDEKSYSTSLKNRLTISKDSSKTQVVLTMTNVDPVDTATYYCARIVGYGSGWYGFFDYWGQGTLVTVSSGGGGSGGGGSGGGGSDIQMTQSPSSLSASVGDRVTITCRASQGIRNDLGWYQQKPGKAPKRLIYAASTLQSGVPSRFSGSGSGTEFTLTISSLQPEDFATYYCLQHNSYPLTFGCGTKVEIKSGGGGSEVQLVESGGGLVKPGGSLRLSCVASGFILSSNSMSWVRQAPGKCLEWVSSIRSSNSYIYYRNSVKGRFTISRDNAKNSLYLQMDSLRAEDTAVYFCARERDYYNSGGYYYGDAFDIWGQGTMVTVSSGGGGSGGGGSGGGGSDIVMTQSPDSLAVSLGERATINCKSSQSVLYSSNNKNYLAWYQQKPGQPPKLLIYWASTRESGVPDRFSGSGSGTDFTLTISSLQAEDVAVYYCQQYYSTPITFGCGTRLEIKSGGGGSEVQLVESGGGLVQPGGSLKLSCAASGFTFNKYAMNWVRQAPGKGLEWVARIRSKYNNYATYYADSVKDRFTISRDDSKNTAYLQMNNLKTEDTAVYYCVRHGNFGNSYISYWAYWGQGTLVTVSSGGGGSGGGGSGGGGSQTVVTQEPSLTVSPGGTVTLTCGSSTGAVTSGNYPNWVQQKPGQAPRGLIGGTKFLAPGTPARFSGSLLGGKAALTLSGVQPEDEAEYYCVLWYSNRWVFGGGTKLTVL

SEQ ID NO: 757 - protein, 1250 aa, Artificial Sequence
  Synthetic
QVTLKESGPTLVKPTETLTLTCTLSGFSLNNARMGVSWIRQPPGKCLEWLAHIFSNDEKSYSTSLKNRLTISKDSSKTQVVLTMTNVDPVDTATYYCARIVGYGSGWYGFFDYWGQGTLVTVSSGGGGSGGGGSGGGGSDIQMTQSPSSLSASVGDRVTITCRASQGIRNDLGWYQQKPGKAPKRLIYAASTLQSGVPSRFSGSGSGTEFTLTISSLQPEDFATYYCLQHNSYPLTFGCGTKVEIKSGGGGSEVQLVESGGGLVKPGGSLRLSCVASGFILSSNSMSWVRQAPGKCLEWVSSIRSSNSYIYYRNSVKGRFTISRDNAKNSLYLQMDSLRAEDTAVYFCARERDYYNSGGYYYGDAFDIWGQGTMVTVSSGGGGSGGGGSGGGGSDIVMTQSPDSLAVSLGERATINCKSSQSVLYSSNNKNYLAWYQQKPGQPPKLLIYWASTRESGVPDRFSGSGSGTDFTLTISSLQAEDVAVYYCQQYYSTPITFGCGTRLEIKSGGGGSEVQLVESGGGLVQPGGSLKLSCAASGFTFNKYAMNWVRQAPGKGLEWVARIRSKYNNYATYYADSVKDRFTISRDDSKNTAYLQMNNLKTEDTAVYYCVRHGNFGNSYISYWAYWGQGTLVTVSSGGGGSGGGGSGGGGSQTVVTQEPSLTVSPGGTVTLTCGSSTGAVTSGNYPNWVQQKPGQAPRGLIGGTKFLAPGTPARFSGSLLGGKAALTLSGVQPEDEAEYYCVLWYSNRWVFGGGTKLTVLGGGGDKTHTCPPCPAPELLGGPSVFLFPPKPKDTLMISRTPEVTCVVVDVSHEDPEVKFNWYVDGVEVHNAKTKPCEEQYGSTYRCVSVLTVLHQDWLNGKEYKCKVSNKALPAPIEKTISKAKGQPREPQVYTLPPSREEMTKNQVSLTCLVKGFYPSDIAVEWESNGQPENNYKTTPPVLDSDGSFFLYSKLTVDKSRWQQGNVFSCSVMHEALHNHYTQKSLSLSPGKGGGGSGGGGSGGGGSGGGGSGGGGSGGGGSDKTHTCPPCPAPELLGGPSVFLFPPKPKDTLMISRTPEVTCVVVDVSHEDPEVKFNWYVDGVEVHNAKTKPCEEQYGSTYRCVSVLTVLHQDWLNGKEYKCKVSNKALPAPIEKTISKAKGQPREPQVYTLPPSREEMTKNQVSLTCLVKGFYPSDIAVEWESNGQPENNYKTTPPVLDSDGSFFLYSKLTVDKSRWQQGNVFSCSVMHEALHNHYTQKSLSLSPGK

SEQ ID NO: 758 - protein, 495 aa, Artificial Sequence
  Synthetic
QVTLKESGPTLVKPTETLTLTCTLSGFSLNNARMGVSWIRQPPGKCLEWLAHIFSNDEKSYSTSLKNRLTISKDSSKTQVVLTMTNVDPVDTATYYCARIVGYGSGWYGFFDYWGQGTLVTVSSGGGGSGGGGSGGGGSDIQMTQSPSSLSASVGDRVTITCRASQGIRNDLGWYQQKPGKAPKRLIYAASTLQSGVPSRFSGSGSGTEFTLTISSLQPEDFATYYCLQHNSYPLTFGCGTKVEIKSGGGGSQVQLQESGPGLVKPSQTLSLTCTVSGGSISSGGYYWSWIRQHPGKCLEWIGYIYYRGNAYYNPSLKSRVTISVDTSKNQFSLKLSSVTAADTAVYYCATLQESVFDYWGQGTLVTVSSGGGGSGGGGSGGGGSQSALTQPASVSGSPGQSITISCTGTSSDVGGYNYVSWYQQHPGKAPKLMIYEVSNRPSGVSNRFSGSKSGNTASLTISGLQAEDEADYYCSSYTSSSTLVVGCGTKLTVL

SEQ ID NO: 759 - protein, 750 aa, Artificial Sequence
  Synthetic
QVTLKESGPTLVKPTETLTLTCTLSGFSLNNARMGVSWIRQPPGKCLEWLAHIFSNDEKSYSTSLKNRLTISKDSSKTQVVLTMTNVDPVDTATYYCARIVGYGSGWYGFFDYWGQGTLVTVSSGGGGSGGGGSGGGGSDIQMTQSPSSLSASVGDRVTITCRASQGIRNDLGWYQQKPGKAPKRLIYAASTLQSGVPSRFSGSGSGTEFTLTISSLQPEDFATYYCLQHNSYPLTFGCGTKVEIKSGGGGSQVQLQESGPGLVKPSQTLSLTCTVSGGSISSGGYYWSWIRQHPGKCLEWIGYIYYRGNAYYNPSLKSRVTISVDTSKNQFSLKLSSVTAADTAVYYCATLQESVFDYWGQGTLVTVSSGGGGSGGGGSGGGGSQSALTQPASVSGSPGQSITISCTGTSSDVGGYNYVSWYQQHPGKAPKLMIYEVSNRPSGVSNRFSGSKSGNTASLTISGLQAEDEADYYCSSYTSSSTLVVGCGTKLTVLSGGGGSEVQLVESGGGLVQPGGSLKLSCAASGFTFNKYAMNWVRQAPGKGLEWVARIRSKYNNYATYYADSVKDRFTISRDDSKNTAYLQMNNLKTEDTAVYYCVRHGNFGNSYISYWAYWGQGTLVTVSSGGGGSGGGGSGGGGSQTVVTQEPSLTVSPGGTVTLTCGSSTGAVTSGNYPNWVQQKPGQAPRGLIGGTKFLAPGTPARFSGSLLGGKAALTLSGVQPEDEAEYYCVLWYSNRWVFGGGTKLTVL

SEQ ID NO: 760 - protein, 1238 aa, Artificial Sequence
  Synthetic
QVTLKESGPTLVKPTETLTLTCTLSGFSLNNARMGVSWIRQPPGKCLEWLAHIFSNDEKSYSTSLKNRLTISKDSSKTQVVLTMTNVDPVDTATYYCARIVGYGSGWYGFFDYWGQGTLVTVSSGGGGSGGGGSGGGGSDIQMTQSPSSLSASVGDRVTITCRASQGIRNDLGWYQQKPGKAPKRLIYAASTLQSGVPSRFSGSGSGTEFTLTISSLQPEDFATYYCLQHNSYPLTFGCGTKVEIKSGGGGSQVQLQESGPGLVKPSQTLSLTCTVSGGSISSGGYYWSWIRQHPGKCLEWIGYIYYRGNAYYNPSLKSRVTISVDTSKNQFSLKLSSVTAADTAVYYCATLQESVFDYWGQGTLVTVSSGGGGSGGGGSGGGGSQSALTQPASVSGSPGQSITISCTGTSSDVGGYNYVSWYQQHPGKAPKLMIYEVSNRPSGVSNRFSGSKSGNTASLTISGLQAEDEADYYCSSYTSSSTLVVGCGTKLTVLSGGGGSEVQLVESGGGLVQPGGSLKLSCAASGFTFNKYAMNWVRQAPGKGLEWVARIRSKYNNYATYYADSVKDRFTISRDDSKNTAYLQMNNLKTEDTAVYYCVRHGNFGNSYISYWAYWGQGTLVTVSSGGGGSGGGGSGGGGSQTVVTQEPSLTVSPGGTVTLTCGSSTGAVTSGNYPNWVQQKPGQAPRGLIGGTKFLAPGTPARFSGSLLGGKAALTLSGVQPEDEAEYYCVLWYSNRWVFGGGTKLTVLGGGGDKTHTCPPCPAPELLGGPSVFLFPPKPKDTLMISRTPEVTCVVVDVSHEDPEVKFNWYVDGVEVHNAKTKPCEEQYGSTYRCVSVLTVLHQDWLNGKEYKCKVSNKALPAPIEKTISKAKGQPREPQVYTLPPSREEMTKNQVSLTCLVKGFYPSDIAVEWESNGQPENNYKTTPPVLDSDGSFFLYSKLTVDKSRWQQGNVFSCSVMHEALHNHYTQKSLSLSPGKGGGGSGGGGSGGGGSGGGGSGGGGSGGGGSDKTHTCPPCPAPELLGGPSVFLFPPKPKDTLMISRTPEVTCVVVDVSHEDPEVKFNWYVDGVEVHNAKTKPCEEQYGSTYRCVSVLTVLHQDWLNGKEYKCKVSNKALPAPIEKTISKAKGQPREPQVYTLPPSREEMTKNQVSLTCLVKGFYPSDIAVEWESNGQPENNYKTTPPVLDSDGSFFLYSKLTVDKSRWQQGNVFSCSVMHEALHNHYTQKSLSLSPGK

SEQ ID NO: 761 - protein, 496 aa, Artificial Sequence
  Synthetic
QVTLKESGPTLVKPTETLTLTCTLSGFSLNNARMGVSWIRQPPGKCLEWLAHIFSNDEKSYSTSLKNRLTISKDSSKTQVVLTMTNVDPVDTATYYCARIVGYGSGWYGFFDYWGQGTLVTVSSGGGGSGGGGSGGGGSDIQMTQSPSSLSASVGDRVTITCRASQGIRNDLGWYQQKPGKAPKRLIYAASTLQSGVPSRFSGSGSGTEFTLTISSLQPEDFATYYCLQHNSYPLTFGCGTKVEIKSGGGGSQVQLQESGPGLVKPSQTLSLTCTVSGGSISSGGYYWSWIRQHPGKCLEWIGYIYYRGNTYYNPSLKSRVTISVDTSKNQFSLKLSSVTAADTAVYYCATLQESVFDYWGQGTLVTVSSGGGGSGGGGSGGGGSQSALTQPASVSGSPGQSITISCTGTSSDVGGYNYVSWYQQHPGKAPKLMIYEVSNRPSGVSNRFSGSKSGNTASLTISGLQAEDEADYYCSSYTSSSTLVVFGCGTKLTVL

SEQ ID NO: 762 - protein, 751 aa, Artificial Sequence
  Synthetic
QVTLKESGPTLVKPTETLTLTCTLSGFSLNNARMGVSWIRQPPGKCLEWLAHIFSNDEKSYSTSLKNRLTISKDSSKTQVVLTMTNVDPVDTATYYCARIVGYGSGWYGFFDYWGQGTLVTVSSGGGGSGGGGSGGGGSDIQMTQSPSSLSASVGDRVTITCRASQGIRNDLGWYQQKPGKAPKRLIYAASTLQSGVPSRFSGSGSGTEFTLTISSLQPEDFATYYCLQHNSYPLTFGCGTKVEIKSGGGGSQVQLQESGPGLVKPSQTLSLTCTVSGGSISSGGYYWSWIRQHPGKCLEWIGYIYYRGNTYYNPSLKSRVTISVDTSKNQFSLKLSSVTAADTAVYYCATLQESVFDYWGQGTLVTVSSGGGGSGGGGSGGGGSQSALTQPASVSGSPGQSITISCTGTSSDVGGYNYVSWYQQHPGKAPKLMIYEVSNRPSGVSNRFSGSKSGNTASLTISGLQAEDEADYYCSSYTSSSTLVVFGCGTKLTVLSGGGGSEVQLVESGGGLVQPGGSLKLSCAASGFTFNKYAMNWVRQAPGKGLEWVARIRSKYNNYATYYADSVKDRFTISRDDSKNTAYLQMNNLKTEDTAVYYCVRHGNFGNSYISYWAYWGQGTLVTVSSGGGGSGGGGSGGGGSQTVVTQEPSLTVSPGGTVTLTCGSSTGAVTSGNYPNWVQQKPGQAPRGLIGGTKFLAPGTPARFSGSLLGGKAALTLSGVQPEDEAEYYCVLWYSNRWVFGGGTKLTVL

SEQ ID NO: 763 - protein, 1239 aa, Artificial Sequence
  Synthetic
QVTLKESGPTLVKPTETLTLTCTLSGFSLNNARMGVSWIRQPPGKCLEWLAHIFSNDEKSYSTSLKNRLTISKDSSKTQVVLTMTNVDPVDTATYYCARIVGYGSGWYGFFDYWGQGTLVTVSSGGGGSGGGGSGGGGSDIQMTQSPSSLSASVGDRVTITCRASQGIRNDLGWYQQKPGKAPKRLIYAASTLQSGVPSRFSGSGSGTEFTLTISSLQPEDFATYYCLQHNSYPLTFGCGTKVEIKSGGGGSQVQLQESGPGLVKPSQTLSLTCTVSGGSISSGGYYWSWIRQHPGKCLEWIGYIYYRGNTYYNPSLKSRVTISVDTSKNQFSLKLSSVTAADTAVYYCATLQESVFDYWGQGTLVTVSSGGGGSGGGGSGGGGSQSALTQPASVSGSPGQSITISCTGTSSDVGGYNYVSWYQQHPGKAPKLMIYEVSNRPSGVSNRFSGSKSGNTASLTISGLQAEDEADYYCSSYTSSSTLVVFGCGTKLTVLSGGGGSEVQLVESGGGLVQPGGSLKLSCAASGFTFNKYAMNWVRQAPGKGLEWVARIRSKYNNYATYYADSVKDRFTISRDDSKNTAYLQMNNLKTEDTAVYYCVRHGNFGNSYISYWAYWGQGTLVTVSSGGGGSGGGGSGGGGSQTVVTQEPSLTVSPGGTVTLTCGSSTGAVTSGNYPNWVQQKPGQAPRGLIGGTKFLAPGTPARFSGSLLGGKAALTLSGVQPEDEAEYYCVLWYSNRWVFGGGTKLTVLGGGGDKTHTCPPCPAPELLGGPSVFLFPPKPKDTLMISRTPEVTCVVVDVSHEDPEVKFNWYVDGVEVHNAKTKPCEEQYGSTYRCVSVLTVLHQDWLNGKEYKCKVSNKALPAPIEKTISKAKGQPREPQVYTLPPSREEMTKNQVSLTCLVKGFYPSDIAVEWESNGQPENNYKTTPPVLDSDGSFFLYSKLTVDKSRWQQGNVFSCSVMHEALHNHYTQKSLSLSPGKGGGGSGGGGSGGGGSGGGGSGGGGSGGGGSDKTHTCPPCPAPELLGGPSVFLFPPKPKDTLMISRTPEVTCVVVDVSHEDPEVKFNWYVDGVEVHNAKTKPCEEQYGSTYRCVSVLTVLHQDWLNGKEYKCKVSNKALPAPIEKTISKAKGQPREPQVYTLPPSREEMTKNQVSLTCLVKGFYPSDIAVEWESNGQPENNYKTTPPVLDSDGSFFLYSKLTVDKSRWQQGNVFSCSVMHEALHNHYTQKSLSLSPGK

SEQ ID NO: 764 - protein, 496 aa, Artificial Sequence
  Synthetic
QVTLKESGPTLVKPTETLTLTCTLSGFSLNNARMGVSWIRQPPGKCLEWLAHIFSNDEKSYSTSLKNRLTISKDSSKTQVVLTMTNVDPVDTATYYCARIVGYGSGWYGFFDYWGQGTLVTVSSGGGGSGGGGSGGGGSDIQMTQSPSSLSASVGDRVTITCRASQGIRNDLGWYQQKPGKAPKRLIYAASTLQSGVPSRFSGSGSGTEFTLTISSLQPEDFATYYCLQHNSYPLTFGCGTKVEIKSGGGGSQVQLQESGPGLVKPSQTLSLTCTVSGGSISSGGYYWSWIRQHPGKCLEWIGYIYYRGNTYYNPSLKSRTTISVDTSKNQFSLKLSSVTAADAAVYYCARLQDSVFDHWGQGTLVTVSSGGGGSGGGGSGGGGSQSALTQPPSASGSPGQSITISCTGTSSDVGSYNLVSWYQQHPGKAPKLMIYEVSNRPSGVSNRFSGSKSGNTASLTISGLQAEDEADYYCSSYTSSSTLVVFGCGTKLTVL

SEQ ID NO: 765 - protein, 751 aa, Artificial Sequence
  Synthetic
QVTLKESGPTLVKPTETLTLTCTLSGFSLNNARMGVSWIRQPPGKCLEWLAHIFSNDEKSYSTSLKNRLTISKDSSKTQVVLTMTNVDPVDTATYYCARIVGYGSGWYGFFDYWGQGTLVTVSSGGGGSGGGGSGGGGSDIQMTQSPSSLSASVGDRVTITCRASQGIRNDLGWYQQKPGKAPKRLIYAASTLQSGVPSRFSGSGSGTEFTLTISSLQPEDFATYYCLQHNSYPLTFGCGTKVEIKSGGGGSQVQLQESGPGLVKPSQTLSLTCTVSGGSISSGGYYWSWIRQHPGKCLEWIGYIYYRGNTYYNPSLKSRTTISVDTSKNQFSLKLSSVTAADAAVYYCARLQDSVFDHWGQGTLVTVSSGGGGSGGGGSGGGGSQSALTQPPSASGSPGQSITISCTGTSSDVGSYNLVSWYQQHPGKAPKLMIYEVSNRPSGVSNRFSGSKSGNTASLTISGLQAEDEADYYCSSYTSSSTLVVFGCGTKLTVLSGGGGSEVQLVESGGGLVQPGGSLKLSCAASGFTFNKYAMNWVRQAPGKGLEWVARIRSKYNNYATYYADSVKDRFTISRDDSKNTAYLQMNNLKTEDTAVYYCVRHGNFGNSYISYWAYWGQGTLVTVSSGGGGSGGGGSGGGGSQTVVTQEPSLTVSPGGTVTLTCGSSTGAVTSGNYPNWVQQKPGQAPRGLIGGTKFLAPGTPARFSGSLLGGKAALTLSGVQPEDEAEYYCVLWYSNRWVFGGGTKLTVL

SEQ ID NO: 766 - protein, 1239 aa, Artificial Sequence
  Synthetic
QVTLKESGPTLVKPTETLTLTCTLSGFSLNNARMGVSWIRQPPGKCLEWLAHIFSNDEKSYSTSLKNRLTISKDSSKTQVVLTMTNVDPVDTATYYCARIVGYGSGWYGFFDYWGQGTLVTVSSGGGGSGGGGSGGGGSDIQMTQSPSSLSASVGDRVTITCRASQGIRNDLGWYQQKPGKAPKRLIYAASTLQSGVPSRFSGSGSGTEFTLTISSLQPEDFATYYCLQHNSYPLTFGCGTKVEIKSGGGGSQVQLQESGPGLVKPSQTLSLTCTVSGGSISSGGYYWSWIRQHPGKCLEWIGYIYYRGNTYYNPSLKSRTTISVDTSKNQFSLKLSSVTAADAAVYYCARLQDSVFDHWGQGTLVTVSSGGGGSGGGGSGGGGSQSALTQPPSASGSPGQSITISCTGTSSDVGSYNLVSWYQQHPGKAPKLMIYEVSNRPSGVSNRFSGSKSGNTASLTISGLQAEDEADYYCSSYTSSSTLVVFGCGTKLTVLSGGGGSEVQLVESGGGLVQPGGSLKLSCAASGFTFNKYAMNWVRQAPGKGLEWVARIRSKYNNYATYYADSVKDRFTISRDDSKNTAYLQMNNLKTEDTAVYYCVRHGNFGNSYISYWAYWGQGTLVTVSSGGGGSGGGGSGGGGSQTVVTQEPSLTVSPGGTVTLTCGSSTGAVTSGNYPNWVQQKPGQAPRGLIGGTKFLAPGTPARFSGSLLGGKAALTLSGVQPEDEAEYYCVLWYSNRWVFGGGTKLTVLGGGGDKTHTCPPCPAPELLGGPSVFLFPPKPKDTLMISRTPEVTCVVVDVSHEDPEVKFNWYVDGVEVHNAKTKPCEEQYGSTYRCVSVLTVLHQDWLNGKEYKCKVSNKALPAPIEKTISKAKGQPREPQVYTLPPSREEMTKNQVSLTCLVKGFYPSDIAVEWESNGQPENNYKTTPPVLDSDGSFFLYSKLTVDKSRWQQGNVFSCSVMHEALHNHYTQKSLSLSPGKGGGGSGGGGSGGGGSGGGGSGGGGSGGGGSDKTHTCPPCPAPELLGGPSVFLFPPKPKDTLMISRTPEVTCVVVDVSHEDPEVKFNWYVDGVEVHNAKTKPCEEQYGSTYRCVSVLTVLHQDWLNGKEYKCKVSNKALPAPIEKTISKAKGQPREPQVYTLPPSREEMTKNQVSLTCLVKGFYPSDIAVEWESNGQPENNYKTTPPVLDSDGSFFLYSKLTVDKSRWQQGNVFSCSVMHEALHNHYTQKSLSLSPGK

SEQ ID NO: 767 - protein, 498 aa, Artificial Sequence
  Synthetic
QVTLKESGPTLVKPTETLTLTCTLSGFSLNNARMGVSWIRQPPGKCLEWLAHIFSNDEKSYSTSLKNRLTISKDSSKTQVVLTMTNVDPVDTATYYCARIVGYGSGWYGFFDYWGQGTLVTVSSGGGGSGGGGSGGGGSDIQMTQSPSSLSASVGDRVTITCRASQGIRNDLGWYQQKPGKAPKRLIYAASTLQSGVPSRFSGSGSGTEFTLTISSLQPEDFATYYCLQHNSYPLTFGCGTKVEIKSGGGGSEVQLLESGGGLVQPGGSLRLSCAASGFTFSHYAMTWVRQAPGKCLEWVSAISGGGDTTFYADSVKGRFTFSRDNSRNTLYLQMNSLRAEDTAVYYCVKDRGYYYGMDVWGQGTTVTVSSGGGGSGGGGSGGGGSDIVMTQTPLSLPVTPGEPASISCRSSQSLLRTNGYNYLDWYLQKPGQSPQLLIYLGSNRASGVPDRFSGSGSGTDFTLKISRVEAEDVGVYYCMQALQSPYTFGCGTKLEIK

SEQ ID NO: 768 - protein, 753 aa, Artificial Sequence
  Synthetic
QVTLKESGPTLVKPTETLTLTCTLSGFSLNNARMGVSWIRQPPGKCLEWLAHIFSNDEKSYSTSLKNRLTISKDSSKTQVVLTMTNVDPVDTATYYCARIVGYGSGWYGFFDYWGQGTLVTVSSGGGGSGGGGSGGGGSDIQMTQSPSSLSASVGDRVTITCRASQGIRNDLGWYQQKPGKAPKRLIYAASTLQSGVPSRFSGSGSGTEFTLTISSLQPEDFATYYCLQHNSYPLTFGCGTKVEIKSGGGGSEVQLLESGGGLVQPGGSLRLSCAASGFTFSHYAMTWVRQAPGKCLEWVSAISGGGDTTFYADSVKGRFTFSRDNSRNTLYLQMNSLRAEDTAVYYCVKDRGYYYGMDVWGQGTTVTVSSGGGGSGGGGSGGGGSDIVMTQTPLSLPVTPGEPASISCRSSQSLLRTNGYNYLDWYLQKPGQSPQLLIYLGSNRASGVPDRFSGSGSGTDFTLKISRVEAEDVGVYYCMQALQSPYTFGCGTKLEIKSGGGGSEVQLVESGGGLVQPGGSLKLSCAASGFTFNKYAMNWVRQAPGKGLEWVARIRSKYNNYATYYADSVKDRFTISRDDSKNTAYLQMNNLKTEDTAVYYCVRHGNFGNSYISYWAYWGQGTLVTVSSGGGGSGGGGSGGGGSQTVVTQEPSLTVSPGGTVTLTCGSSTGAVTSGNYPNWVQQKPGQAPRGLIGGTKFLAPGTPARFSGSLLGGKAALTLSGVQPEDEAEYYCVLWYSNRWVFGGGTKLTVL

SEQ ID NO: 769 - protein, 1241 aa, Artificial Sequence
  Synthetic
QVTLKESGPTLVKPTETLTLTCTLSGFSLNNARMGVSWIRQPPGKCLEWLAHIFSNDEKSYSTSLKNRLTISKDSSKTQVVLTMTNVDPVDTATYYCARIVGYGSGWYGFFDYWGQGTLVTVSSGGGGSGGGGSGGGGSDIQMTQSPSSLSASVGDRVTITCRASQGIRNDLGWYQQKPGKAPKRLIYAASTLQSGVPSRFSGSGSGTEFTLTISSLQPEDFATYYCLQHNSYPLTFGCGTKVEIKSGGGGSEVQLLESGGGLVQPGGSLRLSCAASGFTFSHYAMTWVRQAPGKCLEWVSAISGGGDTTFYADSVKGRFTFSRDNSRNTLYLQMNSLRAEDTAVYYCVKDRGYYYGMDVWGQGTTVTVSSGGGGSGGGGSGGGGSDIVMTQTPLSLPVTPGEPASISCRSSQSLLRTNGYNYLDWYLQKPGQSPQLLIYLGSNRASGVPDRFSGSGSGTDFTLKISRVEAEDVGVYYCMQALQSPYTFGCGTKLEIKSGGGGSEVQLVESGGGLVQPGGSLKLSCAASGFTFNKYAMNWVRQAPGKGLEWVARIRSKYNNYATYYADSVKDRFTISRDDSKNTAYLQMNNLKTEDTAVYYCVRHGNFGNSYISYWAYWGQGTLVTVSSGGGGSGGGGSGGGGSQTVVTQEPSLTVSPGGTVTLTCGSSTGAVTSGNYPNWVQQKPGQAPRGLIGGTKFLAPGTPARFSGSLLGGKAALTLSGVQPEDEAEYYCVLWYSNRWVFGGGTKLTVLGGGGDKTHTCPPCPAPELLGGPSVFLFPPKPKDTLMISRTPEVTCVVVDVSHEDPEVKFNWYVDGVEVHNAKTKPCEEQYGSTYRCVSVLTVLHQDWLNGKEYKCKVSNKALPAPIEKTISKAKGQPREPQVYTLPPSREEMTKNQVSLTCLVKGFYPSDIAVEWESNGQPENNYKTTPPVLDSDGSFFLYSKLTVDKSRWQQGNVFSCSVMHEALHNHYTQKSLSLSPGKGGGGSGGGGSGGGGSGGGGSGGGGSGGGGSDKTHTCPPCPAPELLGGPSVFLFPPKPKDTLMISRTPEVTCVVVDVSHEDPEVKFNWYVDGVEVHNAKTKPCEEQYGSTYRCVSVLTVLHQDWLNGKEYKCKVSNKALPAPIEKTISKAKGQPREPQVYTLPPSREEMTKNQVSLTCLVKGFYPSDIAVEWESNGQPENNYKTTPPVLDSDGSFFLYSKLTVDKSRWQQGNVFSCSVMHEALHNHYTQKSLSLSPGK

SEQ ID NO: 770 - protein, 500 aa, Artificial Sequence
  Synthetic
QVTLKESGPTLVKPTETLTLTCTLSGFSLNNARMGVSWIRQPPGKCLEWLAHIFSNDEKSYSTSLKNRLTISKDSSKTQVVLTMTNVDPVDTATYYCARIVGYGSGWYGFFDYWGQGTLVTVSSGGGGSGGGGSGGGGSDIQMTQSPSSLSASVGDRVTITCRASQGIRNDLGWYQQKPGKAPKRLIYAASTLQSGVPSRFSGSGSGTEFTLTISSLQPEDFATYYCLQHNSYPLTFGCGTKVEIKSGGGGSEVQLLESGGGLVQPGGSLRLSCAASGFTFSHYAMSWVRQVPGKCLEWVSAISGSGGSTYYADAVKGRFTISRDNSKNTLYLQMNSLRAEDTAVYYCAKVRGIGTFYGMDVWGQGTTVTVSSGGGGSGGGGSGGGGSDIVMTQSPLSLSVTPGQPASISCRSSQSLLHSNKYNYLDWYLQKPGQSPQLLIYLGSNRASGVPDRFSGSGSGTDFTLKISRVEAEDVGVYYCMQALQTPITFGCGTRLEIK

SEQ ID NO: 771 - protein, 755 aa, Artificial Sequence
  Synthetic
QVTLKESGPTLVKPTETLTLTCTLSGFSLNNARMGVSWIRQPPGKCLEWLAHIFSNDEKSYSTSLKNRLTISKDSSKTQVVLTMTNVDPVDTATYYCARIVGYGSGWYGFFDYWGQGTLVTVSSGGGGSGGGGSGGGGSDIQMTQSPSSLSASVGDRVTITCRASQGIRNDLGWYQQKPGKAPKRLIYAASTLQSGVPSRFSGSGSGTEFTLTISSLQPEDFATYYCLQHNSYPLTFGCGTKVEIKSGGGGSEVQLLESGGGLVQPGGSLRLSCAASGFTFSHYAMSWVRQVPGKCLEWVSAISGSGGSTYYADAVKGRFTISRDNSKNTLYLQMNSLRAEDTAVYYCAKVRGIGTFYGMDVWGQGTTVTVSSGGGGSGGGGSGGGGSDIVMTQSPLSLSVTPGQPASISCRSSQSLLHSNKYNYLDWYLQKPGQSPQLLIYLGSNRASGVPDRFSGSGSGTDFTLKISRVEAEDVGVYYCMQALQTPITFGCGTRLEIKSGGGGSEVQLVESGGGLVQPGGSLKLSCAASGFTFNKYAMNWVRQAPGKGLEWVARIRSKYNNYATYYADSVKDRFTISRDDSKNTAYLQMNNLKTEDTAVYYCVRHGNFGNSYISYWAYWGQGTLVTVSSGGGGSGGGGSGGGGSQTVVTQEPSLTVSPGGTVTLTCGSSTGAVTSGNYPNWVQQKPGQAPRGLIGGTKFLAPGTPARFSGSLLGGKAALTLSGVQPEDEAEYYCVLWYSNRWVFGGGTKLTVL

SEQ ID NO: 772 - protein, 1243 aa, Artificial Sequence
  Synthetic
QVTLKESGPTLVKPTETLTLTCTLSGFSLNNARMGVSWIRQPPGKCLEWLAHIFSNDEKSYSTSLKNRLTISKDSSKTQVVLTMTNVDPVDTATYYCARIVGYGSGWYGFFDYWGQGTLVTVSSGGGGSGGGGSGGGGSDIQMTQSPSSLSASVGDRVTITCRASQGIRNDLGWYQQKPGKAPKRLIYAASTLQSGVPSRFSGSGSGTEFTLTISSLQPEDFATYYCLQHNSYPLTFGCGTKVEIKSGGGGSEVQLLESGGGLVQPGGSLRLSCAASGFTFSHYAMSWVRQVPGKCLEWVSAISGSGGSTYYADAVKGRFTISRDNSKNTLYLQMNSLRAEDTAVYYCAKVRGIGTFYGMDVWGQGTTVTVSSGGGGSGGGGSGGGGSDIVMTQSPLSLSVTPGQPASISCRSSQSLLHSNKYNYLDWYLQKPGQSPQLLIYLGSNRASGVPDRFSGSGSGTDFTLKISRVEAEDVGVYYCMQALQTPITFGCGTRLEIKSGGGGSEVQLVESGGGLVQPGGSLKLSCAASGFTFNKYAMNWVRQAPGKGLEWVARIRSKYNNYATYYADSVKDRFTISRDDSKNTAYLQMNNLKTEDTAVYYCVRHGNFGNSYISYWAYWGQGTLVTVSSGGGGSGGGGSGGGGSQTVVTQEPSLTVSPGGTVTLTCGSSTGAVTSGNYPNWVQQKPGQAPRGLIGGTKFLAPGTPARFSGSLLGGKAALTLSGVQPEDEAEYYCVLWYSNRWVFGGGTKLTVLGGGGDKTHTCPPCPAPELLGGPSVFLFPPKPKDTLMISRTPEVTCVVVDVSHEDPEVKFNWYVDGVEVHNAKTKPCEEQYGSTYRCVSVLTVLHQDWLNGKEYKCKVSNKALPAPIEKTISKAKGQPREPQVYTLPPSREEMTKNQVSLTCLVKGFYPSDIAVEWESNGQPENNYKTTPPVLDSDGSFFLYSKLTVDKSRWQQGNVFSCSVMHEALHNHYTQKSLSLSPGKGGGGSGGGGSGGGGSGGGGSGGGGSGGGGSDKTHTCPPCPAPELLGGPSVFLFPPKPKDTLMISRTPEVTCVVVDVSHEDPEVKFNWYVDGVEVHNAKTKPCEEQYGSTYRCVSVLTVLHQDWLNGKEYKCKVSNKALPAPIEKTISKAKGQPREPQVYTLPPSREEMTKNQVSLTCLVKGFYPSDIAVEWESNGQPENNYKTTPPVLDSDGSFFLYSKLTVDKSRWQQGNVFSCSVMHEALHNHYTQKSLSLSPGK

SEQ ID NO: 773 - protein, 500 aa, Artificial Sequence
  Synthetic
QVTLKESGPTLVKPTETLTLTCTLSGFSLNNARMGVSWIRQPPGKCLEWLAHIFSNDEKSYSTSLKNRLTISKDSSKTQVVLTMTNVDPVDTATYYCARIVGYGSGWYGFFDYWGQGTLVTVSSGGGGSGGGGSGGGGSDIQMTQSPSSLSASVGDRVTITCRASQGIRNDLGWYQQKPGKAPKRLIYAASTLQSGVPSRFSGSGSGTEFTLTISSLQPEDFATYYCLQHNSYPLTFGCGTKVEIKSGGGGSEVQLLESGGGLVQPGGSLRLSCAASGFTFSHYAMSWVRQTPGKCLEWVSVIDASGGSTYYADAVKGRFTISRDNSKNTLYLQMNSLRAEDTAVYYCAKVRGIGTFYGMDVWGQGTTVTVSSGGGGSGGGGSGGGGSDIVMTQTPLSLPVTPGEPASISCRSSQSLLHSNKYNYLDWYLQKPGQSPQLLIYLGSNRASGVPDRFSGSGSGTDFTLKISRVEAEDVGVYYCMQALQTPLSFGCGTKVEIK

SEQ ID NO: 774 - protein, 755 aa, Artificial Sequence
  Synthetic
QVTLKESGPTLVKPTETLTLTCTLSGFSLNNARMGVSWIRQPPGKCLEWLAHIFSNDEKSYSTSLKNRLTISKDSSKTQVVLTMTNVDPVDTATYYCARIVGYGSGWYGFFDYWGQGTLVTVSSGGGGSGGGGSGGGGSDIQMTQSPSSLSASVGDRVTITCRASQGIRNDLGWYQQKPGKAPKRLIYAASTLQSGVPSRFSGSGSGTEFTLTISSLQPEDFATYYCLQHNSYPLTFGCGTKVEIKSGGGGSEVQLLESGGGLVQPGGSLRLSCAASGFTFSHYAMSWVRQTPGKCLEWVSVIDASGGSTYYADAVKGRFTISRDNSKNTLYLQMNSLRAEDTAVYYCAKVRGIGTFYGMDVWGQGTTVTVSSGGGGSGGGGSGGGGSDIVMTQTPLSLPVTPGEPASISCRSSQSLLHSNKYNYLDWYLQKPGQSPQLLIYLGSNRASGVPDRFSGSGSGTDFTLKISRVEAEDVGVYYCMQALQTPLSFGCGTKVEIKSGGGGSEVQLVESGGGLVQPGGSLKLSCAASGFTFNKYAMNWVRQAPGKGLEWVARIRSKYNNYATYYADSVKDRFTISRDDSKNTAYLQMNNLKTEDTAVYYCVRHGNFGNSYISYWAYWGQGTLVTVSSGGGGSGGGGSGGGGSQTVVTQEPSLTVSPGGTVTLTCGSSTGAVTSGNYPNWVQQKPGQAPRGLIGGTKFLAPGTPARFSGSLLGGKAALTLSGVQPEDEAEYYCVLWYSNRWVFGGGTKLTVL

SEQ ID NO: 775 - protein, 1243 aa, Artificial Sequence
  Synthetic
QVTLKESGPTLVKPTETLTLTCTLSGFSLNNARMGVSWIRQPPGKCLEWLAHIFSNDEKSYSTSLKNRLTISKDSSKTQVVLTMTNVDPVDTATYYCARIVGYGSGWYGFFDYWGQGTLVTVSSGGGGSGGGGSGGGGSDIQMTQSPSSLSASVGDRVTITCRASQGIRNDLGWYQQKPGKAPKRLIYAASTLQSGVPSRFSGSGSGTEFTLTISSLQPEDFATYYCLQHNSYPLTFGCGTKVEIKSGGGGSEVQLLESGGGLVQPGGSLRLSCAASGFTFSHYAMSWVRQTPGKCLEWVSVIDASGGSTYYADAVKGRFTISRDNSKNTLYLQMNSLRAEDTAVYYCAKVRGIGTFYGMDVWGQGTTVTVSSGGGGSGGGGSGGGGSDIVMTQTPLSLPVTPGEPASISCRSSQSLLHSNKYNYLDWYLQKPGQSPQLLIYLGSNRASGVPDRFSGSGSGTDFTLKISRVEAEDVGVYYCMQALQTPLSFGCGTKVEIKSGGGGSEVQLVESGGGLVQPGGSLKLSCAASGFTFNKYAMNWVRQAPGKGLEWVARIRSKYNNYATYYADSVKDRFTISRDDSKNTAYLQMNNLKTEDTAVYYCVRHGNFGNSYISYWAYWGQGTLVTVSSGGGGSGGGGSGGGGSQTVVTQEPSLTVSPGGTVTLTCGSSTGAVTSGNYPNWVQQKPGQAPRGLIGGTKFLAPGTPARFSGSLLGGKAALTLSGVQPEDEAEYYCVLWYSNRWVFGGGTKLTVLGGGGDKTHTCPPCPAPELLGGPSVFLFPPKPKDTLMISRTPEVTCVVVDVSHEDPEVKFNWYVDGVEVHNAKTKPCEEQYGSTYRCVSVLTVLHQDWLNGKEYKCKVSNKALPAPIEKTISKAKGQPREPQVYTLPPSREEMTKNQVSLTCLVKGFYPSDIAVEWESNGQPENNYKTTPPVLDSDGSFFLYSKLTVDKSRWQQGNVFSCSVMHEALHNHYTQKSLSLSPGKGGGGSGGGGSGGGGSGGGGSGGGGSGGGGSDKTHTCPPCPAPELLGGPSVFLFPPKPKDTLMISRTPEVTCVVVDVSHEDPEVKFNWYVDGVEVHNAKTKPCEEQYGSTYRCVSVLTVLHQDWLNGKEYKCKVSNKALPAPIEKTISKAKGQPREPQVYTLPPSREEMTKNQVSLTCLVKGFYPSDIAVEWESNGQPENNYKTTPPVLDSDGSFFLYSKLTVDKSRWQQGNVFSCSVMHEALHNHYTQKSLSLSPGK

SEQ ID NO: 776 - protein, 500 aa, Artificial Sequence
  Synthetic
QVTLKESGPTLVKPTETLTLTCTLSGFSLNNARMGVSWIRQPPGKCLEWLAHIFSNDEKSYSTSLKNRLTISKDSSKTQVVLTMTNVDPVDTATYYCARIVGYGSGWYGFFDYWGQGTLVTVSSGGGGSGGGGSGGGGSDIQMTQSPSSLSASVGDRVTITCRASQGIRNDLGWYQQKPGKAPKRLIYAASTLQSGVPSRFSGSGSGTEFTLTISSLQPEDFATYYCLQHNSYPLTFGCGTKVEIKSGGGGSEVQLLESGGGLVQPGGSLRLSCAASGFTFSHYAMSWVRQTPGKCLEWVSVISGSGGNTYYADSVKGRFTISRDNSKNTLYLQMNSLRAEDTAVYYCAKVRGIGTFYGMDVWGQGTTVTVSSGGGGSGGGGSGGGGSDIVMTQTPLSLPVTPGEPASISCRSSQSLLHSNKYNYLDWYLQKPGQSPQLLIYLGSNRASGVPDRFSGSGSGTDFTLKISRVEAEDVGVYYCMQALQTPLSFGCGTKVEIK

SEQ ID NO: 777 - protein, 755 aa, Artificial Sequence
  Synthetic
QVTLKESGPTLVKPTETLTLTCTLSGFSLNNARMGVSWIRQPPGKCLEWLAHIFSNDEKSYSTSLKNRLTISKDSSKTQVVLTMTNVDPVDTATYYCARIVGYGSGWYGFFDYWGQGTLVTVSSGGGGSGGGGSGGGGSDIQMTQSPSSLSASVGDRVTITCRASQGIRNDLGWYQQKPGKAPKRLIYAASTLQSGVPSRFSGSGSGTEFTLTISSLQPEDFATYYCLQHNSYPLTFGCGTKVEIKSGGGGSEVQLLESGGGLVQPGGSLRLSCAASGFTFSHYAMSWVRQTPGKCLEWVSVISGSGGNTYYADSVKGRFTISRDNSKNTLYLQMNSLRAEDTAVYYCAKVRGIGTFYGMDVWGQGTTVTVSSGGGGSGGGGSGGGGSDIVMTQTPLSLPVTPGEPASISCRSSQSLLHSNKYNYLDWYLQKPGQSPQLLIYLGSNRASGVPDRFSGSGSGTDFTLKISRVEAEDVGVYYCMQALQTPLSFGCGTKVEIKSGGGGSEVQLVESGGGLVQPGGSLKLSCAASGFTFNKYAMNWVRQAPGKGLEWVARIRSKYNNYATYYADSVKDRFTISRDDSKNTAYLQMNNLKTEDTAVYYCVRHGNFGNSYISYWAYWGQGTLVTVSSGGGGSGGGGSGGGGSQTVVTQEPSLTVSPGGTVTLTCGSSTGAVTSGNYPNWVQQKPGQAPRGLIGGTKFLAPGTPARFSGSLLGGKAALTLSGVQPEDEAEYYCVLWYSNRWVFGGGTKLTVL

SEQ ID NO: 778 - protein, 1243 aa, Artificial Sequence
  Synthetic
QVTLKESGPTLVKPTETLTLTCTLSGFSLNNARMGVSWIRQPPGKCLEWLAHIFSNDEKSYSTSLKNRLTISKDSSKTQVVLTMTNVDPVDTATYYCARIVGYGSGWYGFFDYWGQGTLVTVSSGGGGSGGGGSGGGGSDIQMTQSPSSLSASVGDRVTITCRASQGIRNDLGWYQQKPGKAPKRLIYAASTLQSGVPSRFSGSGSGTEFTLTISSLQPEDFATYYCLQHNSYPLTFGCGTKVEIKSGGGGSEVQLLESGGGLVQPGGSLRLSCAASGFTFSHYAMSWVRQTPGKCLEWVSVISGSGGNTYYADSVKGRFTISRDNSKNTLYLQMNSLRAEDTAVYYCAKVRGIGTFYGMDVWGQGTTVTVSSGGGGSGGGGSGGGGSDIVMTQTPLSLPVTPGEPASISCRSSQSLLHSNKYNYLDWYLQKPGQSPQLLIYLGSNRASGVPDRFSGSGSGTDFTLKISRVEAEDVGVYYCMQALQTPLSFGCGTKVEIKSGGGGSEVQLVESGGGLVQPGGSLKLSCAASGFTFNKYAMNWVRQAPGKGLEWVARIRSKYNNYATYYADSVKDRFTISRDDSKNTAYLQMNNLKTEDTAVYYCVRHGNFGNSYISYWAYWGQGTLVTVSSGGGGSGGGGSGGGGSQTVVTQEPSLTVSPGGTVTLTCGSSTGAVTSGNYPNWVQQKPGQAPRGLIGGTKFLAPGTPARFSGSLLGGKAALTLSGVQPEDEAEYYCVLWYSNRWVFGGGTKLTVLGGGGDKTHTCPPCPAPELLGGPSVFLFPPKPKDTLMISRTPEVTCVVVDVSHEDPEVKFNWYVDGVEVHNAKTKPCEEQYGSTYRCVSVLTVLHQDWLNGKEYKCKVSNKALPAPIEKTISKAKGQPREPQVYTLPPSREEMTKNQVSLTCLVKGFYPSDIAVEWESNGQPENNYKTTPPVLDSDGSFFLYSKLTVDKSRWQQGNVFSCSVMHEALHNHYTQKSLSLSPGKGGGGSGGGGSGGGGSGGGGSGGGGSGGGGSDKTHTCPPCPAPELLGGPSVFLFPPKPKDTLMISRTPEVTCVVVDVSHEDPEVKFNWYVDGVEVHNAKTKPCEEQYGSTYRCVSVLTVLHQDWLNGKEYKCKVSNKALPAPIEKTISKAKGQPREPQVYTLPPSREEMTKNQVSLTCLVKGFYPSDIAVEWESNGQPENNYKTTPPVLDSDGSFFLYSKLTVDKSRWQQGNVFSCSVMHEALHNHYTQKSLSLSPGK

SEQ ID NO: 779 - protein, 500 aa, Artificial Sequence
  Synthetic
QVTLKESGPTLVKPTETLTLTCTLSGFSLNNARMGVSWIRQPPGKCLEWLAHIFSNDEKSYSTSLKNRLTISKDSSKTQVVLTMTNVDPVDTATYYCARIVGYGSGWYGFFDYWGQGTLVTVSSGGGGSGGGGSGGGGSDIQMTQSPSSLSASVGDRVTITCRASQGIRNDLGWYQQKPGKAPKRLIYAASTLQSGVPSRFSGSGSGTEFTLTISSLQPEDFATYYCLQHNSYPLTFGCGTKVEIKSGGGGSEVQLLESGGGLVQPGGSLRLSCAASGFTFSHYAMSWVRQTPGKCLEWVSVIDGSGGSTYYADSVKGRFTISRDNSKNTLYLQMNSLRAEDTAVYYCAKVRGIGTFYGMDVWGQGTTVTVSSGGGGSGGGGSGGGGSDIVMTQTPLSLPVTPGEPASISCRSSQSLLHSNLYNYLDWYLQKPGQSPQLLIYLGSNRASGVPDRFSGSGSGTDFTLKISRVEAEDVGVYYCMQALQTPLSFGCGTKVEIK

SEQ ID NO: 780 - protein, 755 aa, Artificial Sequence
  Synthetic
QVTLKESGPTLVKPTETLTLTCTLSGFSLNNARMGVSWIRQPPGKCLEWLAHIFSNDEKSYSTSLKNRLTISKDSSKTQVVLTMTNVDPVDTATYYCARIVGYGSGWYGFFDYWGQGTLVTVSSGGGGSGGGGSGGGGSDIQMTQSPSSLSASVGDRVTITCRASQGIRNDLGWYQQKPGKAPKRLIYAASTLQSGVPSRFSGSGSGTEFTLTISSLQPEDFATYYCLQHNSYPLTFGCGTKVEIKSGGGGSEVQLLESGGGLVQPGGSLRLSCAASGFTFSHYAMSWVRQTPGKCLEWVSVIDGSGGSTYYADSVKGRFTISRDNSKNTLYLQMNSLRAEDTAVYYCAKVRGIGTFYGMDVWGQGTTVTVSSGGGGSGGGGSGGGGSDIVMTQTPLSLPVTPGEPASISCRSSQSLLHSNLYNYLDWYLQKPGQSPQLLIYLGSNRASGVPDRFSGSGSGTDFTLKISRVEAEDVGVYYCMQALQTPLSFGCGTKVEIKSGGGGSEVQLVESGGGLVQPGGSLKLSCAASGFTFNKYAMNWVRQAPGKGLEWVARIRSKYNNYATYYADSVKDRFTISRDDSKNTAYLQMNNLKTEDTAVYYCVRHGNFGNSYISYWAYWGQGTLVTVSSGGGGSGGGGSGGGGSQTVVTQEPSLTVSPGGTVTLTCGSSTGAVTSGNYPNWVQQKPGQAPRGLIGGTKFLAPGTPARFSGSLLGGKAALTLSGVQPEDEAEYYCVLWYSNRWVFGGGTKLTVL

SEQ ID NO: 781 - protein, 1243 aa, Artificial Sequence
  Synthetic
QVTLKESGPTLVKPTETLTLTCTLSGFSLNNARMGVSWIRQPPGKCLEWLAHIFSNDEKSYSTSLKNRLTISKDSSKTQVVLTMTNVDPVDTATYYCARIVGYGSGWYGFFDYWGQGTLVTVSSGGGGSGGGGSGGGGSDIQMTQSPSSLSASVGDRVTITCRASQGIRNDLGWYQQKPGKAPKRLIYAASTLQSGVPSRFSGSGSGTEFTLTISSLQPEDFATYYCLQHNSYPLTFGCGTKVEIKSGGGGSEVQLLESGGGLVQPGGSLRLSCAASGFTFSHYAMSWVRQTPGKCLEWVSVIDGSGGSTYYADSVKGRFTISRDNSKNTLYLQMNSLRAEDTAVYYCAKVRGIGTFYGMDVWGQGTTVTVSSGGGGSGGGGSGGGGSDIVMTQTPLSLPVTPGEPASISCRSSQSLLHSNLYNYLDWYLQKPGQSPQLLIYLGSNRASGVPDRFSGSGSGTDFTLKISRVEAEDVGVYYCMQALQTPLSFGCGTKVEIKSGGGGSEVQLVESGGGLVQPGGSLKLSCAASGFTFNKYAMNWVRQAPGKGLEWVARIRSKYNNYATYYADSVKDRFTISRDDSKNTAYLQMNNLKTEDTAVYYCVRHGNFGNSYISYWAYWGQGTLVTVSSGGGGSGGGGSGGGGSQTVVTQEPSLTVSPGGTVTLTCGSSTGAVTSGNYPNWVQQKPGQAPRGLIGGTKFLAPGTPARFSGSLLGGKAALTLSGVQPEDEAEYYCVLWYSNRWVFGGGTKLTVLGGGGDKTHTCPPCPAPELLGGPSVFLFPPKPKDTLMISRTPEVTCVVVDVSHEDPEVKFNWYVDGVEVHNAKTKPCEEQYGSTYRCVSVLTVLHQDWLNGKEYKCKVSNKALPAPIEKTISKAKGQPREPQVYTLPPSREEMTKNQVSLTCLVKGFYPSDIAVEWESNGQPENNYKTTPPVLDSDGSFFLYSKLTVDKSRWQQGNVFSCSVMHEALHNHYTQKSLSLSPGKGGGGSGGGGSGGGGSGGGGSGGGGSGGGGSDKTHTCPPCPAPELLGGPSVFLFPPKPKDTLMISRTPEVTCVVVDVSHEDPEVKFNWYVDGVEVHNAKTKPCEEQYGSTYRCVSVLTVLHQDWLNGKEYKCKVSNKALPAPIEKTISKAKGQPREPQVYTLPPSREEMTKNQVSLTCLVKGFYPSDIAVEWESNGQPENNYKTTPPVLDSDGSFFLYSKLTVDKSRWQQGNVFSCSVMHEALHNHYTQKSLSLSPGK

SEQ ID NO: 782 - protein, 497 aa, Artificial Sequence
  Synthetic
QVTLKESGPTLVKPTETLTLTCTLSGFSLNNARMGVSWIRQPPGKCLEWLAHIFSNDEKSYSTSLKNRLTISKDSSKTQVVLTMTNVDPVDTATYYCARIVGYGSGWYGFFDYWGQGTLVTVSSGGGGSGGGGSGGGGSDIQMTQSPSSLSASVGDRVTITCRASQGIRNDLGWYQQKPGKAPKRLIYAASTLQSGVPSRFSGSGSGTEFTLTISSLQPEDFATYYCLQHNSYPLTFGCGTKVEIKSGGGGSEVQLLESGGGLVQPGGSLRLSCAASGFTFSHYAMNWVRQAPGKCLEWVSAVSGGGDRTLYADAVKGRFTISRDNSKNTLFLQMNSLRAEDTAIYYCARLRGFYYGMDVWGQGTAVTVSSGGGGSGGGGSGGGGSDIVMTQSPLSLPVTPGEPASISCRSSQSLLHSNKYNYLDWYLQKPGQSPQLLIYLGSNRASGVPDRFSGSGSGTDFTLKISRVEAEDVGVYYCMQALQTLTFGCGTKVDIK

SEQ ID NO: 783 - protein, 752 aa, Artificial Sequence
  Synthetic
QVTLKESGPTLVKPTETLTLTCTLSGFSLNNARMGVSWIRQPPGKCLEWLAHIFSNDEKSYSTSLKNRLTISKDSSKTQVVLTMTNVDPVDTATYYCARIVGYGSGWYGFFDYWGQGTLVTVSSGGGGSGGGGSGGGGSDIQMTQSPSSLSASVGDRVTITCRASQGIRNDLGWYQQKPGKAPKRLIYAASTLQSGVPSRFSGSGSGTEFTLTISSLQPEDFATYYCLQHNSYPLTFGCGTKVEIKSGGGGSEVQLLESGGGLVQPGGSLRLSCAASGFTFSHYAMNWVRQAPGKCLEWVSAVSGGGDRTLYADAVKGRFTISRDNSKNTLFLQMNSLRAEDTAIYYCARLRGFYYGMDVWGQGTAVTVSSGGGGSGGGGSGGGGSDIVMTQSPLSLPVTPGEPASISCRSSQSLLHSNKYNYLDWYLQKPGQSPQLLIYLGSNRASGVPDRFSGSGSGTDFTLKISRVEAEDVGVYYCMQALQTLTFGCGTKVDIKSGGGGSEVQLVESGGGLVQPGGSLKLSCAASGFTFNKYAMNWVRQAPGKGLEWVARIRSKYNNYATYYADSVKDRFTISRDDSKNTAYLQMNNLKTEDTAVYYCVRHGNFGNSYISYWAYWGQGTLVTVSSGGGGSGGGGSGGGGSQTVVTQEPSLTVSPGGTVTLTCGSSTGAVTSGNYPNWVQQKPGQAPRGLIGGTKFLAPGTPARFSGSLLGGKAALTLSGVQPEDEAEYYCVLWYSNRWVFGGGTKLTVL

SEQ ID NO: 784 - protein, 1240 aa, Artificial Sequence
  Synthetic
QVTLKESGPTLVKPTETLTLTCTLSGFSLNNARMGVSWIRQPPGKCLEWLAHIFSNDEKSYSTSLKNRLTISKDSSKTQVVLTMTNVDPVDTATYYCARIVGYGSGWYGFFDYWGQGTLVTVSSGGGGSGGGGSGGGGSDIQMTQSPSSLSASVGDRVTITCRASQGIRNDLGWYQQKPGKAPKRLIYAASTLQSGVPSRFSGSGSGTEFTLTISSLQPEDFATYYCLQHNSYPLTFGCGTKVEIKSGGGGSEVQLLESGGGLVQPGGSLRLSCAASGFTFSHYAMNWVRQAPGKCLEWVSAVSGGGDRTLYADAVKGRFTISRDNSKNTLFLQMNSLRAEDTAIYYCARLRGFYYGMDVWGQGTAVTVSSGGGGSGGGGSGGGGSDIVMTQSPLSLPVTPGEPASISCRSSQSLLHSNKYNYLDWYLQKPGQSPQLLIYLGSNRASGVPDRFSGSGSGTDFTLKISRVEAEDVGVYYCMQALQTLTFGCGTKVDIKSGGGGSEVQLVESGGGLVQPGGSLKLSCAASGFTFNKYAMNWVRQAPGKGLEWVARIRSKYNNYATYYADSVKDRFTISRDDSKNTAYLQMNNLKTEDTAVYYCVRHGNFGNSYISYWAYWGQGTLVTVSSGGGGSGGGGSGGGGSQTVVTQEPSLTVSPGGTVTLTCGSSTGAVTSGNYPNWVQQKPGQAPRGLIGGTKFLAPGTPARFSGSLLGGKAALTLSGVQPEDEAEYYCVLWYSNRWVFGGGTKLTVLGGGGDKTHTCPPCPAPELLGGPSVFLFPPKPKDTLMISRTPEVTCVVVDVSHEDPEVKFNWYVDGVEVHNAKTKPCEEQYGSTYRCVSVLTVLHQDWLNGKEYKCKVSNKALPAPIEKTISKAKGQPREPQVYTLPPSREEMTKNQVSLTCLVKGFYPSDIAVEWESNGQPENNYKTTPPVLDSDGSFFLYSKLTVDKSRWQQGNVFSCSVMHEALHNHYTQKSLSLSPGKGGGGSGGGGSGGGGSGGGGSGGGGSGGGGSDKTHTCPPCPAPELLGGPSVFLFPPKPKDTLMISRTPEVTCVVVDVSHEDPEVKFNWYVDGVEVHNAKTKPCEEQYGSTYRCVSVLTVLHQDWLNGKEYKCKVSNKALPAPIEKTISKAKGQPREPQVYTLPPSREEMTKNQVSLTCLVKGFYPSDIAVEWESNGQPENNYKTTPPVLDSDGSFFLYSKLTVDKSRWQQGNVFSCSVMHEALHNHYTQKSLSLSPGK

SEQ ID NO: 785 - protein, 498 aa, Artificial Sequence
  Synthetic
QVTLKESGPTLVKPTETLTLTCTLSGFSLNNARMGVSWIRQPPGKCLEWLAHIFSNDEKSYSTSLKNRLTISKDSSKTQVVLTMTNVDPVDTATYYCARIVGYGSGWYGFFDYWGQGTLVTVSSGGGGSGGGGSGGGGSDIQMTQSPSSLSASVGDRVTITCRASQGIRNDLGWYQQKPGKAPKRLIYAASTLQSGVPSRFSGSGSGTEFTLTISSLQPEDFATYYCLQHNSYPLTFGCGTKVEIKSGGGGSEVQLLESGGGLVQPGGSLRLSCAASGFTFSHYAMSWVRQAPGKCLEWVSAISGGGDATFYADAVKGRFTFSRDNSRNTLYLQMNSLRAEDTAVYYCVKDRGYYYGMDVWGQGTTVTVSSGGGGSGGGGSGGGGSDIVMTQTPLSLPVTPGEPASISCRSSQSLLRTNKYNYLDWYLQKPGQSPQLLIYLGSNRASGVPDRFSGSGSGTDFTLKISRVEAEDVGVYYCMQALQSPYTFGCGTKLEIK

SEQ ID NO: 786 - protein, 753 aa, Artificial Sequence
  Synthetic
QVTLKESGPTLVKPTETLTLTCTLSGFSLNNARMGVSWIRQPPGKCLEWLAHIFSNDEKSYSTSLKNRLTISKDSSKTQVVLTMTNVDPVDTATYYCARIVGYGSGWYGFFDYWGQGTLVTVSSGGGGSGGGGSGGGGSDIQMTQSPSSLSASVGDRVTITCRASQGIRNDLGWYQQKPGKAPKRLIYAASTLQSGVPSRFSGSGSGTEFTLTISSLQPEDFATYYCLQHNSYPLTFGCGTKVEIKSGGGGSEVQLLESGGGLVQPGGSLRLSCAASGFTFSHYAMSWVRQAPGKCLEWVSAISGGGDATFYADAVKGRFTFSRDNSRNTLYLQMNSLRAEDTAVYYCVKDRGYYYGMDVWGQGTTVTVSSGGGGSGGGGSGGGGSDIVMTQTPLSLPVTPGEPASISCRSSQSLLRTNKYNYLDWYLQKPGQSPQLLIYLGSNRASGVPDRFSGSGSGTDFTLKISRVEAEDVGVYYCMQALQSPYTFGCGTKLEIKSGGGGSEVQLVESGGGLVQPGGSLKLSCAASGFTFNKYAMNWVRQAPGKGLEWVARIRSKYNNYATYYADSVKDRFTISRDDSKNTAYLQMNNLKTEDTAVYYCVRHGNFGNSYISYWAYWGQGTLVTVSSGGGGSGGGGSGGGGSQTVVTQEPSLTVSPGGTVTLTCGSSTGAVTSGNYPNWVQQKPGQAPRGLIGGTKFLAPGTPARFSGSLLGGKAALTLSGVQPEDEAEYYCVLWYSNRWVFGGGTKLTVL

SEQ ID NO: 787 - protein, 1241 aa, Artificial Sequence
  Synthetic
QVTLKESGPTLVKPTETLTLTCTLSGFSLNNARMGVSWIRQPPGKCLEWLAHIFSNDEKSYSTSLKNRLTISKDSSKTQVVLTMTNVDPVDTATYYCARIVGYGSGWYGFFDYWGQGTLVTVSSGGGGSGGGGSGGGGSDIQMTQSPSSLSASVGDRVTITCRASQGIRNDLGWYQQKPGKAPKRLIYAASTLQSGVPSRFSGSGSGTEFTLTISSLQPEDFATYYCLQHNSYPLTFGCGTKVEIKSGGGGSEVQLLESGGGLVQPGGSLRLSCAASGFTFSHYAMSWVRQAPGKCLEWVSAISGGGDATFYADAVKGRFTFSRDNSRNTLYLQMNSLRAEDTAVYYCVKDRGYYYGMDVWGQGTTVTVSSGGGGSGGGGSGGGGSDIVMTQTPLSLPVTPGEPASISCRSSQSLLRTNKYNYLDWYLQKPGQSPQLLIYLGSNRASGVPDRFSGSGSGTDFTLKISRVEAEDVGVYYCMQALQSPYTFGCGTKLEIKSGGGGSEVQLVESGGGLVQPGGSLKLSCAASGFTFNKYAMNWVRQAPGKGLEWVARIRSKYNNYATYYADSVKDRFTISRDDSKNTAYLQMNNLKTEDTAVYYCVRHGNFGNSYISYWAYWGQGTLVTVSSGGGGSGGGGSGGGGSQTVVTQEPSLTVSPGGTVTLTCGSSTGAVTSGNYPNWVQQKPGQAPRGLIGGTKFLAPGTPARFSGSLLGGKAALTLSGVQPEDEAEYYCVLWYSNRWVFGGGTKLTVLGGGGDKTHTCPPCPAPELLGGPSVFLFPPKPKDTLMISRTPEVTCVVVDVSHEDPEVKFNWYVDGVEVHNAKTKPCEEQYGSTYRCVSVLTVLHQDWLNGKEYKCKVSNKALPAPIEKTISKAKGQPREPQVYTLPPSREEMTKNQVSLTCLVKGFYPSDIAVEWESNGQPENNYKTTPPVLDSDGSFFLYSKLTVDKSRWQQGNVFSCSVMHEALHNHYTQKSLSLSPGKGGGGSGGGGSGGGGSGGGGSGGGGSGGGGSDKTHTCPPCPAPELLGGPSVFLFPPKPKDTLMISRTPEVTCVVVDVSHEDPEVKFNWYVDGVEVHNAKTKPCEEQYGSTYRCVSVLTVLHQDWLNGKEYKCKVSNKALPAPIEKTISKAKGQPREPQVYTLPPSREEMTKNQVSLTCLVKGFYPSDIAVEWESNGQPENNYKTTPPVLDSDGSFFLYSKLTVDKSRWQQGNVFSCSVMHEALHNHYTQKSLSLSPGK

SEQ ID NO: 788 - protein, 498 aa, Artificial Sequence
  Synthetic
QVTLKESGPTLVKPTETLTLTCTLSGFSLNNARMGVSWIRQPPGKCLEWLAHIFSNDEKSYSTSLKNRLTISKDSSKTQVVLTMTNVDPVDTATYYCARIVGYGSGWYGFFDYWGQGTLVTVSSGGGGSGGGGSGGGGSDIQMTQSPSSLSASVGDRVTITCRASQGIRNDLGWYQQKPGKAPKRLIYAASTLQSGVPSRFSGSGSGTEFTLTISSLQPEDFATYYCLQHNSYPLTFGCGTKVEIKSGGGGSEVQLLESGGGLVQPGGSLRLSCAASGFTFSHYAMSWVRQAPGKCLEWVSAISGGGDTTFYADSVKGRFTFSRDNSRNTLYLQMNSLRAEDTAVYYCVKDRGYYYGMDVWGQGTTVTVSSGGGGSGGGGSGGGGSDIVMTQTPLSLPVTPGEPASISCRSSQSLLRTNLYNYLDWYLQKPGQSPQLLIYLGSNRASGVPDRFSGSGSGTDFTLKISRVEAEDVGVYYCMQALQSPYTFGCGTKLEIK

SEQ ID NO: 789 - protein, 753 aa, Artificial Sequence
  Synthetic
QVTLKESGPTLVKPTETLTLTCTLSGFSLNNARMGVSWIRQPPGKCLEWLAHIFSNDEKSYSTSLKNRLTISKDSSKTQVVLTMTNVDPVDTATYYCARIVGYGSGWYGFFDYWGQGTLVTVSSGGGGSGGGGSGGGGSDIQMTQSPSSLSASVGDRVTITCRASQGIRNDLGWYQQKPGKAPKRLIYAASTLQSGVPSRFSGSGSGTEFTLTISSLQPEDFATYYCLQHNSYPLTFGCGTKVEIKSGGGGSEVQLLESGGGLVQPGGSLRLSCAASGFTFSHYAMSWVRQAPGKCLEWVSAISGGGDTTFYADSVKGRFTFSRDNSRNTLYLQMNSLRAEDTAVYYCVKDRGYYYGMDVWGQGTTVTVSSGGGGSGGGGSGGGGSDIVMTQTPLSLPVTPGEPASISCRSSQSLLRTNLYNYLDWYLQKPGQSPQLLIYLGSNRASGVPDRFSGSGSGTDFTLKISRVEAEDVGVYYCMQALQSPYTFGCGTKLEIKSGGGGSEVQLVESGGGLVQPGGSLKLSCAASGFTFNKYAMNWVRQAPGKGLEWVARIRSKYNNYATYYADSVKDRFTISRDDSKNTAYLQMNNLKTEDTAVYYCVRHGNFGNSYISYWAYWGQGTLVTVSSGGGGSGGGGSGGGGSQTVVTQEPSLTVSPGGTVTLTCGSSTGAVTSGNYPNWVQQKPGQAPRGLIGGTKFLAPGTPARFSGSLLGGKAALTLSGVQPEDEAEYYCVLWYSNRWVFGGGTKLTVL

SEQ ID NO: 790 - protein, 1241 aa, Artificial Sequence
  Synthetic
QVTLKESGPTLVKPTETLTLTCTLSGFSLNNARMGVSWIRQPPGKCLEWLAHIFSNDEKSYSTSLKNRLTISKDSSKTQVVLTMTNVDPVDTATYYCARIVGYGSGWYGFFDYWGQGTLVTVSSGGGGSGGGGSGGGGSDIQMTQSPSSLSASVGDRVTITCRASQGIRNDLGWYQQKPGKAPKRLIYAASTLQSGVPSRFSGSGSGTEFTLTISSLQPEDFATYYCLQHNSYPLTFGCGTKVEIKSGGGGSEVQLLESGGGLVQPGGSLRLSCAASGFTFSHYAMSWVRQAPGKCLEWVSAISGGGDTTFYADSVKGRFTFSRDNSRNTLYLQMNSLRAEDTAVYYCVKDRGYYYGMDVWGQGTTVTVSSGGGGSGGGGSGGGGSDIVMTQTPLSLPVTPGEPASISCRSSQSLLRTNLYNYLDWYLQKPGQSPQLLIYLGSNRASGVPDRFSGSGSGTDFTLKISRVEAEDVGVYYCMQALQSPYTFGCGTKLEIKSGGGGSEVQLVESGGGLVQPGGSLKLSCAASGFTFNKYAMNWVRQAPGKGLEWVARIRSKYNNYATYYADSVKDRFTISRDDSKNTAYLQMNNLKTEDTAVYYCVRHGNFGNSYISYWAYWGQGTLVTVSSGGGGSGGGGSGGGGSQTVVTQEPSLTVSPGGTVTLTCGSSTGAVTSGNYPNWVQQKPGQAPRGLIGGTKFLAPGTPARFSGSLLGGKAALTLSGVQPEDEAEYYCVLWYSNRWVFGGGTKLTVLGGGGDKTHTCPPCPAPELLGGPSVFLFPPKPKDTLMISRTPEVTCVVVDVSHEDPEVKFNWYVDGVEVHNAKTKPCEEQYGSTYRCVSVLTVLHQDWLNGKEYKCKVSNKALPAPIEKTISKAKGQPREPQVYTLPPSREEMTKNQVSLTCLVKGFYPSDIAVEWESNGQPENNYKTTPPVLDSDGSFFLYSKLTVDKSRWQQGNVFSCSVMHEALHNHYTQKSLSLSPGKGGGGSGGGGSGGGGSGGGGSGGGGSGGGGSDKTHTCPPCPAPELLGGPSVFLFPPKPKDTLMISRTPEVTCVVVDVSHEDPEVKFNWYVDGVEVHNAKTKPCEEQYGSTYRCVSVLTVLHQDWLNGKEYKCKVSNKALPAPIEKTISKAKGQPREPQVYTLPPSREEMTKNQVSLTCLVKGFYPSDIAVEWESNGQPENNYKTTPPVLDSDGSFFLYSKLTVDKSRWQQGNVFSCSVMHEALHNHYTQKSLSLSPGK

SEQ ID NO: 791 - protein, 497 aa, Artificial Sequence
  Synthetic
QVTLKESGPTLVKPTETLTLTCTLSGFSLNNARMGVSWIRQPPGKCLEWLAHIFSNDEKSYSTSLKNRLTISKDSSKTQVVLTMTNVDPVDTATYYCARIVGYGSGWYGFFDYWGQGTLVTVSSGGGGSGGGGSGGGGSDIQMTQSPSSLSASVGDRVTITCRASQGIRNDLGWYQQKPGKAPKRLIYAASTLQSGVPSRFSGSGSGTEFTLTISSLQPEDFATYYCLQHNSYPLTFGCGTKVEIKSGGGGSEVQLLESGGGLVQPGGSLRLSCAASGFTFSNYAMSWVRQAPGKCLEWVSTISGGGDHSYNADAVKGRFTISRDNSKNTLYLQMNSLRAEDTAVYYCAKQRGYYYGMDVWGQGTTVTVSSGGGGSGGGGSGGGGSDIVLTQSPLSLPVTPGEPASISCRSSQSLLHSNKYNYLDWYLQKPGQSPQLLVYLGSDRASGVPDRFSGSGSGTDFTLKISRVEAEDVGVYYCMHALQPLTFGCGTKVEIK

SEQ ID NO: 792 - protein, 752 aa, Artificial Sequence
  Synthetic
QVTLKESGPTLVKPTETLTLTCTLSGFSLNNARMGVSWIRQPPGKCLEWLAHIFSNDEKSYSTSLKNRLTISKDSSKTQVVLTMTNVDPVDTATYYCARIVGYGSGWYGFFDYWGQGTLVTVSSGGGGSGGGGSGGGGSDIQMTQSPSSLSASVGDRVTITCRASQGIRNDLGWYQQKPGKAPKRLIYAASTLQSGVPSRFSGSGSGTEFTLTISSLQPEDFATYYCLQHNSYPLTFGCGTKVEIKSGGGGSEVQLLESGGGLVQPGGSLRLSCAASGFTFSNYAMSWVRQAPGKCLEWVSTISGGGDHSYNADAVKGRFTISRDNSKNTLYLQMNSLRAEDTAVYYCAKQRGYYYGMDVWGQGTTVTVSSGGGGSGGGGSGGGGSDIVLTQSPLSLPVTPGEPASISCRSSQSLLHSNKYNYLDWYLQKPGQSPQLLVYLGSDRASGVPDRFSGSGSGTDFTLKISRVEAEDVGVYYCMHALQPLTFGCGTKVEIKSGGGGSEVQLVESGGGLVQPGGSLKLSCAASGFTFNKYAMNWVRQAPGKGLEWVARIRSKYNNYATYYADSVKDRFTISRDDSKNTAYLQMNNLKTEDTAVYYCVRHGNFGNSYISYWAYWGQGTLVTVSSGGGGSGGGGSGGGGSQTVVTQEPSLTVSPGGTVTLTCGSSTGAVTSGNYPNWVQQKPGQAPRGLIGGTKFLAPGTPARFSGSLLGGKAALTLSGVQPEDEAEYYCVLWYSNRWVFGGGTKLTVL

SEQ ID NO: 793 - protein, 1240 aa, Artificial Sequence
  Synthetic
QVTLKESGPTLVKPTETLTLTCTLSGFSLNNARMGVSWIRQPPGKCLEWLAHIFSNDEKSYSTSLKNRLTISKDSSKTQVVLTMTNVDPVDTATYYCARIVGYGSGWYGFFDYWGQGTLVTVSSGGGGSGGGGSGGGGSDIQMTQSPSSLSASVGDRVTITCRASQGIRNDLGWYQQKPGKAPKRLIYAASTLQSGVPSRFSGSGSGTEFTLTISSLQPEDFATYYCLQHNSYPLTFGCGTKVEIKSGGGGSEVQLLESGGGLVQPGGSLRLSCAASGFTFSNYAMSWVRQAPGKCLEWVSTISGGGDHSYNADAVKGRFTISRDNSKNTLYLQMNSLRAEDTAVYYCAKQRGYYYGMDVWGQGTTVTVSSGGGGSGGGGSGGGGSDIVLTQSPLSLPVTPGEPASISCRSSQSLLHSNKYNYLDWYLQKPGQSPQLLVYLGSDRASGVPDRFSGSGSGTDFTLKISRVEAEDVGVYYCMHALQPLTFGCGTKVEIKSGGGGSEVQLVESGGGLVQPGGSLKLSCAASGFTFNKYAMNWVRQAPGKGLEWVARIRSKYNNYATYYADSVKDRFTISRDDSKNTAYLQMNNLKTEDTAVYYCVRHGNFGNSYISYWAYWGQGTLVTVSSGGGGSGGGGSGGGGSQTVVTQEPSLTVSPGGTVTLTCGSSTGAVTSGNYPNWVQQKPGQAPRGLIGGTKFLAPGTPARFSGSLLGGKAALTLSGVQPEDEAEYYCVLWYSNRWVFGGGTKLTVLGGGGDKTHTCPPCPAPELLGGPSVFLFPPKPKDTLMISRTPEVTCVVVDVSHEDPEVKFNWYVDGVEVHNAKTKPCEEQYGSTYRCVSVLTVLHQDWLNGKEYKCKVSNKALPAPIEKTISKAKGQPREPQVYTLPPSREEMTKNQVSLTCLVKGFYPSDIAVEWESNGQPENNYKTTPPVLDSDGSFFLYSKLTVDKSRWQQGNVFSCSVMHEALHNHYTQKSLSLSPGKGGGGSGGGGSGGGGSGGGGSGGGGSGGGGSDKTHTCPPCPAPELLGGPSVFLFPPKPKDTLMISRTPEVTCVVVDVSHEDPEVKFNWYVDGVEVHNAKTKPCEEQYGSTYRCVSVLTVLHQDWLNGKEYKCKVSNKALPAPIEKTISKAKGQPREPQVYTLPPSREEMTKNQVSLTCLVKGFYPSDIAVEWESNGQPENNYKTTPPVLDSDGSFFLYSKLTVDKSRWQQGNVFSCSVMHEALHNHYTQKSLSLSPGK

SEQ ID NO: 794 - protein, 497 aa, Artificial Sequence
  Synthetic
QVTLKESGPTLVKPTETLTLTCTLSGFSLNNARMGVSWIRQPPGKCLEWLAHIFSNDEKSYSTSLKNRLTISKDSSKTQVVLTMTNVDPVDTATYYCARIVGYGSGWYGFFDYWGQGTLVTVSSGGGGSGGGGSGGGGSDIQMTQSPSSLSASVGDRVTITCRASQGIRNDLGWYQQKPGKAPKRLIYAASTLQSGVPSRFSGSGSGTEFTLTISSLQPEDFATYYCLQHNSYPLTFGCGTKVEIKSGGGGSEVQLLESGGGLVQPGGSLRLSCAASGFTFSNYAMSWVRQAPGKCLEWVSTISGGGDHSYNADSVKGRFTISRDNSKNTLYLQMNSLRAEDTAVYYCAKQRGYYYGMDVWGQGTTVTVSSGGGGSGGGGSGGGGSDIVLTQSPLSLPVTPGEPASISCRSSQSLLHSNKYNYLDWYLQKPGQSPQLLVYLGSDRASGVPDRFSGSGSGTDFTLKISRVEAEDVGVYYCMHALQPLTFGCGTKVEIK

SEQ ID NO: 795 - protein, 752 aa, Artificial Sequence
  Synthetic
QVTLKESGPTLVKPTETLTLTCTLSGFSLNNARMGVSWIRQPPGKCLEWLAHIFSNDEKSYSTSLKNRLTISKDSSKTQVVLTMTNVDPVDTATYYCARIVGYGSGWYGFFDYWGQGTLVTVSSGGGGSGGGGSGGGGSDIQMTQSPSSLSASVGDRVTITCRASQGIRNDLGWYQQKPGKAPKRLIYAASTLQSGVPSRFSGSGSGTEFTLTISSLQPEDFATYYCLQHNSYPLTFGCGTKVEIKSGGGGSEVQLLESGGGLVQPGGSLRLSCAASGFTFSNYAMSWVRQAPGKCLEWVSTISGGGDHSYNADSVKGRFTISRDNSKNTLYLQMNSLRAEDTAVYYCAKQRGYYYGMDVWGQGTTVTVSSGGGGSGGGGSGGGGSDIVLTQSPLSLPVTPGEPASISCRSSQSLLHSNKYNYLDWYLQKPGQSPQLLVYLGSDRASGVPDRFSGSGSGTDFTLKISRVEAEDVGVYYCMHALQPLTFGCGTKVEIKSGGGGSEVQLVESGGGLVQPGGSLKLSCAASGFTFNKYAMNWVRQAPGKGLEWVARIRSKYNNYATYYADSVKDRFTISRDDSKNTAYLQMNNLKTEDTAVYYCVRHGNFGNSYISYWAYWGQGTLVTVSSGGGGSGGGGSGGGGSQTVVTQEPSLTVSPGGTVTLTCGSSTGAVTSGNYPNWVQQKPGQAPRGLIGGTKFLAPGTPARFSGSLLGGKAALTLSGVQPEDEAEYYCVLWYSNRWVFGGGTKLTVL

SEQ ID NO: 796 - protein, 1240 aa, Artificial Sequence
  Synthetic
QVTLKESGPTLVKPTETLTLTCTLSGFSLNNARMGVSWIRQPPGKCLEWLAHIFSNDEKSYSTSLKNRLTISKDSSKTQVVLTMTNVDPVDTATYYCARIVGYGSGWYGFFDYWGQGTLVTVSSGGGGSGGGGSGGGGSDIQMTQSPSSLSASVGDRVTITCRASQGIRNDLGWYQQKPGKAPKRLIYAASTLQSGVPSRFSGSGSGTEFTLTISSLQPEDFATYYCLQHNSYPLTFGCGTKVEIKSGGGGSEVQLLESGGGLVQPGGSLRLSCAASGFTFSNYAMSWVRQAPGKCLEWVSTISGGGDHSYNADSVKGRFTISRDNSKNTLYLQMNSLRAEDTAVYYCAKQRGYYYGMDVWGQGTTVTVSSGGGGSGGGGSGGGGSDIVLTQSPLSLPVTPGEPASISCRSSQSLLHSNKYNYLDWYLQKPGQSPQLLVYLGSDRASGVPDRFSGSGSGTDFTLKISRVEAEDVGVYYCMHALQPLTFGCGTKVEIKSGGGGSEVQLVESGGGLVQPGGSLKLSCAASGFTFNKYAMNWVRQAPGKGLEWVARIRSKYNNYATYYADSVKDRFTISRDDSKNTAYLQMNNLKTEDTAVYYCVRHGNFGNSYISYWAYWGQGTLVTVSSGGGGSGGGGSGGGGSQTVVTQEPSLTVSPGGTVTLTCGSSTGAVTSGNYPNWVQQKPGQAPRGLIGGTKFLAPGTPARFSGSLLGGKAALTLSGVQPEDEAEYYCVLWYSNRWVFGGGTKLTVLGGGGDKTHTCPPCPAPELLGGPSVFLFPPKPKDTLMISRTPEVTCVVVDVSHEDPEVKFNWYVDGVEVHNAKTKPCEEQYGSTYRCVSVLTVLHQDWLNGKEYKCKVSNKALPAPIEKTISKAKGQPREPQVYTLPPSREEMTKNQVSLTCLVKGFYPSDIAVEWESNGQPENNYKTTPPVLDSDGSFFLYSKLTVDKSRWQQGNVFSCSVMHEALHNHYTQKSLSLSPGKGGGGSGGGGSGGGGSGGGGSGGGGSGGGGSDKTHTCPPCPAPELLGGPSVFLFPPKPKDTLMISRTPEVTCVVVDVSHEDPEVKFNWYVDGVEVHNAKTKPCEEQYGSTYRCVSVLTVLHQDWLNGKEYKCKVSNKALPAPIEKTISKAKGQPREPQVYTLPPSREEMTKNQVSLTCLVKGFYPSDIAVEWESNGQPENNYKTTPPVLDSDGSFFLYSKLTVDKSRWQQGNVFSCSVMHEALHNHYTQKSLSLSPGK

SEQ ID NO: 797 - protein, 498 aa, Artificial Sequence
  Synthetic
QVTLKESGPTLVKPTETLTLTCTLSGFSLNNARMGVSWIRQPPGKCLEWLAHIFSNDEKSYSTSLKNRLTISKDSSKTQVVLTMTNVDPVDTATYYCARIVGYGSGWYGFFDYWGQGTLVTVSSGGGGSGGGGSGGGGSDIQMTQSPSSLSASVGDRVTITCRASQGIRNDLGWYQQKPGKAPKRLIYAASTLQSGVPSRFSGSGSGTEFTLTISSLQPEDFATYYCLQHNSYPLTFGCGTKVEIKSGGGGSEVQLLESGGGLVQPGGSLRLSCAASGFTFSHYAMSWVRQAPGKCLEWVSAISGGGDRTFYADAVKGRFTVSRDNSKNTLYLQMNSLRAEDTAVYYCAKLRGFYYGMDVWGQGTTVTVSSGGGGSGGGGSGGGGSDIVMTQSPLSLPVTPGEPASISCRSSQSLLHSNKYNYLDWYLQQPGQSPQLLIYLGSNRASGVPDRFSASGSGTDFTLKISRVEAEDVGVYYCMQGTHWPHTFGCGTKVDIK

SEQ ID NO: 798 - protein, 753 aa, Artificial Sequence
  Synthetic
QVTLKESGPTLVKPTETLTLTCTLSGFSLNNARMGVSWIRQPPGKCLEWLAHIFSNDEKSYSTSLKNRLTISKDSSKTQVVLTMTNVDPVDTATYYCARIVGYGSGWYGFFDYWGQGTLVTVSSGGGGSGGGGSGGGGSDIQMTQSPSSLSASVGDRVTITCRASQGIRNDLGWYQQKPGKAPKRLIYAASTLQSGVPSRFSGSGSGTEFTLTISSLQPEDFATYYCLQHNSYPLTFGCGTKVEIKSGGGGSEVQLLESGGGLVQPGGSLRLSCAASGFTFSHYAMSWVRQAPGKCLEWVSAISGGGDRTFYADAVKGRFTVSRDNSKNTLYLQMNSLRAEDTAVYYCAKLRGFYYGMDVWGQGTTVTVSSGGGGSGGGGSGGGGSDIVMTQSPLSLPVTPGEPASISCRSSQSLLHSNKYNYLDWYLQQPGQSPQLLIYLGSNRASGVPDRFSASGSGTDFTLKISRVEAEDVGVYYCMQGTHWPHTFGCGTKVDIKSGGGGSEVQLVESGGGLVQPGGSLKLSCAASGFTFNKYAMNWVRQAPGKGLEWVARIRSKYNNYATYYADSVKDRFTISRDDSKNTAYLQMNNLKTEDTAVYYCVRHGNFGNSYISYWAYWGQGTLVTVSSGGGGSGGGGSGGGGSQTVVTQEPSLTVSPGGTVTLTCGSSTGAVTSGNYPNWVQQKPGQAPRGLIGGTKFLAPGTPARFSGSLLGGKAALTLSGVQPEDEAEYYCVLWYSNRWVFGGGTKLTVL

SEQ ID NO: 799 - protein, 1241 aa, Artificial Sequence
  Synthetic
QVTLKESGPTLVKPTETLTLTCTLSGFSLNNARMGVSWIRQPPGKCLEWLAHIFSNDEKSYSTSLKNRLTISKDSSKTQVVLTMTNVDPVDTATYYCARIVGYGSGWYGFFDYWGQGTLVTVSSGGGGSGGGGSGGGGSDIQMTQSPSSLSASVGDRVTITCRASQGIRNDLGWYQQKPGKAPKRLIYAASTLQSGVPSRFSGSGSGTEFTLTISSLQPEDFATYYCLQHNSYPLTFGCGTKVEIKSGGGGSEVQLLESGGGLVQPGGSLRLSCAASGFTFSHYAMSWVRQAPGKCLEWVSAISGGGDRTFYADAVKGRFTVSRDNSKNTLYLQMNSLRAEDTAVYYCAKLRGFYYGMDVWGQGTTVTVSSGGGGSGGGGSGGGGSDIVMTQSPLSLPVTPGEPASISCRSSQSLLHSNKYNYLDWYLQQPGQSPQLLIYLGSNRASGVPDRFSASGSGTDFTLKISRVEAEDVGVYYCMQGTHWPHTFGCGTKVDIKSGGGGSEVQLVESGGGLVQPGGSLKLSCAASGFTFNKYAMNWVRQAPGKGLEWVARIRSKYNNYATYYADSVKDRFTISRDDSKNTAYLQMNNLKTEDTAVYYCVRHGNFGNSYISYWAYWGQGTLVTVSSGGGGSGGGGSGGGGSQTVVTQEPSLTVSPGGTVTLTCGSSTGAVTSGNYPNWVQQKPGQAPRGLIGGTKFLAPGTPARFSGSLLGGKAALTLSGVQPEDEAEYYCVLWYSNRWVFGGGTKLTVLGGGGDKTHTCPPCPAPELLGGPSVFLFPPKPKDTLMISRTPEVTCVVVDVSHEDPEVKFNWYVDGVEVHNAKTKPCEEQYGSTYRCVSVLTVLHQDWLNGKEYKCKVSNKALPAPIEKTISKAKGQPREPQVYTLPPSREEMTKNQVSLTCLVKGFYPSDIAVEWESNGQPENNYKTTPPVLDSDGSFFLYSKLTVDKSRWQQGNVFSCSVMHEALHNHYTQKSLSLSPGKGGGGSGGGGSGGGGSGGGGSGGGGSGGGGSDKTHTCPPCPAPELLGGPSVFLFPPKPKDTLMISRTPEVTCVVVDVSHEDPEVKFNWYVDGVEVHNAKTKPCEEQYGSTYRCVSVLTVLHQDWLNGKEYKCKVSNKALPAPIEKTISKAKGQPREPQVYTLPPSREEMTKNQVSLTCLVKGFYPSDIAVEWESNGQPENNYKTTPPVLDSDGSFFLYSKLTVDKSRWQQGNVFSCSVMHEALHNHYTQKSLSLSPGK

SEQ ID NO: 800 - protein, 498 aa, Artificial Sequence
  Synthetic
QVTLKESGPTLVKPTETLTLTCTLSGFSLNNARMGVSWIRQPPGKCLEWLAHIFSNDEKSYSTSLKNRLTISKDSSKTQVVLTMTNVDPVDTATYYCARIVGYGSGWYGFFDYWGQGTLVTVSSGGGGSGGGGSGGGGSDIQMTQSPSSLSASVGDRVTITCRASQGIRNDLGWYQQKPGKAPKRLIYAASTLQSGVPSRFSGSGSGTEFTLTISSLQPEDFATYYCLQHNSYPLTFGCGTKVEIKSGGGGSEVQLLESGGGLVQPGGSLRLSCAASGFTFSHYAMSWVRQAPGKCLEWVSAISGGGDRTFYADSVKGRFTVSRDNSKNTLYLQMNSLRAEDTAVYYCAKLRGFYYGMDVWGQGTTVTVSSGGGGSGGGGSGGGGSDIVMTQSPLSLPVTPGEPASISCRSSQSLLHSNLYNYLDWYLQQPGQSPQLLIYLGSNRASGVPDRFSASGSGTDFTLKISRVEAEDVGVYYCMQGTHWPHTFGCGTKVDIK

SEQ ID NO: 801 - protein, 753 aa, Artificial Sequence
  Synthetic
QVTLKESGPTLVKPTETLTLTCTLSGFSLNNARMGVSWIRQPPGKCLEWLAHIFSNDEKSYSTSLKNRLTISKDSSKTQVVLTMTNVDPVDTATYYCARIVGYGSGWYGFFDYWGQGTLVTVSSGGGGSGGGGSGGGGSDIQMTQSPSSLSASVGDRVTITCRASQGIRNDLGWYQQKPGKAPKRLIYAASTLQSGVPSRFSGSGSGTEFTLTISSLQPEDFATYYCLQHNSYPLTFGCGTKVEIKSGGGGSEVQLLESGGGLVQPGGSLRLSCAASGFTFSHYAMSWVRQAPGKCLEWVSAISGGGDRTFYADSVKGRFTVSRDNSKNTLYLQMNSLRAEDTAVYYCAKLRGFYYGMDVWGQGTTVTVSSGGGGSGGGGSGGGGSDIVMTQSPLSLPVTPGEPASISCRSSQSLLHSNLYNYLDWYLQQPGQSPQLLIYLGSNRASGVPDRFSASGSGTDFTLKISRVEAEDVGVYYCMQGTHWPHTFGCGTKVDIKSGGGGSEVQLVESGGGLVQPGGSLKLSCAASGFTFNKYAMNWVRQAPGKGLEWVARIRSKYNNYATYYADSVKDRFTISRDDSKNTAYLQMNNLKTEDTAVYYCVRHGNFGNSYISYWAYWGQGTLVTVSSGGGGSGGGGSGGGGSQTVVTQEPSLTVSPGGTVTLTCGSSTGAVTSGNYPNWVQQKPGQAPRGLIGGTKFLAPGTPARFSGSLLGGKAALTLSGVQPEDEAEYYCVLWYSNRWVFGGGTKLTVL

SEQ ID NO: 802 - protein, 1241 aa, Artificial Sequence
  Synthetic
QVTLKESGPTLVKPTETLTLTCTLSGFSLNNARMGVSWIRQPPGKCLEWLAHIFSNDEKSYSTSLKNRLTISKDSSKTQVVLTMTNVDPVDTATYYCARIVGYGSGWYGFFDYWGQGTLVTVSSGGGGSGGGGSGGGGSDIQMTQSPSSLSASVGDRVTITCRASQGIRNDLGWYQQKPGKAPKRLIYAASTLQSGVPSRFSGSGSGTEFTLTISSLQPEDFATYYCLQHNSYPLTFGCGTKVEIKSGGGGSEVQLLESGGGLVQPGGSLRLSCAASGFTFSHYAMSWVRQAPGKCLEWVSAISGGGDRTFYADSVKGRFTVSRDNSKNTLYLQMNSLRAEDTAVYYCAKLRGFYYGMDVWGQGTTVTVSSGGGGSGGGGSGGGGSDIVMTQSPLSLPVTPGEPASISCRSSQSLLHSNLYNYLDWYLQQPGQSPQLLIYLGSNRASGVPDRFSASGSGTDFTLKISRVEAEDVGVYYCMQGTHWPHTFGCGTKVDIKSGGGGSEVQLVESGGGLVQPGGSLKLSCAASGFTFNKYAMNWVRQAPGKGLEWVARIRSKYNNYATYYADSVKDRFTISRDDSKNTAYLQMNNLKTEDTAVYYCVRHGNFGNSYISYWAYWGQGTLVTVSSGGGGSGGGGSGGGGSQTVVTQEPSLTVSPGGTVTLTCGSSTGAVTSGNYPNWVQQKPGQAPRGLIGGTKFLAPGTPARFSGSLLGGKAALTLSGVQPEDEAEYYCVLWYSNRWVFGGGTKLTVLGGGGDKTHTCPPCPAPELLGGPSVFLFPPKPKDTLMISRTPEVTCVVVDVSHEDPEVKFNWYVDGVEVHNAKTKPCEEQYGSTYRCVSVLTVLHQDWLNGKEYKCKVSNKALPAPIEKTISKAKGQPREPQVYTLPPSREEMTKNQVSLTCLVKGFYPSDIAVEWESNGQPENNYKTTPPVLDSDGSFFLYSKLTVDKSRWQQGNVFSCSVMHEALHNHYTQKSLSLSPGKGGGGSGGGGSGGGGSGGGGSGGGGSGGGGSDKTHTCPPCPAPELLGGPSVFLFPPKPKDTLMISRTPEVTCVVVDVSHEDPEVKFNWYVDGVEVHNAKTKPCEEQYGSTYRCVSVLTVLHQDWLNGKEYKCKVSNKALPAPIEKTISKAKGQPREPQVYTLPPSREEMTKNQVSLTCLVKGFYPSDIAVEWESNGQPENNYKTTPPVLDSDGSFFLYSKLTVDKSRWQQGNVFSCSVMHEALHNHYTQKSLSLSPGK

SEQ ID NO: 803 - protein, 501 aa, Artificial Sequence
  Synthetic
QVTLKESGPTLVKPTETLTLTCTLSGFSLNNARMGVSWIRQPPGKCLEWLAHIFSNDEKSYSTSLKNRLTISKDSSKTQVVLTMTNVDPVDTATYYCARIVGYGSGWYGFFDYWGQGTLVTVSSGGGGSGGGGSGGGGSDIQMTQSPSSLSASVGDRVTITCRASQGIRNDLGWYQQKPGKAPKRLIYAASTLQSGVPSRFSGSGSGTEFTLTISSLQPEDFATYYCLQHNSYPLTFGCGTKVEIKSGGGGSEVQLLESGGGLVQPGGSLRLSCAASGFSFNSYAMSWVRQAPGKCLEWVSTVSGGGDRTYYADAVKGRFTISRDNSKNTLYLQMNSLRAEDTAVYYCAKNRGEGTTFYGMGAWGQGTMVTVSSGGGGSGGGGSGGGGSDIVLTQSPLSLPVTPGEPASISCRSSQSLLHSNLYNYLDWYLQKPGQSPQLLIYLGSNRASGVPDRFSGSGSGTDFTLKISRVEAEDVGVYYCMQALQTPLTFGCGTKVDIK

SEQ ID NO: 804 - protein, 756 aa, Artificial Sequence
  Synthetic
QVTLKESGPTLVKPTETLTLTCTLSGFSLNNARMGVSWIRQPPGKCLEWLAHIFSNDEKSYSTSLKNRLTISKDSSKTQVVLTMTNVDPVDTATYYCARIVGYGSGWYGFFDYWGQGTLVTVSSGGGGSGGGGSGGGGSDIQMTQSPSSLSASVGDRVTITCRASQGIRNDLGWYQQKPGKAPKRLIYAASTLQSGVPSRFSGSGSGTEFTLTISSLQPEDFATYYCLQHNSYPLTFGCGTKVEIKSGGGGSEVQLLESGGGLVQPGGSLRLSCAASGFSFNSYAMSWVRQAPGKCLEWVSTVSGGGDRTYYADAVKGRFTISRDNSKNTLYLQMNSLRAEDTAVYYCAKNRGEGTTFYGMGAWGQGTMVTVSSGGGGSGGGGSGGGGSDIVLTQSPLSLPVTPGEPASISCRSSQSLLHSNLYNYLDWYLQKPGQSPQLLIYLGSNRASGVPDRFSGSGSGTDFTLKISRVEAEDVGVYYCMQALQTPLTFGCGTKVDIKSGGGGSEVQLVESGGGLVQPGGSLKLSCAASGFTFNKYAMNWVRQAPGKGLEWVARIRSKYNNYATYYADSVKDRFTISRDDSKNTAYLQMNNLKTEDTAVYYCVRHGNFGNSYISYWAYWGQGTLVTVSSGGGGSGGGGSGGGGSQTVVTQEPSLTVSPGGTVTLTCGSSTGAVTSGNYPNWVQQKPGQAPRGLIGGTKFLAPGTPARFSGSLLGGKAALTLSGVQPEDEAEYYCVLWYSNRWVFGGGTKLTVL

SEQ ID NO: 805 - protein, 1244 aa, Artificial Sequence
  Synthetic
QVTLKESGPTLVKPTETLTLTCTLSGFSLNNARMGVSWIRQPPGKCLEWLAHIFSNDEKSYSTSLKNRLTISKDSSKTQVVLTMTNVDPVDTATYYCARIVGYGSGWYGFFDYWGQGTLVTVSSGGGGSGGGGSGGGGSDIQMTQSPSSLSASVGDRVTITCRASQGIRNDLGWYQQKPGKAPKRLIYAASTLQSGVPSRFSGSGSGTEFTLTISSLQPEDFATYYCLQHNSYPLTFGCGTKVEIKSGGGGSEVQLLESGGGLVQPGGSLRLSCAASGFSFNSYAMSWVRQAPGKCLEWVSTVSGGGDRTYYADAVKGRFTISRDNSKNTLYLQMNSLRAEDTAVYYCAKNRGEGTTFYGMGAWGQGTMVTVSSGGGGSGGGGSGGGGSDIVLTQSPLSLPVTPGEPASISCRSSQSLLHSNLYNYLDWYLQKPGQSPQLLIYLGSNRASGVPDRFSGSGSGTDFTLKISRVEAEDVGVYYCMQALQTPLTFGCGTKVDIKSGGGGSEVQLVESGGGLVQPGGSLKLSCAASGFTFNKYAMNWVRQAPGKGLEWVARIRSKYNNYATYYADSVKDRFTISRDDSKNTAYLQMNNLKTEDTAVYYCVRHGNFGNSYISYWAYWGQGTLVTVSSGGGGSGGGGSGGGGSQTVVTQEPSLTVSPGGTVTLTCGSSTGAVTSGNYPNWVQQKPGQAPRGLIGGTKFLAPGTPARFSGSLLGGKAALTLSGVQPEDEAEYYCVLWYSNRWVFGGGTKLTVLGGGGDKTHTCPPCPAPELLGGPSVFLFPPKPKDTLMISRTPEVTCVVVDVSHEDPEVKFNWYVDGVEVHNAKTKPCEEQYGSTYRCVSVLTVLHQDWLNGKEYKCKVSNKALPAPIEKTISKAKGQPREPQVYTLPPSREEMTKNQVSLTCLVKGFYPSDIAVEWESNGQPENNYKTTPPVLDSDGSFFLYSKLTVDKSRWQQGNVFSCSVMHEALHNHYTQKSLSLSPGKGGGGSGGGGSGGGGSGGGGSGGGGSGGGGSDKTHTCPPCPAPELLGGPSVFLFPPKPKDTLMISRTPEVTCVVVDVSHEDPEVKFNWYVDGVEVHNAKTKPCEEQYGSTYRCVSVLTVLHQDWLNGKEYKCKVSNKALPAPIEKTISKAKGQPREPQVYTLPPSREEMTKNQVSLTCLVKGFYPSDIAVEWESNGQPENNYKTTPPVLDSDGSFFLYSKLTVDKSRWQQGNVFSCSVMHEALHNHYTQKSLSLSPGK

SEQ ID NO: 806 - protein, 501 aa, Artificial Sequence
  Synthetic
QVTLKESGPTLVKPTETLTLTCTLSGFSLNNARMGVSWIRQPPGKCLEWLAHIFSNDEKSYSTSLKNRLTISKDSSKTQVVLTMTNVDPVDTATYYCARIVGYGSGWYGFFDYWGQGTLVTVSSGGGGSGGGGSGGGGSDIQMTQSPSSLSASVGDRVTITCRASQGIRNDLGWYQQKPGKAPKRLIYAASTLQSGVPSRFSGSGSGTEFTLTISSLQPEDFATYYCLQHNSYPLTFGCGTKVEIKSGGGGSEVQLLESGGGLVQPGGSLRLSCAASGFSFNSYAMSWVRQAPGKCLEWVSTVSGGGDRTYYADSVKGRFTISRDNSKNTLYLQMNSLRAEDTAVYYCAKNRGEGTTFYGMGAWGQGTMVTVSSGGGGSGGGGSGGGGSDIVLTQSPLSLPVTPGEPASISCRSSQSLLHSNKYNYLDWYLQKPGQSPQLLIYLGSNRASGVPDRFSGSGSGTDFTLKISRVEAEDVGVYYCMQALQTPLTFGCGTKVDIK

SEQ ID NO: 807 - protein, 756 aa, Artificial Sequence
  Synthetic
QVTLKESGPTLVKPTETLTLTCTLSGFSLNNARMGVSWIRQPPGKCLEWLAHIFSNDEKSYSTSLKNRLTISKDSSKTQVVLTMTNVDPVDTATYYCARIVGYGSGWYGFFDYWGQGTLVTVSSGGGGSGGGGSGGGGSDIQMTQSPSSLSASVGDRVTITCRASQGIRNDLGWYQQKPGKAPKRLIYAASTLQSGVPSRFSGSGSGTEFTLTISSLQPEDFATYYCLQHNSYPLTFGCGTKVEIKSGGGGSEVQLLESGGGLVQPGGSLRLSCAASGFSFNSYAMSWVRQAPGKCLEWVSTVSGGGDRTYYADSVKGRFTISRDNSKNTLYLQMNSLRAEDTAVYYCAKNRGEGTTFYGMGAWGQGTMVTVSSGGGGSGGGGSGGGGSDIVLTQSPLSLPVTPGEPASISCRSSQSLLHSNKYNYLDWYLQKPGQSPQLLIYLGSNRASGVPDRFSGSGSGTDFTLKISRVEAEDVGVYYCMQALQTPLTFGCGTKVDIKSGGGGSEVQLVESGGGLVQPGGSLKLSCAASGFTFNKYAMNWVRQAPGKGLEWVARIRSKYNNYATYYADSVKDRFTISRDDSKNTAYLQMNNLKTEDTAVYYCVRHGNFGNSYISYWAYWGQGTLVTVSSGGGGSGGGGSGGGGSQTVVTQEPSLTVSPGGTVTLTCGSSTGAVTSGNYPNWVQQKPGQAPRGLIGGTKFLAPGTPARFSGSLLGGKAALTLSGVQPEDEAEYYCVLWYSNRWVFGGGTKLTVL

SEQ ID NO: 808 - protein, 1244 aa, Artificial Sequence
  Synthetic
QVTLKESGPTLVKPTETLTLTCTLSGFSLNNARMGVSWIRQPPGKCLEWLAHIFSNDEKSYSTSLKNRLTISKDSSKTQVVLTMTNVDPVDTATYYCARIVGYGSGWYGFFDYWGQGTLVTVSSGGGGSGGGGSGGGGSDIQMTQSPSSLSASVGDRVTITCRASQGIRNDLGWYQQKPGKAPKRLIYAASTLQSGVPSRFSGSGSGTEFTLTISSLQPEDFATYYCLQHNSYPLTFGCGTKVEIKSGGGGSEVQLLESGGGLVQPGGSLRLSCAASGFSFNSYAMSWVRQAPGKCLEWVSTVSGGGDRTYYADSVKGRFTISRDNSKNTLYLQMNSLRAEDTAVYYCAKNRGEGTTFYGMGAWGQGTMVTVSSGGGGSGGGGSGGGGSDIVLTQSPLSLPVTPGEPASISCRSSQSLLHSNKYNYLDWYLQKPGQSPQLLIYLGSNRASGVPDRFSGSGSGTDFTLKISRVEAEDVGVYYCMQALQTPLTFGCGTKVDIKSGGGGSEVQLVESGGGLVQPGGSLKLSCAASGFTFNKYAMNWVRQAPGKGLEWVARIRSKYNNYATYYADSVKDRFTISRDDSKNTAYLQMNNLKTEDTAVYYCVRHGNFGNSYISYWAYWGQGTLVTVSSGGGGSGGGGSGGGGSQTVVTQEPSLTVSPGGTVTLTCGSSTGAVTSGNYPNWVQQKPGQAPRGLIGGTKFLAPGTPARFSGSLLGGKAALTLSGVQPEDEAEYYCVLWYSNRWVFGGGTKLTVLGGGGDKTHTCPPCPAPELLGGPSVFLFPPKPKDTLMISRTPEVTCVVVDVSHEDPEVKFNWYVDGVEVHNAKTKPCEEQYGSTYRCVSVLTVLHQDWLNGKEYKCKVSNKALPAPIEKTISKAKGQPREPQVYTLPPSREEMTKNQVSLTCLVKGFYPSDIAVEWESNGQPENNYKTTPPVLDSDGSFFLYSKLTVDKSRWQQGNVFSCSVMHEALHNHYTQKSLSLSPGKGGGGSGGGGSGGGGSGGGGSGGGGSGGGGSDKTHTCPPCPAPELLGGPSVFLFPPKPKDTLMISRTPEVTCVVVDVSHEDPEVKFNWYVDGVEVHNAKTKPCEEQYGSTYRCVSVLTVLHQDWLNGKEYKCKVSNKALPAPIEKTISKAKGQPREPQVYTLPPSREEMTKNQVSLTCLVKGFYPSDIAVEWESNGQPENNYKTTPPVLDSDGSFFLYSKLTVDKSRWQQGNVFSCSVMHEALHNHYTQKSLSLSPGK

SEQ ID NO: 809 - protein, 497 aa, Artificial Sequence
  Synthetic
QVTLKESGPTLVKPTETLTLTCTLSGFSLNNARMGVSWIRQPPGKCLEWLAHIFSNDEKSYSTSLKNRLTISKDSSKTQVVLTMTNVDPVDTATYYCARIVGYGSGWYGFFDYWGQGTLVTVSSGGGGSGGGGSGGGGSDIQMTQSPSSLSASVGDRVTITCRASQGIRNDLGWYQQKPGKAPKRLIYAASTLQSGVPSRFSGSGSGTEFTLTISSLQPEDFATYYCLQHNSYPLTFGCGTKVEIKSGGGGSEVQLLESGGGLVQPGGSLRLSCAASGFTFSHYAMNWVRQAPGKCLEWVSAVSGGGDRTLYADSVKGRFTISRDNSKNTLFLQMNSLRAEDTAIYYCARLRGFYYGMDVWGQGTAVTVSSGGGGSGGGGSGGGGSDIVMTQSPLSLPVTPGEPASISCRSSQSLLHSNKYNYLDWYLQKPGQSPQLLIYLGSNRASGVPDRFSGSGSGTDFTLKISRVEAEDVGVYYCMQALQTLTFGCGTKVDIK

SEQ ID NO: 810 - protein, 752 aa, Artificial Sequence
  Synthetic
QVTLKESGPTLVKPTETLTLTCTLSGFSLNNARMGVSWIRQPPGKCLEWLAHIFSNDEKSYSTSLKNRLTISKDSSKTQVVLTMTNVDPVDTATYYCARIVGYGSGWYGFFDYWGQGTLVTVSSGGGGSGGGGSGGGGSDIQMTQSPSSLSASVGDRVTITCRASQGIRNDLGWYQQKPGKAPKRLIYAASTLQSGVPSRFSGSGSGTEFTLTISSLQPEDFATYYCLQHNSYPLTFGCGTKVEIKSGGGGSEVQLLESGGGLVQPGGSLRLSCAASGFTFSHYAMNWVRQAPGKCLEWVSAVSGGGDRTLYADSVKGRFTISRDNSKNTLFLQMNSLRAEDTAIYYCARLRGFYYGMDVWGQGTAVTVSSGGGGSGGGGSGGGGSDIVMTQSPLSLPVTPGEPASISCRSSQSLLHSNKYNYLDWYLQKPGQSPQLLIYLGSNRASGVPDRFSGSGSGTDFTLKISRVEAEDVGVYYCMQALQTLTFGCGTKVDIKSGGGGSEVQLVESGGGLVQPGGSLKLSCAASGFTFNKYAMNWVRQAPGKGLEWVARIRSKYNNYATYYADSVKDRFTISRDDSKNTAYLQMNNLKTEDTAVYYCVRHGNFGNSYISYWAYWGQGTLVTVSSGGGGSGGGGSGGGGSQTVVTQEPSLTVSPGGTVTLTCGSSTGAVTSGNYPNWVQQKPGQAPRGLIGGTKFLAPGTPARFSGSLLGGKAALTLSGVQPEDEAEYYCVLWYSNRWVFGGGTKLTVL

SEQ ID NO: 811 - protein, 1240 aa, Artificial Sequence
  Synthetic
QVTLKESGPTLVKPTETLTLTCTLSGFSLNNARMGVSWIRQPPGKCLEWLAHIFSNDEKSYSTSLKNRLTISKDSSKTQVVLTMTNVDPVDTATYYCARIVGYGSGWYGFFDYWGQGTLVTVSSGGGGSGGGGSGGGGSDIQMTQSPSSLSASVGDRVTITCRASQGIRNDLGWYQQKPGKAPKRLIYAASTLQSGVPSRFSGSGSGTEFTLTISSLQPEDFATYYCLQHNSYPLTFGCGTKVEIKSGGGGSEVQLLESGGGLVQPGGSLRLSCAASGFTFSHYAMNWVRQAPGKCLEWVSAVSGGGDRTLYADSVKGRFTISRDNSKNTLFLQMNSLRAEDTAIYYCARLRGFYYGMDVWGQGTAVTVSSGGGGSGGGGSGGGGSDIVMTQSPLSLPVTPGEPASISCRSSQSLLHSNKYNYLDWYLQKPGQSPQLLIYLGSNRASGVPDRFSGSGSGTDFTLKISRVEAEDVGVYYCMQALQTLTFGCGTKVDIKSGGGGSEVQLVESGGGLVQPGGSLKLSCAASGFTFNKYAMNWVRQAPGKGLEWVARIRSKYNNYATYYADSVKDRFTISRDDSKNTAYLQMNNLKTEDTAVYYCVRHGNFGNSYISYWAYWGQGTLVTVSSGGGGSGGGGSGGGGSQTVVTQEPSLTVSPGGTVTLTCGSSTGAVTSGNYPNWVQQKPGQAPRGLIGGTKFLAPGTPARFSGSLLGGKAALTLSGVQPEDEAEYYCVLWYSNRWVFGGGTKLTVLGGGGDKTHTCPPCPAPELLGGPSVFLFPPKPKDTLMISRTPEVTCVVVDVSHEDPEVKFNWYVDGVEVHNAKTKPCEEQYGSTYRCVSVLTVLHQDWLNGKEYKCKVSNKALPAPIEKTISKAKGQPREPQVYTLPPSREEMTKNQVSLTCLVKGFYPSDIAVEWESNGQPENNYKTTPPVLDSDGSFFLYSKLTVDKSRWQQGNVFSCSVMHEALHNHYTQKSLSLSPGKGGGGSGGGGSGGGGSGGGGSGGGGSGGGGSDKTHTCPPCPAPELLGGPSVFLFPPKPKDTLMISRTPEVTCVVVDVSHEDPEVKFNWYVDGVEVHNAKTKPCEEQYGSTYRCVSVLTVLHQDWLNGKEYKCKVSNKALPAPIEKTISKAKGQPREPQVYTLPPSREEMTKNQVSLTCLVKGFYPSDIAVEWESNGQPENNYKTTPPVLDSDGSFFLYSKLTVDKSRWQQGNVFSCSVMHEALHNHYTQKSLSLSPGK

SEQ ID NO: 812 - protein, 498 aa, Artificial Sequence
  Synthetic
QVTLKESGPTLVKPTETLTLTCTLSGFSLNNARMGVSWIRQPPGKCLEWLAHIFSNDEKSYSTSLKNRLTISKDSSKTQVVLTMTNVDPVDTATYYCARIVGYGSGWYGFFDYWGQGTLVTVSSGGGGSGGGGSGGGGSDIQMTQSPSSLSASVGDRVTITCRASQGIRNDLGWYQQKPGKAPKRLIYAASTLQSGVPSRFSGSGSGTEFTLTISSLQPEDFATYYCLQHNSYPLTFGCGTKVEIKSGGGGSEVQLLESGGGLVQPGGSLRLSCAASGFTFSHYAMSWVRQAPGKCLEWVSAISGGGDATYYADAVKGRFTISRDNSKNTLYLQMSSLRAEDTAVYYCAKDRGYYYGMAVWGQGTTVTVSSGGGGSGGGGSGGGGSDIVMTQTPLSLPVTPGEPASISCRSSQSLLRSNKYNYLDWYLQKPGQSPQLLIYLGSNRASGVPDRFSGSGSGTDFTLKISRVEAEDVGVYYCMQALQTPLTFGCGTKVEIK

SEQ ID NO: 813 - protein, 753 aa, Artificial Sequence
  Synthetic
QVTLKESGPTLVKPTETLTLTCTLSGFSLNNARMGVSWIRQPPGKCLEWLAHIFSNDEKSYSTSLKNRLTISKDSSKTQVVLTMTNVDPVDTATYYCARIVGYGSGWYGFFDYWGQGTLVTVSSGGGGSGGGGSGGGGSDIQMTQSPSSLSASVGDRVTITCRASQGIRNDLGWYQQKPGKAPKRLIYAASTLQSGVPSRFSGSGSGTEFTLTISSLQPEDFATYYCLQHNSYPLTFGCGTKVEIKSGGGGSEVQLLESGGGLVQPGGSLRLSCAASGFTFSHYAMSWVRQAPGKCLEWVSAISGGGDATYYADAVKGRFTISRDNSKNTLYLQMSSLRAEDTAVYYCAKDRGYYYGMAVWGQGTTVTVSSGGGGSGGGGSGGGGSDIVMTQTPLSLPVTPGEPASISCRSSQSLLRSNKYNYLDWYLQKPGQSPQLLIYLGSNRASGVPDRFSGSGSGTDFTLKISRVEAEDVGVYYCMQALQTPLTFGCGTKVEIKSGGGGSEVQLVESGGGLVQPGGSLKLSCAASGFTFNKYAMNWVRQAPGKGLEWVARIRSKYNNYATYYADSVKDRFTISRDDSKNTAYLQMNNLKTEDTAVYYCVRHGNFGNSYISYWAYWGQGTLVTVSSGGGGSGGGGSGGGGSQTVVTQEPSLTVSPGGTVTLTCGSSTGAVTSGNYPNWVQQKPGQAPRGLIGGTKFLAPGTPARFSGSLLGGKAALTLSGVQPEDEAEYYCVLWYSNRWVFGGGTKLTVL

SEQ ID NO: 814 - protein, 1241 aa, Artificial Sequence
  Synthetic
QVTLKESGPTLVKPTETLTLTCTLSGFSLNNARMGVSWIRQPPGKCLEWLAHIFSNDEKSYSTSLKNRLTISKDSSKTQVVLTMTNVDPVDTATYYCARIVGYGSGWYGFFDYWGQGTLVTVSSGGGGSGGGGSGGGGSDIQMTQSPSSLSASVGDRVTITCRASQGIRNDLGWYQQKPGKAPKRLIYAASTLQSGVPSRFSGSGSGTEFTLTISSLQPEDFATYYCLQHNSYPLTFGCGTKVEIKSGGGGSEVQLLESGGGLVQPGGSLRLSCAASGFTFSHYAMSWVRQAPGKCLEWVSAISGGGDATYYADAVKGRFTISRDNSKNTLYLQMSSLRAEDTAVYYCAKDRGYYYGMAVWGQGTTVTVSSGGGGSGGGGSGGGGSDIVMTQTPLSLPVTPGEPASISCRSSQSLLRSNKYNYLDWYLQKPGQSPQLLIYLGSNRASGVPDRFSGSGSGTDFTLKISRVEAEDVGVYYCMQALQTPLTFGCGTKVEIKSGGGGSEVQLVESGGGLVQPGGSLKLSCAASGFTFNKYAMNWVRQAPGKGLEWVARIRSKYNNYATYYADSVKDRFTISRDDSKNTAYLQMNNLKTEDTAVYYCVRHGNFGNSYISYWAYWGQGTLVTVSSGGGGSGGGGSGGGGSQTVVTQEPSLTVSPGGTVTLTCGSSTGAVTSGNYPNWVQQKPGQAPRGLIGGTKFLAPGTPARFSGSLLGGKAALTLSGVQPEDEAEYYCVLWYSNRWVFGGGTKLTVLGGGGDKTHTCPPCPAPELLGGPSVFLFPPKPKDTLMISRTPEVTCVVVDVSHEDPEVKFNWYVDGVEVHNAKTKPCEEQYGSTYRCVSVLTVLHQDWLNGKEYKCKVSNKALPAPIEKTISKAKGQPREPQVYTLPPSREEMTKNQVSLTCLVKGFYPSDIAVEWESNGQPENNYKTTPPVLDSDGSFFLYSKLTVDKSRWQQGNVFSCSVMHEALHNHYTQKSLSLSPGKGGGGSGGGGSGGGGSGGGGSGGGGSGGGGSDKTHTCPPCPAPELLGGPSVFLFPPKPKDTLMISRTPEVTCVVVDVSHEDPEVKFNWYVDGVEVHNAKTKPCEEQYGSTYRCVSVLTVLHQDWLNGKEYKCKVSNKALPAPIEKTISKAKGQPREPQVYTLPPSREEMTKNQVSLTCLVKGFYPSDIAVEWESNGQPENNYKTTPPVLDSDGSFFLYSKLTVDKSRWQQGNVFSCSVMHEALHNHYTQKSLSLSPGK

SEQ ID NO: 815 - protein, 498 aa, Artificial Sequence
  Synthetic
QVTLKESGPTLVKPTETLTLTCTLSGFSLNNARMGVSWIRQPPGKCLEWLAHIFSNDEKSYSTSLKNRLTISKDSSKTQVVLTMTNVDPVDTATYYCARIVGYGSGWYGFFDYWGQGTLVTVSSGGGGSGGGGSGGGGSDIQMTQSPSSLSASVGDRVTITCRASQGIRNDLGWYQQKPGKAPKRLIYAASTLQSGVPSRFSGSGSGTEFTLTISSLQPEDFATYYCLQHNSYPLTFGCGTKVEIKSGGGGSEVQLLESGGGLVQPGGSLRLSCAASGFTFSHYAMSWVRQAPGKCLEWVSAISGGGDATYYADSVKGRFTISRDNSKNTLYLQMSSLRAEDTAVYYCAKDRGYYYGMAVWGQGTTVTVSSGGGGSGGGGSGGGGSDIVMTQTPLSLPVTPGEPASISCRSSQSLLRSNKYNYLDWYLQKPGQSPQLLIYLGSNRASGVPDRFSGSGSGTDFTLKISRVEAEDVGVYYCMQALQTPLTFGCGTKVEIK

SEQ ID NO: 816 - protein, 753 aa, Artificial Sequence
  Synthetic
QVTLKESGPTLVKPTETLTLTCTLSGFSLNNARMGVSWIRQPPGKCLEWLAHIFSNDEKSYSTSLKNRLTISKDSSKTQVVLTMTNVDPVDTATYYCARIVGYGSGWYGFFDYWGQGTLVTVSSGGGGSGGGGSGGGGSDIQMTQSPSSLSASVGDRVTITCRASQGIRNDLGWYQQKPGKAPKRLIYAASTLQSGVPSRFSGSGSGTEFTLTISSLQPEDFATYYCLQHNSYPLTFGCGTKVEIKSGGGGSEVQLLESGGGLVQPGGSLRLSCAASGFTFSHYAMSWVRQAPGKCLEWVSAISGGGDATYYADSVKGRFTISRDNSKNTLYLQMSSLRAEDTAVYYCAKDRGYYYGMAVWGQGTTVTVSSGGGGSGGGGSGGGGSDIVMTQTPLSLPVTPGEPASISCRSSQSLLRSNKYNYLDWYLQKPGQSPQLLIYLGSNRASGVPDRFSGSGSGTDFTLKISRVEAEDVGVYYCMQALQTPLTFGCGTKVEIKSGGGGSEVQLVESGGGLVQPGGSLKLSCAASGFTFNKYAMNWVRQAPGKGLEWVARIRSKYNNYATYYADSVKDRFTISRDDSKNTAYLQMNNLKTEDTAVYYCVRHGNFGNSYISYWAYWGQGTLVTVSSGGGGSGGGGSGGGGSQTVVTQEPSLTVSPGGTVTLTCGSSTGAVTSGNYPNWVQQKPGQAPRGLIGGTKFLAPGTPARFSGSLLGGKAALTLSGVQPEDEAEYYCVLWYSNRWVFGGGTKLTVL

SEQ ID NO: 817 - protein, 1241 aa, Artificial Sequence
  Synthetic
QVTLKESGPTLVKPTETLTLTCTLSGFSLNNARMGVSWIRQPPGKCLEWLAHIFSNDEKSYSTSLKNRLTISKDSSKTQVVLTMTNVDPVDTATYYCARIVGYGSGWYGFFDYWGQGTLVTVSSGGGGSGGGGSGGGGSDIQMTQSPSSLSASVGDRVTITCRASQGIRNDLGWYQQKPGKAPKRLIYAASTLQSGVPSRFSGSGSGTEFTLTISSLQPEDFATYYCLQHNSYPLTFGCGTKVEIKSGGGGSEVQLLESGGGLVQPGGSLRLSCAASGFTFSHYAMSWVRQAPGKCLEWVSAISGGGDATYYADSVKGRFTISRDNSKNTLYLQMSSLRAEDTAVYYCAKDRGYYYGMAVWGQGTTVTVSSGGGGSGGGGSGGGGSDIVMTQTPLSLPVTPGEPASISCRSSQSLLRSNKYNYLDWYLQKPGQSPQLLIYLGSNRASGVPDRFSGSGSGTDFTLKISRVEAEDVGVYYCMQALQTPLTFGCGTKVEIKSGGGGSEVQLVESGGGLVQPGGSLKLSCAASGFTFNKYAMNWVRQAPGKGLEWVARIRSKYNNYATYYADSVKDRFTISRDDSKNTAYLQMNNLKTEDTAVYYCVRHGNFGNSYISYWAYWGQGTLVTVSSGGGGSGGGGSGGGGSQTVVTQEPSLTVSPGGTVTLTCGSSTGAVTSGNYPNWVQQKPGQAPRGLIGGTKFLAPGTPARFSGSLLGGKAALTLSGVQPEDEAEYYCVLWYSNRWVFGGGTKLTVLGGGGDKTHTCPPCPAPELLGGPSVFLFPPKPKDTLMISRTPEVTCVVVDVSHEDPEVKFNWYVDGVEVHNAKTKPCEEQYGSTYRCVSVLTVLHQDWLNGKEYKCKVSNKALPAPIEKTISKAKGQPREPQVYTLPPSREEMTKNQVSLTCLVKGFYPSDIAVEWESNGQPENNYKTTPPVLDSDGSFFLYSKLTVDKSRWQQGNVFSCSVMHEALHNHYTQKSLSLSPGKGGGGSGGGGSGGGGSGGGGSGGGGSGGGGSDKTHTCPPCPAPELLGGPSVFLFPPKPKDTLMISRTPEVTCVVVDVSHEDPEVKFNWYVDGVEVHNAKTKPCEEQYGSTYRCVSVLTVLHQDWLNGKEYKCKVSNKALPAPIEKTISKAKGQPREPQVYTLPPSREEMTKNQVSLTCLVKGFYPSDIAVEWESNGQPENNYKTTPPVLDSDGSFFLYSKLTVDKSRWQQGNVFSCSVMHEALHNHYTQKSLSLSPGK

SEQ ID NO: 818 - protein, 499 aa, Artificial Sequence
  Synthetic
QVTLKESGPTLVKPTETLTLTCTLSGFSLNNARMGVSWIRQPPGKCLEWLAHIFSNDEKSYSTSLKNRLTISKDSSKTQVVLTMTNVDPVDTATYYCARIVGYGSGWYGFFDYWGQGTLVTVSSGGGGSGGGGSGGGGSDIQMTQSPSSLSASVGDRVTITCRASQGIRNDLGWYQQKPGKAPKRLIYAASTLQSGVPSRFSGSGSGTEFTLTISSLQPEDFATYYCLQHNSYPLTFGCGTKVEIKSGGGGSEVQLLESGGGLVQPGGSLRLSCAASGFTFSHYAMSWVRQAPGKCLEWVSAVSGGGDKTLYADSVKGRFTISRDNSKNTLFLQMNSLRAEDTAIYYCARLRGFYYGMDVWGQGTTVTVSSGGGGSGGGGSGGGGSDIVLTQSPLSLPVTPGEPASISCRSSQSLLHSNKYNYLDWYLQKPGQSPQLLIYLGSNRASGVPDRFSGSGSGTDFTLKISRVEAEDVGVYYCMQALQTPPITFGCGTRLEIK

SEQ ID NO: 819 - protein, 754 aa, Artificial Sequence
  Synthetic
QVTLKESGPTLVKPTETLTLTCTLSGFSLNNARMGVSWIRQPPGKCLEWLAHIFSNDEKSYSTSLKNRLTISKDSSKTQVVLTMTNVDPVDTATYYCARIVGYGSGWYGFFDYWGQGTLVTVSSGGGGSGGGGSGGGGSDIQMTQSPSSLSASVGDRVTITCRASQGIRNDLGWYQQKPGKAPKRLIYAASTLQSGVPSRFSGSGSGTEFTLTISSLQPEDFATYYCLQHNSYPLTFGCGTKVEIKSGGGGSEVQLLESGGGLVQPGGSLRLSCAASGFTFSHYAMSWVRQAPGKCLEWVSAVSGGGDKTLYADSVKGRFTISRDNSKNTLFLQMNSLRAEDTAIYYCARLRGFYYGMDVWGQGTTVTVSSGGGGSGGGGSGGGGSDIVLTQSPLSLPVTPGEPASISCRSSQSLLHSNKYNYLDWYLQKPGQSPQLLIYLGSNRASGVPDRFSGSGSGTDFTLKISRVEAEDVGVYYCMQALQTPPITFGCGTRLEIKSGGGGSEVQLVESGGGLVQPGGSLKLSCAASGFTFNKYAMNWVRQAPGKGLEWVARIRSKYNNYATYYADSVKDRFTISRDDSKNTAYLQMNNLKTEDTAVYYCVRHGNFGNSYISYWAYWGQGTLVTVSSGGGGSGGGGSGGGGSQTVVTQEPSLTVSPGGTVTLTCGSSTGAVTSGNYPNWVQQKPGQAPRGLIGGTKFLAPGTPARFSGSLLGGKAALTLSGVQPEDEAEYYCVLWYSNRWVFGGGTKLTVL

SEQ ID NO: 820 - protein, 1242 aa, Artificial Sequence
  Synthetic
QVTLKESGPTLVKPTETLTLTCTLSGFSLNNARMGVSWIRQPPGKCLEWLAHIFSNDEKSYSTSLKNRLTISKDSSKTQVVLTMTNVDPVDTATYYCARIVGYGSGWYGFFDYWGQGTLVTVSSGGGGSGGGGSGGGGSDIQMTQSPSSLSASVGDRVTITCRASQGIRNDLGWYQQKPGKAPKRLIYAASTLQSGVPSRFSGSGSGTEFTLTISSLQPEDFATYYCLQHNSYPLTFGCGTKVEIKSGGGGSEVQLLESGGGLVQPGGSLRLSCAASGFTFSHYAMSWVRQAPGKCLEWVSAVSGGGDKTLYADSVKGRFTISRDNSKNTLFLQMNSLRAEDTAIYYCARLRGFYYGMDVWGQGTTVTVSSGGGGSGGGGSGGGGSDIVLTQSPLSLPVTPGEPASISCRSSQSLLHSNKYNYLDWYLQKPGQSPQLLIYLGSNRASGVPDRFSGSGSGTDFTLKISRVEAEDVGVYYCMQALQTPPITFGCGTRLEIKSGGGGSEVQLVESGGGLVQPGGSLKLSCAASGFTFNKYAMNWVRQAPGKGLEWVARIRSKYNNYATYYADSVKDRFTISRDDSKNTAYLQMNNLKTEDTAVYYCVRHGNFGNSYISYWAYWGQGTLVTVSSGGGGSGGGGSGGGGSQTVVTQEPSLTVSPGGTVTLTCGSSTGAVTSGNYPNWVQQKPGQAPRGLIGGTKFLAPGTPARFSGSLLGGKAALTLSGVQPEDEAEYYCVLWYSNRWVFGGGTKLTVLGGGGDKTHTCPPCPAPELLGGPSVFLFPPKPKDTLMISRTPEVTCVVVDVSHEDPEVKFNWYVDGVEVHNAKTKPCEEQYGSTYRCVSVLTVLHQDWLNGKEYKCKVSNKALPAPIEKTISKAKGQPREPQVYTLPPSREEMTKNQVSLTCLVKGFYPSDIAVEWESNGQPENNYKTTPPVLDSDGSFFLYSKLTVDKSRWQQGNVFSCSVMHEALHNHYTQKSLSLSPGKGGGGSGGGGSGGGGSGGGGSGGGGSGGGGSDKTHTCPPCPAPELLGGPSVFLFPPKPKDTLMISRTPEVTCVVVDVSHEDPEVKFNWYVDGVEVHNAKTKPCEEQYGSTYRCVSVLTVLHQDWLNGKEYKCKVSNKALPAPIEKTISKAKGQPREPQVYTLPPSREEMTKNQVSLTCLVKGFYPSDIAVEWESNGQPENNYKTTPPVLDSDGSFFLYSKLTVDKSRWQQGNVFSCSVMHEALHNHYTQKSLSLSPGK

SEQ ID NO: 821 - protein, 496 aa, Artificial Sequence
  Synthetic
QVTLKESGPTLVKPTETLTLTCTLSGFSLNNARMGVSWIRQPPGKCLEWLAHIFSNDEKSYSTSLKNRLTISKDSSKTQVVLTMTNVDPVDTATYYCARIVGYGSGWYGFFDYWGQGTLVTVSSGGGGSGGGGSGGGGSDIQMTQSPSSLSASVGDRVTITCRASQGIRNDLGWYQQKPGKAPKRLIYAASTLQSGVPSRFSGSGSGTEFTLTISSLQPEDFATYYCLQHNSYPLTFGCGTKVEIKSGGGGSQVQLQESGPGLVKPSQTLSLTCTVSGGSISSGGYYWSWIRQHPGKCLEWIGYIYYSGNKYYNPSLKSRVTISVDTSKNQFSLKLSSVTAADTAVYYCARLQESVFDYWGQGTLVTVSSGGGGSGGGGSGGGGSQSALTQPPSASGSPGQSITISCTGTSSDVGGYNYVSWYQQHPGKAPKLMIYEVSNRPSGVSNRFSGSKSGNTASLTISGLQAEDEADYYCSSYTSSSTLVVFGCGTKLTVL

SEQ ID NO: 822 - protein, 751 aa, Artificial Sequence
  Synthetic
QVTLKESGPTLVKPTETLTLTCTLSGFSLNNARMGVSWIRQPPGKCLEWLAHIFSNDEKSYSTSLKNRLTISKDSSKTQVVLTMTNVDPVDTATYYCARIVGYGSGWYGFFDYWGQGTLVTVSSGGGGSGGGGSGGGGSDIQMTQSPSSLSASVGDRVTITCRASQGIRNDLGWYQQKPGKAPKRLIYAASTLQSGVPSRFSGSGSGTEFTLTISSLQPEDFATYYCLQHNSYPLTFGCGTKVEIKSGGGGSQVQLQESGPGLVKPSQTLSLTCTVSGGSISSGGYYWSWIRQHPGKCLEWIGYIYYSGNKYYNPSLKSRVTISVDTSKNQFSLKLSSVTAADTAVYYCARLQESVFDYWGQGTLVTVSSGGGGSGGGGSGGGGSQSALTQPPSASGSPGQSITISCTGTSSDVGGYNYVSWYQQHPGKAPKLMIYEVSNRPSGVSNRFSGSKSGNTASLTISGLQAEDEADYYCSSYTSSSTLVVFGCGTKLTVLSGGGGSEVQLVESGGGLVQPGGSLKLSCAASGFTFNKYAMNWVRQAPGKGLEWVARIRSKYNNYATYYADSVKDRFTISRDDSKNTAYLQMNNLKTEDTAVYYCVRHGNFGNSYISYWAYWGQGTLVTVSSGGGGSGGGGSGGGGSQTVVTQEPSLTVSPGGTVTLTCGSSTGAVTSGNYPNWVQQKPGQAPRGLIGGTKFLAPGTPARFSGSLLGGKAALTLSGVQPEDEAEYYCVLWYSNRWVFGGGTKLTVL

SEQ ID NO: 823 - protein, 1239 aa, Artificial Sequence
  Synthetic
QVTLKESGPTLVKPTETLTLTCTLSGFSLNNARMGVSWIRQPPGKCLEWLAHIFSNDEKSYSTSLKNRLTISKDSSKTQVVLTMTNVDPVDTATYYCARIVGYGSGWYGFFDYWGQGTLVTVSSGGGGSGGGGSGGGGSDIQMTQSPSSLSASVGDRVTITCRASQGIRNDLGWYQQKPGKAPKRLIYAASTLQSGVPSRFSGSGSGTEFTLTISSLQPEDFATYYCLQHNSYPLTFGCGTKVEIKSGGGGSQVQLQESGPGLVKPSQTLSLTCTVSGGSISSGGYYWSWIRQHPGKCLEWIGYIYYSGNKYYNPSLKSRVTISVDTSKNQFSLKLSSVTAADTAVYYCARLQESVFDYWGQGTLVTVSSGGGGSGGGGSGGGGSQSALTQPPSASGSPGQSITISCTGTSSDVGGYNYVSWYQQHPGKAPKLMIYEVSNRPSGVSNRFSGSKSGNTASLTISGLQAEDEADYYCSSYTSSSTLVVFGCGTKLTVLSGGGGSEVQLVESGGGLVQPGGSLKLSCAASGFTFNKYAMNWVRQAPGKGLEWVARIRSKYNNYATYYADSVKDRFTISRDDSKNTAYLQMNNLKTEDTAVYYCVRHGNFGNSYISYWAYWGQGTLVTVSSGGGGSGGGGSGGGGSQTVVTQEPSLTVSPGGTVTLTCGSSTGAVTSGNYPNWVQQKPGQAPRGLIGGTKFLAPGTPARFSGSLLGGKAALTLSGVQPEDEAEYYCVLWYSNRWVFGGGTKLTVLGGGGDKTHTCPPCPAPELLGGPSVFLFPPKPKDTLMISRTPEVTCVVVDVSHEDPEVKFNWYVDGVEVHNAKTKPCEEQYGSTYRCVSVLTVLHQDWLNGKEYKCKVSNKALPAPIEKTISKAKGQPREPQVYTLPPSREEMTKNQVSLTCLVKGFYPSDIAVEWESNGQPENNYKTTPPVLDSDGSFFLYSKLTVDKSRWQQGNVFSCSVMHEALHNHYTQKSLSLSPGKGGGGSGGGGSGGGGSGGGGSGGGGSGGGGSDKTHTCPPCPAPELLGGPSVFLFPPKPKDTLMISRTPEVTCVVVDVSHEDPEVKFNWYVDGVEVHNAKTKPCEEQYGSTYRCVSVLTVLHQDWLNGKEYKCKVSNKALPAPIEKTISKAKGQPREPQVYTLPPSREEMTKNQVSLTCLVKGFYPSDIAVEWESNGQPENNYKTTPPVLDSDGSFFLYSKLTVDKSRWQQGNVFSCSVMHEALHNHYTQKSLSLSPGK

SEQ ID NO: 824 - protein, 496 aa, Artificial Sequence
  Synthetic
QVTLKESGPTLVKPTETLTLTCTLSGFSLNNARMGVSWIRQPPGKCLEWLAHIFSNDEKSYSTSLKNRLTISKDSSKTQVVLTMTNVDPVDTATYYCARIVGYGSGWYGFFDYWGQGTLVTVSSGGGGSGGGGSGGGGSDIQMTQSPSSLSASVGDRVTITCRASQGIRNDLGWYQQKPGKAPKRLIYAASTLQSGVPSRFSGSGSGTEFTLTISSLQPEDFATYYCLQHNSYPLTFGCGTKVEIKSGGGGSQVQLQESGPGLVKPSQTLSLTCTVSGGSISSGGYYWSWIRQHPGKCLEWIGYIYYRGNKYYNPSLKSRVTISVDTSKNQFSLKLSSVTAADTAVYYCATLQESVFDYWGQGTLVTVSSGGGGSGGGGSGGGGSQSALTQPASVSGSPGQSITISCTGTSSDVGGYNYVSWYQQHPGKAPKLMIYEVSNRPSGVSNRFSGSKSGNTASLTISGLQAEDEADYYCSSYTSSSTLVVFGCGTKLTVL

SEQ ID NO: 825 - protein, 751 aa, Artificial Sequence
  Synthetic
QVTLKESGPTLVKPTETLTLTCTLSGFSLNNARMGVSWIRQPPGKCLEWLAHIFSNDEKSYSTSLKNRLTISKDSSKTQVVLTMTNVDPVDTATYYCARIVGYGSGWYGFFDYWGQGTLVTVSSGGGGSGGGGSGGGGSDIQMTQSPSSLSASVGDRVTITCRASQGIRNDLGWYQQKPGKAPKRLIYAASTLQSGVPSRFSGSGSGTEFTLTISSLQPEDFATYYCLQHNSYPLTFGCGTKVEIKSGGGGSQVQLQESGPGLVKPSQTLSLTCTVSGGSISSGGYYWSWIRQHPGKCLEWIGYIYYRGNKYYNPSLKSRVTISVDTSKNQFSLKLSSVTAADTAVYYCATLQESVFDYWGQGTLVTVSSGGGGSGGGGSGGGGSQSALTQPASVSGSPGQSITISCTGTSSDVGGYNYVSWYQQHPGKAPKLMIYEVSNRPSGVSNRFSGSKSGNTASLTISGLQAEDEADYYCSSYTSSSTLVVFGCGTKLTVLSGGGGSEVQLVESGGGLVQPGGSLKLSCAASGFTFNKYAMNWVRQAPGKGLEWVARIRSKYNNYATYYADSVKDRFTISRDDSKNTAYLQMNNLKTEDTAVYYCVRHGNFGNSYISYWAYWGQGTLVTVSSGGGGSGGGGSGGGGSQTVVTQEPSLTVSPGGTVTLTCGSSTGAVTSGNYPNWVQQKPGQAPRGLIGGTKFLAPGTPARFSGSLLGGKAALTLSGVQPEDEAEYYCVLWYSNRWVFGGGTKLTVL

SEQ ID NO: 826 - protein, 1239 aa, Artificial Sequence
  Synthetic
QVTLKESGPTLVKPTETLTLTCTLSGFSLNNARMGVSWIRQPPGKCLEWLAHIFSNDEKSYSTSLKNRLTISKDSSKTQVVLTMTNVDPVDTATYYCARIVGYGSGWYGFFDYWGQGTLVTVSSGGGGSGGGGSGGGGSDIQMTQSPSSLSASVGDRVTITCRASQGIRNDLGWYQQKPGKAPKRLIYAASTLQSGVPSRFSGSGSGTEFTLTISSLQPEDFATYYCLQHNSYPLTFGCGTKVEIKSGGGGSQVQLQESGPGLVKPSQTLSLTCTVSGGSISSGGYYWSWIRQHPGKCLEWIGYIYYRGNKYYNPSLKSRVTISVDTSKNQFSLKLSSVTAADTAVYYCATLQESVFDYWGQGTLVTVSSGGGGSGGGGSGGGGSQSALTQPASVSGSPGQSITISCTGTSSDVGGYNYVSWYQQHPGKAPKLMIYEVSNRPSGVSNRFSGSKSGNTASLTISGLQAEDEADYYCSSYTSSSTLVVFGCGTKLTVLSGGGGSEVQLVESGGGLVQPGGSLKLSCAASGFTFNKYAMNWVRQAPGKGLEWVARIRSKYNNYATYYADSVKDRFTISRDDSKNTAYLQMNNLKTEDTAVYYCVRHGNFGNSYISYWAYWGQGTLVTVSSGGGGSGGGGSGGGGSQTVVTQEPSLTVSPGGTVTLTCGSSTGAVTSGNYPNWVQQKPGQAPRGLIGGTKFLAPGTPARFSGSLLGGKAALTLSGVQPEDEAEYYCVLWYSNRWVFGGGTKLTVLGGGGDKTHTCPPCPAPELLGGPSVFLFPPKPKDTLMISRTPEVTCVVVDVSHEDPEVKFNWYVDGVEVHNAKTKPCEEQYGSTYRCVSVLTVLHQDWLNGKEYKCKVSNKALPAPIEKTISKAKGQPREPQVYTLPPSREEMTKNQVSLTCLVKGFYPSDIAVEWESNGQPENNYKTTPPVLDSDGSFFLYSKLTVDKSRWQQGNVFSCSVMHEALHNHYTQKSLSLSPGKGGGGSGGGGSGGGGSGGGGSGGGGSGGGGSDKTHTCPPCPAPELLGGPSVFLFPPKPKDTLMISRTPEVTCVVVDVSHEDPEVKFNWYVDGVEVHNAKTKPCEEQYGSTYRCVSVLTVLHQDWLNGKEYKCKVSNKALPAPIEKTISKAKGQPREPQVYTLPPSREEMTKNQVSLTCLVKGFYPSDIAVEWESNGQPENNYKTTPPVLDSDGSFFLYSKLTVDKSRWQQGNVFSCSVMHEALHNHYTQKSLSLSPGK

SEQ ID NO: 827 - protein, 495 aa, Artificial Sequence
  Synthetic
QVTLKESGPTLVKPTETLTLTCTLSGFSLNNARMGVSWIRQPPGKCLEWLAHIFSNDEKSYSTSLKNRLTISKDSSKTQVVLTMTNVDPVDTATYYCARIVGYGSGWYGFFDYWGQGTLVTVSSGGGGSGGGGSGGGGSDIQMTQSPSSLSASVGDRVTITCRASQGIRNDLGWYQQKPGKAPKRLIYAASTLQSGVPSRFSGSGSGTEFTLTISSLQPEDFATYYCLQHNSYPLTFGCGTKVEIKSGGGGSQVQLQESGPGLVKPSQTLSLTCTVSGGSISSGGYYWSWIRQHPGKCLEWIGYIYYRGNKYYNPSLKSRVTISVDTSKNQFSLKLSSVTAADTAVYYCATLQESVFDYWGQGTLVTVSSGGGGSGGGGSGGGGSQSALTQPASVSGSPGQSITISCTGTSSDVGGYNYVSWYQQHPGKAPKLMIYEVSNRPSGVSNRFSGSKSGNTASLTISGLQAEDEADYYCSSYTSSSTLVVGCGTKLTVL

SEQ ID NO: 828 - protein, 750 aa, Artificial Sequence
  Synthetic
QVTLKESGPTLVKPTETLTLTCTLSGFSLNNARMGVSWIRQPPGKCLEWLAHIFSNDEKSYSTSLKNRLTISKDSSKTQVVLTMTNVDPVDTATYYCARIVGYGSGWYGFFDYWGQGTLVTVSSGGGGSGGGGSGGGGSDIQMTQSPSSLSASVGDRVTITCRASQGIRNDLGWYQQKPGKAPKRLIYAASTLQSGVPSRFSGSGSGTEFTLTISSLQPEDFATYYCLQHNSYPLTFGCGTKVEIKSGGGGSQVQLQESGPGLVKPSQTLSLTCTVSGGSISSGGYYWSWIRQHPGKCLEWIGYIYYRGNKYYNPSLKSRVTISVDTSKNQFSLKLSSVTAADTAVYYCATLQESVFDYWGQGTLVTVSSGGGGSGGGGSGGGGSQSALTQPASVSGSPGQSITISCTGTSSDVGGYNYVSWYQQHPGKAPKLMIYEVSNRPSGVSNRFSGSKSGNTASLTISGLQAEDEADYYCSSYTSSSTLVVGCGTKLTVLSGGGGSEVQLVESGGGLVQPGGSLKLSCAASGFTFNKYAMNWVRQAPGKGLEWVARIRSKYNNYATYYADSVKDRFTISRDDSKNTAYLQMNNLKTEDTAVYYCVRHGNFGNSYISYWAYWGQGTLVTVSSGGGGSGGGGSGGGGSQTVVTQEPSLTVSPGGTVTLTCGSSTGAVTSGNYPNWVQQKPGQAPRGLIGGTKFLAPGTPARFSGSLLGGKAALTLSGVQPEDEAEYYCVLWYSNRWVFGGGTKLTVL

SEQ ID NO: 829 - protein, 1238 aa, Artificial Sequence
  Synthetic
QVTLKESGPTLVKPTETLTLTCTLSGFSLNNARMGVSWIRQPPGKCLEWLAHIFSNDEKSYSTSLKNRLTISKDSSKTQVVLTMTNVDPVDTATYYCARIVGYGSGWYGFFDYWGQGTLVTVSSGGGGSGGGGSGGGGSDIQMTQSPSSLSASVGDRVTITCRASQGIRNDLGWYQQKPGKAPKRLIYAASTLQSGVPSRFSGSGSGTEFTLTISSLQPEDFATYYCLQHNSYPLTFGCGTKVEIKSGGGGSQVQLQESGPGLVKPSQTLSLTCTVSGGSISSGGYYWSWIRQHPGKCLEWIGYIYYRGNKYYNPSLKSRVTISVDTSKNQFSLKLSSVTAADTAVYYCATLQESVFDYWGQGTLVTVSSGGGGSGGGGSGGGGSQSALTQPASVSGSPGQSITISCTGTSSDVGGYNYVSWYQQHPGKAPKLMIYEVSNRPSGVSNRFSGSKSGNTASLTISGLQAEDEADYYCSSYTSSSTLVVGCGTKLTVLSGGGGSEVQLVESGGGLVQPGGSLKLSCAASGFTFNKYAMNWVRQAPGKGLEWVARIRSKYNNYATYYADSVKDRFTISRDDSKNTAYLQMNNLKTEDTAVYYCVRHGNFGNSYISYWAYWGQGTLVTVSSGGGGSGGGGSGGGGSQTVVTQEPSLTVSPGGTVTLTCGSSTGAVTSGNYPNWVQQKPGQAPRGLIGGTKFLAPGTPARFSGSLLGGKAALTLSGVQPEDEAEYYCVLWYSNRWVFGGGTKLTVLGGGGDKTHTCPPCPAPELLGGPSVFLFPPKPKDTLMISRTPEVTCVVVDVSHEDPEVKFNWYVDGVEVHNAKTKPCEEQYGSTYRCVSVLTVLHQDWLNGKEYKCKVSNKALPAPIEKTISKAKGQPREPQVYTLPPSREEMTKNQVSLTCLVKGFYPSDIAVEWESNGQPENNYKTTPPVLDSDGSFFLYSKLTVDKSRWQQGNVFSCSVMHEALHNHYTQKSLSLSPGKGGGGSGGGGSGGGGSGGGGSGGGGSGGGGSDKTHTCPPCPAPELLGGPSVFLFPPKPKDTLMISRTPEVTCVVVDVSHEDPEVKFNWYVDGVEVHNAKTKPCEEQYGSTYRCVSVLTVLHQDWLNGKEYKCKVSNKALPAPIEKTISKAKGQPREPQVYTLPPSREEMTKNQVSLTCLVKGFYPSDIAVEWESNGQPENNYKTTPPVLDSDGSFFLYSKLTVDKSRWQQGNVFSCSVMHEALHNHYTQKSLSLSPGK

SEQ ID NO: 830 - protein, 498 aa, Artificial Sequence
  Synthetic
QVTLKESGPTLVKPTETLTLTCTLSGFSLNNARMGVSWIRQPPGKCLEWLAHIFSNDEKSYSTSLKNRLTISKDSSKTQVVLTMTNVDPVDTATYYCARIVGYGSGWYGFFDYWGQGTLVTVSSGGGGSGGGGSGGGGSDIQMTQSPSSLSASVGDRVTITCRASQGIRNDLGWYQQKPGKAPKRLIYAASTLQSGVPSRFSGSGSGTEFTLTISSLQPEDFATYYCLQHNSYPLTFGCGTKVEIKSGGGGSEVQLLESGGGLVQPGGSLRLSCAASGFTFSHYAMTWVRQAPGKCLEWVSAISGGGDATFYADAVKGRFTFSRDNSRNTLYLQMNSLRAEDTAVYYCVKDRGYYYGMDVWGQGTTVTVSSGGGGSGGGGSGGGGSDIVMTQTPLSLPVTPGEPASISCRSSQSLLRTNKYNYLDWYLQKPGQSPQLLIYLGSNRASGVPDRFSGSGSGTDFTLKISRVEAEDVGVYYCMQALQSPYTFGCGTKLEIK

SEQ ID NO: 831 - protein, 753 aa, Artificial Sequence
  Synthetic
QVTLKESGPTLVKPTETLTLTCTLSGFSLNNARMGVSWIRQPPGKCLEWLAHIFSNDEKSYSTSLKNRLTISKDSSKTQVVLTMTNVDPVDTATYYCARIVGYGSGWYGFFDYWGQGTLVTVSSGGGGSGGGGSGGGGSDIQMTQSPSSLSASVGDRVTITCRASQGIRNDLGWYQQKPGKAPKRLIYAASTLQSGVPSRFSGSGSGTEFTLTISSLQPEDFATYYCLQHNSYPLTFGCGTKVEIKSGGGGSEVQLLESGGGLVQPGGSLRLSCAASGFTFSHYAMTWVRQAPGKCLEWVSAISGGGDATFYADAVKGRFTFSRDNSRNTLYLQMNSLRAEDTAVYYCVKDRGYYYGMDVWGQGTTVTVSSGGGGSGGGGSGGGGSDIVMTQTPLSLPVTPGEPASISCRSSQSLLRTNKYNYLDWYLQKPGQSPQLLIYLGSNRASGVPDRFSGSGSGTDFTLKISRVEAEDVGVYYCMQALQSPYTFGCGTKLEIKSGGGGSEVQLVESGGGLVQPGGSLKLSCAASGFTFNKYAMNWVRQAPGKGLEWVARIRSKYNNYATYYADSVKDRFTISRDDSKNTAYLQMNNLKTEDTAVYYCVRHGNFGNSYISYWAYWGQGTLVTVSSGGGGSGGGGSGGGGSQTVVTQEPSLTVSPGGTVTLTCGSSTGAVTSGNYPNWVQQKPGQAPRGLIGGTKFLAPGTPARFSGSLLGGKAALTLSGVQPEDEAEYYCVLWYSNRWVFGGGTKLTVL

SEQ ID NO: 832 - protein, 1241 aa, Artificial Sequence
  Synthetic
QVTLKESGPTLVKPTETLTLTCTLSGFSLNNARMGVSWIRQPPGKCLEWLAHIFSNDEKSYSTSLKNRLTISKDSSKTQVVLTMTNVDPVDTATYYCARIVGYGSGWYGFFDYWGQGTLVTVSSGGGGSGGGGSGGGGSDIQMTQSPSSLSASVGDRVTITCRASQGIRNDLGWYQQKPGKAPKRLIYAASTLQSGVPSRFSGSGSGTEFTLTISSLQPEDFATYYCLQHNSYPLTFGCGTKVEIKSGGGGSEVQLLESGGGLVQPGGSLRLSCAASGFTFSHYAMTWVRQAPGKCLEWVSAISGGGDATFYADAVKGRFTFSRDNSRNTLYLQMNSLRAEDTAVYYCVKDRGYYYGMDVWGQGTTVTVSSGGGGSGGGGSGGGGSDIVMTQTPLSLPVTPGEPASISCRSSQSLLRTNKYNYLDWYLQKPGQSPQLLIYLGSNRASGVPDRFSGSGSGTDFTLKISRVEAEDVGVYYCMQALQSPYTFGCGTKLEIKSGGGGSEVQLVESGGGLVQPGGSLKLSCAASGFTFNKYAMNWVRQAPGKGLEWVARIRSKYNNYATYYADSVKDRFTISRDDSKNTAYLQMNNLKTEDTAVYYCVRHGNFGNSYISYWAYWGQGTLVTVSSGGGGSGGGGSGGGGSQTVVTQEPSLTVSPGGTVTLTCGSSTGAVTSGNYPNWVQQKPGQAPRGLIGGTKFLAPGTPARFSGSLLGGKAALTLSGVQPEDEAEYYCVLWYSNRWVFGGGTKLTVLGGGGDKTHTCPPCPAPELLGGPSVFLFPPKPKDTLMISRTPEVTCVVVDVSHEDPEVKFNWYVDGVEVHNAKTKPCEEQYGSTYRCVSVLTVLHQDWLNGKEYKCKVSNKALPAPIEKTISKAKGQPREPQVYTLPPSREEMTKNQVSLTCLVKGFYPSDIAVEWESNGQPENNYKTTPPVLDSDGSFFLYSKLTVDKSRWQQGNVFSCSVMHEALHNHYTQKSLSLSPGKGGGGSGGGGSGGGGSGGGGSGGGGSGGGGSDKTHTCPPCPAPELLGGPSVFLFPPKPKDTLMISRTPEVTCVVVDVSHEDPEVKFNWYVDGVEVHNAKTKPCEEQYGSTYRCVSVLTVLHQDWLNGKEYKCKVSNKALPAPIEKTISKAKGQPREPQVYTLPPSREEMTKNQVSLTCLVKGFYPSDIAVEWESNGQPENNYKTTPPVLDSDGSFFLYSKLTVDKSRWQQGNVFSCSVMHEALHNHYTQKSLSLSPGK

SEQ ID NO: 833 - protein, 498 aa, Artificial Sequence
  Synthetic
QVTLKESGPTLVKPTETLTLTCTLSGFSLNNARMGVSWIRQPPGKCLEWLAHIFSNDEKSYSTSLKNRLTISKDSSKTQVVLTMTNVDPVDTATYYCARIVGYGSGWYGFFDYWGQGTLVTVSSGGGGSGGGGSGGGGSDIQMTQSPSSLSASVGDRVTITCRASQGIRNDLGWYQQKPGKAPKRLIYAASTLQSGVPSRFSGSGSGTEFTLTISSLQPEDFATYYCLQHNSYPLTFGCGTKVEIKSGGGGSEVQLLESGGGLVQPGGSLRLSCAASGFTFSHYAMTWVRQAPGKCLEWVSAISGGGDTTFYADSVKGRFTFSRDNSRNTLYLQMNSLRAEDTAVYYCVKDRGYYYGMDVWGQGTTVTVSSGGGGSGGGGSGGGGSDIVMTQTPLSLPVTPGEPASISCRSSQSLLRTNKYNYLDWYLQKPGQSPQLLIYLGSNRASGVPDRFSGSGSGTDFTLKISRVEAEDVGVYYCMQALQSPYTFGCGTKLEIK

SEQ ID NO: 834 - protein, 753 aa, Artificial Sequence
  Synthetic
QVTLKESGPTLVKPTETLTLTCTLSGFSLNNARMGVSWIRQPPGKCLEWLAHIFSNDEKSYSTSLKNRLTISKDSSKTQVVLTMTNVDPVDTATYYCARIVGYGSGWYGFFDYWGQGTLVTVSSGGGGSGGGGSGGGGSDIQMTQSPSSLSASVGDRVTITCRASQGIRNDLGWYQQKPGKAPKRLIYAASTLQSGVPSRFSGSGSGTEFTLTISSLQPEDFATYYCLQHNSYPLTFGCGTKVEIKSGGGGSEVQLLESGGGLVQPGGSLRLSCAASGFTFSHYAMTWVRQAPGKCLEWVSAISGGGDTTFYADSVKGRFTFSRDNSRNTLYLQMNSLRAEDTAVYYCVKDRGYYYGMDVWGQGTTVTVSSGGGGSGGGGSGGGGSDIVMTQTPLSLPVTPGEPASISCRSSQSLLRTNKYNYLDWYLQKPGQSPQLLIYLGSNRASGVPDRFSGSGSGTDFTLKISRVEAEDVGVYYCMQALQSPYTFGCGTKLEIKSGGGGSEVQLVESGGGLVQPGGSLKLSCAASGFTFNKYAMNWVRQAPGKGLEWVARIRSKYNNYATYYADSVKDRFTISRDDSKNTAYLQMNNLKTEDTAVYYCVRHGNFGNSYISYWAYWGQGTLVTVSSGGGGSGGGGSGGGGSQTVVTQEPSLTVSPGGTVTLTCGSSTGAVTSGNYPNWVQQKPGQAPRGLIGGTKFLAPGTPARFSGSLLGGKAALTLSGVQPEDEAEYYCVLWYSNRWVFGGGTKLTVL

SEQ ID NO: 835 - protein, 1241 aa, Artificial Sequence
  Synthetic
QVTLKESGPTLVKPTETLTLTCTLSGFSLNNARMGVSWIRQPPGKCLEWLAHIFSNDEKSYSTSLKNRLTISKDSSKTQVVLTMTNVDPVDTATYYCARIVGYGSGWYGFFDYWGQGTLVTVSSGGGGSGGGGSGGGGSDIQMTQSPSSLSASVGDRVTITCRASQGIRNDLGWYQQKPGKAPKRLIYAASTLQSGVPSRFSGSGSGTEFTLTISSLQPEDFATYYCLQHNSYPLTFGCGTKVEIKSGGGGSEVQLLESGGGLVQPGGSLRLSCAASGFTFSHYAMTWVRQAPGKCLEWVSAISGGGDTTFYADSVKGRFTFSRDNSRNTLYLQMNSLRAEDTAVYYCVKDRGYYYGMDVWGQGTTVTVSSGGGGSGGGGSGGGGSDIVMTQTPLSLPVTPGEPASISCRSSQSLLRTNKYNYLDWYLQKPGQSPQLLIYLGSNRASGVPDRFSGSGSGTDFTLKISRVEAEDVGVYYCMQALQSPYTFGCGTKLEIKSGGGGSEVQLVESGGGLVQPGGSLKLSCAASGFTFNKYAMNWVRQAPGKGLEWVARIRSKYNNYATYYADSVKDRFTISRDDSKNTAYLQMNNLKTEDTAVYYCVRHGNFGNSYISYWAYWGQGTLVTVSSGGGGSGGGGSGGGGSQTVVTQEPSLTVSPGGTVTLTCGSSTGAVTSGNYPNWVQQKPGQAPRGLIGGTKFLAPGTPARFSGSLLGGKAALTLSGVQPEDEAEYYCVLWYSNRWVFGGGTKLTVLGGGGDKTHTCPPCPAPELLGGPSVFLFPPKPKDTLMISRTPEVTCVVVDVSHEDPEVKFNWYVDGVEVHNAKTKPCEEQYGSTYRCVSVLTVLHQDWLNGKEYKCKVSNKALPAPIEKTISKAKGQPREPQVYTLPPSREEMTKNQVSLTCLVKGFYPSDIAVEWESNGQPENNYKTTPPVLDSDGSFFLYSKLTVDKSRWQQGNVFSCSVMHEALHNHYTQKSLSLSPGKGGGGSGGGGSGGGGSGGGGSGGGGSGGGGSDKTHTCPPCPAPELLGGPSVFLFPPKPKDTLMISRTPEVTCVVVDVSHEDPEVKFNWYVDGVEVHNAKTKPCEEQYGSTYRCVSVLTVLHQDWLNGKEYKCKVSNKALPAPIEKTISKAKGQPREPQVYTLPPSREEMTKNQVSLTCLVKGFYPSDIAVEWESNGQPENNYKTTPPVLDSDGSFFLYSKLTVDKSRWQQGNVFSCSVMHEALHNHYTQKSLSLSPGK

SEQ ID NO: 836 - protein, 501 aa, Artificial Sequence
  Synthetic
QVQLQESGPGLVKPSETLSLTCTVSGGSVSGGGYYWSWIRQPPGKCLEWIGYIYYSGSTNYNPSLKSRVTMSVGPSKNQFSLKLRSVTAADTAVYYCARDQGSSSDAFDIWGQGTMVTVSSGGGGSGGGGSGGGGSDIVMTQSPDSLAVSLGERATINCKSSQSVLYSSNNKNYLAWYQQKPGQPPKLLIYWASTRESGVPDRFSGSGSGTDFTLTISSLQAEDVAVYYCQQYYSTPFTFGCGTKVDIKSGGGGSQVTLKESGPTLVKPTETLTLTCTLSGFSLNNARMGVSWIRQPPGKCLEWLAHIFSNDEKSYSTSLKNRLTISKDSSKTQVVLTMTNVDPVDTATYYCARIVGYGSGWYGFFDYWGQGTLVTVSSGGGGSGGGGSGGGGSDIQMTQSPSSLSASVGDRVTITCRASQGIRNDLGWYQQKPGKAPKRLIYAASTLQSGVPSRFSGSGSGTEFTLTISSLQPEDFATYYCLQHNSYPLTFGCGTKVEIK

SEQ ID NO: 837 - protein, 756 aa, Artificial Sequence
  Synthetic
QVQLQESGPGLVKPSETLSLTCTVSGGSVSGGGYYWSWIRQPPGKCLEWIGYIYYSGSTNYNPSLKSRVTMSVGPSKNQFSLKLRSVTAADTAVYYCARDQGSSSDAFDIWGQGTMVTVSSGGGGSGGGGSGGGGSDIVMTQSPDSLAVSLGERATINCKSSQSVLYSSNNKNYLAWYQQKPGQPPKLLIYWASTRESGVPDRFSGSGSGTDFTLTISSLQAEDVAVYYCQQYYSTPFTFGCGTKVDIKSGGGGSQVTLKESGPTLVKPTETLTLTCTLSGFSLNNARMGVSWIRQPPGKCLEWLAHIFSNDEKSYSTSLKNRLTISKDSSKTQVVLTMTNVDPVDTATYYCARIVGYGSGWYGFFDYWGQGTLVTVSSGGGGSGGGGSGGGGSDIQMTQSPSSLSASVGDRVTITCRASQGIRNDLGWYQQKPGKAPKRLIYAASTLQSGVPSRFSGSGSGTEFTLTISSLQPEDFATYYCLQHNSYPLTFGCGTKVEIKSGGGGSEVQLVESGGGLVQPGGSLKLSCAASGFTFNKYAMNWVRQAPGKGLEWVARIRSKYNNYATYYADSVKDRFTISRDDSKNTAYLQMNNLKTEDTAVYYCVRHGNFGNSYISYWAYWGQGTLVTVSSGGGGSGGGGSGGGGSQTVVTQEPSLTVSPGGTVTLTCGSSTGAVTSGNYPNWVQQKPGQAPRGLIGGTKFLAPGTPARFSGSLLGGKAALTLSGVQPEDEAEYYCVLWYSNRWVFGGGTKLTVL

SEQ ID NO: 838 - protein, 1244 aa, Artificial Sequence
  Synthetic
QVQLQESGPGLVKPSETLSLTCTVSGGSVSGGGYYWSWIRQPPGKCLEWIGYIYYSGSTNYNPSLKSRVTMSVGPSKNQFSLKLRSVTAADTAVYYCARDQGSSSDAFDIWGQGTMVTVSSGGGGSGGGGSGGGGSDIVMTQSPDSLAVSLGERATINCKSSQSVLYSSNNKNYLAWYQQKPGQPPKLLIYWASTRESGVPDRFSGSGSGTDFTLTISSLQAEDVAVYYCQQYYSTPFTFGCGTKVDIKSGGGGSQVTLKESGPTLVKPTETLTLTCTLSGFSLNNARMGVSWIRQPPGKCLEWLAHIFSNDEKSYSTSLKNRLTISKDSSKTQVVLTMTNVDPVDTATYYCARIVGYGSGWYGFFDYWGQGTLVTVSSGGGGSGGGGSGGGGSDIQMTQSPSSLSASVGDRVTITCRASQGIRNDLGWYQQKPGKAPKRLIYAASTLQSGVPSRFSGSGSGTEFTLTISSLQPEDFATYYCLQHNSYPLTFGCGTKVEIKSGGGGSEVQLVESGGGLVQPGGSLKLSCAASGFTFNKYAMNWVRQAPGKGLEWVARIRSKYNNYATYYADSVKDRFTISRDDSKNTAYLQMNNLKTEDTAVYYCVRHGNFGNSYISYWAYWGQGTLVTVSSGGGGSGGGGSGGGGSQTVVTQEPSLTVSPGGTVTLTCGSSTGAVTSGNYPNWVQQKPGQAPRGLIGGTKFLAPGTPARFSGSLLGGKAALTLSGVQPEDEAEYYCVLWYSNRWVFGGGTKLTVLGGGGDKTHTCPPCPAPELLGGPSVFLFPPKPKDTLMISRTPEVTCVVVDVSHEDPEVKFNWYVDGVEVHNAKTKPCEEQYGSTYRCVSVLTVLHQDWLNGKEYKCKVSNKALPAPIEKTISKAKGQPREPQVYTLPPSREEMTKNQVSLTCLVKGFYPSDIAVEWESNGQPENNYKTTPPVLDSDGSFFLYSKLTVDKSRWQQGNVFSCSVMHEALHNHYTQKSLSLSPGKGGGGSGGGGSGGGGSGGGGSGGGGSGGGGSDKTHTCPPCPAPELLGGPSVFLFPPKPKDTLMISRTPEVTCVVVDVSHEDPEVKFNWYVDGVEVHNAKTKPCEEQYGSTYRCVSVLTVLHQDWLNGKEYKCKVSNKALPAPIEKTISKAKGQPREPQVYTLPPSREEMTKNQVSLTCLVKGFYPSDIAVEWESNGQPENNYKTTPPVLDSDGSFFLYSKLTVDKSRWQQGNVFSCSVMHEALHNHYTQKSLSLSPGK

SEQ ID NO: 839 - protein, 501 aa, Artificial Sequence
  Synthetic
QVQLQESGPGLVKPSETLSLTCTVSGGSVSGGGYYWSWIRQPPGKCLEWIGYIYYSGSTNYNPSLKSRVTMSVGPSKNQFSLKLRSVTAADTAVYYCARDQGSSSDAFDIWGQGTMVTVSSGGGGSGGGGSGGGGSDIVMTQSPDSLAVSLGERATINCKSSQSVLYSSNNKNYLAWYQQKPGQPPKLLIYWASTRESGVPDRFSGSGSGTDFTLTISSLQAEDVAVYYCQQYYSTPFTFGCGTKVDIKSGGGGSQVTLKESGPALVKPTETLTLTCTVSGFSFRNARMGVSWIRQPPGKALEWLAHIFSNDEKSYSTSLKSRLTISKDTSKSQVVLTLTNMDPVDTATYFCARMPEYSSGWSGAFDIWGQGTMVTVSSGGGGSGGGGSGGGGSDIQMTQSPSSLSASVGDRVTITCRASQDIGYDLGWYQQKPGKAPKRLIYAASTLQSGVPSRFSGSGSGTEFTLIISSLQPEDFATYYCLQHNSFPWTFGQGTKVEIK

SEQ ID NO: 840 - protein, 756 aa, Artificial Sequence
  Synthetic
QVQLQESGPGLVKPSETLSLTCTVSGGSVSGGGYYWSWIRQPPGKCLEWIGYIYYSGSTNYNPSLKSRVTMSVGPSKNQFSLKLRSVTAADTAVYYCARDQGSSSDAFDIWGQGTMVTVSSGGGGSGGGGSGGGGSDIVMTQSPDSLAVSLGERATINCKSSQSVLYSSNNKNYLAWYQQKPGQPPKLLIYWASTRESGVPDRFSGSGSGTDFTLTISSLQAEDVAVYYCQQYYSTPFTFGCGTKVDIKSGGGGSQVTLKESGPALVKPTETLTLTCTVSGFSFRNARMGVSWIRQPPGKALEWLAHIFSNDEKSYSTSLKSRLTISKDTSKSQVVLTLTNMDPVDTATYFCARMPEYSSGWSGAFDIWGQGTMVTVSSGGGGSGGGGSGGGGSDIQMTQSPSSLSASVGDRVTITCRASQDIGYDLGWYQQKPGKAPKRLIYAASTLQSGVPSRFSGSGSGTEFTLIISSLQPEDFATYYCLQHNSFPWTFGQGTKVEIKSGGGGSEVQLVESGGGLVQPGGSLKLSCAASGFTFNKYAMNWVRQAPGKGLEWVARIRSKYNNYATYYADSVKDRFTISRDDSKNTAYLQMNNLKTEDTAVYYCVRHGNFGNSYISYWAYWGQGTLVTVSSGGGGSGGGGSGGGGSQTVVTQEPSLTVSPGGTVTLTCGSSTGAVTSGNYPNWVQQKPGQAPRGLIGGTKFLAPGTPARFSGSLLGGKAALTLSGVQPEDEAEYYCVLWYSNRWVFGGGTKLTVL

SEQ ID NO: 841 - protein, 1244 aa, Artificial Sequence
  Synthetic
QVQLQESGPGLVKPSETLSLTCTVSGGSVSGGGYYWSWIRQPPGKCLEWIGYIYYSGSTNYNPSLKSRVTMSVGPSKNQFSLKLRSVTAADTAVYYCARDQGSSSDAFDIWGQGTMVTVSSGGGGSGGGGSGGGGSDIVMTQSPDSLAVSLGERATINCKSSQSVLYSSNNKNYLAWYQQKPGQPPKLLIYWASTRESGVPDRFSGSGSGTDFTLTISSLQAEDVAVYYCQQYYSTPFTFGCGTKVDIKSGGGGSQVTLKESGPALVKPTETLTLTCTVSGFSFRNARMGVSWIRQPPGKALEWLAHIFSNDEKSYSTSLKSRLTISKDTSKSQVVLTLTNMDPVDTATYFCARMPEYSSGWSGAFDIWGQGTMVTVSSGGGGSGGGGSGGGGSDIQMTQSPSSLSASVGDRVTITCRASQDIGYDLGWYQQKPGKAPKRLIYAASTLQSGVPSRFSGSGSGTEFTLIISSLQPEDFATYYCLQHNSFPWTFGQGTKVEIKSGGGGSEVQLVESGGGLVQPGGSLKLSCAASGFTFNKYAMNWVRQAPGKGLEWVARIRSKYNNYATYYADSVKDRFTISRDDSKNTAYLQMNNLKTEDTAVYYCVRHGNFGNSYISYWAYWGQGTLVTVSSGGGGSGGGGSGGGGSQTVVTQEPSLTVSPGGTVTLTCGSSTGAVTSGNYPNWVQQKPGQAPRGLIGGTKFLAPGTPARFSGSLLGGKAALTLSGVQPEDEAEYYCVLWYSNRWVFGGGTKLTVLGGGGDKTHTCPPCPAPELLGGPSVFLFPPKPKDTLMISRTPEVTCVVVDVSHEDPEVKFNWYVDGVEVHNAKTKPCEEQYGSTYRCVSVLTVLHQDWLNGKEYKCKVSNKALPAPIEKTISKAKGQPREPQVYTLPPSREEMTKNQVSLTCLVKGFYPSDIAVEWESNGQPENNYKTTPPVLDSDGSFFLYSKLTVDKSRWQQGNVFSCSVMHEALHNHYTQKSLSLSPGKGGGGSGGGGSGGGGSGGGGSGGGGSGGGGSDKTHTCPPCPAPELLGGPSVFLFPPKPKDTLMISRTPEVTCVVVDVSHEDPEVKFNWYVDGVEVHNAKTKPCEEQYGSTYRCVSVLTVLHQDWLNGKEYKCKVSNKALPAPIEKTISKAKGQPREPQVYTLPPSREEMTKNQVSLTCLVKGFYPSDIAVEWESNGQPENNYKTTPPVLDSDGSFFLYSKLTVDKSRWQQGNVFSCSVMHEALHNHYTQKSLSLSPGK

SEQ ID NO: 842 - protein, 501 aa, Artificial Sequence
  Synthetic
QVQLQESGPGLVKPSETLSLTCTVSGGSVSGGGYYWSWIRQPPGKCLEWIGYIYYSGSTNYNPSLKSRVTMSVGPSKNQFSLKLRSVTAADTAVYYCARDQGSSSDAFDIWGQGTMVTVSSGGGGSGGGGSGGGGSDIVMTQSPDSLAVSLGERATINCKSSQSVLYSSNNKNYLAWYQQKPGQPPKLLIYWASTRESGVPDRFSGSGSGTDFTLTISSLQAEDVAVYYCQQYYSTPFTFGCGTKVDIKSGGGGSQVTLKESGPALVKPTETLTLTCTLSGFSLNNARMAVSWIRQPPGKCLEWLAHIFSNDEKSYSTSLKSRLTISKDTSKSQVVLTMTNMDPEDTATYYCARIVGYGTGWYGFFDYWGQGILVTVSSGGGGSGGGGSGGGGSDIQMTQSPSSLSASVGDRVTITCRASQGIRNDLAWYQQKPGKAPKRLIYAASSLQSGVPSRFSGSGSGTEFTLTISSLQPEDFATYYCLQHNSYPLTFGCGTKVEIK

SEQ ID NO: 843 - protein, 756 aa, Artificial Sequence
  Synthetic
QVQLQESGPGLVKPSETLSLTCTVSGGSVSGGGYYWSWIRQPPGKCLEWIGYIYYSGSTNYNPSLKSRVTMSVGPSKNQFSLKLRSVTAADTAVYYCARDQGSSSDAFDIWGQGTMVTVSSGGGGSGGGGSGGGGSDIVMTQSPDSLAVSLGERATINCKSSQSVLYSSNNKNYLAWYQQKPGQPPKLLIYWASTRESGVPDRFSGSGSGTDFTLTISSLQAEDVAVYYCQQYYSTPFTFGCGTKVDIKSGGGGSQVTLKESGPALVKPTETLTLTCTLSGFSLNNARMAVSWIRQPPGKCLEWLAHIFSNDEKSYSTSLKSRLTISKDTSKSQVVLTMTNMDPEDTATYYCARIVGYGTGWYGFFDYWGQGILVTVSSGGGGSGGGGSGGGGSDIQMTQSPSSLSASVGDRVTITCRASQGIRNDLAWYQQKPGKAPKRLIYAASSLQSGVPSRFSGSGSGTEFTLTISSLQPEDFATYYCLQHNSYPLTFGCGTKVEIKSGGGGSEVQLVESGGGLVQPGGSLKLSCAASGFTFNKYAMNWVRQAPGKGLEWVARIRSKYNNYATYYADSVKDRFTISRDDSKNTAYLQMNNLKTEDTAVYYCVRHGNFGNSYISYWAYWGQGTLVTVSSGGGGSGGGGSGGGGSQTVVTQEPSLTVSPGGTVTLTCGSSTGAVTSGNYPNWVQQKPGQAPRGLIGGTKFLAPGTPARFSGSLLGGKAALTLSGVQPEDEAEYYCVLWYSNRWVFGGGTKLTVL

SEQ ID NO: 844 - protein, 1244 aa, Artificial Sequence
  Synthetic
QVQLQESGPGLVKPSETLSLTCTVSGGSVSGGGYYWSWIRQPPGKCLEWIGYIYYSGSTNYNPSLKSRVTMSVGPSKNQFSLKLRSVTAADTAVYYCARDQGSSSDAFDIWGQGTMVTVSSGGGGSGGGGSGGGGSDIVMTQSPDSLAVSLGERATINCKSSQSVLYSSNNKNYLAWYQQKPGQPPKLLIYWASTRESGVPDRFSGSGSGTDFTLTISSLQAEDVAVYYCQQYYSTPFTFGCGTKVDIKSGGGGSQVTLKESGPALVKPTETLTLTCTLSGFSLNNARMAVSWIRQPPGKCLEWLAHIFSNDEKSYSTSLKSRLTISKDTSKSQVVLTMTNMDPEDTATYYCARIVGYGTGWYGFFDYWGQGILVTVSSGGGGSGGGGSGGGGSDIQMTQSPSSLSASVGDRVTITCRASQGIRNDLAWYQQKPGKAPKRLIYAASSLQSGVPSRFSGSGSGTEFTLTISSLQPEDFATYYCLQHNSYPLTFGCGTKVEIKSGGGGSEVQLVESGGGLVQPGGSLKLSCAASGFTFNKYAMNWVRQAPGKGLEWVARIRSKYNNYATYYADSVKDRFTISRDDSKNTAYLQMNNLKTEDTAVYYCVRHGNFGNSYISYWAYWGQGTLVTVSSGGGGSGGGGSGGGGSQTVVTQEPSLTVSPGGTVTLTCGSSTGAVTSGNYPNWVQQKPGQAPRGLIGGTKFLAPGTPARFSGSLLGGKAALTLSGVQPEDEAEYYCVLWYSNRWVFGGGTKLTVLGGGGDKTHTCPPCPAPELLGGPSVFLFPPKPKDTLMISRTPEVTCVVVDVSHEDPEVKFNWYVDGVEVHNAKTKPCEEQYGSTYRCVSVLTVLHQDWLNGKEYKCKVSNKALPAPIEKTISKAKGQPREPQVYTLPPSREEMTKNQVSLTCLVKGFYPSDIAVEWESNGQPENNYKTTPPVLDSDGSFFLYSKLTVDKSRWQQGNVFSCSVMHEALHNHYTQKSLSLSPGKGGGGSGGGGSGGGGSGGGGSGGGGSGGGGSDKTHTCPPCPAPELLGGPSVFLFPPKPKDTLMISRTPEVTCVVVDVSHEDPEVKFNWYVDGVEVHNAKTKPCEEQYGSTYRCVSVLTVLHQDWLNGKEYKCKVSNKALPAPIEKTISKAKGQPREPQVYTLPPSREEMTKNQVSLTCLVKGFYPSDIAVEWESNGQPENNYKTTPPVLDSDGSFFLYSKLTVDKSRWQQGNVFSCSVMHEALHNHYTQKSLSLSPGK

SEQ ID NO: 845 - protein, 498 aa, Artificial Sequence
  Synthetic
EVQLLESGGGLVQPGGSLRLSCAASGFTFSHYAMSWVRQAPGKCLEWVSAISGGGDRTFYADAVKGRFTVSRDNSKNTLYLQMNSLRAEDTAVYYCAKLRGFYYGMDVWGQGTTVTVSSGGGGSGGGGSGGGGSDIVMTQSPLSLPVTPGEPASISCRSSQSLLHSNKYNYLDWYLQQPGQSPQLLIYLGSNRASGVPDRFSASGSGTDFTLKISRVEAEDVGVYYCMQGTHWPHTFGCGTKVDIKSGGGGSQVTLKESGPTLVKPTETLTLTCTLSGFSLNNARMGVSWIRQPPGKCLEWLAHIFSNDEKSYSTSLKNRLTISKDSSKTQVVLTMTNVDPVDTATYYCARIVGYGSGWYGFFDYWGQGTLVTVSSGGGGSGGGGSGGGGSDIQMTQSPSSLSASVGDRVTITCRASQGIRNDLGWYQQKPGKAPKRLIYAASTLQSGVPSRFSGSGSGTEFTLTISSLQPEDFATYYCLQHNSYPLTFGCGTKVEIK

SEQ ID NO: 846 - protein, 753 aa, Artificial Sequence
  Synthetic
EVQLLESGGGLVQPGGSLRLSCAASGFTFSHYAMSWVRQAPGKCLEWVSAISGGGDRTFYADAVKGRFTVSRDNSKNTLYLQMNSLRAEDTAVYYCAKLRGFYYGMDVWGQGTTVTVSSGGGGSGGGGSGGGGSDIVMTQSPLSLPVTPGEPASISCRSSQSLLHSNKYNYLDWYLQQPGQSPQLLIYLGSNRASGVPDRFSASGSGTDFTLKISRVEAEDVGVYYCMQGTHWPHTFGCGTKVDIKSGGGGSQVTLKESGPTLVKPTETLTLTCTLSGFSLNNARMGVSWIRQPPGKCLEWLAHIFSNDEKSYSTSLKNRLTISKDSSKTQVVLTMTNVDPVDTATYYCARIVGYGSGWYGFFDYWGQGTLVTVSSGGGGSGGGGSGGGGSDIQMTQSPSSLSASVGDRVTITCRASQGIRNDLGWYQQKPGKAPKRLIYAASTLQSGVPSRFSGSGSGTEFTLTISSLQPEDFATYYCLQHNSYPLTFGCGTKVEIKSGGGGSEVQLVESGGGLVQPGGSLKLSCAASGFTFNKYAMNWVRQAPGKGLEWVARIRSKYNNYATYYADSVKDRFTISRDDSKNTAYLQMNNLKTEDTAVYYCVRHGNFGNSYISYWAYWGQGTLVTVSSGGGGSGGGGSGGGGSQTVVTQEPSLTVSPGGTVTLTCGSSTGAVTSGNYPNWVQQKPGQAPRGLIGGTKFLAPGTPARFSGSLLGGKAALTLSGVQPEDEAEYYCVLWYSNRWVFGGGTKLTVL

SEQ ID NO: 847 - protein, 1241 aa, Artificial Sequence
  Synthetic
EVQLLESGGGLVQPGGSLRLSCAASGFTFSHYAMSWVRQAPGKCLEWVSAISGGGDRTFYADAVKGRFTVSRDNSKNTLYLQMNSLRAEDTAVYYCAKLRGFYYGMDVWGQGTTVTVSSGGGGSGGGGSGGGGSDIVMTQSPLSLPVTPGEPASISCRSSQSLLHSNKYNYLDWYLQQPGQSPQLLIYLGSNRASGVPDRFSASGSGTDFTLKISRVEAEDVGVYYCMQGTHWPHTFGCGTKVDIKSGGGGSQVTLKESGPTLVKPTETLTLTCTLSGFSLNNARMGVSWIRQPPGKCLEWLAHIFSNDEKSYSTSLKNRLTISKDSSKTQVVLTMTNVDPVDTATYYCARIVGYGSGWYGFFDYWGQGTLVTVSSGGGGSGGGGSGGGGSDIQMTQSPSSLSASVGDRVTITCRASQGIRNDLGWYQQKPGKAPKRLIYAASTLQSGVPSRFSGSGSGTEFTLTISSLQPEDFATYYCLQHNSYPLTFGCGTKVEIKSGGGGSEVQLVESGGGLVQPGGSLKLSCAASGFTFNKYAMNWVRQAPGKGLEWVARIRSKYNNYATYYADSVKDRFTISRDDSKNTAYLQMNNLKTEDTAVYYCVRHGNFGNSYISYWAYWGQGTLVTVSSGGGGSGGGGSGGGGSQTVVTQEPSLTVSPGGTVTLTCGSSTGAVTSGNYPNWVQQKPGQAPRGLIGGTKFLAPGTPARFSGSLLGGKAALTLSGVQPEDEAEYYCVLWYSNRWVFGGGTKLTVLGGGGDKTHTCPPCPAPELLGGPSVFLFPPKPKDTLMISRTPEVTCVVVDVSHEDPEVKFNWYVDGVEVHNAKTKPCEEQYGSTYRCVSVLTVLHQDWLNGKEYKCKVSNKALPAPIEKTISKAKGQPREPQVYTLPPSREEMTKNQVSLTCLVKGFYPSDIAVEWESNGQPENNYKTTPPVLDSDGSFFLYSKLTVDKSRWQQGNVFSCSVMHEALHNHYTQKSLSLSPGKGGGGSGGGGSGGGGSGGGGSGGGGSGGGGSDKTHTCPPCPAPELLGGPSVFLFPPKPKDTLMISRTPEVTCVVVDVSHEDPEVKFNWYVDGVEVHNAKTKPCEEQYGSTYRCVSVLTVLHQDWLNGKEYKCKVSNKALPAPIEKTISKAKGQPREPQVYTLPPSREEMTKNQVSLTCLVKGFYPSDIAVEWESNGQPENNYKTTPPVLDSDGSFFLYSKLTVDKSRWQQGNVFSCSVMHEALHNHYTQKSLSLSPGK

SEQ ID NO: 848 - protein, 498 aa, Artificial Sequence
  Synthetic
EVQLLESGGGLVQPGGSLRLSCAASGFTFSHYAMSWVRQAPGKCLEWVSAISGGGDRTFYADAVKGRFTVSRDNSKNTLYLQMNSLRAEDTAVYYCAKLRGFYYGMDVWGQGTTVTVSSGGGGSGGGGSGGGGSDIVMTQSPLSLPVTPGEPASISCRSSQSLLHSNKYNYLDWYLQQPGQSPQLLIYLGSNRASGVPDRFSASGSGTDFTLKISRVEAEDVGVYYCMQGTHWPHTFGCGTKVDIKSGGGGSQVTLKESGPALVKPTETLTLTCTVSGFSFRNARMGVSWIRQPPGKALEWLAHIFSNDEKSYSTSLKSRLTISKDTSKSQVVLTLTNMDPVDTATYFCARMPEYSSGWSGAFDIWGQGTMVTVSSGGGGSGGGGSGGGGSDIQMTQSPSSLSASVGDRVTITCRASQDIGYDLGWYQQKPGKAPKRLIYAASTLQSGVPSRFSGSGSGTEFTLIISSLQPEDFATYYCLQHNSFPWTFGQGTKVEIK

SEQ ID NO: 849 - protein, 753 aa, Artificial Sequence
  Synthetic
EVQLLESGGGLVQPGGSLRLSCAASGFTFSHYAMSWVRQAPGKCLEWVSAISGGGDRTFYADAVKGRFTVSRDNSKNTLYLQMNSLRAEDTAVYYCAKLRGFYYGMDVWGQGTTVTVSSGGGGSGGGGSGGGGSDIVMTQSPLSLPVTPGEPASISCRSSQSLLHSNKYNYLDWYLQQPGQSPQLLIYLGSNRASGVPDRFSASGSGTDFTLKISRVEAEDVGVYYCMQGTHWPHTFGCGTKVDIKSGGGGSQVTLKESGPALVKPTETLTLTCTVSGFSFRNARMGVSWIRQPPGKALEWLAHIFSNDEKSYSTSLKSRLTISKDTSKSQVVLTLTNMDPVDTATYFCARMPEYSSGWSGAFDIWGQGTMVTVSSGGGGSGGGGSGGGGSDIQMTQSPSSLSASVGDRVTITCRASQDIGYDLGWYQQKPGKAPKRLIYAASTLQSGVPSRFSGSGSGTEFTLIISSLQPEDFATYYCLQHNSFPWTFGQGTKVEIKSGGGGSEVQLVESGGGLVQPGGSLKLSCAASGFTFNKYAMNWVRQAPGKGLEWVARIRSKYNNYATYYADSVKDRFTISRDDSKNTAYLQMNNLKTEDTAVYYCVRHGNFGNSYISYWAYWGQGTLVTVSSGGGGSGGGGSGGGGSQTVVTQEPSLTVSPGGTVTLTCGSSTGAVTSGNYPNWVQQKPGQAPRGLIGGTKFLAPGTPARFSGSLLGGKAALTLSGVQPEDEAEYYCVLWYSNRWVFGGGTKLTVL

SEQ ID NO: 850 - protein, 1241 aa, Artificial Sequence
  Synthetic
EVQLLESGGGLVQPGGSLRLSCAASGFTFSHYAMSWVRQAPGKCLEWVSAISGGGDRTFYADAVKGRFTVSRDNSKNTLYLQMNSLRAEDTAVYYCAKLRGFYYGMDVWGQGTTVTVSSGGGGSGGGGSGGGGSDIVMTQSPLSLPVTPGEPASISCRSSQSLLHSNKYNYLDWYLQQPGQSPQLLIYLGSNRASGVPDRFSASGSGTDFTLKISRVEAEDVGVYYCMQGTHWPHTFGCGTKVDIKSGGGGSQVTLKESGPALVKPTETLTLTCTVSGFSFRNARMGVSWIRQPPGKALEWLAHIFSNDEKSYSTSLKSRLTISKDTSKSQVVLTLTNMDPVDTATYFCARMPEYSSGWSGAFDIWGQGTMVTVSSGGGGSGGGGSGGGGSDIQMTQSPSSLSASVGDRVTITCRASQDIGYDLGWYQQKPGKAPKRLIYAASTLQSGVPSRFSGSGSGTEFTLIISSLQPEDFATYYCLQHNSFPWTFGQGTKVEIKSGGGGSEVQLVESGGGLVQPGGSLKLSCAASGFTFNKYAMNWVRQAPGKGLEWVARIRSKYNNYATYYADSVKDRFTISRDDSKNTAYLQMNNLKTEDTAVYYCVRHGNFGNSYISYWAYWGQGTLVTVSSGGGGSGGGGSGGGGSQTVVTQEPSLTVSPGGTVTLTCGSSTGAVTSGNYPNWVQQKPGQAPRGLIGGTKFLAPGTPARFSGSLLGGKAALTLSGVQPEDEAEYYCVLWYSNRWVFGGGTKLTVLGGGGDKTHTCPPCPAPELLGGPSVFLFPPKPKDTLMISRTPEVTCVVVDVSHEDPEVKFNWYVDGVEVHNAKTKPCEEQYGSTYRCVSVLTVLHQDWLNGKEYKCKVSNKALPAPIEKTISKAKGQPREPQVYTLPPSREEMTKNQVSLTCLVKGFYPSDIAVEWESNGQPENNYKTTPPVLDSDGSFFLYSKLTVDKSRWQQGNVFSCSVMHEALHNHYTQKSLSLSPGKGGGGSGGGGSGGGGSGGGGSGGGGSGGGGSDKTHTCPPCPAPELLGGPSVFLFPPKPKDTLMISRTPEVTCVVVDVSHEDPEVKFNWYVDGVEVHNAKTKPCEEQYGSTYRCVSVLTVLHQDWLNGKEYKCKVSNKALPAPIEKTISKAKGQPREPQVYTLPPSREEMTKNQVSLTCLVKGFYPSDIAVEWESNGQPENNYKTTPPVLDSDGSFFLYSKLTVDKSRWQQGNVFSCSVMHEALHNHYTQKSLSLSPGK

SEQ ID NO: 851 - protein, 498 aa, Artificial Sequence
  Synthetic
EVQLLESGGGLVQPGGSLRLSCAASGFTFSHYAMSWVRQAPGKCLEWVSAISGGGDRTFYADAVKGRFTVSRDNSKNTLYLQMNSLRAEDTAVYYCAKLRGFYYGMDVWGQGTTVTVSSGGGGSGGGGSGGGGSDIVMTQSPLSLPVTPGEPASISCRSSQSLLHSNKYNYLDWYLQQPGQSPQLLIYLGSNRASGVPDRFSASGSGTDFTLKISRVEAEDVGVYYCMQGTHWPHTFGCGTKVDIKSGGGGSQVTLKESGPALVKPTETLTLTCTLSGFSLNNARMAVSWIRQPPGKCLEWLAHIFSNDEKSYSTSLKSRLTISKDTSKSQVVLTMTNMDPEDTATYYCARIVGYGTGWYGFFDYWGQGILVTVSSGGGGSGGGGSGGGGSDIQMTQSPSSLSASVGDRVTITCRASQGIRNDLAWYQQKPGKAPKRLIYAASSLQSGVPSRFSGSGSGTEFTLTISSLQPEDFATYYCLQHNSYPLTFGCGTKVEIK

SEQ ID NO: 852 - protein, 753 aa, Artificial Sequence
  Synthetic
EVQLLESGGGLVQPGGSLRLSCAASGFTFSHYAMSWVRQAPGKCLEWVSAISGGGDRTFYADAVKGRFTVSRDNSKNTLYLQMNSLRAEDTAVYYCAKLRGFYYGMDVWGQGTTVTVSSGGGGSGGGGSGGGGSDIVMTQSPLSLPVTPGEPASISCRSSQSLLHSNKYNYLDWYLQQPGQSPQLLIYLGSNRASGVPDRFSASGSGTDFTLKISRVEAEDVGVYYCMQGTHWPHTFGCGTKVDIKSGGGGSQVTLKESGPALVKPTETLTLTCTLSGFSLNNARMAVSWIRQPPGKCLEWLAHIFSNDEKSYSTSLKSRLTISKDTSKSQVVLTMTNMDPEDTATYYCARIVGYGTGWYGFFDYWGQGILVTVSSGGGGSGGGGSGGGGSDIQMTQSPSSLSASVGDRVTITCRASQGIRNDLAWYQQKPGKAPKRLIYAASSLQSGVPSRFSGSGSGTEFTLTISSLQPEDFATYYCLQHNSYPLTFGCGTKVEIKSGGGGSEVQLVESGGGLVQPGGSLKLSCAASGFTFNKYAMNWVRQAPGKGLEWVARIRSKYNNYATYYADSVKDRFTISRDDSKNTAYLQMNNLKTEDTAVYYCVRHGNFGNSYISYWAYWGQGTLVTVSSGGGGSGGGGSGGGGSQTVVTQEPSLTVSPGGTVTLTCGSSTGAVTSGNYPNWVQQKPGQAPRGLIGGTKFLAPGTPARFSGSLLGGKAALTLSGVQPEDEAEYYCVLWYSNRWVFGGGTKLTVL

SEQ ID NO: 853 - protein, 1241 aa, Artificial Sequence
  Synthetic
EVQLLESGGGLVQPGGSLRLSCAASGFTFSHYAMSWVRQAPGKCLEWVSAISGGGDRTFYADAVKGRFTVSRDNSKNTLYLQMNSLRAEDTAVYYCAKLRGFYYGMDVWGQGTTVTVSSGGGGSGGGGSGGGGSDIVMTQSPLSLPVTPGEPASISCRSSQSLLHSNKYNYLDWYLQQPGQSPQLLIYLGSNRASGVPDRFSASGSGTDFTLKISRVEAEDVGVYYCMQGTHWPHTFGCGTKVDIKSGGGGSQVTLKESGPALVKPTETLTLTCTLSGFSLNNARMAVSWIRQPPGKCLEWLAHIFSNDEKSYSTSLKSRLTISKDTSKSQVVLTMTNMDPEDTATYYCARIVGYGTGWYGFFDYWGQGILVTVSSGGGGSGGGGSGGGGSDIQMTQSPSSLSASVGDRVTITCRASQGIRNDLAWYQQKPGKAPKRLIYAASSLQSGVPSRFSGSGSGTEFTLTISSLQPEDFATYYCLQHNSYPLTFGCGTKVEIKSGGGGSEVQLVESGGGLVQPGGSLKLSCAASGFTFNKYAMNWVRQAPGKGLEWVARIRSKYNNYATYYADSVKDRFTISRDDSKNTAYLQMNNLKTEDTAVYYCVRHGNFGNSYISYWAYWGQGTLVTVSSGGGGSGGGGSGGGGSQTVVTQEPSLTVSPGGTVTLTCGSSTGAVTSGNYPNWVQQKPGQAPRGLIGGTKFLAPGTPARFSGSLLGGKAALTLSGVQPEDEAEYYCVLWYSNRWVFGGGTKLTVLGGGGDKTHTCPPCPAPELLGGPSVFLFPPKPKDTLMISRTPEVTCVVVDVSHEDPEVKFNWYVDGVEVHNAKTKPCEEQYGSTYRCVSVLTVLHQDWLNGKEYKCKVSNKALPAPIEKTISKAKGQPREPQVYTLPPSREEMTKNQVSLTCLVKGFYPSDIAVEWESNGQPENNYKTTPPVLDSDGSFFLYSKLTVDKSRWQQGNVFSCSVMHEALHNHYTQKSLSLSPGKGGGGSGGGGSGGGGSGGGGSGGGGSGGGGSDKTHTCPPCPAPELLGGPSVFLFPPKPKDTLMISRTPEVTCVVVDVSHEDPEVKFNWYVDGVEVHNAKTKPCEEQYGSTYRCVSVLTVLHQDWLNGKEYKCKVSNKALPAPIEKTISKAKGQPREPQVYTLPPSREEMTKNQVSLTCLVKGFYPSDIAVEWESNGQPENNYKTTPPVLDSDGSFFLYSKLTVDKSRWQQGNVFSCSVMHEALHNHYTQKSLSLSPGK

SEQ ID NO: 854 - protein, 497 aa, Artificial Sequence
  Synthetic
EVQLLESGGGLVQPGGSLRLSCAASGFTFSHYAMNWVRQAPGKCLEWVSAVSGGGDRTLYADAVKGRFTISRDNSKNTLFLQMNSLRAEDTAIYYCARLRGFYYGMDVWGQGTAVTVSSGGGGSGGGGSGGGGSDIVMTQSPLSLPVTPGEPASISCRSSQSLLHSNKYNYLDWYLQKPGQSPQLLIYLGSNRASGVPDRFSGSGSGTDFTLKISRVEAEDVGVYYCMQALQTLTFGCGTKVDIKSGGGGSQVTLKESGPTLVKPTETLTLTCTLSGFSLNNARMGVSWIRQPPGKCLEWLAHIFSNDEKSYSTSLKNRLTISKDSSKTQVVLTMTNVDPVDTATYYCARIVGYGSGWYGFFDYWGQGTLVTVSSGGGGSGGGGSGGGGSDIQMTQSPSSLSASVGDRVTITCRASQGIRNDLGWYQQKPGKAPKRLIYAASTLQSGVPSRFSGSGSGTEFTLTISSLQPEDFATYYCLQHNSYPLTFGCGTKVEIK

SEQ ID NO: 855 - protein, 752 aa, Artificial Sequence
  Synthetic
EVQLLESGGGLVQPGGSLRLSCAASGFTFSHYAMNWVRQAPGKCLEWVSAVSGGGDRTLYADAVKGRFTISRDNSKNTLFLQMNSLRAEDTAIYYCARLRGFYYGMDVWGQGTAVTVSSGGGGSGGGGSGGGGSDIVMTQSPLSLPVTPGEPASISCRSSQSLLHSNKYNYLDWYLQKPGQSPQLLIYLGSNRASGVPDRFSGSGSGTDFTLKISRVEAEDVGVYYCMQALQTLTFGCGTKVDIKSGGGGSQVTLKESGPTLVKPTETLTLTCTLSGFSLNNARMGVSWIRQPPGKCLEWLAHIFSNDEKSYSTSLKNRLTISKDSSKTQVVLTMTNVDPVDTATYYCARIVGYGSGWYGFFDYWGQGTLVTVSSGGGGSGGGGSGGGGSDIQMTQSPSSLSASVGDRVTITCRASQGIRNDLGWYQQKPGKAPKRLIYAASTLQSGVPSRFSGSGSGTEFTLTISSLQPEDFATYYCLQHNSYPLTFGCGTKVEIKSGGGGSEVQLVESGGGLVQPGGSLKLSCAASGFTFNKYAMNWVRQAPGKGLEWVARIRSKYNNYATYYADSVKDRFTISRDDSKNTAYLQMNNLKTEDTAVYYCVRHGNFGNSYISYWAYWGQGTLVTVSSGGGGSGGGGSGGGGSQTVVTQEPSLTVSPGGTVTLTCGSSTGAVTSGNYPNWVQQKPGQAPRGLIGGTKFLAPGTPARFSGSLLGGKAALTLSGVQPEDEAEYYCVLWYSNRWVFGGGTKLTVL

SEQ ID NO: 856 - protein, 1240 aa, Artificial Sequence
  Synthetic
EVQLLESGGGLVQPGGSLRLSCAASGFTFSHYAMNWVRQAPGKCLEWVSAVSGGGDRTLYADAVKGRFTISRDNSKNTLFLQMNSLRAEDTAIYYCARLRGFYYGMDVWGQGTAVTVSSGGGGSGGGGSGGGGSDIVMTQSPLSLPVTPGEPASISCRSSQSLLHSNKYNYLDWYLQKPGQSPQLLIYLGSNRASGVPDRFSGSGSGTDFTLKISRVEAEDVGVYYCMQALQTLTFGCGTKVDIKSGGGGSQVTLKESGPTLVKPTETLTLTCTLSGFSLNNARMGVSWIRQPPGKCLEWLAHIFSNDEKSYSTSLKNRLTISKDSSKTQVVLTMTNVDPVDTATYYCARIVGYGSGWYGFFDYWGQGTLVTVSSGGGGSGGGGSGGGGSDIQMTQSPSSLSASVGDRVTITCRASQGIRNDLGWYQQKPGKAPKRLIYAASTLQSGVPSRFSGSGSGTEFTLTISSLQPEDFATYYCLQHNSYPLTFGCGTKVEIKSGGGGSEVQLVESGGGLVQPGGSLKLSCAASGFTFNKYAMNWVRQAPGKGLEWVARIRSKYNNYATYYADSVKDRFTISRDDSKNTAYLQMNNLKTEDTAVYYCVRHGNFGNSYISYWAYWGQGTLVTVSSGGGGSGGGGSGGGGSQTVVTQEPSLTVSPGGTVTLTCGSSTGAVTSGNYPNWVQQKPGQAPRGLIGGTKFLAPGTPARFSGSLLGGKAALTLSGVQPEDEAEYYCVLWYSNRWVFGGGTKLTVLGGGGDKTHTCPPCPAPELLGGPSVFLFPPKPKDTLMISRTPEVTCVVVDVSHEDPEVKFNWYVDGVEVHNAKTKPCEEQYGSTYRCVSVLTVLHQDWLNGKEYKCKVSNKALPAPIEKTISKAKGQPREPQVYTLPPSREEMTKNQVSLTCLVKGFYPSDIAVEWESNGQPENNYKTTPPVLDSDGSFFLYSKLTVDKSRWQQGNVFSCSVMHEALHNHYTQKSLSLSPGKGGGGSGGGGSGGGGSGGGGSGGGGSGGGGSDKTHTCPPCPAPELLGGPSVFLFPPKPKDTLMISRTPEVTCVVVDVSHEDPEVKFNWYVDGVEVHNAKTKPCEEQYGSTYRCVSVLTVLHQDWLNGKEYKCKVSNKALPAPIEKTISKAKGQPREPQVYTLPPSREEMTKNQVSLTCLVKGFYPSDIAVEWESNGQPENNYKTTPPVLDSDGSFFLYSKLTVDKSRWQQGNVFSCSVMHEALHNHYTQKSLSLSPGK

SEQ ID NO: 857 - protein, 497 aa, Artificial Sequence
  Synthetic
EVQLLESGGGLVQPGGSLRLSCAASGFTFSHYAMNWVRQAPGKCLEWVSAVSGGGDRTLYADAVKGRFTISRDNSKNTLFLQMNSLRAEDTAIYYCARLRGFYYGMDVWGQGTAVTVSSGGGGSGGGGSGGGGSDIVMTQSPLSLPVTPGEPASISCRSSQSLLHSNKYNYLDWYLQKPGQSPQLLIYLGSNRASGVPDRFSGSGSGTDFTLKISRVEAEDVGVYYCMQALQTLTFGCGTKVDIKSGGGGSQVTLKESGPALVKPTETLTLTCTVSGFSFRNARMGVSWIRQPPGKALEWLAHIFSNDEKSYSTSLKSRLTISKDTSKSQVVLTLTNMDPVDTATYFCARMPEYSSGWSGAFDIWGQGTMVTVSSGGGGSGGGGSGGGGSDIQMTQSPSSLSASVGDRVTITCRASQDIGYDLGWYQQKPGKAPKRLIYAASTLQSGVPSRFSGSGSGTEFTLIISSLQPEDFATYYCLQHNSFPWTFGQGTKVEIK

SEQ ID NO: 858 - protein, 752 aa, Artificial Sequence
  Synthetic
EVQLLESGGGLVQPGGSLRLSCAASGFTFSHYAMNWVRQAPGKCLEWVSAVSGGGDRTLYADAVKGRFTISRDNSKNTLFLQMNSLRAEDTAIYYCARLRGFYYGMDVWGQGTAVTVSSGGGGSGGGGSGGGGSDIVMTQSPLSLPVTPGEPASISCRSSQSLLHSNKYNYLDWYLQKPGQSPQLLIYLGSNRASGVPDRFSGSGSGTDFTLKISRVEAEDVGVYYCMQALQTLTFGCGTKVDIKSGGGGSQVTLKESGPALVKPTETLTLTCTVSGFSFRNARMGVSWIRQPPGKALEWLAHIFSNDEKSYSTSLKSRLTISKDTSKSQVVLTLTNMDPVDTATYFCARMPEYSSGWSGAFDIWGQGTMVTVSSGGGGSGGGGSGGGGSDIQMTQSPSSLSASVGDRVTITCRASQDIGYDLGWYQQKPGKAPKRLIYAASTLQSGVPSRFSGSGSGTEFTLIISSLQPEDFATYYCLQHNSFPWTFGQGTKVEIKSGGGGSEVQLVESGGGLVQPGGSLKLSCAASGFTFNKYAMNWVRQAPGKGLEWVARIRSKYNNYATYYADSVKDRFTISRDDSKNTAYLQMNNLKTEDTAVYYCVRHGNFGNSYISYWAYWGQGTLVTVSSGGGGSGGGGSGGGGSQTVVTQEPSLTVSPGGTVTLTCGSSTGAVTSGNYPNWVQQKPGQAPRGLIGGTKFLAPGTPARFSGSLLGGKAALTLSGVQPEDEAEYYCVLWYSNRWVFGGGTKLTVL

SEQ ID NO: 859 - protein, 1240 aa, Artificial Sequence
  Synthetic
EVQLLESGGGLVQPGGSLRLSCAASGFTFSHYAMNWVRQAPGKCLEWVSAVSGGGDRTLYADAVKGRFTISRDNSKNTLFLQMNSLRAEDTAIYYCARLRGFYYGMDVWGQGTAVTVSSGGGGSGGGGSGGGGSDIVMTQSPLSLPVTPGEPASISCRSSQSLLHSNKYNYLDWYLQKPGQSPQLLIYLGSNRASGVPDRFSGSGSGTDFTLKISRVEAEDVGVYYCMQALQTLTFGCGTKVDIKSGGGGSQVTLKESGPALVKPTETLTLTCTVSGFSFRNARMGVSWIRQPPGKALEWLAHIFSNDEKSYSTSLKSRLTISKDTSKSQVVLTLTNMDPVDTATYFCARMPEYSSGWSGAFDIWGQGTMVTVSSGGGGSGGGGSGGGGSDIQMTQSPSSLSASVGDRVTITCRASQDIGYDLGWYQQKPGKAPKRLIYAASTLQSGVPSRFSGSGSGTEFTLIISSLQPEDFATYYCLQHNSFPWTFGQGTKVEIKSGGGGSEVQLVESGGGLVQPGGSLKLSCAASGFTFNKYAMNWVRQAPGKGLEWVARIRSKYNNYATYYADSVKDRFTISRDDSKNTAYLQMNNLKTEDTAVYYCVRHGNFGNSYISYWAYWGQGTLVTVSSGGGGSGGGGSGGGGSQTVVTQEPSLTVSPGGTVTLTCGSSTGAVTSGNYPNWVQQKPGQAPRGLIGGTKFLAPGTPARFSGSLLGGKAALTLSGVQPEDEAEYYCVLWYSNRWVFGGGTKLTVLGGGGDKTHTCPPCPAPELLGGPSVFLFPPKPKDTLMISRTPEVTCVVVDVSHEDPEVKFNWYVDGVEVHNAKTKPCEEQYGSTYRCVSVLTVLHQDWLNGKEYKCKVSNKALPAPIEKTISKAKGQPREPQVYTLPPSREEMTKNQVSLTCLVKGFYPSDIAVEWESNGQPENNYKTTPPVLDSDGSFFLYSKLTVDKSRWQQGNVFSCSVMHEALHNHYTQKSLSLSPGKGGGGSGGGGSGGGGSGGGGSGGGGSGGGGSDKTHTCPPCPAPELLGGPSVFLFPPKPKDTLMISRTPEVTCVVVDVSHEDPEVKFNWYVDGVEVHNAKTKPCEEQYGSTYRCVSVLTVLHQDWLNGKEYKCKVSNKALPAPIEKTISKAKGQPREPQVYTLPPSREEMTKNQVSLTCLVKGFYPSDIAVEWESNGQPENNYKTTPPVLDSDGSFFLYSKLTVDKSRWQQGNVFSCSVMHEALHNHYTQKSLSLSPGK

SEQ ID NO: 860 - protein, 497 aa, Artificial Sequence
  Synthetic
EVQLLESGGGLVQPGGSLRLSCAASGFTFSHYAMNWVRQAPGKCLEWVSAVSGGGDRTLYADAVKGRFTISRDNSKNTLFLQMNSLRAEDTAIYYCARLRGFYYGMDVWGQGTAVTVSSGGGGSGGGGSGGGGSDIVMTQSPLSLPVTPGEPASISCRSSQSLLHSNKYNYLDWYLQKPGQSPQLLIYLGSNRASGVPDRFSGSGSGTDFTLKISRVEAEDVGVYYCMQALQTLTFGCGTKVDIKSGGGGSQVTLKESGPALVKPTETLTLTCTLSGFSLNNARMAVSWIRQPPGKCLEWLAHIFSNDEKSYSTSLKSRLTISKDTSKSQVVLTMTNMDPEDTATYYCARIVGYGTGWYGFFDYWGQGILVTVSSGGGGSGGGGSGGGGSDIQMTQSPSSLSASVGDRVTITCRASQGIRNDLAWYQQKPGKAPKRLIYAASSLQSGVPSRFSGSGSGTEFTLTISSLQPEDFATYYCLQHNSYPLTFGCGTKVEIK

SEQ ID NO: 861 - protein, 752 aa, Artificial Sequence
  Synthetic
EVQLLESGGGLVQPGGSLRLSCAASGFTFSHYAMNWVRQAPGKCLEWVSAVSGGGDRTLYADAVKGRFTISRDNSKNTLFLQMNSLRAEDTAIYYCARLRGFYYGMDVWGQGTAVTVSSGGGGSGGGGSGGGGSDIVMTQSPLSLPVTPGEPASISCRSSQSLLHSNKYNYLDWYLQKPGQSPQLLIYLGSNRASGVPDRFSGSGSGTDFTLKISRVEAEDVGVYYCMQALQTLTFGCGTKVDIKSGGGGSQVTLKESGPALVKPTETLTLTCTLSGFSLNNARMAVSWIRQPPGKCLEWLAHIFSNDEKSYSTSLKSRLTISKDTSKSQVVLTMTNMDPEDTATYYCARIVGYGTGWYGFFDYWGQGILVTVSSGGGGSGGGGSGGGGSDIQMTQSPSSLSASVGDRVTITCRASQGIRNDLAWYQQKPGKAPKRLIYAASSLQSGVPSRFSGSGSGTEFTLTISSLQPEDFATYYCLQHNSYPLTFGCGTKVEIKSGGGGSEVQLVESGGGLVQPGGSLKLSCAASGFTFNKYAMNWVRQAPGKGLEWVARIRSKYNNYATYYADSVKDRFTISRDDSKNTAYLQMNNLKTEDTAVYYCVRHGNFGNSYISYWAYWGQGTLVTVSSGGGGSGGGGSGGGGSQTVVTQEPSLTVSPGGTVTLTCGSSTGAVTSGNYPNWVQQKPGQAPRGLIGGTKFLAPGTPARFSGSLLGGKAALTLSGVQPEDEAEYYCVLWYSNRWVFGGGTKLTVL

SEQ ID NO: 862 - protein, 1240 aa, Artificial Sequence
  Synthetic
EVQLLESGGGLVQPGGSLRLSCAASGFTFSHYAMNWVRQAPGKCLEWVSAVSGGGDRTLYADAVKGRFTISRDNSKNTLFLQMNSLRAEDTAIYYCARLRGFYYGMDVWGQGTAVTVSSGGGGSGGGGSGGGGSDIVMTQSPLSLPVTPGEPASISCRSSQSLLHSNKYNYLDWYLQKPGQSPQLLIYLGSNRASGVPDRFSGSGSGTDFTLKISRVEAEDVGVYYCMQALQTLTFGCGTKVDIKSGGGGSQVTLKESGPALVKPTETLTLTCTLSGFSLNNARMAVSWIRQPPGKCLEWLAHIFSNDEKSYSTSLKSRLTISKDTSKSQVVLTMTNMDPEDTATYYCARIVGYGTGWYGFFDYWGQGILVTVSSGGGGSGGGGSGGGGSDIQMTQSPSSLSASVGDRVTITCRASQGIRNDLAWYQQKPGKAPKRLIYAASSLQSGVPSRFSGSGSGTEFTLTISSLQPEDFATYYCLQHNSYPLTFGCGTKVEIKSGGGGSEVQLVESGGGLVQPGGSLKLSCAASGFTFNKYAMNWVRQAPGKGLEWVARIRSKYNNYATYYADSVKDRFTISRDDSKNTAYLQMNNLKTEDTAVYYCVRHGNFGNSYISYWAYWGQGTLVTVSSGGGGSGGGGSGGGGSQTVVTQEPSLTVSPGGTVTLTCGSSTGAVTSGNYPNWVQQKPGQAPRGLIGGTKFLAPGTPARFSGSLLGGKAALTLSGVQPEDEAEYYCVLWYSNRWVFGGGTKLTVLGGGGDKTHTCPPCPAPELLGGPSVFLFPPKPKDTLMISRTPEVTCVVVDVSHEDPEVKFNWYVDGVEVHNAKTKPCEEQYGSTYRCVSVLTVLHQDWLNGKEYKCKVSNKALPAPIEKTISKAKGQPREPQVYTLPPSREEMTKNQVSLTCLVKGFYPSDIAVEWESNGQPENNYKTTPPVLDSDGSFFLYSKLTVDKSRWQQGNVFSCSVMHEALHNHYTQKSLSLSPGKGGGGSGGGGSGGGGSGGGGSGGGGSGGGGSDKTHTCPPCPAPELLGGPSVFLFPPKPKDTLMISRTPEVTCVVVDVSHEDPEVKFNWYVDGVEVHNAKTKPCEEQYGSTYRCVSVLTVLHQDWLNGKEYKCKVSNKALPAPIEKTISKAKGQPREPQVYTLPPSREEMTKNQVSLTCLVKGFYPSDIAVEWESNGQPENNYKTTPPVLDSDGSFFLYSKLTVDKSRWQQGNVFSCSVMHEALHNHYTQKSLSLSPGK

SEQ ID NO: 863 - protein, 499 aa, Artificial Sequence
  Synthetic
EVQLLESGGGLVQPGGSLRLSCAASGFTFSHYAMSWVRQAPGKCLEWVSAVSGGGDKTLYADAVKGRFTISRDNSKNTLFLQMNSLRAEDTAIYYCARLRGFYYGMDVWGQGTTVTVSSGGGGSGGGGSGGGGSDIVLTQSPLSLPVTPGEPASISCRSSQSLLHSNKYNYLDWYLQKPGQSPQLLIYLGSNRASGVPDRFSGSGSGTDFTLKISRVEAEDVGVYYCMQALQTPPITFGCGTRLEIKSGGGGSQVTLKESGPTLVKPTETLTLTCTLSGFSLNNARMGVSWIRQPPGKCLEWLAHIFSNDEKSYSTSLKNRLTISKDSSKTQVVLTMTNVDPVDTATYYCARIVGYGSGWYGFFDYWGQGTLVTVSSGGGGSGGGGSGGGGSDIQMTQSPSSLSASVGDRVTITCRASQGIRNDLGWYQQKPGKAPKRLIYAASTLQSGVPSRFSGSGSGTEFTLTISSLQPEDFATYYCLQHNSYPLTFGCGTKVEIK

SEQ ID NO: 864 - protein, 754 aa, Artificial Sequence
  Synthetic
EVQLLESGGGLVQPGGSLRLSCAASGFTFSHYAMSWVRQAPGKCLEWVSAVSGGGDKTLYADAVKGRFTISRDNSKNTLFLQMNSLRAEDTAIYYCARLRGFYYGMDVWGQGTTVTVSSGGGGSGGGGSGGGGSDIVLTQSPLSLPVTPGEPASISCRSSQSLLHSNKYNYLDWYLQKPGQSPQLLIYLGSNRASGVPDRFSGSGSGTDFTLKISRVEAEDVGVYYCMQALQTPPITFGCGTRLEIKSGGGGSQVTLKESGPTLVKPTETLTLTCTLSGFSLNNARMGVSWIRQPPGKCLEWLAHIFSNDEKSYSTSLKNRLTISKDSSKTQVVLTMTNVDPVDTATYYCARIVGYGSGWYGFFDYWGQGTLVTVSSGGGGSGGGGSGGGGSDIQMTQSPSSLSASVGDRVTITCRASQGIRNDLGWYQQKPGKAPKRLIYAASTLQSGVPSRFSGSGSGTEFTLTISSLQPEDFATYYCLQHNSYPLTFGCGTKVEIKSGGGGSEVQLVESGGGLVQPGGSLKLSCAASGFTFNKYAMNWVRQAPGKGLEWVARIRSKYNNYATYYADSVKDRFTISRDDSKNTAYLQMNNLKTEDTAVYYCVRHGNFGNSYISYWAYWGQGTLVTVSSGGGGSGGGGSGGGGSQTVVTQEPSLTVSPGGTVTLTCGSSTGAVTSGNYPNWVQQKPGQAPRGLIGGTKFLAPGTPARFSGSLLGGKAALTLSGVQPEDEAEYYCVLWYSNRWVFGGGTKLTVL

SEQ ID NO: 865 - protein, 1242 aa, Artificial Sequence
  Synthetic
EVQLLESGGGLVQPGGSLRLSCAASGFTFSHYAMSWVRQAPGKCLEWVSAVSGGGDKTLYADAVKGRFTISRDNSKNTLFLQMNSLRAEDTAIYYCARLRGFYYGMDVWGQGTTVTVSSGGGGSGGGGSGGGGSDIVLTQSPLSLPVTPGEPASISCRSSQSLLHSNKYNYLDWYLQKPGQSPQLLIYLGSNRASGVPDRFSGSGSGTDFTLKISRVEAEDVGVYYCMQALQTPPITFGCGTRLEIKSGGGGSQVTLKESGPTLVKPTETLTLTCTLSGFSLNNARMGVSWIRQPPGKCLEWLAHIFSNDEKSYSTSLKNRLTISKDSSKTQVVLTMTNVDPVDTATYYCARIVGYGSGWYGFFDYWGQGTLVTVSSGGGGSGGGGSGGGGSDIQMTQSPSSLSASVGDRVTITCRASQGIRNDLGWYQQKPGKAPKRLIYAASTLQSGVPSRFSGSGSGTEFTLTISSLQPEDFATYYCLQHNSYPLTFGCGTKVEIKSGGGGSEVQLVESGGGLVQPGGSLKLSCAASGFTFNKYAMNWVRQAPGKGLEWVARIRSKYNNYATYYADSVKDRFTISRDDSKNTAYLQMNNLKTEDTAVYYCVRHGNFGNSYISYWAYWGQGTLVTVSSGGGGSGGGGSGGGGSQTVVTQEPSLTVSPGGTVTLTCGSSTGAVTSGNYPNWVQQKPGQAPRGLIGGTKFLAPGTPARFSGSLLGGKAALTLSGVQPEDEAEYYCVLWYSNRWVFGGGTKLTVLGGGGDKTHTCPPCPAPELLGGPSVFLFPPKPKDTLMISRTPEVTCVVVDVSHEDPEVKFNWYVDGVEVHNAKTKPCEEQYGSTYRCVSVLTVLHQDWLNGKEYKCKVSNKALPAPIEKTISKAKGQPREPQVYTLPPSREEMTKNQVSLTCLVKGFYPSDIAVEWESNGQPENNYKTTPPVLDSDGSFFLYSKLTVDKSRWQQGNVFSCSVMHEALHNHYTQKSLSLSPGKGGGGSGGGGSGGGGSGGGGSGGGGSGGGGSDKTHTCPPCPAPELLGGPSVFLFPPKPKDTLMISRTPEVTCVVVDVSHEDPEVKFNWYVDGVEVHNAKTKPCEEQYGSTYRCVSVLTVLHQDWLNGKEYKCKVSNKALPAPIEKTISKAKGQPREPQVYTLPPSREEMTKNQVSLTCLVKGFYPSDIAVEWESNGQPENNYKTTPPVLDSDGSFFLYSKLTVDKSRWQQGNVFSCSVMHEALHNHYTQKSLSLSPGK

SEQ ID NO: 866 - protein, 499 aa, Artificial Sequence
  Synthetic
EVQLLESGGGLVQPGGSLRLSCAASGFTFSHYAMSWVRQAPGKCLEWVSAVSGGGDKTLYADAVKGRFTISRDNSKNTLFLQMNSLRAEDTAIYYCARLRGFYYGMDVWGQGTTVTVSSGGGGSGGGGSGGGGSDIVLTQSPLSLPVTPGEPASISCRSSQSLLHSNKYNYLDWYLQKPGQSPQLLIYLGSNRASGVPDRFSGSGSGTDFTLKISRVEAEDVGVYYCMQALQTPPITFGCGTRLEIKSGGGGSQVTLKESGPALVKPTETLTLTCTVSGFSFRNARMGVSWIRQPPGKALEWLAHIFSNDEKSYSTSLKSRLTISKDTSKSQVVLTLTNMDPVDTATYFCARMPEYSSGWSGAFDIWGQGTMVTVSSGGGGSGGGGSGGGGSDIQMTQSPSSLSASVGDRVTITCRASQDIGYDLGWYQQKPGKAPKRLIYAASTLQSGVPSRFSGSGSGTEFTLIISSLQPEDFATYYCLQHNSFPWTFGQGTKVEIK

SEQ ID NO: 867 - protein, 754 aa, Artificial Sequence
  Synthetic
EVQLLESGGGLVQPGGSLRLSCAASGFTFSHYAMSWVRQAPGKCLEWVSAVSGGGDKTLYADAVKGRFTISRDNSKNTLFLQMNSLRAEDTAIYYCARLRGFYYGMDVWGQGTTVTVSSGGGGSGGGGSGGGGSDIVLTQSPLSLPVTPGEPASISCRSSQSLLHSNKYNYLDWYLQKPGQSPQLLIYLGSNRASGVPDRFSGSGSGTDFTLKISRVEAEDVGVYYCMQALQTPPITFGCGTRLEIKSGGGGSQVTLKESGPALVKPTETLTLTCTVSGFSFRNARMGVSWIRQPPGKALEWLAHIFSNDEKSYSTSLKSRLTISKDTSKSQVVLTLTNMDPVDTATYFCARMPEYSSGWSGAFDIWGQGTMVTVSSGGGGSGGGGSGGGGSDIQMTQSPSSLSASVGDRVTITCRASQDIGYDLGWYQQKPGKAPKRLIYAASTLQSGVPSRFSGSGSGTEFTLIISSLQPEDFATYYCLQHNSFPWTFGQGTKVEIKSGGGGSEVQLVESGGGLVQPGGSLKLSCAASGFTFNKYAMNWVRQAPGKGLEWVARIRSKYNNYATYYADSVKDRFTISRDDSKNTAYLQMNNLKTEDTAVYYCVRHGNFGNSYISYWAYWGQGTLVTVSSGGGGSGGGGSGGGGSQTVVTQEPSLTVSPGGTVTLTCGSSTGAVTSGNYPNWVQQKPGQAPRGLIGGTKFLAPGTPARFSGSLLGGKAALTLSGVQPEDEAEYYCVLWYSNRWVFGGGTKLTVL

SEQ ID NO: 868 - protein, 1242 aa, Artificial Sequence
  Synthetic
EVQLLESGGGLVQPGGSLRLSCAASGFTFSHYAMSWVRQAPGKCLEWVSAVSGGGDKTLYADAVKGRFTISRDNSKNTLFLQMNSLRAEDTAIYYCARLRGFYYGMDVWGQGTTVTVSSGGGGSGGGGSGGGGSDIVLTQSPLSLPVTPGEPASISCRSSQSLLHSNKYNYLDWYLQKPGQSPQLLIYLGSNRASGVPDRFSGSGSGTDFTLKISRVEAEDVGVYYCMQALQTPPITFGCGTRLEIKSGGGGSQVTLKESGPALVKPTETLTLTCTVSGFSFRNARMGVSWIRQPPGKALEWLAHIFSNDEKSYSTSLKSRLTISKDTSKSQVVLTLTNMDPVDTATYFCARMPEYSSGWSGAFDIWGQGTMVTVSSGGGGSGGGGSGGGGSDIQMTQSPSSLSASVGDRVTITCRASQDIGYDLGWYQQKPGKAPKRLIYAASTLQSGVPSRFSGSGSGTEFTLIISSLQPEDFATYYCLQHNSFPWTFGQGTKVEIKSGGGGSEVQLVESGGGLVQPGGSLKLSCAASGFTFNKYAMNWVRQAPGKGLEWVARIRSKYNNYATYYADSVKDRFTISRDDSKNTAYLQMNNLKTEDTAVYYCVRHGNFGNSYISYWAYWGQGTLVTVSSGGGGSGGGGSGGGGSQTVVTQEPSLTVSPGGTVTLTCGSSTGAVTSGNYPNWVQQKPGQAPRGLIGGTKFLAPGTPARFSGSLLGGKAALTLSGVQPEDEAEYYCVLWYSNRWVFGGGTKLTVLGGGGDKTHTCPPCPAPELLGGPSVFLFPPKPKDTLMISRTPEVTCVVVDVSHEDPEVKFNWYVDGVEVHNAKTKPCEEQYGSTYRCVSVLTVLHQDWLNGKEYKCKVSNKALPAPIEKTISKAKGQPREPQVYTLPPSREEMTKNQVSLTCLVKGFYPSDIAVEWESNGQPENNYKTTPPVLDSDGSFFLYSKLTVDKSRWQQGNVFSCSVMHEALHNHYTQKSLSLSPGKGGGGSGGGGSGGGGSGGGGSGGGGSGGGGSDKTHTCPPCPAPELLGGPSVFLFPPKPKDTLMISRTPEVTCVVVDVSHEDPEVKFNWYVDGVEVHNAKTKPCEEQYGSTYRCVSVLTVLHQDWLNGKEYKCKVSNKALPAPIEKTISKAKGQPREPQVYTLPPSREEMTKNQVSLTCLVKGFYPSDIAVEWESNGQPENNYKTTPPVLDSDGSFFLYSKLTVDKSRWQQGNVFSCSVMHEALHNHYTQKSLSLSPGK

SEQ ID NO: 869 - protein, 499 aa, Artificial Sequence
  Synthetic
EVQLLESGGGLVQPGGSLRLSCAASGFTFSHYAMSWVRQAPGKCLEWVSAVSGGGDKTLYADAVKGRFTISRDNSKNTLFLQMNSLRAEDTAIYYCARLRGFYYGMDVWGQGTTVTVSSGGGGSGGGGSGGGGSDIVLTQSPLSLPVTPGEPASISCRSSQSLLHSNKYNYLDWYLQKPGQSPQLLIYLGSNRASGVPDRFSGSGSGTDFTLKISRVEAEDVGVYYCMQALQTPPITFGCGTRLEIKSGGGGSQVTLKESGPALVKPTETLTLTCTLSGFSLNNARMAVSWIRQPPGKCLEWLAHIFSNDEKSYSTSLKSRLTISKDTSKSQVVLTMTNMDPEDTATYYCARIVGYGTGWYGFFDYWGQGILVTVSSGGGGSGGGGSGGGGSDIQMTQSPSSLSASVGDRVTITCRASQGIRNDLAWYQQKPGKAPKRLIYAASSLQSGVPSRFSGSGSGTEFTLTISSLQPEDFATYYCLQHNSYPLTFGCGTKVEIK

SEQ ID NO: 870 - protein, 754 aa, Artificial Sequence
  Synthetic
EVQLLESGGGLVQPGGSLRLSCAASGFTFSHYAMSWVRQAPGKCLEWVSAVSGGGDKTLYADAVKGRFTISRDNSKNTLFLQMNSLRAEDTAIYYCARLRGFYYGMDVWGQGTTVTVSSGGGGSGGGGSGGGGSDIVLTQSPLSLPVTPGEPASISCRSSQSLLHSNKYNYLDWYLQKPGQSPQLLIYLGSNRASGVPDRFSGSGSGTDFTLKISRVEAEDVGVYYCMQALQTPPITFGCGTRLEIKSGGGGSQVTLKESGPALVKPTETLTLTCTLSGFSLNNARMAVSWIRQPPGKCLEWLAHIFSNDEKSYSTSLKSRLTISKDTSKSQVVLTMTNMDPEDTATYYCARIVGYGTGWYGFFDYWGQGILVTVSSGGGGSGGGGSGGGGSDIQMTQSPSSLSASVGDRVTITCRASQGIRNDLAWYQQKPGKAPKRLIYAASSLQSGVPSRFSGSGSGTEFTLTISSLQPEDFATYYCLQHNSYPLTFGCGTKVEIKSGGGGSEVQLVESGGGLVQPGGSLKLSCAASGFTFNKYAMNWVRQAPGKGLEWVARIRSKYNNYATYYADSVKDRFTISRDDSKNTAYLQMNNLKTEDTAVYYCVRHGNFGNSYISYWAYWGQGTLVTVSSGGGGSGGGGSGGGGSQTVVTQEPSLTVSPGGTVTLTCGSSTGAVTSGNYPNWVQQKPGQAPRGLIGGTKFLAPGTPARFSGSLLGGKAALTLSGVQPEDEAEYYCVLWYSNRWVFGGGTKLTVL

SEQ ID NO: 871 - protein, 1242 aa, Artificial Sequence
  Synthetic
EVQLLESGGGLVQPGGSLRLSCAASGFTFSHYAMSWVRQAPGKCLEWVSAVSGGGDKTLYADAVKGRFTISRDNSKNTLFLQMNSLRAEDTAIYYCARLRGFYYGMDVWGQGTTVTVSSGGGGSGGGGSGGGGSDIVLTQSPLSLPVTPGEPASISCRSSQSLLHSNKYNYLDWYLQKPGQSPQLLIYLGSNRASGVPDRFSGSGSGTDFTLKISRVEAEDVGVYYCMQALQTPPITFGCGTRLEIKSGGGGSQVTLKESGPALVKPTETLTLTCTLSGFSLNNARMAVSWIRQPPGKCLEWLAHIFSNDEKSYSTSLKSRLTISKDTSKSQVVLTMTNMDPEDTATYYCARIVGYGTGWYGFFDYWGQGILVTVSSGGGGSGGGGSGGGGSDIQMTQSPSSLSASVGDRVTITCRASQGIRNDLAWYQQKPGKAPKRLIYAASSLQSGVPSRFSGSGSGTEFTLTISSLQPEDFATYYCLQHNSYPLTFGCGTKVEIKSGGGGSEVQLVESGGGLVQPGGSLKLSCAASGFTFNKYAMNWVRQAPGKGLEWVARIRSKYNNYATYYADSVKDRFTISRDDSKNTAYLQMNNLKTEDTAVYYCVRHGNFGNSYISYWAYWGQGTLVTVSSGGGGSGGGGSGGGGSQTVVTQEPSLTVSPGGTVTLTCGSSTGAVTSGNYPNWVQQKPGQAPRGLIGGTKFLAPGTPARFSGSLLGGKAALTLSGVQPEDEAEYYCVLWYSNRWVFGGGTKLTVLGGGGDKTHTCPPCPAPELLGGPSVFLFPPKPKDTLMISRTPEVTCVVVDVSHEDPEVKFNWYVDGVEVHNAKTKPCEEQYGSTYRCVSVLTVLHQDWLNGKEYKCKVSNKALPAPIEKTISKAKGQPREPQVYTLPPSREEMTKNQVSLTCLVKGFYPSDIAVEWESNGQPENNYKTTPPVLDSDGSFFLYSKLTVDKSRWQQGNVFSCSVMHEALHNHYTQKSLSLSPGKGGGGSGGGGSGGGGSGGGGSGGGGSGGGGSDKTHTCPPCPAPELLGGPSVFLFPPKPKDTLMISRTPEVTCVVVDVSHEDPEVKFNWYVDGVEVHNAKTKPCEEQYGSTYRCVSVLTVLHQDWLNGKEYKCKVSNKALPAPIEKTISKAKGQPREPQVYTLPPSREEMTKNQVSLTCLVKGFYPSDIAVEWESNGQPENNYKTTPPVLDSDGSFFLYSKLTVDKSRWQQGNVFSCSVMHEALHNHYTQKSLSLSPGK

SEQ ID NO: 872 - protein, 499 aa, Artificial Sequence; identical to SEQ ID NO: 671
  Synthetic

SEQ ID NO: 873 - protein, 754 aa, Artificial Sequence; identical to SEQ ID NO: 672
  Synthetic

SEQ ID NO: 874 - protein, 501 aa, Artificial Sequence; identical to SEQ ID NO: 710
  Synthetic

SEQ ID NO: 875 - protein, 756 aa, Artificial Sequence; identical to SEQ ID NO: 711
  Synthetic

SEQ ID NO: 876 - protein, 497 aa, Artificial Sequence; identical to SEQ ID NO: 782
  Synthetic

SEQ ID NO: 877 - protein, 752 aa, Artificial Sequence; identical to SEQ ID NO: 783
  Synthetic

SEQ ID NO: 878 - protein, 498 aa, Artificial Sequence; identical to SEQ ID NO: 797
  Synthetic

SEQ ID NO: 879 - protein, 753 aa, Artificial Sequence; identical to SEQ ID NO: 798
  Synthetic

SEQ ID NO: 880 - protein, 501 aa, Artificial Sequence
  Synthetic
QVTLKESGPALVKPTETLTLTCTVSGFSFRNARMGVSWIRQPPGKALEWLAHIFSNDEKSYSTSLKSRLTISKDTSKSQVVLTLTNMDPVDTATYFCARMPEYSSGWSGAFDIWGQGTMVTVSSGGGGSGGGGSGGGGSDIQMTQSPSSLSASVGDRVTITCRASQDIGYDLGWYQQKPGKAPKRLIYAASTLQSGVPSRFSGSGSGTEFTLIISSLQPEDFATYYCLQHNSFPWTFGQGTKVEIKSGGGGSQVQLQESGPGLVKPSETLSLTCTVSGGSVSGGGYYWSWIRQPPGKCLEWIGYIYYSGSTNYNPSLKSRVTMSVGPSKNQFSLKLRSVTAADTAVYYCARDQGSSSDAFDIWGQGTMVTVSSGGGGSGGGGSGGGGSDIVMTQSPDSLAVSLGERATINCKSSQSVLYSSNNKNYLAWYQQKPGQPPKLLIYWASTRESGVPDRFSGSGSGTDFTLTISSLQAEDVAVYYCQQYYSTPFTFGCGTKVDIK

SEQ ID NO: 881 - protein, 756 aa, Artificial Sequence
  Synthetic
QVTLKESGPALVKPTETLTLTCTVSGFSFRNARMGVSWIRQPPGKALEWLAHIFSNDEKSYSTSLKSRLTISKDTSKSQVVLTLTNMDPVDTATYFCARMPEYSSGWSGAFDIWGQGTMVTVSSGGGGSGGGGSGGGGSDIQMTQSPSSLSASVGDRVTITCRASQDIGYDLGWYQQKPGKAPKRLIYAASTLQSGVPSRFSGSGSGTEFTLIISSLQPEDFATYYCLQHNSFPWTFGQGTKVEIKSGGGGSQVQLQESGPGLVKPSETLSLTCTVSGGSVSGGGYYWSWIRQPPGKCLEWIGYIYYSGSTNYNPSLKSRVTMSVGPSKNQFSLKLRSVTAADTAVYYCARDQGSSSDAFDIWGQGTMVTVSSGGGGSGGGGSGGGGSDIVMTQSPDSLAVSLGERATINCKSSQSVLYSSNNKNYLAWYQQKPGQPPKLLIYWASTRESGVPDRFSGSGSGTDFTLTISSLQAEDVAVYYCQQYYSTPFTFGCGTKVDIKSGGGGSEVQLVESGGGLVQPGGSLKLSCAASGFTFNKYAMNWVRQAPGKGLEWVARIRSKYNNYATYYADSVKDRFTISRDDSKNTAYLQMNNLKTEDTAVYYCVRHGNFGNSYISYWAYWGQGTLVTVSSGGGGSGGGGSGGGGSQTVVTQEPSLTVSPGGTVTLTCGSSTGAVTSGNYPNWVQQKPGQAPRGLIGGTKFLAPGTPARFSGSLLGGKAALTLSGVQPEDEAEYYCVLWYSNRWVFGGGTKLTVL

SEQ ID NO: 882 - protein, 497 aa, Artificial Sequence
  Synthetic
QVTLKESGPALVKPTETLTLTCTVSGFSFRNARMGVSWIRQPPGKALEWLAHIFSNDEKSYSTSLKSRLTISKDTSKSQVVLTLTNMDPVDTATYFCARMPEYSSGWSGAFDIWGQGTMVTVSSGGGGSGGGGSGGGGSDIQMTQSPSSLSASVGDRVTITCRASQDIGYDLGWYQQKPGKAPKRLIYAASTLQSGVPSRFSGSGSGTEFTLIISSLQPEDFATYYCLQHNSFPWTFGQGTKVEIKSGGGGSEVQLLESGGGLVQPGGSLRLSCAASGFTFSHYAMNWVRQAPGKCLEWVSAVSGGGDRTLYADAVKGRFTISRDNSKNTLFLQMNSLRAEDTAIYYCARLRGFYYGMDVWGQGTAVTVSSGGGGSGGGGSGGGGSDIVMTQSPLSLPVTPGEPASISCRSSQSLLHSNKYNYLDWYLQKPGQSPQLLIYLGSNRASGVPDRFSGSGSGTDFTLKISRVEAEDVGVYYCMQALQTLTFGCGTKVDIK

SEQ ID NO: 883 - protein, 752 aa, Artificial Sequence
  Synthetic
QVTLKESGPALVKPTETLTLTCTVSGFSFRNARMGVSWIRQPPGKALEWLAHIFSNDEKSYSTSLKSRLTISKDTSKSQVVLTLTNMDPVDTATYFCARMPEYSSGWSGAFDIWGQGTMVTVSSGGGGSGGGGSGGGGSDIQMTQSPSSLSASVGDRVTITCRASQDIGYDLGWYQQKPGKAPKRLIYAASTLQSGVPSRFSGSGSGTEFTLIISSLQPEDFATYYCLQHNSFPWTFGQGTKVEIKSGGGGSEVQLLESGGGLVQPGGSLRLSCAASGFTFSHYAMNWVRQAPGKCLEWVSAVSGGGDRTLYADAVKGRFTISRDNSKNTLFLQMNSLRAEDTAIYYCARLRGFYYGMDVWGQGTAVTVSSGGGGSGGGGSGGGGSDIVMTQSPLSLPVTPGEPASISCRSSQSLLHSNKYNYLDWYLQKPGQSPQLLIYLGSNRASGVPDRFSGSGSGTDFTLKISRVEAEDVGVYYCMQALQTLTFGCGTKVDIKSGGGGSEVQLVESGGGLVQPGGSLKLSCAASGFTFNKYAMNWVRQAPGKGLEWVARIRSKYNNYATYYADSVKDRFTISRDDSKNTAYLQMNNLKTEDTAVYYCVRHGNFGNSYISYWAYWGQGTLVTVSSGGGGSGGGGSGGGGSQTVVTQEPSLTVSPGGTVTLTCGSSTGAVTSGNYPNWVQQKPGQAPRGLIGGTKFLAPGTPARFSGSLLGGKAALTLSGVQPEDEAEYYCVLWYSNRWVFGGGTKLTVL

SEQ ID NO: 884 - protein, 499 aa, Artificial Sequence
  Synthetic
QVTLKESGPALVKPTETLTLTCTVSGFSFRNARMGVSWIRQPPGKALEWLAHIFSNDEKSYSTSLKSRLTISKDTSKSQVVLTLTNMDPVDTATYFCARMPEYSSGWSGAFDIWGQGTMVTVSSGGGGSGGGGSGGGGSDIQMTQSPSSLSASVGDRVTITCRASQDIGYDLGWYQQKPGKAPKRLIYAASTLQSGVPSRFSGSGSGTEFTLIISSLQPEDFATYYCLQHNSFPWTFGQGTKVEIKSGGGGSEVQLLESGGGLVQPGGSLRLSCAASGFTFSHYAMSWVRQAPGKCLEWVSAVSGGGDKTLYADAVKGRFTISRDNSKNTLFLQMNSLRAEDTAIYYCARLRGFYYGMDVWGQGTTVTVSSGGGGSGGGGSGGGGSDIVLTQSPLSLPVTPGEPASISCRSSQSLLHSNKYNYLDWYLQKPGQSPQLLIYLGSNRASGVPDRFSGSGSGTDFTLKISRVEAEDVGVYYCMQALQTPPITFGCGTRLEIK

SEQ ID NO: 885 - protein, 754 aa, Artificial Sequence
  Synthetic
QVTLKESGPALVKPTETLTLTCTVSGFSFRNARMGVSWIRQPPGKALEWLAHIFSNDEKSYSTSLKSRLTISKDTSKSQVVLTLTNMDPVDTATYFCARMPEYSSGWSGAFDIWGQGTMVTVSSGGGGSGGGGSGGGGSDIQMTQSPSSLSASVGDRVTITCRASQDIGYDLGWYQQKPGKAPKRLIYAASTLQSGVPSRFSGSGSGTEFTLIISSLQPEDFATYYCLQHNSFPWTFGQGTKVEIKSGGGGSEVQLLESGGGLVQPGGSLRLSCAASGFTFSHYAMSWVRQAPGKCLEWVSAVSGGGDKTLYADAVKGRFTISRDNSKNTLFLQMNSLRAEDTAIYYCARLRGFYYGMDVWGQGTTVTVSSGGGGSGGGGSGGGGSDIVLTQSPLSLPVTPGEPASISCRSSQSLLHSNKYNYLDWYLQKPGQSPQLLIYLGSNRASGVPDRFSGSGSGTDFTLKISRVEAEDVGVYYCMQALQTPPITFGCGTRLEIKSGGGGSEVQLVESGGGLVQPGGSLKLSCAASGFTFNKYAMNWVRQAPGKGLEWVARIRSKYNNYATYYADSVKDRFTISRDDSKNTAYLQMNNLKTEDTAVYYCVRHGNFGNSYISYWAYWGQGTLVTVSSGGGGSGGGGSGGGGSQTVVTQEPSLTVSPGGTVTLTCGSSTGAVTSGNYPNWVQQKPGQAPRGLIGGTKFLAPGTPARFSGSLLGGKAALTLSGVQPEDEAEYYCVLWYSNRWVFGGGTKLTVL

SEQ ID NO: 886 - protein, 498 aa, Artificial Sequence
  Synthetic
QVTLKESGPALVKPTETLTLTCTVSGFSFRNARMGVSWIRQPPGKALEWLAHIFSNDEKSYSTSLKSRLTISKDTSKSQVVLTLTNMDPVDTATYFCARMPEYSSGWSGAFDIWGQGTMVTVSSGGGGSGGGGSGGGGSDIQMTQSPSSLSASVGDRVTITCRASQDIGYDLGWYQQKPGKAPKRLIYAASTLQSGVPSRFSGSGSGTEFTLIISSLQPEDFATYYCLQHNSFPWTFGQGTKVEIKSGGGGSEVQLLESGGGLVQPGGSLRLSCAASGFTFSHYAMSWVRQAPGKCLEWVSAISGGGDRTFYADAVKGRFTVSRDNSKNTLYLQMNSLRAEDTAVYYCAKLRGFYYGMDVWGQGTTVTVSSGGGGSGGGGSGGGGSDIVMTQSPLSLPVTPGEPASISCRSSQSLLHSNKYNYLDWYLQQPGQSPQLLIYLGSNRASGVPDRFSASGSGTDFTLKISRVEAEDVGVYYCMQGTHWPHTFGCGTKVDIK

SEQ ID NO: 887 - protein, 753 aa, Artificial Sequence
  Synthetic
QVTLKESGPALVKPTETLTLTCTVSGFSFRNARMGVSWIRQPPGKALEWLAHIFSNDEKSYSTSLKSRLTISKDTSKSQVVLTLTNMDPVDTATYFCARMPEYSSGWSGAFDIWGQGTMVTVSSGGGGSGGGGSGGGGSDIQMTQSPSSLSASVGDRVTITCRASQDIGYDLGWYQQKPGKAPKRLIYAASTLQSGVPSRFSGSGSGTEFTLIISSLQPEDFATYYCLQHNSFPWTFGQGTKVEIKSGGGGSEVQLLESGGGLVQPGGSLRLSCAASGFTFSHYAMSWVRQAPGKCLEWVSAISGGGDRTFYADAVKGRFTVSRDNSKNTLYLQMNSLRAEDTAVYYCAKLRGFYYGMDVWGQGTTVTVSSGGGGSGGGGSGGGGSDIVMTQSPLSLPVTPGEPASISCRSSQSLLHSNKYNYLDWYLQQPGQSPQLLIYLGSNRASGVPDRFSASGSGTDFTLKISRVEAEDVGVYYCMQGTHWPHTFGCGTKVDIKSGGGGSEVQLVESGGGLVQPGGSLKLSCAASGFTFNKYAMNWVRQAPGKGLEWVARIRSKYNNYATYYADSVKDRFTISRDDSKNTAYLQMNNLKTEDTAVYYCVRHGNFGNSYISYWAYWGQGTLVTVSSGGGGSGGGGSGGGGSQTVVTQEPSLTVSPGGTVTLTCGSSTGAVTSGNYPNWVQQKPGQAPRGLIGGTKFLAPGTPARFSGSLLGGKAALTLSGVQPEDEAEYYCVLWYSNRWVFGGGTKLTVL

SEQ ID NO: 888 - protein, 501 aa, Artificial Sequence
  Synthetic
QVTLKESGPALVKPTETLTLTCTLSGFSLNNARMAVSWIRQPPGKCLEWLAHIFSNDEKSYSTSLKSRLTISKDTSKSQVVLTMTNMDPEDTATYYCARIVGYGTGWYGFFDYWGQGILVTVSSGGGGSGGGGSGGGGSDIQMTQSPSSLSASVGDRVTITCRASQGIRNDLAWYQQKPGKAPKRLIYAASSLQSGVPSRFSGSGSGTEFTLTISSLQPEDFATYYCLQHNSYPLTFGCGTKVEIKSGGGGSQVQLQESGPGLVKPSETLSLTCTVSGGSVSGGGYYWSWIRQPPGKCLEWIGYIYYSGSTNYNPSLKSRVTMSVGPSKNQFSLKLRSVTAADTAVYYCARDQGSSSDAFDIWGQGTMVTVSSGGGGSGGGGSGGGGSDIVMTQSPDSLAVSLGERATINCKSSQSVLYSSNNKNYLAWYQQKPGQPPKLLIYWASTRESGVPDRFSGSGSGTDFTLTISSLQAEDVAVYYCQQYYSTPFTFGCGTKVDIK

SEQ ID NO: 889 - protein, 756 aa, Artificial Sequence
  Synthetic
QVTLKESGPALVKPTETLTLTCTLSGFSLNNARMAVSWIRQPPGKCLEWLAHIFSNDEKSYSTSLKSRLTISKDTSKSQVVLTMTNMDPEDTATYYCARIVGYGTGWYGFFDYWGQGILVTVSSGGGGSGGGGSGGGGSDIQMTQSPSSLSASVGDRVTITCRASQGIRNDLAWYQQKPGKAPKRLIYAASSLQSGVPSRFSGSGSGTEFTLTISSLQPEDFATYYCLQHNSYPLTFGCGTKVEIKSGGGGSQVQLQESGPGLVKPSETLSLTCTVSGGSVSGGGYYWSWIRQPPGKCLEWIGYIYYSGSTNYNPSLKSRVTMSVGPSKNQFSLKLRSVTAADTAVYYCARDQGSSSDAFDIWGQGTMVTVSSGGGGSGGGGSGGGGSDIVMTQSPDSLAVSLGERATINCKSSQSVLYSSNNKNYLAWYQQKPGQPPKLLIYWASTRESGVPDRFSGSGSGTDFTLTISSLQAEDVAVYYCQQYYSTPFTFGCGTKVDIKSGGGGSEVQLVESGGGLVQPGGSLKLSCAASGFTFNKYAMNWVRQAPGKGLEWVARIRSKYNNYATYYADSVKDRFTISRDDSKNTAYLQMNNLKTEDTAVYYCVRHGNFGNSYISYWAYWGQGTLVTVSSGGGGSGGGGSGGGGSQTVVTQEPSLTVSPGGTVTLTCGSSTGAVTSGNYPNWVQQKPGQAPRGLIGGTKFLAPGTPARFSGSLLGGKAALTLSGVQPEDEAEYYCVLWYSNRWVFGGGTKLTVL

SEQ ID NO: 890 - protein, 497 aa, Artificial Sequence
  Synthetic
QVTLKESGPALVKPTETLTLTCTLSGFSLNNARMAVSWIRQPPGKCLEWLAHIFSNDEKSYSTSLKSRLTISKDTSKSQVVLTMTNMDPEDTATYYCARIVGYGTGWYGFFDYWGQGILVTVSSGGGGSGGGGSGGGGSDIQMTQSPSSLSASVGDRVTITCRASQGIRNDLAWYQQKPGKAPKRLIYAASSLQSGVPSRFSGSGSGTEFTLTISSLQPEDFATYYCLQHNSYPLTFGCGTKVEIKSGGGGSEVQLLESGGGLVQPGGSLRLSCAASGFTFSHYAMNWVRQAPGKCLEWVSAVSGGGDRTLYADAVKGRFTISRDNSKNTLFLQMNSLRAEDTAIYYCARLRGFYYGMDVWGQGTAVTVSSGGGGSGGGGSGGGGSDIVMTQSPLSLPVTPGEPASISCRSSQSLLHSNKYNYLDWYLQKPGQSPQLLIYLGSNRASGVPDRFSGSGSGTDFTLKISRVEAEDVGVYYCMQALQTLTFGCGTKVDIK

SEQ ID NO: 891 - protein, 752 aa, Artificial Sequence
  Synthetic
QVTLKESGPALVKPTETLTLTCTLSGFSLNNARMAVSWIRQPPGKCLEWLAHIFSNDEKSYSTSLKSRLTISKDTSKSQVVLTMTNMDPEDTATYYCARIVGYGTGWYGFFDYWGQGILVTVSSGGGGSGGGGSGGGGSDIQMTQSPSSLSASVGDRVTITCRASQGIRNDLAWYQQKPGKAPKRLIYAASSLQSGVPSRFSGSGSGTEFTLTISSLQPEDFATYYCLQHNSYPLTFGCGTKVEIKSGGGGSEVQLLESGGGLVQPGGSLRLSCAASGFTFSHYAMNWVRQAPGKCLEWVSAVSGGGDRTLYADAVKGRFTISRDNSKNTLFLQMNSLRAEDTAIYYCARLRGFYYGMDVWGQGTAVTVSSGGGGSGGGGSGGGGSDIVMTQSPLSLPVTPGEPASISCRSSQSLLHSNKYNYLDWYLQKPGQSPQLLIYLGSNRASGVPDRFSGSGSGTDFTLKISRVEAEDVGVYYCMQALQTLTFGCGTKVDIKSGGGGSEVQLVESGGGLVQPGGSLKLSCAASGFTFNKYAMNWVRQAPGKGLEWVARIRSKYNNYATYYADSVKDRFTISRDDSKNTAYLQMNNLKTEDTAVYYCVRHGNFGNSYISYWAYWGQGTLVTVSSGGGGSGGGGSGGGGSQTVVTQEPSLTVSPGGTVTLTCGSSTGAVTSGNYPNWVQQKPGQAPRGLIGGTKFLAPGTPARFSGSLLGGKAALTLSGVQPEDEAEYYCVLWYSNRWVFGGGTKLTVL

SEQ ID NO: 892 - protein, 499 aa, Artificial Sequence
  Synthetic
QVTLKESGPALVKPTETLTLTCTLSGFSLNNARMAVSWIRQPPGKCLEWLAHIFSNDEKSYSTSLKSRLTISKDTSKSQVVLTMTNMDPEDTATYYCARIVGYGTGWYGFFDYWGQGILVTVSSGGGGSGGGGSGGGGSDIQMTQSPSSLSASVGDRVTITCRASQGIRNDLAWYQQKPGKAPKRLIYAASSLQSGVPSRFSGSGSGTEFTLTISSLQPEDFATYYCLQHNSYPLTFGCGTKVEIKSGGGGSEVQLLESGGGLVQPGGSLRLSCAASGFTFSHYAMSWVRQAPGKCLEWVSAVSGGGDKTLYADAVKGRFTISRDNSKNTLFLQMNSLRAEDTAIYYCARLRGFYYGMDVWGQGTTVTVSSGGGGSGGGGSGGGGSDIVLTQSPLSLPVTPGEPASISCRSSQSLLHSNKYNYLDWYLQKPGQSPQLLIYLGSNRASGVPDRFSGSGSGTDFTLKISRVEAEDVGVYYCMQALQTPPITFGCGTRLEIK

SEQ ID NO: 893 - protein, 754 aa, Artificial Sequence
  Synthetic
QVTLKESGPALVKPTETLTLTCTLSGFSLNNARMAVSWIRQPPGKCLEWLAHIFSNDEKSYSTSLKSRLTISKDTSKSQVVLTMTNMDPEDTATYYCARIVGYGTGWYGFFDYWGQGILVTVSSGGGGSGGGGSGGGGSDIQMTQSPSSLSASVGDRVTITCRASQGIRNDLAWYQQKPGKAPKRLIYAASSLQSGVPSRFSGSGSGTEFTLTISSLQPEDFATYYCLQHNSYPLTFGCGTKVEIKSGGGGSEVQLLESGGGLVQPGGSLRLSCAASGFTFSHYAMSWVRQAPGKCLEWVSAVSGGGDKTLYADAVKGRFTISRDNSKNTLFLQMNSLRAEDTAIYYCARLRGFYYGMDVWGQGTTVTVSSGGGGSGGGGSGGGGSDIVLTQSPLSLPVTPGEPASISCRSSQSLLHSNKYNYLDWYLQKPGQSPQLLIYLGSNRASGVPDRFSGSGSGTDFTLKISRVEAEDVGVYYCMQALQTPPITFGCGTRLEIKSGGGGSEVQLVESGGGLVQPGGSLKLSCAASGFTFNKYAMNWVRQAPGKGLEWVARIRSKYNNYATYYADSVKDRFTISRDDSKNTAYLQMNNLKTEDTAVYYCVRHGNFGNSYISYWAYWGQGTLVTVSSGGGGSGGGGSGGGGSQTVVTQEPSLTVSPGGTVTLTCGSSTGAVTSGNYPNWVQQKPGQAPRGLIGGTKFLAPGTPARFSGSLLGGKAALTLSGVQPEDEAEYYCVLWYSNRWVFGGGTKLTVL

SEQ ID NO: 894 - protein, 498 aa, Artificial Sequence
  Synthetic
QVTLKESGPALVKPTETLTLTCTLSGFSLNNARMAVSWIRQPPGKCLEWLAHIFSNDEKSYSTSLKSRLTISKDTSKSQVVLTMTNMDPEDTATYYCARIVGYGTGWYGFFDYWGQGILVTVSSGGGGSGGGGSGGGGSDIQMTQSPSSLSASVGDRVTITCRASQGIRNDLAWYQQKPGKAPKRLIYAASSLQSGVPSRFSGSGSGTEFTLTISSLQPEDFATYYCLQHNSYPLTFGCGTKVEIKSGGGGSEVQLLESGGGLVQPGGSLRLSCAASGFTFSHYAMSWVRQAPGKCLEWVSAISGGGDRTFYADAVKGRFTVSRDNSKNTLYLQMNSLRAEDTAVYYCAKLRGFYYGMDVWGQGTTVTVSSGGGGSGGGGSGGGGSDIVMTQSPLSLPVTPGEPASISCRSSQSLLHSNKYNYLDWYLQQPGQSPQLLIYLGSNRASGVPDRFSASGSGTDFTLKISRVEAEDVGVYYCMQGTHWPHTFGCGTKVDIK

SEQ ID NO: 895 - protein, 753 aa, Artificial Sequence
  Synthetic
QVTLKESGPALVKPTETLTLTCTLSGFSLNNARMAVSWIRQPPGKCLEWLAHIFSNDEKSYSTSLKSRLTISKDTSKSQVVLTMTNMDPEDTATYYCARIVGYGTGWYGFFDYWGQGILVTVSSGGGGSGGGGSGGGGSDIQMTQSPSSLSASVGDRVTITCRASQGIRNDLAWYQQKPGKAPKRLIYAASSLQSGVPSRFSGSGSGTEFTLTISSLQPEDFATYYCLQHNSYPLTFGCGTKVEIKSGGGGSEVQLLESGGGLVQPGGSLRLSCAASGFTFSHYAMSWVRQAPGKCLEWVSAISGGGDRTFYADAVKGRFTVSRDNSKNTLYLQMNSLRAEDTAVYYCAKLRGFYYGMDVWGQGTTVTVSSGGGGSGGGGSGGGGSDIVMTQSPLSLPVTPGEPASISCRSSQSLLHSNKYNYLDWYLQQPGQSPQLLIYLGSNRASGVPDRFSASGSGTDFTLKISRVEAEDVGVYYCMQGTHWPHTFGCGTKVDIKSGGGGSEVQLVESGGGLVQPGGSLKLSCAASGFTFNKYAMNWVRQAPGKGLEWVARIRSKYNNYATYYADSVKDRFTISRDDSKNTAYLQMNNLKTEDTAVYYCVRHGNFGNSYISYWAYWGQGTLVTVSSGGGGSGGGGSGGGGSQTVVTQEPSLTVSPGGTVTLTCGSSTGAVTSGNYPNWVQQKPGQAPRGLIGGTKFLAPGTPARFSGSLLGGKAALTLSGVQPEDEAEYYCVLWYSNRWVFGGGTKLTVL

SEQ ID NO: 896 - protein, 5 aa, Artificial Sequence
  Synthetic
SYGMH

SEQ ID NO: 897 - protein, 17 aa, Artificial Sequence
  Synthetic
VTSYDANNVYYHPSVKG

SEQ ID NO: 898 - protein, 17 aa, Artificial Sequence
  Synthetic
DYSSYWDFRYYYYGMDV

SEQ ID NO: 899 - protein, 11 aa, Artificial Sequence
  Synthetic
SGDALPKQYAY

SEQ ID NO: 900 - protein, 7 aa, Artificial Sequence
  Synthetic
KDAERPS

SEQ ID NO: 901 - protein, 11 aa, Artificial Sequence
  Synthetic
QSTDQSGTYMI

SEQ ID NO: 902 - protein, 126 aa, Artificial Sequence
  Synthetic
QVQLVESGGGVVQPGRSLRLSCAASGFTFSSYGMHWVRQAPGKCLDWVAVTSYDANNVYYHPSVKGRFTISRDNSKNTLYLQMNSLRAEDTAVYYCARDYSSYWDFRYYYYGMDVWGQGTTVTVSS

SEQ ID NO: 903 - protein, 107 aa, Artificial Sequence
  Synthetic
YELTQPPSVSVSPGQTARITCSGDALPKQYAYWYQQKPGQAPVLVIYKDAERPSGIPERFSGSSSGTTVTLTISGVQAKDKADYYCQSTDQSGTYMIFGCGTRLTVL

SEQ ID NO: 904 - protein, 249 aa, Artificial Sequence
  Synthetic
QVQLVESGGGVVQPGRSLRLSCAASGFTFSSYGMHWVRQAPGKCLDWVAVTSYDANNVYYHPSVKGRFTISRDNSKNTLYLQMNSLRAEDTAVYYCARDYSSYWDFRYYYYGMDVWGQGTTVTVSSGGGGSGGGGSGGGGSSYELTQPPSVSVSPGQTARITCSGDALPKQYAYWYQQKPGQAPVLVIYKDAERPSGIPERFSGSSSGTTVTLTISGVQAKDKADYYCQSTDQSGTYMIFGCGTRLTVL

SEQ ID NO: 905 - protein, 504 aa, Artificial Sequence
  Synthetic
QVQLVESGGGVVQPGRSLRLSCAASGFTFSSYGMHWVRQAPGKCLDWVAVTSYDANNVYYHPSVKGRFTISRDNSKNTLYLQMNSLRAEDTAVYYCARDYSSYWDFRYYYYGMDVWGQGTTVTVSSGGGGSGGGGSGGGGSSYELTQPPSVSVSPGQTARITCSGDALPKQYAYWYQQKPGQAPVLVIYKDAERPSGIPERFSGSSSGTTVTLTISGVQAKDKADYYCQSTDQSGTYMIFGCGTRLTVLSGGGGSEVQLVESGGGLVQPGGSLKLSCAASGFTFNKYAMNWVRQAPGKGLEWVARIRSKYNNYATYYADSVKDRFTISRDDSKNTAYLQMNNLKTEDTAVYYCVRHGNFGNSYISYWAYWGQGTLVTVSSGGGGSGGGGSGGGGSQTVVTQEPSLTVSPGGTVTLTCGSSTGAVTSGNYPNWVQQKPGQAPRGLIGGTKFLAPGTPARFSGSLLGGKAALTLSGVQPEDEAEYYCVLWYSNRWVFGGGTKLTVL

SEQ ID NO: 906 - protein, 992 aa, Artificial Sequence
  Synthetic
QVQLVESGGGVVQPGRSLRLSCAASGFTFSSYGMHWVRQAPGKCLDWVAVTSYDANNVYYHPSVKGRFTISRDNSKNTLYLQMNSLRAEDTAVYYCARDYSSYWDFRYYYYGMDVWGQGTTVTVSSGGGGSGGGGSGGGGSSYELTQPPSVSVSPGQTARITCSGDALPKQYAYWYQQKPGQAPVLVIYKDAERPSGIPERFSGSSSGTTVTLTISGVQAKDKADYYCQSTDQSGTYMIFGCGTRLTVLSGGGGSEVQLVESGGGLVQPGGSLKLSCAASGFTFNKYAMNWVRQAPGKGLEWVARIRSKYNNYATYYADSVKDRFTISRDDSKNTAYLQMNNLKTEDTAVYYCVRHGNFGNSYISYWAYWGQGTLVTVSSGGGGSGGGGSGGGGSQTVVTQEPSLTVSPGGTVTLTCGSSTGAVTSGNYPNWVQQKPGQAPRGLIGGTKFLAPGTPARFSGSLLGGKAALTLSGVQPEDEAEYYCVLWYSNRWVFGGGTKLTVLGGGGDKTHTCPPCPAPELLGGPSVFLFPPKPKDTLMISRTPEVTCVVVDVSHEDPEVKFNWYVDGVEVHNAKTKPCEEQYGSTYRCVSVLTVLHQDWLNGKEYKCKVSNKALPAPIEKTISKAKGQPREPQVYTLPPSREEMTKNQVSLTCLVKGFYPSDIAVEWESNGQPENNYKTTPPVLDSDGSFFLYSKLTVDKSRWQQGNVFSCSVMHEALHNHYTQKSLSLSPGKGGGGSGGGGSGGGGSGGGGSGGGGSGGGGSDKTHTCPPCPAPELLGGPSVFLFPPKPKDTLMISRTPEVTCVVVDVSHEDPEVKFNWYVDGVEVHNAKTKPCEEQYGSTYRCVSVLTVLHQDWLNGKEYKCKVSNKALPAPIEKTISKAKGQPREPQVYTLPPSREEMTKNQVSLTCLVKGFYPSDIAVEWESNGQPENNYKTTPPVLDSDGSFFLYSKLTVDKSRWQQGNVFSCSVMHEALHNHYTQKSLSLSPGK

SEQ ID NO: 907 - protein, 5 aa, Artificial Sequence
  Synthetic
SYGMH

SEQ ID NO: 908 - protein, 17 aa, Artificial Sequence
  Synthetic
VTSYDANNVYYHPSVKG

SEQ ID NO: 909 - protein, 17 aa, Artificial Sequence
  Synthetic
DYSSYWDFRYYYYGMDV

SEQ ID NO: 910 - protein, 11 aa, Artificial Sequence
  Synthetic
SGDALPKQYAY

SEQ ID NO: 911 - protein, 7 aa, Artificial Sequence
  Synthetic
KDAERPS

SEQ ID NO: 912 - protein, 11 aa, Artificial Sequence
  Synthetic
QSTDNSGTYMI

SEQ ID NO: 913 - protein, 126 aa, Artificial Sequence
  Synthetic
QVQLVESGGGVVQPGRSLRLSCAASGFTFSSYGMHWVRQAPGKCLDWVAVTSYDANNVYYHPSVKGRFTISRDNSKNTLNLQMNSLRAEDTAVYYCARDYSSYWDFRYYYYGMDVWGQGTTVTVSS

SEQ ID NO: 914 - protein, 107 aa, Artificial Sequence
  Synthetic
YELTQPPSVSVSPGQTARITCSGDALPKQYAYWYQQKPGQAPVLVIYKDAERPSGIPERFSGSSSGTTVTLTISGVQAKDKADYYCQSTDNSGTYMIFGCGTRLTVL

SEQ ID NO: 915 - protein, 249 aa, Artificial Sequence
  Synthetic
QVQLVESGGGVVQPGRSLRLSCAASGFTFSSYGMHWVRQAPGKCLDWVAVTSYDANNVYYHPSVKGRFTISRDNSKNTLNLQMNSLRAEDTAVYYCARDYSSYWDFRYYYYGMDVWGQGTTVTVSSGGGGSGGGGSGGGGSSYELTQPPSVSVSPGQTARITCSGDALPKQYAYWYQQKPGQAPVLVIYKDAERPSGIPERFSGSSSGTTVTLTISGVQAKDKADYYCQSTDNSGTYMIFGCGTRLTVL

SEQ ID NO: 916 - protein, 504 aa, Artificial Sequence
  Synthetic
QVQLVESGGGVVQPGRSLRLSCAASGFTFSSYGMHWVRQAPGKCLDWVAVTSYDANNVYYHPSVKGRFTISRDNSKNTLNLQMNSLRAEDTAVYYCARDYSSYWDFRYYYYGMDVWGQGTTVTVSSGGGGSGGGGSGGGGSSYELTQPPSVSVSPGQTARITCSGDALPKQYAYWYQQKPGQAPVLVIYKDAERPSGIPERFSGSSSGTTVTLTISGVQAKDKADYYCQSTDNSGTYMIFGCGTRLTVLSGGGGSEVQLVESGGGLVQPGGSLKLSCAASGFTFNKYAMNWVRQAPGKGLEWVARIRSKYNNYATYYADSVKDRFTISRDDSKNTAYLQMNNLKTEDTAVYYCVRHGNFGNSYISYWAYWGQGTLVTVSSGGGGSGGGGSGGGGSQTVVTQEPSLTVSPGGTVTLTCGSSTGAVTSGNYPNWVQQKPGQAPRGLIGGTKFLAPGTPARFSGSLLGGKAALTLSGVQPEDEAEYYCVLWYSNRWVFGGGTKLTVL

SEQ ID NO: 917 - protein, 992 aa, Artificial Sequence
  Synthetic
QVQLVESGGGVVQPGRSLRLSCAASGFTFSSYGMHWVRQAPGKCLDWVAVTSYDANNVYYHPSVKGRFTISRDNSKNTLNLQMNSLRAEDTAVYYCARDYSSYWDFRYYYYGMDVWGQGTTVTVSSGGGGSGGGGSGGGGSSYELTQPPSVSVSPGQTARITCSGDALPKQYAYWYQQKPGQAPVLVIYKDAERPSGIPERFSGSSSGTTVTLTISGVQAKDKADYYCQSTDNSGTYMIFGCGTRLTVLSGGGGSEVQLVESGGGLVQPGGSLKLSCAASGFTFNKYAMNWVRQAPGKGLEWVARIRSKYNNYATYYADSVKDRFTISRDDSKNTAYLQMNNLKTEDTAVYYCVRHGNFGNSYISYWAYWGQGTLVTVSSGGGGSGGGGSGGGGSQTVVTQEPSLTVSPGGTVTLTCGSSTGAVTSGNYPNWVQQKPGQAPRGLIGGTKFLAPGTPARFSGSLLGGKAALTLSGVQPEDEAEYYCVLWYSNRWVFGGGTKLTVLGGGGDKTHTCPPCPAPELLGGPSVFLFPPKPKDTLMISRTPEVTCVVVDVSHEDPEVKFNWYVDGVEVHNAKTKPCEEQYGSTYRCVSVLTVLHQDWLNGKEYKCKVSNKALPAPIEKTISKAKGQPREPQVYTLPPSREEMTKNQVSLTCLVKGFYPSDIAVEWESNGQPENNYKTTPPVLDSDGSFFLYSKLTVDKSRWQQGNVFSCSVMHEALHNHYTQKSLSLSPGKGGGGSGGGGSGGGGSGGGGSGGGGSGGGGSDKTHTCPPCPAPELLGGPSVFLFPPKPKDTLMISRTPEVTCVVVDVSHEDPEVKFNWYVDGVEVHNAKTKPCEEQYGSTYRCVSVLTVLHQDWLNGKEYKCKVSNKALPAPIEKTISKAKGQPREPQVYTLPPSREEMTKNQVSLTCLVKGFYPSDIAVEWESNGQPENNYKTTPPVLDSDGSFFLYSKLTVDKSRWQQGNVFSCSVMHEALHNHYTQKSLSLSPGK

SEQ ID NO: 918 - protein, 5 aa, Artificial Sequence
  Synthetic
SYGMH

SEQ ID NO: 919 - protein, 17 aa, Artificial Sequence
  Synthetic
VTSYDANNVYYHPSVKG

SEQ ID NO: 920 - protein, 17 aa, Artificial Sequence
  Synthetic
DYSSYWDFRYYYYGMDV

SEQ ID NO: 921 - protein, 11 aa, Artificial Sequence
  Synthetic
SGDALPKQYAY

SEQ ID NO: 922 - protein, 7 aa, Artificial Sequence
  Synthetic
KDAERPS

SEQ ID NO: 923 - protein, 11 aa, Artificial Sequence
  Synthetic
QSTDQSGTYMI

SEQ ID NO: 924 - protein, 126 aa, Artificial Sequence; identical to SEQ ID NO: 913
  Synthetic

SEQ ID NO: 925 - protein, 107 aa, Artificial Sequence; identical to SEQ ID NO: 903
  Synthetic

SEQ ID NO: 926 - protein, 249 aa, Artificial Sequence
  Synthetic
QVQLVESGGGVVQPGRSLRLSCAASGFTFSSYGMHWVRQAPGKCLDWVAVTSYDANNVYYHPSVKGRFTISRDNSKNTLNLQMNSLRAEDTAVYYCARDYSSYWDFRYYYYGMDVWGQGTTVTVSSGGGGSGGGGSGGGGSSYELTQPPSVSVSPGQTARITCSGDALPKQYAYWYQQKPGQAPVLVIYKDAERPSGIPERFSGSSSGTTVTLTISGVQAKDKADYYCQSTDQSGTYMIFGCGTRLTVL

SEQ ID NO: 927 - protein, 504 aa, Artificial Sequence
  Synthetic
QVQLVESGGGVVQPGRSLRLSCAASGFTFSSYGMHWVRQAPGKCLDWVAVTSYDANNVYYHPSVKGRFTISRDNSKNTLNLQMNSLRAEDTAVYYCARDYSSYWDFRYYYYGMDVWGQGTTVTVSSGGGGSGGGGSGGGGSSYELTQPPSVSVSPGQTARITCSGDALPKQYAYWYQQKPGQAPVLVIYKDAERPSGIPERFSGSSSGTTVTLTISGVQAKDKADYYCQSTDQSGTYMIFGCGTRLTVLSGGGGSEVQLVESGGGLVQPGGSLKLSCAASGFTFNKYAMNWVRQAPGKGLEWVARIRSKYNNYATYYADSVKDRFTISRDDSKNTAYLQMNNLKTEDTAVYYCVRHGNFGNSYISYWAYWGQGTLVTVSSGGGGSGGGGSGGGGSQTVVTQEPSLTVSPGGTVTLTCGSSTGAVTSGNYPNWVQQKPGQAPRGLIGGTKFLAPGTPARFSGSLLGGKAALTLSGVQPEDEAEYYCVLWYSNRWVFGGGTKLTVL

SEQ ID NO: 928 - protein, 992 aa, Artificial Sequence
  Synthetic
QVQLVESGGGVVQPGRSLRLSCAASGFTFSSYGMHWVRQAPGKCLDWVAVTSYDANNVYYHPSVKGRFTISRDNSKNTLNLQMNSLRAEDTAVYYCARDYSSYWDFRYYYYGMDVWGQGTTVTVSSGGGGSGGGGSGGGGSSYELTQPPSVSVSPGQTARITCSGDALPKQYAYWYQQKPGQAPVLVIYKDAERPSGIPERFSGSSSGTTVTLTISGVQAKDKADYYCQSTDQSGTYMIFGCGTRLTVLSGGGGSEVQLVESGGGLVQPGGSLKLSCAASGFTFNKYAMNWVRQAPGKGLEWVARIRSKYNNYATYYADSVKDRFTISRDDSKNTAYLQMNNLKTEDTAVYYCVRHGNFGNSYISYWAYWGQGTLVTVSSGGGGSGGGGSGGGGSQTVVTQEPSLTVSPGGTVTLTCGSSTGAVTSGNYPNWVQQKPGQAPRGLIGGTKFLAPGTPARFSGSLLGGKAALTLSGVQPEDEAEYYCVLWYSNRWVFGGGTKLTVLGGGGDKTHTCPPCPAPELLGGPSVFLFPPKPKDTLMISRTPEVTCVVVDVSHEDPEVKFNWYVDGVEVHNAKTKPCEEQYGSTYRCVSVLTVLHQDWLNGKEYKCKVSNKALPAPIEKTISKAKGQPREPQVYTLPPSREEMTKNQVSLTCLVKGFYPSDIAVEWESNGQPENNYKTTPPVLDSDGSFFLYSKLTVDKSRWQQGNVFSCSVMHEALHNHYTQKSLSLSPGKGGGGSGGGGSGGGGSGGGGSGGGGSGGGGSDKTHTCPPCPAPELLGGPSVFLFPPKPKDTLMISRTPEVTCVVVDVSHEDPEVKFNWYVDGVEVHNAKTKPCEEQYGSTYRCVSVLTVLHQDWLNGKEYKCKVSNKALPAPIEKTISKAKGQPREPQVYTLPPSREEMTKNQVSLTCLVKGFYPSDIAVEWESNGQPENNYKTTPPVLDSDGSFFLYSKLTVDKSRWQQGNVFSCSVMHEALHNHYTQKSLSLSPGK

SEQ ID NO: 929 - protein, 5 aa, Artificial Sequence
  Synthetic
SYGMH

SEQ ID NO: 930 - protein, 17 aa, Artificial Sequence
  Synthetic
VTSYDANNKYYASSVKG

SEQ ID NO: 931 - protein, 17 aa, Artificial Sequence
  Synthetic
DYSSYWDFRYYYYGMDV

SEQ ID NO: 932 - protein, 11 aa, Artificial Sequence
  Synthetic
SGDALPKQYAY

SEQ ID NO: 933 - protein, 7 aa, Artificial Sequence
  Synthetic
KDAERPS

SEQ ID NO: 934 - protein, 11 aa, Artificial Sequence
  Synthetic
QSTDNSGTYMI

SEQ ID NO: 935 - protein, 126 aa, Artificial Sequence
  Synthetic
QVQLVESGGGVVQPGRSLRLSCAASGFTFSSYGMHWVRQAPGKCLDWVAVTSYDANNKYYASSVKGRFTISRDNSKNTLYLQMNSLRAEDTAVYYCARDYSSYWDFRYYYYGMDVWGQGTTVTVSS

SEQ ID NO: 936 - protein, 107 aa, Artificial Sequence; identical to SEQ ID NO: 914
  Synthetic

SEQ ID NO: 937 - protein, 249 aa, Artificial Sequence
  Synthetic
QVQLVESGGGVVQPGRSLRLSCAASGFTFSSYGMHWVRQAPGKCLDWVAVTSYDANNKYYASSVKGRFTISRDNSKNTLYLQMNSLRAEDTAVYYCARDYSSYWDFRYYYYGMDVWGQGTTVTVSSGGGGSGGGGSGGGGSSYELTQPPSVSVSPGQTARITCSGDALPKQYAYWYQQKPGQAPVLVIYKDAERPSGIPERFSGSSSGTTVTLTISGVQAKDKADYYCQSTDNSGTYMIFGCGTRLTVL

SEQ ID NO: 938 - protein, 504 aa, Artificial Sequence
  Synthetic
QVQLVESGGGVVQPGRSLRLSCAASGFTFSSYGMHWVRQAPGKCLDWVAVTSYDANNKYYASSVKGRFTISRDNSKNTLYLQMNSLRAEDTAVYYCARDYSSYWDFRYYYYGMDVWGQGTTVTVSSGGGGSGGGGSGGGGSSYELTQPPSVSVSPGQTARITCSGDALPKQYAYWYQQKPGQAPVLVIYKDAERPSGIPERFSGSSSGTTVTLTISGVQAKDKADYYCQSTDNSGTYMIFGCGTRLTVLSGGGGSEVQLVESGGGLVQPGGSLKLSCAASGFTFNKYAMNWVRQAPGKGLEWVARIRSKYNNYATYYADSVKDRFTISRDDSKNTAYLQMNNLKTEDTAVYYCVRHGNFGNSYISYWAYWGQGTLVTVSSGGGGSGGGGSGGGGSQTVVTQEPSLTVSPGGTVTLTCGSSTGAVTSGNYPNWVQQKPGQAPRGLIGGTKFLAPGTPARFSGSLLGGKAALTLSGVQPEDEAEYYCVLWYSNRWVFGGGTKLTVL

SEQ ID NO: 939 - protein, 992 aa, Artificial Sequence
  Synthetic
QVQLVESGGGVVQPGRSLRLSCAASGFTFSSYGMHWVRQAPGKCLDWVAVTSYDANNKYYASSVKGRFTISRDNSKNTLYLQMNSLRAEDTAVYYCARDYSSYWDFRYYYYGMDVWGQGTTVTVSSGGGGSGGGGSGGGGSSYELTQPPSVSVSPGQTARITCSGDALPKQYAYWYQQKPGQAPVLVIYKDAERPSGIPERFSGSSSGTTVTLTISGVQAKDKADYYCQSTDNSGTYMIFGCGTRLTVLSGGGGSEVQLVESGGGLVQPGGSLKLSCAASGFTFNKYAMNWVRQAPGKGLEWVARIRSKYNNYATYYADSVKDRFTISRDDSKNTAYLQMNNLKTEDTAVYYCVRHGNFGNSYISYWAYWGQGTLVTVSSGGGGSGGGGSGGGGSQTVVTQEPSLTVSPGGTVTLTCGSSTGAVTSGNYPNWVQQKPGQAPRGLIGGTKFLAPGTPARFSGSLLGGKAALTLSGVQPEDEAEYYCVLWYSNRWVFGGGTKLTVLGGGGDKTHTCPPCPAPELLGGPSVFLFPPKPKDTLMISRTPEVTCVVVDVSHEDPEVKFNWYVDGVEVHNAKTKPCEEQYGSTYRCVSVLTVLHQDWLNGKEYKCKVSNKALPAPIEKTISKAKGQPREPQVYTLPPSREEMTKNQVSLTCLVKGFYPSDIAVEWESNGQPENNYKTTPPVLDSDGSFFLYSKLTVDKSRWQQGNVFSCSVMHEALHNHYTQKSLSLSPGKGGGGSGGGGSGGGGSGGGGSGGGGSGGGGSDKTHTCPPCPAPELLGGPSVFLFPPKPKDTLMISRTPEVTCVVVDVSHEDPEVKFNWYVDGVEVHNAKTKPCEEQYGSTYRCVSVLTVLHQDWLNGKEYKCKVSNKALPAPIEKTISKAKGQPREPQVYTLPPSREEMTKNQVSLTCLVKGFYPSDIAVEWESNGQPENNYKTTPPVLDSDGSFFLYSKLTVDKSRWQQGNVFSCSVMHEALHNHYTQKSLSLSPGK

SEQ ID NO: 940 - protein, 5 aa, Artificial Sequence
  Synthetic
SYGMH

SEQ ID NO: 941 - protein, 17 aa, Artificial Sequence
  Synthetic
VTSYDANNKYYASSVKG

SEQ ID NO: 942 - protein, 17 aa, Artificial Sequence
  Synthetic
DYSSYWDFRYYYYGMDV

SEQ ID NO: 943 - protein, 11 aa, Artificial Sequence
  Synthetic
SGDALPKQYAY

SEQ ID NO: 944 - protein, 7 aa, Artificial Sequence
  Synthetic
KDAERPS

SEQ ID NO: 945 - protein, 11 aa, Artificial Sequence
  Synthetic
QSTDQSGTYMI

SEQ ID NO: 946 - protein, 126 aa, Artificial Sequence; identical to SEQ ID NO: 935
  Synthetic

SEQ ID NO: 947 - protein, 107 aa, Artificial Sequence; identical to SEQ ID NO: 903
  Synthetic

SEQ ID NO: 948 - protein, 249 aa, Artificial Sequence
  Synthetic
QVQLVESGGGVVQPGRSLRLSCAASGFTFSSYGMHWVRQAPGKCLDWVAVTSYDANNKYYASSVKGRFTISRDNSKNTLYLQMNSLRAEDTAVYYCARDYSSYWDFRYYYYGMDVWGQGTTVTVSSGGGGSGGGGSGGGGSSYELTQPPSVSVSPGQTARITCSGDALPKQYAYWYQQKPGQAPVLVIYKDAERPSGIPERFSGSSSGTTVTLTISGVQAKDKADYYCQSTDQSGTYMIFGCGTRLTVL

SEQ ID NO: 949 - protein, 504 aa, Artificial Sequence
  Synthetic
QVQLVESGGGVVQPGRSLRLSCAASGFTFSSYGMHWVRQAPGKCLDWVAVTSYDANNKYYASSVKGRFTISRDNSKNTLYLQMNSLRAEDTAVYYCARDYSSYWDFRYYYYGMDVWGQGTTVTVSSGGGGSGGGGSGGGGSSYELTQPPSVSVSPGQTARITCSGDALPKQYAYWYQQKPGQAPVLVIYKDAERPSGIPERFSGSSSGTTVTLTISGVQAKDKADYYCQSTDQSGTYMIFGCGTRLTVLSGGGGSEVQLVESGGGLVQPGGSLKLSCAASGFTFNKYAMNWVRQAPGKGLEWVARIRSKYNNYATYYADSVKDRFTISRDDSKNTAYLQMNNLKTEDTAVYYCVRHGNFGNSYISYWAYWGQGTLVTVSSGGGGSGGGGSGGGGSQTVVTQEPSLTVSPGGTVTLTCGSSTGAVTSGNYPNWVQQKPGQAPRGLIGGTKFLAPGTPARFSGSLLGGKAALTLSGVQPEDEAEYYCVLWYSNRWVFGGGTKLTVL

SEQ ID NO: 950 - protein, 992 aa, Artificial Sequence
  Synthetic
QVQLVESGGGVVQPGRSLRLSCAASGFTFSSYGMHWVRQAPGKCLDWVAVTSYDANNKYYASSVKGRFTISRDNSKNTLYLQMNSLRAEDTAVYYCARDYSSYWDFRYYYYGMDVWGQGTTVTVSSGGGGSGGGGSGGGGSSYELTQPPSVSVSPGQTARITCSGDALPKQYAYWYQQKPGQAPVLVIYKDAERPSGIPERFSGSSSGTTVTLTISGVQAKDKADYYCQSTDQSGTYMIFGCGTRLTVLSGGGGSEVQLVESGGGLVQPGGSLKLSCAASGFTFNKYAMNWVRQAPGKGLEWVARIRSKYNNYATYYADSVKDRFTISRDDSKNTAYLQMNNLKTEDTAVYYCVRHGNFGNSYISYWAYWGQGTLVTVSSGGGGSGGGGSGGGGSQTVVTQEPSLTVSPGGTVTLTCGSSTGAVTSGNYPNWVQQKPGQAPRGLIGGTKFLAPGTPARFSGSLLGGKAALTLSGVQPEDEAEYYCVLWYSNRWVFGGGTKLTVLGGGGDKTHTCPPCPAPELLGGPSVFLFPPKPKDTLMISRTPEVTCVVVDVSHEDPEVKFNWYVDGVEVHNAKTKPCEEQYGSTYRCVSVLTVLHQDWLNGKEYKCKVSNKALPAPIEKTISKAKGQPREPQVYTLPPSREEMTKNQVSLTCLVKGFYPSDIAVEWESNGQPENNYKTTPPVLDSDGSFFLYSKLTVDKSRWQQGNVFSCSVMHEALHNHYTQKSLSLSPGKGGGGSGGGGSGGGGSGGGGSGGGGSGGGGSDKTHTCPPCPAPELLGGPSVFLFPPKPKDTLMISRTPEVTCVVVDVSHEDPEVKFNWYVDGVEVHNAKTKPCEEQYGSTYRCVSVLTVLHQDWLNGKEYKCKVSNKALPAPIEKTISKAKGQPREPQVYTLPPSREEMTKNQVSLTCLVKGFYPSDIAVEWESNGQPENNYKTTPPVLDSDGSFFLYSKLTVDKSRWQQGNVFSCSVMHEALHNHYTQKSLSLSPGK

SEQ ID NO: 951 - protein, 5 aa, Artificial Sequence
  Synthetic
SYGMH

SEQ ID NO: 952 - protein, 17 aa, Artificial Sequence
  Synthetic
VTSYDANNKYYAESVKG

SEQ ID NO: 953 - protein, 17 aa, Artificial Sequence
  Synthetic
DYSSYWDFRYYYYGMDV

SEQ ID NO: 954 - protein, 11 aa, Artificial Sequence
  Synthetic
SGDALPKQYAY

SEQ ID NO: 955 - protein, 7 aa, Artificial Sequence
  Synthetic
KDAERPS

SEQ ID NO: 956 - protein, 11 aa, Artificial Sequence
  Synthetic
QSTDNSGTYMI

SEQ ID NO: 957 - protein, 126 aa, Artificial Sequence
  Synthetic
QVQLVESGGGVVQPGRSLRLSCAASGFTFSSYGMHWVRQAPGKCLDWVAVTSYDANNKYYAESVKGRFTISRDNSKNTLYLQMNSLRAEDTAVYYCARDYSSYWDFRYYYYGMDVWGQGTTVTVSS

SEQ ID NO: 958 - protein, 107 aa, Artificial Sequence; identical to SEQ ID NO: 914
  Synthetic

SEQ ID NO: 959 - protein, 249 aa, Artificial Sequence
  Synthetic
QVQLVESGGGVVQPGRSLRLSCAASGFTFSSYGMHWVRQAPGKCLDWVAVTSYDANNKYYAESVKGRFTISRDNSKNTLYLQMNSLRAEDTAVYYCARDYSSYWDFRYYYYGMDVWGQGTTVTVSSGGGGSGGGGSGGGGSSYELTQPPSVSVSPGQTARITCSGDALPKQYAYWYQQKPGQAPVLVIYKDAERPSGIPERFSGSSSGTTVTLTISGVQAKDKADYYCQSTDNSGTYMIFGCGTRLTVL

SEQ ID NO: 960 - protein, 504 aa, Artificial Sequence
  Synthetic
QVQLVESGGGVVQPGRSLRLSCAASGFTFSSYGMHWVRQAPGKCLDWVAVTSYDANNKYYAESVKGRFTISRDNSKNTLYLQMNSLRAEDTAVYYCARDYSSYWDFRYYYYGMDVWGQGTTVTVSSGGGGSGGGGSGGGGSSYELTQPPSVSVSPGQTARITCSGDALPKQYAYWYQQKPGQAPVLVIYKDAERPSGIPERFSGSSSGTTVTLTISGVQAKDKADYYCQSTDNSGTYMIFGCGTRLTVLSGGGGSEVQLVESGGGLVQPGGSLKLSCAASGFTFNKYAMNWVRQAPGKGLEWVARIRSKYNNYATYYADSVKDRFTISRDDSKNTAYLQMNNLKTEDTAVYYCVRHGNFGNSYISYWAYWGQGTLVTVSSGGGGSGGGGSGGGGSQTVVTQEPSLTVSPGGTVTLTCGSSTGAVTSGNYPNWVQQKPGQAPRGLIGGTKFLAPGTPARFSGSLLGGKAALTLSGVQPEDEAEYYCVLWYSNRWVFGGGTKLTVL

SEQ ID NO: 961 - protein, 992 aa, Artificial Sequence
  Synthetic
QVQLVESGGGVVQPGRSLRLSCAASGFTFSSYGMHWVRQAPGKCLDWVAVTSYDANNKYYAESVKGRFTISRDNSKNTLYLQMNSLRAEDTAVYYCARDYSSYWDFRYYYYGMDVWGQGTTVTVSSGGGGSGGGGSGGGGSSYELTQPPSVSVSPGQTARITCSGDALPKQYAYWYQQKPGQAPVLVIYKDAERPSGIPERFSGSSSGTTVTLTISGVQAKDKADYYCQSTDNSGTYMIFGCGTRLTVLSGGGGSEVQLVESGGGLVQPGGSLKLSCAASGFTFNKYAMNWVRQAPGKGLEWVARIRSKYNNYATYYADSVKDRFTISRDDSKNTAYLQMNNLKTEDTAVYYCVRHGNFGNSYISYWAYWGQGTLVTVSSGGGGSGGGGSGGGGSQTVVTQEPSLTVSPGGTVTLTCGSSTGAVTSGNYPNWVQQKPGQAPRGLIGGTKFLAPGTPARFSGSLLGGKAALTLSGVQPEDEAEYYCVLWYSNRWVFGGGTKLTVLGGGGDKTHTCPPCPAPELLGGPSVFLFPPKPKDTLMISRTPEVTCVVVDVSHEDPEVKFNWYVDGVEVHNAKTKPCEEQYGSTYRCVSVLTVLHQDWLNGKEYKCKVSNKALPAPIEKTISKAKGQPREPQVYTLPPSREEMTKNQVSLTCLVKGFYPSDIAVEWESNGQPENNYKTTPPVLDSDGSFFLYSKLTVDKSRWQQGNVFSCSVMHEALHNHYTQKSLSLSPGKGGGGSGGGGSGGGGSGGGGSGGGGSGGGGSDKTHTCPPCPAPELLGGPSVFLFPPKPKDTLMISRTPEVTCVVVDVSHEDPEVKFNWYVDGVEVHNAKTKPCEEQYGSTYRCVSVLTVLHQDWLNGKEYKCKVSNKALPAPIEKTISKAKGQPREPQVYTLPPSREEMTKNQVSLTCLVKGFYPSDIAVEWESNGQPENNYKTTPPVLDSDGSFFLYSKLTVDKSRWQQGNVFSCSVMHEALHNHYTQKSLSLSPGK

SEQ ID NO: 962 - protein, 5 aa, Artificial Sequence
  Synthetic
SYGMH

SEQ ID NO: 963 - protein, 17 aa, Artificial Sequence
  Synthetic
VTSYDANNKYYAESVKG

SEQ ID NO: 964 - protein, 17 aa, Artificial Sequence
  Synthetic
DYSSYWDFRYYYYGMDV

SEQ ID NO: 965 - protein, 11 aa, Artificial Sequence
  Synthetic
SGDALPKQYAY

SEQ ID NO: 966 - protein, 7 aa, Artificial Sequence
  Synthetic
KDAERPS

SEQ ID NO: 967 - protein, 11 aa, Artificial Sequence
  Synthetic
QSTDQSGTYMI

SEQ ID NO: 968 - protein, 126 aa, Artificial Sequence; identical to SEQ ID NO: 957
  Synthetic

SEQ ID NO: 969 - protein, 107 aa, Artificial Sequence; identical to SEQ ID NO: 903
  Synthetic

SEQ ID NO: 970 - protein, 249 aa, Artificial Sequence
  Synthetic
QVQLVESGGGVVQPGRSLRLSCAASGFTFSSYGMHWVRQAPGKCLDWVAVTSYDANNKYYAESVKGRFTISRDNSKNTLYLQMNSLRAEDTAVYYCARDYSSYWDFRYYYYGMDVWGQGTTVTVSSGGGGSGGGGSGGGGSSYELTQPPSVSVSPGQTARITCSGDALPKQYAYWYQQKPGQAPVLVIYKDAERPSGIPERFSGSSSGTTVTLTISGVQAKDKADYYCQSTDQSGTYMIFGCGTRLTVL

SEQ ID NO: 971 - protein, 504 aa, Artificial Sequence
  Synthetic
QVQLVESGGGVVQPGRSLRLSCAASGFTFSSYGMHWVRQAPGKCLDWVAVTSYDANNKYYAESVKGRFTISRDNSKNTLYLQMNSLRAEDTAVYYCARDYSSYWDFRYYYYGMDVWGQGTTVTVSSGGGGSGGGGSGGGGSSYELTQPPSVSVSPGQTARITCSGDALPKQYAYWYQQKPGQAPVLVIYKDAERPSGIPERFSGSSSGTTVTLTISGVQAKDKADYYCQSTDQSGTYMIFGCGTRLTVLSGGGGSEVQLVESGGGLVQPGGSLKLSCAASGFTFNKYAMNWVRQAPGKGLEWVARIRSKYNNYATYYADSVKDRFTISRDDSKNTAYLQMNNLKTEDTAVYYCVRHGNFGNSYISYWAYWGQGTLVTVSSGGGGSGGGGSGGGGSQTVVTQEPSLTVSPGGTVTLTCGSSTGAVTSGNYPNWVQQKPGQAPRGLIGGTKFLAPGTPARFSGSLLGGKAALTLSGVQPEDEAEYYCVLWYSNRWVFGGGTKLTVL

SEQ ID NO: 972 - protein, 992 aa, Artificial Sequence
  Synthetic
QVQLVESGGGVVQPGRSLRLSCAASGFTFSSYGMHWVRQAPGKCLDWVAVTSYDANNKYYAESVKGRFTISRDNSKNTLYLQMNSLRAEDTAVYYCARDYSSYWDFRYYYYGMDVWGQGTTVTVSSGGGGSGGGGSGGGGSSYELTQPPSVSVSPGQTARITCSGDALPKQYAYWYQQKPGQAPVLVIYKDAERPSGIPERFSGSSSGTTVTLTISGVQAKDKADYYCQSTDQSGTYMIFGCGTRLTVLSGGGGSEVQLVESGGGLVQPGGSLKLSCAASGFTFNKYAMNWVRQAPGKGLEWVARIRSKYNNYATYYADSVKDRFTISRDDSKNTAYLQMNNLKTEDTAVYYCVRHGNFGNSYISYWAYWGQGTLVTVSSGGGGSGGGGSGGGGSQTVVTQEPSLTVSPGGTVTLTCGSSTGAVTSGNYPNWVQQKPGQAPRGLIGGTKFLAPGTPARFSGSLLGGKAALTLSGVQPEDEAEYYCVLWYSNRWVFGGGTKLTVLGGGGDKTHTCPPCPAPELLGGPSVFLFPPKPKDTLMISRTPEVTCVVVDVSHEDPEVKFNWYVDGVEVHNAKTKPCEEQYGSTYRCVSVLTVLHQDWLNGKEYKCKVSNKALPAPIEKTISKAKGQPREPQVYTLPPSREEMTKNQVSLTCLVKGFYPSDIAVEWESNGQPENNYKTTPPVLDSDGSFFLYSKLTVDKSRWQQGNVFSCSVMHEALHNHYTQKSLSLSPGKGGGGSGGGGSGGGGSGGGGSGGGGSGGGGSDKTHTCPPCPAPELLGGPSVFLFPPKPKDTLMISRTPEVTCVVVDVSHEDPEVKFNWYVDGVEVHNAKTKPCEEQYGSTYRCVSVLTVLHQDWLNGKEYKCKVSNKALPAPIEKTISKAKGQPREPQVYTLPPSREEMTKNQVSLTCLVKGFYPSDIAVEWESNGQPENNYKTTPPVLDSDGSFFLYSKLTVDKSRWQQGNVFSCSVMHEALHNHYTQKSLSLSPGK

SEQ ID NO: 973 - protein, 5 aa, Artificial Sequence
  Synthetic
SYGMH

SEQ ID NO: 974 - protein, 17 aa, Artificial Sequence
  Synthetic
VTSYDANNKYYAESVKG

SEQ ID NO: 975 - protein, 17 aa, Artificial Sequence
  Synthetic
DYSSYWDFRYYYYGMDV

SEQ ID NO: 976 - protein, 11 aa, Artificial Sequence
  Synthetic
SGDALPKQYAY

SEQ ID NO: 977 - protein, 7 aa, Artificial Sequence
  Synthetic
KDAERPS

SEQ ID NO: 978 - protein, 11 aa, Artificial Sequence
  Synthetic
QSTDNSGTYMI

SEQ ID NO: 979 - protein, 126 aa, Artificial Sequence; identical to SEQ ID NO: 957
  Synthetic

SEQ ID NO: 980 - protein, 107 aa, Artificial Sequence
  Synthetic
YELTQPPSVSVSPGQTARITCSGDALPKQYAYWYQQKPGQAPVLVIYKDAERPSGIPERFSGSSSGTTVTLTISGVQAKDEADYYCQSTDNSGTYMIFGCGTRLTVL

SEQ ID NO: 981 - protein, 249 aa, Artificial Sequence
  Synthetic
QVQLVESGGGVVQPGRSLRLSCAASGFTFSSYGMHWVRQAPGKCLDWVAVTSYDANNKYYAESVKGRFTISRDNSKNTLYLQMNSLRAEDTAVYYCARDYSSYWDFRYYYYGMDVWGQGTTVTVSSGGGGSGGGGSGGGGSSYELTQPPSVSVSPGQTARITCSGDALPKQYAYWYQQKPGQAPVLVIYKDAERPSGIPERFSGSSSGTTVTLTISGVQAKDEADYYCQSTDNSGTYMIFGCGTRLTVL

SEQ ID NO: 982 - protein, 504 aa, Artificial Sequence
  Synthetic
QVQLVESGGGVVQPGRSLRLSCAASGFTFSSYGMHWVRQAPGKCLDWVAVTSYDANNKYYAESVKGRFTISRDNSKNTLYLQMNSLRAEDTAVYYCARDYSSYWDFRYYYYGMDVWGQGTTVTVSSGGGGSGGGGSGGGGSSYELTQPPSVSVSPGQTARITCSGDALPKQYAYWYQQKPGQAPVLVIYKDAERPSGIPERFSGSSSGTTVTLTISGVQAKDEADYYCQSTDNSGTYMIFGCGTRLTVLSGGGGSEVQLVESGGGLVQPGGSLKLSCAASGFTFNKYAMNWVRQAPGKGLEWVARIRSKYNNYATYYADSVKDRFTISRDDSKNTAYLQMNNLKTEDTAVYYCVRHGNFGNSYISYWAYWGQGTLVTVSSGGGGSGGGGSGGGGSQTVVTQEPSLTVSPGGTVTLTCGSSTGAVTSGNYPNWVQQKPGQAPRGLIGGTKFLAPGTPARFSGSLLGGKAALTLSGVQPEDEAEYYCVLWYSNRWVFGGGTKLTVL

SEQ ID NO: 983 - protein, 992 aa, Artificial Sequence
  Synthetic
QVQLVESGGGVVQPGRSLRLSCAASGFTFSSYGMHWVRQAPGKCLDWVAVTSYDANNKYYAESVKGRFTISRDNSKNTLYLQMNSLRAEDTAVYYCARDYSSYWDFRYYYYGMDVWGQGTTVTVSSGGGGSGGGGSGGGGSSYELTQPPSVSVSPGQTARITCSGDALPKQYAYWYQQKPGQAPVLVIYKDAERPSGIPERFSGSSSGTTVTLTISGVQAKDEADYYCQSTDNSGTYMIFGCGTRLTVLSGGGGSEVQLVESGGGLVQPGGSLKLSCAASGFTFNKYAMNWVRQAPGKGLEWVARIRSKYNNYATYYADSVKDRFTISRDDSKNTAYLQMNNLKTEDTAVYYCVRHGNFGNSYISYWAYWGQGTLVTVSSGGGGSGGGGSGGGGSQTVVTQEPSLTVSPGGTVTLTCGSSTGAVTSGNYPNWVQQKPGQAPRGLIGGTKFLAPGTPARFSGSLLGGKAALTLSGVQPEDEAEYYCVLWYSNRWVFGGGTKLTVLGGGGDKTHTCPPCPAPELLGGPSVFLFPPKPKDTLMISRTPEVTCVVVDVSHEDPEVKFNWYVDGVEVHNAKTKPCEEQYGSTYRCVSVLTVLHQDWLNGKEYKCKVSNKALPAPIEKTISKAKGQPREPQVYTLPPSREEMTKNQVSLTCLVKGFYPSDIAVEWESNGQPENNYKTTPPVLDSDGSFFLYSKLTVDKSRWQQGNVFSCSVMHEALHNHYTQKSLSLSPGKGGGGSGGGGSGGGGSGGGGSGGGGSGGGGSDKTHTCPPCPAPELLGGPSVFLFPPKPKDTLMISRTPEVTCVVVDVSHEDPEVKFNWYVDGVEVHNAKTKPCEEQYGSTYRCVSVLTVLHQDWLNGKEYKCKVSNKALPAPIEKTISKAKGQPREPQVYTLPPSREEMTKNQVSLTCLVKGFYPSDIAVEWESNGQPENNYKTTPPVLDSDGSFFLYSKLTVDKSRWQQGNVFSCSVMHEALHNHYTQKSLSLSPGK

SEQ ID NO: 984 - protein, 5 aa, Artificial Sequence
  Synthetic
SYGMH

SEQ ID NO: 985 - protein, 17 aa, Artificial Sequence
  Synthetic
VTSYDANNKYYAESVKG

SEQ ID NO: 986 - protein, 17 aa, Artificial Sequence
  Synthetic
DYSSYWDFRYYYYGMDV

SEQ ID NO: 987 - protein, 11 aa, Artificial Sequence
  Synthetic
SGDALPKQYAY

SEQ ID NO: 988 - protein, 7 aa, Artificial Sequence
  Synthetic
KDAERPS

SEQ ID NO: 989 - protein, 11 aa, Artificial Sequence
  Synthetic
QSTDNSGTYMI

SEQ ID NO: 990 - protein, 126 aa, Artificial Sequence; identical to SEQ ID NO: 957
  Synthetic

SEQ ID NO: 991 - protein, 107 aa, Artificial Sequence
  Synthetic
YELTQPPSVSVSPGQTARITCSGDALPKQYAYWYQQKPGQAPVLVIYKDAERPSGIPERFSGSSSGTTVTLTISGVQAEDEADYYCQSTDNSGTYMIFGCGTRLTVL

SEQ ID NO: 992 - protein, 249 aa, Artificial Sequence
  Synthetic
QVQLVESGGGVVQPGRSLRLSCAASGFTFSSYGMHWVRQAPGKCLDWVAVTSYDANNKYYAESVKGRFTISRDNSKNTLYLQMNSLRAEDTAVYYCARDYSSYWDFRYYYYGMDVWGQGTTVTVSSGGGGSGGGGSGGGGSSYELTQPPSVSVSPGQTARITCSGDALPKQYAYWYQQKPGQAPVLVIYKDAERPSGIPERFSGSSSGTTVTLTISGVQAEDEADYYCQSTDNSGTYMIFGCGTRLTVL

SEQ ID NO: 993 - protein, 504 aa, Artificial Sequence
  Synthetic
QVQLVESGGGVVQPGRSLRLSCAASGFTFSSYGMHWVRQAPGKCLDWVAVTSYDANNKYYAESVKGRFTISRDNSKNTLYLQMNSLRAEDTAVYYCARDYSSYWDFRYYYYGMDVWGQGTTVTVSSGGGGSGGGGSGGGGSSYELTQPPSVSVSPGQTARITCSGDALPKQYAYWYQQKPGQAPVLVIYKDAERPSGIPERFSGSSSGTTVTLTISGVQAEDEADYYCQSTDNSGTYMIFGCGTRLTVLSGGGGSEVQLVESGGGLVQPGGSLKLSCAASGFTFNKYAMNWVRQAPGKGLEWVARIRSKYNNYATYYADSVKDRFTISRDDSKNTAYLQMNNLKTEDTAVYYCVRHGNFGNSYISYWAYWGQGTLVTVSSGGGGSGGGGSGGGGSQTVVTQEPSLTVSPGGTVTLTCGSSTGAVTSGNYPNWVQQKPGQAPRGLIGGTKFLAPGTPARFSGSLLGGKAALTLSGVQPEDEAEYYCVLWYSNRWVFGGGTKLTVL

SEQ ID NO: 994 - protein, 992 aa, Artificial Sequence
  Synthetic
QVQLVESGGGVVQPGRSLRLSCAASGFTFSSYGMHWVRQAPGKCLDWVAVTSYDANNKYYAESVKGRFTISRDNSKNTLYLQMNSLRAEDTAVYYCARDYSSYWDFRYYYYGMDVWGQGTTVTVSSGGGGSGGGGSGGGGSSYELTQPPSVSVSPGQTARITCSGDALPKQYAYWYQQKPGQAPVLVIYKDAERPSGIPERFSGSSSGTTVTLTISGVQAEDEADYYCQSTDNSGTYMIFGCGTRLTVLSGGGGSEVQLVESGGGLVQPGGSLKLSCAASGFTFNKYAMNWVRQAPGKGLEWVARIRSKYNNYATYYADSVKDRFTISRDDSKNTAYLQMNNLKTEDTAVYYCVRHGNFGNSYISYWAYWGQGTLVTVSSGGGGSGGGGSGGGGSQTVVTQEPSLTVSPGGTVTLTCGSSTGAVTSGNYPNWVQQKPGQAPRGLIGGTKFLAPGTPARFSGSLLGGKAALTLSGVQPEDEAEYYCVLWYSNRWVFGGGTKLTVLGGGGDKTHTCPPCPAPELLGGPSVFLFPPKPKDTLMISRTPEVTCVVVDVSHEDPEVKFNWYVDGVEVHNAKTKPCEEQYGSTYRCVSVLTVLHQDWLNGKEYKCKVSNKALPAPIEKTISKAKGQPREPQVYTLPPSREEMTKNQVSLTCLVKGFYPSDIAVEWESNGQPENNYKTTPPVLDSDGSFFLYSKLTVDKSRWQQGNVFSCSVMHEALHNHYTQKSLSLSPGKGGGGSGGGGSGGGGSGGGGSGGGGSGGGGSDKTHTCPPCPAPELLGGPSVFLFPPKPKDTLMISRTPEVTCVVVDVSHEDPEVKFNWYVDGVEVHNAKTKPCEEQYGSTYRCVSVLTVLHQDWLNGKEYKCKVSNKALPAPIEKTISKAKGQPREPQVYTLPPSREEMTKNQVSLTCLVKGFYPSDIAVEWESNGQPENNYKTTPPVLDSDGSFFLYSKLTVDKSRWQQGNVFSCSVMHEALHNHYTQKSLSLSPGK

SEQ ID NO: 995 - protein, 5 aa, Artificial Sequence
  Synthetic
SYGMH

SEQ ID NO: 996 - protein, 17 aa, Artificial Sequence
  Synthetic
TLTPEGNNVYYHPSVKG

SEQ ID NO: 997 - protein, 17 aa, Artificial Sequence
  Synthetic
DYSSYWDFRYYYYGMDV

SEQ ID NO: 998 - protein, 11 aa, Artificial Sequence
  Synthetic
SGDALPKQYAY

SEQ ID NO: 999 - protein, 7 aa, Artificial Sequence
  Synthetic
KDAERPS

SEQ ID NO: 1000 - protein, 11 aa, Artificial Sequence
  Synthetic
QSTDNSGTYMI

SEQ ID NO: 1001 - protein, 126 aa, Artificial Sequence
  Synthetic
QVQLVESGGGVVQPGRSLRLSCAASGFTFSSYGMHWVRQAPGKCLDWVATLTPEGNNVYYHPSVKGRFTISRDNSKNTLNLQMNSLRAEDTAVYYCARDYSSYWDFRYYYYGMDVWGQGTTVTVSS

SEQ ID NO: 1002 - protein, 107 aa, Artificial Sequence; identical to SEQ ID NO: 914
  Synthetic

SEQ ID NO: 1003 - protein, 249 aa, Artificial Sequence
  Synthetic
QVQLVESGGGVVQPGRSLRLSCAASGFTFSSYGMHWVRQAPGKCLDWVATLTPEGNNVYYHPSVKGRFTISRDNSKNTLNLQMNSLRAEDTAVYYCARDYSSYWDFRYYYYGMDVWGQGTTVTVSSGGGGSGGGGSGGGGSSYELTQPPSVSVSPGQTARITCSGDALPKQYAYWYQQKPGQAPVLVIYKDAERPSGIPERFSGSSSGTTVTLTISGVQAKDKADYYCQSTDNSGTYMIFGCGTRLTVL

SEQ ID NO: 1004 - protein, 504 aa, Artificial Sequence
  Synthetic
QVQLVESGGGVVQPGRSLRLSCAASGFTFSSYGMHWVRQAPGKCLDWVATLTPEGNNVYYHPSVKGRFTISRDNSKNTLNLQMNSLRAEDTAVYYCARDYSSYWDFRYYYYGMDVWGQGTTVTVSSGGGGSGGGGSGGGGSSYELTQPPSVSVSPGQTARITCSGDALPKQYAYWYQQKPGQAPVLVIYKDAERPSGIPERFSGSSSGTTVTLTISGVQAKDKADYYCQSTDNSGTYMIFGCGTRLTVLSGGGGSEVQLVESGGGLVQPGGSLKLSCAASGFTFNKYAMNWVRQAPGKGLEWVARIRSKYNNYATYYADSVKDRFTISRDDSKNTAYLQMNNLKTEDTAVYYCVRHGNFGNSYISYWAYWGQGTLVTVSSGGGGSGGGGSGGGGSQTVVTQEPSLTVSPGGTVTLTCGSSTGAVTSGNYPNWVQQKPGQAPRGLIGGTKFLAPGTPARFSGSLLGGKAALTLSGVQPEDEAEYYCVLWYSNRWVFGGGTKLTVL

SEQ ID NO: 1005 - protein, 992 aa, Artificial Sequence
  Synthetic
QVQLVESGGGVVQPGRSLRLSCAASGFTFSSYGMHWVRQAPGKCLDWVATLTPEGNNVYYHPSVKGRFTISRDNSKNTLNLQMNSLRAEDTAVYYCARDYSSYWDFRYYYYGMDVWGQGTTVTVSSGGGGSGGGGSGGGGSSYELTQPPSVSVSPGQTARITCSGDALPKQYAYWYQQKPGQAPVLVIYKDAERPSGIPERFSGSSSGTTVTLTISGVQAKDKADYYCQSTDNSGTYMIFGCGTRLTVLSGGGGSEVQLVESGGGLVQPGGSLKLSCAASGFTFNKYAMNWVRQAPGKGLEWVARIRSKYNNYATYYADSVKDRFTISRDDSKNTAYLQMNNLKTEDTAVYYCVRHGNFGNSYISYWAYWGQGTLVTVSSGGGGSGGGGSGGGGSQTVVTQEPSLTVSPGGTVTLTCGSSTGAVTSGNYPNWVQQKPGQAPRGLIGGTKFLAPGTPARFSGSLLGGKAALTLSGVQPEDEAEYYCVLWYSNRWVFGGGTKLTVLGGGGDKTHTCPPCPAPELLGGPSVFLFPPKPKDTLMISRTPEVTCVVVDVSHEDPEVKFNWYVDGVEVHNAKTKPCEEQYGSTYRCVSVLTVLHQDWLNGKEYKCKVSNKALPAPIEKTISKAKGQPREPQVYTLPPSREEMTKNQVSLTCLVKGFYPSDIAVEWESNGQPENNYKTTPPVLDSDGSFFLYSKLTVDKSRWQQGNVFSCSVMHEALHNHYTQKSLSLSPGKGGGGSGGGGSGGGGSGGGGSGGGGSGGGGSDKTHTCPPCPAPELLGGPSVFLFPPKPKDTLMISRTPEVTCVVVDVSHEDPEVKFNWYVDGVEVHNAKTKPCEEQYGSTYRCVSVLTVLHQDWLNGKEYKCKVSNKALPAPIEKTISKAKGQPREPQVYTLPPSREEMTKNQVSLTCLVKGFYPSDIAVEWESNGQPENNYKTTPPVLDSDGSFFLYSKLTVDKSRWQQGNVFSCSVMHEALHNHYTQKSLSLSPGK

SEQ ID NO: 1006 - protein, 5 aa, Artificial Sequence
  Synthetic
SYGMH

SEQ ID NO: 1007 - protein, 17 aa, Artificial Sequence
  Synthetic
TLTPEGNNVYYHPSVKG

SEQ ID NO: 1008 - protein, 17 aa, Artificial Sequence
  Synthetic
DYSSYWDFRYYYYGMDV

SEQ ID NO: 1009 - protein, 11 aa, Artificial Sequence
  Synthetic
SGDALPKQYAY

SEQ ID NO: 1010 - protein, 7 aa, Artificial Sequence
  Synthetic
KDAERPS

SEQ ID NO: 1011 - protein, 11 aa, Artificial Sequence
  Synthetic
QSTDQSGTYMI

SEQ ID NO: 1012 - protein, 126 aa, Artificial Sequence; identical to SEQ ID NO: 1001
  Synthetic

SEQ ID NO: 1013 - protein, 107 aa, Artificial Sequence; identical to SEQ ID NO: 903
  Synthetic

SEQ ID NO: 1014 - protein, 249 aa, Artificial Sequence
  Synthetic
QVQLVESGGGVVQPGRSLRLSCAASGFTFSSYGMHWVRQAPGKCLDWVATLTPEGNNVYYHPSVKGRFTISRDNSKNTLNLQMNSLRAEDTAVYYCARDYSSYWDFRYYYYGMDVWGQGTTVTVSSGGGGSGGGGSGGGGSSYELTQPPSVSVSPGQTARITCSGDALPKQYAYWYQQKPGQAPVLVIYKDAERPSGIPERFSGSSSGTTVTLTISGVQAKDKADYYCQSTDQSGTYMIFGCGTRLTVL

SEQ ID NO: 1015 - protein, 504 aa, Artificial Sequence
  Synthetic
QVQLVESGGGVVQPGRSLRLSCAASGFTFSSYGMHWVRQAPGKCLDWVATLTPEGNNVYYHPSVKGRFTISRDNSKNTLNLQMNSLRAEDTAVYYCARDYSSYWDFRYYYYGMDVWGQGTTVTVSSGGGGSGGGGSGGGGSSYELTQPPSVSVSPGQTARITCSGDALPKQYAYWYQQKPGQAPVLVIYKDAERPSGIPERFSGSSSGTTVTLTISGVQAKDKADYYCQSTDQSGTYMIFGCGTRLTVLSGGGGSEVQLVESGGGLVQPGGSLKLSCAASGFTFNKYAMNWVRQAPGKGLEWVARIRSKYNNYATYYADSVKDRFTISRDDSKNTAYLQMNNLKTEDTAVYYCVRHGNFGNSYISYWAYWGQGTLVTVSSGGGGSGGGGSGGGGSQTVVTQEPSLTVSPGGTVTLTCGSSTGAVTSGNYPNWVQQKPGQAPRGLIGGTKFLAPGTPARFSGSLLGGKAALTLSGVQPEDEAEYYCVLWYSNRWVFGGGTKLTVL

SEQ ID NO: 1016 - protein, 992 aa, Artificial Sequence
  Synthetic
QVQLVESGGGVVQPGRSLRLSCAASGFTFSSYGMHWVRQAPGKCLDWVATLTPEGNNVYYHPSVKGRFTISRDNSKNTLNLQMNSLRAEDTAVYYCARDYSSYWDFRYYYYGMDVWGQGTTVTVSSGGGGSGGGGSGGGGSSYELTQPPSVSVSPGQTARITCSGDALPKQYAYWYQQKPGQAPVLVIYKDAERPSGIPERFSGSSSGTTVTLTISGVQAKDKADYYCQSTDQSGTYMIFGCGTRLTVLSGGGGSEVQLVESGGGLVQPGGSLKLSCAASGFTFNKYAMNWVRQAPGKGLEWVARIRSKYNNYATYYADSVKDRFTISRDDSKNTAYLQMNNLKTEDTAVYYCVRHGNFGNSYISYWAYWGQGTLVTVSSGGGGSGGGGSGGGGSQTVVTQEPSLTVSPGGTVTLTCGSSTGAVTSGNYPNWVQQKPGQAPRGLIGGTKFLAPGTPARFSGSLLGGKAALTLSGVQPEDEAEYYCVLWYSNRWVFGGGTKLTVLGGGGDKTHTCPPCPAPELLGGPSVFLFPPKPKDTLMISRTPEVTCVVVDVSHEDPEVKFNWYVDGVEVHNAKTKPCEEQYGSTYRCVSVLTVLHQDWLNGKEYKCKVSNKALPAPIEKTISKAKGQPREPQVYTLPPSREEMTKNQVSLTCLVKGFYPSDIAVEWESNGQPENNYKTTPPVLDSDGSFFLYSKLTVDKSRWQQGNVFSCSVMHEALHNHYTQKSLSLSPGKGGGGSGGGGSGGGGSGGGGSGGGGSGGGGSDKTHTCPPCPAPELLGGPSVFLFPPKPKDTLMISRTPEVTCVVVDVSHEDPEVKFNWYVDGVEVHNAKTKPCEEQYGSTYRCVSVLTVLHQDWLNGKEYKCKVSNKALPAPIEKTISKAKGQPREPQVYTLPPSREEMTKNQVSLTCLVKGFYPSDIAVEWESNGQPENNYKTTPPVLDSDGSFFLYSKLTVDKSRWQQGNVFSCSVMHEALHNHYTQKSLSLSPGK

SEQ ID NO: 1017 - protein, 5 aa, Artificial Sequence
  Synthetic
SYGMH

SEQ ID NO: 1018 - protein, 17 aa, Artificial Sequence
  Synthetic
VIWYANHESYYASAVKG

SEQ ID NO: 1019 - protein, 17 aa, Artificial Sequence
  Synthetic
AGSRSSGYYYYYRGVKY

SEQ ID NO: 1020 - protein, 12 aa, Artificial Sequence
  Synthetic
TLSSGHSTYIIA

SEQ ID NO: 1021 - protein, 11 aa, Artificial Sequence
  Synthetic
LEGSGSYNKGS

SEQ ID NO: 1022 - protein, 10 aa, Artificial Sequence
  Synthetic
ETWDSTSRVV

SEQ ID NO: 1023 - protein, 126 aa, Artificial Sequence
  Synthetic
QVQLVESGGGVVQPGRSLRLSCAASGFTFSSYGMHWVRQAPGKCMEWVAVIWYANHESYYASAVKGRFTISRDNSKNTLYLQMNSLRAEDTAVYYCARAGSRSSGYYYYYRGVKYWGQGTTVTVSS

SEQ ID NO: 1024 - protein, 112 aa, Artificial Sequence
  Synthetic
QPVLTQSSSASASLGSSVKLTCTLSSGHSTYIIAWHQQQPGKAPRYLMKLEGSGSYNKGSGVPDRFSGSSSGADRYLTISNLQFEDEADYYCETWDSTSRVVFGCGTKLTVL

SEQ ID NO: 1025 - protein, 253 aa, Artificial Sequence
  Synthetic
QVQLVESGGGVVQPGRSLRLSCAASGFTFSSYGMHWVRQAPGKCMEWVAVIWYANHESYYASAVKGRFTISRDNSKNTLYLQMNSLRAEDTAVYYCARAGSRSSGYYYYYRGVKYWGQGTTVTVSSGGGGSGGGGSGGGGSQPVLTQSSSASASLGSSVKLTCTLSSGHSTYIIAWHQQQPGKAPRYLMKLEGSGSYNKGSGVPDRFSGSSSGADRYLTISNLQFEDEADYYCETWDSTSRVVFGCGTKLTVL

SEQ ID NO: 1026 - protein, 508 aa, Artificial Sequence
  Synthetic
QVQLVESGGGVVQPGRSLRLSCAASGFTFSSYGMHWVRQAPGKCMEWVAVIWYANHESYYASAVKGRFTISRDNSKNTLYLQMNSLRAEDTAVYYCARAGSRSSGYYYYYRGVKYWGQGTTVTVSSGGGGSGGGGSGGGGSQPVLTQSSSASASLGSSVKLTCTLSSGHSTYIIAWHQQQPGKAPRYLMKLEGSGSYNKGSGVPDRFSGSSSGADRYLTISNLQFEDEADYYCETWDSTSRVVFGCGTKLTVLSGGGGSEVQLVESGGGLVQPGGSLKLSCAASGFTFNKYAMNWVRQAPGKGLEWVARIRSKYNNYATYYADSVKDRFTISRDDSKNTAYLQMNNLKTEDTAVYYCVRHGNFGNSYISYWAYWGQGTLVTVSSGGGGSGGGGSGGGGSQTVVTQEPSLTVSPGGTVTLTCGSSTGAVTSGNYPNWVQQKPGQAPRGLIGGTKFLAPGTPARFSGSLLGGKAALTLSGVQPEDEAEYYCVLWYSNRWVFGGGTKLTVL

SEQ ID NO: 1027 - protein, 996 aa, Artificial Sequence
  Synthetic
QVQLVESGGGVVQPGRSLRLSCAASGFTFSSYGMHWVRQAPGKCMEWVAVIWYANHESYYASAVKGRFTISRDNSKNTLYLQMNSLRAEDTAVYYCARAGSRSSGYYYYYRGVKYWGQGTTVTVSSGGGGSGGGGSGGGGSQPVLTQSSSASASLGSSVKLTCTLSSGHSTYIIAWHQQQPGKAPRYLMKLEGSGSYNKGSGVPDRFSGSSSGADRYLTISNLQFEDEADYYCETWDSTSRVVFGCGTKLTVLSGGGGSEVQLVESGGGLVQPGGSLKLSCAASGFTFNKYAMNWVRQAPGKGLEWVARIRSKYNNYATYYADSVKDRFTISRDDSKNTAYLQMNNLKTEDTAVYYCVRHGNFGNSYISYWAYWGQGTLVTVSSGGGGSGGGGSGGGGSQTVVTQEPSLTVSPGGTVTLTCGSSTGAVTSGNYPNWVQQKPGQAPRGLIGGTKFLAPGTPARFSGSLLGGKAALTLSGVQPEDEAEYYCVLWYSNRWVFGGGTKLTVLGGGGDKTHTCPPCPAPELLGGPSVFLFPPKPKDTLMISRTPEVTCVVVDVSHEDPEVKFNWYVDGVEVHNAKTKPCEEQYGSTYRCVSVLTVLHQDWLNGKEYKCKVSNKALPAPIEKTISKAKGQPREPQVYTLPPSREEMTKNQVSLTCLVKGFYPSDIAVEWESNGQPENNYKTTPPVLDSDGSFFLYSKLTVDKSRWQQGNVFSCSVMHEALHNHYTQKSLSLSPGKGGGGSGGGGSGGGGSGGGGSGGGGSGGGGSDKTHTCPPCPAPELLGGPSVFLFPPKPKDTLMISRTPEVTCVVVDVSHEDPEVKFNWYVDGVEVHNAKTKPCEEQYGSTYRCVSVLTVLHQDWLNGKEYKCKVSNKALPAPIEKTISKAKGQPREPQVYTLPPSREEMTKNQVSLTCLVKGFYPSDIAVEWESNGQPENNYKTTPPVLDSDGSFFLYSKLTVDKSRWQQGNVFSCSVMHEALHNHYTQKSLSLSPGK

SEQ ID NO: 1028 - protein, 5 aa, Artificial Sequence
  Synthetic
SYGMH

SEQ ID NO: 1029 - protein, 17 aa, Artificial Sequence
  Synthetic
VIWYANHESYYASAVKG

SEQ ID NO: 1030 - protein, 17 aa, Artificial Sequence
  Synthetic
AGSRSSGYYYYYRGVKY

SEQ ID NO: 1031 - protein, 12 aa, Artificial Sequence
  Synthetic
TLSSGHSTYIIA

SEQ ID NO: 1032 - protein, 11 aa, Artificial Sequence
  Synthetic
LEGSGSYNKGS

SEQ ID NO: 1033 - protein, 10 aa, Artificial Sequence
  Synthetic
ETWDATSRVV

SEQ ID NO: 1034 - protein, 126 aa, Artificial Sequence; identical to SEQ ID NO: 1023
  Synthetic

SEQ ID NO: 1035 - protein, 112 aa, Artificial Sequence
  Synthetic
QPVLTQSSSASASLGSSVKLTCTLSSGHSTYIIAWHQQQPGKAPRYLMKLEGSGSYNKGSGVPDRFSGSSSGADRYLTISNLQFEDEADYYCETWDATSRVVFGCGTKLTVL

SEQ ID NO: 1036 - protein, 253 aa, Artificial Sequence
  Synthetic
QVQLVESGGGVVQPGRSLRLSCAASGFTFSSYGMHWVRQAPGKCMEWVAVIWYANHESYYASAVKGRFTISRDNSKNTLYLQMNSLRAEDTAVYYCARAGSRSSGYYYYYRGVKYWGQGTTVTVSSGGGGSGGGGSGGGGSQPVLTQSSSASASLGSSVKLTCTLSSGHSTYIIAWHQQQPGKAPRYLMKLEGSGSYNKGSGVPDRFSGSSSGADRYLTISNLQFEDEADYYCETWDATSRVVFGCGTKLTVL

SEQ ID NO: 1037 - protein, 508 aa, Artificial Sequence
  Synthetic
QVQLVESGGGVVQPGRSLRLSCAASGFTFSSYGMHWVRQAPGKCMEWVAVIWYANHESYYASAVKGRFTISRDNSKNTLYLQMNSLRAEDTAVYYCARAGSRSSGYYYYYRGVKYWGQGTTVTVSSGGGGSGGGGSGGGGSQPVLTQSSSASASLGSSVKLTCTLSSGHSTYIIAWHQQQPGKAPRYLMKLEGSGSYNKGSGVPDRFSGSSSGADRYLTISNLQFEDEADYYCETWDATSRVVFGCGTKLTVLSGGGGSEVQLVESGGGLVQPGGSLKLSCAASGFTFNKYAMNWVRQAPGKGLEWVARIRSKYNNYATYYADSVKDRFTISRDDSKNTAYLQMNNLKTEDTAVYYCVRHGNFGNSYISYWAYWGQGTLVTVSSGGGGSGGGGSGGGGSQTVVTQEPSLTVSPGGTVTLTCGSSTGAVTSGNYPNWVQQKPGQAPRGLIGGTKFLAPGTPARFSGSLLGGKAALTLSGVQPEDEAEYYCVLWYSNRWVFGGGTKLTVL

SEQ ID NO: 1038 - protein, 996 aa, Artificial Sequence
  Synthetic
QVQLVESGGGVVQPGRSLRLSCAASGFTFSSYGMHWVRQAPGKCMEWVAVIWYANHESYYASAVKGRFTISRDNSKNTLYLQMNSLRAEDTAVYYCARAGSRSSGYYYYYRGVKYWGQGTTVTVSSGGGGSGGGGSGGGGSQPVLTQSSSASASLGSSVKLTCTLSSGHSTYIIAWHQQQPGKAPRYLMKLEGSGSYNKGSGVPDRFSGSSSGADRYLTISNLQFEDEADYYCETWDATSRVVFGCGTKLTVLSGGGGSEVQLVESGGGLVQPGGSLKLSCAASGFTFNKYAMNWVRQAPGKGLEWVARIRSKYNNYATYYADSVKDRFTISRDDSKNTAYLQMNNLKTEDTAVYYCVRHGNFGNSYISYWAYWGQGTLVTVSSGGGGSGGGGSGGGGSQTVVTQEPSLTVSPGGTVTLTCGSSTGAVTSGNYPNWVQQKPGQAPRGLIGGTKFLAPGTPARFSGSLLGGKAALTLSGVQPEDEAEYYCVLWYSNRWVFGGGTKLTVLGGGGDKTHTCPPCPAPELLGGPSVFLFPPKPKDTLMISRTPEVTCVVVDVSHEDPEVKFNWYVDGVEVHNAKTKPCEEQYGSTYRCVSVLTVLHQDWLNGKEYKCKVSNKALPAPIEKTISKAKGQPREPQVYTLPPSREEMTKNQVSLTCLVKGFYPSDIAVEWESNGQPENNYKTTPPVLDSDGSFFLYSKLTVDKSRWQQGNVFSCSVMHEALHNHYTQKSLSLSPGKGGGGSGGGGSGGGGSGGGGSGGGGSGGGGSDKTHTCPPCPAPELLGGPSVFLFPPKPKDTLMISRTPEVTCVVVDVSHEDPEVKFNWYVDGVEVHNAKTKPCEEQYGSTYRCVSVLTVLHQDWLNGKEYKCKVSNKALPAPIEKTISKAKGQPREPQVYTLPPSREEMTKNQVSLTCLVKGFYPSDIAVEWESNGQPENNYKTTPPVLDSDGSFFLYSKLTVDKSRWQQGNVFSCSVMHEALHNHYTQKSLSLSPGK

SEQ ID NO: 1039 - protein, 5 aa, Artificial Sequence
  Synthetic
SYGMH

SEQ ID NO: 1040 - protein, 17 aa, Artificial Sequence
  Synthetic
VIWYANHESYYASAVKG

SEQ ID NO: 1041 - protein, 17 aa, Artificial Sequence
  Synthetic
AGSRSSGYYYYYRGVKY

SEQ ID NO: 1042 - protein, 12 aa, Artificial Sequence
  Synthetic
TLSSGHSTYIIA

SEQ ID NO: 1043 - protein, 11 aa, Artificial Sequence
  Synthetic
LEGSGSYNKGS

SEQ ID NO: 1044 - protein, 10 aa, Artificial Sequence
  Synthetic
ETWRSTSRVV

SEQ ID NO: 1045 - protein, 126 aa, Artificial Sequence; identical to SEQ ID NO: 1023
  Synthetic

SEQ ID NO: 1046 - protein, 112 aa, Artificial Sequence
  Synthetic
QPVLTQSSSASASLGSSVKLTCTLSSGHSTYIIAWHQQQPGKAPRYLMKLEGSGSYNKGSGVPDRFSGSSSGADRYLTISNLQFEDEADYYCETWRSTSRVVFGCGTKLTVL

SEQ ID NO: 1047 - protein, 253 aa, Artificial Sequence
  Synthetic
QVQLVESGGGVVQPGRSLRLSCAASGFTFSSYGMHWVRQAPGKCMEWVAVIWYANHESYYASAVKGRFTISRDNSKNTLYLQMNSLRAEDTAVYYCARAGSRSSGYYYYYRGVKYWGQGTTVTVSSGGGGSGGGGSGGGGSQPVLTQSSSASASLGSSVKLTCTLSSGHSTYIIAWHQQQPGKAPRYLMKLEGSGSYNKGSGVPDRFSGSSSGADRYLTISNLQFEDEADYYCETWRSTSRVVFGCGTKLTVL

SEQ ID NO: 1048 - protein, 508 aa, Artificial Sequence
  Synthetic
QVQLVESGGGVVQPGRSLRLSCAASGFTFSSYGMHWVRQAPGKCMEWVAVIWYANHESYYASAVKGRFTISRDNSKNTLYLQMNSLRAEDTAVYYCARAGSRSSGYYYYYRGVKYWGQGTTVTVSSGGGGSGGGGSGGGGSQPVLTQSSSASASLGSSVKLTCTLSSGHSTYIIAWHQQQPGKAPRYLMKLEGSGSYNKGSGVPDRFSGSSSGADRYLTISNLQFEDEADYYCETWRSTSRVVFGCGTKLTVLSGGGGSEVQLVESGGGLVQPGGSLKLSCAASGFTFNKYAMNWVRQAPGKGLEWVARIRSKYNNYATYYADSVKDRFTISRDDSKNTAYLQMNNLKTEDTAVYYCVRHGNFGNSYISYWAYWGQGTLVTVSSGGGGSGGGGSGGGGSQTVVTQEPSLTVSPGGTVTLTCGSSTGAVTSGNYPNWVQQKPGQAPRGLIGGTKFLAPGTPARFSGSLLGGKAALTLSGVQPEDEAEYYCVLWYSNRWVFGGGTKLTVL

SEQ ID NO: 1049 - protein, 996 aa, Artificial Sequence
  Synthetic
QVQLVESGGGVVQPGRSLRLSCAASGFTFSSYGMHWVRQAPGKCMEWVAVIWYANHESYYASAVKGRFTISRDNSKNTLYLQMNSLRAEDTAVYYCARAGSRSSGYYYYYRGVKYWGQGTTVTVSSGGGGSGGGGSGGGGSQPVLTQSSSASASLGSSVKLTCTLSSGHSTYIIAWHQQQPGKAPRYLMKLEGSGSYNKGSGVPDRFSGSSSGADRYLTISNLQFEDEADYYCETWRSTSRVVFGCGTKLTVLSGGGGSEVQLVESGGGLVQPGGSLKLSCAASGFTFNKYAMNWVRQAPGKGLEWVARIRSKYNNYATYYADSVKDRFTISRDDSKNTAYLQMNNLKTEDTAVYYCVRHGNFGNSYISYWAYWGQGTLVTVSSGGGGSGGGGSGGGGSQTVVTQEPSLTVSPGGTVTLTCGSSTGAVTSGNYPNWVQQKPGQAPRGLIGGTKFLAPGTPARFSGSLLGGKAALTLSGVQPEDEAEYYCVLWYSNRWVFGGGTKLTVLGGGGDKTHTCPPCPAPELLGGPSVFLFPPKPKDTLMISRTPEVTCVVVDVSHEDPEVKFNWYVDGVEVHNAKTKPCEEQYGSTYRCVSVLTVLHQDWLNGKEYKCKVSNKALPAPIEKTISKAKGQPREPQVYTLPPSREEMTKNQVSLTCLVKGFYPSDIAVEWESNGQPENNYKTTPPVLDSDGSFFLYSKLTVDKSRWQQGNVFSCSVMHEALHNHYTQKSLSLSPGKGGGGSGGGGSGGGGSGGGGSGGGGSGGGGSDKTHTCPPCPAPELLGGPSVFLFPPKPKDTLMISRTPEVTCVVVDVSHEDPEVKFNWYVDGVEVHNAKTKPCEEQYGSTYRCVSVLTVLHQDWLNGKEYKCKVSNKALPAPIEKTISKAKGQPREPQVYTLPPSREEMTKNQVSLTCLVKGFYPSDIAVEWESNGQPENNYKTTPPVLDSDGSFFLYSKLTVDKSRWQQGNVFSCSVMHEALHNHYTQKSLSLSPGK

SEQ ID NO: 1050 - protein, 5 aa, Artificial Sequence
  Synthetic
SYGMH

SEQ ID NO: 1051 - protein, 17 aa, Artificial Sequence
  Synthetic
VIWYANHESYYASAVKG

SEQ ID NO: 1052 - protein, 17 aa, Artificial Sequence
  Synthetic
AGSRSSGYYYYYRGVKY

SEQ ID NO: 1053 - protein, 12 aa, Artificial Sequence
  Synthetic
TLSSGHSTYIIA

SEQ ID NO: 1054 - protein, 11 aa, Artificial Sequence
  Synthetic
LEGSGSYNKGS

SEQ ID NO: 1055 - protein, 10 aa, Artificial Sequence
  Synthetic
ETWQSTSRVV

SEQ ID NO: 1056 - protein, 126 aa, Artificial Sequence; identical to SEQ ID NO: 1023
  Synthetic

SEQ ID NO: 1057 - protein, 112 aa, Artificial Sequence
  Synthetic
QPVLTQSSSASASLGSSVKLTCTLSSGHSTYIIAWHQQQPGKAPRYLMKLEGSGSYNKGSGVPDRFSGSSSGADRYLTISNLQFEDEADYYCETWQSTSRVVFGCGTKLTVL

SEQ ID NO: 1058 - protein, 253 aa, Artificial Sequence
  Synthetic
QVQLVESGGGVVQPGRSLRLSCAASGFTFSSYGMHWVRQAPGKCMEWVAVIWYANHESYYASAVKGRFTISRDNSKNTLYLQMNSLRAEDTAVYYCARAGSRSSGYYYYYRGVKYWGQGTTVTVSSGGGGSGGGGSGGGGSQPVLTQSSSASASLGSSVKLTCTLSSGHSTYIIAWHQQQPGKAPRYLMKLEGSGSYNKGSGVPDRFSGSSSGADRYLTISNLQFEDEADYYCETWQSTSRVVFGCGTKLTVL

SEQ ID NO: 1059 - protein, 508 aa, Artificial Sequence
  Synthetic
QVQLVESGGGVVQPGRSLRLSCAASGFTFSSYGMHWVRQAPGKCMEWVAVIWYANHESYYASAVKGRFTISRDNSKNTLYLQMNSLRAEDTAVYYCARAGSRSSGYYYYYRGVKYWGQGTTVTVSSGGGGSGGGGSGGGGSQPVLTQSSSASASLGSSVKLTCTLSSGHSTYIIAWHQQQPGKAPRYLMKLEGSGSYNKGSGVPDRFSGSSSGADRYLTISNLQFEDEADYYCETWQSTSRVVFGCGTKLTVLSGGGGSEVQLVESGGGLVQPGGSLKLSCAASGFTFNKYAMNWVRQAPGKGLEWVARIRSKYNNYATYYADSVKDRFTISRDDSKNTAYLQMNNLKTEDTAVYYCVRHGNFGNSYISYWAYWGQGTLVTVSSGGGGSGGGGSGGGGSQTVVTQEPSLTVSPGGTVTLTCGSSTGAVTSGNYPNWVQQKPGQAPRGLIGGTKFLAPGTPARFSGSLLGGKAALTLSGVQPEDEAEYYCVLWYSNRWVFGGGTKLTVL

SEQ ID NO: 1060 - protein, 996 aa, Artificial Sequence
  Synthetic
QVQLVESGGGVVQPGRSLRLSCAASGFTFSSYGMHWVRQAPGKCMEWVAVIWYANHESYYASAVKGRFTISRDNSKNTLYLQMNSLRAEDTAVYYCARAGSRSSGYYYYYRGVKYWGQGTTVTVSSGGGGSGGGGSGGGGSQPVLTQSSSASASLGSSVKLTCTLSSGHSTYIIAWHQQQPGKAPRYLMKLEGSGSYNKGSGVPDRFSGSSSGADRYLTISNLQFEDEADYYCETWQSTSRVVFGCGTKLTVLSGGGGSEVQLVESGGGLVQPGGSLKLSCAASGFTFNKYAMNWVRQAPGKGLEWVARIRSKYNNYATYYADSVKDRFTISRDDSKNTAYLQMNNLKTEDTAVYYCVRHGNFGNSYISYWAYWGQGTLVTVSSGGGGSGGGGSGGGGSQTVVTQEPSLTVSPGGTVTLTCGSSTGAVTSGNYPNWVQQKPGQAPRGLIGGTKFLAPGTPARFSGSLLGGKAALTLSGVQPEDEAEYYCVLWYSNRWVFGGGTKLTVLGGGGDKTHTCPPCPAPELLGGPSVFLFPPKPKDTLMISRTPEVTCVVVDVSHEDPEVKFNWYVDGVEVHNAKTKPCEEQYGSTYRCVSVLTVLHQDWLNGKEYKCKVSNKALPAPIEKTISKAKGQPREPQVYTLPPSREEMTKNQVSLTCLVKGFYPSDIAVEWESNGQPENNYKTTPPVLDSDGSFFLYSKLTVDKSRWQQGNVFSCSVMHEALHNHYTQKSLSLSPGKGGGGSGGGGSGGGGSGGGGSGGGGSGGGGSDKTHTCPPCPAPELLGGPSVFLFPPKPKDTLMISRTPEVTCVVVDVSHEDPEVKFNWYVDGVEVHNAKTKPCEEQYGSTYRCVSVLTVLHQDWLNGKEYKCKVSNKALPAPIEKTISKAKGQPREPQVYTLPPSREEMTKNQVSLTCLVKGFYPSDIAVEWESNGQPENNYKTTPPVLDSDGSFFLYSKLTVDKSRWQQGNVFSCSVMHEALHNHYTQKSLSLSPGK

SEQ ID NO: 1061 - protein, 5 aa, Artificial Sequence
  Synthetic
SYGMH

SEQ ID NO: 1062 - protein, 17 aa, Artificial Sequence
  Synthetic
VIWYANHESYYASAVKG

SEQ ID NO: 1063 - protein, 17 aa, Artificial Sequence
  Synthetic
AGSRSSGYYYYYKGIRA

SEQ ID NO: 1064 - protein, 12 aa, Artificial Sequence
  Synthetic
TLSSGHSTYIIA

SEQ ID NO: 1065 - protein, 11 aa, Artificial Sequence
  Synthetic
LEGSGSYNKGS

SEQ ID NO: 1066 - protein, 10 aa, Artificial Sequence
  Synthetic
ETWDSTSRVV

SEQ ID NO: 1067 - protein, 126 aa, Artificial Sequence
  Synthetic
QVQLVESGGGVVQPGRSLRLSCAASGFTFSSYGMHWVRQAPGKCMEWVAVIWYANHESYYASAVKGRFTISRDNSKNTLYLQMNSLRAEDTAVYYCARAGSRSSGYYYYYKGIRAWGQGTTVTVSS

SEQ ID NO: 1068 - protein, 112 aa, Artificial Sequence; identical to SEQ ID NO: 1024
  Synthetic

SEQ ID NO: 1069 - protein, 253 aa, Artificial Sequence
  Synthetic
QVQLVESGGGVVQPGRSLRLSCAASGFTFSSYGMHWVRQAPGKCMEWVAVIWYANHESYYASAVKGRFTISRDNSKNTLYLQMNSLRAEDTAVYYCARAGSRSSGYYYYYKGIRAWGQGTTVTVSSGGGGSGGGGSGGGGSQPVLTQSSSASASLGSSVKLTCTLSSGHSTYIIAWHQQQPGKAPRYLMKLEGSGSYNKGSGVPDRFSGSSSGADRYLTISNLQFEDEADYYCETWDSTSRVVFGCGTKLTVL

SEQ ID NO: 1070 - protein, 508 aa, Artificial Sequence
  Synthetic
QVQLVESGGGVVQPGRSLRLSCAASGFTFSSYGMHWVRQAPGKCMEWVAVIWYANHESYYASAVKGRFTISRDNSKNTLYLQMNSLRAEDTAVYYCARAGSRSSGYYYYYKGIRAWGQGTTVTVSSGGGGSGGGGSGGGGSQPVLTQSSSASASLGSSVKLTCTLSSGHSTYIIAWHQQQPGKAPRYLMKLEGSGSYNKGSGVPDRFSGSSSGADRYLTISNLQFEDEADYYCETWDSTSRVVFGCGTKLTVLSGGGGSEVQLVESGGGLVQPGGSLKLSCAASGFTFNKYAMNWVRQAPGKGLEWVARIRSKYNNYATYYADSVKDRFTISRDDSKNTAYLQMNNLKTEDTAVYYCVRHGNFGNSYISYWAYWGQGTLVTVSSGGGGSGGGGSGGGGSQTVVTQEPSLTVSPGGTVTLTCGSSTGAVTSGNYPNWVQQKPGQAPRGLIGGTKFLAPGTPARFSGSLLGGKAALTLSGVQPEDEAEYYCVLWYSNRWVFGGGTKLTVL

SEQ ID NO: 1071 - protein, 996 aa, Artificial Sequence
  Synthetic
QVQLVESGGGVVQPGRSLRLSCAASGFTFSSYGMHWVRQAPGKCMEWVAVIWYANHESYYASAVKGRFTISRDNSKNTLYLQMNSLRAEDTAVYYCARAGSRSSGYYYYYKGIRAWGQGTTVTVSSGGGGSGGGGSGGGGSQPVLTQSSSASASLGSSVKLTCTLSSGHSTYIIAWHQQQPGKAPRYLMKLEGSGSYNKGSGVPDRFSGSSSGADRYLTISNLQFEDEADYYCETWDSTSRVVFGCGTKLTVLSGGGGSEVQLVESGGGLVQPGGSLKLSCAASGFTFNKYAMNWVRQAPGKGLEWVARIRSKYNNYATYYADSVKDRFTISRDDSKNTAYLQMNNLKTEDTAVYYCVRHGNFGNSYISYWAYWGQGTLVTVSSGGGGSGGGGSGGGGSQTVVTQEPSLTVSPGGTVTLTCGSSTGAVTSGNYPNWVQQKPGQAPRGLIGGTKFLAPGTPARFSGSLLGGKAALTLSGVQPEDEAEYYCVLWYSNRWVFGGGTKLTVLGGGGDKTHTCPPCPAPELLGGPSVFLFPPKPKDTLMISRTPEVTCVVVDVSHEDPEVKFNWYVDGVEVHNAKTKPCEEQYGSTYRCVSVLTVLHQDWLNGKEYKCKVSNKALPAPIEKTISKAKGQPREPQVYTLPPSREEMTKNQVSLTCLVKGFYPSDIAVEWESNGQPENNYKTTPPVLDSDGSFFLYSKLTVDKSRWQQGNVFSCSVMHEALHNHYTQKSLSLSPGKGGGGSGGGGSGGGGSGGGGSGGGGSGGGGSDKTHTCPPCPAPELLGGPSVFLFPPKPKDTLMISRTPEVTCVVVDVSHEDPEVKFNWYVDGVEVHNAKTKPCEEQYGSTYRCVSVLTVLHQDWLNGKEYKCKVSNKALPAPIEKTISKAKGQPREPQVYTLPPSREEMTKNQVSLTCLVKGFYPSDIAVEWESNGQPENNYKTTPPVLDSDGSFFLYSKLTVDKSRWQQGNVFSCSVMHEALHNHYTQKSLSLSPGK

SEQ ID NO: 1072 - protein, 5 aa, Artificial Sequence
  Synthetic
SYGMH

SEQ ID NO: 1073 - protein, 17 aa, Artificial Sequence
  Synthetic
VIWYANHESYYASAVKG

SEQ ID NO: 1074 - protein, 17 aa, Artificial Sequence
  Synthetic
AGSRSSGYYYYYKGIRA

SEQ ID NO: 1075 - protein, 12 aa, Artificial Sequence
  Synthetic
TLSSGHSTYIIA

SEQ ID NO: 1076 - protein, 11 aa, Artificial Sequence
  Synthetic
LEGSGSYNKGS

SEQ ID NO: 1077 - protein, 10 aa, Artificial Sequence
  Synthetic
ETWDATSRVV

SEQ ID NO: 1078 - protein, 126 aa, Artificial Sequence; identical to SEQ ID NO: 1067
  Synthetic

SEQ ID NO: 1079 - protein, 112 aa, Artificial Sequence; identical to SEQ ID NO: 1035
  Synthetic

SEQ ID NO: 1080 - protein, 253 aa, Artificial Sequence
  Synthetic
QVQLVESGGGVVQPGRSLRLSCAASGFTFSSYGMHWVRQAPGKCMEWVAVIWYANHESYYASAVKGRFTISRDNSKNTLYLQMNSLRAEDTAVYYCARAGSRSSGYYYYYKGIRAWGQGTTVTVSSGGGGSGGGGSGGGGSQPVLTQSSSASASLGSSVKLTCTLSSGHSTYIIAWHQQQPGKAPRYLMKLEGSGSYNKGSGVPDRFSGSSSGADRYLTISNLQFEDEADYYCETWDATSRVVFGCGTKLTVL

SEQ ID NO: 1081 - protein, 508 aa, Artificial Sequence
  Synthetic
QVQLVESGGGVVQPGRSLRLSCAASGFTFSSYGMHWVRQAPGKCMEWVAVIWYANHESYYASAVKGRFTISRDNSKNTLYLQMNSLRAEDTAVYYCARAGSRSSGYYYYYKGIRAWGQGTTVTVSSGGGGSGGGGSGGGGSQPVLTQSSSASASLGSSVKLTCTLSSGHSTYIIAWHQQQPGKAPRYLMKLEGSGSYNKGSGVPDRFSGSSSGADRYLTISNLQFEDEADYYCETWDATSRVVFGCGTKLTVLSGGGGSEVQLVESGGGLVQPGGSLKLSCAASGFTFNKYAMNWVRQAPGKGLEWVARIRSKYNNYATYYADSVKDRFTISRDDSKNTAYLQMNNLKTEDTAVYYCVRHGNFGNSYISYWAYWGQGTLVTVSSGGGGSGGGGSGGGGSQTVVTQEPSLTVSPGGTVTLTCGSSTGAVTSGNYPNWVQQKPGQAPRGLIGGTKFLAPGTPARFSGSLLGGKAALTLSGVQPEDEAEYYCVLWYSNRWVFGGGTKLTVL

SEQ ID NO: 1082 - protein, 996 aa, Artificial Sequence
  Synthetic
QVQLVESGGGVVQPGRSLRLSCAASGFTFSSYGMHWVRQAPGKCMEWVAVIWYANHESYYASAVKGRFTISRDNSKNTLYLQMNSLRAEDTAVYYCARAGSRSSGYYYYYKGIRAWGQGTTVTVSSGGGGSGGGGSGGGGSQPVLTQSSSASASLGSSVKLTCTLSSGHSTYIIAWHQQQPGKAPRYLMKLEGSGSYNKGSGVPDRFSGSSSGADRYLTISNLQFEDEADYYCETWDATSRVVFGCGTKLTVLSGGGGSEVQLVESGGGLVQPGGSLKLSCAASGFTFNKYAMNWVRQAPGKGLEWVARIRSKYNNYATYYADSVKDRFTISRDDSKNTAYLQMNNLKTEDTAVYYCVRHGNFGNSYISYWAYWGQGTLVTVSSGGGGSGGGGSGGGGSQTVVTQEPSLTVSPGGTVTLTCGSSTGAVTSGNYPNWVQQKPGQAPRGLIGGTKFLAPGTPARFSGSLLGGKAALTLSGVQPEDEAEYYCVLWYSNRWVFGGGTKLTVLGGGGDKTHTCPPCPAPELLGGPSVFLFPPKPKDTLMISRTPEVTCVVVDVSHEDPEVKFNWYVDGVEVHNAKTKPCEEQYGSTYRCVSVLTVLHQDWLNGKEYKCKVSNKALPAPIEKTISKAKGQPREPQVYTLPPSREEMTKNQVSLTCLVKGFYPSDIAVEWESNGQPENNYKTTPPVLDSDGSFFLYSKLTVDKSRWQQGNVFSCSVMHEALHNHYTQKSLSLSPGKGGGGSGGGGSGGGGSGGGGSGGGGSGGGGSDKTHTCPPCPAPELLGGPSVFLFPPKPKDTLMISRTPEVTCVVVDVSHEDPEVKFNWYVDGVEVHNAKTKPCEEQYGSTYRCVSVLTVLHQDWLNGKEYKCKVSNKALPAPIEKTISKAKGQPREPQVYTLPPSREEMTKNQVSLTCLVKGFYPSDIAVEWESNGQPENNYKTTPPVLDSDGSFFLYSKLTVDKSRWQQGNVFSCSVMHEALHNHYTQKSLSLSPGK

SEQ ID NO: 1083 - protein, 5 aa, Artificial Sequence
  Synthetic
SYGMH

SEQ ID NO: 1084 - protein, 17 aa, Artificial Sequence
  Synthetic
VIWYANHESYYASAVKG

SEQ ID NO: 1085 - protein, 17 aa, Artificial Sequence
  Synthetic
AGSRSSGYYYYYKGIRA

SEQ ID NO: 1086 - protein, 12 aa, Artificial Sequence
  Synthetic
TLSSGHSTYIIA

SEQ ID NO: 1087 - protein, 11 aa, Artificial Sequence
  Synthetic
LEGSGSYNKGS

SEQ ID NO: 1088 - protein, 10 aa, Artificial Sequence
  Synthetic
ETWRSTSRVV

SEQ ID NO: 1089 - protein, 126 aa, Artificial Sequence; identical to SEQ ID NO: 1067
  Synthetic

SEQ ID NO: 1090 - protein, 112 aa, Artificial Sequence; identical to SEQ ID NO: 1046
  Synthetic

SEQ ID NO: 1091 - protein, 253 aa, Artificial Sequence
  Synthetic
QVQLVESGGGVVQPGRSLRLSCAASGFTFSSYGMHWVRQAPGKCMEWVAVIWYANHESYYASAVKGRFTISRDNSKNTLYLQMNSLRAEDTAVYYCARAGSRSSGYYYYYKGIRAWGQGTTVTVSSGGGGSGGGGSGGGGSQPVLTQSSSASASLGSSVKLTCTLSSGHSTYIIAWHQQQPGKAPRYLMKLEGSGSYNKGSGVPDRFSGSSSGADRYLTISNLQFEDEADYYCETWRSTSRVVFGCGTKLTVL

SEQ ID NO: 1092 - protein, 508 aa, Artificial Sequence
  Synthetic
QVQLVESGGGVVQPGRSLRLSCAASGFTFSSYGMHWVRQAPGKCMEWVAVIWYANHESYYASAVKGRFTISRDNSKNTLYLQMNSLRAEDTAVYYCARAGSRSSGYYYYYKGIRAWGQGTTVTVSSGGGGSGGGGSGGGGSQPVLTQSSSASASLGSSVKLTCTLSSGHSTYIIAWHQQQPGKAPRYLMKLEGSGSYNKGSGVPDRFSGSSSGADRYLTISNLQFEDEADYYCETWRSTSRVVFGCGTKLTVLSGGGGSEVQLVESGGGLVQPGGSLKLSCAASGFTFNKYAMNWVRQAPGKGLEWVARIRSKYNNYATYYADSVKDRFTISRDDSKNTAYLQMNNLKTEDTAVYYCVRHGNFGNSYISYWAYWGQGTLVTVSSGGGGSGGGGSGGGGSQTVVTQEPSLTVSPGGTVTLTCGSSTGAVTSGNYPNWVQQKPGQAPRGLIGGTKFLAPGTPARFSGSLLGGKAALTLSGVQPEDEAEYYCVLWYSNRWVFGGGTKLTVL

SEQ ID NO: 1093 - protein, 996 aa, Artificial Sequence
  Synthetic
QVQLVESGGGVVQPGRSLRLSCAASGFTFSSYGMHWVRQAPGKCMEWVAVIWYANHESYYASAVKGRFTISRDNSKNTLYLQMNSLRAEDTAVYYCARAGSRSSGYYYYYKGIRAWGQGTTVTVSSGGGGSGGGGSGGGGSQPVLTQSSSASASLGSSVKLTCTLSSGHSTYIIAWHQQQPGKAPRYLMKLEGSGSYNKGSGVPDRFSGSSSGADRYLTISNLQFEDEADYYCETWRSTSRVVFGCGTKLTVLSGGGGSEVQLVESGGGLVQPGGSLKLSCAASGFTFNKYAMNWVRQAPGKGLEWVARIRSKYNNYATYYADSVKDRFTISRDDSKNTAYLQMNNLKTEDTAVYYCVRHGNFGNSYISYWAYWGQGTLVTVSSGGGGSGGGGSGGGGSQTVVTQEPSLTVSPGGTVTLTCGSSTGAVTSGNYPNWVQQKPGQAPRGLIGGTKFLAPGTPARFSGSLLGGKAALTLSGVQPEDEAEYYCVLWYSNRWVFGGGTKLTVLGGGGDKTHTCPPCPAPELLGGPSVFLFPPKPKDTLMISRTPEVTCVVVDVSHEDPEVKFNWYVDGVEVHNAKTKPCEEQYGSTYRCVSVLTVLHQDWLNGKEYKCKVSNKALPAPIEKTISKAKGQPREPQVYTLPPSREEMTKNQVSLTCLVKGFYPSDIAVEWESNGQPENNYKTTPPVLDSDGSFFLYSKLTVDKSRWQQGNVFSCSVMHEALHNHYTQKSLSLSPGKGGGGSGGGGSGGGGSGGGGSGGGGSGGGGSDKTHTCPPCPAPELLGGPSVFLFPPKPKDTLMISRTPEVTCVVVDVSHEDPEVKFNWYVDGVEVHNAKTKPCEEQYGSTYRCVSVLTVLHQDWLNGKEYKCKVSNKALPAPIEKTISKAKGQPREPQVYTLPPSREEMTKNQVSLTCLVKGFYPSDIAVEWESNGQPENNYKTTPPVLDSDGSFFLYSKLTVDKSRWQQGNVFSCSVMHEALHNHYTQKSLSLSPGK

SEQ ID NO: 1094 - protein, 5 aa, Artificial Sequence
  Synthetic
SYGMH

SEQ ID NO: 1095 - protein, 17 aa, Artificial Sequence
  Synthetic
VIWYANHESYYASAVKG

SEQ ID NO: 1096 - protein, 17 aa, Artificial Sequence
  Synthetic
AGSRSSGYYYYYKGIRA

SEQ ID NO: 1097 - protein, 12 aa, Artificial Sequence
  Synthetic
TLSSGHSTYIIA

SEQ ID NO: 1098 - protein, 11 aa, Artificial Sequence
  Synthetic
LEGSGSYNKGS

SEQ ID NO: 1099 - protein, 10 aa, Artificial Sequence
  Synthetic
ETWQSTSRVV

SEQ ID NO: 1100 - protein, 126 aa, Artificial Sequence; identical to SEQ ID NO: 1067
  Synthetic

SEQ ID NO: 1101 - protein, 112 aa, Artificial Sequence; identical to SEQ ID NO: 1057
  Synthetic

SEQ ID NO: 1102 - protein, 253 aa, Artificial Sequence
  Synthetic
QVQLVESGGGVVQPGRSLRLSCAASGFTFSSYGMHWVRQAPGKCMEWVAVIWYANHESYYASAVKGRFTISRDNSKNTLYLQMNSLRAEDTAVYYCARAGSRSSGYYYYYKGIRAWGQGTTVTVSSGGGGSGGGGSGGGGSQPVLTQSSSASASLGSSVKLTCTLSSGHSTYIIAWHQQQPGKAPRYLMKLEGSGSYNKGSGVPDRFSGSSSGADRYLTISNLQFEDEADYYCETWQSTSRVVFGCGTKLTVL

SEQ ID NO: 1103 - protein, 508 aa, Artificial Sequence
  Synthetic
QVQLVESGGGVVQPGRSLRLSCAASGFTFSSYGMHWVRQAPGKCMEWVAVIWYANHESYYASAVKGRFTISRDNSKNTLYLQMNSLRAEDTAVYYCARAGSRSSGYYYYYKGIRAWGQGTTVTVSSGGGGSGGGGSGGGGSQPVLTQSSSASASLGSSVKLTCTLSSGHSTYIIAWHQQQPGKAPRYLMKLEGSGSYNKGSGVPDRFSGSSSGADRYLTISNLQFEDEADYYCETWQSTSRVVFGCGTKLTVLSGGGGSEVQLVESGGGLVQPGGSLKLSCAASGFTFNKYAMNWVRQAPGKGLEWVARIRSKYNNYATYYADSVKDRFTISRDDSKNTAYLQMNNLKTEDTAVYYCVRHGNFGNSYISYWAYWGQGTLVTVSSGGGGSGGGGSGGGGSQTVVTQEPSLTVSPGGTVTLTCGSSTGAVTSGNYPNWVQQKPGQAPRGLIGGTKFLAPGTPARFSGSLLGGKAALTLSGVQPEDEAEYYCVLWYSNRWVFGGGTKLTVL

SEQ ID NO: 1104 - protein, 996 aa, Artificial Sequence
  Synthetic
QVQLVESGGGVVQPGRSLRLSCAASGFTFSSYGMHWVRQAPGKCMEWVAVIWYANHESYYASAVKGRFTISRDNSKNTLYLQMNSLRAEDTAVYYCARAGSRSSGYYYYYKGIRAWGQGTTVTVSSGGGGSGGGGSGGGGSQPVLTQSSSASASLGSSVKLTCTLSSGHSTYIIAWHQQQPGKAPRYLMKLEGSGSYNKGSGVPDRFSGSSSGADRYLTISNLQFEDEADYYCETWQSTSRVVFGCGTKLTVLSGGGGSEVQLVESGGGLVQPGGSLKLSCAASGFTFNKYAMNWVRQAPGKGLEWVARIRSKYNNYATYYADSVKDRFTISRDDSKNTAYLQMNNLKTEDTAVYYCVRHGNFGNSYISYWAYWGQGTLVTVSSGGGGSGGGGSGGGGSQTVVTQEPSLTVSPGGTVTLTCGSSTGAVTSGNYPNWVQQKPGQAPRGLIGGTKFLAPGTPARFSGSLLGGKAALTLSGVQPEDEAEYYCVLWYSNRWVFGGGTKLTVLGGGGDKTHTCPPCPAPELLGGPSVFLFPPKPKDTLMISRTPEVTCVVVDVSHEDPEVKFNWYVDGVEVHNAKTKPCEEQYGSTYRCVSVLTVLHQDWLNGKEYKCKVSNKALPAPIEKTISKAKGQPREPQVYTLPPSREEMTKNQVSLTCLVKGFYPSDIAVEWESNGQPENNYKTTPPVLDSDGSFFLYSKLTVDKSRWQQGNVFSCSVMHEALHNHYTQKSLSLSPGKGGGGSGGGGSGGGGSGGGGSGGGGSGGGGSDKTHTCPPCPAPELLGGPSVFLFPPKPKDTLMISRTPEVTCVVVDVSHEDPEVKFNWYVDGVEVHNAKTKPCEEQYGSTYRCVSVLTVLHQDWLNGKEYKCKVSNKALPAPIEKTISKAKGQPREPQVYTLPPSREEMTKNQVSLTCLVKGFYPSDIAVEWESNGQPENNYKTTPPVLDSDGSFFLYSKLTVDKSRWQQGNVFSCSVMHEALHNHYTQKSLSLSPGK

SEQ ID NO: 1105 - protein, 5 aa, Artificial Sequence
  Synthetic
SSWMN

SEQ ID NO: 1106 - protein, 17 aa, Artificial Sequence
  Synthetic
RIYPGDGDTKYNGKFKG

SEQ ID NO: 1107 - protein, 11 aa, Artificial Sequence
  Synthetic
STMIATGAMDY

SEQ ID NO: 1108 - protein, 11 aa, Artificial Sequence
  Synthetic
KASQDVSTAVA

SEQ ID NO: 1109 - protein, 7 aa, Artificial Sequence
  Synthetic
SASYRYT

SEQ ID NO: 1110 - protein, 10 aa, Artificial Sequence
  Synthetic
QQHYSTPPYT

SEQ ID NO: 1111 - protein, 120 aa, Artificial Sequence
  Synthetic
QVQLVQSGAEVKKPGASVKVSCKASGYAFSSSWMNWVRQAPGQGLEWIGRIYPGDGDTKYNGKFKGKATLTADKSTSTAYMELSSLRSEDTAVYYCARSTMIATGAMDYWGQGTLVTVSS

SEQ ID NO: 1112 - protein, 109 aa, Artificial Sequence
  Synthetic
DIQMTQSPSSLSASVGDRVTITCKASQDVSTAVAWYQQKPGKAPKLLIYSASYRYTGVPDRFTGSGSGTDFTLTISSLQPEDFATYYCQQHYSTPPYTFGGGTKVEIKR

SEQ ID NO: 1113 - protein, 244 aa, Artificial Sequence
  Synthetic
DIQMTQSPSSLSASVGDRVTITCKASQDVSTAVAWYQQKPGKAPKLLIYSASYRYTGVPDRFTGSGSGTDFTLTISSLQPEDFATYYCQQHYSTPPYTFGGGTKVEIKRGGGGSGGGGSGGGGSQVQLVQSGAEVKKPGASVKVSCKASGYAFSSSWMNWVRQAPGQGLEWIGRIYPGDGDTKYNGKFKGKATLTADKSTSTAYMELSSLRSEDTAVYYCARSTMIATGAMDYWGQGTLVTVSS

SEQ ID NO: 1114 - protein, 499 aa, Artificial Sequence
  Synthetic
DIQMTQSPSSLSASVGDRVTITCKASQDVSTAVAWYQQKPGKAPKLLIYSASYRYTGVPDRFTGSGSGTDFTLTISSLQPEDFATYYCQQHYSTPPYTFGGGTKVEIKRGGGGSGGGGSGGGGSQVQLVQSGAEVKKPGASVKVSCKASGYAFSSSWMNWVRQAPGQGLEWIGRIYPGDGDTKYNGKFKGKATLTADKSTSTAYMELSSLRSEDTAVYYCARSTMIATGAMDYWGQGTLVTVSSSGGGGSEVQLVESGGGLVQPGGSLKLSCAASGFTFNKYAMNWVRQAPGKGLEWVARIRSKYNNYATYYADSVKDRFTISRDDSKNTAYLQMNNLKTEDTAVYYCVRHGNFGNSYISYWAYWGQGTLVTVSSGGGGSGGGGSGGGGSQTVVTQEPSLTVSPGGTVTLTCGSSTGAVTSGNYPNWVQQKPGQAPRGLIGGTKFLAPGTPARFSGSLLGGKAALTLSGVQPEDEAEYYCVLWYSNRWVFGGGTKLTVL

SEQ ID NO: 1115 - protein, 987 aa, Artificial Sequence
  Synthetic
DIQMTQSPSSLSASVGDRVTITCKASQDVSTAVAWYQQKPGKAPKLLIYSASYRYTGVPDRFTGSGSGTDFTLTISSLQPEDFATYYCQQHYSTPPYTFGGGTKVEIKRGGGGSGGGGSGGGGSQVQLVQSGAEVKKPGASVKVSCKASGYAFSSSWMNWVRQAPGQGLEWIGRIYPGDGDTKYNGKFKGKATLTADKSTSTAYMELSSLRSEDTAVYYCARSTMIATGAMDYWGQGTLVTVSSSGGGGSEVQLVESGGGLVQPGGSLKLSCAASGFTFNKYAMNWVRQAPGKGLEWVARIRSKYNNYATYYADSVKDRFTISRDDSKNTAYLQMNNLKTEDTAVYYCVRHGNFGNSYISYWAYWGQGTLVTVSSGGGGSGGGGSGGGGSQTVVTQEPSLTVSPGGTVTLTCGSSTGAVTSGNYPNWVQQKPGQAPRGLIGGTKFLAPGTPARFSGSLLGGKAALTLSGVQPEDEAEYYCVLWYSNRWVFGGGTKLTVLGGGGDKTHTCPPCPAPELLGGPSVFLFPPKPKDTLMISRTPEVTCVVVDVSHEDPEVKFNWYVDGVEVHNAKTKPCEEQYGSTYRCVSVLTVLHQDWLNGKEYKCKVSNKALPAPIEKTISKAKGQPREPQVYTLPPSREEMTKNQVSLTCLVKGFYPSDIAVEWESNGQPENNYKTTPPVLDSDGSFFLYSKLTVDKSRWQQGNVFSCSVMHEALHNHYTQKSLSLSPGKGGGGSGGGGSGGGGSGGGGSGGGGSGGGGSDKTHTCPPCPAPELLGGPSVFLFPPKPKDTLMISRTPEVTCVVVDVSHEDPEVKFNWYVDGVEVHNAKTKPCEEQYGSTYRCVSVLTVLHQDWLNGKEYKCKVSNKALPAPIEKTISKAKGQPREPQVYTLPPSREEMTKNQVSLTCLVKGFYPSDIAVEWESNGQPENNYKTTPPVLDSDGSFFLYSKLTVDKSRWQQGNVFSCSVMHEALHNHYTQKSLSLSPGK

SEQ ID NO: 1116 - protein, 5 aa, Artificial Sequence
  Synthetic
SSWMN

SEQ ID NO: 1117 - protein, 17 aa, Artificial Sequence
  Synthetic
RIYPGDGDTKYNGKFKG

SEQ ID NO: 1118 - protein, 11 aa, Artificial Sequence
  Synthetic
STMIATGAMDY

SEQ ID NO: 1119 - protein, 11 aa, Artificial Sequence
  Synthetic
KASQDVSTAVA

SEQ ID NO: 1120 - protein, 7 aa, Artificial Sequence
  Synthetic
SASYRYT

SEQ ID NO: 1121 - protein, 10 aa, Artificial Sequence
  Synthetic
QQHYSTPPYT

SEQ ID NO: 1122 - protein, 120 aa, Artificial Sequence
  Synthetic
QVQLVQSGAEVKKPGASVKVSCKASGYAFSSSWMNWVRQAPGQCLEWIGRIYPGDGDTKYNGKFKGKATLTADKSTSTAYMELSSLRSEDTAVYYCARSTMIATGAMDYWGQGTLVTVSS

SEQ ID NO: 1123 - protein, 109 aa, Artificial Sequence
  Synthetic
DIQMTQSPSSLSASVGDRVTITCKASQDVSTAVAWYQQKPGKAPKLLIYSASYRYTGVPDRFTGSGSGTDFTLTISSLQPEDFATYYCQQHYSTPPYTFGCGTKVEIKR

SEQ ID NO: 1124 - protein, 499 aa, Artificial Sequence
  Synthetic
DIQMTQSPSSLSASVGDRVTITCKASQDVSTAVAWYQQKPGKAPKLLIYSASYRYTGVPDRFTGSGSGTDFTLTISSLQPEDFATYYCQQHYSTPPYTFGCGTKVEIKRGGGGSGGGGSGGGGSQVQLVQSGAEVKKPGASVKVSCKASGYAFSSSWMNWVRQAPGQCLEWIGRIYPGDGDTKYNGKFKGKATLTADKSTSTAYMELSSLRSEDTAVYYCARSTMIATGAMDYWGQGTLVTVSSSGGGGSEVQLVESGGGLVQPGGSLKLSCAASGFTFNKYAMNWVRQAPGKGLEWVARIRSKYNNYATYYADSVKDRFTISRDDSKNTAYLQMNNLKTEDTAVYYCVRHGNFGNSYISYWAYWGQGTLVTVSSGGGGSGGGGSGGGGSQTVVTQEPSLTVSPGGTVTLTCGSSTGAVTSGNYPNWVQQKPGQAPRGLIGGTKFLAPGTPARFSGSLLGGKAALTLSGVQPEDEAEYYCVLWYSNRWVFGGGTKLTVL

SEQ ID NO: 1125 - protein, 499 aa, Artificial Sequence; identical to SEQ ID NO: 1124
  Synthetic

SEQ ID NO: 1126 - protein, 987 aa, Artificial Sequence
  Synthetic
DIQMTQSPSSLSASVGDRVTITCKASQDVSTAVAWYQQKPGKAPKLLIYSASYRYTGVPDRFTGSGSGTDFTLTISSLQPEDFATYYCQQHYSTPPYTFGCGTKVEIKRGGGGSGGGGSGGGGSQVQLVQSGAEVKKPGASVKVSCKASGYAFSSSWMNWVRQAPGQCLEWIGRIYPGDGDTKYNGKFKGKATLTADKSTSTAYMELSSLRSEDTAVYYCARSTMIATGAMDYWGQGTLVTVSSSGGGGSEVQLVESGGGLVQPGGSLKLSCAASGFTFNKYAMNWVRQAPGKGLEWVARIRSKYNNYATYYADSVKDRFTISRDDSKNTAYLQMNNLKTEDTAVYYCVRHGNFGNSYISYWAYWGQGTLVTVSSGGGGSGGGGSGGGGSQTVVTQEPSLTVSPGGTVTLTCGSSTGAVTSGNYPNWVQQKPGQAPRGLIGGTKFLAPGTPARFSGSLLGGKAALTLSGVQPEDEAEYYCVLWYSNRWVFGGGTKLTVLGGGGDKTHTCPPCPAPELLGGPSVFLFPPKPKDTLMISRTPEVTCVVVDVSHEDPEVKFNWYVDGVEVHNAKTKPCEEQYGSTYRCVSVLTVLHQDWLNGKEYKCKVSNKALPAPIEKTISKAKGQPREPQVYTLPPSREEMTKNQVSLTCLVKGFYPSDIAVEWESNGQPENNYKTTPPVLDSDGSFFLYSKLTVDKSRWQQGNVFSCSVMHEALHNHYTQKSLSLSPGKGGGGSGGGGSGGGGSGGGGSGGGGSGGGGSDKTHTCPPCPAPELLGGPSVFLFPPKPKDTLMISRTPEVTCVVVDVSHEDPEVKFNWYVDGVEVHNAKTKPCEEQYGSTYRCVSVLTVLHQDWLNGKEYKCKVSNKALPAPIEKTISKAKGQPREPQVYTLPPSREEMTKNQVSLTCLVKGFYPSDIAVEWESNGQPENNYKTTPPVLDSDGSFFLYSKLTVDKSRWQQGNVFSCSVMHEALHNHYTQKSLSLSPGK

SEQ ID NO: 1127 - protein, 5 aa, Artificial Sequence
  Synthetic
SSWMN

SEQ ID NO: 1128 - protein, 17 aa, Artificial Sequence
  Synthetic
RIYPGDGDTKYNGKFKG

SEQ ID NO: 1129 - protein, 11 aa, Artificial Sequence
  Synthetic
STMIATGAMDY

SEQ ID NO: 1130 - protein, 11 aa, Artificial Sequence
  Synthetic
KASQDVSTAVA

SEQ ID NO: 1131 - protein, 7 aa, Artificial Sequence
  Synthetic
SASYRYT

SEQ ID NO: 1132 - protein, 10 aa, Artificial Sequence
  Synthetic
QQHYSTPPYT

SEQ ID NO: 1133 - protein, 120 aa, Artificial Sequence
  Synthetic
QVQLVQSGAEVKKPGASVKVSCKASGYTFSSSWMNWVRQAPGQGLEWIGRIYPGDGDTKYNGKFKGKATLTADKSTSTAYMELSSLRSEDTAVYYCARSTMIATGAMDYWGQGTLVTVSS

SEQ ID NO: 1134 - protein, 109 aa, Artificial Sequence
  Synthetic
DIQMTQSPSSLSASVGDRVTITCKASQDVSTAVAWYQQKPGKAPKLLIYSASYRYTGVPSRFTGSGSGTDFTLTISSLQPEDFATYYCQQHYSTPPYTFGGGTKVEIKR

SEQ ID NO: 1135 - protein, 244 aa, Artificial Sequence
  Synthetic
DIQMTQSPSSLSASVGDRVTITCKASQDVSTAVAWYQQKPGKAPKLLIYSASYRYTGVPSRFTGSGSGTDFTLTISSLQPEDFATYYCQQHYSTPPYTFGGGTKVEIKRGGGGSGGGGSGGGGSQVQLVQSGAEVKKPGASVKVSCKASGYTFSSSWMNWVRQAPGQGLEWIGRIYPGDGDTKYNGKFKGKATLTADKSTSTAYMELSSLRSEDTAVYYCARSTMIATGAMDYWGQGTLVTVSS

SEQ ID NO: 1136 - protein, 499 aa, Artificial Sequence
  Synthetic
DIQMTQSPSSLSASVGDRVTITCKASQDVSTAVAWYQQKPGKAPKLLIYSASYRYTGVPSRFTGSGSGTDFTLTISSLQPEDFATYYCQQHYSTPPYTFGGGTKVEIKRGGGGSGGGGSGGGGSQVQLVQSGAEVKKPGASVKVSCKASGYTFSSSWMNWVRQAPGQGLEWIGRIYPGDGDTKYNGKFKGKATLTADKSTSTAYMELSSLRSEDTAVYYCARSTMIATGAMDYWGQGTLVTVSSSGGGGSEVQLVESGGGLVQPGGSLKLSCAASGFTFNKYAMNWVRQAPGKGLEWVARIRSKYNNYATYYADSVKDRFTISRDDSKNTAYLQMNNLKTEDTAVYYCVRHGNFGNSYISYWAYWGQGTLVTVSSGGGGSGGGGSGGGGSQTVVTQEPSLTVSPGGTVTLTCGSSTGAVTSGNYPNWVQQKPGQAPRGLIGGTKFLAPGTPARFSGSLLGGKAALTLSGVQPEDEAEYYCVLWYSNRWVFGGGTKLTVL

SEQ ID NO: 1137 - protein, 987 aa, Artificial Sequence
  Synthetic
DIQMTQSPSSLSASVGDRVTITCKASQDVSTAVAWYQQKPGKAPKLLIYSASYRYTGVPSRFTGSGSGTDFTLTISSLQPEDFATYYCQQHYSTPPYTFGGGTKVEIKRGGGGSGGGGSGGGGSQVQLVQSGAEVKKPGASVKVSCKASGYTFSSSWMNWVRQAPGQGLEWIGRIYPGDGDTKYNGKFKGKATLTADKSTSTAYMELSSLRSEDTAVYYCARSTMIATGAMDYWGQGTLVTVSSSGGGGSEVQLVESGGGLVQPGGSLKLSCAASGFTFNKYAMNWVRQAPGKGLEWVARIRSKYNNYATYYADSVKDRFTISRDDSKNTAYLQMNNLKTEDTAVYYCVRHGNFGNSYISYWAYWGQGTLVTVSSGGGGSGGGGSGGGGSQTVVTQEPSLTVSPGGTVTLTCGSSTGAVTSGNYPNWVQQKPGQAPRGLIGGTKFLAPGTPARFSGSLLGGKAALTLSGVQPEDEAEYYCVLWYSNRWVFGGGTKLTVLGGGGDKTHTCPPCPAPELLGGPSVFLFPPKPKDTLMISRTPEVTCVVVDVSHEDPEVKFNWYVDGVEVHNAKTKPCEEQYGSTYRCVSVLTVLHQDWLNGKEYKCKVSNKALPAPIEKTISKAKGQPREPQVYTLPPSREEMTKNQVSLTCLVKGFYPSDIAVEWESNGQPENNYKTTPPVLDSDGSFFLYSKLTVDKSRWQQGNVFSCSVMHEALHNHYTQKSLSLSPGKGGGGSGGGGSGGGGSGGGGSGGGGSGGGGSDKTHTCPPCPAPELLGGPSVFLFPPKPKDTLMISRTPEVTCVVVDVSHEDPEVKFNWYVDGVEVHNAKTKPCEEQYGSTYRCVSVLTVLHQDWLNGKEYKCKVSNKALPAPIEKTISKAKGQPREPQVYTLPPSREEMTKNQVSLTCLVKGFYPSDIAVEWESNGQPENNYKTTPPVLDSDGSFFLYSKLTVDKSRWQQGNVFSCSVMHEALHNHYTQKSLSLSPGK

SEQ ID NO: 1138 - protein, 5 aa, Artificial Sequence
  Synthetic
SSWMN

SEQ ID NO: 1139 - protein, 17 aa, Artificial Sequence
  Synthetic
RIYPGDGDTKYNGKFKG

SEQ ID NO: 1140 - protein, 11 aa, Artificial Sequence
  Synthetic
STMIATGAMDY

SEQ ID NO: 1141 - protein, 11 aa, Artificial Sequence
  Synthetic
KASQDVSTAVA

SEQ ID NO: 1142 - protein, 7 aa, Artificial Sequence
  Synthetic
SASYRYT

SEQ ID NO: 1143 - protein, 10 aa, Artificial Sequence
  Synthetic
QQHYSTPPYT

SEQ ID NO: 1144 - protein, 120 aa, Artificial Sequence
  Synthetic
QVQLVQSGAEVKKPGASVKVSCKASGYTFSSSWMNWVRQAPGQGLEWMGRIYPGDGDTKYNGKFKGKVTLTADKSTSTAYMELSSLRSEDTAVYYCARSTMIATGAMDYWGQGTLVTVSS

SEQ ID NO: 1145 - protein, 109 aa, Artificial Sequence
  Synthetic
DIQMTQSPSSLSASVGDRVTITCKASQDVSTAVAWYQQKPGKAPKLLIYSASYRYTGVPSRFSGSGSGTDFTLTISSLQPEDFATYYCQQHYSTPPYTFGGGTKVEIKR

SEQ ID NO: 1146 - protein, 244 aa, Artificial Sequence
  Synthetic
DIQMTQSPSSLSASVGDRVTITCKASQDVSTAVAWYQQKPGKAPKLLIYSASYRYTGVPSRFSGSGSGTDFTLTISSLQPEDFATYYCQQHYSTPPYTFGGGTKVEIKRGGGGSGGGGSGGGGSQVQLVQSGAEVKKPGASVKVSCKASGYTFSSSWMNWVRQAPGQGLEWMGRIYPGDGDTKYNGKFKGKVTLTADKSTSTAYMELSSLRSEDTAVYYCARSTMIATGAMDYWGQGTLVTVSS

SEQ ID NO: 1147 - protein, 499 aa, Artificial Sequence
  Synthetic
DIQMTQSPSSLSASVGDRVTITCKASQDVSTAVAWYQQKPGKAPKLLIYSASYRYTGVPSRFSGSGSGTDFTLTISSLQPEDFATYYCQQHYSTPPYTFGGGTKVEIKRGGGGSGGGGSGGGGSQVQLVQSGAEVKKPGASVKVSCKASGYTFSSSWMNWVRQAPGQGLEWMGRIYPGDGDTKYNGKFKGKVTLTADKSTSTAYMELSSLRSEDTAVYYCARSTMIATGAMDYWGQGTLVTVSSSGGGGSEVQLVESGGGLVQPGGSLKLSCAASGFTFNKYAMNWVRQAPGKGLEWVARIRSKYNNYATYYADSVKDRFTISRDDSKNTAYLQMNNLKTEDTAVYYCVRHGNFGNSYISYWAYWGQGTLVTVSSGGGGSGGGGSGGGGSQTVVTQEPSLTVSPGGTVTLTCGSSTGAVTSGNYPNWVQQKPGQAPRGLIGGTKFLAPGTPARFSGSLLGGKAALTLSGVQPEDEAEYYCVLWYSNRWVFGGGTKLTVL

SEQ ID NO: 1148 - protein, 987 aa, Artificial Sequence
  Synthetic
DIQMTQSPSSLSASVGDRVTITCKASQDVSTAVAWYQQKPGKAPKLLIYSASYRYTGVPSRFSGSGSGTDFTLTISSLQPEDFATYYCQQHYSTPPYTFGGGTKVEIKRGGGGSGGGGSGGGGSQVQLVQSGAEVKKPGASVKVSCKASGYTFSSSWMNWVRQAPGQGLEWMGRIYPGDGDTKYNGKFKGKVTLTADKSTSTAYMELSSLRSEDTAVYYCARSTMIATGAMDYWGQGTLVTVSSSGGGGSEVQLVESGGGLVQPGGSLKLSCAASGFTFNKYAMNWVRQAPGKGLEWVARIRSKYNNYATYYADSVKDRFTISRDDSKNTAYLQMNNLKTEDTAVYYCVRHGNFGNSYISYWAYWGQGTLVTVSSGGGGSGGGGSGGGGSQTVVTQEPSLTVSPGGTVTLTCGSSTGAVTSGNYPNWVQQKPGQAPRGLIGGTKFLAPGTPARFSGSLLGGKAALTLSGVQPEDEAEYYCVLWYSNRWVFGGGTKLTVLGGGGDKTHTCPPCPAPELLGGPSVFLFPPKPKDTLMISRTPEVTCVVVDVSHEDPEVKFNWYVDGVEVHNAKTKPCEEQYGSTYRCVSVLTVLHQDWLNGKEYKCKVSNKALPAPIEKTISKAKGQPREPQVYTLPPSREEMTKNQVSLTCLVKGFYPSDIAVEWESNGQPENNYKTTPPVLDSDGSFFLYSKLTVDKSRWQQGNVFSCSVMHEALHNHYTQKSLSLSPGKGGGGSGGGGSGGGGSGGGGSGGGGSGGGGSDKTHTCPPCPAPELLGGPSVFLFPPKPKDTLMISRTPEVTCVVVDVSHEDPEVKFNWYVDGVEVHNAKTKPCEEQYGSTYRCVSVLTVLHQDWLNGKEYKCKVSNKALPAPIEKTISKAKGQPREPQVYTLPPSREEMTKNQVSLTCLVKGFYPSDIAVEWESNGQPENNYKTTPPVLDSDGSFFLYSKLTVDKSRWQQGNVFSCSVMHEALHNHYTQKSLSLSPGK

SEQ ID NO: 1149 - protein, 5 aa, Artificial Sequence
  Synthetic
SSWMN

SEQ ID NO: 1150 - protein, 17 aa, Artificial Sequence
  Synthetic
RIYPGDGDTKYNGKFKG

SEQ ID NO: 1151 - protein, 11 aa, Artificial Sequence
  Synthetic
STMIATGAMDY

SEQ ID NO: 1152 - protein, 11 aa, Artificial Sequence
  Synthetic
KASQDVSTAVA

SEQ ID NO: 1153 - protein, 7 aa, Artificial Sequence
  Synthetic
SASYRYT

SEQ ID NO: 1154 - protein, 10 aa, Artificial Sequence
  Synthetic
QQHYSTPPYT

SEQ ID NO: 1155 - protein, 120 aa, Artificial Sequence; identical to SEQ ID NO: 1144
  Synthetic

SEQ ID NO: 1156 - protein, 109 aa, Artificial Sequence
  Synthetic
DIQMTQSPSSLSASVGDRVTITCKASQDVSTAVAWYQQKPGKAPKLLIYSASYRYTGVPDRFSGSGSGTDFTLTISSLQPEDFATYYCQQHYSTPPYTFGGGTKVEIKR

SEQ ID NO: 1157 - protein, 244 aa, Artificial Sequence
  Synthetic
DIQMTQSPSSLSASVGDRVTITCKASQDVSTAVAWYQQKPGKAPKLLIYSASYRYTGVPDRFSGSGSGTDFTLTISSLQPEDFATYYCQQHYSTPPYTFGGGTKVEIKRGGGGSGGGGSGGGGSQVQLVQSGAEVKKPGASVKVSCKASGYTFSSSWMNWVRQAPGQGLEWMGRIYPGDGDTKYNGKFKGKVTLTADKSTSTAYMELSSLRSEDTAVYYCARSTMIATGAMDYWGQGTLVTVSS

SEQ ID NO: 1158 - protein, 499 aa, Artificial Sequence
  Synthetic
DIQMTQSPSSLSASVGDRVTITCKASQDVSTAVAWYQQKPGKAPKLLIYSASYRYTGVPDRFSGSGSGTDFTLTISSLQPEDFATYYCQQHYSTPPYTFGGGTKVEIKRGGGGSGGGGSGGGGSQVQLVQSGAEVKKPGASVKVSCKASGYTFSSSWMNWVRQAPGQGLEWMGRIYPGDGDTKYNGKFKGKVTLTADKSTSTAYMELSSLRSEDTAVYYCARSTMIATGAMDYWGQGTLVTVSSSGGGGSEVQLVESGGGLVQPGGSLKLSCAASGFTFNKYAMNWVRQAPGKGLEWVARIRSKYNNYATYYADSVKDRFTISRDDSKNTAYLQMNNLKTEDTAVYYCVRHGNFGNSYISYWAYWGQGTLVTVSSGGGGSGGGGSGGGGSQTVVTQEPSLTVSPGGTVTLTCGSSTGAVTSGNYPNWVQQKPGQAPRGLIGGTKFLAPGTPARFSGSLLGGKAALTLSGVQPEDEAEYYCVLWYSNRWVFGGGTKLTVL

SEQ ID NO: 1159 - protein, 987 aa, Artificial Sequence
  Synthetic
DIQMTQSPSSLSASVGDRVTITCKASQDVSTAVAWYQQKPGKAPKLLIYSASYRYTGVPDRFSGSGSGTDFTLTISSLQPEDFATYYCQQHYSTPPYTFGGGTKVEIKRGGGGSGGGGSGGGGSQVQLVQSGAEVKKPGASVKVSCKASGYTFSSSWMNWVRQAPGQGLEWMGRIYPGDGDTKYNGKFKGKVTLTADKSTSTAYMELSSLRSEDTAVYYCARSTMIATGAMDYWGQGTLVTVSSSGGGGSEVQLVESGGGLVQPGGSLKLSCAASGFTFNKYAMNWVRQAPGKGLEWVARIRSKYNNYATYYADSVKDRFTISRDDSKNTAYLQMNNLKTEDTAVYYCVRHGNFGNSYISYWAYWGQGTLVTVSSGGGGSGGGGSGGGGSQTVVTQEPSLTVSPGGTVTLTCGSSTGAVTSGNYPNWVQQKPGQAPRGLIGGTKFLAPGTPARFSGSLLGGKAALTLSGVQPEDEAEYYCVLWYSNRWVFGGGTKLTVLGGGGDKTHTCPPCPAPELLGGPSVFLFPPKPKDTLMISRTPEVTCVVVDVSHEDPEVKFNWYVDGVEVHNAKTKPCEEQYGSTYRCVSVLTVLHQDWLNGKEYKCKVSNKALPAPIEKTISKAKGQPREPQVYTLPPSREEMTKNQVSLTCLVKGFYPSDIAVEWESNGQPENNYKTTPPVLDSDGSFFLYSKLTVDKSRWQQGNVFSCSVMHEALHNHYTQKSLSLSPGKGGGGSGGGGSGGGGSGGGGSGGGGSGGGGSDKTHTCPPCPAPELLGGPSVFLFPPKPKDTLMISRTPEVTCVVVDVSHEDPEVKFNWYVDGVEVHNAKTKPCEEQYGSTYRCVSVLTVLHQDWLNGKEYKCKVSNKALPAPIEKTISKAKGQPREPQVYTLPPSREEMTKNQVSLTCLVKGFYPSDIAVEWESNGQPENNYKTTPPVLDSDGSFFLYSKLTVDKSRWQQGNVFSCSVMHEALHNHYTQKSLSLSPGK

SEQ ID NO: 1160 - protein, 5 aa, Artificial Sequence
  Synthetic
SSWMN

SEQ ID NO: 1161 - protein, 17 aa, Artificial Sequence
  Synthetic
RIYPGDGDTKYNGKFKG

SEQ ID NO: 1162 - protein, 11 aa, Artificial Sequence
  Synthetic
STMIATGAMDY

SEQ ID NO: 1163 - protein, 11 aa, Artificial Sequence
  Synthetic
KASQDVSTAVA

SEQ ID NO: 1164 - protein, 7 aa, Artificial Sequence
  Synthetic
SASYRYT

SEQ ID NO: 1165 - protein, 10 aa, Artificial Sequence
  Synthetic
QQHYSTPPYT

SEQ ID NO: 1166 - protein, 120 aa, Artificial Sequence
  Synthetic
QVQLVQSGAEVKKPGASVKVSCKASGYTFSSSWMNWVRQAPGQCLEWIGRIYPGDGDTKYNGKFKGKATLTADKSTSTAYMELSSLRSEDTAVYYCARSTMIATGAMDYWGQGTLVTVSS

SEQ ID NO: 1167 - protein, 109 aa, Artificial Sequence; identical to SEQ ID NO: 1123
  Synthetic

SEQ ID NO: 1168 - protein, 244 aa, Artificial Sequence
  Synthetic
DIQMTQSPSSLSASVGDRVTITCKASQDVSTAVAWYQQKPGKAPKLLIYSASYRYTGVPDRFTGSGSGTDFTLTISSLQPEDFATYYCQQHYSTPPYTFGCGTKVEIKRGGGGSGGGGSGGGGSQVQLVQSGAEVKKPGASVKVSCKASGYTFSSSWMNWVRQAPGQCLEWIGRIYPGDGDTKYNGKFKGKATLTADKSTSTAYMELSSLRSEDTAVYYCARSTMIATGAMDYWGQGTLVTVSS

SEQ ID NO: 1169 - protein, 499 aa, Artificial Sequence
  Synthetic
DIQMTQSPSSLSASVGDRVTITCKASQDVSTAVAWYQQKPGKAPKLLIYSASYRYTGVPDRFTGSGSGTDFTLTISSLQPEDFATYYCQQHYSTPPYTFGCGTKVEIKRGGGGSGGGGSGGGGSQVQLVQSGAEVKKPGASVKVSCKASGYTFSSSWMNWVRQAPGQCLEWIGRIYPGDGDTKYNGKFKGKATLTADKSTSTAYMELSSLRSEDTAVYYCARSTMIATGAMDYWGQGTLVTVSSSGGGGSEVQLVESGGGLVQPGGSLKLSCAASGFTFNKYAMNWVRQAPGKGLEWVARIRSKYNNYATYYADSVKDRFTISRDDSKNTAYLQMNNLKTEDTAVYYCVRHGNFGNSYISYWAYWGQGTLVTVSSGGGGSGGGGSGGGGSQTVVTQEPSLTVSPGGTVTLTCGSSTGAVTSGNYPNWVQQKPGQAPRGLIGGTKFLAPGTPARFSGSLLGGKAALTLSGVQPEDEAEYYCVLWYSNRWVFGGGTKLTVL

SEQ ID NO: 1170 - protein, 987 aa, Artificial Sequence
  Synthetic
DIQMTQSPSSLSASVGDRVTITCKASQDVSTAVAWYQQKPGKAPKLLIYSASYRYTGVPDRFTGSGSGTDFTLTISSLQPEDFATYYCQQHYSTPPYTFGCGTKVEIKRGGGGSGGGGSGGGGSQVQLVQSGAEVKKPGASVKVSCKASGYTFSSSWMNWVRQAPGQCLEWIGRIYPGDGDTKYNGKFKGKATLTADKSTSTAYMELSSLRSEDTAVYYCARSTMIATGAMDYWGQGTLVTVSSSGGGGSEVQLVESGGGLVQPGGSLKLSCAASGFTFNKYAMNWVRQAPGKGLEWVARIRSKYNNYATYYADSVKDRFTISRDDSKNTAYLQMNNLKTEDTAVYYCVRHGNFGNSYISYWAYWGQGTLVTVSSGGGGSGGGGSGGGGSQTVVTQEPSLTVSPGGTVTLTCGSSTGAVTSGNYPNWVQQKPGQAPRGLIGGTKFLAPGTPARFSGSLLGGKAALTLSGVQPEDEAEYYCVLWYSNRWVFGGGTKLTVLGGGGDKTHTCPPCPAPELLGGPSVFLFPPKPKDTLMISRTPEVTCVVVDVSHEDPEVKFNWYVDGVEVHNAKTKPCEEQYGSTYRCVSVLTVLHQDWLNGKEYKCKVSNKALPAPIEKTISKAKGQPREPQVYTLPPSREEMTKNQVSLTCLVKGFYPSDIAVEWESNGQPENNYKTTPPVLDSDGSFFLYSKLTVDKSRWQQGNVFSCSVMHEALHNHYTQKSLSLSPGKGGGGSGGGGSGGGGSGGGGSGGGGSGGGGSDKTHTCPPCPAPELLGGPSVFLFPPKPKDTLMISRTPEVTCVVVDVSHEDPEVKFNWYVDGVEVHNAKTKPCEEQYGSTYRCVSVLTVLHQDWLNGKEYKCKVSNKALPAPIEKTISKAKGQPREPQVYTLPPSREEMTKNQVSLTCLVKGFYPSDIAVEWESNGQPENNYKTTPPVLDSDGSFFLYSKLTVDKSRWQQGNVFSCSVMHEALHNHYTQKSLSLSPGK

SEQ ID NO: 1171 - protein, 5 aa, Artificial Sequence
  Synthetic
SSWMN

SEQ ID NO: 1172 - protein, 17 aa, Artificial Sequence
  Synthetic
RIYPGDADAKYQGKFKG

SEQ ID NO: 1173 - protein, 11 aa, Artificial Sequence
  Synthetic
STMIATGAMDY

SEQ ID NO: 1174 - protein, 11 aa, Artificial Sequence
  Synthetic
KASQDVSTAVA

SEQ ID NO: 1175 - protein, 7 aa, Artificial Sequence
  Synthetic
SASYRYT

SEQ ID NO: 1176 - protein, 10 aa, Artificial Sequence
  Synthetic
QQHYSTPPYT

SEQ ID NO: 1177 - protein, 120 aa, Artificial Sequence
  Synthetic
QVQLVQSGAEVKKPGASVKVSCKASGYTFSSSWMNWVRQAPGQGLEWMGRIYPGDADAKYQGKFKGKVTLTADKSTSTAYMELSSLRSEDTAVYYCARSTMIATGAMDYWGQGTLVTVSS

SEQ ID NO: 1178 - protein, 109 aa, Artificial Sequence; identical to SEQ ID NO: 1145
  Synthetic

SEQ ID NO: 1179 - protein, 244 aa, Artificial Sequence
  Synthetic
DIQMTQSPSSLSASVGDRVTITCKASQDVSTAVAWYQQKPGKAPKLLIYSASYRYTGVPSRFSGSGSGTDFTLTISSLQPEDFATYYCQQHYSTPPYTFGGGTKVEIKRGGGGSGGGGSGGGGSQVQLVQSGAEVKKPGASVKVSCKASGYTFSSSWMNWVRQAPGQGLEWMGRIYPGDADAKYQGKFKGKVTLTADKSTSTAYMELSSLRSEDTAVYYCARSTMIATGAMDYWGQGTLVTVSS

SEQ ID NO: 1180 - protein, 499 aa, Artificial Sequence
  Synthetic
DIQMTQSPSSLSASVGDRVTITCKASQDVSTAVAWYQQKPGKAPKLLIYSASYRYTGVPSRFSGSGSGTDFTLTISSLQPEDFATYYCQQHYSTPPYTFGGGTKVEIKRGGGGSGGGGSGGGGSQVQLVQSGAEVKKPGASVKVSCKASGYTFSSSWMNWVRQAPGQGLEWMGRIYPGDADAKYQGKFKGKVTLTADKSTSTAYMELSSLRSEDTAVYYCARSTMIATGAMDYWGQGTLVTVSSSGGGGSEVQLVESGGGLVQPGGSLKLSCAASGFTFNKYAMNWVRQAPGKGLEWVARIRSKYNNYATYYADSVKDRFTISRDDSKNTAYLQMNNLKTEDTAVYYCVRHGNFGNSYISYWAYWGQGTLVTVSSGGGGSGGGGSGGGGSQTVVTQEPSLTVSPGGTVTLTCGSSTGAVTSGNYPNWVQQKPGQAPRGLIGGTKFLAPGTPARFSGSLLGGKAALTLSGVQPEDEAEYYCVLWYSNRWVFGGGTKLTVL

SEQ ID NO: 1181 - protein, 987 aa, Artificial Sequence
  Synthetic
DIQMTQSPSSLSASVGDRVTITCKASQDVSTAVAWYQQKPGKAPKLLIYSASYRYTGVPSRFSGSGSGTDFTLTISSLQPEDFATYYCQQHYSTPPYTFGGGTKVEIKRGGGGSGGGGSGGGGSQVQLVQSGAEVKKPGASVKVSCKASGYTFSSSWMNWVRQAPGQGLEWMGRIYPGDADAKYQGKFKGKVTLTADKSTSTAYMELSSLRSEDTAVYYCARSTMIATGAMDYWGQGTLVTVSSSGGGGSEVQLVESGGGLVQPGGSLKLSCAASGFTFNKYAMNWVRQAPGKGLEWVARIRSKYNNYATYYADSVKDRFTISRDDSKNTAYLQMNNLKTEDTAVYYCVRHGNFGNSYISYWAYWGQGTLVTVSSGGGGSGGGGSGGGGSQTVVTQEPSLTVSPGGTVTLTCGSSTGAVTSGNYPNWVQQKPGQAPRGLIGGTKFLAPGTPARFSGSLLGGKAALTLSGVQPEDEAEYYCVLWYSNRWVFGGGTKLTVLGGGGDKTHTCPPCPAPELLGGPSVFLFPPKPKDTLMISRTPEVTCVVVDVSHEDPEVKFNWYVDGVEVHNAKTKPCEEQYGSTYRCVSVLTVLHQDWLNGKEYKCKVSNKALPAPIEKTISKAKGQPREPQVYTLPPSREEMTKNQVSLTCLVKGFYPSDIAVEWESNGQPENNYKTTPPVLDSDGSFFLYSKLTVDKSRWQQGNVFSCSVMHEALHNHYTQKSLSLSPGKGGGGSGGGGSGGGGSGGGGSGGGGSGGGGSDKTHTCPPCPAPELLGGPSVFLFPPKPKDTLMISRTPEVTCVVVDVSHEDPEVKFNWYVDGVEVHNAKTKPCEEQYGSTYRCVSVLTVLHQDWLNGKEYKCKVSNKALPAPIEKTISKAKGQPREPQVYTLPPSREEMTKNQVSLTCLVKGFYPSDIAVEWESNGQPENNYKTTPPVLDSDGSFFLYSKLTVDKSRWQQGNVFSCSVMHEALHNHYTQKSLSLSPGK

SEQ ID NO: 1182 - protein, 5 aa, Artificial Sequence
  Synthetic
SSWMN

SEQ ID NO: 1183 - protein, 17 aa, Artificial Sequence
  Synthetic
RIYPGDADAKYNGKFKG

SEQ ID NO: 1184 - protein, 11 aa, Artificial Sequence
  Synthetic
STMIATGAMDY

SEQ ID NO: 1185 - protein, 11 aa, Artificial Sequence
  Synthetic
KASQDVSTAVA

SEQ ID NO: 1186 - protein, 7 aa, Artificial Sequence
  Synthetic
SASYRYT

SEQ ID NO: 1187 - protein, 10 aa, Artificial Sequence
  Synthetic
QQHYSTPPYT

SEQ ID NO: 1188 - protein, 120 aa, Artificial Sequence
  Synthetic
QVQLVQSGAEVKKPGASVKVSCKASGYAFSSSWMNWVRQAPGQGLEWIGRIYPGDADAKYNGKFKGKATLTADKSTSTAYMELSSLRSEDTAVYYCARSTMIATGAMDYWGQGTLVTVSS

SEQ ID NO: 1189 - protein, 109 aa, Artificial Sequence; identical to SEQ ID NO: 1112
  Synthetic

SEQ ID NO: 1190 - protein, 244 aa, Artificial Sequence
  Synthetic
DIQMTQSPSSLSASVGDRVTITCKASQDVSTAVAWYQQKPGKAPKLLIYSASYRYTGVPDRFTGSGSGTDFTLTISSLQPEDFATYYCQQHYSTPPYTFGGGTKVEIKRGGGGSGGGGSGGGGSQVQLVQSGAEVKKPGASVKVSCKASGYAFSSSWMNWVRQAPGQGLEWIGRIYPGDADAKYNGKFKGKATLTADKSTSTAYMELSSLRSEDTAVYYCARSTMIATGAMDYWGQGTLVTVSS

SEQ ID NO: 1191 - protein, 499 aa, Artificial Sequence
  Synthetic
DIQMTQSPSSLSASVGDRVTITCKASQDVSTAVAWYQQKPGKAPKLLIYSASYRYTGVPDRFTGSGSGTDFTLTISSLQPEDFATYYCQQHYSTPPYTFGGGTKVEIKRGGGGSGGGGSGGGGSQVQLVQSGAEVKKPGASVKVSCKASGYAFSSSWMNWVRQAPGQGLEWIGRIYPGDADAKYNGKFKGKATLTADKSTSTAYMELSSLRSEDTAVYYCARSTMIATGAMDYWGQGTLVTVSSSGGGGSEVQLVESGGGLVQPGGSLKLSCAASGFTFNKYAMNWVRQAPGKGLEWVARIRSKYNNYATYYADSVKDRFTISRDDSKNTAYLQMNNLKTEDTAVYYCVRHGNFGNSYISYWAYWGQGTLVTVSSGGGGSGGGGSGGGGSQTVVTQEPSLTVSPGGTVTLTCGSSTGAVTSGNYPNWVQQKPGQAPRGLIGGTKFLAPGTPARFSGSLLGGKAALTLSGVQPEDEAEYYCVLWYSNRWVFGGGTKLTVL

SEQ ID NO: 1192 - protein, 987 aa, Artificial Sequence
  Synthetic
DIQMTQSPSSLSASVGDRVTITCKASQDVSTAVAWYQQKPGKAPKLLIYSASYRYTGVPDRFTGSGSGTDFTLTISSLQPEDFATYYCQQHYSTPPYTFGGGTKVEIKRGGGGSGGGGSGGGGSQVQLVQSGAEVKKPGASVKVSCKASGYAFSSSWMNWVRQAPGQGLEWIGRIYPGDADAKYNGKFKGKATLTADKSTSTAYMELSSLRSEDTAVYYCARSTMIATGAMDYWGQGTLVTVSSSGGGGSEVQLVESGGGLVQPGGSLKLSCAASGFTFNKYAMNWVRQAPGKGLEWVARIRSKYNNYATYYADSVKDRFTISRDDSKNTAYLQMNNLKTEDTAVYYCVRHGNFGNSYISYWAYWGQGTLVTVSSGGGGSGGGGSGGGGSQTVVTQEPSLTVSPGGTVTLTCGSSTGAVTSGNYPNWVQQKPGQAPRGLIGGTKFLAPGTPARFSGSLLGGKAALTLSGVQPEDEAEYYCVLWYSNRWVFGGGTKLTVLGGGGDKTHTCPPCPAPELLGGPSVFLFPPKPKDTLMISRTPEVTCVVVDVSHEDPEVKFNWYVDGVEVHNAKTKPCEEQYGSTYRCVSVLTVLHQDWLNGKEYKCKVSNKALPAPIEKTISKAKGQPREPQVYTLPPSREEMTKNQVSLTCLVKGFYPSDIAVEWESNGQPENNYKTTPPVLDSDGSFFLYSKLTVDKSRWQQGNVFSCSVMHEALHNHYTQKSLSLSPGKGGGGSGGGGSGGGGSGGGGSGGGGSGGGGSDKTHTCPPCPAPELLGGPSVFLFPPKPKDTLMISRTPEVTCVVVDVSHEDPEVKFNWYVDGVEVHNAKTKPCEEQYGSTYRCVSVLTVLHQDWLNGKEYKCKVSNKALPAPIEKTISKAKGQPREPQVYTLPPSREEMTKNQVSLTCLVKGFYPSDIAVEWESNGQPENNYKTTPPVLDSDGSFFLYSKLTVDKSRWQQGNVFSCSVMHEALHNHYTQKSLSLSPGK

SEQ ID NO: 1193 - protein, 5 aa, Artificial Sequence
  Synthetic
SSWMN

SEQ ID NO: 1194 - protein, 17 aa, Artificial Sequence
  Synthetic
RIYPGDGDTKYQGKFKG

SEQ ID NO: 1195 - protein, 11 aa, Artificial Sequence
  Synthetic
STMIATGAMDY

SEQ ID NO: 1196 - protein, 11 aa, Artificial Sequence
  Synthetic
KASQDVSTAVA

SEQ ID NO: 1197 - protein, 7 aa, Artificial Sequence
  Synthetic
SASYRYT

SEQ ID NO: 1198 - protein, 10 aa, Artificial Sequence
  Synthetic
QQHYSTPPYT

SEQ ID NO: 1199 - protein, 120 aa, Artificial Sequence
  Synthetic
QVQLVQSGAEVKKPGASVKVSCKASGYAFSSSWMNWVRQAPGQGLEWIGRIYPGDGDTKYQGKFKGKATLTADKSTSTAYMELSSLRSEDTAVYYCARSTMIATGAMDYWGQGTLVTVSS

SEQ ID NO: 1200 - protein, 109 aa, Artificial Sequence; identical to SEQ ID NO: 1112
  Synthetic

SEQ ID NO: 1201 - protein, 244 aa, Artificial Sequence
  Synthetic
DIQMTQSPSSLSASVGDRVTITCKASQDVSTAVAWYQQKPGKAPKLLIYSASYRYTGVPDRFTGSGSGTDFTLTISSLQPEDFATYYCQQHYSTPPYTFGGGTKVEIKRGGGGSGGGGSGGGGSQVQLVQSGAEVKKPGASVKVSCKASGYAFSSSWMNWVRQAPGQGLEWIGRIYPGDGDTKYQGKFKGKATLTADKSTSTAYMELSSLRSEDTAVYYCARSTMIATGAMDYWGQGTLVTVSS

SEQ ID NO: 1202 - protein, 499 aa, Artificial Sequence
  Synthetic
DIQMTQSPSSLSASVGDRVTITCKASQDVSTAVAWYQQKPGKAPKLLIYSASYRYTGVPDRFTGSGSGTDFTLTISSLQPEDFATYYCQQHYSTPPYTFGGGTKVEIKRGGGGSGGGGSGGGGSQVQLVQSGAEVKKPGASVKVSCKASGYAFSSSWMNWVRQAPGQGLEWIGRIYPGDGDTKYQGKFKGKATLTADKSTSTAYMELSSLRSEDTAVYYCARSTMIATGAMDYWGQGTLVTVSSSGGGGSEVQLVESGGGLVQPGGSLKLSCAASGFTFNKYAMNWVRQAPGKGLEWVARIRSKYNNYATYYADSVKDRFTISRDDSKNTAYLQMNNLKTEDTAVYYCVRHGNFGNSYISYWAYWGQGTLVTVSSGGGGSGGGGSGGGGSQTVVTQEPSLTVSPGGTVTLTCGSSTGAVTSGNYPNWVQQKPGQAPRGLIGGTKFLAPGTPARFSGSLLGGKAALTLSGVQPEDEAEYYCVLWYSNRWVFGGGTKLTVL

SEQ ID NO: 1203 - protein, 987 aa, Artificial Sequence
  Synthetic
DIQMTQSPSSLSASVGDRVTITCKASQDVSTAVAWYQQKPGKAPKLLIYSASYRYTGVPDRFTGSGSGTDFTLTISSLQPEDFATYYCQQHYSTPPYTFGGGTKVEIKRGGGGSGGGGSGGGGSQVQLVQSGAEVKKPGASVKVSCKASGYAFSSSWMNWVRQAPGQGLEWIGRIYPGDGDTKYQGKFKGKATLTADKSTSTAYMELSSLRSEDTAVYYCARSTMIATGAMDYWGQGTLVTVSSSGGGGSEVQLVESGGGLVQPGGSLKLSCAASGFTFNKYAMNWVRQAPGKGLEWVARIRSKYNNYATYYADSVKDRFTISRDDSKNTAYLQMNNLKTEDTAVYYCVRHGNFGNSYISYWAYWGQGTLVTVSSGGGGSGGGGSGGGGSQTVVTQEPSLTVSPGGTVTLTCGSSTGAVTSGNYPNWVQQKPGQAPRGLIGGTKFLAPGTPARFSGSLLGGKAALTLSGVQPEDEAEYYCVLWYSNRWVFGGGTKLTVLGGGGDKTHTCPPCPAPELLGGPSVFLFPPKPKDTLMISRTPEVTCVVVDVSHEDPEVKFNWYVDGVEVHNAKTKPCEEQYGSTYRCVSVLTVLHQDWLNGKEYKCKVSNKALPAPIEKTISKAKGQPREPQVYTLPPSREEMTKNQVSLTCLVKGFYPSDIAVEWESNGQPENNYKTTPPVLDSDGSFFLYSKLTVDKSRWQQGNVFSCSVMHEALHNHYTQKSLSLSPGKGGGGSGGGGSGGGGSGGGGSGGGGSGGGGSDKTHTCPPCPAPELLGGPSVFLFPPKPKDTLMISRTPEVTCVVVDVSHEDPEVKFNWYVDGVEVHNAKTKPCEEQYGSTYRCVSVLTVLHQDWLNGKEYKCKVSNKALPAPIEKTISKAKGQPREPQVYTLPPSREEMTKNQVSLTCLVKGFYPSDIAVEWESNGQPENNYKTTPPVLDSDGSFFLYSKLTVDKSRWQQGNVFSCSVMHEALHNHYTQKSLSLSPGK

SEQ ID NO: 1204 - protein, 5 aa, Artificial Sequence
  Synthetic
SSWMN

SEQ ID NO: 1205 - protein, 17 aa, Artificial Sequence
  Synthetic
RIYPGDGDTKYNAKFKG

SEQ ID NO: 1206 - protein, 11 aa, Artificial Sequence
  Synthetic
STMIATGAMDY

SEQ ID NO: 1207 - protein, 11 aa, Artificial Sequence
  Synthetic
KASQDVSTAVA

SEQ ID NO: 1208 - protein, 7 aa, Artificial Sequence
  Synthetic
SASYRYT

SEQ ID NO: 1209 - protein, 10 aa, Artificial Sequence
  Synthetic
QQHYSTPPYT

SEQ ID NO: 1210 - protein, 120 aa, Artificial Sequence
  Synthetic
QVQLVQSGAEVKKPGASVKVSCKASGYAFSSSWMNWVRQAPGQGLEWIGRIYPGDGDTKYNAKFKGKATLTADKSTSTAYMELSSLRSEDTAVYYCARSTMIATGAMDYWGQGTLVTVSS

SEQ ID NO: 1211 - protein, 109 aa, Artificial Sequence; identical to SEQ ID NO: 1112
  Synthetic

SEQ ID NO: 1212 - protein, 244 aa, Artificial Sequence
  Synthetic
DIQMTQSPSSLSASVGDRVTITCKASQDVSTAVAWYQQKPGKAPKLLIYSASYRYTGVPDRFTGSGSGTDFTLTISSLQPEDFATYYCQQHYSTPPYTFGGGTKVEIKRGGGGSGGGGSGGGGSQVQLVQSGAEVKKPGASVKVSCKASGYAFSSSWMNWVRQAPGQGLEWIGRIYPGDGDTKYNAKFKGKATLTADKSTSTAYMELSSLRSEDTAVYYCARSTMIATGAMDYWGQGTLVTVSS

SEQ ID NO: 1213 - protein, 499 aa, Artificial Sequence
  Synthetic
DIQMTQSPSSLSASVGDRVTITCKASQDVSTAVAWYQQKPGKAPKLLIYSASYRYTGVPDRFTGSGSGTDFTLTISSLQPEDFATYYCQQHYSTPPYTFGGGTKVEIKRGGGGSGGGGSGGGGSQVQLVQSGAEVKKPGASVKVSCKASGYAFSSSWMNWVRQAPGQGLEWIGRIYPGDGDTKYNAKFKGKATLTADKSTSTAYMELSSLRSEDTAVYYCARSTMIATGAMDYWGQGTLVTVSSSGGGGSEVQLVESGGGLVQPGGSLKLSCAASGFTFNKYAMNWVRQAPGKGLEWVARIRSKYNNYATYYADSVKDRFTISRDDSKNTAYLQMNNLKTEDTAVYYCVRHGNFGNSYISYWAYWGQGTLVTVSSGGGGSGGGGSGGGGSQTVVTQEPSLTVSPGGTVTLTCGSSTGAVTSGNYPNWVQQKPGQAPRGLIGGTKFLAPGTPARFSGSLLGGKAALTLSGVQPEDEAEYYCVLWYSNRWVFGGGTKLTVL

SEQ ID NO: 1214 - protein, 987 aa, Artificial Sequence
  Synthetic
DIQMTQSPSSLSASVGDRVTITCKASQDVSTAVAWYQQKPGKAPKLLIYSASYRYTGVPDRFTGSGSGTDFTLTISSLQPEDFATYYCQQHYSTPPYTFGGGTKVEIKRGGGGSGGGGSGGGGSQVQLVQSGAEVKKPGASVKVSCKASGYAFSSSWMNWVRQAPGQGLEWIGRIYPGDGDTKYNAKFKGKATLTADKSTSTAYMELSSLRSEDTAVYYCARSTMIATGAMDYWGQGTLVTVSSSGGGGSEVQLVESGGGLVQPGGSLKLSCAASGFTFNKYAMNWVRQAPGKGLEWVARIRSKYNNYATYYADSVKDRFTISRDDSKNTAYLQMNNLKTEDTAVYYCVRHGNFGNSYISYWAYWGQGTLVTVSSGGGGSGGGGSGGGGSQTVVTQEPSLTVSPGGTVTLTCGSSTGAVTSGNYPNWVQQKPGQAPRGLIGGTKFLAPGTPARFSGSLLGGKAALTLSGVQPEDEAEYYCVLWYSNRWVFGGGTKLTVLGGGGDKTHTCPPCPAPELLGGPSVFLFPPKPKDTLMISRTPEVTCVVVDVSHEDPEVKFNWYVDGVEVHNAKTKPCEEQYGSTYRCVSVLTVLHQDWLNGKEYKCKVSNKALPAPIEKTISKAKGQPREPQVYTLPPSREEMTKNQVSLTCLVKGFYPSDIAVEWESNGQPENNYKTTPPVLDSDGSFFLYSKLTVDKSRWQQGNVFSCSVMHEALHNHYTQKSLSLSPGKGGGGSGGGGSGGGGSGGGGSGGGGSGGGGSDKTHTCPPCPAPELLGGPSVFLFPPKPKDTLMISRTPEVTCVVVDVSHEDPEVKFNWYVDGVEVHNAKTKPCEEQYGSTYRCVSVLTVLHQDWLNGKEYKCKVSNKALPAPIEKTISKAKGQPREPQVYTLPPSREEMTKNQVSLTCLVKGFYPSDIAVEWESNGQPENNYKTTPPVLDSDGSFFLYSKLTVDKSRWQQGNVFSCSVMHEALHNHYTQKSLSLSPGK

SEQ ID NO: 1215 - protein, 5 aa, Artificial Sequence
  Synthetic
SSWMN

SEQ ID NO: 1216 - protein, 17 aa, Artificial Sequence
  Synthetic
RIYPGDADTKYNGKFKG

SEQ ID NO: 1217 - protein, 11 aa, Artificial Sequence
  Synthetic
STMIATGAMDY

SEQ ID NO: 1218 - protein, 11 aa, Artificial Sequence
  Synthetic
KASQDVSTAVA

SEQ ID NO: 1219 - protein, 7 aa, Artificial Sequence
  Synthetic
SASYRYT

SEQ ID NO: 1220 - protein, 10 aa, Artificial Sequence
  Synthetic
QQHYSTPPYT

SEQ ID NO: 1221 - protein, 120 aa, Artificial Sequence
  Synthetic
QVQLVQSGAEVKKPGASVKVSCKASGYAFSSSWMNWVRQAPGQGLEWIGRIYPGDADTKYNGKFKGKATLTADKSTSTAYMELSSLRSEDTAVYYCARSTMIATGAMDYWGQGTLVTVSS

SEQ ID NO: 1222 - protein, 109 aa, Artificial Sequence; identical to SEQ ID NO: 1112
  Synthetic

SEQ ID NO: 1223 - protein, 244 aa, Artificial Sequence
  Synthetic
DIQMTQSPSSLSASVGDRVTITCKASQDVSTAVAWYQQKPGKAPKLLIYSASYRYTGVPDRFTGSGSGTDFTLTISSLQPEDFATYYCQQHYSTPPYTFGGGTKVEIKRGGGGSGGGGSGGGGSQVQLVQSGAEVKKPGASVKVSCKASGYAFSSSWMNWVRQAPGQGLEWIGRIYPGDADTKYNGKFKGKATLTADKSTSTAYMELSSLRSEDTAVYYCARSTMIATGAMDYWGQGTLVTVSS

SEQ ID NO: 1224 - protein, 499 aa, Artificial Sequence
  Synthetic
DIQMTQSPSSLSASVGDRVTITCKASQDVSTAVAWYQQKPGKAPKLLIYSASYRYTGVPDRFTGSGSGTDFTLTISSLQPEDFATYYCQQHYSTPPYTFGGGTKVEIKRGGGGSGGGGSGGGGSQVQLVQSGAEVKKPGASVKVSCKASGYAFSSSWMNWVRQAPGQGLEWIGRIYPGDADTKYNGKFKGKATLTADKSTSTAYMELSSLRSEDTAVYYCARSTMIATGAMDYWGQGTLVTVSSSGGGGSEVQLVESGGGLVQPGGSLKLSCAASGFTFNKYAMNWVRQAPGKGLEWVARIRSKYNNYATYYADSVKDRFTISRDDSKNTAYLQMNNLKTEDTAVYYCVRHGNFGNSYISYWAYWGQGTLVTVSSGGGGSGGGGSGGGGSQTVVTQEPSLTVSPGGTVTLTCGSSTGAVTSGNYPNWVQQKPGQAPRGLIGGTKFLAPGTPARFSGSLLGGKAALTLSGVQPEDEAEYYCVLWYSNRWVFGGGTKLTVL

SEQ ID NO: 1225 - protein, 987 aa, Artificial Sequence
  Synthetic
DIQMTQSPSSLSASVGDRVTITCKASQDVSTAVAWYQQKPGKAPKLLIYSASYRYTGVPDRFTGSGSGTDFTLTISSLQPEDFATYYCQQHYSTPPYTFGGGTKVEIKRGGGGSGGGGSGGGGSQVQLVQSGAEVKKPGASVKVSCKASGYAFSSSWMNWVRQAPGQGLEWIGRIYPGDADTKYNGKFKGKATLTADKSTSTAYMELSSLRSEDTAVYYCARSTMIATGAMDYWGQGTLVTVSSSGGGGSEVQLVESGGGLVQPGGSLKLSCAASGFTFNKYAMNWVRQAPGKGLEWVARIRSKYNNYATYYADSVKDRFTISRDDSKNTAYLQMNNLKTEDTAVYYCVRHGNFGNSYISYWAYWGQGTLVTVSSGGGGSGGGGSGGGGSQTVVTQEPSLTVSPGGTVTLTCGSSTGAVTSGNYPNWVQQKPGQAPRGLIGGTKFLAPGTPARFSGSLLGGKAALTLSGVQPEDEAEYYCVLWYSNRWVFGGGTKLTVLGGGGDKTHTCPPCPAPELLGGPSVFLFPPKPKDTLMISRTPEVTCVVVDVSHEDPEVKFNWYVDGVEVHNAKTKPCEEQYGSTYRCVSVLTVLHQDWLNGKEYKCKVSNKALPAPIEKTISKAKGQPREPQVYTLPPSREEMTKNQVSLTCLVKGFYPSDIAVEWESNGQPENNYKTTPPVLDSDGSFFLYSKLTVDKSRWQQGNVFSCSVMHEALHNHYTQKSLSLSPGKGGGGSGGGGSGGGGSGGGGSGGGGSGGGGSDKTHTCPPCPAPELLGGPSVFLFPPKPKDTLMISRTPEVTCVVVDVSHEDPEVKFNWYVDGVEVHNAKTKPCEEQYGSTYRCVSVLTVLHQDWLNGKEYKCKVSNKALPAPIEKTISKAKGQPREPQVYTLPPSREEMTKNQVSLTCLVKGFYPSDIAVEWESNGQPENNYKTTPPVLDSDGSFFLYSKLTVDKSRWQQGNVFSCSVMHEALHNHYTQKSLSLSPGK

SEQ ID NO: 1226 - protein, 5 aa, Artificial Sequence
  Synthetic
SSWMN

SEQ ID NO: 1227 - protein, 17 aa, Artificial Sequence
  Synthetic
RIYPGDGDAKYNGKFKG

SEQ ID NO: 1228 - protein, 11 aa, Artificial Sequence
  Synthetic
STMIATGAMDY

SEQ ID NO: 1229 - protein, 11 aa, Artificial Sequence
  Synthetic
KASQDVSTAVA

SEQ ID NO: 1230 - protein, 7 aa, Artificial Sequence
  Synthetic
SASYRYT

SEQ ID NO: 1231 - protein, 10 aa, Artificial Sequence
  Synthetic
QQHYSTPPYT

SEQ ID NO: 1232 - protein, 120 aa, Artificial Sequence
  Synthetic
QVQLVQSGAEVKKPGASVKVSCKASGYAFSSSWMNWVRQAPGQGLEWIGRIYPGDGDAKYNGKFKGKATLTADKSTSTAYMELSSLRSEDTAVYYCARSTMIATGAMDYWGQGTLVTVSS

SEQ ID NO: 1233 - protein, 109 aa, Artificial Sequence; identical to SEQ ID NO: 1112
  Synthetic

SEQ ID NO: 1234 - protein, 244 aa, Artificial Sequence
  Synthetic
DIQMTQSPSSLSASVGDRVTITCKASQDVSTAVAWYQQKPGKAPKLLIYSASYRYTGVPDRFTGSGSGTDFTLTISSLQPEDFATYYCQQHYSTPPYTFGGGTKVEIKRGGGGSGGGGSGGGGSQVQLVQSGAEVKKPGASVKVSCKASGYAFSSSWMNWVRQAPGQGLEWIGRIYPGDGDAKYNGKFKGKATLTADKSTSTAYMELSSLRSEDTAVYYCARSTMIATGAMDYWGQGTLVTVSS

SEQ ID NO: 1235 - protein, 499 aa, Artificial Sequence
  Synthetic
DIQMTQSPSSLSASVGDRVTITCKASQDVSTAVAWYQQKPGKAPKLLIYSASYRYTGVPDRFTGSGSGTDFTLTISSLQPEDFATYYCQQHYSTPPYTFGGGTKVEIKRGGGGSGGGGSGGGGSQVQLVQSGAEVKKPGASVKVSCKASGYAFSSSWMNWVRQAPGQGLEWIGRIYPGDGDAKYNGKFKGKATLTADKSTSTAYMELSSLRSEDTAVYYCARSTMIATGAMDYWGQGTLVTVSSSGGGGSEVQLVESGGGLVQPGGSLKLSCAASGFTFNKYAMNWVRQAPGKGLEWVARIRSKYNNYATYYADSVKDRFTISRDDSKNTAYLQMNNLKTEDTAVYYCVRHGNFGNSYISYWAYWGQGTLVTVSSGGGGSGGGGSGGGGSQTVVTQEPSLTVSPGGTVTLTCGSSTGAVTSGNYPNWVQQKPGQAPRGLIGGTKFLAPGTPARFSGSLLGGKAALTLSGVQPEDEAEYYCVLWYSNRWVFGGGTKLTVL

SEQ ID NO: 1236 - protein, 987 aa, Artificial Sequence
  Synthetic
DIQMTQSPSSLSASVGDRVTITCKASQDVSTAVAWYQQKPGKAPKLLIYSASYRYTGVPDRFTGSGSGTDFTLTISSLQPEDFATYYCQQHYSTPPYTFGGGTKVEIKRGGGGSGGGGSGGGGSQVQLVQSGAEVKKPGASVKVSCKASGYAFSSSWMNWVRQAPGQGLEWIGRIYPGDGDAKYNGKFKGKATLTADKSTSTAYMELSSLRSEDTAVYYCARSTMIATGAMDYWGQGTLVTVSSSGGGGSEVQLVESGGGLVQPGGSLKLSCAASGFTFNKYAMNWVRQAPGKGLEWVARIRSKYNNYATYYADSVKDRFTISRDDSKNTAYLQMNNLKTEDTAVYYCVRHGNFGNSYISYWAYWGQGTLVTVSSGGGGSGGGGSGGGGSQTVVTQEPSLTVSPGGTVTLTCGSSTGAVTSGNYPNWVQQKPGQAPRGLIGGTKFLAPGTPARFSGSLLGGKAALTLSGVQPEDEAEYYCVLWYSNRWVFGGGTKLTVLGGGGDKTHTCPPCPAPELLGGPSVFLFPPKPKDTLMISRTPEVTCVVVDVSHEDPEVKFNWYVDGVEVHNAKTKPCEEQYGSTYRCVSVLTVLHQDWLNGKEYKCKVSNKALPAPIEKTISKAKGQPREPQVYTLPPSREEMTKNQVSLTCLVKGFYPSDIAVEWESNGQPENNYKTTPPVLDSDGSFFLYSKLTVDKSRWQQGNVFSCSVMHEALHNHYTQKSLSLSPGKGGGGSGGGGSGGGGSGGGGSGGGGSGGGGSDKTHTCPPCPAPELLGGPSVFLFPPKPKDTLMISRTPEVTCVVVDVSHEDPEVKFNWYVDGVEVHNAKTKPCEEQYGSTYRCVSVLTVLHQDWLNGKEYKCKVSNKALPAPIEKTISKAKGQPREPQVYTLPPSREEMTKNQVSLTCLVKGFYPSDIAVEWESNGQPENNYKTTPPVLDSDGSFFLYSKLTVDKSRWQQGNVFSCSVMHEALHNHYTQKSLSLSPGK

SEQ ID NO: 1237 - protein, 5 aa, Artificial Sequence
  Synthetic
SSWMN

SEQ ID NO: 1238 - protein, 17 aa, Artificial Sequence
  Synthetic
RIYPGDADAKYNAKFKG

SEQ ID NO: 1239 - protein, 11 aa, Artificial Sequence
  Synthetic
STMIATGAMDY

SEQ ID NO: 1240 - protein, 11 aa, Artificial Sequence
  Synthetic
KASQDVSTAVA

SEQ ID NO: 1241 - protein, 7 aa, Artificial Sequence
  Synthetic
SASYRYT

SEQ ID NO: 1242 - protein, 10 aa, Artificial Sequence
  Synthetic
QQHYSTPPYT

SEQ ID NO: 1243 - protein, 120 aa, Artificial Sequence
  Synthetic
QVQLVQSGAEVKKPGASVKVSCKASGYAFSSSWMNWVRQAPGQGLEWIGRIYPGDADAKYNAKFKGKATLTADKSTSTAYMELSSLRSEDTAVYYCARSTMIATGAMDYWGQGTLVTVSS

SEQ ID NO: 1244 - protein, 109 aa, Artificial Sequence; identical to SEQ ID NO: 1112
  Synthetic

SEQ ID NO: 1245 - protein, 244 aa, Artificial Sequence
  Synthetic
DIQMTQSPSSLSASVGDRVTITCKASQDVSTAVAWYQQKPGKAPKLLIYSASYRYTGVPDRFTGSGSGTDFTLTISSLQPEDFATYYCQQHYSTPPYTFGGGTKVEIKRGGGGSGGGGSGGGGSQVQLVQSGAEVKKPGASVKVSCKASGYAFSSSWMNWVRQAPGQGLEWIGRIYPGDADAKYNAKFKGKATLTADKSTSTAYMELSSLRSEDTAVYYCARSTMIATGAMDYWGQGTLVTVSS

SEQ ID NO: 1246 - protein, 499 aa, Artificial Sequence
  Synthetic
DIQMTQSPSSLSASVGDRVTITCKASQDVSTAVAWYQQKPGKAPKLLIYSASYRYTGVPDRFTGSGSGTDFTLTISSLQPEDFATYYCQQHYSTPPYTFGGGTKVEIKRGGGGSGGGGSGGGGSQVQLVQSGAEVKKPGASVKVSCKASGYAFSSSWMNWVRQAPGQGLEWIGRIYPGDADAKYNAKFKGKATLTADKSTSTAYMELSSLRSEDTAVYYCARSTMIATGAMDYWGQGTLVTVSSSGGGGSEVQLVESGGGLVQPGGSLKLSCAASGFTFNKYAMNWVRQAPGKGLEWVARIRSKYNNYATYYADSVKDRFTISRDDSKNTAYLQMNNLKTEDTAVYYCVRHGNFGNSYISYWAYWGQGTLVTVSSGGGGSGGGGSGGGGSQTVVTQEPSLTVSPGGTVTLTCGSSTGAVTSGNYPNWVQQKPGQAPRGLIGGTKFLAPGTPARFSGSLLGGKAALTLSGVQPEDEAEYYCVLWYSNRWVFGGGTKLTVL

SEQ ID NO: 1247 - protein, 987 aa, Artificial Sequence
  Synthetic
DIQMTQSPSSLSASVGDRVTITCKASQDVSTAVAWYQQKPGKAPKLLIYSASYRYTGVPDRFTGSGSGTDFTLTISSLQPEDFATYYCQQHYSTPPYTFGGGTKVEIKRGGGGSGGGGSGGGGSQVQLVQSGAEVKKPGASVKVSCKASGYAFSSSWMNWVRQAPGQGLEWIGRIYPGDADAKYNAKFKGKATLTADKSTSTAYMELSSLRSEDTAVYYCARSTMIATGAMDYWGQGTLVTVSSSGGGGSEVQLVESGGGLVQPGGSLKLSCAASGFTFNKYAMNWVRQAPGKGLEWVARIRSKYNNYATYYADSVKDRFTISRDDSKNTAYLQMNNLKTEDTAVYYCVRHGNFGNSYISYWAYWGQGTLVTVSSGGGGSGGGGSGGGGSQTVVTQEPSLTVSPGGTVTLTCGSSTGAVTSGNYPNWVQQKPGQAPRGLIGGTKFLAPGTPARFSGSLLGGKAALTLSGVQPEDEAEYYCVLWYSNRWVFGGGTKLTVLGGGGDKTHTCPPCPAPELLGGPSVFLFPPKPKDTLMISRTPEVTCVVVDVSHEDPEVKFNWYVDGVEVHNAKTKPCEEQYGSTYRCVSVLTVLHQDWLNGKEYKCKVSNKALPAPIEKTISKAKGQPREPQVYTLPPSREEMTKNQVSLTCLVKGFYPSDIAVEWESNGQPENNYKTTPPVLDSDGSFFLYSKLTVDKSRWQQGNVFSCSVMHEALHNHYTQKSLSLSPGKGGGGSGGGGSGGGGSGGGGSGGGGSGGGGSDKTHTCPPCPAPELLGGPSVFLFPPKPKDTLMISRTPEVTCVVVDVSHEDPEVKFNWYVDGVEVHNAKTKPCEEQYGSTYRCVSVLTVLHQDWLNGKEYKCKVSNKALPAPIEKTISKAKGQPREPQVYTLPPSREEMTKNQVSLTCLVKGFYPSDIAVEWESNGQPENNYKTTPPVLDSDGSFFLYSKLTVDKSRWQQGNVFSCSVMHEALHNHYTQKSLSLSPGK

SEQ ID NO: 1248 - protein, 5 aa, Artificial Sequence
  Synthetic
SSWMN

SEQ ID NO: 1249 - protein, 17 aa, Artificial Sequence
  Synthetic
RIYPGDADAKYNGKFKG

SEQ ID NO: 1250 - protein, 11 aa, Artificial Sequence
  Synthetic
STMIATGAMDY

SEQ ID NO: 1251 - protein, 11 aa, Artificial Sequence
  Synthetic
KASQDVSTAVA

SEQ ID NO: 1252 - protein, 7 aa, Artificial Sequence
  Synthetic
SASYRYT

SEQ ID NO: 1253 - protein, 10 aa, Artificial Sequence
  Synthetic
QQHYSTPPYT

SEQ ID NO: 1254 - protein, 120 aa, Artificial Sequence
  Synthetic
QVQLVQSGAEVKKPGASVKVSCKASGYTFSSSWMNWVRQAPGQGLEWIGRIYPGDADAKYNGKFKGKATLTADKSTSTAYMELSSLRSEDTAVYYCARSTMIATGAMDYWGQGTLVTVSS

SEQ ID NO: 1255 - protein, 109 aa, Artificial Sequence; identical to SEQ ID NO: 1134
  Synthetic

SEQ ID NO: 1256 - protein, 244 aa, Artificial Sequence
  Synthetic
DIQMTQSPSSLSASVGDRVTITCKASQDVSTAVAWYQQKPGKAPKLLIYSASYRYTGVPSRFTGSGSGTDFTLTISSLQPEDFATYYCQQHYSTPPYTFGGGTKVEIKRGGGGSGGGGSGGGGSQVQLVQSGAEVKKPGASVKVSCKASGYTFSSSWMNWVRQAPGQGLEWIGRIYPGDADAKYNGKFKGKATLTADKSTSTAYMELSSLRSEDTAVYYCARSTMIATGAMDYWGQGTLVTVSS

SEQ ID NO: 1257 - protein, 499 aa, Artificial Sequence
  Synthetic
DIQMTQSPSSLSASVGDRVTITCKASQDVSTAVAWYQQKPGKAPKLLIYSASYRYTGVPSRFTGSGSGTDFTLTISSLQPEDFATYYCQQHYSTPPYTFGGGTKVEIKRGGGGSGGGGSGGGGSQVQLVQSGAEVKKPGASVKVSCKASGYTFSSSWMNWVRQAPGQGLEWIGRIYPGDADAKYNGKFKGKATLTADKSTSTAYMELSSLRSEDTAVYYCARSTMIATGAMDYWGQGTLVTVSSSGGGGSEVQLVESGGGLVQPGGSLKLSCAASGFTFNKYAMNWVRQAPGKGLEWVARIRSKYNNYATYYADSVKDRFTISRDDSKNTAYLQMNNLKTEDTAVYYCVRHGNFGNSYISYWAYWGQGTLVTVSSGGGGSGGGGSGGGGSQTVVTQEPSLTVSPGGTVTLTCGSSTGAVTSGNYPNWVQQKPGQAPRGLIGGTKFLAPGTPARFSGSLLGGKAALTLSGVQPEDEAEYYCVLWYSNRWVFGGGTKLTVL

SEQ ID NO: 1258 - protein, 987 aa, Artificial Sequence
  Synthetic
DIQMTQSPSSLSASVGDRVTITCKASQDVSTAVAWYQQKPGKAPKLLIYSASYRYTGVPSRFTGSGSGTDFTLTISSLQPEDFATYYCQQHYSTPPYTFGGGTKVEIKRGGGGSGGGGSGGGGSQVQLVQSGAEVKKPGASVKVSCKASGYTFSSSWMNWVRQAPGQGLEWIGRIYPGDADAKYNGKFKGKATLTADKSTSTAYMELSSLRSEDTAVYYCARSTMIATGAMDYWGQGTLVTVSSSGGGGSEVQLVESGGGLVQPGGSLKLSCAASGFTFNKYAMNWVRQAPGKGLEWVARIRSKYNNYATYYADSVKDRFTISRDDSKNTAYLQMNNLKTEDTAVYYCVRHGNFGNSYISYWAYWGQGTLVTVSSGGGGSGGGGSGGGGSQTVVTQEPSLTVSPGGTVTLTCGSSTGAVTSGNYPNWVQQKPGQAPRGLIGGTKFLAPGTPARFSGSLLGGKAALTLSGVQPEDEAEYYCVLWYSNRWVFGGGTKLTVLGGGGDKTHTCPPCPAPELLGGPSVFLFPPKPKDTLMISRTPEVTCVVVDVSHEDPEVKFNWYVDGVEVHNAKTKPCEEQYGSTYRCVSVLTVLHQDWLNGKEYKCKVSNKALPAPIEKTISKAKGQPREPQVYTLPPSREEMTKNQVSLTCLVKGFYPSDIAVEWESNGQPENNYKTTPPVLDSDGSFFLYSKLTVDKSRWQQGNVFSCSVMHEALHNHYTQKSLSLSPGKGGGGSGGGGSGGGGSGGGGSGGGGSGGGGSDKTHTCPPCPAPELLGGPSVFLFPPKPKDTLMISRTPEVTCVVVDVSHEDPEVKFNWYVDGVEVHNAKTKPCEEQYGSTYRCVSVLTVLHQDWLNGKEYKCKVSNKALPAPIEKTISKAKGQPREPQVYTLPPSREEMTKNQVSLTCLVKGFYPSDIAVEWESNGQPENNYKTTPPVLDSDGSFFLYSKLTVDKSRWQQGNVFSCSVMHEALHNHYTQKSLSLSPGK

SEQ ID NO: 1259 - protein, 5 aa, Artificial Sequence
  Synthetic
SSWMN

SEQ ID NO: 1260 - protein, 17 aa, Artificial Sequence
  Synthetic
RIYPGDGETKYNGKFKG

SEQ ID NO: 1261 - protein, 11 aa, Artificial Sequence
  Synthetic
STMIATGAMDY

SEQ ID NO: 1262 - protein, 11 aa, Artificial Sequence
  Synthetic
KASQDVSTAVA

SEQ ID NO: 1263 - protein, 7 aa, Artificial Sequence
  Synthetic
SASYRYT

SEQ ID NO: 1264 - protein, 10 aa, Artificial Sequence
  Synthetic
QQHYSTPPYT

SEQ ID NO: 1265 - protein, 120 aa, Artificial Sequence
  Synthetic
QVQLVQSGAEVKKPGASVKVSCKASGYAFSSSWMNWVRQAPGQGLEWIGRIYPGDGETKYNGKFKGKATLTADKSTSTAYMELSSLRSEDTAVYYCARSTMIATGAMDYWGQGTLVTVSS

SEQ ID NO: 1266 - protein, 109 aa, Artificial Sequence; identical to SEQ ID NO: 1112
  Synthetic

SEQ ID NO: 1267 - protein, 244 aa, Artificial Sequence
  Synthetic
DIQMTQSPSSLSASVGDRVTITCKASQDVSTAVAWYQQKPGKAPKLLIYSASYRYTGVPDRFTGSGSGTDFTLTISSLQPEDFATYYCQQHYSTPPYTFGGGTKVEIKRGGGGSGGGGSGGGGSQVQLVQSGAEVKKPGASVKVSCKASGYAFSSSWMNWVRQAPGQGLEWIGRIYPGDGETKYNGKFKGKATLTADKSTSTAYMELSSLRSEDTAVYYCARSTMIATGAMDYWGQGTLVTVSS

SEQ ID NO: 1268 - protein, 499 aa, Artificial Sequence
  Synthetic
DIQMTQSPSSLSASVGDRVTITCKASQDVSTAVAWYQQKPGKAPKLLIYSASYRYTGVPDRFTGSGSGTDFTLTISSLQPEDFATYYCQQHYSTPPYTFGGGTKVEIKRGGGGSGGGGSGGGGSQVQLVQSGAEVKKPGASVKVSCKASGYAFSSSWMNWVRQAPGQGLEWIGRIYPGDGETKYNGKFKGKATLTADKSTSTAYMELSSLRSEDTAVYYCARSTMIATGAMDYWGQGTLVTVSSSGGGGSEVQLVESGGGLVQPGGSLKLSCAASGFTFNKYAMNWVRQAPGKGLEWVARIRSKYNNYATYYADSVKDRFTISRDDSKNTAYLQMNNLKTEDTAVYYCVRHGNFGNSYISYWAYWGQGTLVTVSSGGGGSGGGGSGGGGSQTVVTQEPSLTVSPGGTVTLTCGSSTGAVTSGNYPNWVQQKPGQAPRGLIGGTKFLAPGTPARFSGSLLGGKAALTLSGVQPEDEAEYYCVLWYSNRWVFGGGTKLTVL

SEQ ID NO: 1269 - protein, 987 aa, Artificial Sequence
  Synthetic
DIQMTQSPSSLSASVGDRVTITCKASQDVSTAVAWYQQKPGKAPKLLIYSASYRYTGVPDRFTGSGSGTDFTLTISSLQPEDFATYYCQQHYSTPPYTFGGGTKVEIKRGGGGSGGGGSGGGGSQVQLVQSGAEVKKPGASVKVSCKASGYAFSSSWMNWVRQAPGQGLEWIGRIYPGDGETKYNGKFKGKATLTADKSTSTAYMELSSLRSEDTAVYYCARSTMIATGAMDYWGQGTLVTVSSSGGGGSEVQLVESGGGLVQPGGSLKLSCAASGFTFNKYAMNWVRQAPGKGLEWVARIRSKYNNYATYYADSVKDRFTISRDDSKNTAYLQMNNLKTEDTAVYYCVRHGNFGNSYISYWAYWGQGTLVTVSSGGGGSGGGGSGGGGSQTVVTQEPSLTVSPGGTVTLTCGSSTGAVTSGNYPNWVQQKPGQAPRGLIGGTKFLAPGTPARFSGSLLGGKAALTLSGVQPEDEAEYYCVLWYSNRWVFGGGTKLTVLGGGGDKTHTCPPCPAPELLGGPSVFLFPPKPKDTLMISRTPEVTCVVVDVSHEDPEVKFNWYVDGVEVHNAKTKPCEEQYGSTYRCVSVLTVLHQDWLNGKEYKCKVSNKALPAPIEKTISKAKGQPREPQVYTLPPSREEMTKNQVSLTCLVKGFYPSDIAVEWESNGQPENNYKTTPPVLDSDGSFFLYSKLTVDKSRWQQGNVFSCSVMHEALHNHYTQKSLSLSPGKGGGGSGGGGSGGGGSGGGGSGGGGSGGGGSDKTHTCPPCPAPELLGGPSVFLFPPKPKDTLMISRTPEVTCVVVDVSHEDPEVKFNWYVDGVEVHNAKTKPCEEQYGSTYRCVSVLTVLHQDWLNGKEYKCKVSNKALPAPIEKTISKAKGQPREPQVYTLPPSREEMTKNQVSLTCLVKGFYPSDIAVEWESNGQPENNYKTTPPVLDSDGSFFLYSKLTVDKSRWQQGNVFSCSVMHEALHNHYTQKSLSLSPGK

SEQ ID NO: 1270 - protein, 5 aa, Artificial Sequence
  Synthetic
SSWMN

SEQ ID NO: 1271 - protein, 17 aa, Artificial Sequence
  Synthetic
RIYPGEGDTKYNGKFKG

SEQ ID NO: 1272 - protein, 11 aa, Artificial Sequence
  Synthetic
STMIATGAMDY

SEQ ID NO: 1273 - protein, 11 aa, Artificial Sequence
  Synthetic
KASQDVSTAVA

SEQ ID NO: 1274 - protein, 7 aa, Artificial Sequence
  Synthetic
SASYRYT

SEQ ID NO: 1275 - protein, 10 aa, Artificial Sequence
  Synthetic
QQHYSTPPYT

SEQ ID NO: 1276 - protein, 120 aa, Artificial Sequence
  Synthetic
QVQLVQSGAEVKKPGASVKVSCKASGYAFSSSWMNWVRQAPGQGLEWIGRIYPGEGDTKYNGKFKGKATLTADKSTSTAYMELSSLRSEDTAVYYCARSTMIATGAMDYWGQGTLVTVSS

SEQ ID NO: 1277 - protein, 109 aa, Artificial Sequence; identical to SEQ ID NO: 1112
  Synthetic

SEQ ID NO: 1278 - protein, 244 aa, Artificial Sequence
  Synthetic
DIQMTQSPSSLSASVGDRVTITCKASQDVSTAVAWYQQKPGKAPKLLIYSASYRYTGVPDRFTGSGSGTDFTLTISSLQPEDFATYYCQQHYSTPPYTFGGGTKVEIKRGGGGSGGGGSGGGGSQVQLVQSGAEVKKPGASVKVSCKASGYAFSSSWMNWVRQAPGQGLEWIGRIYPGEGDTKYNGKFKGKATLTADKSTSTAYMELSSLRSEDTAVYYCARSTMIATGAMDYWGQGTLVTVSS

SEQ ID NO: 1279 - protein, 499 aa, Artificial Sequence
  Synthetic
DIQMTQSPSSLSASVGDRVTITCKASQDVSTAVAWYQQKPGKAPKLLIYSASYRYTGVPDRFTGSGSGTDFTLTISSLQPEDFATYYCQQHYSTPPYTFGGGTKVEIKRGGGGSGGGGSGGGGSQVQLVQSGAEVKKPGASVKVSCKASGYAFSSSWMNWVRQAPGQGLEWIGRIYPGEGDTKYNGKFKGKATLTADKSTSTAYMELSSLRSEDTAVYYCARSTMIATGAMDYWGQGTLVTVSSSGGGGSEVQLVESGGGLVQPGGSLKLSCAASGFTFNKYAMNWVRQAPGKGLEWVARIRSKYNNYATYYADSVKDRFTISRDDSKNTAYLQMNNLKTEDTAVYYCVRHGNFGNSYISYWAYWGQGTLVTVSSGGGGSGGGGSGGGGSQTVVTQEPSLTVSPGGTVTLTCGSSTGAVTSGNYPNWVQQKPGQAPRGLIGGTKFLAPGTPARFSGSLLGGKAALTLSGVQPEDEAEYYCVLWYSNRWVFGGGTKLTVL

SEQ ID NO: 1280 - protein, 987 aa, Artificial Sequence
  Synthetic
DIQMTQSPSSLSASVGDRVTITCKASQDVSTAVAWYQQKPGKAPKLLIYSASYRYTGVPDRFTGSGSGTDFTLTISSLQPEDFATYYCQQHYSTPPYTFGGGTKVEIKRGGGGSGGGGSGGGGSQVQLVQSGAEVKKPGASVKVSCKASGYAFSSSWMNWVRQAPGQGLEWIGRIYPGEGDTKYNGKFKGKATLTADKSTSTAYMELSSLRSEDTAVYYCARSTMIATGAMDYWGQGTLVTVSSSGGGGSEVQLVESGGGLVQPGGSLKLSCAASGFTFNKYAMNWVRQAPGKGLEWVARIRSKYNNYATYYADSVKDRFTISRDDSKNTAYLQMNNLKTEDTAVYYCVRHGNFGNSYISYWAYWGQGTLVTVSSGGGGSGGGGSGGGGSQTVVTQEPSLTVSPGGTVTLTCGSSTGAVTSGNYPNWVQQKPGQAPRGLIGGTKFLAPGTPARFSGSLLGGKAALTLSGVQPEDEAEYYCVLWYSNRWVFGGGTKLTVLGGGGDKTHTCPPCPAPELLGGPSVFLFPPKPKDTLMISRTPEVTCVVVDVSHEDPEVKFNWYVDGVEVHNAKTKPCEEQYGSTYRCVSVLTVLHQDWLNGKEYKCKVSNKALPAPIEKTISKAKGQPREPQVYTLPPSREEMTKNQVSLTCLVKGFYPSDIAVEWESNGQPENNYKTTPPVLDSDGSFFLYSKLTVDKSRWQQGNVFSCSVMHEALHNHYTQKSLSLSPGKGGGGSGGGGSGGGGSGGGGSGGGGSGGGGSDKTHTCPPCPAPELLGGPSVFLFPPKPKDTLMISRTPEVTCVVVDVSHEDPEVKFNWYVDGVEVHNAKTKPCEEQYGSTYRCVSVLTVLHQDWLNGKEYKCKVSNKALPAPIEKTISKAKGQPREPQVYTLPPSREEMTKNQVSLTCLVKGFYPSDIAVEWESNGQPENNYKTTPPVLDSDGSFFLYSKLTVDKSRWQQGNVFSCSVMHEALHNHYTQKSLSLSPGK

SEQ ID NO: 1281 - protein, 5 aa, Artificial Sequence
  Synthetic
SSWMN

SEQ ID NO: 1282 - protein, 17 aa, Artificial Sequence
  Synthetic
RIYPGDGDTKYNGKFKG

SEQ ID NO: 1283 - protein, 11 aa, Artificial Sequence
  Synthetic
STMIATGAMDY

SEQ ID NO: 1284 - protein, 11 aa, Artificial Sequence
  Synthetic
KASQDVSTAVA

SEQ ID NO: 1285 - protein, 7 aa, Artificial Sequence
  Synthetic
SASYRYT

SEQ ID NO: 1286 - protein, 10 aa, Artificial Sequence
  Synthetic
QQHYSTPPYT

SEQ ID NO: 1287 - protein, 120 aa, Artificial Sequence
  Synthetic
QMQLVQSGAEVKKTGSSVKVSCKASGYTFTSSWMNWVRQAPGQALEWMGRIYPGDGDTKYNGKFKGRVTITRDRSMSTAYMELSSLRSEDTAMYYCARSTMIATGAMDYWGQGTLVTVSS

SEQ ID NO: 1288 - protein, 109 aa, Artificial Sequence
  Synthetic
EIVLTQSPATLSLSPGERATLSCKASQDVSTAVAWYQQKPGLAPRLLIYSASYRYTGIPDRFSGSGSGTDFTLTISRLEPEDFAVYYCQQHYSTPPYTFGPGTKVDIKR

SEQ ID NO: 1289 - protein, 244 aa, Artificial Sequence
  Synthetic
EIVLTQSPATLSLSPGERATLSCKASQDVSTAVAWYQQKPGLAPRLLIYSASYRYTGIPDRFSGSGSGTDFTLTISRLEPEDFAVYYCQQHYSTPPYTFGPGTKVDIKRGGGGSGGGGSGGGGSQMQLVQSGAEVKKTGSSVKVSCKASGYTFTSSWMNWVRQAPGQALEWMGRIYPGDGDTKYNGKFKGRVTITRDRSMSTAYMELSSLRSEDTAMYYCARSTMIATGAMDYWGQGTLVTVSS

SEQ ID NO: 1290 - protein, 499 aa, Artificial Sequence
  Synthetic
EIVLTQSPATLSLSPGERATLSCKASQDVSTAVAWYQQKPGLAPRLLIYSASYRYTGIPDRFSGSGSGTDFTLTISRLEPEDFAVYYCQQHYSTPPYTFGPGTKVDIKRGGGGSGGGGSGGGGSQMQLVQSGAEVKKTGSSVKVSCKASGYTFTSSWMNWVRQAPGQALEWMGRIYPGDGDTKYNGKFKGRVTITRDRSMSTAYMELSSLRSEDTAMYYCARSTMIATGAMDYWGQGTLVTVSSSGGGGSEVQLVESGGGLVQPGGSLKLSCAASGFTFNKYAMNWVRQAPGKGLEWVARIRSKYNNYATYYADSVKDRFTISRDDSKNTAYLQMNNLKTEDTAVYYCVRHGNFGNSYISYWAYWGQGTLVTVSSGGGGSGGGGSGGGGSQTVVTQEPSLTVSPGGTVTLTCGSSTGAVTSGNYPNWVQQKPGQAPRGLIGGTKFLAPGTPARFSGSLLGGKAALTLSGVQPEDEAEYYCVLWYSNRWVFGGGTKLTVL

SEQ ID NO: 1291 - protein, 987 aa, Artificial Sequence
  Synthetic
EIVLTQSPATLSLSPGERATLSCKASQDVSTAVAWYQQKPGLAPRLLIYSASYRYTGIPDRFSGSGSGTDFTLTISRLEPEDFAVYYCQQHYSTPPYTFGPGTKVDIKRGGGGSGGGGSGGGGSQMQLVQSGAEVKKTGSSVKVSCKASGYTFTSSWMNWVRQAPGQALEWMGRIYPGDGDTKYNGKFKGRVTITRDRSMSTAYMELSSLRSEDTAMYYCARSTMIATGAMDYWGQGTLVTVSSSGGGGSEVQLVESGGGLVQPGGSLKLSCAASGFTFNKYAMNWVRQAPGKGLEWVARIRSKYNNYATYYADSVKDRFTISRDDSKNTAYLQMNNLKTEDTAVYYCVRHGNFGNSYISYWAYWGQGTLVTVSSGGGGSGGGGSGGGGSQTVVTQEPSLTVSPGGTVTLTCGSSTGAVTSGNYPNWVQQKPGQAPRGLIGGTKFLAPGTPARFSGSLLGGKAALTLSGVQPEDEAEYYCVLWYSNRWVFGGGTKLTVLGGGGDKTHTCPPCPAPELLGGPSVFLFPPKPKDTLMISRTPEVTCVVVDVSHEDPEVKFNWYVDGVEVHNAKTKPCEEQYGSTYRCVSVLTVLHQDWLNGKEYKCKVSNKALPAPIEKTISKAKGQPREPQVYTLPPSREEMTKNQVSLTCLVKGFYPSDIAVEWESNGQPENNYKTTPPVLDSDGSFFLYSKLTVDKSRWQQGNVFSCSVMHEALHNHYTQKSLSLSPGKGGGGSGGGGSGGGGSGGGGSGGGGSGGGGSDKTHTCPPCPAPELLGGPSVFLFPPKPKDTLMISRTPEVTCVVVDVSHEDPEVKFNWYVDGVEVHNAKTKPCEEQYGSTYRCVSVLTVLHQDWLNGKEYKCKVSNKALPAPIEKTISKAKGQPREPQVYTLPPSREEMTKNQVSLTCLVKGFYPSDIAVEWESNGQPENNYKTTPPVLDSDGSFFLYSKLTVDKSRWQQGNVFSCSVMHEALHNHYTQKSLSLSPGK

SEQ ID NO: 1292 - protein, 5 aa, Artificial Sequence
  Synthetic
SSWMN

SEQ ID NO: 1293 - protein, 17 aa, Artificial Sequence
  Synthetic
RIYPGDADAKYQGKFKG

SEQ ID NO: 1294 - protein, 11 aa, Artificial Sequence
  Synthetic
STMIATGAMDY

SEQ ID NO: 1295 - protein, 11 aa, Artificial Sequence
  Synthetic
KASQDVSTAVA

SEQ ID NO: 1296 - protein, 7 aa, Artificial Sequence
  Synthetic
SASYRYT

SEQ ID NO: 1297 - protein, 10 aa, Artificial Sequence
  Synthetic
QQHYSTPPYT

SEQ ID NO: 1298 - protein, 120 aa, Artificial Sequence
  Synthetic
QMQLVQSGAEVKKTGSSVKVSCKASGYTFTSSWMNWVRQAPGQALEWMGRIYPGDADAKYQGKFKGRVTITRDRSMSTAYMELSSLRSEDTAMYYCARSTMIATGAMDYWGQGTLVTVSS

SEQ ID NO: 1299 - protein, 109 aa, Artificial Sequence; identical to SEQ ID NO: 1288
  Synthetic

SEQ ID NO: 1300 - protein, 244 aa, Artificial Sequence
  Synthetic
EIVLTQSPATLSLSPGERATLSCKASQDVSTAVAWYQQKPGLAPRLLIYSASYRYTGIPDRFSGSGSGTDFTLTISRLEPEDFAVYYCQQHYSTPPYTFGPGTKVDIKRGGGGSGGGGSGGGGSQMQLVQSGAEVKKTGSSVKVSCKASGYTFTSSWMNWVRQAPGQALEWMGRIYPGDADAKYQGKFKGRVTITRDRSMSTAYMELSSLRSEDTAMYYCARSTMIATGAMDYWGQGTLVTVSS

SEQ ID NO: 1301 - protein, 499 aa, Artificial Sequence
  Synthetic
EIVLTQSPATLSLSPGERATLSCKASQDVSTAVAWYQQKPGLAPRLLIYSASYRYTGIPDRFSGSGSGTDFTLTISRLEPEDFAVYYCQQHYSTPPYTFGPGTKVDIKRGGGGSGGGGSGGGGSQMQLVQSGAEVKKTGSSVKVSCKASGYTFTSSWMNWVRQAPGQALEWMGRIYPGDADAKYQGKFKGRVTITRDRSMSTAYMELSSLRSEDTAMYYCARSTMIATGAMDYWGQGTLVTVSSSGGGGSEVQLVESGGGLVQPGGSLKLSCAASGFTFNKYAMNWVRQAPGKGLEWVARIRSKYNNYATYYADSVKDRFTISRDDSKNTAYLQMNNLKTEDTAVYYCVRHGNFGNSYISYWAYWGQGTLVTVSSGGGGSGGGGSGGGGSQTVVTQEPSLTVSPGGTVTLTCGSSTGAVTSGNYPNWVQQKPGQAPRGLIGGTKFLAPGTPARFSGSLLGGKAALTLSGVQPEDEAEYYCVLWYSNRWVFGGGTKLTVL

SEQ ID NO: 1302 - protein, 987 aa, Artificial Sequence
  Synthetic
EIVLTQSPATLSLSPGERATLSCKASQDVSTAVAWYQQKPGLAPRLLIYSASYRYTGIPDRFSGSGSGTDFTLTISRLEPEDFAVYYCQQHYSTPPYTFGPGTKVDIKRGGGGSGGGGSGGGGSQMQLVQSGAEVKKTGSSVKVSCKASGYTFTSSWMNWVRQAPGQALEWMGRIYPGDADAKYQGKFKGRVTITRDRSMSTAYMELSSLRSEDTAMYYCARSTMIATGAMDYWGQGTLVTVSSSGGGGSEVQLVESGGGLVQPGGSLKLSCAASGFTFNKYAMNWVRQAPGKGLEWVARIRSKYNNYATYYADSVKDRFTISRDDSKNTAYLQMNNLKTEDTAVYYCVRHGNFGNSYISYWAYWGQGTLVTVSSGGGGSGGGGSGGGGSQTVVTQEPSLTVSPGGTVTLTCGSSTGAVTSGNYPNWVQQKPGQAPRGLIGGTKFLAPGTPARFSGSLLGGKAALTLSGVQPEDEAEYYCVLWYSNRWVFGGGTKLTVLGGGGDKTHTCPPCPAPELLGGPSVFLFPPKPKDTLMISRTPEVTCVVVDVSHEDPEVKFNWYVDGVEVHNAKTKPCEEQYGSTYRCVSVLTVLHQDWLNGKEYKCKVSNKALPAPIEKTISKAKGQPREPQVYTLPPSREEMTKNQVSLTCLVKGFYPSDIAVEWESNGQPENNYKTTPPVLDSDGSFFLYSKLTVDKSRWQQGNVFSCSVMHEALHNHYTQKSLSLSPGKGGGGSGGGGSGGGGSGGGGSGGGGSGGGGSDKTHTCPPCPAPELLGGPSVFLFPPKPKDTLMISRTPEVTCVVVDVSHEDPEVKFNWYVDGVEVHNAKTKPCEEQYGSTYRCVSVLTVLHQDWLNGKEYKCKVSNKALPAPIEKTISKAKGQPREPQVYTLPPSREEMTKNQVSLTCLVKGFYPSDIAVEWESNGQPENNYKTTPPVLDSDGSFFLYSKLTVDKSRWQQGNVFSCSVMHEALHNHYTQKSLSLSPGK

SEQ ID NO: 1303 - protein, 5 aa, Artificial Sequence
  Synthetic
SSWMN

SEQ ID NO: 1304 - protein, 17 aa, Artificial Sequence
  Synthetic
RIYPGDADAKYQGKFKG

SEQ ID NO: 1305 - protein, 11 aa, Artificial Sequence
  Synthetic
STMIATGAMDY

SEQ ID NO: 1306 - protein, 11 aa, Artificial Sequence
  Synthetic
KASQDVSTAVA

SEQ ID NO: 1307 - protein, 7 aa, Artificial Sequence
  Synthetic
SASYRYT

SEQ ID NO: 1308 - protein, 10 aa, Artificial Sequence
  Synthetic
QQHYSTPPYT

SEQ ID NO: 1309 - protein, 120 aa, Artificial Sequence
  Synthetic
QMQLVQSGAEVKKPGSSVKVSCKASGYTFTSSWMNWVRQAPGQGLEWMGRIYPGDADAKYQGKFKGRVTITRDRSMSTAYMELSSLRSEDTAMYYCARSTMIATGAMDYWGQGTLVTVSS

SEQ ID NO: 1310 - protein, 109 aa, Artificial Sequence
  Synthetic
EIVLTQSPATLSLSPGERATLSCKASQDVSTAVAWYQQKPGQAPRLLIYSASYRYTGIPDRFSGSGSGTDFTLTISRLEPEDFAVYYCQQHYSTPPYTFGQGTKVDIKR

SEQ ID NO: 1311 - protein, 244 aa, Artificial Sequence
  Synthetic
EIVLTQSPATLSLSPGERATLSCKASQDVSTAVAWYQQKPGQAPRLLIYSASYRYTGIPDRFSGSGSGTDFTLTISRLEPEDFAVYYCQQHYSTPPYTFGQGTKVDIKRGGGGSGGGGSGGGGSQMQLVQSGAEVKKPGSSVKVSCKASGYTFTSSWMNWVRQAPGQGLEWMGRIYPGDADAKYQGKFKGRVTITRDRSMSTAYMELSSLRSEDTAMYYCARSTMIATGAMDYWGQGTLVTVSS

SEQ ID NO: 1312 - protein, 499 aa, Artificial Sequence
  Synthetic
EIVLTQSPATLSLSPGERATLSCKASQDVSTAVAWYQQKPGQAPRLLIYSASYRYTGIPDRFSGSGSGTDFTLTISRLEPEDFAVYYCQQHYSTPPYTFGQGTKVDIKRGGGGSGGGGSGGGGSQMQLVQSGAEVKKPGSSVKVSCKASGYTFTSSWMNWVRQAPGQGLEWMGRIYPGDADAKYQGKFKGRVTITRDRSMSTAYMELSSLRSEDTAMYYCARSTMIATGAMDYWGQGTLVTVSSSGGGGSEVQLVESGGGLVQPGGSLKLSCAASGFTFNKYAMNWVRQAPGKGLEWVARIRSKYNNYATYYADSVKDRFTISRDDSKNTAYLQMNNLKTEDTAVYYCVRHGNFGNSYISYWAYWGQGTLVTVSSGGGGSGGGGSGGGGSQTVVTQEPSLTVSPGGTVTLTCGSSTGAVTSGNYPNWVQQKPGQAPRGLIGGTKFLAPGTPARFSGSLLGGKAALTLSGVQPEDEAEYYCVLWYSNRWVFGGGTKLTVL

SEQ ID NO: 1313 - protein, 987 aa, Artificial Sequence
  Synthetic
EIVLTQSPATLSLSPGERATLSCKASQDVSTAVAWYQQKPGQAPRLLIYSASYRYTGIPDRFSGSGSGTDFTLTISRLEPEDFAVYYCQQHYSTPPYTFGQGTKVDIKRGGGGSGGGGSGGGGSQMQLVQSGAEVKKPGSSVKVSCKASGYTFTSSWMNWVRQAPGQGLEWMGRIYPGDADAKYQGKFKGRVTITRDRSMSTAYMELSSLRSEDTAMYYCARSTMIATGAMDYWGQGTLVTVSSSGGGGSEVQLVESGGGLVQPGGSLKLSCAASGFTFNKYAMNWVRQAPGKGLEWVARIRSKYNNYATYYADSVKDRFTISRDDSKNTAYLQMNNLKTEDTAVYYCVRHGNFGNSYISYWAYWGQGTLVTVSSGGGGSGGGGSGGGGSQTVVTQEPSLTVSPGGTVTLTCGSSTGAVTSGNYPNWVQQKPGQAPRGLIGGTKFLAPGTPARFSGSLLGGKAALTLSGVQPEDEAEYYCVLWYSNRWVFGGGTKLTVLGGGGDKTHTCPPCPAPELLGGPSVFLFPPKPKDTLMISRTPEVTCVVVDVSHEDPEVKFNWYVDGVEVHNAKTKPCEEQYGSTYRCVSVLTVLHQDWLNGKEYKCKVSNKALPAPIEKTISKAKGQPREPQVYTLPPSREEMTKNQVSLTCLVKGFYPSDIAVEWESNGQPENNYKTTPPVLDSDGSFFLYSKLTVDKSRWQQGNVFSCSVMHEALHNHYTQKSLSLSPGKGGGGSGGGGSGGGGSGGGGSGGGGSGGGGSDKTHTCPPCPAPELLGGPSVFLFPPKPKDTLMISRTPEVTCVVVDVSHEDPEVKFNWYVDGVEVHNAKTKPCEEQYGSTYRCVSVLTVLHQDWLNGKEYKCKVSNKALPAPIEKTISKAKGQPREPQVYTLPPSREEMTKNQVSLTCLVKGFYPSDIAVEWESNGQPENNYKTTPPVLDSDGSFFLYSKLTVDKSRWQQGNVFSCSVMHEALHNHYTQKSLSLSPGK

SEQ ID NO: 1314 - protein, 5 aa, Artificial Sequence
  Synthetic
SSWMN

SEQ ID NO: 1315 - protein, 17 aa, Artificial Sequence
  Synthetic
RIYPGDGDTKYNGKFKG

SEQ ID NO: 1316 - protein, 11 aa, Artificial Sequence
  Synthetic
STMIATGAMDY

SEQ ID NO: 1317 - protein, 11 aa, Artificial Sequence
  Synthetic
KASQDVSTAVA

SEQ ID NO: 1318 - protein, 7 aa, Artificial Sequence
  Synthetic
SASYRYT

SEQ ID NO: 1319 - protein, 10 aa, Artificial Sequence
  Synthetic
QQHYSTPPYT

SEQ ID NO: 1320 - protein, 120 aa, Artificial Sequence; identical to SEQ ID NO: 1287
  Synthetic

SEQ ID NO: 1321 - protein, 109 aa, Artificial Sequence
  Synthetic
EIVLTQSPATLSLSPGERATLSCKASQDVSTAVAWYQQKPGQAPRLLIYSASYRYTGIPDRFSGSGSGTDFTLTISRLEPEDFAVYYCQQHYSTPPYTFGGGTKVDIKR

SEQ ID NO: 1322 - protein, 244 aa, Artificial Sequence
  Synthetic
EIVLTQSPATLSLSPGERATLSCKASQDVSTAVAWYQQKPGQAPRLLIYSASYRYTGIPDRFSGSGSGTDFTLTISRLEPEDFAVYYCQQHYSTPPYTFGGGTKVDIKRGGGGSGGGGSGGGGSQMQLVQSGAEVKKTGSSVKVSCKASGYTFTSSWMNWVRQAPGQALEWMGRIYPGDGDTKYNGKFKGRVTITRDRSMSTAYMELSSLRSEDTAMYYCARSTMIATGAMDYWGQGTLVTVSS

SEQ ID NO: 1323 - protein, 499 aa, Artificial Sequence
  Synthetic
EIVLTQSPATLSLSPGERATLSCKASQDVSTAVAWYQQKPGQAPRLLIYSASYRYTGIPDRFSGSGSGTDFTLTISRLEPEDFAVYYCQQHYSTPPYTFGGGTKVDIKRGGGGSGGGGSGGGGSQMQLVQSGAEVKKTGSSVKVSCKASGYTFTSSWMNWVRQAPGQALEWMGRIYPGDGDTKYNGKFKGRVTITRDRSMSTAYMELSSLRSEDTAMYYCARSTMIATGAMDYWGQGTLVTVSSSGGGGSEVQLVESGGGLVQPGGSLKLSCAASGFTFNKYAMNWVRQAPGKGLEWVARIRSKYNNYATYYADSVKDRFTISRDDSKNTAYLQMNNLKTEDTAVYYCVRHGNFGNSYISYWAYWGQGTLVTVSSGGGGSGGGGSGGGGSQTVVTQEPSLTVSPGGTVTLTCGSSTGAVTSGNYPNWVQQKPGQAPRGLIGGTKFLAPGTPARFSGSLLGGKAALTLSGVQPEDEAEYYCVLWYSNRWVFGGGTKLTVL

SEQ ID NO: 1324 - protein, 987 aa, Artificial Sequence
  Synthetic
EIVLTQSPATLSLSPGERATLSCKASQDVSTAVAWYQQKPGQAPRLLIYSASYRYTGIPDRFSGSGSGTDFTLTISRLEPEDFAVYYCQQHYSTPPYTFGGGTKVDIKRGGGGSGGGGSGGGGSQMQLVQSGAEVKKTGSSVKVSCKASGYTFTSSWMNWVRQAPGQALEWMGRIYPGDGDTKYNGKFKGRVTITRDRSMSTAYMELSSLRSEDTAMYYCARSTMIATGAMDYWGQGTLVTVSSSGGGGSEVQLVESGGGLVQPGGSLKLSCAASGFTFNKYAMNWVRQAPGKGLEWVARIRSKYNNYATYYADSVKDRFTISRDDSKNTAYLQMNNLKTEDTAVYYCVRHGNFGNSYISYWAYWGQGTLVTVSSGGGGSGGGGSGGGGSQTVVTQEPSLTVSPGGTVTLTCGSSTGAVTSGNYPNWVQQKPGQAPRGLIGGTKFLAPGTPARFSGSLLGGKAALTLSGVQPEDEAEYYCVLWYSNRWVFGGGTKLTVLGGGGDKTHTCPPCPAPELLGGPSVFLFPPKPKDTLMISRTPEVTCVVVDVSHEDPEVKFNWYVDGVEVHNAKTKPCEEQYGSTYRCVSVLTVLHQDWLNGKEYKCKVSNKALPAPIEKTISKAKGQPREPQVYTLPPSREEMTKNQVSLTCLVKGFYPSDIAVEWESNGQPENNYKTTPPVLDSDGSFFLYSKLTVDKSRWQQGNVFSCSVMHEALHNHYTQKSLSLSPGKGGGGSGGGGSGGGGSGGGGSGGGGSGGGGSDKTHTCPPCPAPELLGGPSVFLFPPKPKDTLMISRTPEVTCVVVDVSHEDPEVKFNWYVDGVEVHNAKTKPCEEQYGSTYRCVSVLTVLHQDWLNGKEYKCKVSNKALPAPIEKTISKAKGQPREPQVYTLPPSREEMTKNQVSLTCLVKGFYPSDIAVEWESNGQPENNYKTTPPVLDSDGSFFLYSKLTVDKSRWQQGNVFSCSVMHEALHNHYTQKSLSLSPGK

SEQ ID NO: 1325 - protein, 5 aa, Artificial Sequence
  Synthetic
SSWMN

SEQ ID NO: 1326 - protein, 17 aa, Artificial Sequence
  Synthetic
RIYPGDGDTKYNGKFKG

SEQ ID NO: 1327 - protein, 11 aa, Artificial Sequence
  Synthetic
STMIATGAMDY

SEQ ID NO: 1328 - protein, 11 aa, Artificial Sequence
  Synthetic
KASQDVSTAVA

SEQ ID NO: 1329 - protein, 7 aa, Artificial Sequence
  Synthetic
SASYRYT

SEQ ID NO: 1330 - protein, 10 aa, Artificial Sequence
  Synthetic
QQHYSTPPYT

SEQ ID NO: 1331 - protein, 120 aa, Artificial Sequence
  Synthetic
QMQLVQSGAEVKKTGSSVKVSCKASGYTFTSSWMNWVRQAPGQCLEWMGRIYPGDGDTKYNGKFKGRVTITRDRSMSTAYMELSSLRSEDTAMYYCARSTMIATGAMDYWGQGTLVTVSS

SEQ ID NO: 1332 - protein, 109 aa, Artificial Sequence
  Synthetic
EIVLTQSPATLSLSPGERATLSCKASQDVSTAVAWYQQKPGLAPRLLIYSASYRYTGIPDRFSGSGSGTDFTLTISRLEPEDFAVYYCQQHYSTPPYTFGCGTKVDIKR

SEQ ID NO: 1333 - protein, 244 aa, Artificial Sequence
  Synthetic
EIVLTQSPATLSLSPGERATLSCKASQDVSTAVAWYQQKPGLAPRLLIYSASYRYTGIPDRFSGSGSGTDFTLTISRLEPEDFAVYYCQQHYSTPPYTFGCGTKVDIKRGGGGSGGGGSGGGGSQMQLVQSGAEVKKTGSSVKVSCKASGYTFTSSWMNWVRQAPGQCLEWMGRIYPGDGDTKYNGKFKGRVTITRDRSMSTAYMELSSLRSEDTAMYYCARSTMIATGAMDYWGQGTLVTVSS

SEQ ID NO: 1334 - protein, 499 aa, Artificial Sequence
  Synthetic
EIVLTQSPATLSLSPGERATLSCKASQDVSTAVAWYQQKPGLAPRLLIYSASYRYTGIPDRFSGSGSGTDFTLTISRLEPEDFAVYYCQQHYSTPPYTFGCGTKVDIKRGGGGSGGGGSGGGGSQMQLVQSGAEVKKTGSSVKVSCKASGYTFTSSWMNWVRQAPGQCLEWMGRIYPGDGDTKYNGKFKGRVTITRDRSMSTAYMELSSLRSEDTAMYYCARSTMIATGAMDYWGQGTLVTVSSSGGGGSEVQLVESGGGLVQPGGSLKLSCAASGFTFNKYAMNWVRQAPGKGLEWVARIRSKYNNYATYYADSVKDRFTISRDDSKNTAYLQMNNLKTEDTAVYYCVRHGNFGNSYISYWAYWGQGTLVTVSSGGGGSGGGGSGGGGSQTVVTQEPSLTVSPGGTVTLTCGSSTGAVTSGNYPNWVQQKPGQAPRGLIGGTKFLAPGTPARFSGSLLGGKAALTLSGVQPEDEAEYYCVLWYSNRWVFGGGTKLTVL

SEQ ID NO: 1335 - protein, 987 aa, Artificial Sequence
  Synthetic
EIVLTQSPATLSLSPGERATLSCKASQDVSTAVAWYQQKPGLAPRLLIYSASYRYTGIPDRFSGSGSGTDFTLTISRLEPEDFAVYYCQQHYSTPPYTFGCGTKVDIKRGGGGSGGGGSGGGGSQMQLVQSGAEVKKTGSSVKVSCKASGYTFTSSWMNWVRQAPGQCLEWMGRIYPGDGDTKYNGKFKGRVTITRDRSMSTAYMELSSLRSEDTAMYYCARSTMIATGAMDYWGQGTLVTVSSSGGGGSEVQLVESGGGLVQPGGSLKLSCAASGFTFNKYAMNWVRQAPGKGLEWVARIRSKYNNYATYYADSVKDRFTISRDDSKNTAYLQMNNLKTEDTAVYYCVRHGNFGNSYISYWAYWGQGTLVTVSSGGGGSGGGGSGGGGSQTVVTQEPSLTVSPGGTVTLTCGSSTGAVTSGNYPNWVQQKPGQAPRGLIGGTKFLAPGTPARFSGSLLGGKAALTLSGVQPEDEAEYYCVLWYSNRWVFGGGTKLTVLGGGGDKTHTCPPCPAPELLGGPSVFLFPPKPKDTLMISRTPEVTCVVVDVSHEDPEVKFNWYVDGVEVHNAKTKPCEEQYGSTYRCVSVLTVLHQDWLNGKEYKCKVSNKALPAPIEKTISKAKGQPREPQVYTLPPSREEMTKNQVSLTCLVKGFYPSDIAVEWESNGQPENNYKTTPPVLDSDGSFFLYSKLTVDKSRWQQGNVFSCSVMHEALHNHYTQKSLSLSPGKGGGGSGGGGSGGGGSGGGGSGGGGSGGGGSDKTHTCPPCPAPELLGGPSVFLFPPKPKDTLMISRTPEVTCVVVDVSHEDPEVKFNWYVDGVEVHNAKTKPCEEQYGSTYRCVSVLTVLHQDWLNGKEYKCKVSNKALPAPIEKTISKAKGQPREPQVYTLPPSREEMTKNQVSLTCLVKGFYPSDIAVEWESNGQPENNYKTTPPVLDSDGSFFLYSKLTVDKSRWQQGNVFSCSVMHEALHNHYTQKSLSLSPGK

SEQ ID NO: 1336 - protein, 5 aa, Artificial Sequence
  Synthetic
SSWMN

SEQ ID NO: 1337 - protein, 17 aa, Artificial Sequence
  Synthetic
RIYPGDGDTKYNGKFKG

SEQ ID NO: 1338 - protein, 11 aa, Artificial Sequence
  Synthetic
STMIATGAMDY

SEQ ID NO: 1339 - protein, 11 aa, Artificial Sequence
  Synthetic
KASQDVSTAVA

SEQ ID NO: 1340 - protein, 7 aa, Artificial Sequence
  Synthetic
SASYRYT

SEQ ID NO: 1341 - protein, 10 aa, Artificial Sequence
  Synthetic
QQHYSTPPYT

SEQ ID NO: 1342 - protein, 120 aa, Artificial Sequence
  Synthetic
QMQLVQSGAEVKKPGSSVKVSCKASGYTFTSSWMNWVRQAPGQGLEWMGRIYPGDGDTKYNGKFKGRVTITRDRSMSTAYMELSSLRSEDTAMYYCARSTMIATGAMDYWGQGTLVTVSS

SEQ ID NO: 1343 - protein, 109 aa, Artificial Sequence; identical to SEQ ID NO: 1310
  Synthetic

SEQ ID NO: 1344 - protein, 244 aa, Artificial Sequence
  Synthetic
EIVLTQSPATLSLSPGERATLSCKASQDVSTAVAWYQQKPGQAPRLLIYSASYRYTGIPDRFSGSGSGTDFTLTISRLEPEDFAVYYCQQHYSTPPYTFGQGTKVDIKRGGGGSGGGGSGGGGSQMQLVQSGAEVKKPGSSVKVSCKASGYTFTSSWMNWVRQAPGQGLEWMGRIYPGDGDTKYNGKFKGRVTITRDRSMSTAYMELSSLRSEDTAMYYCARSTMIATGAMDYWGQGTLVTVSS

SEQ ID NO: 1345 - protein, 499 aa, Artificial Sequence
  Synthetic
EIVLTQSPATLSLSPGERATLSCKASQDVSTAVAWYQQKPGQAPRLLIYSASYRYTGIPDRFSGSGSGTDFTLTISRLEPEDFAVYYCQQHYSTPPYTFGQGTKVDIKRGGGGSGGGGSGGGGSQMQLVQSGAEVKKPGSSVKVSCKASGYTFTSSWMNWVRQAPGQGLEWMGRIYPGDGDTKYNGKFKGRVTITRDRSMSTAYMELSSLRSEDTAMYYCARSTMIATGAMDYWGQGTLVTVSSSGGGGSEVQLVESGGGLVQPGGSLKLSCAASGFTFNKYAMNWVRQAPGKGLEWVARIRSKYNNYATYYADSVKDRFTISRDDSKNTAYLQMNNLKTEDTAVYYCVRHGNFGNSYISYWAYWGQGTLVTVSSGGGGSGGGGSGGGGSQTVVTQEPSLTVSPGGTVTLTCGSSTGAVTSGNYPNWVQQKPGQAPRGLIGGTKFLAPGTPARFSGSLLGGKAALTLSGVQPEDEAEYYCVLWYSNRWVFGGGTKLTVL

SEQ ID NO: 1346 - protein, 987 aa, Artificial Sequence
  Synthetic
EIVLTQSPATLSLSPGERATLSCKASQDVSTAVAWYQQKPGQAPRLLIYSASYRYTGIPDRFSGSGSGTDFTLTISRLEPEDFAVYYCQQHYSTPPYTFGQGTKVDIKRGGGGSGGGGSGGGGSQMQLVQSGAEVKKPGSSVKVSCKASGYTFTSSWMNWVRQAPGQGLEWMGRIYPGDGDTKYNGKFKGRVTITRDRSMSTAYMELSSLRSEDTAMYYCARSTMIATGAMDYWGQGTLVTVSSSGGGGSEVQLVESGGGLVQPGGSLKLSCAASGFTFNKYAMNWVRQAPGKGLEWVARIRSKYNNYATYYADSVKDRFTISRDDSKNTAYLQMNNLKTEDTAVYYCVRHGNFGNSYISYWAYWGQGTLVTVSSGGGGSGGGGSGGGGSQTVVTQEPSLTVSPGGTVTLTCGSSTGAVTSGNYPNWVQQKPGQAPRGLIGGTKFLAPGTPARFSGSLLGGKAALTLSGVQPEDEAEYYCVLWYSNRWVFGGGTKLTVLGGGGDKTHTCPPCPAPELLGGPSVFLFPPKPKDTLMISRTPEVTCVVVDVSHEDPEVKFNWYVDGVEVHNAKTKPCEEQYGSTYRCVSVLTVLHQDWLNGKEYKCKVSNKALPAPIEKTISKAKGQPREPQVYTLPPSREEMTKNQVSLTCLVKGFYPSDIAVEWESNGQPENNYKTTPPVLDSDGSFFLYSKLTVDKSRWQQGNVFSCSVMHEALHNHYTQKSLSLSPGKGGGGSGGGGSGGGGSGGGGSGGGGSGGGGSDKTHTCPPCPAPELLGGPSVFLFPPKPKDTLMISRTPEVTCVVVDVSHEDPEVKFNWYVDGVEVHNAKTKPCEEQYGSTYRCVSVLTVLHQDWLNGKEYKCKVSNKALPAPIEKTISKAKGQPREPQVYTLPPSREEMTKNQVSLTCLVKGFYPSDIAVEWESNGQPENNYKTTPPVLDSDGSFFLYSKLTVDKSRWQQGNVFSCSVMHEALHNHYTQKSLSLSPGK

SEQ ID NO: 1347 - protein, 5 aa, Artificial Sequence
  Synthetic
SSWMN

SEQ ID NO: 1348 - protein, 17 aa, Artificial Sequence
  Synthetic
RIYPGDGDTKYNGKFKG

SEQ ID NO: 1349 - protein, 11 aa, Artificial Sequence
  Synthetic
STMIATGAMDY

SEQ ID NO: 1350 - protein, 11 aa, Artificial Sequence
  Synthetic
KASQDVSTAVA

SEQ ID NO: 1351 - protein, 7 aa, Artificial Sequence
  Synthetic
SASYRYT

SEQ ID NO: 1352 - protein, 10 aa, Artificial Sequence
  Synthetic
QQHYSTPPYT

SEQ ID NO: 1353 - protein, 120 aa, Artificial Sequence
  Synthetic
QVQLVESGGGVVQPGRSLRLSCAASGFTFSSSWMNWVRQAPGKGLEWVARIYPGDGDTKYNGKFKGRFTISRDNSKNTLYLQMNSLRAEDTAVYYCARSTMIATGAMDYWGQGTMVTVSS

SEQ ID NO: 1354 - protein, 109 aa, Artificial Sequence
  Synthetic
EIVMTQSPATLSLSPGERATLSCKASQDVSTAVAWYQQKPGQAPRLLIYSASYRYTGIPARFSGSGSGTDFTLTISSLQPEDFAVYYCQQHYSTPPYTFGPGTKVDIKR

SEQ ID NO: 1355 - protein, 244 aa, Artificial Sequence
  Synthetic
EIVMTQSPATLSLSPGERATLSCKASQDVSTAVAWYQQKPGQAPRLLIYSASYRYTGIPARFSGSGSGTDFTLTISSLQPEDFAVYYCQQHYSTPPYTFGPGTKVDIKRGGGGSGGGGSGGGGSQVQLVESGGGVVQPGRSLRLSCAASGFTFSSSWMNWVRQAPGKGLEWVARIYPGDGDTKYNGKFKGRFTISRDNSKNTLYLQMNSLRAEDTAVYYCARSTMIATGAMDYWGQGTMVTVSS

SEQ ID NO: 1356 - protein, 499 aa, Artificial Sequence
  Synthetic
EIVMTQSPATLSLSPGERATLSCKASQDVSTAVAWYQQKPGQAPRLLIYSASYRYTGIPARFSGSGSGTDFTLTISSLQPEDFAVYYCQQHYSTPPYTFGPGTKVDIKRGGGGSGGGGSGGGGSQVQLVESGGGVVQPGRSLRLSCAASGFTFSSSWMNWVRQAPGKGLEWVARIYPGDGDTKYNGKFKGRFTISRDNSKNTLYLQMNSLRAEDTAVYYCARSTMIATGAMDYWGQGTMVTVSSSGGGGSEVQLVESGGGLVQPGGSLKLSCAASGFTFNKYAMNWVRQAPGKGLEWVARIRSKYNNYATYYADSVKDRFTISRDDSKNTAYLQMNNLKTEDTAVYYCVRHGNFGNSYISYWAYWGQGTLVTVSSGGGGSGGGGSGGGGSQTVVTQEPSLTVSPGGTVTLTCGSSTGAVTSGNYPNWVQQKPGQAPRGLIGGTKFLAPGTPARFSGSLLGGKAALTLSGVQPEDEAEYYCVLWYSNRWVFGGGTKLTVL

SEQ ID NO: 1357 - protein, 987 aa, Artificial Sequence
  Synthetic
EIVMTQSPATLSLSPGERATLSCKASQDVSTAVAWYQQKPGQAPRLLIYSASYRYTGIPARFSGSGSGTDFTLTISSLQPEDFAVYYCQQHYSTPPYTFGPGTKVDIKRGGGGSGGGGSGGGGSQVQLVESGGGVVQPGRSLRLSCAASGFTFSSSWMNWVRQAPGKGLEWVARIYPGDGDTKYNGKFKGRFTISRDNSKNTLYLQMNSLRAEDTAVYYCARSTMIATGAMDYWGQGTMVTVSSSGGGGSEVQLVESGGGLVQPGGSLKLSCAASGFTFNKYAMNWVRQAPGKGLEWVARIRSKYNNYATYYADSVKDRFTISRDDSKNTAYLQMNNLKTEDTAVYYCVRHGNFGNSYISYWAYWGQGTLVTVSSGGGGSGGGGSGGGGSQTVVTQEPSLTVSPGGTVTLTCGSSTGAVTSGNYPNWVQQKPGQAPRGLIGGTKFLAPGTPARFSGSLLGGKAALTLSGVQPEDEAEYYCVLWYSNRWVFGGGTKLTVLGGGGDKTHTCPPCPAPELLGGPSVFLFPPKPKDTLMISRTPEVTCVVVDVSHEDPEVKFNWYVDGVEVHNAKTKPCEEQYGSTYRCVSVLTVLHQDWLNGKEYKCKVSNKALPAPIEKTISKAKGQPREPQVYTLPPSREEMTKNQVSLTCLVKGFYPSDIAVEWESNGQPENNYKTTPPVLDSDGSFFLYSKLTVDKSRWQQGNVFSCSVMHEALHNHYTQKSLSLSPGKGGGGSGGGGSGGGGSGGGGSGGGGSGGGGSDKTHTCPPCPAPELLGGPSVFLFPPKPKDTLMISRTPEVTCVVVDVSHEDPEVKFNWYVDGVEVHNAKTKPCEEQYGSTYRCVSVLTVLHQDWLNGKEYKCKVSNKALPAPIEKTISKAKGQPREPQVYTLPPSREEMTKNQVSLTCLVKGFYPSDIAVEWESNGQPENNYKTTPPVLDSDGSFFLYSKLTVDKSRWQQGNVFSCSVMHEALHNHYTQKSLSLSPGK

SEQ ID NO: 1358 - protein, 5 aa, Artificial Sequence
  Synthetic
SSWMN

SEQ ID NO: 1359 - protein, 17 aa, Artificial Sequence
  Synthetic
RIYPGDADAKYQGKFKG

SEQ ID NO: 1360 - protein, 11 aa, Artificial Sequence
  Synthetic
STMIATGAMDY

SEQ ID NO: 1361 - protein, 11 aa, Artificial Sequence
  Synthetic
KASQDVSTAVA

SEQ ID NO: 1362 - protein, 7 aa, Artificial Sequence
  Synthetic
SASYRYT

SEQ ID NO: 1363 - protein, 10 aa, Artificial Sequence
  Synthetic
QQHYSTPPYT

SEQ ID NO: 1364 - protein, 120 aa, Artificial Sequence
  Synthetic
QVQLVESGGGVVQPGRSLRLSCAASGFTFSSSWMNWVRQAPGKGLEWVARIYPGDADAKYQGKFKGRFTISRDNSKNTLYLQMNSLRAEDTAVYYCARSTMIATGAMDYWGQGTMVTVSS

SEQ ID NO: 1365 - protein, 109 aa, Artificial Sequence; identical to SEQ ID NO: 1354
  Synthetic

SEQ ID NO: 1366 - protein, 244 aa, Artificial Sequence
  Synthetic
EIVMTQSPATLSLSPGERATLSCKASQDVSTAVAWYQQKPGQAPRLLIYSASYRYTGIPARFSGSGSGTDFTLTISSLQPEDFAVYYCQQHYSTPPYTFGPGTKVDIKRGGGGSGGGGSGGGGSQVQLVESGGGVVQPGRSLRLSCAASGFTFSSSWMNWVRQAPGKGLEWVARIYPGDADAKYQGKFKGRFTISRDNSKNTLYLQMNSLRAEDTAVYYCARSTMIATGAMDYWGQGTMVTVSS

SEQ ID NO: 1367 - protein, 499 aa, Artificial Sequence
  Synthetic
EIVMTQSPATLSLSPGERATLSCKASQDVSTAVAWYQQKPGQAPRLLIYSASYRYTGIPARFSGSGSGTDFTLTISSLQPEDFAVYYCQQHYSTPPYTFGPGTKVDIKRGGGGSGGGGSGGGGSQVQLVESGGGVVQPGRSLRLSCAASGFTFSSSWMNWVRQAPGKGLEWVARIYPGDADAKYQGKFKGRFTISRDNSKNTLYLQMNSLRAEDTAVYYCARSTMIATGAMDYWGQGTMVTVSSSGGGGSEVQLVESGGGLVQPGGSLKLSCAASGFTFNKYAMNWVRQAPGKGLEWVARIRSKYNNYATYYADSVKDRFTISRDDSKNTAYLQMNNLKTEDTAVYYCVRHGNFGNSYISYWAYWGQGTLVTVSSGGGGSGGGGSGGGGSQTVVTQEPSLTVSPGGTVTLTCGSSTGAVTSGNYPNWVQQKPGQAPRGLIGGTKFLAPGTPARFSGSLLGGKAALTLSGVQPEDEAEYYCVLWYSNRWVFGGGTKLTVL

SEQ ID NO: 1368 - protein, 987 aa, Artificial Sequence
  Synthetic
EIVMTQSPATLSLSPGERATLSCKASQDVSTAVAWYQQKPGQAPRLLIYSASYRYTGIPARFSGSGSGTDFTLTISSLQPEDFAVYYCQQHYSTPPYTFGPGTKVDIKRGGGGSGGGGSGGGGSQVQLVESGGGVVQPGRSLRLSCAASGFTFSSSWMNWVRQAPGKGLEWVARIYPGDADAKYQGKFKGRFTISRDNSKNTLYLQMNSLRAEDTAVYYCARSTMIATGAMDYWGQGTMVTVSSSGGGGSEVQLVESGGGLVQPGGSLKLSCAASGFTFNKYAMNWVRQAPGKGLEWVARIRSKYNNYATYYADSVKDRFTISRDDSKNTAYLQMNNLKTEDTAVYYCVRHGNFGNSYISYWAYWGQGTLVTVSSGGGGSGGGGSGGGGSQTVVTQEPSLTVSPGGTVTLTCGSSTGAVTSGNYPNWVQQKPGQAPRGLIGGTKFLAPGTPARFSGSLLGGKAALTLSGVQPEDEAEYYCVLWYSNRWVFGGGTKLTVLGGGGDKTHTCPPCPAPELLGGPSVFLFPPKPKDTLMISRTPEVTCVVVDVSHEDPEVKFNWYVDGVEVHNAKTKPCEEQYGSTYRCVSVLTVLHQDWLNGKEYKCKVSNKALPAPIEKTISKAKGQPREPQVYTLPPSREEMTKNQVSLTCLVKGFYPSDIAVEWESNGQPENNYKTTPPVLDSDGSFFLYSKLTVDKSRWQQGNVFSCSVMHEALHNHYTQKSLSLSPGKGGGGSGGGGSGGGGSGGGGSGGGGSGGGGSDKTHTCPPCPAPELLGGPSVFLFPPKPKDTLMISRTPEVTCVVVDVSHEDPEVKFNWYVDGVEVHNAKTKPCEEQYGSTYRCVSVLTVLHQDWLNGKEYKCKVSNKALPAPIEKTISKAKGQPREPQVYTLPPSREEMTKNQVSLTCLVKGFYPSDIAVEWESNGQPENNYKTTPPVLDSDGSFFLYSKLTVDKSRWQQGNVFSCSVMHEALHNHYTQKSLSLSPGK

SEQ ID NO: 1369 - protein, 5 aa, Artificial Sequence
  Synthetic
SSWMN

SEQ ID NO: 1370 - protein, 17 aa, Artificial Sequence
  Synthetic
RIYPGDADAKYQGKFKG

SEQ ID NO: 1371 - protein, 11 aa, Artificial Sequence
  Synthetic
STMIATGAMDY

SEQ ID NO: 1372 - protein, 11 aa, Artificial Sequence
  Synthetic
KASQDVSTAVA

SEQ ID NO: 1373 - protein, 7 aa, Artificial Sequence
  Synthetic
SASYRYT

SEQ ID NO: 1374 - protein, 10 aa, Artificial Sequence
  Synthetic
QQHYSTPPYT

SEQ ID NO: 1375 - protein, 120 aa, Artificial Sequence; identical to SEQ ID NO: 1364
  Synthetic

SEQ ID NO: 1376 - protein, 109 aa, Artificial Sequence
  Synthetic
EIVMTQSPATLSLSPGERATLSCKASQDVSTAVAWYQQKPGQAPRLLIYSASYRYTGIPARFSGSGSGTDFTLTISSLEPEDFAVYYCQQHYSTPPYTFGQGTKVDIKR

SEQ ID NO: 1377 - protein, 244 aa, Artificial Sequence
  Synthetic
EIVMTQSPATLSLSPGERATLSCKASQDVSTAVAWYQQKPGQAPRLLIYSASYRYTGIPARFSGSGSGTDFTLTISSLEPEDFAVYYCQQHYSTPPYTFGQGTKVDIKRGGGGSGGGGSGGGGSQVQLVESGGGVVQPGRSLRLSCAASGFTFSSSWMNWVRQAPGKGLEWVARIYPGDADAKYQGKFKGRFTISRDNSKNTLYLQMNSLRAEDTAVYYCARSTMIATGAMDYWGQGTMVTVSS

SEQ ID NO: 1378 - protein, 499 aa, Artificial Sequence
  Synthetic
EIVMTQSPATLSLSPGERATLSCKASQDVSTAVAWYQQKPGQAPRLLIYSASYRYTGIPARFSGSGSGTDFTLTISSLEPEDFAVYYCQQHYSTPPYTFGQGTKVDIKRGGGGSGGGGSGGGGSQVQLVESGGGVVQPGRSLRLSCAASGFTFSSSWMNWVRQAPGKGLEWVARIYPGDADAKYQGKFKGRFTISRDNSKNTLYLQMNSLRAEDTAVYYCARSTMIATGAMDYWGQGTMVTVSSSGGGGSEVQLVESGGGLVQPGGSLKLSCAASGFTFNKYAMNWVRQAPGKGLEWVARIRSKYNNYATYYADSVKDRFTISRDDSKNTAYLQMNNLKTEDTAVYYCVRHGNFGNSYISYWAYWGQGTLVTVSSGGGGSGGGGSGGGGSQTVVTQEPSLTVSPGGTVTLTCGSSTGAVTSGNYPNWVQQKPGQAPRGLIGGTKFLAPGTPARFSGSLLGGKAALTLSGVQPEDEAEYYCVLWYSNRWVFGGGTKLTVL

SEQ ID NO: 1379 - protein, 987 aa, Artificial Sequence
  Synthetic
EIVMTQSPATLSLSPGERATLSCKASQDVSTAVAWYQQKPGQAPRLLIYSASYRYTGIPARFSGSGSGTDFTLTISSLEPEDFAVYYCQQHYSTPPYTFGQGTKVDIKRGGGGSGGGGSGGGGSQVQLVESGGGVVQPGRSLRLSCAASGFTFSSSWMNWVRQAPGKGLEWVARIYPGDADAKYQGKFKGRFTISRDNSKNTLYLQMNSLRAEDTAVYYCARSTMIATGAMDYWGQGTMVTVSSSGGGGSEVQLVESGGGLVQPGGSLKLSCAASGFTFNKYAMNWVRQAPGKGLEWVARIRSKYNNYATYYADSVKDRFTISRDDSKNTAYLQMNNLKTEDTAVYYCVRHGNFGNSYISYWAYWGQGTLVTVSSGGGGSGGGGSGGGGSQTVVTQEPSLTVSPGGTVTLTCGSSTGAVTSGNYPNWVQQKPGQAPRGLIGGTKFLAPGTPARFSGSLLGGKAALTLSGVQPEDEAEYYCVLWYSNRWVFGGGTKLTVLGGGGDKTHTCPPCPAPELLGGPSVFLFPPKPKDTLMISRTPEVTCVVVDVSHEDPEVKFNWYVDGVEVHNAKTKPCEEQYGSTYRCVSVLTVLHQDWLNGKEYKCKVSNKALPAPIEKTISKAKGQPREPQVYTLPPSREEMTKNQVSLTCLVKGFYPSDIAVEWESNGQPENNYKTTPPVLDSDGSFFLYSKLTVDKSRWQQGNVFSCSVMHEALHNHYTQKSLSLSPGKGGGGSGGGGSGGGGSGGGGSGGGGSGGGGSDKTHTCPPCPAPELLGGPSVFLFPPKPKDTLMISRTPEVTCVVVDVSHEDPEVKFNWYVDGVEVHNAKTKPCEEQYGSTYRCVSVLTVLHQDWLNGKEYKCKVSNKALPAPIEKTISKAKGQPREPQVYTLPPSREEMTKNQVSLTCLVKGFYPSDIAVEWESNGQPENNYKTTPPVLDSDGSFFLYSKLTVDKSRWQQGNVFSCSVMHEALHNHYTQKSLSLSPGK

SEQ ID NO: 1380 - protein, 5 aa, Artificial Sequence
  Synthetic
SSWMN

SEQ ID NO: 1381 - protein, 17 aa, Artificial Sequence
  Synthetic
RIYPGDGDTKYNGKFKG

SEQ ID NO: 1382 - protein, 11 aa, Artificial Sequence
  Synthetic
STMIATGAMDY

SEQ ID NO: 1383 - protein, 11 aa, Artificial Sequence
  Synthetic
KASQDVSTAVA

SEQ ID NO: 1384 - protein, 7 aa, Artificial Sequence
  Synthetic
SASYRYT

SEQ ID NO: 1385 - protein, 10 aa, Artificial Sequence
  Synthetic
QQHYSTPPYT

SEQ ID NO: 1386 - protein, 120 aa, Artificial Sequence
  Synthetic
QVQLVESGGGVVQPGRSLRLSCAASGFTFSSSWMNWVRQAPGKCLEWVARIYPGDGDTKYNGKFKGRFTISRDNSKNTLYLQMNSLRAEDTAVYYCARSTMIATGAMDYWGQGTMVTVSS

SEQ ID NO: 1387 - protein, 109 aa, Artificial Sequence
  Synthetic
EIVMTQSPATLSLSPGERATLSCKASQDVSTAVAWYQQKPGQAPRLLIYSASYRYTGIPARFSGSGSGTDFTLTISSLQPEDFAVYYCQQHYSTPPYTFGCGTKVDIKR

SEQ ID NO: 1388 - protein, 244 aa, Artificial Sequence
  Synthetic
EIVMTQSPATLSLSPGERATLSCKASQDVSTAVAWYQQKPGQAPRLLIYSASYRYTGIPARFSGSGSGTDFTLTISSLQPEDFAVYYCQQHYSTPPYTFGCGTKVDIKRGGGGSGGGGSGGGGSQVQLVESGGGVVQPGRSLRLSCAASGFTFSSSWMNWVRQAPGKCLEWVARIYPGDGDTKYNGKFKGRFTISRDNSKNTLYLQMNSLRAEDTAVYYCARSTMIATGAMDYWGQGTMVTVSS

SEQ ID NO: 1389 - protein, 499 aa, Artificial Sequence
  Synthetic
EIVMTQSPATLSLSPGERATLSCKASQDVSTAVAWYQQKPGQAPRLLIYSASYRYTGIPARFSGSGSGTDFTLTISSLQPEDFAVYYCQQHYSTPPYTFGCGTKVDIKRGGGGSGGGGSGGGGSQVQLVESGGGVVQPGRSLRLSCAASGFTFSSSWMNWVRQAPGKCLEWVARIYPGDGDTKYNGKFKGRFTISRDNSKNTLYLQMNSLRAEDTAVYYCARSTMIATGAMDYWGQGTMVTVSSSGGGGSEVQLVESGGGLVQPGGSLKLSCAASGFTFNKYAMNWVRQAPGKGLEWVARIRSKYNNYATYYADSVKDRFTISRDDSKNTAYLQMNNLKTEDTAVYYCVRHGNFGNSYISYWAYWGQGTLVTVSSGGGGSGGGGSGGGGSQTVVTQEPSLTVSPGGTVTLTCGSSTGAVTSGNYPNWVQQKPGQAPRGLIGGTKFLAPGTPARFSGSLLGGKAALTLSGVQPEDEAEYYCVLWYSNRWVFGGGTKLTVL

SEQ ID NO: 1390 - protein, 987 aa, Artificial Sequence
  Synthetic
EIVMTQSPATLSLSPGERATLSCKASQDVSTAVAWYQQKPGQAPRLLIYSASYRYTGIPARFSGSGSGTDFTLTISSLQPEDFAVYYCQQHYSTPPYTFGCGTKVDIKRGGGGSGGGGSGGGGSQVQLVESGGGVVQPGRSLRLSCAASGFTFSSSWMNWVRQAPGKCLEWVARIYPGDGDTKYNGKFKGRFTISRDNSKNTLYLQMNSLRAEDTAVYYCARSTMIATGAMDYWGQGTMVTVSSSGGGGSEVQLVESGGGLVQPGGSLKLSCAASGFTFNKYAMNWVRQAPGKGLEWVARIRSKYNNYATYYADSVKDRFTISRDDSKNTAYLQMNNLKTEDTAVYYCVRHGNFGNSYISYWAYWGQGTLVTVSSGGGGSGGGGSGGGGSQTVVTQEPSLTVSPGGTVTLTCGSSTGAVTSGNYPNWVQQKPGQAPRGLIGGTKFLAPGTPARFSGSLLGGKAALTLSGVQPEDEAEYYCVLWYSNRWVFGGGTKLTVLGGGGDKTHTCPPCPAPELLGGPSVFLFPPKPKDTLMISRTPEVTCVVVDVSHEDPEVKFNWYVDGVEVHNAKTKPCEEQYGSTYRCVSVLTVLHQDWLNGKEYKCKVSNKALPAPIEKTISKAKGQPREPQVYTLPPSREEMTKNQVSLTCLVKGFYPSDIAVEWESNGQPENNYKTTPPVLDSDGSFFLYSKLTVDKSRWQQGNVFSCSVMHEALHNHYTQKSLSLSPGKGGGGSGGGGSGGGGSGGGGSGGGGSGGGGSDKTHTCPPCPAPELLGGPSVFLFPPKPKDTLMISRTPEVTCVVVDVSHEDPEVKFNWYVDGVEVHNAKTKPCEEQYGSTYRCVSVLTVLHQDWLNGKEYKCKVSNKALPAPIEKTISKAKGQPREPQVYTLPPSREEMTKNQVSLTCLVKGFYPSDIAVEWESNGQPENNYKTTPPVLDSDGSFFLYSKLTVDKSRWQQGNVFSCSVMHEALHNHYTQKSLSLSPGK

SEQ ID NO: 1391 - protein, 5 aa, Artificial Sequence
  Synthetic
SSWMN

SEQ ID NO: 1392 - protein, 17 aa, Artificial Sequence
  Synthetic
RIYPGDADAKYNAKFKG

SEQ ID NO: 1393 - protein, 11 aa, Artificial Sequence
  Synthetic
STMIATGAMDY

SEQ ID NO: 1394 - protein, 11 aa, Artificial Sequence
  Synthetic
KASQDVSTAVA

SEQ ID NO: 1395 - protein, 7 aa, Artificial Sequence
  Synthetic
SASYRYT

SEQ ID NO: 1396 - protein, 10 aa, Artificial Sequence
  Synthetic
QQHYSTPPYT

SEQ ID NO: 1397 - protein, 120 aa, Artificial Sequence
  Synthetic
QVQLVQSGAEVKKPGASVKVSCKASGYAFSSSWMNWVRQAPGQCLEWIGRIYPGDADAKYNAKFKGKATLTADKSTSTAYMELSSLRSEDTAVYYCARSTMIATGAMDYWGQGTLVTVSS

SEQ ID NO: 1398 - protein, 109 aa, Artificial Sequence; identical to SEQ ID NO: 1123
  Synthetic

SEQ ID NO: 1399 - protein, 244 aa, Artificial Sequence
  Synthetic
DIQMTQSPSSLSASVGDRVTITCKASQDVSTAVAWYQQKPGKAPKLLIYSASYRYTGVPDRFTGSGSGTDFTLTISSLQPEDFATYYCQQHYSTPPYTFGCGTKVEIKRGGGGSGGGGSGGGGSQVQLVQSGAEVKKPGASVKVSCKASGYAFSSSWMNWVRQAPGQCLEWIGRIYPGDADAKYNAKFKGKATLTADKSTSTAYMELSSLRSEDTAVYYCARSTMIATGAMDYWGQGTLVTVSS

SEQ ID NO: 1400 - protein, 499 aa, Artificial Sequence
  Synthetic
DIQMTQSPSSLSASVGDRVTITCKASQDVSTAVAWYQQKPGKAPKLLIYSASYRYTGVPDRFTGSGSGTDFTLTISSLQPEDFATYYCQQHYSTPPYTFGCGTKVEIKRGGGGSGGGGSGGGGSQVQLVQSGAEVKKPGASVKVSCKASGYAFSSSWMNWVRQAPGQCLEWIGRIYPGDADAKYNAKFKGKATLTADKSTSTAYMELSSLRSEDTAVYYCARSTMIATGAMDYWGQGTLVTVSSSGGGGSEVQLVESGGGLVQPGGSLKLSCAASGFTFNKYAMNWVRQAPGKGLEWVARIRSKYNNYATYYADSVKDRFTISRDDSKNTAYLQMNNLKTEDTAVYYCVRHGNFGNSYISYWAYWGQGTLVTVSSGGGGSGGGGSGGGGSQTVVTQEPSLTVSPGGTVTLTCGSSTGAVTSGNYPNWVQQKPGQAPRGLIGGTKFLAPGTPARFSGSLLGGKAALTLSGVQPEDEAEYYCVLWYSNRWVFGGGTKLTVL

SEQ ID NO: 1401 - protein, 987 aa, Artificial Sequence
  Synthetic
DIQMTQSPSSLSASVGDRVTITCKASQDVSTAVAWYQQKPGKAPKLLIYSASYRYTGVPDRFTGSGSGTDFTLTISSLQPEDFATYYCQQHYSTPPYTFGCGTKVEIKRGGGGSGGGGSGGGGSQVQLVQSGAEVKKPGASVKVSCKASGYAFSSSWMNWVRQAPGQCLEWIGRIYPGDADAKYNAKFKGKATLTADKSTSTAYMELSSLRSEDTAVYYCARSTMIATGAMDYWGQGTLVTVSSSGGGGSEVQLVESGGGLVQPGGSLKLSCAASGFTFNKYAMNWVRQAPGKGLEWVARIRSKYNNYATYYADSVKDRFTISRDDSKNTAYLQMNNLKTEDTAVYYCVRHGNFGNSYISYWAYWGQGTLVTVSSGGGGSGGGGSGGGGSQTVVTQEPSLTVSPGGTVTLTCGSSTGAVTSGNYPNWVQQKPGQAPRGLIGGTKFLAPGTPARFSGSLLGGKAALTLSGVQPEDEAEYYCVLWYSNRWVFGGGTKLTVLGGGGDKTHTCPPCPAPELLGGPSVFLFPPKPKDTLMISRTPEVTCVVVDVSHEDPEVKFNWYVDGVEVHNAKTKPCEEQYGSTYRCVSVLTVLHQDWLNGKEYKCKVSNKALPAPIEKTISKAKGQPREPQVYTLPPSREEMTKNQVSLTCLVKGFYPSDIAVEWESNGQPENNYKTTPPVLDSDGSFFLYSKLTVDKSRWQQGNVFSCSVMHEALHNHYTQKSLSLSPGKGGGGSGGGGSGGGGSGGGGSGGGGSGGGGSDKTHTCPPCPAPELLGGPSVFLFPPKPKDTLMISRTPEVTCVVVDVSHEDPEVKFNWYVDGVEVHNAKTKPCEEQYGSTYRCVSVLTVLHQDWLNGKEYKCKVSNKALPAPIEKTISKAKGQPREPQVYTLPPSREEMTKNQVSLTCLVKGFYPSDIAVEWESNGQPENNYKTTPPVLDSDGSFFLYSKLTVDKSRWQQGNVFSCSVMHEALHNHYTQKSLSLSPGK

SEQ ID NO: 1402 - protein, 5 aa, Artificial Sequence
  Synthetic
NHIIH

SEQ ID NO: 1403 - protein, 17 aa, Artificial Sequence
  Synthetic
YINPYPGYHAYNEKFQG

SEQ ID NO: 1404 - protein, 12 aa, Artificial Sequence
  Synthetic
DGYYRDTDVLDY

SEQ ID NO: 1405 - protein, 11 aa, Artificial Sequence
  Synthetic
QASQDISNYLN

SEQ ID NO: 1406 - protein, 7 aa, Artificial Sequence
  Synthetic
YTSRLHT

SEQ ID NO: 1407 - protein, 9 aa, Artificial Sequence
  Synthetic
QQGNTLPWT

SEQ ID NO: 1408 - protein, 121 aa, Artificial Sequence
  Synthetic
QVQLVQSGAEVKKPGASVKVSCKASGYTFTNHIIHWVRQAPGQCLEWMGYINPYPGYHAYNEKFQGRATMTSDTSTSTVYMELSSLRSEDTAVYYCARDGYYRDTDVLDYWGQGTLVTVSS

SEQ ID NO: 1409 - protein, 107 aa, Artificial Sequence
  Synthetic
DIQMTQSPSSLSASVGDRVTITCQASQDISNYLNWYQQKPGKAPKLLIYYTSRLHTGVPSRFSGSGSGTDFTFTISSLEPEDIATYYCQQGNTLPWTFGCGTKVEIK

SEQ ID NO: 1410 - protein, 249 aa, Artificial Sequence
  Synthetic
EVQLVESGGGLVQPGGSLKLSCAASGFTFNKYAMNWVRQAPGKGLEWVARIRSKYNNYATYYADSVKDRFTISRDDSKNTAYLQMNNLKTEDTAVYYCVRHGNFGNSYISYWAYWGQGTLVTVSSGGGGSGGGGSGGGGSQTVVTQEPSLTVSPGGTVTLTCGSSTGAVTSGNYPNWVQQKPGQAPRGLIGGTKFLAPGTPARFSGSLLGGKAALTLSGVQPEDEAEYYCVLWYSNRWVFGGGTKLTVL

SEQ ID NO: 1411 - protein, 5 aa, Artificial Sequence
  Synthetic
NHIIH

SEQ ID NO: 1412 - protein, 1248 aa, Artificial Sequence
  Synthetic
MDMRVPAQLLGLDIQMTQSPSSLSASVGDRVTITCKASQDVSTAVAWYQQKPGKAPKLLIYSASYRYTGVPDRFTGSGSGTDFTLTISSLQPEDFATYYCQQHYSTPPYTFGCGTKVEIKRGGGGSGGGGSGGGGSQVQLVQSGAEVKKPGASVKVSCKASGYAFSSSWMNWVRQAPGQCLEWIGRIYPGDADAKYNAKFKGKATLTADKSTSTAYMELSSLRSEDTAVYYCARSTMIATGAMDYWGQGTLVTVSSSGGGGSQVQLVQSGAEVKKPGASVKVSCKASGYTFTNHIIHWVRQAPGQCLEWMGYINPYPGYHAYNEKFQGRATMTSDTSTSTVYMELSSLRSEDTAVYYCARDGYYRDTDVLDYWGQGTLVTVSSGGGGSGGGGSGGGGSDIQMTQSPSSLSASVGDRVTITCQASQDISNYLNWYQQKPGKAPKLLIYYTSRLHTGVPSRFSGSGSGTDFTFTISSLEPEDIATYYCQQGNTLPWTFGCGTKVEIKSGGGGSEVQLVESGGGLVQPGGSLKLSCAASGFTFNKYAMNWVRQAPGKGLEWVARIRSKYNNYATYYADSVKDRFTISRDDSKNTAYLQMNNLKTEDTAVYYCVRHGNFGNSYISYWAYWGQGTLVTVSSGGGGSGGGGSGGGGSQTVVTQEPSLTVSPGGTVTLTCGSSTGAVTSGNYPNWVQQKPGQAPRGLIGGTKFLAPGTPARFSGSLLGGKAALTLSGVQPEDEAEYYCVLWYSNRWVFGGGTKLTVLGGGGDKTHTCPPCPAPELLGGPSVFLFPPKPKDTLMISRTPEVTCVVVDVSHEDPEVKFNWYVDGVEVHNAKTKPCEEQYGSTYRCVSVLTVLHQDWLNGKEYKCKVSNKALPAPIEKTISKAKGQPREPQVYTLPPSREEMTKNQVSLTCLVKGFYPSDIAVEWESNGQPENNYKTTPPVLDSDGSFFLYSKLTVDKSRWQQGNVFSCSVMHEALHNHYTQKSLSLSPGKGGGGSGGGGSGGGGSGGGGSGGGGSGGGGSDKTHTCPPCPAPELLGGPSVFLFPPKPKDTLMISRTPEVTCVVVDVSHEDPEVKFNWYVDGVEVHNAKTKPCEEQYGSTYRCVSVLTVLHQDWLNGKEYKCKVSNKALPAPIEKTISKAKGQPREPQVYTLPPSREEMTKNQVSLTCLVKGFYPSDIAVEWESNGQPENNYKTTPPVLDSDGSFFLYSKLTVDKSRWQQGNVFSCSVMHEALHNHYTQKSLSLSPGK

SEQ ID NO: 1413 - protein, 5 aa, Artificial Sequence
  Synthetic
DYYIN

SEQ ID NO: 1414 - protein, 17 aa, Artificial Sequence
  Synthetic
WIYFASGNSEYNQKFTG

SEQ ID NO: 1415 - protein, 10 aa, Artificial Sequence
  Synthetic
LYDYDWYFDV

SEQ ID NO: 1416 - protein, 16 aa, Artificial Sequence
  Synthetic
KSSQSLVHSNGNTYLH

SEQ ID NO: 1417 - protein, 7 aa, Artificial Sequence
  Synthetic
KVSNRFS

SEQ ID NO: 1418 - protein, 9 aa, Artificial Sequence
  Synthetic
SQSSIYPWT

SEQ ID NO: 1419 - protein, 119 aa, Artificial Sequence
  Synthetic
QVQLVQSGAEVKKPGASVKVSCKASGYSFPDYYINWVRQAPGQGLEWMGWIYFASGNSEYNQKFTGRVTMTRDTSINTAYMELSSLTSEDTAVYFCASLYDYDWYFDVWGQGTMVTVSS

SEQ ID NO: 1420 - protein, 112 aa, Artificial Sequence
  Synthetic
DIVMTQTPLSLSVTPGQPASISCKSSQSLVHSNGNTYLHWYLQKPGQSPQLLIYKVSNRFSGVPDRFSGSGSGTDFTLKISRVEAEDVGIYYCSQSSIYPWTFGQGTKLEIK

SEQ ID NO: 1421 - protein, 246 aa, Artificial Sequence
  Synthetic
QVQLVQSGAEVKKPGASVKVSCKASGYSFPDYYINWVRQAPGQGLEWMGWIYFASGNSEYNQKFTGRVTMTRDTSINTAYMELSSLTSEDTAVYFCASLYDYDWYFDVWGQGTMVTVSSGGGGSGGGGSGGGGSDIVMTQTPLSLSVTPGQPASISCKSSQSLVHSNGNTYLHWYLQKPGQSPQLLIYKVSNRFSGVPDRFSGSGSGTDFTLKISRVEAEDVGIYYCSQSSIYPWTFGQGTKLEIK

SEQ ID NO: 1422 - protein, 501 aa, Artificial Sequence
  Synthetic
QVQLVQSGAEVKKPGASVKVSCKASGYSFPDYYINWVRQAPGQGLEWMGWIYFASGNSEYNQKFTGRVTMTRDTSINTAYMELSSLTSEDTAVYFCASLYDYDWYFDVWGQGTMVTVSSGGGGSGGGGSGGGGSDIVMTQTPLSLSVTPGQPASISCKSSQSLVHSNGNTYLHWYLQKPGQSPQLLIYKVSNRFSGVPDRFSGSGSGTDFTLKISRVEAEDVGIYYCSQSSIYPWTFGQGTKLEIKSGGGGSEVQLVESGGGLVQPGGSLKLSCAASGFTFNKYAMNWVRQAPGKGLEWVARIRSKYNNYATYYADSVKDRFTISRDDSKNTAYLQMNNLKTEDTAVYYCVRHGNFGNSYISYWAYWGQGTLVTVSSGGGGSGGGGSGGGGSQTVVTQEPSLTVSPGGTVTLTCGSSTGAVTSGNYPNWVQQKPGQAPRGLIGGTKFLAPGTPARFSGSLLGGKAALTLSGVQPEDEAEYYCVLWYSNRWVFGGGTKLTVL

SEQ ID NO: 1423 - protein, 989 aa, Artificial Sequence
  Synthetic
QVQLVQSGAEVKKPGASVKVSCKASGYSFPDYYINWVRQAPGQGLEWMGWIYFASGNSEYNQKFTGRVTMTRDTSINTAYMELSSLTSEDTAVYFCASLYDYDWYFDVWGQGTMVTVSSGGGGSGGGGSGGGGSDIVMTQTPLSLSVTPGQPASISCKSSQSLVHSNGNTYLHWYLQKPGQSPQLLIYKVSNRFSGVPDRFSGSGSGTDFTLKISRVEAEDVGIYYCSQSSIYPWTFGQGTKLEIKSGGGGSEVQLVESGGGLVQPGGSLKLSCAASGFTFNKYAMNWVRQAPGKGLEWVARIRSKYNNYATYYADSVKDRFTISRDDSKNTAYLQMNNLKTEDTAVYYCVRHGNFGNSYISYWAYWGQGTLVTVSSGGGGSGGGGSGGGGSQTVVTQEPSLTVSPGGTVTLTCGSSTGAVTSGNYPNWVQQKPGQAPRGLIGGTKFLAPGTPARFSGSLLGGKAALTLSGVQPEDEAEYYCVLWYSNRWVFGGGTKLTVLGGGGDKTHTCPPCPAPELLGGPSVFLFPPKPKDTLMISRTPEVTCVVVDVSHEDPEVKFNWYVDGVEVHNAKTKPCEEQYGSTYRCVSVLTVLHQDWLNGKEYKCKVSNKALPAPIEKTISKAKGQPREPQVYTLPPSREEMTKNQVSLTCLVKGFYPSDIAVEWESNGQPENNYKTTPPVLDSDGSFFLYSKLTVDKSRWQQGNVFSCSVMHEALHNHYTQKSLSLSPGKGGGGSGGGGSGGGGSGGGGSGGGGSGGGGSDKTHTCPPCPAPELLGGPSVFLFPPKPKDTLMISRTPEVTCVVVDVSHEDPEVKFNWYVDGVEVHNAKTKPCEEQYGSTYRCVSVLTVLHQDWLNGKEYKCKVSNKALPAPIEKTISKAKGQPREPQVYTLPPSREEMTKNQVSLTCLVKGFYPSDIAVEWESNGQPENNYKTTPPVLDSDGSFFLYSKLTVDKSRWQQGNVFSCSVMHEALHNHYTQKSLSLSPGK

SEQ ID NO: 1424 - protein, 5 aa, Artificial Sequence
  Synthetic
NFDMA

SEQ ID NO: 1425 - protein, 17 aa, Artificial Sequence
  Synthetic
SITTGGGDTYYADSVKG

SEQ ID NO: 1426 - protein, 12 aa, Artificial Sequence
  Synthetic
HGYYDGYHLFDY

SEQ ID NO: 1427 - protein, 11 aa, Artificial Sequence
  Synthetic
RANQGISNNLN

SEQ ID NO: 1428 - protein, 7 aa, Artificial Sequence
  Synthetic
YTSNLQS

SEQ ID NO: 1429 - protein, 9 aa, Artificial Sequence
  Synthetic
QQFTSLPYT

SEQ ID NO: 1430 - protein, 121 aa, Artificial Sequence
  Synthetic
EVQLVESGGGLVQPGGSLRLSCAASGFTFSNFDMAWVRQAPGKGLVWVSSITTGGGDTYYADSVKGRFTISRDNAKSTLYLQMDSLRSEDTAVYYCVRHGYYDGYHLFDYWGQGTLVTVSS

SEQ ID NO: 1431 - protein, 107 aa, Artificial Sequence
  Synthetic
DIQMTQSPSSLSASVGDRVTITCRANQGISNNLNWYQQKPGKAPKPLIYYTSNLQSGVPSRFSGSGSGTDYTLTISSLQPEDFATYYCQQFTSLPYTFGQGTKLEIK

SEQ ID NO: 1432 - protein, 243 aa, Artificial Sequence
  Synthetic
EVQLVESGGGLVQPGGSLRLSCAASGFTFSNFDMAWVRQAPGKGLVWVSSITTGGGDTYYADSVKGRFTISRDNAKSTLYLQMDSLRSEDTAVYYCVRHGYYDGYHLFDYWGQGTLVTVSSGGGGSGGGGSGGGGSDIQMTQSPSSLSASVGDRVTITCRANQGISNNLNWYQQKPGKAPKPLIYYTSNLQSGVPSRFSGSGSGTDYTLTISSLQPEDFATYYCQQFTSLPYTFGQGTKLEIK

SEQ ID NO: 1433 - protein, 498 aa, Artificial Sequence
  Synthetic
EVQLVESGGGLVQPGGSLRLSCAASGFTFSNFDMAWVRQAPGKGLVWVSSITTGGGDTYYADSVKGRFTISRDNAKSTLYLQMDSLRSEDTAVYYCVRHGYYDGYHLFDYWGQGTLVTVSSGGGGSGGGGSGGGGSDIQMTQSPSSLSASVGDRVTITCRANQGISNNLNWYQQKPGKAPKPLIYYTSNLQSGVPSRFSGSGSGTDYTLTISSLQPEDFATYYCQQFTSLPYTFGQGTKLEIKSGGGGSEVQLVESGGGLVQPGGSLKLSCAASGFTFNKYAMNWVRQAPGKGLEWVARIRSKYNNYATYYADSVKDRFTISRDDSKNTAYLQMNNLKTEDTAVYYCVRHGNFGNSYISYWAYWGQGTLVTVSSGGGGSGGGGSGGGGSQTVVTQEPSLTVSPGGTVTLTCGSSTGAVTSGNYPNWVQQKPGQAPRGLIGGTKFLAPGTPARFSGSLLGGKAALTLSGVQPEDEAEYYCVLWYSNRWVFGGGTKLTVL

SEQ ID NO: 1434 - protein, 986 aa, Artificial Sequence
  Synthetic
EVQLVESGGGLVQPGGSLRLSCAASGFTFSNFDMAWVRQAPGKGLVWVSSITTGGGDTYYADSVKGRFTISRDNAKSTLYLQMDSLRSEDTAVYYCVRHGYYDGYHLFDYWGQGTLVTVSSGGGGSGGGGSGGGGSDIQMTQSPSSLSASVGDRVTITCRANQGISNNLNWYQQKPGKAPKPLIYYTSNLQSGVPSRFSGSGSGTDYTLTISSLQPEDFATYYCQQFTSLPYTFGQGTKLEIKSGGGGSEVQLVESGGGLVQPGGSLKLSCAASGFTFNKYAMNWVRQAPGKGLEWVARIRSKYNNYATYYADSVKDRFTISRDDSKNTAYLQMNNLKTEDTAVYYCVRHGNFGNSYISYWAYWGQGTLVTVSSGGGGSGGGGSGGGGSQTVVTQEPSLTVSPGGTVTLTCGSSTGAVTSGNYPNWVQQKPGQAPRGLIGGTKFLAPGTPARFSGSLLGGKAALTLSGVQPEDEAEYYCVLWYSNRWVFGGGTKLTVLGGGGDKTHTCPPCPAPELLGGPSVFLFPPKPKDTLMISRTPEVTCVVVDVSHEDPEVKFNWYVDGVEVHNAKTKPCEEQYGSTYRCVSVLTVLHQDWLNGKEYKCKVSNKALPAPIEKTISKAKGQPREPQVYTLPPSREEMTKNQVSLTCLVKGFYPSDIAVEWESNGQPENNYKTTPPVLDSDGSFFLYSKLTVDKSRWQQGNVFSCSVMHEALHNHYTQKSLSLSPGKGGGGSGGGGSGGGGSGGGGSGGGGSGGGGSDKTHTCPPCPAPELLGGPSVFLFPPKPKDTLMISRTPEVTCVVVDVSHEDPEVKFNWYVDGVEVHNAKTKPCEEQYGSTYRCVSVLTVLHQDWLNGKEYKCKVSNKALPAPIEKTISKAKGQPREPQVYTLPPSREEMTKNQVSLTCLVKGFYPSDIAVEWESNGQPENNYKTTPPVLDSDGSFFLYSKLTVDKSRWQQGNVFSCSVMHEALHNHYTQKSLSLSPGK

SEQ ID NO: 1435 - protein, 493 aa, Artificial Sequence
  Synthetic
DIQMTQSPSSLSASVGDRVTITCKASQDVSTAVAWYQQKPGKAPKLLIYSASYRYTGVPDRFTGSGSGTDFTLTISSLQPEDFATYYCQQHYSTPPYTFGCGTKVEIKRGGGGSGGGGSGGGGSQVQLVQSGAEVKKPGASVKVSCKASGYAFSSSWMNWVRQAPGQCLEWIGRIYPGDADAKYNAKFKGKATLTADKSTSTAYMELSSLRSEDTAVYYCARSTMIATGAMDYWGQGTLVTVSSSGGGGSQVQLVQSGAEVKKPGASVKVSCKASGYTFTNHIIHWVRQAPGQCLEWMGYINPYPGYHAYNEKFQGRATMTSDTSTSTVYMELSSLRSEDTAVYYCARDGYYRDTDVLDYWGQGTLVTVSSGGGGSGGGGSGGGGSDIQMTQSPSSLSASVGDRVTITCQASQDISNYLNWYQQKPGKAPKLLIYYTSRLHTGVPSRFSGSGSGTDFTFTISSLEPEDIATYYCQQGNTLPWTFGCGTKVEIK

SEQ ID NO: 1436 - protein, 748 aa, Artificial Sequence
  Synthetic
DIQMTQSPSSLSASVGDRVTITCKASQDVSTAVAWYQQKPGKAPKLLIYSASYRYTGVPDRFTGSGSGTDFTLTISSLQPEDFATYYCQQHYSTPPYTFGCGTKVEIKRGGGGSGGGGSGGGGSQVQLVQSGAEVKKPGASVKVSCKASGYAFSSSWMNWVRQAPGQCLEWIGRIYPGDADAKYNAKFKGKATLTADKSTSTAYMELSSLRSEDTAVYYCARSTMIATGAMDYWGQGTLVTVSSSGGGGSQVQLVQSGAEVKKPGASVKVSCKASGYTFTNHIIHWVRQAPGQCLEWMGYINPYPGYHAYNEKFQGRATMTSDTSTSTVYMELSSLRSEDTAVYYCARDGYYRDTDVLDYWGQGTLVTVSSGGGGSGGGGSGGGGSDIQMTQSPSSLSASVGDRVTITCQASQDISNYLNWYQQKPGKAPKLLIYYTSRLHTGVPSRFSGSGSGTDFTFTISSLEPEDIATYYCQQGNTLPWTFGCGTKVEIKSGGGGSEVQLVESGGGLVQPGGSLKLSCAASGFTFNKYAMNWVRQAPGKGLEWVARIRSKYNNYATYYADSVKDRFTISRDDSKNTAYLQMNNLKTEDTAVYYCVRHGNFGNSYISYWAYWGQGTLVTVSSGGGGSGGGGSGGGGSQTVVTQEPSLTVSPGGTVTLTCGSSTGAVTSGNYPNWVQQKPGQAPRGLIGGTKFLAPGTPARFSGSLLGGKAALTLSGVQPEDEAEYYCVLWYSNRWVFGGGTKLTVL

SEQ ID NO: 1437 - protein, 1236 aa, Artificial Sequence
  Synthetic
DIQMTQSPSSLSASVGDRVTITCKASQDVSTAVAWYQQKPGKAPKLLIYSASYRYTGVPDRFTGSGSGTDFTLTISSLQPEDFATYYCQQHYSTPPYTFGCGTKVEIKRGGGGSGGGGSGGGGSQVQLVQSGAEVKKPGASVKVSCKASGYAFSSSWMNWVRQAPGQCLEWIGRIYPGDADAKYNAKFKGKATLTADKSTSTAYMELSSLRSEDTAVYYCARSTMIATGAMDYWGQGTLVTVSSSGGGGSQVQLVQSGAEVKKPGASVKVSCKASGYTFTNHIIHWVRQAPGQCLEWMGYINPYPGYHAYNEKFQGRATMTSDTSTSTVYMELSSLRSEDTAVYYCARDGYYRDTDVLDYWGQGTLVTVSSGGGGSGGGGSGGGGSDIQMTQSPSSLSASVGDRVTITCQASQDISNYLNWYQQKPGKAPKLLIYYTSRLHTGVPSRFSGSGSGTDFTFTISSLEPEDIATYYCQQGNTLPWTFGCGTKVEIKSGGGGSEVQLVESGGGLVQPGGSLKLSCAASGFTFNKYAMNWVRQAPGKGLEWVARIRSKYNNYATYYADSVKDRFTISRDDSKNTAYLQMNNLKTEDTAVYYCVRHGNFGNSYISYWAYWGQGTLVTVSSGGGGSGGGGSGGGGSQTVVTQEPSLTVSPGGTVTLTCGSSTGAVTSGNYPNWVQQKPGQAPRGLIGGTKFLAPGTPARFSGSLLGGKAALTLSGVQPEDEAEYYCVLWYSNRWVFGGGTKLTVLGGGGDKTHTCPPCPAPELLGGPSVFLFPPKPKDTLMISRTPEVTCVVVDVSHEDPEVKFNWYVDGVEVHNAKTKPCEEQYGSTYRCVSVLTVLHQDWLNGKEYKCKVSNKALPAPIEKTISKAKGQPREPQVYTLPPSREEMTKNQVSLTCLVKGFYPSDIAVEWESNGQPENNYKTTPPVLDSDGSFFLYSKLTVDKSRWQQGNVFSCSVMHEALHNHYTQKSLSLSPGKGGGGSGGGGSGGGGSGGGGSGGGGSGGGGSDKTHTCPPCPAPELLGGPSVFLFPPKPKDTLMISRTPEVTCVVVDVSHEDPEVKFNWYVDGVEVHNAKTKPCEEQYGSTYRCVSVLTVLHQDWLNGKEYKCKVSNKALPAPIEKTISKAKGQPREPQVYTLPPSREEMTKNQVSLTCLVKGFYPSDIAVEWESNGQPENNYKTTPPVLDSDGSFFLYSKLTVDKSRWQQGNVFSCSVMHEALHNHYTQKSLSLSPGK

SEQ ID NO: 1438 - protein, 496 aa, Artificial Sequence
  Synthetic
QVQLVQSGAEVKKPGASVKVSCKASGYSFPDYYINWVRQAPGQGLEWMGWIYFASGNSEYNQKFTGRVTMTRDTSINTAYMELSSLTSEDTAVYFCASLYDYDWYFDVWGQGTMVTVSSGGGGSGGGGSGGGGSDIVMTQTPLSLSVTPGQPASISCKSSQSLVHSNGNTYLHWYLQKPGQSPQLLIYKVSNRFSGVPDRFSGSGSGTDFTLKISRVEAEDVGIYYCSQSSIYPWTFGQGTKLEIKSGGGGSDIQMTQSPSSLSASVGDRVTITCKASQDVSTAVAWYQQKPGKAPKLLIYSASYRYTGVPDRFTGSGSGTDFTLTISSLQPEDFATYYCQQHYSTPPYTFGGGTKVEIKRGGGGSGGGGSGGGGSQVQLVQSGAEVKKPGASVKVSCKASGYAFSSSWMNWVRQAPGQGLEWIGRIYPGDGDTKYNAKFKGKATLTADKSTSTAYMELSSLRSEDTAVYYCARSTMIATGAMDYWGQGTLVTVSS

SEQ ID NO: 1439 - protein, 751 aa, Artificial Sequence
  Synthetic
QVQLVQSGAEVKKPGASVKVSCKASGYSFPDYYINWVRQAPGQGLEWMGWIYFASGNSEYNQKFTGRVTMTRDTSINTAYMELSSLTSEDTAVYFCASLYDYDWYFDVWGQGTMVTVSSGGGGSGGGGSGGGGSDIVMTQTPLSLSVTPGQPASISCKSSQSLVHSNGNTYLHWYLQKPGQSPQLLIYKVSNRFSGVPDRFSGSGSGTDFTLKISRVEAEDVGIYYCSQSSIYPWTFGQGTKLEIKSGGGGSDIQMTQSPSSLSASVGDRVTITCKASQDVSTAVAWYQQKPGKAPKLLIYSASYRYTGVPDRFTGSGSGTDFTLTISSLQPEDFATYYCQQHYSTPPYTFGGGTKVEIKRGGGGSGGGGSGGGGSQVQLVQSGAEVKKPGASVKVSCKASGYAFSSSWMNWVRQAPGQGLEWIGRIYPGDGDTKYNAKFKGKATLTADKSTSTAYMELSSLRSEDTAVYYCARSTMIATGAMDYWGQGTLVTVSSSGGGGSEVQLVESGGGLVQPGGSLKLSCAASGFTFNKYAMNWVRQAPGKGLEWVARIRSKYNNYATYYADSVKDRFTISRDDSKNTAYLQMNNLKTEDTAVYYCVRHGNFGNSYISYWAYWGQGTLVTVSSGGGGSGGGGSGGGGSQTVVTQEPSLTVSPGGTVTLTCGSSTGAVTSGNYPNWVQQKPGQAPRGLIGGTKFLAPGTPARFSGSLLGGKAALTLSGVQPEDEAEYYCVLWYSNRWVFGGGTKLTVL

SEQ ID NO: 1440 - protein, 1239 aa, Artificial Sequence
  Synthetic
QVQLVQSGAEVKKPGASVKVSCKASGYSFPDYYINWVRQAPGQGLEWMGWIYFASGNSEYNQKFTGRVTMTRDTSINTAYMELSSLTSEDTAVYFCASLYDYDWYFDVWGQGTMVTVSSGGGGSGGGGSGGGGSDIVMTQTPLSLSVTPGQPASISCKSSQSLVHSNGNTYLHWYLQKPGQSPQLLIYKVSNRFSGVPDRFSGSGSGTDFTLKISRVEAEDVGIYYCSQSSIYPWTFGQGTKLEIKSGGGGSDIQMTQSPSSLSASVGDRVTITCKASQDVSTAVAWYQQKPGKAPKLLIYSASYRYTGVPDRFTGSGSGTDFTLTISSLQPEDFATYYCQQHYSTPPYTFGGGTKVEIKRGGGGSGGGGSGGGGSQVQLVQSGAEVKKPGASVKVSCKASGYAFSSSWMNWVRQAPGQGLEWIGRIYPGDGDTKYNAKFKGKATLTADKSTSTAYMELSSLRSEDTAVYYCARSTMIATGAMDYWGQGTLVTVSSSGGGGSEVQLVESGGGLVQPGGSLKLSCAASGFTFNKYAMNWVRQAPGKGLEWVARIRSKYNNYATYYADSVKDRFTISRDDSKNTAYLQMNNLKTEDTAVYYCVRHGNFGNSYISYWAYWGQGTLVTVSSGGGGSGGGGSGGGGSQTVVTQEPSLTVSPGGTVTLTCGSSTGAVTSGNYPNWVQQKPGQAPRGLIGGTKFLAPGTPARFSGSLLGGKAALTLSGVQPEDEAEYYCVLWYSNRWVFGGGTKLTVLGGGGDKTHTCPPCPAPELLGGPSVFLFPPKPKDTLMISRTPEVTCVVVDVSHEDPEVKFNWYVDGVEVHNAKTKPCEEQYGSTYRCVSVLTVLHQDWLNGKEYKCKVSNKALPAPIEKTISKAKGQPREPQVYTLPPSREEMTKNQVSLTCLVKGFYPSDIAVEWESNGQPENNYKTTPPVLDSDGSFFLYSKLTVDKSRWQQGNVFSCSVMHEALHNHYTQKSLSLSPGKGGGGSGGGGSGGGGSGGGGSGGGGSGGGGSDKTHTCPPCPAPELLGGPSVFLFPPKPKDTLMISRTPEVTCVVVDVSHEDPEVKFNWYVDGVEVHNAKTKPCEEQYGSTYRCVSVLTVLHQDWLNGKEYKCKVSNKALPAPIEKTISKAKGQPREPQVYTLPPSREEMTKNQVSLTCLVKGFYPSDIAVEWESNGQPENNYKTTPPVLDSDGSFFLYSKLTVDKSRWQQGNVFSCSVMHEALHNHYTQKSLSLSPGK

SEQ ID NO: 1441 - protein, 496 aa, Artificial Sequence
  Synthetic
QVQLVQSGAEVKKPGASVKVSCKASGYSFPDYYINWVRQAPGQGLEWMGWIYFASGNSEYNQKFTGRVTMTRDTSINTAYMELSSLTSEDTAVYFCASLYDYDWYFDVWGQGTMVTVSSGGGGSGGGGSGGGGSDIVMTQTPLSLSVTPGQPASISCKSSQSLVHSNGNTYLHWYLQKPGQSPQLLIYKVSNRFSGVPDRFSGSGSGTDFTLKISRVEAEDVGIYYCSQSSIYPWTFGQGTKLEIKSGGGGSDIQMTQSPSSLSASVGDRVTITCKASQDVSTAVAWYQQKPGKAPKLLIYSASYRYTGVPDRFTGSGSGTDFTLTISSLQPEDFATYYCQQHYSTPPYTFGGGTKVEIKRGGGGSGGGGSGGGGSQVQLVQSGAEVKKPGASVKVSCKASGYAFSSSWMNWVRQAPGQGLEWIGRIYPGDGDAKYNGKFKGKATLTADKSTSTAYMELSSLRSEDTAVYYCARSTMIATGAMDYWGQGTLVTVSS

SEQ ID NO: 1442 - protein, 751 aa, Artificial Sequence
  Synthetic
QVQLVQSGAEVKKPGASVKVSCKASGYSFPDYYINWVRQAPGQGLEWMGWIYFASGNSEYNQKFTGRVTMTRDTSINTAYMELSSLTSEDTAVYFCASLYDYDWYFDVWGQGTMVTVSSGGGGSGGGGSGGGGSDIVMTQTPLSLSVTPGQPASISCKSSQSLVHSNGNTYLHWYLQKPGQSPQLLIYKVSNRFSGVPDRFSGSGSGTDFTLKISRVEAEDVGIYYCSQSSIYPWTFGQGTKLEIKSGGGGSDIQMTQSPSSLSASVGDRVTITCKASQDVSTAVAWYQQKPGKAPKLLIYSASYRYTGVPDRFTGSGSGTDFTLTISSLQPEDFATYYCQQHYSTPPYTFGGGTKVEIKRGGGGSGGGGSGGGGSQVQLVQSGAEVKKPGASVKVSCKASGYAFSSSWMNWVRQAPGQGLEWIGRIYPGDGDAKYNGKFKGKATLTADKSTSTAYMELSSLRSEDTAVYYCARSTMIATGAMDYWGQGTLVTVSSSGGGGSEVQLVESGGGLVQPGGSLKLSCAASGFTFNKYAMNWVRQAPGKGLEWVARIRSKYNNYATYYADSVKDRFTISRDDSKNTAYLQMNNLKTEDTAVYYCVRHGNFGNSYISYWAYWGQGTLVTVSSGGGGSGGGGSGGGGSQTVVTQEPSLTVSPGGTVTLTCGSSTGAVTSGNYPNWVQQKPGQAPRGLIGGTKFLAPGTPARFSGSLLGGKAALTLSGVQPEDEAEYYCVLWYSNRWVFGGGTKLTVL

SEQ ID NO: 1443 - protein, 1239 aa, Artificial Sequence
  Synthetic
QVQLVQSGAEVKKPGASVKVSCKASGYSFPDYYINWVRQAPGQGLEWMGWIYFASGNSEYNQKFTGRVTMTRDTSINTAYMELSSLTSEDTAVYFCASLYDYDWYFDVWGQGTMVTVSSGGGGSGGGGSGGGGSDIVMTQTPLSLSVTPGQPASISCKSSQSLVHSNGNTYLHWYLQKPGQSPQLLIYKVSNRFSGVPDRFSGSGSGTDFTLKISRVEAEDVGIYYCSQSSIYPWTFGQGTKLEIKSGGGGSDIQMTQSPSSLSASVGDRVTITCKASQDVSTAVAWYQQKPGKAPKLLIYSASYRYTGVPDRFTGSGSGTDFTLTISSLQPEDFATYYCQQHYSTPPYTFGGGTKVEIKRGGGGSGGGGSGGGGSQVQLVQSGAEVKKPGASVKVSCKASGYAFSSSWMNWVRQAPGQGLEWIGRIYPGDGDAKYNGKFKGKATLTADKSTSTAYMELSSLRSEDTAVYYCARSTMIATGAMDYWGQGTLVTVSSSGGGGSEVQLVESGGGLVQPGGSLKLSCAASGFTFNKYAMNWVRQAPGKGLEWVARIRSKYNNYATYYADSVKDRFTISRDDSKNTAYLQMNNLKTEDTAVYYCVRHGNFGNSYISYWAYWGQGTLVTVSSGGGGSGGGGSGGGGSQTVVTQEPSLTVSPGGTVTLTCGSSTGAVTSGNYPNWVQQKPGQAPRGLIGGTKFLAPGTPARFSGSLLGGKAALTLSGVQPEDEAEYYCVLWYSNRWVFGGGTKLTVLGGGGDKTHTCPPCPAPELLGGPSVFLFPPKPKDTLMISRTPEVTCVVVDVSHEDPEVKFNWYVDGVEVHNAKTKPCEEQYGSTYRCVSVLTVLHQDWLNGKEYKCKVSNKALPAPIEKTISKAKGQPREPQVYTLPPSREEMTKNQVSLTCLVKGFYPSDIAVEWESNGQPENNYKTTPPVLDSDGSFFLYSKLTVDKSRWQQGNVFSCSVMHEALHNHYTQKSLSLSPGKGGGGSGGGGSGGGGSGGGGSGGGGSGGGGSDKTHTCPPCPAPELLGGPSVFLFPPKPKDTLMISRTPEVTCVVVDVSHEDPEVKFNWYVDGVEVHNAKTKPCEEQYGSTYRCVSVLTVLHQDWLNGKEYKCKVSNKALPAPIEKTISKAKGQPREPQVYTLPPSREEMTKNQVSLTCLVKGFYPSDIAVEWESNGQPENNYKTTPPVLDSDGSFFLYSKLTVDKSRWQQGNVFSCSVMHEALHNHYTQKSLSLSPGK

SEQ ID NO: 1444 - protein, 496 aa, Artificial Sequence
  Synthetic
QVQLVQSGAEVKKPGASVKVSCKASGYSFPDYYINWVRQAPGQGLEWMGWIYFASGNSEYNQKFTGRVTMTRDTSINTAYMELSSLTSEDTAVYFCASLYDYDWYFDVWGQGTMVTVSSGGGGSGGGGSGGGGSDIVMTQTPLSLSVTPGQPASISCKSSQSLVHSNGNTYLHWYLQKPGQSPQLLIYKVSNRFSGVPDRFSGSGSGTDFTLKISRVEAEDVGIYYCSQSSIYPWTFGQGTKLEIKSGGGGSDIQMTQSPSSLSASVGDRVTITCKASQDVSTAVAWYQQKPGKAPKLLIYSASYRYTGVPDRFTGSGSGTDFTLTISSLQPEDFATYYCQQHYSTPPYTFGCGTKVEIKRGGGGSGGGGSGGGGSQVQLVQSGAEVKKPGASVKVSCKASGYAFSSSWMNWVRQAPGQCLEWIGRIYPGDADAKYNAKFKGKATLTADKSTSTAYMELSSLRSEDTAVYYCARSTMIATGAMDYWGQGTLVTVSS

SEQ ID NO: 1445 - protein, 751 aa, Artificial Sequence
  Synthetic
QVQLVQSGAEVKKPGASVKVSCKASGYSFPDYYINWVRQAPGQGLEWMGWIYFASGNSEYNQKFTGRVTMTRDTSINTAYMELSSLTSEDTAVYFCASLYDYDWYFDVWGQGTMVTVSSGGGGSGGGGSGGGGSDIVMTQTPLSLSVTPGQPASISCKSSQSLVHSNGNTYLHWYLQKPGQSPQLLIYKVSNRFSGVPDRFSGSGSGTDFTLKISRVEAEDVGIYYCSQSSIYPWTFGQGTKLEIKSGGGGSDIQMTQSPSSLSASVGDRVTITCKASQDVSTAVAWYQQKPGKAPKLLIYSASYRYTGVPDRFTGSGSGTDFTLTISSLQPEDFATYYCQQHYSTPPYTFGCGTKVEIKRGGGGSGGGGSGGGGSQVQLVQSGAEVKKPGASVKVSCKASGYAFSSSWMNWVRQAPGQCLEWIGRIYPGDADAKYNAKFKGKATLTADKSTSTAYMELSSLRSEDTAVYYCARSTMIATGAMDYWGQGTLVTVSSSGGGGSEVQLVESGGGLVQPGGSLKLSCAASGFTFNKYAMNWVRQAPGKGLEWVARIRSKYNNYATYYADSVKDRFTISRDDSKNTAYLQMNNLKTEDTAVYYCVRHGNFGNSYISYWAYWGQGTLVTVSSGGGGSGGGGSGGGGSQTVVTQEPSLTVSPGGTVTLTCGSSTGAVTSGNYPNWVQQKPGQAPRGLIGGTKFLAPGTPARFSGSLLGGKAALTLSGVQPEDEAEYYCVLWYSNRWVFGGGTKLTVL

SEQ ID NO: 1446 - protein, 1239 aa, Artificial Sequence
  Synthetic
QVQLVQSGAEVKKPGASVKVSCKASGYSFPDYYINWVRQAPGQGLEWMGWIYFASGNSEYNQKFTGRVTMTRDTSINTAYMELSSLTSEDTAVYFCASLYDYDWYFDVWGQGTMVTVSSGGGGSGGGGSGGGGSDIVMTQTPLSLSVTPGQPASISCKSSQSLVHSNGNTYLHWYLQKPGQSPQLLIYKVSNRFSGVPDRFSGSGSGTDFTLKISRVEAEDVGIYYCSQSSIYPWTFGQGTKLEIKSGGGGSDIQMTQSPSSLSASVGDRVTITCKASQDVSTAVAWYQQKPGKAPKLLIYSASYRYTGVPDRFTGSGSGTDFTLTISSLQPEDFATYYCQQHYSTPPYTFGCGTKVEIKRGGGGSGGGGSGGGGSQVQLVQSGAEVKKPGASVKVSCKASGYAFSSSWMNWVRQAPGQCLEWIGRIYPGDADAKYNAKFKGKATLTADKSTSTAYMELSSLRSEDTAVYYCARSTMIATGAMDYWGQGTLVTVSSSGGGGSEVQLVESGGGLVQPGGSLKLSCAASGFTFNKYAMNWVRQAPGKGLEWVARIRSKYNNYATYYADSVKDRFTISRDDSKNTAYLQMNNLKTEDTAVYYCVRHGNFGNSYISYWAYWGQGTLVTVSSGGGGSGGGGSGGGGSQTVVTQEPSLTVSPGGTVTLTCGSSTGAVTSGNYPNWVQQKPGQAPRGLIGGTKFLAPGTPARFSGSLLGGKAALTLSGVQPEDEAEYYCVLWYSNRWVFGGGTKLTVLGGGGDKTHTCPPCPAPELLGGPSVFLFPPKPKDTLMISRTPEVTCVVVDVSHEDPEVKFNWYVDGVEVHNAKTKPCEEQYGSTYRCVSVLTVLHQDWLNGKEYKCKVSNKALPAPIEKTISKAKGQPREPQVYTLPPSREEMTKNQVSLTCLVKGFYPSDIAVEWESNGQPENNYKTTPPVLDSDGSFFLYSKLTVDKSRWQQGNVFSCSVMHEALHNHYTQKSLSLSPGKGGGGSGGGGSGGGGSGGGGSGGGGSGGGGSDKTHTCPPCPAPELLGGPSVFLFPPKPKDTLMISRTPEVTCVVVDVSHEDPEVKFNWYVDGVEVHNAKTKPCEEQYGSTYRCVSVLTVLHQDWLNGKEYKCKVSNKALPAPIEKTISKAKGQPREPQVYTLPPSREEMTKNQVSLTCLVKGFYPSDIAVEWESNGQPENNYKTTPPVLDSDGSFFLYSKLTVDKSRWQQGNVFSCSVMHEALHNHYTQKSLSLSPGK

SEQ ID NO: 1447 - protein, 493 aa, Artificial Sequence
  Synthetic
QVQLVQSGAEVKKPGASVKVSCKASGYTFTNHIIHWVRQAPGQCLEWMGYINPYPGYHAYNEKFQGRATMTSDTSTSTVYMELSSLRSEDTAVYYCARDGYYRDTDVLDYWGQGTLVTVSSGGGGSGGGGSGGGGSDIQMTQSPSSLSASVGDRVTITCQASQDISNYLNWYQQKPGKAPKLLIYYTSRLHTGVPSRFSGSGSGTDFTFTISSLEPEDIATYYCQQGNTLPWTFGCGTKVEIKSGGGGSDIQMTQSPSSLSASVGDRVTITCKASQDVSTAVAWYQQKPGKAPKLLIYSASYRYTGVPDRFTGSGSGTDFTLTISSLQPEDFATYYCQQHYSTPPYTFGGGTKVEIKRGGGGSGGGGSGGGGSQVQLVQSGAEVKKPGASVKVSCKASGYAFSSSWMNWVRQAPGQGLEWIGRIYPGDGDTKYNAKFKGKATLTADKSTSTAYMELSSLRSEDTAVYYCARSTMIATGAMDYWGQGTLVTVSS

SEQ ID NO: 1448 - protein, 748 aa, Artificial Sequence
  Synthetic
QVQLVQSGAEVKKPGASVKVSCKASGYTFTNHIIHWVRQAPGQCLEWMGYINPYPGYHAYNEKFQGRATMTSDTSTSTVYMELSSLRSEDTAVYYCARDGYYRDTDVLDYWGQGTLVTVSSGGGGSGGGGSGGGGSDIQMTQSPSSLSASVGDRVTITCQASQDISNYLNWYQQKPGKAPKLLIYYTSRLHTGVPSRFSGSGSGTDFTFTISSLEPEDIATYYCQQGNTLPWTFGCGTKVEIKSGGGGSDIQMTQSPSSLSASVGDRVTITCKASQDVSTAVAWYQQKPGKAPKLLIYSASYRYTGVPDRFTGSGSGTDFTLTISSLQPEDFATYYCQQHYSTPPYTFGGGTKVEIKRGGGGSGGGGSGGGGSQVQLVQSGAEVKKPGASVKVSCKASGYAFSSSWMNWVRQAPGQGLEWIGRIYPGDGDTKYNAKFKGKATLTADKSTSTAYMELSSLRSEDTAVYYCARSTMIATGAMDYWGQGTLVTVSSSGGGGSEVQLVESGGGLVQPGGSLKLSCAASGFTFNKYAMNWVRQAPGKGLEWVARIRSKYNNYATYYADSVKDRFTISRDDSKNTAYLQMNNLKTEDTAVYYCVRHGNFGNSYISYWAYWGQGTLVTVSSGGGGSGGGGSGGGGSQTVVTQEPSLTVSPGGTVTLTCGSSTGAVTSGNYPNWVQQKPGQAPRGLIGGTKFLAPGTPARFSGSLLGGKAALTLSGVQPEDEAEYYCVLWYSNRWVFGGGTKLTVL

SEQ ID NO: 1449 - protein, 1236 aa, Artificial Sequence
  Synthetic
QVQLVQSGAEVKKPGASVKVSCKASGYTFTNHIIHWVRQAPGQCLEWMGYINPYPGYHAYNEKFQGRATMTSDTSTSTVYMELSSLRSEDTAVYYCARDGYYRDTDVLDYWGQGTLVTVSSGGGGSGGGGSGGGGSDIQMTQSPSSLSASVGDRVTITCQASQDISNYLNWYQQKPGKAPKLLIYYTSRLHTGVPSRFSGSGSGTDFTFTISSLEPEDIATYYCQQGNTLPWTFGCGTKVEIKSGGGGSDIQMTQSPSSLSASVGDRVTITCKASQDVSTAVAWYQQKPGKAPKLLIYSASYRYTGVPDRFTGSGSGTDFTLTISSLQPEDFATYYCQQHYSTPPYTFGGGTKVEIKRGGGGSGGGGSGGGGSQVQLVQSGAEVKKPGASVKVSCKASGYAFSSSWMNWVRQAPGQGLEWIGRIYPGDGDTKYNAKFKGKATLTADKSTSTAYMELSSLRSEDTAVYYCARSTMIATGAMDYWGQGTLVTVSSSGGGGSEVQLVESGGGLVQPGGSLKLSCAASGFTFNKYAMNWVRQAPGKGLEWVARIRSKYNNYATYYADSVKDRFTISRDDSKNTAYLQMNNLKTEDTAVYYCVRHGNFGNSYISYWAYWGQGTLVTVSSGGGGSGGGGSGGGGSQTVVTQEPSLTVSPGGTVTLTCGSSTGAVTSGNYPNWVQQKPGQAPRGLIGGTKFLAPGTPARFSGSLLGGKAALTLSGVQPEDEAEYYCVLWYSNRWVFGGGTKLTVLGGGGDKTHTCPPCPAPELLGGPSVFLFPPKPKDTLMISRTPEVTCVVVDVSHEDPEVKFNWYVDGVEVHNAKTKPCEEQYGSTYRCVSVLTVLHQDWLNGKEYKCKVSNKALPAPIEKTISKAKGQPREPQVYTLPPSREEMTKNQVSLTCLVKGFYPSDIAVEWESNGQPENNYKTTPPVLDSDGSFFLYSKLTVDKSRWQQGNVFSCSVMHEALHNHYTQKSLSLSPGKGGGGSGGGGSGGGGSGGGGSGGGGSGGGGSDKTHTCPPCPAPELLGGPSVFLFPPKPKDTLMISRTPEVTCVVVDVSHEDPEVKFNWYVDGVEVHNAKTKPCEEQYGSTYRCVSVLTVLHQDWLNGKEYKCKVSNKALPAPIEKTISKAKGQPREPQVYTLPPSREEMTKNQVSLTCLVKGFYPSDIAVEWESNGQPENNYKTTPPVLDSDGSFFLYSKLTVDKSRWQQGNVFSCSVMHEALHNHYTQKSLSLSPGK

SEQ ID NO: 1450 - protein, 493 aa, Artificial Sequence
  Synthetic
QVQLVQSGAEVKKPGASVKVSCKASGYTFTNHIIHWVRQAPGQCLEWMGYINPYPGYHAYNEKFQGRATMTSDTSTSTVYMELSSLRSEDTAVYYCARDGYYRDTDVLDYWGQGTLVTVSSGGGGSGGGGSGGGGSDIQMTQSPSSLSASVGDRVTITCQASQDISNYLNWYQQKPGKAPKLLIYYTSRLHTGVPSRFSGSGSGTDFTFTISSLEPEDIATYYCQQGNTLPWTFGCGTKVEIKSGGGGSDIQMTQSPSSLSASVGDRVTITCKASQDVSTAVAWYQQKPGKAPKLLIYSASYRYTGVPDRFTGSGSGTDFTLTISSLQPEDFATYYCQQHYSTPPYTFGGGTKVEIKRGGGGSGGGGSGGGGSQVQLVQSGAEVKKPGASVKVSCKASGYAFSSSWMNWVRQAPGQGLEWIGRIYPGDGDAKYNGKFKGKATLTADKSTSTAYMELSSLRSEDTAVYYCARSTMIATGAMDYWGQGTLVTVSS

SEQ ID NO: 1451 - protein, 748 aa, Artificial Sequence
  Synthetic
QVQLVQSGAEVKKPGASVKVSCKASGYTFTNHIIHWVRQAPGQCLEWMGYINPYPGYHAYNEKFQGRATMTSDTSTSTVYMELSSLRSEDTAVYYCARDGYYRDTDVLDYWGQGTLVTVSSGGGGSGGGGSGGGGSDIQMTQSPSSLSASVGDRVTITCQASQDISNYLNWYQQKPGKAPKLLIYYTSRLHTGVPSRFSGSGSGTDFTFTISSLEPEDIATYYCQQGNTLPWTFGCGTKVEIKSGGGGSDIQMTQSPSSLSASVGDRVTITCKASQDVSTAVAWYQQKPGKAPKLLIYSASYRYTGVPDRFTGSGSGTDFTLTISSLQPEDFATYYCQQHYSTPPYTFGGGTKVEIKRGGGGSGGGGSGGGGSQVQLVQSGAEVKKPGASVKVSCKASGYAFSSSWMNWVRQAPGQGLEWIGRIYPGDGDAKYNGKFKGKATLTADKSTSTAYMELSSLRSEDTAVYYCARSTMIATGAMDYWGQGTLVTVSSSGGGGSEVQLVESGGGLVQPGGSLKLSCAASGFTFNKYAMNWVRQAPGKGLEWVARIRSKYNNYATYYADSVKDRFTISRDDSKNTAYLQMNNLKTEDTAVYYCVRHGNFGNSYISYWAYWGQGTLVTVSSGGGGSGGGGSGGGGSQTVVTQEPSLTVSPGGTVTLTCGSSTGAVTSGNYPNWVQQKPGQAPRGLIGGTKFLAPGTPARFSGSLLGGKAALTLSGVQPEDEAEYYCVLWYSNRWVFGGGTKLTVL

SEQ ID NO: 1452 - protein, 1236 aa, Artificial Sequence
  Synthetic
QVQLVQSGAEVKKPGASVKVSCKASGYTFTNHIIHWVRQAPGQCLEWMGYINPYPGYHAYNEKFQGRATMTSDTSTSTVYMELSSLRSEDTAVYYCARDGYYRDTDVLDYWGQGTLVTVSSGGGGSGGGGSGGGGSDIQMTQSPSSLSASVGDRVTITCQASQDISNYLNWYQQKPGKAPKLLIYYTSRLHTGVPSRFSGSGSGTDFTFTISSLEPEDIATYYCQQGNTLPWTFGCGTKVEIKSGGGGSDIQMTQSPSSLSASVGDRVTITCKASQDVSTAVAWYQQKPGKAPKLLIYSASYRYTGVPDRFTGSGSGTDFTLTISSLQPEDFATYYCQQHYSTPPYTFGGGTKVEIKRGGGGSGGGGSGGGGSQVQLVQSGAEVKKPGASVKVSCKASGYAFSSSWMNWVRQAPGQGLEWIGRIYPGDGDAKYNGKFKGKATLTADKSTSTAYMELSSLRSEDTAVYYCARSTMIATGAMDYWGQGTLVTVSSSGGGGSEVQLVESGGGLVQPGGSLKLSCAASGFTFNKYAMNWVRQAPGKGLEWVARIRSKYNNYATYYADSVKDRFTISRDDSKNTAYLQMNNLKTEDTAVYYCVRHGNFGNSYISYWAYWGQGTLVTVSSGGGGSGGGGSGGGGSQTVVTQEPSLTVSPGGTVTLTCGSSTGAVTSGNYPNWVQQKPGQAPRGLIGGTKFLAPGTPARFSGSLLGGKAALTLSGVQPEDEAEYYCVLWYSNRWVFGGGTKLTVLGGGGDKTHTCPPCPAPELLGGPSVFLFPPKPKDTLMISRTPEVTCVVVDVSHEDPEVKFNWYVDGVEVHNAKTKPCEEQYGSTYRCVSVLTVLHQDWLNGKEYKCKVSNKALPAPIEKTISKAKGQPREPQVYTLPPSREEMTKNQVSLTCLVKGFYPSDIAVEWESNGQPENNYKTTPPVLDSDGSFFLYSKLTVDKSRWQQGNVFSCSVMHEALHNHYTQKSLSLSPGKGGGGSGGGGSGGGGSGGGGSGGGGSGGGGSDKTHTCPPCPAPELLGGPSVFLFPPKPKDTLMISRTPEVTCVVVDVSHEDPEVKFNWYVDGVEVHNAKTKPCEEQYGSTYRCVSVLTVLHQDWLNGKEYKCKVSNKALPAPIEKTISKAKGQPREPQVYTLPPSREEMTKNQVSLTCLVKGFYPSDIAVEWESNGQPENNYKTTPPVLDSDGSFFLYSKLTVDKSRWQQGNVFSCSVMHEALHNHYTQKSLSLSPGK

SEQ ID NO: 1453 - protein, 493 aa, Artificial Sequence
  Synthetic
QVQLVQSGAEVKKPGASVKVSCKASGYTFTNHIIHWVRQAPGQCLEWMGYINPYPGYHAYNEKFQGRATMTSDTSTSTVYMELSSLRSEDTAVYYCARDGYYRDTDVLDYWGQGTLVTVSSGGGGSGGGGSGGGGSDIQMTQSPSSLSASVGDRVTITCQASQDISNYLNWYQQKPGKAPKLLIYYTSRLHTGVPSRFSGSGSGTDFTFTISSLEPEDIATYYCQQGNTLPWTFGCGTKVEIKSGGGGSDIQMTQSPSSLSASVGDRVTITCKASQDVSTAVAWYQQKPGKAPKLLIYSASYRYTGVPDRFTGSGSGTDFTLTISSLQPEDFATYYCQQHYSTPPYTFGCGTKVEIKRGGGGSGGGGSGGGGSQVQLVQSGAEVKKPGASVKVSCKASGYAFSSSWMNWVRQAPGQCLEWIGRIYPGDADAKYNAKFKGKATLTADKSTSTAYMELSSLRSEDTAVYYCARSTMIATGAMDYWGQGTLVTVSS

SEQ ID NO: 1454 - protein, 748 aa, Artificial Sequence
  Synthetic
QVQLVQSGAEVKKPGASVKVSCKASGYTFTNHIIHWVRQAPGQCLEWMGYINPYPGYHAYNEKFQGRATMTSDTSTSTVYMELSSLRSEDTAVYYCARDGYYRDTDVLDYWGQGTLVTVSSGGGGSGGGGSGGGGSDIQMTQSPSSLSASVGDRVTITCQASQDISNYLNWYQQKPGKAPKLLIYYTSRLHTGVPSRFSGSGSGTDFTFTISSLEPEDIATYYCQQGNTLPWTFGCGTKVEIKSGGGGSDIQMTQSPSSLSASVGDRVTITCKASQDVSTAVAWYQQKPGKAPKLLIYSASYRYTGVPDRFTGSGSGTDFTLTISSLQPEDFATYYCQQHYSTPPYTFGCGTKVEIKRGGGGSGGGGSGGGGSQVQLVQSGAEVKKPGASVKVSCKASGYAFSSSWMNWVRQAPGQCLEWIGRIYPGDADAKYNAKFKGKATLTADKSTSTAYMELSSLRSEDTAVYYCARSTMIATGAMDYWGQGTLVTVSSSGGGGSEVQLVESGGGLVQPGGSLKLSCAASGFTFNKYAMNWVRQAPGKGLEWVARIRSKYNNYATYYADSVKDRFTISRDDSKNTAYLQMNNLKTEDTAVYYCVRHGNFGNSYISYWAYWGQGTLVTVSSGGGGSGGGGSGGGGSQTVVTQEPSLTVSPGGTVTLTCGSSTGAVTSGNYPNWVQQKPGQAPRGLIGGTKFLAPGTPARFSGSLLGGKAALTLSGVQPEDEAEYYCVLWYSNRWVFGGGTKLTVL

SEQ ID NO: 1455 - protein, 1236 aa, Artificial Sequence
  Synthetic
QVQLVQSGAEVKKPGASVKVSCKASGYTFTNHIIHWVRQAPGQCLEWMGYINPYPGYHAYNEKFQGRATMTSDTSTSTVYMELSSLRSEDTAVYYCARDGYYRDTDVLDYWGQGTLVTVSSGGGGSGGGGSGGGGSDIQMTQSPSSLSASVGDRVTITCQASQDISNYLNWYQQKPGKAPKLLIYYTSRLHTGVPSRFSGSGSGTDFTFTISSLEPEDIATYYCQQGNTLPWTFGCGTKVEIKSGGGGSDIQMTQSPSSLSASVGDRVTITCKASQDVSTAVAWYQQKPGKAPKLLIYSASYRYTGVPDRFTGSGSGTDFTLTISSLQPEDFATYYCQQHYSTPPYTFGCGTKVEIKRGGGGSGGGGSGGGGSQVQLVQSGAEVKKPGASVKVSCKASGYAFSSSWMNWVRQAPGQCLEWIGRIYPGDADAKYNAKFKGKATLTADKSTSTAYMELSSLRSEDTAVYYCARSTMIATGAMDYWGQGTLVTVSSSGGGGSEVQLVESGGGLVQPGGSLKLSCAASGFTFNKYAMNWVRQAPGKGLEWVARIRSKYNNYATYYADSVKDRFTISRDDSKNTAYLQMNNLKTEDTAVYYCVRHGNFGNSYISYWAYWGQGTLVTVSSGGGGSGGGGSGGGGSQTVVTQEPSLTVSPGGTVTLTCGSSTGAVTSGNYPNWVQQKPGQAPRGLIGGTKFLAPGTPARFSGSLLGGKAALTLSGVQPEDEAEYYCVLWYSNRWVFGGGTKLTVLGGGGDKTHTCPPCPAPELLGGPSVFLFPPKPKDTLMISRTPEVTCVVVDVSHEDPEVKFNWYVDGVEVHNAKTKPCEEQYGSTYRCVSVLTVLHQDWLNGKEYKCKVSNKALPAPIEKTISKAKGQPREPQVYTLPPSREEMTKNQVSLTCLVKGFYPSDIAVEWESNGQPENNYKTTPPVLDSDGSFFLYSKLTVDKSRWQQGNVFSCSVMHEALHNHYTQKSLSLSPGKGGGGSGGGGSGGGGSGGGGSGGGGSGGGGSDKTHTCPPCPAPELLGGPSVFLFPPKPKDTLMISRTPEVTCVVVDVSHEDPEVKFNWYVDGVEVHNAKTKPCEEQYGSTYRCVSVLTVLHQDWLNGKEYKCKVSNKALPAPIEKTISKAKGQPREPQVYTLPPSREEMTKNQVSLTCLVKGFYPSDIAVEWESNGQPENNYKTTPPVLDSDGSFFLYSKLTVDKSRWQQGNVFSCSVMHEALHNHYTQKSLSLSPGK

SEQ ID NO: 1456 - protein, 493 aa, Artificial Sequence
  Synthetic
EVQLVESGGGLVQPGGSLRLSCAASGFTFSNFDMAWVRQAPGKGLVWVSSITTGGGDTYYADSVKGRFTISRDNAKSTLYLQMDSLRSEDTAVYYCVRHGYYDGYHLFDYWGQGTLVTVSSGGGGSGGGGSGGGGSDIQMTQSPSSLSASVGDRVTITCRANQGISNNLNWYQQKPGKAPKPLIYYTSNLQSGVPSRFSGSGSGTDYTLTISSLQPEDFATYYCQQFTSLPYTFGQGTKLEIKSGGGGSDIQMTQSPSSLSASVGDRVTITCKASQDVSTAVAWYQQKPGKAPKLLIYSASYRYTGVPDRFTGSGSGTDFTLTISSLQPEDFATYYCQQHYSTPPYTFGGGTKVEIKRGGGGSGGGGSGGGGSQVQLVQSGAEVKKPGASVKVSCKASGYAFSSSWMNWVRQAPGQGLEWIGRIYPGDGDTKYNAKFKGKATLTADKSTSTAYMELSSLRSEDTAVYYCARSTMIATGAMDYWGQGTLVTVSS

SEQ ID NO: 1457 - protein, 748 aa, Artificial Sequence
  Synthetic
EVQLVESGGGLVQPGGSLRLSCAASGFTFSNFDMAWVRQAPGKGLVWVSSITTGGGDTYYADSVKGRFTISRDNAKSTLYLQMDSLRSEDTAVYYCVRHGYYDGYHLFDYWGQGTLVTVSSGGGGSGGGGSGGGGSDIQMTQSPSSLSASVGDRVTITCRANQGISNNLNWYQQKPGKAPKPLIYYTSNLQSGVPSRFSGSGSGTDYTLTISSLQPEDFATYYCQQFTSLPYTFGQGTKLEIKSGGGGSDIQMTQSPSSLSASVGDRVTITCKASQDVSTAVAWYQQKPGKAPKLLIYSASYRYTGVPDRFTGSGSGTDFTLTISSLQPEDFATYYCQQHYSTPPYTFGGGTKVEIKRGGGGSGGGGSGGGGSQVQLVQSGAEVKKPGASVKVSCKASGYAFSSSWMNWVRQAPGQGLEWIGRIYPGDGDTKYNAKFKGKATLTADKSTSTAYMELSSLRSEDTAVYYCARSTMIATGAMDYWGQGTLVTVSSSGGGGSEVQLVESGGGLVQPGGSLKLSCAASGFTFNKYAMNWVRQAPGKGLEWVARIRSKYNNYATYYADSVKDRFTISRDDSKNTAYLQMNNLKTEDTAVYYCVRHGNFGNSYISYWAYWGQGTLVTVSSGGGGSGGGGSGGGGSQTVVTQEPSLTVSPGGTVTLTCGSSTGAVTSGNYPNWVQQKPGQAPRGLIGGTKFLAPGTPARFSGSLLGGKAALTLSGVQPEDEAEYYCVLWYSNRWVFGGGTKLTVL

SEQ ID NO: 1458 - protein, 1236 aa, Artificial Sequence
  Synthetic
EVQLVESGGGLVQPGGSLRLSCAASGFTFSNFDMAWVRQAPGKGLVWVSSITTGGGDTYYADSVKGRFTISRDNAKSTLYLQMDSLRSEDTAVYYCVRHGYYDGYHLFDYWGQGTLVTVSSGGGGSGGGGSGGGGSDIQMTQSPSSLSASVGDRVTITCRANQGISNNLNWYQQKPGKAPKPLIYYTSNLQSGVPSRFSGSGSGTDYTLTISSLQPEDFATYYCQQFTSLPYTFGQGTKLEIKSGGGGSDIQMTQSPSSLSASVGDRVTITCKASQDVSTAVAWYQQKPGKAPKLLIYSASYRYTGVPDRFTGSGSGTDFTLTISSLQPEDFATYYCQQHYSTPPYTFGGGTKVEIKRGGGGSGGGGSGGGGSQVQLVQSGAEVKKPGASVKVSCKASGYAFSSSWMNWVRQAPGQGLEWIGRIYPGDGDTKYNAKFKGKATLTADKSTSTAYMELSSLRSEDTAVYYCARSTMIATGAMDYWGQGTLVTVSSSGGGGSEVQLVESGGGLVQPGGSLKLSCAASGFTFNKYAMNWVRQAPGKGLEWVARIRSKYNNYATYYADSVKDRFTISRDDSKNTAYLQMNNLKTEDTAVYYCVRHGNFGNSYISYWAYWGQGTLVTVSSGGGGSGGGGSGGGGSQTVVTQEPSLTVSPGGTVTLTCGSSTGAVTSGNYPNWVQQKPGQAPRGLIGGTKFLAPGTPARFSGSLLGGKAALTLSGVQPEDEAEYYCVLWYSNRWVFGGGTKLTVLGGGGDKTHTCPPCPAPELLGGPSVFLFPPKPKDTLMISRTPEVTCVVVDVSHEDPEVKFNWYVDGVEVHNAKTKPCEEQYGSTYRCVSVLTVLHQDWLNGKEYKCKVSNKALPAPIEKTISKAKGQPREPQVYTLPPSREEMTKNQVSLTCLVKGFYPSDIAVEWESNGQPENNYKTTPPVLDSDGSFFLYSKLTVDKSRWQQGNVFSCSVMHEALHNHYTQKSLSLSPGKGGGGSGGGGSGGGGSGGGGSGGGGSGGGGSDKTHTCPPCPAPELLGGPSVFLFPPKPKDTLMISRTPEVTCVVVDVSHEDPEVKFNWYVDGVEVHNAKTKPCEEQYGSTYRCVSVLTVLHQDWLNGKEYKCKVSNKALPAPIEKTISKAKGQPREPQVYTLPPSREEMTKNQVSLTCLVKGFYPSDIAVEWESNGQPENNYKTTPPVLDSDGSFFLYSKLTVDKSRWQQGNVFSCSVMHEALHNHYTQKSLSLSPGK

SEQ ID NO: 1459 - protein, 493 aa, Artificial Sequence
  Synthetic
EVQLVESGGGLVQPGGSLRLSCAASGFTFSNFDMAWVRQAPGKGLVWVSSITTGGGDTYYADSVKGRFTISRDNAKSTLYLQMDSLRSEDTAVYYCVRHGYYDGYHLFDYWGQGTLVTVSSGGGGSGGGGSGGGGSDIQMTQSPSSLSASVGDRVTITCRANQGISNNLNWYQQKPGKAPKPLIYYTSNLQSGVPSRFSGSGSGTDYTLTISSLQPEDFATYYCQQFTSLPYTFGQGTKLEIKSGGGGSDIQMTQSPSSLSASVGDRVTITCKASQDVSTAVAWYQQKPGKAPKLLIYSASYRYTGVPDRFTGSGSGTDFTLTISSLQPEDFATYYCQQHYSTPPYTFGGGTKVEIKRGGGGSGGGGSGGGGSQVQLVQSGAEVKKPGASVKVSCKASGYAFSSSWMNWVRQAPGQGLEWIGRIYPGDGDAKYNGKFKGKATLTADKSTSTAYMELSSLRSEDTAVYYCARSTMIATGAMDYWGQGTLVTVSS

SEQ ID NO: 1460 - protein, 748 aa, Artificial Sequence
  Synthetic
EVQLVESGGGLVQPGGSLRLSCAASGFTFSNFDMAWVRQAPGKGLVWVSSITTGGGDTYYADSVKGRFTISRDNAKSTLYLQMDSLRSEDTAVYYCVRHGYYDGYHLFDYWGQGTLVTVSSGGGGSGGGGSGGGGSDIQMTQSPSSLSASVGDRVTITCRANQGISNNLNWYQQKPGKAPKPLIYYTSNLQSGVPSRFSGSGSGTDYTLTISSLQPEDFATYYCQQFTSLPYTFGQGTKLEIKSGGGGSDIQMTQSPSSLSASVGDRVTITCKASQDVSTAVAWYQQKPGKAPKLLIYSASYRYTGVPDRFTGSGSGTDFTLTISSLQPEDFATYYCQQHYSTPPYTFGGGTKVEIKRGGGGSGGGGSGGGGSQVQLVQSGAEVKKPGASVKVSCKASGYAFSSSWMNWVRQAPGQGLEWIGRIYPGDGDAKYNGKFKGKATLTADKSTSTAYMELSSLRSEDTAVYYCARSTMIATGAMDYWGQGTLVTVSSSGGGGSEVQLVESGGGLVQPGGSLKLSCAASGFTFNKYAMNWVRQAPGKGLEWVARIRSKYNNYATYYADSVKDRFTISRDDSKNTAYLQMNNLKTEDTAVYYCVRHGNFGNSYISYWAYWGQGTLVTVSSGGGGSGGGGSGGGGSQTVVTQEPSLTVSPGGTVTLTCGSSTGAVTSGNYPNWVQQKPGQAPRGLIGGTKFLAPGTPARFSGSLLGGKAALTLSGVQPEDEAEYYCVLWYSNRWVFGGGTKLTVL

SEQ ID NO: 1461 - protein, 1236 aa, Artificial Sequence
  Synthetic
EVQLVESGGGLVQPGGSLRLSCAASGFTFSNFDMAWVRQAPGKGLVWVSSITTGGGDTYYADSVKGRFTISRDNAKSTLYLQMDSLRSEDTAVYYCVRHGYYDGYHLFDYWGQGTLVTVSSGGGGSGGGGSGGGGSDIQMTQSPSSLSASVGDRVTITCRANQGISNNLNWYQQKPGKAPKPLIYYTSNLQSGVPSRFSGSGSGTDYTLTISSLQPEDFATYYCQQFTSLPYTFGQGTKLEIKSGGGGSDIQMTQSPSSLSASVGDRVTITCKASQDVSTAVAWYQQKPGKAPKLLIYSASYRYTGVPDRFTGSGSGTDFTLTISSLQPEDFATYYCQQHYSTPPYTFGGGTKVEIKRGGGGSGGGGSGGGGSQVQLVQSGAEVKKPGASVKVSCKASGYAFSSSWMNWVRQAPGQGLEWIGRIYPGDGDAKYNGKFKGKATLTADKSTSTAYMELSSLRSEDTAVYYCARSTMIATGAMDYWGQGTLVTVSSSGGGGSEVQLVESGGGLVQPGGSLKLSCAASGFTFNKYAMNWVRQAPGKGLEWVARIRSKYNNYATYYADSVKDRFTISRDDSKNTAYLQMNNLKTEDTAVYYCVRHGNFGNSYISYWAYWGQGTLVTVSSGGGGSGGGGSGGGGSQTVVTQEPSLTVSPGGTVTLTCGSSTGAVTSGNYPNWVQQKPGQAPRGLIGGTKFLAPGTPARFSGSLLGGKAALTLSGVQPEDEAEYYCVLWYSNRWVFGGGTKLTVLGGGGDKTHTCPPCPAPELLGGPSVFLFPPKPKDTLMISRTPEVTCVVVDVSHEDPEVKFNWYVDGVEVHNAKTKPCEEQYGSTYRCVSVLTVLHQDWLNGKEYKCKVSNKALPAPIEKTISKAKGQPREPQVYTLPPSREEMTKNQVSLTCLVKGFYPSDIAVEWESNGQPENNYKTTPPVLDSDGSFFLYSKLTVDKSRWQQGNVFSCSVMHEALHNHYTQKSLSLSPGKGGGGSGGGGSGGGGSGGGGSGGGGSGGGGSDKTHTCPPCPAPELLGGPSVFLFPPKPKDTLMISRTPEVTCVVVDVSHEDPEVKFNWYVDGVEVHNAKTKPCEEQYGSTYRCVSVLTVLHQDWLNGKEYKCKVSNKALPAPIEKTISKAKGQPREPQVYTLPPSREEMTKNQVSLTCLVKGFYPSDIAVEWESNGQPENNYKTTPPVLDSDGSFFLYSKLTVDKSRWQQGNVFSCSVMHEALHNHYTQKSLSLSPGK

SEQ ID NO: 1462 - protein, 493 aa, Artificial Sequence
  Synthetic
EVQLVESGGGLVQPGGSLRLSCAASGFTFSNFDMAWVRQAPGKGLVWVSSITTGGGDTYYADSVKGRFTISRDNAKSTLYLQMDSLRSEDTAVYYCVRHGYYDGYHLFDYWGQGTLVTVSSGGGGSGGGGSGGGGSDIQMTQSPSSLSASVGDRVTITCRANQGISNNLNWYQQKPGKAPKPLIYYTSNLQSGVPSRFSGSGSGTDYTLTISSLQPEDFATYYCQQFTSLPYTFGQGTKLEIKSGGGGSDIQMTQSPSSLSASVGDRVTITCKASQDVSTAVAWYQQKPGKAPKLLIYSASYRYTGVPDRFTGSGSGTDFTLTISSLQPEDFATYYCQQHYSTPPYTFGCGTKVEIKRGGGGSGGGGSGGGGSQVQLVQSGAEVKKPGASVKVSCKASGYAFSSSWMNWVRQAPGQCLEWIGRIYPGDADAKYNAKFKGKATLTADKSTSTAYMELSSLRSEDTAVYYCARSTMIATGAMDYWGQGTLVTVSS

SEQ ID NO: 1463 - protein, 748 aa, Artificial Sequence
  Synthetic
EVQLVESGGGLVQPGGSLRLSCAASGFTFSNFDMAWVRQAPGKGLVWVSSITTGGGDTYYADSVKGRFTISRDNAKSTLYLQMDSLRSEDTAVYYCVRHGYYDGYHLFDYWGQGTLVTVSSGGGGSGGGGSGGGGSDIQMTQSPSSLSASVGDRVTITCRANQGISNNLNWYQQKPGKAPKPLIYYTSNLQSGVPSRFSGSGSGTDYTLTISSLQPEDFATYYCQQFTSLPYTFGQGTKLEIKSGGGGSDIQMTQSPSSLSASVGDRVTITCKASQDVSTAVAWYQQKPGKAPKLLIYSASYRYTGVPDRFTGSGSGTDFTLTISSLQPEDFATYYCQQHYSTPPYTFGCGTKVEIKRGGGGSGGGGSGGGGSQVQLVQSGAEVKKPGASVKVSCKASGYAFSSSWMNWVRQAPGQCLEWIGRIYPGDADAKYNAKFKGKATLTADKSTSTAYMELSSLRSEDTAVYYCARSTMIATGAMDYWGQGTLVTVSSSGGGGSEVQLVESGGGLVQPGGSLKLSCAASGFTFNKYAMNWVRQAPGKGLEWVARIRSKYNNYATYYADSVKDRFTISRDDSKNTAYLQMNNLKTEDTAVYYCVRHGNFGNSYISYWAYWGQGTLVTVSSGGGGSGGGGSGGGGSQTVVTQEPSLTVSPGGTVTLTCGSSTGAVTSGNYPNWVQQKPGQAPRGLIGGTKFLAPGTPARFSGSLLGGKAALTLSGVQPEDEAEYYCVLWYSNRWVFGGGTKLTVL

SEQ ID NO: 1464 - protein, 1236 aa, Artificial Sequence
  Synthetic
EVQLVESGGGLVQPGGSLRLSCAASGFTFSNFDMAWVRQAPGKGLVWVSSITTGGGDTYYADSVKGRFTISRDNAKSTLYLQMDSLRSEDTAVYYCVRHGYYDGYHLFDYWGQGTLVTVSSGGGGSGGGGSGGGGSDIQMTQSPSSLSASVGDRVTITCRANQGISNNLNWYQQKPGKAPKPLIYYTSNLQSGVPSRFSGSGSGTDYTLTISSLQPEDFATYYCQQFTSLPYTFGQGTKLEIKSGGGGSDIQMTQSPSSLSASVGDRVTITCKASQDVSTAVAWYQQKPGKAPKLLIYSASYRYTGVPDRFTGSGSGTDFTLTISSLQPEDFATYYCQQHYSTPPYTFGCGTKVEIKRGGGGSGGGGSGGGGSQVQLVQSGAEVKKPGASVKVSCKASGYAFSSSWMNWVRQAPGQCLEWIGRIYPGDADAKYNAKFKGKATLTADKSTSTAYMELSSLRSEDTAVYYCARSTMIATGAMDYWGQGTLVTVSSSGGGGSEVQLVESGGGLVQPGGSLKLSCAASGFTFNKYAMNWVRQAPGKGLEWVARIRSKYNNYATYYADSVKDRFTISRDDSKNTAYLQMNNLKTEDTAVYYCVRHGNFGNSYISYWAYWGQGTLVTVSSGGGGSGGGGSGGGGSQTVVTQEPSLTVSPGGTVTLTCGSSTGAVTSGNYPNWVQQKPGQAPRGLIGGTKFLAPGTPARFSGSLLGGKAALTLSGVQPEDEAEYYCVLWYSNRWVFGGGTKLTVLGGGGDKTHTCPPCPAPELLGGPSVFLFPPKPKDTLMISRTPEVTCVVVDVSHEDPEVKFNWYVDGVEVHNAKTKPCEEQYGSTYRCVSVLTVLHQDWLNGKEYKCKVSNKALPAPIEKTISKAKGQPREPQVYTLPPSREEMTKNQVSLTCLVKGFYPSDIAVEWESNGQPENNYKTTPPVLDSDGSFFLYSKLTVDKSRWQQGNVFSCSVMHEALHNHYTQKSLSLSPGKGGGGSGGGGSGGGGSGGGGSGGGGSGGGGSDKTHTCPPCPAPELLGGPSVFLFPPKPKDTLMISRTPEVTCVVVDVSHEDPEVKFNWYVDGVEVHNAKTKPCEEQYGSTYRCVSVLTVLHQDWLNGKEYKCKVSNKALPAPIEKTISKAKGQPREPQVYTLPPSREEMTKNQVSLTCLVKGFYPSDIAVEWESNGQPENNYKTTPPVLDSDGSFFLYSKLTVDKSRWQQGNVFSCSVMHEALHNHYTQKSLSLSPGK

SEQ ID NO: 1465 - protein, 496 aa, Artificial Sequence
  Synthetic
DIQMTQSPSSLSASVGDRVTITCKASQDVSTAVAWYQQKPGKAPKLLIYSASYRYTGVPDRFTGSGSGTDFTLTISSLQPEDFATYYCQQHYSTPPYTFGGGTKVEIKRGGGGSGGGGSGGGGSQVQLVQSGAEVKKPGASVKVSCKASGYAFSSSWMNWVRQAPGQGLEWIGRIYPGDGDTKYNAKFKGKATLTADKSTSTAYMELSSLRSEDTAVYYCARSTMIATGAMDYWGQGTLVTVSSSGGGGSQVQLVQSGAEVKKPGASVKVSCKASGYSFPDYYINWVRQAPGQGLEWMGWIYFASGNSEYNQKFTGRVTMTRDTSINTAYMELSSLTSEDTAVYFCASLYDYDWYFDVWGQGTMVTVSSGGGGSGGGGSGGGGSDIVMTQTPLSLSVTPGQPASISCKSSQSLVHSNGNTYLHWYLQKPGQSPQLLIYKVSNRFSGVPDRFSGSGSGTDFTLKISRVEAEDVGIYYCSQSSIYPWTFGQGTKLEIK

SEQ ID NO: 1466 - protein, 751 aa, Artificial Sequence
  Synthetic
DIQMTQSPSSLSASVGDRVTITCKASQDVSTAVAWYQQKPGKAPKLLIYSASYRYTGVPDRFTGSGSGTDFTLTISSLQPEDFATYYCQQHYSTPPYTFGGGTKVEIKRGGGGSGGGGSGGGGSQVQLVQSGAEVKKPGASVKVSCKASGYAFSSSWMNWVRQAPGQGLEWIGRIYPGDGDTKYNAKFKGKATLTADKSTSTAYMELSSLRSEDTAVYYCARSTMIATGAMDYWGQGTLVTVSSSGGGGSQVQLVQSGAEVKKPGASVKVSCKASGYSFPDYYINWVRQAPGQGLEWMGWIYFASGNSEYNQKFTGRVTMTRDTSINTAYMELSSLTSEDTAVYFCASLYDYDWYFDVWGQGTMVTVSSGGGGSGGGGSGGGGSDIVMTQTPLSLSVTPGQPASISCKSSQSLVHSNGNTYLHWYLQKPGQSPQLLIYKVSNRFSGVPDRFSGSGSGTDFTLKISRVEAEDVGIYYCSQSSIYPWTFGQGTKLEIKSGGGGSEVQLVESGGGLVQPGGSLKLSCAASGFTFNKYAMNWVRQAPGKGLEWVARIRSKYNNYATYYADSVKDRFTISRDDSKNTAYLQMNNLKTEDTAVYYCVRHGNFGNSYISYWAYWGQGTLVTVSSGGGGSGGGGSGGGGSQTVVTQEPSLTVSPGGTVTLTCGSSTGAVTSGNYPNWVQQKPGQAPRGLIGGTKFLAPGTPARFSGSLLGGKAALTLSGVQPEDEAEYYCVLWYSNRWVFGGGTKLTVL

SEQ ID NO: 1467 - protein, 1239 aa, Artificial Sequence
  Synthetic
DIQMTQSPSSLSASVGDRVTITCKASQDVSTAVAWYQQKPGKAPKLLIYSASYRYTGVPDRFTGSGSGTDFTLTISSLQPEDFATYYCQQHYSTPPYTFGGGTKVEIKRGGGGSGGGGSGGGGSQVQLVQSGAEVKKPGASVKVSCKASGYAFSSSWMNWVRQAPGQGLEWIGRIYPGDGDTKYNAKFKGKATLTADKSTSTAYMELSSLRSEDTAVYYCARSTMIATGAMDYWGQGTLVTVSSSGGGGSQVQLVQSGAEVKKPGASVKVSCKASGYSFPDYYINWVRQAPGQGLEWMGWIYFASGNSEYNQKFTGRVTMTRDTSINTAYMELSSLTSEDTAVYFCASLYDYDWYFDVWGQGTMVTVSSGGGGSGGGGSGGGGSDIVMTQTPLSLSVTPGQPASISCKSSQSLVHSNGNTYLHWYLQKPGQSPQLLIYKVSNRFSGVPDRFSGSGSGTDFTLKISRVEAEDVGIYYCSQSSIYPWTFGQGTKLEIKSGGGGSEVQLVESGGGLVQPGGSLKLSCAASGFTFNKYAMNWVRQAPGKGLEWVARIRSKYNNYATYYADSVKDRFTISRDDSKNTAYLQMNNLKTEDTAVYYCVRHGNFGNSYISYWAYWGQGTLVTVSSGGGGSGGGGSGGGGSQTVVTQEPSLTVSPGGTVTLTCGSSTGAVTSGNYPNWVQQKPGQAPRGLIGGTKFLAPGTPARFSGSLLGGKAALTLSGVQPEDEAEYYCVLWYSNRWVFGGGTKLTVLGGGGDKTHTCPPCPAPELLGGPSVFLFPPKPKDTLMISRTPEVTCVVVDVSHEDPEVKFNWYVDGVEVHNAKTKPCEEQYGSTYRCVSVLTVLHQDWLNGKEYKCKVSNKALPAPIEKTISKAKGQPREPQVYTLPPSREEMTKNQVSLTCLVKGFYPSDIAVEWESNGQPENNYKTTPPVLDSDGSFFLYSKLTVDKSRWQQGNVFSCSVMHEALHNHYTQKSLSLSPGKGGGGSGGGGSGGGGSGGGGSGGGGSGGGGSDKTHTCPPCPAPELLGGPSVFLFPPKPKDTLMISRTPEVTCVVVDVSHEDPEVKFNWYVDGVEVHNAKTKPCEEQYGSTYRCVSVLTVLHQDWLNGKEYKCKVSNKALPAPIEKTISKAKGQPREPQVYTLPPSREEMTKNQVSLTCLVKGFYPSDIAVEWESNGQPENNYKTTPPVLDSDGSFFLYSKLTVDKSRWQQGNVFSCSVMHEALHNHYTQKSLSLSPGK

SEQ ID NO: 1468 - protein, 493 aa, Artificial Sequence
  Synthetic
DIQMTQSPSSLSASVGDRVTITCKASQDVSTAVAWYQQKPGKAPKLLIYSASYRYTGVPDRFTGSGSGTDFTLTISSLQPEDFATYYCQQHYSTPPYTFGGGTKVEIKRGGGGSGGGGSGGGGSQVQLVQSGAEVKKPGASVKVSCKASGYAFSSSWMNWVRQAPGQGLEWIGRIYPGDGDTKYNAKFKGKATLTADKSTSTAYMELSSLRSEDTAVYYCARSTMIATGAMDYWGQGTLVTVSSSGGGGSEVQLVESGGGLVQPGGSLRLSCAASGFTFSNFDMAWVRQAPGKGLVWVSSITTGGGDTYYADSVKGRFTISRDNAKSTLYLQMDSLRSEDTAVYYCVRHGYYDGYHLFDYWGQGTLVTVSSGGGGSGGGGSGGGGSDIQMTQSPSSLSASVGDRVTITCRANQGISNNLNWYQQKPGKAPKPLIYYTSNLQSGVPSRFSGSGSGTDYTLTISSLQPEDFATYYCQQFTSLPYTFGQGTKLEIK

SEQ ID NO: 1469 - protein, 748 aa, Artificial Sequence
  Synthetic
DIQMTQSPSSLSASVGDRVTITCKASQDVSTAVAWYQQKPGKAPKLLIYSASYRYTGVPDRFTGSGSGTDFTLTISSLQPEDFATYYCQQHYSTPPYTFGGGTKVEIKRGGGGSGGGGSGGGGSQVQLVQSGAEVKKPGASVKVSCKASGYAFSSSWMNWVRQAPGQGLEWIGRIYPGDGDTKYNAKFKGKATLTADKSTSTAYMELSSLRSEDTAVYYCARSTMIATGAMDYWGQGTLVTVSSSGGGGSEVQLVESGGGLVQPGGSLRLSCAASGFTFSNFDMAWVRQAPGKGLVWVSSITTGGGDTYYADSVKGRFTISRDNAKSTLYLQMDSLRSEDTAVYYCVRHGYYDGYHLFDYWGQGTLVTVSSGGGGSGGGGSGGGGSDIQMTQSPSSLSASVGDRVTITCRANQGISNNLNWYQQKPGKAPKPLIYYTSNLQSGVPSRFSGSGSGTDYTLTISSLQPEDFATYYCQQFTSLPYTFGQGTKLEIKSGGGGSEVQLVESGGGLVQPGGSLKLSCAASGFTFNKYAMNWVRQAPGKGLEWVARIRSKYNNYATYYADSVKDRFTISRDDSKNTAYLQMNNLKTEDTAVYYCVRHGNFGNSYISYWAYWGQGTLVTVSSGGGGSGGGGSGGGGSQTVVTQEPSLTVSPGGTVTLTCGSSTGAVTSGNYPNWVQQKPGQAPRGLIGGTKFLAPGTPARFSGSLLGGKAALTLSGVQPEDEAEYYCVLWYSNRWVFGGGTKLTVL

SEQ ID NO: 1470 - protein, 1236 aa, Artificial Sequence
  Synthetic
DIQMTQSPSSLSASVGDRVTITCKASQDVSTAVAWYQQKPGKAPKLLIYSASYRYTGVPDRFTGSGSGTDFTLTISSLQPEDFATYYCQQHYSTPPYTFGGGTKVEIKRGGGGSGGGGSGGGGSQVQLVQSGAEVKKPGASVKVSCKASGYAFSSSWMNWVRQAPGQGLEWIGRIYPGDGDTKYNAKFKGKATLTADKSTSTAYMELSSLRSEDTAVYYCARSTMIATGAMDYWGQGTLVTVSSSGGGGSEVQLVESGGGLVQPGGSLRLSCAASGFTFSNFDMAWVRQAPGKGLVWVSSITTGGGDTYYADSVKGRFTISRDNAKSTLYLQMDSLRSEDTAVYYCVRHGYYDGYHLFDYWGQGTLVTVSSGGGGSGGGGSGGGGSDIQMTQSPSSLSASVGDRVTITCRANQGISNNLNWYQQKPGKAPKPLIYYTSNLQSGVPSRFSGSGSGTDYTLTISSLQPEDFATYYCQQFTSLPYTFGQGTKLEIKSGGGGSEVQLVESGGGLVQPGGSLKLSCAASGFTFNKYAMNWVRQAPGKGLEWVARIRSKYNNYATYYADSVKDRFTISRDDSKNTAYLQMNNLKTEDTAVYYCVRHGNFGNSYISYWAYWGQGTLVTVSSGGGGSGGGGSGGGGSQTVVTQEPSLTVSPGGTVTLTCGSSTGAVTSGNYPNWVQQKPGQAPRGLIGGTKFLAPGTPARFSGSLLGGKAALTLSGVQPEDEAEYYCVLWYSNRWVFGGGTKLTVLGGGGDKTHTCPPCPAPELLGGPSVFLFPPKPKDTLMISRTPEVTCVVVDVSHEDPEVKFNWYVDGVEVHNAKTKPCEEQYGSTYRCVSVLTVLHQDWLNGKEYKCKVSNKALPAPIEKTISKAKGQPREPQVYTLPPSREEMTKNQVSLTCLVKGFYPSDIAVEWESNGQPENNYKTTPPVLDSDGSFFLYSKLTVDKSRWQQGNVFSCSVMHEALHNHYTQKSLSLSPGKGGGGSGGGGSGGGGSGGGGSGGGGSGGGGSDKTHTCPPCPAPELLGGPSVFLFPPKPKDTLMISRTPEVTCVVVDVSHEDPEVKFNWYVDGVEVHNAKTKPCEEQYGSTYRCVSVLTVLHQDWLNGKEYKCKVSNKALPAPIEKTISKAKGQPREPQVYTLPPSREEMTKNQVSLTCLVKGFYPSDIAVEWESNGQPENNYKTTPPVLDSDGSFFLYSKLTVDKSRWQQGNVFSCSVMHEALHNHYTQKSLSLSPGK

SEQ ID NO: 1471 - protein, 493 aa, Artificial Sequence
  Synthetic
DIQMTQSPSSLSASVGDRVTITCKASQDVSTAVAWYQQKPGKAPKLLIYSASYRYTGVPDRFTGSGSGTDFTLTISSLQPEDFATYYCQQHYSTPPYTFGGGTKVEIKRGGGGSGGGGSGGGGSQVQLVQSGAEVKKPGASVKVSCKASGYAFSSSWMNWVRQAPGQGLEWIGRIYPGDGDTKYNAKFKGKATLTADKSTSTAYMELSSLRSEDTAVYYCARSTMIATGAMDYWGQGTLVTVSSSGGGGSQVQLVQSGAEVKKPGASVKVSCKASGYTFTNHIIHWVRQAPGQCLEWMGYINPYPGYHAYNEKFQGRATMTSDTSTSTVYMELSSLRSEDTAVYYCARDGYYRDTDVLDYWGQGTLVTVSSGGGGSGGGGSGGGGSDIQMTQSPSSLSASVGDRVTITCQASQDISNYLNWYQQKPGKAPKLLIYYTSRLHTGVPSRFSGSGSGTDFTFTISSLEPEDIATYYCQQGNTLPWTFGCGTKVEIK

SEQ ID NO: 1472 - protein, 748 aa, Artificial Sequence
  Synthetic
DIQMTQSPSSLSASVGDRVTITCKASQDVSTAVAWYQQKPGKAPKLLIYSASYRYTGVPDRFTGSGSGTDFTLTISSLQPEDFATYYCQQHYSTPPYTFGGGTKVEIKRGGGGSGGGGSGGGGSQVQLVQSGAEVKKPGASVKVSCKASGYAFSSSWMNWVRQAPGQGLEWIGRIYPGDGDTKYNAKFKGKATLTADKSTSTAYMELSSLRSEDTAVYYCARSTMIATGAMDYWGQGTLVTVSSSGGGGSQVQLVQSGAEVKKPGASVKVSCKASGYTFTNHIIHWVRQAPGQCLEWMGYINPYPGYHAYNEKFQGRATMTSDTSTSTVYMELSSLRSEDTAVYYCARDGYYRDTDVLDYWGQGTLVTVSSGGGGSGGGGSGGGGSDIQMTQSPSSLSASVGDRVTITCQASQDISNYLNWYQQKPGKAPKLLIYYTSRLHTGVPSRFSGSGSGTDFTFTISSLEPEDIATYYCQQGNTLPWTFGCGTKVEIKSGGGGSEVQLVESGGGLVQPGGSLKLSCAASGFTFNKYAMNWVRQAPGKGLEWVARIRSKYNNYATYYADSVKDRFTISRDDSKNTAYLQMNNLKTEDTAVYYCVRHGNFGNSYISYWAYWGQGTLVTVSSGGGGSGGGGSGGGGSQTVVTQEPSLTVSPGGTVTLTCGSSTGAVTSGNYPNWVQQKPGQAPRGLIGGTKFLAPGTPARFSGSLLGGKAALTLSGVQPEDEAEYYCVLWYSNRWVFGGGTKLTVL

SEQ ID NO: 1473 - protein, 1236 aa, Artificial Sequence
  Synthetic
DIQMTQSPSSLSASVGDRVTITCKASQDVSTAVAWYQQKPGKAPKLLIYSASYRYTGVPDRFTGSGSGTDFTLTISSLQPEDFATYYCQQHYSTPPYTFGGGTKVEIKRGGGGSGGGGSGGGGSQVQLVQSGAEVKKPGASVKVSCKASGYAFSSSWMNWVRQAPGQGLEWIGRIYPGDGDTKYNAKFKGKATLTADKSTSTAYMELSSLRSEDTAVYYCARSTMIATGAMDYWGQGTLVTVSSSGGGGSQVQLVQSGAEVKKPGASVKVSCKASGYTFTNHIIHWVRQAPGQCLEWMGYINPYPGYHAYNEKFQGRATMTSDTSTSTVYMELSSLRSEDTAVYYCARDGYYRDTDVLDYWGQGTLVTVSSGGGGSGGGGSGGGGSDIQMTQSPSSLSASVGDRVTITCQASQDISNYLNWYQQKPGKAPKLLIYYTSRLHTGVPSRFSGSGSGTDFTFTISSLEPEDIATYYCQQGNTLPWTFGCGTKVEIKSGGGGSEVQLVESGGGLVQPGGSLKLSCAASGFTFNKYAMNWVRQAPGKGLEWVARIRSKYNNYATYYADSVKDRFTISRDDSKNTAYLQMNNLKTEDTAVYYCVRHGNFGNSYISYWAYWGQGTLVTVSSGGGGSGGGGSGGGGSQTVVTQEPSLTVSPGGTVTLTCGSSTGAVTSGNYPNWVQQKPGQAPRGLIGGTKFLAPGTPARFSGSLLGGKAALTLSGVQPEDEAEYYCVLWYSNRWVFGGGTKLTVLGGGGDKTHTCPPCPAPELLGGPSVFLFPPKPKDTLMISRTPEVTCVVVDVSHEDPEVKFNWYVDGVEVHNAKTKPCEEQYGSTYRCVSVLTVLHQDWLNGKEYKCKVSNKALPAPIEKTISKAKGQPREPQVYTLPPSREEMTKNQVSLTCLVKGFYPSDIAVEWESNGQPENNYKTTPPVLDSDGSFFLYSKLTVDKSRWQQGNVFSCSVMHEALHNHYTQKSLSLSPGKGGGGSGGGGSGGGGSGGGGSGGGGSGGGGSDKTHTCPPCPAPELLGGPSVFLFPPKPKDTLMISRTPEVTCVVVDVSHEDPEVKFNWYVDGVEVHNAKTKPCEEQYGSTYRCVSVLTVLHQDWLNGKEYKCKVSNKALPAPIEKTISKAKGQPREPQVYTLPPSREEMTKNQVSLTCLVKGFYPSDIAVEWESNGQPENNYKTTPPVLDSDGSFFLYSKLTVDKSRWQQGNVFSCSVMHEALHNHYTQKSLSLSPGK

SEQ ID NO: 1474 - protein, 496 aa, Artificial Sequence
  Synthetic
DIQMTQSPSSLSASVGDRVTITCKASQDVSTAVAWYQQKPGKAPKLLIYSASYRYTGVPDRFTGSGSGTDFTLTISSLQPEDFATYYCQQHYSTPPYTFGGGTKVEIKRGGGGSGGGGSGGGGSQVQLVQSGAEVKKPGASVKVSCKASGYAFSSSWMNWVRQAPGQGLEWIGRIYPGDGDAKYNGKFKGKATLTADKSTSTAYMELSSLRSEDTAVYYCARSTMIATGAMDYWGQGTLVTVSSSGGGGSQVQLVQSGAEVKKPGASVKVSCKASGYSFPDYYINWVRQAPGQGLEWMGWIYFASGNSEYNQKFTGRVTMTRDTSINTAYMELSSLTSEDTAVYFCASLYDYDWYFDVWGQGTMVTVSSGGGGSGGGGSGGGGSDIVMTQTPLSLSVTPGQPASISCKSSQSLVHSNGNTYLHWYLQKPGQSPQLLIYKVSNRFSGVPDRFSGSGSGTDFTLKISRVEAEDVGIYYCSQSSIYPWTFGQGTKLEIK

SEQ ID NO: 1475 - protein, 751 aa, Artificial Sequence
  Synthetic
DIQMTQSPSSLSASVGDRVTITCKASQDVSTAVAWYQQKPGKAPKLLIYSASYRYTGVPDRFTGSGSGTDFTLTISSLQPEDFATYYCQQHYSTPPYTFGGGTKVEIKRGGGGSGGGGSGGGGSQVQLVQSGAEVKKPGASVKVSCKASGYAFSSSWMNWVRQAPGQGLEWIGRIYPGDGDAKYNGKFKGKATLTADKSTSTAYMELSSLRSEDTAVYYCARSTMIATGAMDYWGQGTLVTVSSSGGGGSQVQLVQSGAEVKKPGASVKVSCKASGYSFPDYYINWVRQAPGQGLEWMGWIYFASGNSEYNQKFTGRVTMTRDTSINTAYMELSSLTSEDTAVYFCASLYDYDWYFDVWGQGTMVTVSSGGGGSGGGGSGGGGSDIVMTQTPLSLSVTPGQPASISCKSSQSLVHSNGNTYLHWYLQKPGQSPQLLIYKVSNRFSGVPDRFSGSGSGTDFTLKISRVEAEDVGIYYCSQSSIYPWTFGQGTKLEIKSGGGGSEVQLVESGGGLVQPGGSLKLSCAASGFTFNKYAMNWVRQAPGKGLEWVARIRSKYNNYATYYADSVKDRFTISRDDSKNTAYLQMNNLKTEDTAVYYCVRHGNFGNSYISYWAYWGQGTLVTVSSGGGGSGGGGSGGGGSQTVVTQEPSLTVSPGGTVTLTCGSSTGAVTSGNYPNWVQQKPGQAPRGLIGGTKFLAPGTPARFSGSLLGGKAALTLSGVQPEDEAEYYCVLWYSNRWVFGGGTKLTVL

SEQ ID NO: 1476 - protein, 1239 aa, Artificial Sequence
  Synthetic
DIQMTQSPSSLSASVGDRVTITCKASQDVSTAVAWYQQKPGKAPKLLIYSASYRYTGVPDRFTGSGSGTDFTLTISSLQPEDFATYYCQQHYSTPPYTFGGGTKVEIKRGGGGSGGGGSGGGGSQVQLVQSGAEVKKPGASVKVSCKASGYAFSSSWMNWVRQAPGQGLEWIGRIYPGDGDAKYNGKFKGKATLTADKSTSTAYMELSSLRSEDTAVYYCARSTMIATGAMDYWGQGTLVTVSSSGGGGSQVQLVQSGAEVKKPGASVKVSCKASGYSFPDYYINWVRQAPGQGLEWMGWIYFASGNSEYNQKFTGRVTMTRDTSINTAYMELSSLTSEDTAVYFCASLYDYDWYFDVWGQGTMVTVSSGGGGSGGGGSGGGGSDIVMTQTPLSLSVTPGQPASISCKSSQSLVHSNGNTYLHWYLQKPGQSPQLLIYKVSNRFSGVPDRFSGSGSGTDFTLKISRVEAEDVGIYYCSQSSIYPWTFGQGTKLEIKSGGGGSEVQLVESGGGLVQPGGSLKLSCAASGFTFNKYAMNWVRQAPGKGLEWVARIRSKYNNYATYYADSVKDRFTISRDDSKNTAYLQMNNLKTEDTAVYYCVRHGNFGNSYISYWAYWGQGTLVTVSSGGGGSGGGGSGGGGSQTVVTQEPSLTVSPGGTVTLTCGSSTGAVTSGNYPNWVQQKPGQAPRGLIGGTKFLAPGTPARFSGSLLGGKAALTLSGVQPEDEAEYYCVLWYSNRWVFGGGTKLTVLGGGGDKTHTCPPCPAPELLGGPSVFLFPPKPKDTLMISRTPEVTCVVVDVSHEDPEVKFNWYVDGVEVHNAKTKPCEEQYGSTYRCVSVLTVLHQDWLNGKEYKCKVSNKALPAPIEKTISKAKGQPREPQVYTLPPSREEMTKNQVSLTCLVKGFYPSDIAVEWESNGQPENNYKTTPPVLDSDGSFFLYSKLTVDKSRWQQGNVFSCSVMHEALHNHYTQKSLSLSPGKGGGGSGGGGSGGGGSGGGGSGGGGSGGGGSDKTHTCPPCPAPELLGGPSVFLFPPKPKDTLMISRTPEVTCVVVDVSHEDPEVKFNWYVDGVEVHNAKTKPCEEQYGSTYRCVSVLTVLHQDWLNGKEYKCKVSNKALPAPIEKTISKAKGQPREPQVYTLPPSREEMTKNQVSLTCLVKGFYPSDIAVEWESNGQPENNYKTTPPVLDSDGSFFLYSKLTVDKSRWQQGNVFSCSVMHEALHNHYTQKSLSLSPGK

SEQ ID NO: 1477 - protein, 493 aa, Artificial Sequence
  Synthetic
DIQMTQSPSSLSASVGDRVTITCKASQDVSTAVAWYQQKPGKAPKLLIYSASYRYTGVPDRFTGSGSGTDFTLTISSLQPEDFATYYCQQHYSTPPYTFGGGTKVEIKRGGGGSGGGGSGGGGSQVQLVQSGAEVKKPGASVKVSCKASGYAFSSSWMNWVRQAPGQGLEWIGRIYPGDGDAKYNGKFKGKATLTADKSTSTAYMELSSLRSEDTAVYYCARSTMIATGAMDYWGQGTLVTVSSSGGGGSEVQLVESGGGLVQPGGSLRLSCAASGFTFSNFDMAWVRQAPGKGLVWVSSITTGGGDTYYADSVKGRFTISRDNAKSTLYLQMDSLRSEDTAVYYCVRHGYYDGYHLFDYWGQGTLVTVSSGGGGSGGGGSGGGGSDIQMTQSPSSLSASVGDRVTITCRANQGISNNLNWYQQKPGKAPKPLIYYTSNLQSGVPSRFSGSGSGTDYTLTISSLQPEDFATYYCQQFTSLPYTFGQGTKLEIK

SEQ ID NO: 1478 - protein, 748 aa, Artificial Sequence
  Synthetic
DIQMTQSPSSLSASVGDRVTITCKASQDVSTAVAWYQQKPGKAPKLLIYSASYRYTGVPDRFTGSGSGTDFTLTISSLQPEDFATYYCQQHYSTPPYTFGGGTKVEIKRGGGGSGGGGSGGGGSQVQLVQSGAEVKKPGASVKVSCKASGYAFSSSWMNWVRQAPGQGLEWIGRIYPGDGDAKYNGKFKGKATLTADKSTSTAYMELSSLRSEDTAVYYCARSTMIATGAMDYWGQGTLVTVSSSGGGGSEVQLVESGGGLVQPGGSLRLSCAASGFTFSNFDMAWVRQAPGKGLVWVSSITTGGGDTYYADSVKGRFTISRDNAKSTLYLQMDSLRSEDTAVYYCVRHGYYDGYHLFDYWGQGTLVTVSSGGGGSGGGGSGGGGSDIQMTQSPSSLSASVGDRVTITCRANQGISNNLNWYQQKPGKAPKPLIYYTSNLQSGVPSRFSGSGSGTDYTLTISSLQPEDFATYYCQQFTSLPYTFGQGTKLEIKSGGGGSEVQLVESGGGLVQPGGSLKLSCAASGFTFNKYAMNWVRQAPGKGLEWVARIRSKYNNYATYYADSVKDRFTISRDDSKNTAYLQMNNLKTEDTAVYYCVRHGNFGNSYISYWAYWGQGTLVTVSSGGGGSGGGGSGGGGSQTVVTQEPSLTVSPGGTVTLTCGSSTGAVTSGNYPNWVQQKPGQAPRGLIGGTKFLAPGTPARFSGSLLGGKAALTLSGVQPEDEAEYYCVLWYSNRWVFGGGTKLTVL

SEQ ID NO: 1479 - protein, 1236 aa, Artificial Sequence
  Synthetic
DIQMTQSPSSLSASVGDRVTITCKASQDVSTAVAWYQQKPGKAPKLLIYSASYRYTGVPDRFTGSGSGTDFTLTISSLQPEDFATYYCQQHYSTPPYTFGGGTKVEIKRGGGGSGGGGSGGGGSQVQLVQSGAEVKKPGASVKVSCKASGYAFSSSWMNWVRQAPGQGLEWIGRIYPGDGDAKYNGKFKGKATLTADKSTSTAYMELSSLRSEDTAVYYCARSTMIATGAMDYWGQGTLVTVSSSGGGGSEVQLVESGGGLVQPGGSLRLSCAASGFTFSNFDMAWVRQAPGKGLVWVSSITTGGGDTYYADSVKGRFTISRDNAKSTLYLQMDSLRSEDTAVYYCVRHGYYDGYHLFDYWGQGTLVTVSSGGGGSGGGGSGGGGSDIQMTQSPSSLSASVGDRVTITCRANQGISNNLNWYQQKPGKAPKPLIYYTSNLQSGVPSRFSGSGSGTDYTLTISSLQPEDFATYYCQQFTSLPYTFGQGTKLEIKSGGGGSEVQLVESGGGLVQPGGSLKLSCAASGFTFNKYAMNWVRQAPGKGLEWVARIRSKYNNYATYYADSVKDRFTISRDDSKNTAYLQMNNLKTEDTAVYYCVRHGNFGNSYISYWAYWGQGTLVTVSSGGGGSGGGGSGGGGSQTVVTQEPSLTVSPGGTVTLTCGSSTGAVTSGNYPNWVQQKPGQAPRGLIGGTKFLAPGTPARFSGSLLGGKAALTLSGVQPEDEAEYYCVLWYSNRWVFGGGTKLTVLGGGGDKTHTCPPCPAPELLGGPSVFLFPPKPKDTLMISRTPEVTCVVVDVSHEDPEVKFNWYVDGVEVHNAKTKPCEEQYGSTYRCVSVLTVLHQDWLNGKEYKCKVSNKALPAPIEKTISKAKGQPREPQVYTLPPSREEMTKNQVSLTCLVKGFYPSDIAVEWESNGQPENNYKTTPPVLDSDGSFFLYSKLTVDKSRWQQGNVFSCSVMHEALHNHYTQKSLSLSPGKGGGGSGGGGSGGGGSGGGGSGGGGSGGGGSDKTHTCPPCPAPELLGGPSVFLFPPKPKDTLMISRTPEVTCVVVDVSHEDPEVKFNWYVDGVEVHNAKTKPCEEQYGSTYRCVSVLTVLHQDWLNGKEYKCKVSNKALPAPIEKTISKAKGQPREPQVYTLPPSREEMTKNQVSLTCLVKGFYPSDIAVEWESNGQPENNYKTTPPVLDSDGSFFLYSKLTVDKSRWQQGNVFSCSVMHEALHNHYTQKSLSLSPGK

SEQ ID NO: 1480 - protein, 493 aa, Artificial Sequence
  Synthetic
DIQMTQSPSSLSASVGDRVTITCKASQDVSTAVAWYQQKPGKAPKLLIYSASYRYTGVPDRFTGSGSGTDFTLTISSLQPEDFATYYCQQHYSTPPYTFGGGTKVEIKRGGGGSGGGGSGGGGSQVQLVQSGAEVKKPGASVKVSCKASGYAFSSSWMNWVRQAPGQGLEWIGRIYPGDGDAKYNGKFKGKATLTADKSTSTAYMELSSLRSEDTAVYYCARSTMIATGAMDYWGQGTLVTVSSSGGGGSQVQLVQSGAEVKKPGASVKVSCKASGYTFTNHIIHWVRQAPGQCLEWMGYINPYPGYHAYNEKFQGRATMTSDTSTSTVYMELSSLRSEDTAVYYCARDGYYRDTDVLDYWGQGTLVTVSSGGGGSGGGGSGGGGSDIQMTQSPSSLSASVGDRVTITCQASQDISNYLNWYQQKPGKAPKLLIYYTSRLHTGVPSRFSGSGSGTDFTFTISSLEPEDIATYYCQQGNTLPWTFGCGTKVEIK

SEQ ID NO: 1481 - protein, 748 aa, Artificial Sequence
  Synthetic
DIQMTQSPSSLSASVGDRVTITCKASQDVSTAVAWYQQKPGKAPKLLIYSASYRYTGVPDRFTGSGSGTDFTLTISSLQPEDFATYYCQQHYSTPPYTFGGGTKVEIKRGGGGSGGGGSGGGGSQVQLVQSGAEVKKPGASVKVSCKASGYAFSSSWMNWVRQAPGQGLEWIGRIYPGDGDAKYNGKFKGKATLTADKSTSTAYMELSSLRSEDTAVYYCARSTMIATGAMDYWGQGTLVTVSSSGGGGSQVQLVQSGAEVKKPGASVKVSCKASGYTFTNHIIHWVRQAPGQCLEWMGYINPYPGYHAYNEKFQGRATMTSDTSTSTVYMELSSLRSEDTAVYYCARDGYYRDTDVLDYWGQGTLVTVSSGGGGSGGGGSGGGGSDIQMTQSPSSLSASVGDRVTITCQASQDISNYLNWYQQKPGKAPKLLIYYTSRLHTGVPSRFSGSGSGTDFTFTISSLEPEDIATYYCQQGNTLPWTFGCGTKVEIKSGGGGSEVQLVESGGGLVQPGGSLKLSCAASGFTFNKYAMNWVRQAPGKGLEWVARIRSKYNNYATYYADSVKDRFTISRDDSKNTAYLQMNNLKTEDTAVYYCVRHGNFGNSYISYWAYWGQGTLVTVSSGGGGSGGGGSGGGGSQTVVTQEPSLTVSPGGTVTLTCGSSTGAVTSGNYPNWVQQKPGQAPRGLIGGTKFLAPGTPARFSGSLLGGKAALTLSGVQPEDEAEYYCVLWYSNRWVFGGGTKLTVL

SEQ ID NO: 1482 - protein, 1236 aa, Artificial Sequence
  Synthetic
DIQMTQSPSSLSASVGDRVTITCKASQDVSTAVAWYQQKPGKAPKLLIYSASYRYTGVPDRFTGSGSGTDFTLTISSLQPEDFATYYCQQHYSTPPYTFGGGTKVEIKRGGGGSGGGGSGGGGSQVQLVQSGAEVKKPGASVKVSCKASGYAFSSSWMNWVRQAPGQGLEWIGRIYPGDGDAKYNGKFKGKATLTADKSTSTAYMELSSLRSEDTAVYYCARSTMIATGAMDYWGQGTLVTVSSSGGGGSQVQLVQSGAEVKKPGASVKVSCKASGYTFTNHIIHWVRQAPGQCLEWMGYINPYPGYHAYNEKFQGRATMTSDTSTSTVYMELSSLRSEDTAVYYCARDGYYRDTDVLDYWGQGTLVTVSSGGGGSGGGGSGGGGSDIQMTQSPSSLSASVGDRVTITCQASQDISNYLNWYQQKPGKAPKLLIYYTSRLHTGVPSRFSGSGSGTDFTFTISSLEPEDIATYYCQQGNTLPWTFGCGTKVEIKSGGGGSEVQLVESGGGLVQPGGSLKLSCAASGFTFNKYAMNWVRQAPGKGLEWVARIRSKYNNYATYYADSVKDRFTISRDDSKNTAYLQMNNLKTEDTAVYYCVRHGNFGNSYISYWAYWGQGTLVTVSSGGGGSGGGGSGGGGSQTVVTQEPSLTVSPGGTVTLTCGSSTGAVTSGNYPNWVQQKPGQAPRGLIGGTKFLAPGTPARFSGSLLGGKAALTLSGVQPEDEAEYYCVLWYSNRWVFGGGTKLTVLGGGGDKTHTCPPCPAPELLGGPSVFLFPPKPKDTLMISRTPEVTCVVVDVSHEDPEVKFNWYVDGVEVHNAKTKPCEEQYGSTYRCVSVLTVLHQDWLNGKEYKCKVSNKALPAPIEKTISKAKGQPREPQVYTLPPSREEMTKNQVSLTCLVKGFYPSDIAVEWESNGQPENNYKTTPPVLDSDGSFFLYSKLTVDKSRWQQGNVFSCSVMHEALHNHYTQKSLSLSPGKGGGGSGGGGSGGGGSGGGGSGGGGSGGGGSDKTHTCPPCPAPELLGGPSVFLFPPKPKDTLMISRTPEVTCVVVDVSHEDPEVKFNWYVDGVEVHNAKTKPCEEQYGSTYRCVSVLTVLHQDWLNGKEYKCKVSNKALPAPIEKTISKAKGQPREPQVYTLPPSREEMTKNQVSLTCLVKGFYPSDIAVEWESNGQPENNYKTTPPVLDSDGSFFLYSKLTVDKSRWQQGNVFSCSVMHEALHNHYTQKSLSLSPGK

SEQ ID NO: 1483 - protein, 496 aa, Artificial Sequence
  Synthetic
DIQMTQSPSSLSASVGDRVTITCKASQDVSTAVAWYQQKPGKAPKLLIYSASYRYTGVPDRFTGSGSGTDFTLTISSLQPEDFATYYCQQHYSTPPYTFGCGTKVEIKRGGGGSGGGGSGGGGSQVQLVQSGAEVKKPGASVKVSCKASGYAFSSSWMNWVRQAPGQCLEWIGRIYPGDADAKYNAKFKGKATLTADKSTSTAYMELSSLRSEDTAVYYCARSTMIATGAMDYWGQGTLVTVSSSGGGGSQVQLVQSGAEVKKPGASVKVSCKASGYSFPDYYINWVRQAPGQGLEWMGWIYFASGNSEYNQKFTGRVTMTRDTSINTAYMELSSLTSEDTAVYFCASLYDYDWYFDVWGQGTMVTVSSGGGGSGGGGSGGGGSDIVMTQTPLSLSVTPGQPASISCKSSQSLVHSNGNTYLHWYLQKPGQSPQLLIYKVSNRFSGVPDRFSGSGSGTDFTLKISRVEAEDVGIYYCSQSSIYPWTFGQGTKLEIK

SEQ ID NO: 1484 - protein, 751 aa, Artificial Sequence
  Synthetic
DIQMTQSPSSLSASVGDRVTITCKASQDVSTAVAWYQQKPGKAPKLLIYSASYRYTGVPDRFTGSGSGTDFTLTISSLQPEDFATYYCQQHYSTPPYTFGCGTKVEIKRGGGGSGGGGSGGGGSQVQLVQSGAEVKKPGASVKVSCKASGYAFSSSWMNWVRQAPGQCLEWIGRIYPGDADAKYNAKFKGKATLTADKSTSTAYMELSSLRSEDTAVYYCARSTMIATGAMDYWGQGTLVTVSSSGGGGSQVQLVQSGAEVKKPGASVKVSCKASGYSFPDYYINWVRQAPGQGLEWMGWIYFASGNSEYNQKFTGRVTMTRDTSINTAYMELSSLTSEDTAVYFCASLYDYDWYFDVWGQGTMVTVSSGGGGSGGGGSGGGGSDIVMTQTPLSLSVTPGQPASISCKSSQSLVHSNGNTYLHWYLQKPGQSPQLLIYKVSNRFSGVPDRFSGSGSGTDFTLKISRVEAEDVGIYYCSQSSIYPWTFGQGTKLEIKSGGGGSEVQLVESGGGLVQPGGSLKLSCAASGFTFNKYAMNWVRQAPGKGLEWVARIRSKYNNYATYYADSVKDRFTISRDDSKNTAYLQMNNLKTEDTAVYYCVRHGNFGNSYISYWAYWGQGTLVTVSSGGGGSGGGGSGGGGSQTVVTQEPSLTVSPGGTVTLTCGSSTGAVTSGNYPNWVQQKPGQAPRGLIGGTKFLAPGTPARFSGSLLGGKAALTLSGVQPEDEAEYYCVLWYSNRWVFGGGTKLTVL

SEQ ID NO: 1485 - protein, 1239 aa, Artificial Sequence
  Synthetic
DIQMTQSPSSLSASVGDRVTITCKASQDVSTAVAWYQQKPGKAPKLLIYSASYRYTGVPDRFTGSGSGTDFTLTISSLQPEDFATYYCQQHYSTPPYTFGCGTKVEIKRGGGGSGGGGSGGGGSQVQLVQSGAEVKKPGASVKVSCKASGYAFSSSWMNWVRQAPGQCLEWIGRIYPGDADAKYNAKFKGKATLTADKSTSTAYMELSSLRSEDTAVYYCARSTMIATGAMDYWGQGTLVTVSSSGGGGSQVQLVQSGAEVKKPGASVKVSCKASGYSFPDYYINWVRQAPGQGLEWMGWIYFASGNSEYNQKFTGRVTMTRDTSINTAYMELSSLTSEDTAVYFCASLYDYDWYFDVWGQGTMVTVSSGGGGSGGGGSGGGGSDIVMTQTPLSLSVTPGQPASISCKSSQSLVHSNGNTYLHWYLQKPGQSPQLLIYKVSNRFSGVPDRFSGSGSGTDFTLKISRVEAEDVGIYYCSQSSIYPWTFGQGTKLEIKSGGGGSEVQLVESGGGLVQPGGSLKLSCAASGFTFNKYAMNWVRQAPGKGLEWVARIRSKYNNYATYYADSVKDRFTISRDDSKNTAYLQMNNLKTEDTAVYYCVRHGNFGNSYISYWAYWGQGTLVTVSSGGGGSGGGGSGGGGSQTVVTQEPSLTVSPGGTVTLTCGSSTGAVTSGNYPNWVQQKPGQAPRGLIGGTKFLAPGTPARFSGSLLGGKAALTLSGVQPEDEAEYYCVLWYSNRWVFGGGTKLTVLGGGGDKTHTCPPCPAPELLGGPSVFLFPPKPKDTLMISRTPEVTCVVVDVSHEDPEVKFNWYVDGVEVHNAKTKPCEEQYGSTYRCVSVLTVLHQDWLNGKEYKCKVSNKALPAPIEKTISKAKGQPREPQVYTLPPSREEMTKNQVSLTCLVKGFYPSDIAVEWESNGQPENNYKTTPPVLDSDGSFFLYSKLTVDKSRWQQGNVFSCSVMHEALHNHYTQKSLSLSPGKGGGGSGGGGSGGGGSGGGGSGGGGSGGGGSDKTHTCPPCPAPELLGGPSVFLFPPKPKDTLMISRTPEVTCVVVDVSHEDPEVKFNWYVDGVEVHNAKTKPCEEQYGSTYRCVSVLTVLHQDWLNGKEYKCKVSNKALPAPIEKTISKAKGQPREPQVYTLPPSREEMTKNQVSLTCLVKGFYPSDIAVEWESNGQPENNYKTTPPVLDSDGSFFLYSKLTVDKSRWQQGNVFSCSVMHEALHNHYTQKSLSLSPGK

SEQ ID NO: 1486 - protein, 493 aa, Artificial Sequence
  Synthetic
DIQMTQSPSSLSASVGDRVTITCKASQDVSTAVAWYQQKPGKAPKLLIYSASYRYTGVPDRFTGSGSGTDFTLTISSLQPEDFATYYCQQHYSTPPYTFGCGTKVEIKRGGGGSGGGGSGGGGSQVQLVQSGAEVKKPGASVKVSCKASGYAFSSSWMNWVRQAPGQCLEWIGRIYPGDADAKYNAKFKGKATLTADKSTSTAYMELSSLRSEDTAVYYCARSTMIATGAMDYWGQGTLVTVSSSGGGGSEVQLVESGGGLVQPGGSLRLSCAASGFTFSNFDMAWVRQAPGKGLVWVSSITTGGGDTYYADSVKGRFTISRDNAKSTLYLQMDSLRSEDTAVYYCVRHGYYDGYHLFDYWGQGTLVTVSSGGGGSGGGGSGGGGSDIQMTQSPSSLSASVGDRVTITCRANQGISNNLNWYQQKPGKAPKPLIYYTSNLQSGVPSRFSGSGSGTDYTLTISSLQPEDFATYYCQQFTSLPYTFGQGTKLEIK

SEQ ID NO: 1487 - protein, 748 aa, Artificial Sequence
  Synthetic
DIQMTQSPSSLSASVGDRVTITCKASQDVSTAVAWYQQKPGKAPKLLIYSASYRYTGVPDRFTGSGSGTDFTLTISSLQPEDFATYYCQQHYSTPPYTFGCGTKVEIKRGGGGSGGGGSGGGGSQVQLVQSGAEVKKPGASVKVSCKASGYAFSSSWMNWVRQAPGQCLEWIGRIYPGDADAKYNAKFKGKATLTADKSTSTAYMELSSLRSEDTAVYYCARSTMIATGAMDYWGQGTLVTVSSSGGGGSEVQLVESGGGLVQPGGSLRLSCAASGFTFSNFDMAWVRQAPGKGLVWVSSITTGGGDTYYADSVKGRFTISRDNAKSTLYLQMDSLRSEDTAVYYCVRHGYYDGYHLFDYWGQGTLVTVSSGGGGSGGGGSGGGGSDIQMTQSPSSLSASVGDRVTITCRANQGISNNLNWYQQKPGKAPKPLIYYTSNLQSGVPSRFSGSGSGTDYTLTISSLQPEDFATYYCQQFTSLPYTFGQGTKLEIKSGGGGSEVQLVESGGGLVQPGGSLKLSCAASGFTFNKYAMNWVRQAPGKGLEWVARIRSKYNNYATYYADSVKDRFTISRDDSKNTAYLQMNNLKTEDTAVYYCVRHGNFGNSYISYWAYWGQGTLVTVSSGGGGSGGGGSGGGGSQTVVTQEPSLTVSPGGTVTLTCGSSTGAVTSGNYPNWVQQKPGQAPRGLIGGTKFLAPGTPARFSGSLLGGKAALTLSGVQPEDEAEYYCVLWYSNRWVFGGGTKLTVL

SEQ ID NO: 1488 - protein, 1236 aa, Artificial Sequence
  Synthetic
DIQMTQSPSSLSASVGDRVTITCKASQDVSTAVAWYQQKPGKAPKLLIYSASYRYTGVPDRFTGSGSGTDFTLTISSLQPEDFATYYCQQHYSTPPYTFGCGTKVEIKRGGGGSGGGGSGGGGSQVQLVQSGAEVKKPGASVKVSCKASGYAFSSSWMNWVRQAPGQCLEWIGRIYPGDADAKYNAKFKGKATLTADKSTSTAYMELSSLRSEDTAVYYCARSTMIATGAMDYWGQGTLVTVSSSGGGGSEVQLVESGGGLVQPGGSLRLSCAASGFTFSNFDMAWVRQAPGKGLVWVSSITTGGGDTYYADSVKGRFTISRDNAKSTLYLQMDSLRSEDTAVYYCVRHGYYDGYHLFDYWGQGTLVTVSSGGGGSGGGGSGGGGSDIQMTQSPSSLSASVGDRVTITCRANQGISNNLNWYQQKPGKAPKPLIYYTSNLQSGVPSRFSGSGSGTDYTLTISSLQPEDFATYYCQQFTSLPYTFGQGTKLEIKSGGGGSEVQLVESGGGLVQPGGSLKLSCAASGFTFNKYAMNWVRQAPGKGLEWVARIRSKYNNYATYYADSVKDRFTISRDDSKNTAYLQMNNLKTEDTAVYYCVRHGNFGNSYISYWAYWGQGTLVTVSSGGGGSGGGGSGGGGSQTVVTQEPSLTVSPGGTVTLTCGSSTGAVTSGNYPNWVQQKPGQAPRGLIGGTKFLAPGTPARFSGSLLGGKAALTLSGVQPEDEAEYYCVLWYSNRWVFGGGTKLTVLGGGGDKTHTCPPCPAPELLGGPSVFLFPPKPKDTLMISRTPEVTCVVVDVSHEDPEVKFNWYVDGVEVHNAKTKPCEEQYGSTYRCVSVLTVLHQDWLNGKEYKCKVSNKALPAPIEKTISKAKGQPREPQVYTLPPSREEMTKNQVSLTCLVKGFYPSDIAVEWESNGQPENNYKTTPPVLDSDGSFFLYSKLTVDKSRWQQGNVFSCSVMHEALHNHYTQKSLSLSPGKGGGGSGGGGSGGGGSGGGGSGGGGSGGGGSDKTHTCPPCPAPELLGGPSVFLFPPKPKDTLMISRTPEVTCVVVDVSHEDPEVKFNWYVDGVEVHNAKTKPCEEQYGSTYRCVSVLTVLHQDWLNGKEYKCKVSNKALPAPIEKTISKAKGQPREPQVYTLPPSREEMTKNQVSLTCLVKGFYPSDIAVEWESNGQPENNYKTTPPVLDSDGSFFLYSKLTVDKSRWQQGNVFSCSVMHEALHNHYTQKSLSLSPGK

SEQ ID NO: 1489 - protein, 5 aa, Artificial Sequence
  Synthetic
SFYWS

SEQ ID NO: 1490 - protein, 16 aa, Artificial Sequence
  Synthetic
RISSSGDVDYNPSLKS

SEQ ID NO: 1491 - protein, 6 aa, Artificial Sequence
  Synthetic
EGGFYY

SEQ ID NO: 1492 - protein, 12 aa, Artificial Sequence
  Synthetic
RASQSVSSSYLA

SEQ ID NO: 1493 - protein, 7 aa, Artificial Sequence
  Synthetic
GASSRAT

SEQ ID NO: 1494 - protein, 9 aa, Artificial Sequence
  Synthetic
QQYGSSPIT

SEQ ID NO: 1495 - protein, 114 aa, Artificial Sequence
  Synthetic
QVQLQESGPGLVKPSETLSLTCTVSGGSISSFYWSWIRQPPGKCLEWIGRISSSGDVDYNPSLKSRVTISVDTSKNQFSLKLSSVTAADTAVYYCAREGGFYYWGQGTLVTVSS

SEQ ID NO: 1496 - protein, 108 aa, Artificial Sequence
  Synthetic
EIVLTQSPGTLSLSPGERATLSCRASQSVSSSYLAWYQQKPGQAPRLLIYGASSRATGIPDRFSGSGSGTDFTLTISRLEPEDFAVYYCQQYGSSPITFGCGTKLEIK

SEQ ID NO: 1497 - protein, 237 aa, Artificial Sequence
  Synthetic
QVQLQESGPGLVKPSETLSLTCTVSGGSISSFYWSWIRQPPGKCLEWIGRISSSGDVDYNPSLKSRVTISVDTSKNQFSLKLSSVTAADTAVYYCAREGGFYYWGQGTLVTVSSGGGGSGGGGSGGGGSEIVLTQSPGTLSLSPGERATLSCRASQSVSSSYLAWYQQKPGQAPRLLIYGASSRATGIPDRFSGSGSGTDFTLTISRLEPEDFAVYYCQQYGSSPITFGCGTKLEIK

SEQ ID NO: 1498 - protein, 492 aa, Artificial Sequence
  Synthetic
QVQLQESGPGLVKPSETLSLTCTVSGGSISSFYWSWIRQPPGKCLEWIGRISSSGDVDYNPSLKSRVTISVDTSKNQFSLKLSSVTAADTAVYYCAREGGFYYWGQGTLVTVSSGGGGSGGGGSGGGGSEIVLTQSPGTLSLSPGERATLSCRASQSVSSSYLAWYQQKPGQAPRLLIYGASSRATGIPDRFSGSGSGTDFTLTISRLEPEDFAVYYCQQYGSSPITFGCGTKLEIKSGGGGSEVQLVESGGGLVQPGGSLKLSCAASGFTFNKYAMNWVRQAPGKGLEWVARIRSKYNNYATYYADSVKDRFTISRDDSKNTAYLQMNNLKTEDTAVYYCVRHGNFGNSYISYWAYWGQGTLVTVSSGGGGSGGGGSGGGGSQTVVTQEPSLTVSPGGTVTLTCGSSTGAVTSGNYPNWVQQKPGQAPRGLIGGTKFLAPGTPARFSGSLLGGKAALTLSGVQPEDEAEYYCVLWYSNRWVFGGGTKLTVL

SEQ ID NO: 1499 - protein, 980 aa, Artificial Sequence
  Synthetic
QVQLQESGPGLVKPSETLSLTCTVSGGSISSFYWSWIRQPPGKCLEWIGRISSSGDVDYNPSLKSRVTISVDTSKNQFSLKLSSVTAADTAVYYCAREGGFYYWGQGTLVTVSSGGGGSGGGGSGGGGSEIVLTQSPGTLSLSPGERATLSCRASQSVSSSYLAWYQQKPGQAPRLLIYGASSRATGIPDRFSGSGSGTDFTLTISRLEPEDFAVYYCQQYGSSPITFGCGTKLEIKSGGGGSEVQLVESGGGLVQPGGSLKLSCAASGFTFNKYAMNWVRQAPGKGLEWVARIRSKYNNYATYYADSVKDRFTISRDDSKNTAYLQMNNLKTEDTAVYYCVRHGNFGNSYISYWAYWGQGTLVTVSSGGGGSGGGGSGGGGSQTVVTQEPSLTVSPGGTVTLTCGSSTGAVTSGNYPNWVQQKPGQAPRGLIGGTKFLAPGTPARFSGSLLGGKAALTLSGVQPEDEAEYYCVLWYSNRWVFGGGTKLTVLGGGGDKTHTCPPCPAPELLGGPSVFLFPPKPKDTLMISRTPEVTCVVVDVSHEDPEVKFNWYVDGVEVHNAKTKPCEEQYGSTYRCVSVLTVLHQDWLNGKEYKCKVSNKALPAPIEKTISKAKGQPREPQVYTLPPSREEMTKNQVSLTCLVKGFYPSDIAVEWESNGQPENNYKTTPPVLDSDGSFFLYSKLTVDKSRWQQGNVFSCSVMHEALHNHYTQKSLSLSPGKGGGGSGGGGSGGGGSGGGGSGGGGSGGGGSDKTHTCPPCPAPELLGGPSVFLFPPKPKDTLMISRTPEVTCVVVDVSHEDPEVKFNWYVDGVEVHNAKTKPCEEQYGSTYRCVSVLTVLHQDWLNGKEYKCKVSNKALPAPIEKTISKAKGQPREPQVYTLPPSREEMTKNQVSLTCLVKGFYPSDIAVEWESNGQPENNYKTTPPVLDSDGSFFLYSKLTVDKSRWQQGNVFSCSVMHEALHNHYTQKSLSLSPGK

SEQ ID NO: 1500 - protein, 5 aa, Artificial Sequence
  Synthetic
SYGIS

SEQ ID NO: 1501 - protein, 17 aa, Artificial Sequence
  Synthetic
WISAYSGNAIYAQKLQG

SEQ ID NO: 1502 - protein, 13 aa, Artificial Sequence
  Synthetic
DPDYYGSGSYSDY

SEQ ID NO: 1503 - protein, 11 aa, Artificial Sequence
  Synthetic
RASQSVSSNLA

SEQ ID NO: 1504 - protein, 7 aa, Artificial Sequence
  Synthetic
GASSRAT

SEQ ID NO: 1505 - protein, 10 aa, Artificial Sequence
  Synthetic
QQYHSWPLLT

SEQ ID NO: 1506 - protein, 122 aa, Artificial Sequence
  Synthetic
QVQLVQSGAEVKKPGASVKVSCKASGYTFTSYGISWVRQAPGQCLEWMGWISAYSGNAIYAQKLQGRVTMTRDTSTSTAYMELRSLRSDDTAVYYCARDPDYYGSGSYSDYWGQGTLVTVSS

SEQ ID NO: 1507 - protein, 108 aa, Artificial Sequence
  Synthetic
EIVLTQSPATLSVSPGERATLSCRASQSVSSNLAWYQQKPGQAPRLLIYGASSRATGIPARFSGSGSGTEFTLTISSLQSEDFAVYYCQQYHSWPLLTFGCGTKVEIK

SEQ ID NO: 1508 - protein, 245 aa, Artificial Sequence
  Synthetic
QVQLVQSGAEVKKPGASVKVSCKASGYTFTSYGISWVRQAPGQCLEWMGWISAYSGNAIYAQKLQGRVTMTRDTSTSTAYMELRSLRSDDTAVYYCARDPDYYGSGSYSDYWGQGTLVTVSSGGGGSGGGGSGGGGSEIVLTQSPATLSVSPGERATLSCRASQSVSSNLAWYQQKPGQAPRLLIYGASSRATGIPARFSGSGSGTEFTLTISSLQSEDFAVYYCQQYHSWPLLTFGCGTKVEIK

SEQ ID NO: 1509 - protein, 500 aa, Artificial Sequence
  Synthetic
QVQLVQSGAEVKKPGASVKVSCKASGYTFTSYGISWVRQAPGQCLEWMGWISAYSGNAIYAQKLQGRVTMTRDTSTSTAYMELRSLRSDDTAVYYCARDPDYYGSGSYSDYWGQGTLVTVSSGGGGSGGGGSGGGGSEIVLTQSPATLSVSPGERATLSCRASQSVSSNLAWYQQKPGQAPRLLIYGASSRATGIPARFSGSGSGTEFTLTISSLQSEDFAVYYCQQYHSWPLLTFGCGTKVEIKSGGGGSEVQLVESGGGLVQPGGSLKLSCAASGFTFNKYAMNWVRQAPGKGLEWVARIRSKYNNYATYYADSVKDRFTISRDDSKNTAYLQMNNLKTEDTAVYYCVRHGNFGNSYISYWAYWGQGTLVTVSSGGGGSGGGGSGGGGSQTVVTQEPSLTVSPGGTVTLTCGSSTGAVTSGNYPNWVQQKPGQAPRGLIGGTKFLAPGTPARFSGSLLGGKAALTLSGVQPEDEAEYYCVLWYSNRWVFGGGTKLTVL

SEQ ID NO: 1510 - protein, 988 aa, Artificial Sequence
  Synthetic
QVQLVQSGAEVKKPGASVKVSCKASGYTFTSYGISWVRQAPGQCLEWMGWISAYSGNAIYAQKLQGRVTMTRDTSTSTAYMELRSLRSDDTAVYYCARDPDYYGSGSYSDYWGQGTLVTVSSGGGGSGGGGSGGGGSEIVLTQSPATLSVSPGERATLSCRASQSVSSNLAWYQQKPGQAPRLLIYGASSRATGIPARFSGSGSGTEFTLTISSLQSEDFAVYYCQQYHSWPLLTFGCGTKVEIKSGGGGSEVQLVESGGGLVQPGGSLKLSCAASGFTFNKYAMNWVRQAPGKGLEWVARIRSKYNNYATYYADSVKDRFTISRDDSKNTAYLQMNNLKTEDTAVYYCVRHGNFGNSYISYWAYWGQGTLVTVSSGGGGSGGGGSGGGGSQTVVTQEPSLTVSPGGTVTLTCGSSTGAVTSGNYPNWVQQKPGQAPRGLIGGTKFLAPGTPARFSGSLLGGKAALTLSGVQPEDEAEYYCVLWYSNRWVFGGGTKLTVLGGGGDKTHTCPPCPAPELLGGPSVFLFPPKPKDTLMISRTPEVTCVVVDVSHEDPEVKFNWYVDGVEVHNAKTKPCEEQYGSTYRCVSVLTVLHQDWLNGKEYKCKVSNKALPAPIEKTISKAKGQPREPQVYTLPPSREEMTKNQVSLTCLVKGFYPSDIAVEWESNGQPENNYKTTPPVLDSDGSFFLYSKLTVDKSRWQQGNVFSCSVMHEALHNHYTQKSLSLSPGKGGGGSGGGGSGGGGSGGGGSGGGGSGGGGSDKTHTCPPCPAPELLGGPSVFLFPPKPKDTLMISRTPEVTCVVVDVSHEDPEVKFNWYVDGVEVHNAKTKPCEEQYGSTYRCVSVLTVLHQDWLNGKEYKCKVSNKALPAPIEKTISKAKGQPREPQVYTLPPSREEMTKNQVSLTCLVKGFYPSDIAVEWESNGQPENNYKTTPPVLDSDGSFFLYSKLTVDKSRWQQGNVFSCSVMHEALHNHYTQKSLSLSPGK

SEQ ID NO: 1511 - protein, 5 aa, Artificial Sequence
  Synthetic
SYGIS

SEQ ID NO: 1512 - protein, 17 aa, Artificial Sequence
  Synthetic
WISAYNGQTIYAQKLQG

SEQ ID NO: 1513 - protein, 13 aa, Artificial Sequence
  Synthetic
DPDYYGSGSYSDY

SEQ ID NO: 1514 - protein, 11 aa, Artificial Sequence
  Synthetic
RASQSVSSNLA

SEQ ID NO: 1515 - protein, 7 aa, Artificial Sequence
  Synthetic
GASNRAT

SEQ ID NO: 1516 - protein, 10 aa, Artificial Sequence
  Synthetic
QQYHSWPLLT

SEQ ID NO: 1517 - protein, 122 aa, Artificial Sequence
  Synthetic
QVQLVQSGAEVKKPGASVKVSCKASGYTFTSYGISWVRQAPGQCLEWMGWISAYNGQTIYAQKLQGRVTMTRDTSTSTAYMELRSLRSDDTAVYYCARDPDYYGSGSYSDYWGQGTLVTVSS

SEQ ID NO: 1518 - protein, 108 aa, Artificial Sequence
  Synthetic
EIVMTQSPATLSVSPGERATLSCRASQSVSSNLAWYQQKPGQAPRLLIYGASNRATGIPARFSGSGSGTEFTLTISSLQSEDFAVYYCQQYHSWPLLTFGCGTKVEIK

SEQ ID NO: 1519 - protein, 245 aa, Artificial Sequence
  Synthetic
QVQLVQSGAEVKKPGASVKVSCKASGYTFTSYGISWVRQAPGQCLEWMGWISAYNGQTIYAQKLQGRVTMTRDTSTSTAYMELRSLRSDDTAVYYCARDPDYYGSGSYSDYWGQGTLVTVSSGGGGSGGGGSGGGGSEIVMTQSPATLSVSPGERATLSCRASQSVSSNLAWYQQKPGQAPRLLIYGASNRATGIPARFSGSGSGTEFTLTISSLQSEDFAVYYCQQYHSWPLLTFGCGTKVEIK

SEQ ID NO: 1520 - protein, 500 aa, Artificial Sequence
  Synthetic
QVQLVQSGAEVKKPGASVKVSCKASGYTFTSYGISWVRQAPGQCLEWMGWISAYNGQTIYAQKLQGRVTMTRDTSTSTAYMELRSLRSDDTAVYYCARDPDYYGSGSYSDYWGQGTLVTVSSGGGGSGGGGSGGGGSEIVMTQSPATLSVSPGERATLSCRASQSVSSNLAWYQQKPGQAPRLLIYGASNRATGIPARFSGSGSGTEFTLTISSLQSEDFAVYYCQQYHSWPLLTFGCGTKVEIKSGGGGSEVQLVESGGGLVQPGGSLKLSCAASGFTFNKYAMNWVRQAPGKGLEWVARIRSKYNNYATYYADSVKDRFTISRDDSKNTAYLQMNNLKTEDTAVYYCVRHGNFGNSYISYWAYWGQGTLVTVSSGGGGSGGGGSGGGGSQTVVTQEPSLTVSPGGTVTLTCGSSTGAVTSGNYPNWVQQKPGQAPRGLIGGTKFLAPGTPARFSGSLLGGKAALTLSGVQPEDEAEYYCVLWYSNRWVFGGGTKLTVL

SEQ ID NO: 1521 - protein, 988 aa, Artificial Sequence
  Synthetic
QVQLVQSGAEVKKPGASVKVSCKASGYTFTSYGISWVRQAPGQCLEWMGWISAYNGQTIYAQKLQGRVTMTRDTSTSTAYMELRSLRSDDTAVYYCARDPDYYGSGSYSDYWGQGTLVTVSSGGGGSGGGGSGGGGSEIVMTQSPATLSVSPGERATLSCRASQSVSSNLAWYQQKPGQAPRLLIYGASNRATGIPARFSGSGSGTEFTLTISSLQSEDFAVYYCQQYHSWPLLTFGCGTKVEIKSGGGGSEVQLVESGGGLVQPGGSLKLSCAASGFTFNKYAMNWVRQAPGKGLEWVARIRSKYNNYATYYADSVKDRFTISRDDSKNTAYLQMNNLKTEDTAVYYCVRHGNFGNSYISYWAYWGQGTLVTVSSGGGGSGGGGSGGGGSQTVVTQEPSLTVSPGGTVTLTCGSSTGAVTSGNYPNWVQQKPGQAPRGLIGGTKFLAPGTPARFSGSLLGGKAALTLSGVQPEDEAEYYCVLWYSNRWVFGGGTKLTVLGGGGDKTHTCPPCPAPELLGGPSVFLFPPKPKDTLMISRTPEVTCVVVDVSHEDPEVKFNWYVDGVEVHNAKTKPCEEQYGSTYRCVSVLTVLHQDWLNGKEYKCKVSNKALPAPIEKTISKAKGQPREPQVYTLPPSREEMTKNQVSLTCLVKGFYPSDIAVEWESNGQPENNYKTTPPVLDSDGSFFLYSKLTVDKSRWQQGNVFSCSVMHEALHNHYTQKSLSLSPGKGGGGSGGGGSGGGGSGGGGSGGGGSGGGGSDKTHTCPPCPAPELLGGPSVFLFPPKPKDTLMISRTPEVTCVVVDVSHEDPEVKFNWYVDGVEVHNAKTKPCEEQYGSTYRCVSVLTVLHQDWLNGKEYKCKVSNKALPAPIEKTISKAKGQPREPQVYTLPPSREEMTKNQVSLTCLVKGFYPSDIAVEWESNGQPENNYKTTPPVLDSDGSFFLYSKLTVDKSRWQQGNVFSCSVMHEALHNHYTQKSLSLSPGK

SEQ ID NO: 1522 - protein, 5 aa, Artificial Sequence
  Synthetic
NYGMH

SEQ ID NO: 1523 - protein, 17 aa, Artificial Sequence
  Synthetic
VISYEASNKNYADAVKG

SEQ ID NO: 1524 - protein, 17 aa, Artificial Sequence
  Synthetic
DRFGDYSGYYYYYGMDV

SEQ ID NO: 1525 - protein, 16 aa, Artificial Sequence
  Synthetic
RSSQSLLHSSGKTYLD

SEQ ID NO: 1526 - protein, 7 aa, Artificial Sequence
  Synthetic
LGSNRAS

SEQ ID NO: 1527 - protein, 9 aa, Artificial Sequence
  Synthetic
MQATQTPFT

SEQ ID NO: 1528 - protein, 126 aa, Artificial Sequence
  Synthetic
QVQLVESGGGVVQPGRSLRLSCAASGFTFSNYGMHWVRQAPGKCLEWVAVISYEASNKNYADAVKGRFTISRDNSKNTLYLQMNSLRAEDTAVYYCARDRFGDYSGYYYYYGMDVWGQGTTVTVSS

SEQ ID NO: 1529 - protein, 112 aa, Artificial Sequence
  Synthetic
DIVMTQTPLSLPVTPGQPASISCRSSQSLLHSSGKTYLDWYLQKPGQSPQLLIYLGSNRASGVPDRFSGSGSGTDFTLKISRVEAEDVGVYYCMQATQTPFTFGCGTKVEIK

SEQ ID NO: 1530 - protein, 253 aa, Artificial Sequence
  Synthetic
QVQLVESGGGVVQPGRSLRLSCAASGFTFSNYGMHWVRQAPGKCLEWVAVISYEASNKNYADAVKGRFTISRDNSKNTLYLQMNSLRAEDTAVYYCARDRFGDYSGYYYYYGMDVWGQGTTVTVSSGGGGSGGGGSGGGGSDIVMTQTPLSLPVTPGQPASISCRSSQSLLHSSGKTYLDWYLQKPGQSPQLLIYLGSNRASGVPDRFSGSGSGTDFTLKISRVEAEDVGVYYCMQATQTPFTFGCGTKVEIK

SEQ ID NO: 1531 - protein, 508 aa, Artificial Sequence
  Synthetic
QVQLVESGGGVVQPGRSLRLSCAASGFTFSNYGMHWVRQAPGKCLEWVAVISYEASNKNYADAVKGRFTISRDNSKNTLYLQMNSLRAEDTAVYYCARDRFGDYSGYYYYYGMDVWGQGTTVTVSSGGGGSGGGGSGGGGSDIVMTQTPLSLPVTPGQPASISCRSSQSLLHSSGKTYLDWYLQKPGQSPQLLIYLGSNRASGVPDRFSGSGSGTDFTLKISRVEAEDVGVYYCMQATQTPFTFGCGTKVEIKSGGGGSEVQLVESGGGLVQPGGSLKLSCAASGFTFNKYAMNWVRQAPGKGLEWVARIRSKYNNYATYYADSVKDRFTISRDDSKNTAYLQMNNLKTEDTAVYYCVRHGNFGNSYISYWAYWGQGTLVTVSSGGGGSGGGGSGGGGSQTVVTQEPSLTVSPGGTVTLTCGSSTGAVTSGNYPNWVQQKPGQAPRGLIGGTKFLAPGTPARFSGSLLGGKAALTLSGVQPEDEAEYYCVLWYSNRWVFGGGTKLTVL

SEQ ID NO: 1532 - protein, 996 aa, Artificial Sequence
  Synthetic
QVQLVESGGGVVQPGRSLRLSCAASGFTFSNYGMHWVRQAPGKCLEWVAVISYEASNKNYADAVKGRFTISRDNSKNTLYLQMNSLRAEDTAVYYCARDRFGDYSGYYYYYGMDVWGQGTTVTVSSGGGGSGGGGSGGGGSDIVMTQTPLSLPVTPGQPASISCRSSQSLLHSSGKTYLDWYLQKPGQSPQLLIYLGSNRASGVPDRFSGSGSGTDFTLKISRVEAEDVGVYYCMQATQTPFTFGCGTKVEIKSGGGGSEVQLVESGGGLVQPGGSLKLSCAASGFTFNKYAMNWVRQAPGKGLEWVARIRSKYNNYATYYADSVKDRFTISRDDSKNTAYLQMNNLKTEDTAVYYCVRHGNFGNSYISYWAYWGQGTLVTVSSGGGGSGGGGSGGGGSQTVVTQEPSLTVSPGGTVTLTCGSSTGAVTSGNYPNWVQQKPGQAPRGLIGGTKFLAPGTPARFSGSLLGGKAALTLSGVQPEDEAEYYCVLWYSNRWVFGGGTKLTVLGGGGDKTHTCPPCPAPELLGGPSVFLFPPKPKDTLMISRTPEVTCVVVDVSHEDPEVKFNWYVDGVEVHNAKTKPCEEQYGSTYRCVSVLTVLHQDWLNGKEYKCKVSNKALPAPIEKTISKAKGQPREPQVYTLPPSREEMTKNQVSLTCLVKGFYPSDIAVEWESNGQPENNYKTTPPVLDSDGSFFLYSKLTVDKSRWQQGNVFSCSVMHEALHNHYTQKSLSLSPGKGGGGSGGGGSGGGGSGGGGSGGGGSGGGGSDKTHTCPPCPAPELLGGPSVFLFPPKPKDTLMISRTPEVTCVVVDVSHEDPEVKFNWYVDGVEVHNAKTKPCEEQYGSTYRCVSVLTVLHQDWLNGKEYKCKVSNKALPAPIEKTISKAKGQPREPQVYTLPPSREEMTKNQVSLTCLVKGFYPSDIAVEWESNGQPENNYKTTPPVLDSDGSFFLYSKLTVDKSRWQQGNVFSCSVMHEALHNHYTQKSLSLSPGK

SEQ ID NO: 1533 - protein, 5 aa, Artificial Sequence
  Synthetic
NYGMH

SEQ ID NO: 1534 - protein, 17 aa, Artificial Sequence
  Synthetic
VISYDAWFSQYADAVKG

SEQ ID NO: 1535 - protein, 15 aa, Artificial Sequence
  Synthetic
DLITFGGHYYFGMDV

SEQ ID NO: 1536 - protein, 12 aa, Artificial Sequence
  Synthetic
RASQSVSSNYLA

SEQ ID NO: 1537 - protein, 7 aa, Artificial Sequence
  Synthetic
AASSRVT

SEQ ID NO: 1538 - protein, 9 aa, Artificial Sequence
  Synthetic
QQYGSSPFT

SEQ ID NO: 1539 - protein, 124 aa, Artificial Sequence
  Synthetic
QVQLVESGGGVVQPGRSLRLSCAASGFTFSNYGMHWVRQAPGKCLEWVAVISYDAWFSQYADAVKGRFTVSRDNSKNTLYLQMNSLRAEDTAVYYCARDLITFGGHYYFGMDVWGQGTTVTVSS

SEQ ID NO: 1540 - protein, 108 aa, Artificial Sequence
  Synthetic
EIVLTQSPGTLSLSPGERATLSCRASQSVSSNYLAWYQQKPGQAPRLLIYAASSRVTGIPDRFSGSGSGTDFTLTISRLEPEDFAVYYCQQYGSSPFTFGCGTKVEIK

SEQ ID NO: 1541 - protein, 247 aa, Artificial Sequence
  Synthetic
QVQLVESGGGVVQPGRSLRLSCAASGFTFSNYGMHWVRQAPGKCLEWVAVISYDAWFSQYADAVKGRFTVSRDNSKNTLYLQMNSLRAEDTAVYYCARDLITFGGHYYFGMDVWGQGTTVTVSSGGGGSGGGGSGGGGSEIVLTQSPGTLSLSPGERATLSCRASQSVSSNYLAWYQQKPGQAPRLLIYAASSRVTGIPDRFSGSGSGTDFTLTISRLEPEDFAVYYCQQYGSSPFTFGCGTKVEIK

SEQ ID NO: 1542 - protein, 502 aa, Artificial Sequence
  Synthetic
QVQLVESGGGVVQPGRSLRLSCAASGFTFSNYGMHWVRQAPGKCLEWVAVISYDAWFSQYADAVKGRFTVSRDNSKNTLYLQMNSLRAEDTAVYYCARDLITFGGHYYFGMDVWGQGTTVTVSSGGGGSGGGGSGGGGSEIVLTQSPGTLSLSPGERATLSCRASQSVSSNYLAWYQQKPGQAPRLLIYAASSRVTGIPDRFSGSGSGTDFTLTISRLEPEDFAVYYCQQYGSSPFTFGCGTKVEIKSGGGGSEVQLVESGGGLVQPGGSLKLSCAASGFTFNKYAMNWVRQAPGKGLEWVARIRSKYNNYATYYADSVKDRFTISRDDSKNTAYLQMNNLKTEDTAVYYCVRHGNFGNSYISYWAYWGQGTLVTVSSGGGGSGGGGSGGGGSQTVVTQEPSLTVSPGGTVTLTCGSSTGAVTSGNYPNWVQQKPGQAPRGLIGGTKFLAPGTPARFSGSLLGGKAALTLSGVQPEDEAEYYCVLWYSNRWVFGGGTKLTVL

SEQ ID NO: 1543 - protein, 990 aa, Artificial Sequence
  Synthetic
QVQLVESGGGVVQPGRSLRLSCAASGFTFSNYGMHWVRQAPGKCLEWVAVISYDAWFSQYADAVKGRFTVSRDNSKNTLYLQMNSLRAEDTAVYYCARDLITFGGHYYFGMDVWGQGTTVTVSSGGGGSGGGGSGGGGSEIVLTQSPGTLSLSPGERATLSCRASQSVSSNYLAWYQQKPGQAPRLLIYAASSRVTGIPDRFSGSGSGTDFTLTISRLEPEDFAVYYCQQYGSSPFTFGCGTKVEIKSGGGGSEVQLVESGGGLVQPGGSLKLSCAASGFTFNKYAMNWVRQAPGKGLEWVARIRSKYNNYATYYADSVKDRFTISRDDSKNTAYLQMNNLKTEDTAVYYCVRHGNFGNSYISYWAYWGQGTLVTVSSGGGGSGGGGSGGGGSQTVVTQEPSLTVSPGGTVTLTCGSSTGAVTSGNYPNWVQQKPGQAPRGLIGGTKFLAPGTPARFSGSLLGGKAALTLSGVQPEDEAEYYCVLWYSNRWVFGGGTKLTVLGGGGDKTHTCPPCPAPELLGGPSVFLFPPKPKDTLMISRTPEVTCVVVDVSHEDPEVKFNWYVDGVEVHNAKTKPCEEQYGSTYRCVSVLTVLHQDWLNGKEYKCKVSNKALPAPIEKTISKAKGQPREPQVYTLPPSREEMTKNQVSLTCLVKGFYPSDIAVEWESNGQPENNYKTTPPVLDSDGSFFLYSKLTVDKSRWQQGNVFSCSVMHEALHNHYTQKSLSLSPGKGGGGSGGGGSGGGGSGGGGSGGGGSGGGGSDKTHTCPPCPAPELLGGPSVFLFPPKPKDTLMISRTPEVTCVVVDVSHEDPEVKFNWYVDGVEVHNAKTKPCEEQYGSTYRCVSVLTVLHQDWLNGKEYKCKVSNKALPAPIEKTISKAKGQPREPQVYTLPPSREEMTKNQVSLTCLVKGFYPSDIAVEWESNGQPENNYKTTPPVLDSDGSFFLYSKLTVDKSRWQQGNVFSCSVMHEALHNHYTQKSLSLSPGK

SEQ ID NO: 1544 - protein, 5 aa, Artificial Sequence
  Synthetic
SYGIS

SEQ ID NO: 1545 - protein, 17 aa, Artificial Sequence
  Synthetic
WISAYNGQTIYAQKLQG

SEQ ID NO: 1546 - protein, 13 aa, Artificial Sequence
  Synthetic
DPDYYGSGSYSDY

SEQ ID NO: 1547 - protein, 11 aa, Artificial Sequence
  Synthetic
RASQSVSSNLA

SEQ ID NO: 1548 - protein, 7 aa, Artificial Sequence
  Synthetic
GGSSRAT

SEQ ID NO: 1549 - protein, 10 aa, Artificial Sequence
  Synthetic
QQYHSWPLLT

SEQ ID NO: 1550 - protein, 122 aa, Artificial Sequence; identical to SEQ ID NO: 1517
  Synthetic

SEQ ID NO: 1551 - protein, 108 aa, Artificial Sequence
  Synthetic
EIVMTQSPATLSVSPGERATLSCRASQSVSSNLAWYQQKPGQAPRLLIYGGSSRATGIPARFSGSGSGTEFTLTISSLQSEDFAVYYCQQYHSWPLLTFGCGTKVEIK

SEQ ID NO: 1552 - protein, 245 aa, Artificial Sequence
  Synthetic
QVQLVQSGAEVKKPGASVKVSCKASGYTFTSYGISWVRQAPGQCLEWMGWISAYNGQTIYAQKLQGRVTMTRDTSTSTAYMELRSLRSDDTAVYYCARDPDYYGSGSYSDYWGQGTLVTVSSGGGGSGGGGSGGGGSEIVMTQSPATLSVSPGERATLSCRASQSVSSNLAWYQQKPGQAPRLLIYGGSSRATGIPARFSGSGSGTEFTLTISSLQSEDFAVYYCQQYHSWPLLTFGCGTKVEIK

SEQ ID NO: 1553 - protein, 500 aa, Artificial Sequence
  Synthetic
QVQLVQSGAEVKKPGASVKVSCKASGYTFTSYGISWVRQAPGQCLEWMGWISAYNGQTIYAQKLQGRVTMTRDTSTSTAYMELRSLRSDDTAVYYCARDPDYYGSGSYSDYWGQGTLVTVSSGGGGSGGGGSGGGGSEIVMTQSPATLSVSPGERATLSCRASQSVSSNLAWYQQKPGQAPRLLIYGGSSRATGIPARFSGSGSGTEFTLTISSLQSEDFAVYYCQQYHSWPLLTFGCGTKVEIKSGGGGSEVQLVESGGGLVQPGGSLKLSCAASGFTFNKYAMNWVRQAPGKGLEWVARIRSKYNNYATYYADSVKDRFTISRDDSKNTAYLQMNNLKTEDTAVYYCVRHGNFGNSYISYWAYWGQGTLVTVSSGGGGSGGGGSGGGGSQTVVTQEPSLTVSPGGTVTLTCGSSTGAVTSGNYPNWVQQKPGQAPRGLIGGTKFLAPGTPARFSGSLLGGKAALTLSGVQPEDEAEYYCVLWYSNRWVFGGGTKLTVL

SEQ ID NO: 1554 - protein, 988 aa, Artificial Sequence
  Synthetic
QVQLVQSGAEVKKPGASVKVSCKASGYTFTSYGISWVRQAPGQCLEWMGWISAYNGQTIYAQKLQGRVTMTRDTSTSTAYMELRSLRSDDTAVYYCARDPDYYGSGSYSDYWGQGTLVTVSSGGGGSGGGGSGGGGSEIVMTQSPATLSVSPGERATLSCRASQSVSSNLAWYQQKPGQAPRLLIYGGSSRATGIPARFSGSGSGTEFTLTISSLQSEDFAVYYCQQYHSWPLLTFGCGTKVEIKSGGGGSEVQLVESGGGLVQPGGSLKLSCAASGFTFNKYAMNWVRQAPGKGLEWVARIRSKYNNYATYYADSVKDRFTISRDDSKNTAYLQMNNLKTEDTAVYYCVRHGNFGNSYISYWAYWGQGTLVTVSSGGGGSGGGGSGGGGSQTVVTQEPSLTVSPGGTVTLTCGSSTGAVTSGNYPNWVQQKPGQAPRGLIGGTKFLAPGTPARFSGSLLGGKAALTLSGVQPEDEAEYYCVLWYSNRWVFGGGTKLTVLGGGGDKTHTCPPCPAPELLGGPSVFLFPPKPKDTLMISRTPEVTCVVVDVSHEDPEVKFNWYVDGVEVHNAKTKPCEEQYGSTYRCVSVLTVLHQDWLNGKEYKCKVSNKALPAPIEKTISKAKGQPREPQVYTLPPSREEMTKNQVSLTCLVKGFYPSDIAVEWESNGQPENNYKTTPPVLDSDGSFFLYSKLTVDKSRWQQGNVFSCSVMHEALHNHYTQKSLSLSPGKGGGGSGGGGSGGGGSGGGGSGGGGSGGGGSDKTHTCPPCPAPELLGGPSVFLFPPKPKDTLMISRTPEVTCVVVDVSHEDPEVKFNWYVDGVEVHNAKTKPCEEQYGSTYRCVSVLTVLHQDWLNGKEYKCKVSNKALPAPIEKTISKAKGQPREPQVYTLPPSREEMTKNQVSLTCLVKGFYPSDIAVEWESNGQPENNYKTTPPVLDSDGSFFLYSKLTVDKSRWQQGNVFSCSVMHEALHNHYTQKSLSLSPGK

SEQ ID NO: 1555 - protein, 5 aa, Artificial Sequence
  Synthetic
SYWMH

SEQ ID NO: 1556 - protein, 17 aa, Artificial Sequence
  Synthetic
YISPNSGYTDYHQKFKG

SEQ ID NO: 1557 - protein, 5 aa, Artificial Sequence
  Synthetic
DPMDY

SEQ ID NO: 1558 - protein, 10 aa, Artificial Sequence
  Synthetic
SASSSVNYMH

SEQ ID NO: 1559 - protein, 7 aa, Artificial Sequence
  Synthetic
RTSNLAS

SEQ ID NO: 1560 - protein, 9 aa, Artificial Sequence
  Synthetic
QQWSSYPPT

SEQ ID NO: 1561 - protein, 114 aa, Artificial Sequence
  Synthetic
QVQLVQSGAVVKKPGASVKVSCKASGYTFTSYWMHWVRQRPGQCLEWMGYISPNSGYTDYHQKFKGRVTMTRDKSISTAYMELSRLTSDDTAVYYCARDPMDYWGQGTLVTVSS

SEQ ID NO: 1562 - protein, 106 aa, Artificial Sequence
  Synthetic
EIVLTQSPDFQSVTPKEKVTITCSASSSVNYMHWYQQKPDSSPKLLIKRTSNLASGVPSRFSGSGSGTDFTLTINSLEAEDAATYYCQQWSSYPPTFGCGTKLEIK

SEQ ID NO: 1563 - protein, 235 aa, Artificial Sequence
  Synthetic
QVQLVQSGAVVKKPGASVKVSCKASGYTFTSYWMHWVRQRPGQCLEWMGYISPNSGYTDYHQKFKGRVTMTRDKSISTAYMELSRLTSDDTAVYYCARDPMDYWGQGTLVTVSSGGGGSGGGGSGGGGSEIVLTQSPDFQSVTPKEKVTITCSASSSVNYMHWYQQKPDSSPKLLIKRTSNLASGVPSRFSGSGSGTDFTLTINSLEAEDAATYYCQQWSSYPPTFGCGTKLEIK

SEQ ID NO: 1564 - protein, 490 aa, Artificial Sequence
  Synthetic
QVQLVQSGAVVKKPGASVKVSCKASGYTFTSYWMHWVRQRPGQCLEWMGYISPNSGYTDYHQKFKGRVTMTRDKSISTAYMELSRLTSDDTAVYYCARDPMDYWGQGTLVTVSSGGGGSGGGGSGGGGSEIVLTQSPDFQSVTPKEKVTITCSASSSVNYMHWYQQKPDSSPKLLIKRTSNLASGVPSRFSGSGSGTDFTLTINSLEAEDAATYYCQQWSSYPPTFGCGTKLEIKSGGGGSEVQLVESGGGLVQPGGSLKLSCAASGFTFNKYAMNWVRQAPGKGLEWVARIRSKYNNYATYYADSVKDRFTISRDDSKNTAYLQMNNLKTEDTAVYYCVRHGNFGNSYISYWAYWGQGTLVTVSSGGGGSGGGGSGGGGSQTVVTQEPSLTVSPGGTVTLTCGSSTGAVTSGNYPNWVQQKPGQAPRGLIGGTKFLAPGTPARFSGSLLGGKAALTLSGVQPEDEAEYYCVLWYSNRWVFGGGTKLTVL

SEQ ID NO: 1565 - protein, 978 aa, Artificial Sequence
  Synthetic
QVQLVQSGAVVKKPGASVKVSCKASGYTFTSYWMHWVRQRPGQCLEWMGYISPNSGYTDYHQKFKGRVTMTRDKSISTAYMELSRLTSDDTAVYYCARDPMDYWGQGTLVTVSSGGGGSGGGGSGGGGSEIVLTQSPDFQSVTPKEKVTITCSASSSVNYMHWYQQKPDSSPKLLIKRTSNLASGVPSRFSGSGSGTDFTLTINSLEAEDAATYYCQQWSSYPPTFGCGTKLEIKSGGGGSEVQLVESGGGLVQPGGSLKLSCAASGFTFNKYAMNWVRQAPGKGLEWVARIRSKYNNYATYYADSVKDRFTISRDDSKNTAYLQMNNLKTEDTAVYYCVRHGNFGNSYISYWAYWGQGTLVTVSSGGGGSGGGGSGGGGSQTVVTQEPSLTVSPGGTVTLTCGSSTGAVTSGNYPNWVQQKPGQAPRGLIGGTKFLAPGTPARFSGSLLGGKAALTLSGVQPEDEAEYYCVLWYSNRWVFGGGTKLTVLGGGGDKTHTCPPCPAPELLGGPSVFLFPPKPKDTLMISRTPEVTCVVVDVSHEDPEVKFNWYVDGVEVHNAKTKPCEEQYGSTYRCVSVLTVLHQDWLNGKEYKCKVSNKALPAPIEKTISKAKGQPREPQVYTLPPSREEMTKNQVSLTCLVKGFYPSDIAVEWESNGQPENNYKTTPPVLDSDGSFFLYSKLTVDKSRWQQGNVFSCSVMHEALHNHYTQKSLSLSPGKGGGGSGGGGSGGGGSGGGGSGGGGSGGGGSDKTHTCPPCPAPELLGGPSVFLFPPKPKDTLMISRTPEVTCVVVDVSHEDPEVKFNWYVDGVEVHNAKTKPCEEQYGSTYRCVSVLTVLHQDWLNGKEYKCKVSNKALPAPIEKTISKAKGQPREPQVYTLPPSREEMTKNQVSLTCLVKGFYPSDIAVEWESNGQPENNYKTTPPVLDSDGSFFLYSKLTVDKSRWQQGNVFSCSVMHEALHNHYTQKSLSLSPGK

SEQ ID NO: 1566 - protein, 5 aa, Artificial Sequence
  Synthetic
GYYWS

SEQ ID NO: 1567 - protein, 16 aa, Artificial Sequence
  Synthetic
EINHRGSTNYNPSLKS

SEQ ID NO: 1568 - protein, 14 aa, Artificial Sequence
  Synthetic
GYSSSWYTGYVFDY

SEQ ID NO: 1569 - protein, 14 aa, Artificial Sequence
  Synthetic
TGTSSDVFGYDYVS

SEQ ID NO: 1570 - protein, 7 aa, Artificial Sequence
  Synthetic
DVSNRPS

SEQ ID NO: 1571 - protein, 10 aa, Artificial Sequence
  Synthetic
SSYKSRNQVI

SEQ ID NO: 1572 - protein, 122 aa, Artificial Sequence
  Synthetic
QVQLQQWGAGLLKPSETLSLTCAVYGGSFSGYYWSWIRQPPGKCLEWIGEINHRGSTNYNPSLKSRVTISGDTSKNQFSLKLSSVNAADTAVYYCARGYSSSWYTGYVFDYWGQGTLVTVSS

SEQ ID NO: 1573 - protein, 110 aa, Artificial Sequence
  Synthetic
QSALTQPASVSGSPGQSITISCTGTSSDVFGYDYVSWYQQHPGKAPKLMIYDVSNRPSGVSNRFSGSKSGNAASLTISGLQAEDEADYYCSSYKSRNQVIFGCGTKLTVL

SEQ ID NO: 1574 - protein, 247 aa, Artificial Sequence
  Synthetic
QVQLQQWGAGLLKPSETLSLTCAVYGGSFSGYYWSWIRQPPGKCLEWIGEINHRGSTNYNPSLKSRVTISGDTSKNQFSLKLSSVNAADTAVYYCARGYSSSWYTGYVFDYWGQGTLVTVSSGGGGSGGGGSGGGGSQSALTQPASVSGSPGQSITISCTGTSSDVFGYDYVSWYQQHPGKAPKLMIYDVSNRPSGVSNRFSGSKSGNAASLTISGLQAEDEADYYCSSYKSRNQVIFGCGTKLTVL

SEQ ID NO: 1575 - protein, 502 aa, Artificial Sequence
  Synthetic
QVQLQQWGAGLLKPSETLSLTCAVYGGSFSGYYWSWIRQPPGKCLEWIGEINHRGSTNYNPSLKSRVTISGDTSKNQFSLKLSSVNAADTAVYYCARGYSSSWYTGYVFDYWGQGTLVTVSSGGGGSGGGGSGGGGSQSALTQPASVSGSPGQSITISCTGTSSDVFGYDYVSWYQQHPGKAPKLMIYDVSNRPSGVSNRFSGSKSGNAASLTISGLQAEDEADYYCSSYKSRNQVIFGCGTKLTVLSGGGGSEVQLVESGGGLVQPGGSLKLSCAASGFTFNKYAMNWVRQAPGKGLEWVARIRSKYNNYATYYADSVKDRFTISRDDSKNTAYLQMNNLKTEDTAVYYCVRHGNFGNSYISYWAYWGQGTLVTVSSGGGGSGGGGSGGGGSQTVVTQEPSLTVSPGGTVTLTCGSSTGAVTSGNYPNWVQQKPGQAPRGLIGGTKFLAPGTPARFSGSLLGGKAALTLSGVQPEDEAEYYCVLWYSNRWVFGGGTKLTVL

SEQ ID NO: 1576 - protein, 990 aa, Artificial Sequence
  Synthetic
QVQLQQWGAGLLKPSETLSLTCAVYGGSFSGYYWSWIRQPPGKCLEWIGEINHRGSTNYNPSLKSRVTISGDTSKNQFSLKLSSVNAADTAVYYCARGYSSSWYTGYVFDYWGQGTLVTVSSGGGGSGGGGSGGGGSQSALTQPASVSGSPGQSITISCTGTSSDVFGYDYVSWYQQHPGKAPKLMIYDVSNRPSGVSNRFSGSKSGNAASLTISGLQAEDEADYYCSSYKSRNQVIFGCGTKLTVLSGGGGSEVQLVESGGGLVQPGGSLKLSCAASGFTFNKYAMNWVRQAPGKGLEWVARIRSKYNNYATYYADSVKDRFTISRDDSKNTAYLQMNNLKTEDTAVYYCVRHGNFGNSYISYWAYWGQGTLVTVSSGGGGSGGGGSGGGGSQTVVTQEPSLTVSPGGTVTLTCGSSTGAVTSGNYPNWVQQKPGQAPRGLIGGTKFLAPGTPARFSGSLLGGKAALTLSGVQPEDEAEYYCVLWYSNRWVFGGGTKLTVLGGGGDKTHTCPPCPAPELLGGPSVFLFPPKPKDTLMISRTPEVTCVVVDVSHEDPEVKFNWYVDGVEVHNAKTKPCEEQYGSTYRCVSVLTVLHQDWLNGKEYKCKVSNKALPAPIEKTISKAKGQPREPQVYTLPPSREEMTKNQVSLTCLVKGFYPSDIAVEWESNGQPENNYKTTPPVLDSDGSFFLYSKLTVDKSRWQQGNVFSCSVMHEALHNHYTQKSLSLSPGKGGGGSGGGGSGGGGSGGGGSGGGGSGGGGSDKTHTCPPCPAPELLGGPSVFLFPPKPKDTLMISRTPEVTCVVVDVSHEDPEVKFNWYVDGVEVHNAKTKPCEEQYGSTYRCVSVLTVLHQDWLNGKEYKCKVSNKALPAPIEKTISKAKGQPREPQVYTLPPSREEMTKNQVSLTCLVKGFYPSDIAVEWESNGQPENNYKTTPPVLDSDGSFFLYSKLTVDKSRWQQGNVFSCSVMHEALHNHYTQKSLSLSPGK

SEQ ID NO: 1577 - protein, 5 aa, Artificial Sequence
  Synthetic
DYWMH

SEQ ID NO: 1578 - protein, 17 aa, Artificial Sequence
  Synthetic
YITPSTGYTDYHRKFRG

SEQ ID NO: 1579 - protein, 5 aa, Artificial Sequence
  Synthetic
STFDA

SEQ ID NO: 1580 - protein, 11 aa, Artificial Sequence
  Synthetic
RASQEISGYLS

SEQ ID NO: 1581 - protein, 7 aa, Artificial Sequence
  Synthetic
ATSSLDA

SEQ ID NO: 1582 - protein, 9 aa, Artificial Sequence
  Synthetic
LQYASYPLT

SEQ ID NO: 1583 - protein, 114 aa, Artificial Sequence
  Synthetic
QVQLVQSGAELKKPGASVKVSCKTSGYTFTDYWMHWVRQAPGQCLEWMGYITPSTGYTDYHRKFRGRVTMTRDTSISTAYMELSRLRSDDTAVYYCARSTFDAWGQGTMVTVSS

SEQ ID NO: 1584 - protein, 107 aa, Artificial Sequence
  Synthetic
DIQMTQSPSSLSASVGDRVSITCRASQEISGYLSWFQQKPGKAIKRLIYATSSLDAGVPSRFSGSGSGTDFTLTISSLQPEDFADYYCLQYASYPLTFGCGTKLEIK

SEQ ID NO: 1585 - protein, 236 aa, Artificial Sequence
  Synthetic
QVQLVQSGAELKKPGASVKVSCKTSGYTFTDYWMHWVRQAPGQCLEWMGYITPSTGYTDYHRKFRGRVTMTRDTSISTAYMELSRLRSDDTAVYYCARSTFDAWGQGTMVTVSSGGGGSGGGGSGGGGSDIQMTQSPSSLSASVGDRVSITCRASQEISGYLSWFQQKPGKAIKRLIYATSSLDAGVPSRFSGSGSGTDFTLTISSLQPEDFADYYCLQYASYPLTFGCGTKLEIK

SEQ ID NO: 1586 - protein, 491 aa, Artificial Sequence
  Synthetic
QVQLVQSGAELKKPGASVKVSCKTSGYTFTDYWMHWVRQAPGQCLEWMGYITPSTGYTDYHRKFRGRVTMTRDTSISTAYMELSRLRSDDTAVYYCARSTFDAWGQGTMVTVSSGGGGSGGGGSGGGGSDIQMTQSPSSLSASVGDRVSITCRASQEISGYLSWFQQKPGKAIKRLIYATSSLDAGVPSRFSGSGSGTDFTLTISSLQPEDFADYYCLQYASYPLTFGCGTKLEIKSGGGGSEVQLVESGGGLVQPGGSLKLSCAASGFTFNKYAMNWVRQAPGKGLEWVARIRSKYNNYATYYADSVKDRFTISRDDSKNTAYLQMNNLKTEDTAVYYCVRHGNFGNSYISYWAYWGQGTLVTVSSGGGGSGGGGSGGGGSQTVVTQEPSLTVSPGGTVTLTCGSSTGAVTSGNYPNWVQQKPGQAPRGLIGGTKFLAPGTPARFSGSLLGGKAALTLSGVQPEDEAEYYCVLWYSNRWVFGGGTKLTVL

SEQ ID NO: 1587 - protein, 979 aa, Artificial Sequence
  Synthetic
QVQLVQSGAELKKPGASVKVSCKTSGYTFTDYWMHWVRQAPGQCLEWMGYITPSTGYTDYHRKFRGRVTMTRDTSISTAYMELSRLRSDDTAVYYCARSTFDAWGQGTMVTVSSGGGGSGGGGSGGGGSDIQMTQSPSSLSASVGDRVSITCRASQEISGYLSWFQQKPGKAIKRLIYATSSLDAGVPSRFSGSGSGTDFTLTISSLQPEDFADYYCLQYASYPLTFGCGTKLEIKSGGGGSEVQLVESGGGLVQPGGSLKLSCAASGFTFNKYAMNWVRQAPGKGLEWVARIRSKYNNYATYYADSVKDRFTISRDDSKNTAYLQMNNLKTEDTAVYYCVRHGNFGNSYISYWAYWGQGTLVTVSSGGGGSGGGGSGGGGSQTVVTQEPSLTVSPGGTVTLTCGSSTGAVTSGNYPNWVQQKPGQAPRGLIGGTKFLAPGTPARFSGSLLGGKAALTLSGVQPEDEAEYYCVLWYSNRWVFGGGTKLTVLGGGGDKTHTCPPCPAPELLGGPSVFLFPPKPKDTLMISRTPEVTCVVVDVSHEDPEVKFNWYVDGVEVHNAKTKPCEEQYGSTYRCVSVLTVLHQDWLNGKEYKCKVSNKALPAPIEKTISKAKGQPREPQVYTLPPSREEMTKNQVSLTCLVKGFYPSDIAVEWESNGQPENNYKTTPPVLDSDGSFFLYSKLTVDKSRWQQGNVFSCSVMHEALHNHYTQKSLSLSPGKGGGGSGGGGSGGGGSGGGGSGGGGSGGGGSDKTHTCPPCPAPELLGGPSVFLFPPKPKDTLMISRTPEVTCVVVDVSHEDPEVKFNWYVDGVEVHNAKTKPCEEQYGSTYRCVSVLTVLHQDWLNGKEYKCKVSNKALPAPIEKTISKAKGQPREPQVYTLPPSREEMTKNQVSLTCLVKGFYPSDIAVEWESNGQPENNYKTTPPVLDSDGSFFLYSKLTVDKSRWQQGNVFSCSVMHEALHNHYTQKSLSLSPGK

SEQ ID NO: 1588 - protein, 5 aa, Artificial Sequence
  Synthetic
SYWMH

SEQ ID NO: 1589 - protein, 17 aa, Artificial Sequence
  Synthetic
YITPSTGYTEYNQKFKG

SEQ ID NO: 1590 - protein, 10 aa, Artificial Sequence
  Synthetic
VHDYDRAMEY

SEQ ID NO: 1591 - protein, 11 aa, Artificial Sequence
  Synthetic
KASQDINKYIA

SEQ ID NO: 1592 - protein, 7 aa, Artificial Sequence
  Synthetic
YTSTLQP

SEQ ID NO: 1593 - protein, 9 aa, Artificial Sequence
  Synthetic
LQYASYPFT

SEQ ID NO: 1594 - protein, 119 aa, Artificial Sequence
  Synthetic
QVQLVQSGAEVKKPGASVKVSCKASGYTFTSYWMHWVRQAPGQCLEWIGYITPSTGYTEYNQKFKGRVTMTRDKSTSTVYMELSSLTSEDTAVYYCARVHDYDRAMEYWGQGTTVTVSS

SEQ ID NO: 1595 - protein, 107 aa, Artificial Sequence
  Synthetic
DIQMTQSPSSLSASVGDRVTITCKASQDINKYIAWYQQKPGKGPKLLIYYTSTLQPGVPSRFSGSGSGTDFTFTISSLQPEDIATYYCLQYASYPFTFGCGTRLEIK

SEQ ID NO: 1596 - protein, 241 aa, Artificial Sequence
  Synthetic
QVQLVQSGAEVKKPGASVKVSCKASGYTFTSYWMHWVRQAPGQCLEWIGYITPSTGYTEYNQKFKGRVTMTRDKSTSTVYMELSSLTSEDTAVYYCARVHDYDRAMEYWGQGTTVTVSSGGGGSGGGGSGGGGSDIQMTQSPSSLSASVGDRVTITCKASQDINKYIAWYQQKPGKGPKLLIYYTSTLQPGVPSRFSGSGSGTDFTFTISSLQPEDIATYYCLQYASYPFTFGCGTRLEIK

SEQ ID NO: 1597 - protein, 496 aa, Artificial Sequence
  Synthetic
QVQLVQSGAEVKKPGASVKVSCKASGYTFTSYWMHWVRQAPGQCLEWIGYITPSTGYTEYNQKFKGRVTMTRDKSTSTVYMELSSLTSEDTAVYYCARVHDYDRAMEYWGQGTTVTVSSGGGGSGGGGSGGGGSDIQMTQSPSSLSASVGDRVTITCKASQDINKYIAWYQQKPGKGPKLLIYYTSTLQPGVPSRFSGSGSGTDFTFTISSLQPEDIATYYCLQYASYPFTFGCGTRLEIKSGGGGSEVQLVESGGGLVQPGGSLKLSCAASGFTFNKYAMNWVRQAPGKGLEWVARIRSKYNNYATYYADSVKDRFTISRDDSKNTAYLQMNNLKTEDTAVYYCVRHGNFGNSYISYWAYWGQGTLVTVSSGGGGSGGGGSGGGGSQTVVTQEPSLTVSPGGTVTLTCGSSTGAVTSGNYPNWVQQKPGQAPRGLIGGTKFLAPGTPARFSGSLLGGKAALTLSGVQPEDEAEYYCVLWYSNRWVFGGGTKLTVL

SEQ ID NO: 1598 - protein, 984 aa, Artificial Sequence
  Synthetic
QVQLVQSGAEVKKPGASVKVSCKASGYTFTSYWMHWVRQAPGQCLEWIGYITPSTGYTEYNQKFKGRVTMTRDKSTSTVYMELSSLTSEDTAVYYCARVHDYDRAMEYWGQGTTVTVSSGGGGSGGGGSGGGGSDIQMTQSPSSLSASVGDRVTITCKASQDINKYIAWYQQKPGKGPKLLIYYTSTLQPGVPSRFSGSGSGTDFTFTISSLQPEDIATYYCLQYASYPFTFGCGTRLEIKSGGGGSEVQLVESGGGLVQPGGSLKLSCAASGFTFNKYAMNWVRQAPGKGLEWVARIRSKYNNYATYYADSVKDRFTISRDDSKNTAYLQMNNLKTEDTAVYYCVRHGNFGNSYISYWAYWGQGTLVTVSSGGGGSGGGGSGGGGSQTVVTQEPSLTVSPGGTVTLTCGSSTGAVTSGNYPNWVQQKPGQAPRGLIGGTKFLAPGTPARFSGSLLGGKAALTLSGVQPEDEAEYYCVLWYSNRWVFGGGTKLTVLGGGGDKTHTCPPCPAPELLGGPSVFLFPPKPKDTLMISRTPEVTCVVVDVSHEDPEVKFNWYVDGVEVHNAKTKPCEEQYGSTYRCVSVLTVLHQDWLNGKEYKCKVSNKALPAPIEKTISKAKGQPREPQVYTLPPSREEMTKNQVSLTCLVKGFYPSDIAVEWESNGQPENNYKTTPPVLDSDGSFFLYSKLTVDKSRWQQGNVFSCSVMHEALHNHYTQKSLSLSPGKGGGGSGGGGSGGGGSGGGGSGGGGSGGGGSDKTHTCPPCPAPELLGGPSVFLFPPKPKDTLMISRTPEVTCVVVDVSHEDPEVKFNWYVDGVEVHNAKTKPCEEQYGSTYRCVSVLTVLHQDWLNGKEYKCKVSNKALPAPIEKTISKAKGQPREPQVYTLPPSREEMTKNQVSLTCLVKGFYPSDIAVEWESNGQPENNYKTTPPVLDSDGSFFLYSKLTVDKSRWQQGNVFSCSVMHEALHNHYTQKSLSLSPGK

SEQ ID NO: 1599 - protein, 5 aa, Artificial Sequence
  Synthetic
DYWMH

SEQ ID NO: 1600 - protein, 17 aa, Artificial Sequence
  Synthetic
YITPSSGYTDYNQKFKG

SEQ ID NO: 1601 - protein, 11 aa, Artificial Sequence
  Synthetic
NYLGRGYAMDY

SEQ ID NO: 1602 - protein, 11 aa, Artificial Sequence
  Synthetic
RASENIYSNLA

SEQ ID NO: 1603 - protein, 7 aa, Artificial Sequence
  Synthetic
AATNLAE

SEQ ID NO: 1604 - protein, 9 aa, Artificial Sequence
  Synthetic
QHFYGTPLT

SEQ ID NO: 1605 - protein, 120 aa, Artificial Sequence
  Synthetic
QVQLVQSGAEVKKPGASVKVSCKASGYTFTDYWMHWVRQAPGQCLEWMGYITPSSGYTDYNQKFKGRVTMTRDKSTSTVYMELSSLTSEDTAVYYCARNYLGRGYAMDYWGQGTTVTVSS

SEQ ID NO: 1606 - protein, 107 aa, Artificial Sequence
  Synthetic
DIQMTQSPSSLSASVGDRVTITCRASENIYSNLAWYQQKPGKAPKLLIYAATNLAEGVPSRFSGSGSGTDFTLTISSLQPEDFATYYCQHFYGTPLTFGCGTKLEIK

SEQ ID NO: 1607 - protein, 242 aa, Artificial Sequence
  Synthetic
QVQLVQSGAEVKKPGASVKVSCKASGYTFTDYWMHWVRQAPGQCLEWMGYITPSSGYTDYNQKFKGRVTMTRDKSTSTVYMELSSLTSEDTAVYYCARNYLGRGYAMDYWGQGTTVTVSSGGGGSGGGGSGGGGSDIQMTQSPSSLSASVGDRVTITCRASENIYSNLAWYQQKPGKAPKLLIYAATNLAEGVPSRFSGSGSGTDFTLTISSLQPEDFATYYCQHFYGTPLTFGCGTKLEIK

SEQ ID NO: 1608 - protein, 497 aa, Artificial Sequence
  Synthetic
QVQLVQSGAEVKKPGASVKVSCKASGYTFTDYWMHWVRQAPGQCLEWMGYITPSSGYTDYNQKFKGRVTMTRDKSTSTVYMELSSLTSEDTAVYYCARNYLGRGYAMDYWGQGTTVTVSSGGGGSGGGGSGGGGSDIQMTQSPSSLSASVGDRVTITCRASENIYSNLAWYQQKPGKAPKLLIYAATNLAEGVPSRFSGSGSGTDFTLTISSLQPEDFATYYCQHFYGTPLTFGCGTKLEIKSGGGGSEVQLVESGGGLVQPGGSLKLSCAASGFTFNKYAMNWVRQAPGKGLEWVARIRSKYNNYATYYADSVKDRFTISRDDSKNTAYLQMNNLKTEDTAVYYCVRHGNFGNSYISYWAYWGQGTLVTVSSGGGGSGGGGSGGGGSQTVVTQEPSLTVSPGGTVTLTCGSSTGAVTSGNYPNWVQQKPGQAPRGLIGGTKFLAPGTPARFSGSLLGGKAALTLSGVQPEDEAEYYCVLWYSNRWVFGGGTKLTVL

SEQ ID NO: 1609 - protein, 985 aa, Artificial Sequence
  Synthetic
QVQLVQSGAEVKKPGASVKVSCKASGYTFTDYWMHWVRQAPGQCLEWMGYITPSSGYTDYNQKFKGRVTMTRDKSTSTVYMELSSLTSEDTAVYYCARNYLGRGYAMDYWGQGTTVTVSSGGGGSGGGGSGGGGSDIQMTQSPSSLSASVGDRVTITCRASENIYSNLAWYQQKPGKAPKLLIYAATNLAEGVPSRFSGSGSGTDFTLTISSLQPEDFATYYCQHFYGTPLTFGCGTKLEIKSGGGGSEVQLVESGGGLVQPGGSLKLSCAASGFTFNKYAMNWVRQAPGKGLEWVARIRSKYNNYATYYADSVKDRFTISRDDSKNTAYLQMNNLKTEDTAVYYCVRHGNFGNSYISYWAYWGQGTLVTVSSGGGGSGGGGSGGGGSQTVVTQEPSLTVSPGGTVTLTCGSSTGAVTSGNYPNWVQQKPGQAPRGLIGGTKFLAPGTPARFSGSLLGGKAALTLSGVQPEDEAEYYCVLWYSNRWVFGGGTKLTVLGGGGDKTHTCPPCPAPELLGGPSVFLFPPKPKDTLMISRTPEVTCVVVDVSHEDPEVKFNWYVDGVEVHNAKTKPCEEQYGSTYRCVSVLTVLHQDWLNGKEYKCKVSNKALPAPIEKTISKAKGQPREPQVYTLPPSREEMTKNQVSLTCLVKGFYPSDIAVEWESNGQPENNYKTTPPVLDSDGSFFLYSKLTVDKSRWQQGNVFSCSVMHEALHNHYTQKSLSLSPGKGGGGSGGGGSGGGGSGGGGSGGGGSGGGGSDKTHTCPPCPAPELLGGPSVFLFPPKPKDTLMISRTPEVTCVVVDVSHEDPEVKFNWYVDGVEVHNAKTKPCEEQYGSTYRCVSVLTVLHQDWLNGKEYKCKVSNKALPAPIEKTISKAKGQPREPQVYTLPPSREEMTKNQVSLTCLVKGFYPSDIAVEWESNGQPENNYKTTPPVLDSDGSFFLYSKLTVDKSRWQQGNVFSCSVMHEALHNHYTQKSLSLSPGK

SEQ ID NO: 1610 - protein, 5 aa, Artificial Sequence
  Synthetic
GYYWS

SEQ ID NO: 1611 - protein, 16 aa, Artificial Sequence
  Synthetic
EINHRGSTNYNPSLKS

SEQ ID NO: 1612 - protein, 14 aa, Artificial Sequence
  Synthetic
GYSSSWYTGYVFDY

SEQ ID NO: 1613 - protein, 14 aa, Artificial Sequence
  Synthetic
TGTSSDVFGYDYVS

SEQ ID NO: 1614 - protein, 7 aa, Artificial Sequence
  Synthetic
DVSNRPS

SEQ ID NO: 1615 - protein, 10 aa, Artificial Sequence
  Synthetic
SSYKSSSTVV

SEQ ID NO: 1616 - protein, 122 aa, Artificial Sequence; identical to SEQ ID NO: 1572
  Synthetic

SEQ ID NO: 1617 - protein, 110 aa, Artificial Sequence
  Synthetic
QSALTQPASVSGSPGQSITISCTGTSSDVFGYDYVSWYQQHPGKAPKLMIYDVSNRPSGVSNRFSGSKSGNAASLTISGLQAEDEADYYCSSYKSSSTVVFGCGTKLTVL

SEQ ID NO: 1618 - protein, 247 aa, Artificial Sequence
  Synthetic
QVQLQQWGAGLLKPSETLSLTCAVYGGSFSGYYWSWIRQPPGKCLEWIGEINHRGSTNYNPSLKSRVTISGDTSKNQFSLKLSSVNAADTAVYYCARGYSSSWYTGYVFDYWGQGTLVTVSSGGGGSGGGGSGGGGSQSALTQPASVSGSPGQSITISCTGTSSDVFGYDYVSWYQQHPGKAPKLMIYDVSNRPSGVSNRFSGSKSGNAASLTISGLQAEDEADYYCSSYKSSSTVVFGCGTKLTVL

SEQ ID NO: 1619 - protein, 502 aa, Artificial Sequence
  Synthetic
QVQLQQWGAGLLKPSETLSLTCAVYGGSFSGYYWSWIRQPPGKCLEWIGEINHRGSTNYNPSLKSRVTISGDTSKNQFSLKLSSVNAADTAVYYCARGYSSSWYTGYVFDYWGQGTLVTVSSGGGGSGGGGSGGGGSQSALTQPASVSGSPGQSITISCTGTSSDVFGYDYVSWYQQHPGKAPKLMIYDVSNRPSGVSNRFSGSKSGNAASLTISGLQAEDEADYYCSSYKSSSTVVFGCGTKLTVLSGGGGSEVQLVESGGGLVQPGGSLKLSCAASGFTFNKYAMNWVRQAPGKGLEWVARIRSKYNNYATYYADSVKDRFTISRDDSKNTAYLQMNNLKTEDTAVYYCVRHGNFGNSYISYWAYWGQGTLVTVSSGGGGSGGGGSGGGGSQTVVTQEPSLTVSPGGTVTLTCGSSTGAVTSGNYPNWVQQKPGQAPRGLIGGTKFLAPGTPARFSGSLLGGKAALTLSGVQPEDEAEYYCVLWYSNRWVFGGGTKLTVL

SEQ ID NO: 1620 - protein, 990 aa, Artificial Sequence
  Synthetic
QVQLQQWGAGLLKPSETLSLTCAVYGGSFSGYYWSWIRQPPGKCLEWIGEINHRGSTNYNPSLKSRVTISGDTSKNQFSLKLSSVNAADTAVYYCARGYSSSWYTGYVFDYWGQGTLVTVSSGGGGSGGGGSGGGGSQSALTQPASVSGSPGQSITISCTGTSSDVFGYDYVSWYQQHPGKAPKLMIYDVSNRPSGVSNRFSGSKSGNAASLTISGLQAEDEADYYCSSYKSSSTVVFGCGTKLTVLSGGGGSEVQLVESGGGLVQPGGSLKLSCAASGFTFNKYAMNWVRQAPGKGLEWVARIRSKYNNYATYYADSVKDRFTISRDDSKNTAYLQMNNLKTEDTAVYYCVRHGNFGNSYISYWAYWGQGTLVTVSSGGGGSGGGGSGGGGSQTVVTQEPSLTVSPGGTVTLTCGSSTGAVTSGNYPNWVQQKPGQAPRGLIGGTKFLAPGTPARFSGSLLGGKAALTLSGVQPEDEAEYYCVLWYSNRWVFGGGTKLTVLGGGGDKTHTCPPCPAPELLGGPSVFLFPPKPKDTLMISRTPEVTCVVVDVSHEDPEVKFNWYVDGVEVHNAKTKPCEEQYGSTYRCVSVLTVLHQDWLNGKEYKCKVSNKALPAPIEKTISKAKGQPREPQVYTLPPSREEMTKNQVSLTCLVKGFYPSDIAVEWESNGQPENNYKTTPPVLDSDGSFFLYSKLTVDKSRWQQGNVFSCSVMHEALHNHYTQKSLSLSPGKGGGGSGGGGSGGGGSGGGGSGGGGSGGGGSDKTHTCPPCPAPELLGGPSVFLFPPKPKDTLMISRTPEVTCVVVDVSHEDPEVKFNWYVDGVEVHNAKTKPCEEQYGSTYRCVSVLTVLHQDWLNGKEYKCKVSNKALPAPIEKTISKAKGQPREPQVYTLPPSREEMTKNQVSLTCLVKGFYPSDIAVEWESNGQPENNYKTTPPVLDSDGSFFLYSKLTVDKSRWQQGNVFSCSVMHEALHNHYTQKSLSLSPGK

SEQ ID NO: 1621 - protein, 5 aa, Artificial Sequence
  Synthetic
DYWMH

SEQ ID NO: 1622 - protein, 17 aa, Artificial Sequence
  Synthetic
YITPSTGYTDYHRKFRG

SEQ ID NO: 1623 - protein, 5 aa, Artificial Sequence
  Synthetic
STFDA

SEQ ID NO: 1624 - protein, 11 aa, Artificial Sequence
  Synthetic
RASQEISGYLS

SEQ ID NO: 1625 - protein, 7 aa, Artificial Sequence
  Synthetic
ATSSLDA

SEQ ID NO: 1626 - protein, 9 aa, Artificial Sequence
  Synthetic
LQYASYPLT

SEQ ID NO: 1627 - protein, 114 aa, Artificial Sequence
  Synthetic
QVQLVQSGAEVKKPGASVKVSCKASGYTFTDYWMHWVRQAPGQCLEWMGYITPSTGYTDYHRKFRGRVTMTRDKSISTAYMELSRLRSDDTAVYYCARSTFDAWGQGTMVTVSS

SEQ ID NO: 1628 - protein, 107 aa, Artificial Sequence; identical to SEQ ID NO: 1584
  Synthetic

SEQ ID NO: 1629 - protein, 236 aa, Artificial Sequence
  Synthetic
QVQLVQSGAEVKKPGASVKVSCKASGYTFTDYWMHWVRQAPGQCLEWMGYITPSTGYTDYHRKFRGRVTMTRDKSISTAYMELSRLRSDDTAVYYCARSTFDAWGQGTMVTVSSGGGGSGGGGSGGGGSDIQMTQSPSSLSASVGDRVSITCRASQEISGYLSWFQQKPGKAIKRLIYATSSLDAGVPSRFSGSGSGTDFTLTISSLQPEDFADYYCLQYASYPLTFGCGTKLEIK

SEQ ID NO: 1630 - protein, 491 aa, Artificial Sequence
  Synthetic
QVQLVQSGAEVKKPGASVKVSCKASGYTFTDYWMHWVRQAPGQCLEWMGYITPSTGYTDYHRKFRGRVTMTRDKSISTAYMELSRLRSDDTAVYYCARSTFDAWGQGTMVTVSSGGGGSGGGGSGGGGSDIQMTQSPSSLSASVGDRVSITCRASQEISGYLSWFQQKPGKAIKRLIYATSSLDAGVPSRFSGSGSGTDFTLTISSLQPEDFADYYCLQYASYPLTFGCGTKLEIKSGGGGSEVQLVESGGGLVQPGGSLKLSCAASGFTFNKYAMNWVRQAPGKGLEWVARIRSKYNNYATYYADSVKDRFTISRDDSKNTAYLQMNNLKTEDTAVYYCVRHGNFGNSYISYWAYWGQGTLVTVSSGGGGSGGGGSGGGGSQTVVTQEPSLTVSPGGTVTLTCGSSTGAVTSGNYPNWVQQKPGQAPRGLIGGTKFLAPGTPARFSGSLLGGKAALTLSGVQPEDEAEYYCVLWYSNRWVFGGGTKLTVL

SEQ ID NO: 1631 - protein, 979 aa, Artificial Sequence
  Synthetic
QVQLVQSGAEVKKPGASVKVSCKASGYTFTDYWMHWVRQAPGQCLEWMGYITPSTGYTDYHRKFRGRVTMTRDKSISTAYMELSRLRSDDTAVYYCARSTFDAWGQGTMVTVSSGGGGSGGGGSGGGGSDIQMTQSPSSLSASVGDRVSITCRASQEISGYLSWFQQKPGKAIKRLIYATSSLDAGVPSRFSGSGSGTDFTLTISSLQPEDFADYYCLQYASYPLTFGCGTKLEIKSGGGGSEVQLVESGGGLVQPGGSLKLSCAASGFTFNKYAMNWVRQAPGKGLEWVARIRSKYNNYATYYADSVKDRFTISRDDSKNTAYLQMNNLKTEDTAVYYCVRHGNFGNSYISYWAYWGQGTLVTVSSGGGGSGGGGSGGGGSQTVVTQEPSLTVSPGGTVTLTCGSSTGAVTSGNYPNWVQQKPGQAPRGLIGGTKFLAPGTPARFSGSLLGGKAALTLSGVQPEDEAEYYCVLWYSNRWVFGGGTKLTVLGGGGDKTHTCPPCPAPELLGGPSVFLFPPKPKDTLMISRTPEVTCVVVDVSHEDPEVKFNWYVDGVEVHNAKTKPCEEQYGSTYRCVSVLTVLHQDWLNGKEYKCKVSNKALPAPIEKTISKAKGQPREPQVYTLPPSREEMTKNQVSLTCLVKGFYPSDIAVEWESNGQPENNYKTTPPVLDSDGSFFLYSKLTVDKSRWQQGNVFSCSVMHEALHNHYTQKSLSLSPGKGGGGSGGGGSGGGGSGGGGSGGGGSGGGGSDKTHTCPPCPAPELLGGPSVFLFPPKPKDTLMISRTPEVTCVVVDVSHEDPEVKFNWYVDGVEVHNAKTKPCEEQYGSTYRCVSVLTVLHQDWLNGKEYKCKVSNKALPAPIEKTISKAKGQPREPQVYTLPPSREEMTKNQVSLTCLVKGFYPSDIAVEWESNGQPENNYKTTPPVLDSDGSFFLYSKLTVDKSRWQQGNVFSCSVMHEALHNHYTQKSLSLSPGK

SEQ ID NO: 1632 - protein, 5 aa, Artificial Sequence
  Synthetic
SYWMH

SEQ ID NO: 1633 - protein, 17 aa, Artificial Sequence
  Synthetic
YITPSTGYTEYNQKFKG

SEQ ID NO: 1634 - protein, 10 aa, Artificial Sequence
  Synthetic
VHDYDRAMEY

SEQ ID NO: 1635 - protein, 11 aa, Artificial Sequence
  Synthetic
KASQDINKYIA

SEQ ID NO: 1636 - protein, 7 aa, Artificial Sequence
  Synthetic
YTSTLQP

SEQ ID NO: 1637 - protein, 9 aa, Artificial Sequence
  Synthetic
LQYASYPFT

SEQ ID NO: 1638 - protein, 119 aa, Artificial Sequence
  Synthetic
QVQLVQSGAEVKKPGASVKVSCKASGYTFTSYWMHWVRQAPGQCLEWMGYITPSTGYTEYNQKFKGRVTMTRDKSTSTVYMELSSLRSEDTAVYYCARVHDYDRAMEYWGQGTTVTVSS

SEQ ID NO: 1639 - protein, 107 aa, Artificial Sequence; identical to SEQ ID NO: 1595
  Synthetic

SEQ ID NO: 1640 - protein, 241 aa, Artificial Sequence
  Synthetic
QVQLVQSGAEVKKPGASVKVSCKASGYTFTSYWMHWVRQAPGQCLEWMGYITPSTGYTEYNQKFKGRVTMTRDKSTSTVYMELSSLRSEDTAVYYCARVHDYDRAMEYWGQGTTVTVSSGGGGSGGGGSGGGGSDIQMTQSPSSLSASVGDRVTITCKASQDINKYIAWYQQKPGKGPKLLIYYTSTLQPGVPSRFSGSGSGTDFTFTISSLQPEDIATYYCLQYASYPFTFGCGTRLEIK

SEQ ID NO: 1641 - protein, 496 aa, Artificial Sequence
  Synthetic
QVQLVQSGAEVKKPGASVKVSCKASGYTFTSYWMHWVRQAPGQCLEWMGYITPSTGYTEYNQKFKGRVTMTRDKSTSTVYMELSSLRSEDTAVYYCARVHDYDRAMEYWGQGTTVTVSSGGGGSGGGGSGGGGSDIQMTQSPSSLSASVGDRVTITCKASQDINKYIAWYQQKPGKGPKLLIYYTSTLQPGVPSRFSGSGSGTDFTFTISSLQPEDIATYYCLQYASYPFTFGCGTRLEIKSGGGGSEVQLVESGGGLVQPGGSLKLSCAASGFTFNKYAMNWVRQAPGKGLEWVARIRSKYNNYATYYADSVKDRFTISRDDSKNTAYLQMNNLKTEDTAVYYCVRHGNFGNSYISYWAYWGQGTLVTVSSGGGGSGGGGSGGGGSQTVVTQEPSLTVSPGGTVTLTCGSSTGAVTSGNYPNWVQQKPGQAPRGLIGGTKFLAPGTPARFSGSLLGGKAALTLSGVQPEDEAEYYCVLWYSNRWVFGGGTKLTVL

SEQ ID NO: 1642 - protein, 984 aa, Artificial Sequence
  Synthetic
QVQLVQSGAEVKKPGASVKVSCKASGYTFTSYWMHWVRQAPGQCLEWMGYITPSTGYTEYNQKFKGRVTMTRDKSTSTVYMELSSLRSEDTAVYYCARVHDYDRAMEYWGQGTTVTVSSGGGGSGGGGSGGGGSDIQMTQSPSSLSASVGDRVTITCKASQDINKYIAWYQQKPGKGPKLLIYYTSTLQPGVPSRFSGSGSGTDFTFTISSLQPEDIATYYCLQYASYPFTFGCGTRLEIKSGGGGSEVQLVESGGGLVQPGGSLKLSCAASGFTFNKYAMNWVRQAPGKGLEWVARIRSKYNNYATYYADSVKDRFTISRDDSKNTAYLQMNNLKTEDTAVYYCVRHGNFGNSYISYWAYWGQGTLVTVSSGGGGSGGGGSGGGGSQTVVTQEPSLTVSPGGTVTLTCGSSTGAVTSGNYPNWVQQKPGQAPRGLIGGTKFLAPGTPARFSGSLLGGKAALTLSGVQPEDEAEYYCVLWYSNRWVFGGGTKLTVLGGGGDKTHTCPPCPAPELLGGPSVFLFPPKPKDTLMISRTPEVTCVVVDVSHEDPEVKFNWYVDGVEVHNAKTKPCEEQYGSTYRCVSVLTVLHQDWLNGKEYKCKVSNKALPAPIEKTISKAKGQPREPQVYTLPPSREEMTKNQVSLTCLVKGFYPSDIAVEWESNGQPENNYKTTPPVLDSDGSFFLYSKLTVDKSRWQQGNVFSCSVMHEALHNHYTQKSLSLSPGKGGGGSGGGGSGGGGSGGGGSGGGGSGGGGSDKTHTCPPCPAPELLGGPSVFLFPPKPKDTLMISRTPEVTCVVVDVSHEDPEVKFNWYVDGVEVHNAKTKPCEEQYGSTYRCVSVLTVLHQDWLNGKEYKCKVSNKALPAPIEKTISKAKGQPREPQVYTLPPSREEMTKNQVSLTCLVKGFYPSDIAVEWESNGQPENNYKTTPPVLDSDGSFFLYSKLTVDKSRWQQGNVFSCSVMHEALHNHYTQKSLSLSPGK

SEQ ID NO: 1643 - protein, 5 aa, Artificial Sequence
  Synthetic
DYWMH

SEQ ID NO: 1644 - protein, 17 aa, Artificial Sequence
  Synthetic
YITPSTGYTDYNQKFKG

SEQ ID NO: 1645 - protein, 11 aa, Artificial Sequence
  Synthetic
NYNHRGYAMDY

SEQ ID NO: 1646 - protein, 11 aa, Artificial Sequence
  Synthetic
RASENIYSNLA

SEQ ID NO: 1647 - protein, 7 aa, Artificial Sequence
  Synthetic
AATNLAE

SEQ ID NO: 1648 - protein, 9 aa, Artificial Sequence
  Synthetic
QHFYGTPLT

SEQ ID NO: 1649 - protein, 120 aa, Artificial Sequence
  Synthetic
QVQLVQSGAEVKKPGASVKVSCKASGYTFTDYWMHWVRQAPGQCLEWMGYITPSTGYTDYNQKFKGRVTMTRDKSTSTAYMELSSLRSEDTAVYYCARNYNHRGYAMDYWGQGTTVTVSS

SEQ ID NO: 1650 - protein, 107 aa, Artificial Sequence; identical to SEQ ID NO: 1606
  Synthetic

SEQ ID NO: 1651 - protein, 242 aa, Artificial Sequence
  Synthetic
QVQLVQSGAEVKKPGASVKVSCKASGYTFTDYWMHWVRQAPGQCLEWMGYITPSTGYTDYNQKFKGRVTMTRDKSTSTAYMELSSLRSEDTAVYYCARNYNHRGYAMDYWGQGTTVTVSSGGGGSGGGGSGGGGSDIQMTQSPSSLSASVGDRVTITCRASENIYSNLAWYQQKPGKAPKLLIYAATNLAEGVPSRFSGSGSGTDFTLTISSLQPEDFATYYCQHFYGTPLTFGCGTKLEIK

SEQ ID NO: 1652 - protein, 497 aa, Artificial Sequence
  Synthetic
QVQLVQSGAEVKKPGASVKVSCKASGYTFTDYWMHWVRQAPGQCLEWMGYITPSTGYTDYNQKFKGRVTMTRDKSTSTAYMELSSLRSEDTAVYYCARNYNHRGYAMDYWGQGTTVTVSSGGGGSGGGGSGGGGSDIQMTQSPSSLSASVGDRVTITCRASENIYSNLAWYQQKPGKAPKLLIYAATNLAEGVPSRFSGSGSGTDFTLTISSLQPEDFATYYCQHFYGTPLTFGCGTKLEIKSGGGGSEVQLVESGGGLVQPGGSLKLSCAASGFTFNKYAMNWVRQAPGKGLEWVARIRSKYNNYATYYADSVKDRFTISRDDSKNTAYLQMNNLKTEDTAVYYCVRHGNFGNSYISYWAYWGQGTLVTVSSGGGGSGGGGSGGGGSQTVVTQEPSLTVSPGGTVTLTCGSSTGAVTSGNYPNWVQQKPGQAPRGLIGGTKFLAPGTPARFSGSLLGGKAALTLSGVQPEDEAEYYCVLWYSNRWVFGGGTKLTVL

SEQ ID NO: 1653 - protein, 985 aa, Artificial Sequence
  Synthetic
QVQLVQSGAEVKKPGASVKVSCKASGYTFTDYWMHWVRQAPGQCLEWMGYITPSTGYTDYNQKFKGRVTMTRDKSTSTAYMELSSLRSEDTAVYYCARNYNHRGYAMDYWGQGTTVTVSSGGGGSGGGGSGGGGSDIQMTQSPSSLSASVGDRVTITCRASENIYSNLAWYQQKPGKAPKLLIYAATNLAEGVPSRFSGSGSGTDFTLTISSLQPEDFATYYCQHFYGTPLTFGCGTKLEIKSGGGGSEVQLVESGGGLVQPGGSLKLSCAASGFTFNKYAMNWVRQAPGKGLEWVARIRSKYNNYATYYADSVKDRFTISRDDSKNTAYLQMNNLKTEDTAVYYCVRHGNFGNSYISYWAYWGQGTLVTVSSGGGGSGGGGSGGGGSQTVVTQEPSLTVSPGGTVTLTCGSSTGAVTSGNYPNWVQQKPGQAPRGLIGGTKFLAPGTPARFSGSLLGGKAALTLSGVQPEDEAEYYCVLWYSNRWVFGGGTKLTVLGGGGDKTHTCPPCPAPELLGGPSVFLFPPKPKDTLMISRTPEVTCVVVDVSHEDPEVKFNWYVDGVEVHNAKTKPCEEQYGSTYRCVSVLTVLHQDWLNGKEYKCKVSNKALPAPIEKTISKAKGQPREPQVYTLPPSREEMTKNQVSLTCLVKGFYPSDIAVEWESNGQPENNYKTTPPVLDSDGSFFLYSKLTVDKSRWQQGNVFSCSVMHEALHNHYTQKSLSLSPGKGGGGSGGGGSGGGGSGGGGSGGGGSGGGGSDKTHTCPPCPAPELLGGPSVFLFPPKPKDTLMISRTPEVTCVVVDVSHEDPEVKFNWYVDGVEVHNAKTKPCEEQYGSTYRCVSVLTVLHQDWLNGKEYKCKVSNKALPAPIEKTISKAKGQPREPQVYTLPPSREEMTKNQVSLTCLVKGFYPSDIAVEWESNGQPENNYKTTPPVLDSDGSFFLYSKLTVDKSRWQQGNVFSCSVMHEALHNHYTQKSLSLSPGK

SEQ ID NO: 1654 - protein, 5 aa, Artificial Sequence
  Synthetic
SYWMH

SEQ ID NO: 1655 - protein, 17 aa, Artificial Sequence
  Synthetic
YISPNSGYTDYHHKFKG

SEQ ID NO: 1656 - protein, 5 aa, Artificial Sequence
  Synthetic
DPMDY

SEQ ID NO: 1657 - protein, 11 aa, Artificial Sequence
  Synthetic
RASENIYSYLA

SEQ ID NO: 1658 - protein, 7 aa, Artificial Sequence
  Synthetic
NAKTLVE

SEQ ID NO: 1659 - protein, 9 aa, Artificial Sequence
  Synthetic
QHHYGTPRT

SEQ ID NO: 1660 - protein, 114 aa, Artificial Sequence
  Synthetic
QVQLVQSGAEVKKPGASVKVSCKASGYTFTSYWMHWVRQRPGQCLEWMGYISPNSGYTDYHHKFKGRVTMTADKSISTAYMQLSRLTSDDTAVYYCARDPMDYWGQGTLVTVSS

SEQ ID NO: 1661 - protein, 107 aa, Artificial Sequence
  Synthetic
DIQMTQSPSSLSASVGDRVTITCRASENIYSYLAWYQQKPGKAPKLLIYNAKTLVEGVPSRFSGSGSGTDFTLTISSLQPEDFGTYYCQHHYGTPRTFGCGTKLEIK

SEQ ID NO: 1662 - protein, 236 aa, Artificial Sequence
  Synthetic
QVQLVQSGAEVKKPGASVKVSCKASGYTFTSYWMHWVRQRPGQCLEWMGYISPNSGYTDYHHKFKGRVTMTADKSISTAYMQLSRLTSDDTAVYYCARDPMDYWGQGTLVTVSSGGGGSGGGGSGGGGSDIQMTQSPSSLSASVGDRVTITCRASENIYSYLAWYQQKPGKAPKLLIYNAKTLVEGVPSRFSGSGSGTDFTLTISSLQPEDFGTYYCQHHYGTPRTFGCGTKLEIK

SEQ ID NO: 1663 - protein, 491 aa, Artificial Sequence
  Synthetic
QVQLVQSGAEVKKPGASVKVSCKASGYTFTSYWMHWVRQRPGQCLEWMGYISPNSGYTDYHHKFKGRVTMTADKSISTAYMQLSRLTSDDTAVYYCARDPMDYWGQGTLVTVSSGGGGSGGGGSGGGGSDIQMTQSPSSLSASVGDRVTITCRASENIYSYLAWYQQKPGKAPKLLIYNAKTLVEGVPSRFSGSGSGTDFTLTISSLQPEDFGTYYCQHHYGTPRTFGCGTKLEIKSGGGGSEVQLVESGGGLVQPGGSLKLSCAASGFTFNKYAMNWVRQAPGKGLEWVARIRSKYNNYATYYADSVKDRFTISRDDSKNTAYLQMNNLKTEDTAVYYCVRHGNFGNSYISYWAYWGQGTLVTVSSGGGGSGGGGSGGGGSQTVVTQEPSLTVSPGGTVTLTCGSSTGAVTSGNYPNWVQQKPGQAPRGLIGGTKFLAPGTPARFSGSLLGGKAALTLSGVQPEDEAEYYCVLWYSNRWVFGGGTKLTVL

SEQ ID NO: 1664 - protein, 979 aa, Artificial Sequence
  Synthetic
QVQLVQSGAEVKKPGASVKVSCKASGYTFTSYWMHWVRQRPGQCLEWMGYISPNSGYTDYHHKFKGRVTMTADKSISTAYMQLSRLTSDDTAVYYCARDPMDYWGQGTLVTVSSGGGGSGGGGSGGGGSDIQMTQSPSSLSASVGDRVTITCRASENIYSYLAWYQQKPGKAPKLLIYNAKTLVEGVPSRFSGSGSGTDFTLTISSLQPEDFGTYYCQHHYGTPRTFGCGTKLEIKSGGGGSEVQLVESGGGLVQPGGSLKLSCAASGFTFNKYAMNWVRQAPGKGLEWVARIRSKYNNYATYYADSVKDRFTISRDDSKNTAYLQMNNLKTEDTAVYYCVRHGNFGNSYISYWAYWGQGTLVTVSSGGGGSGGGGSGGGGSQTVVTQEPSLTVSPGGTVTLTCGSSTGAVTSGNYPNWVQQKPGQAPRGLIGGTKFLAPGTPARFSGSLLGGKAALTLSGVQPEDEAEYYCVLWYSNRWVFGGGTKLTVLGGGGDKTHTCPPCPAPELLGGPSVFLFPPKPKDTLMISRTPEVTCVVVDVSHEDPEVKFNWYVDGVEVHNAKTKPCEEQYGSTYRCVSVLTVLHQDWLNGKEYKCKVSNKALPAPIEKTISKAKGQPREPQVYTLPPSREEMTKNQVSLTCLVKGFYPSDIAVEWESNGQPENNYKTTPPVLDSDGSFFLYSKLTVDKSRWQQGNVFSCSVMHEALHNHYTQKSLSLSPGKGGGGSGGGGSGGGGSGGGGSGGGGSGGGGSDKTHTCPPCPAPELLGGPSVFLFPPKPKDTLMISRTPEVTCVVVDVSHEDPEVKFNWYVDGVEVHNAKTKPCEEQYGSTYRCVSVLTVLHQDWLNGKEYKCKVSNKALPAPIEKTISKAKGQPREPQVYTLPPSREEMTKNQVSLTCLVKGFYPSDIAVEWESNGQPENNYKTTPPVLDSDGSFFLYSKLTVDKSRWQQGNVFSCSVMHEALHNHYTQKSLSLSPGK

SEQ ID NO: 1665 - protein, 495 aa, Artificial Sequence
  Synthetic
QVQLVESGGGVVQPGRSLRLSCAASGFTFSNYGMHWVRQAPGKCLEWVAVISYDAWFSQYADAVKGRFTVSRDNSKNTLYLQMNSLRAEDTAVYYCARDLITFGGHYYFGMDVWGQGTTVTVSSGGGGSGGGGSGGGGSEIVLTQSPGTLSLSPGERATLSCRASQSVSSNYLAWYQQKPGQAPRLLIYAASSRVTGIPDRFSGSGSGTDFTLTISRLEPEDFAVYYCQQYGSSPFTFGCGTKVEIKSGGGGSQVQLVQSGAEVKKPGASVKVSCKASGYTFTDYWMHWVRQAPGQCLEWMGYITPSTGYTDYNQKFKGRVTMTRDKSTSTAYMELSSLRSEDTAVYYCARNYNHRGYAMDYWGQGTTVTVSSGGGGSGGGGSGGGGSDIQMTQSPSSLSASVGDRVTITCRASENIYSNLAWYQQKPGKAPKLLIYAATNLAEGVPSRFSGSGSGTDFTLTISSLQPEDFATYYCQHFYGTPLTFGCGTKLEIK

SEQ ID NO: 1666 - protein, 750 aa, Artificial Sequence
  Synthetic
QVQLVESGGGVVQPGRSLRLSCAASGFTFSNYGMHWVRQAPGKCLEWVAVISYDAWFSQYADAVKGRFTVSRDNSKNTLYLQMNSLRAEDTAVYYCARDLITFGGHYYFGMDVWGQGTTVTVSSGGGGSGGGGSGGGGSEIVLTQSPGTLSLSPGERATLSCRASQSVSSNYLAWYQQKPGQAPRLLIYAASSRVTGIPDRFSGSGSGTDFTLTISRLEPEDFAVYYCQQYGSSPFTFGCGTKVEIKSGGGGSQVQLVQSGAEVKKPGASVKVSCKASGYTFTDYWMHWVRQAPGQCLEWMGYITPSTGYTDYNQKFKGRVTMTRDKSTSTAYMELSSLRSEDTAVYYCARNYNHRGYAMDYWGQGTTVTVSSGGGGSGGGGSGGGGSDIQMTQSPSSLSASVGDRVTITCRASENIYSNLAWYQQKPGKAPKLLIYAATNLAEGVPSRFSGSGSGTDFTLTISSLQPEDFATYYCQHFYGTPLTFGCGTKLEIKSGGGGSEVQLVESGGGLVQPGGSLKLSCAASGFTFNKYAMNWVRQAPGKGLEWVARIRSKYNNYATYYADSVKDRFTISRDDSKNTAYLQMNNLKTEDTAVYYCVRHGNFGNSYISYWAYWGQGTLVTVSSGGGGSGGGGSGGGGSQTVVTQEPSLTVSPGGTVTLTCGSSTGAVTSGNYPNWVQQKPGQAPRGLIGGTKFLAPGTPARFSGSLLGGKAALTLSGVQPEDEAEYYCVLWYSNRWVFGGGTKLTVL

SEQ ID NO: 1667 - protein, 1238 aa, Artificial Sequence
  Synthetic
QVQLVESGGGVVQPGRSLRLSCAASGFTFSNYGMHWVRQAPGKCLEWVAVISYDAWFSQYADAVKGRFTVSRDNSKNTLYLQMNSLRAEDTAVYYCARDLITFGGHYYFGMDVWGQGTTVTVSSGGGGSGGGGSGGGGSEIVLTQSPGTLSLSPGERATLSCRASQSVSSNYLAWYQQKPGQAPRLLIYAASSRVTGIPDRFSGSGSGTDFTLTISRLEPEDFAVYYCQQYGSSPFTFGCGTKVEIKSGGGGSQVQLVQSGAEVKKPGASVKVSCKASGYTFTDYWMHWVRQAPGQCLEWMGYITPSTGYTDYNQKFKGRVTMTRDKSTSTAYMELSSLRSEDTAVYYCARNYNHRGYAMDYWGQGTTVTVSSGGGGSGGGGSGGGGSDIQMTQSPSSLSASVGDRVTITCRASENIYSNLAWYQQKPGKAPKLLIYAATNLAEGVPSRFSGSGSGTDFTLTISSLQPEDFATYYCQHFYGTPLTFGCGTKLEIKSGGGGSEVQLVESGGGLVQPGGSLKLSCAASGFTFNKYAMNWVRQAPGKGLEWVARIRSKYNNYATYYADSVKDRFTISRDDSKNTAYLQMNNLKTEDTAVYYCVRHGNFGNSYISYWAYWGQGTLVTVSSGGGGSGGGGSGGGGSQTVVTQEPSLTVSPGGTVTLTCGSSTGAVTSGNYPNWVQQKPGQAPRGLIGGTKFLAPGTPARFSGSLLGGKAALTLSGVQPEDEAEYYCVLWYSNRWVFGGGTKLTVLGGGGDKTHTCPPCPAPELLGGPSVFLFPPKPKDTLMISRTPEVTCVVVDVSHEDPEVKFNWYVDGVEVHNAKTKPCEEQYGSTYRCVSVLTVLHQDWLNGKEYKCKVSNKALPAPIEKTISKAKGQPREPQVYTLPPSREEMTKNQVSLTCLVKGFYPSDIAVEWESNGQPENNYKTTPPVLDSDGSFFLYSKLTVDKSRWQQGNVFSCSVMHEALHNHYTQKSLSLSPGKGGGGSGGGGSGGGGSGGGGSGGGGSGGGGSDKTHTCPPCPAPELLGGPSVFLFPPKPKDTLMISRTPEVTCVVVDVSHEDPEVKFNWYVDGVEVHNAKTKPCEEQYGSTYRCVSVLTVLHQDWLNGKEYKCKVSNKALPAPIEKTISKAKGQPREPQVYTLPPSREEMTKNQVSLTCLVKGFYPSDIAVEWESNGQPENNYKTTPPVLDSDGSFFLYSKLTVDKSRWQQGNVFSCSVMHEALHNHYTQKSLSLSPGK

SEQ ID NO: 1668 - protein, 489 aa, Artificial Sequence
  Synthetic
QVQLVESGGGVVQPGRSLRLSCAASGFTFSNYGMHWVRQAPGKCLEWVAVISYDAWFSQYADAVKGRFTVSRDNSKNTLYLQMNSLRAEDTAVYYCARDLITFGGHYYFGMDVWGQGTTVTVSSGGGGSGGGGSGGGGSEIVLTQSPGTLSLSPGERATLSCRASQSVSSNYLAWYQQKPGQAPRLLIYAASSRVTGIPDRFSGSGSGTDFTLTISRLEPEDFAVYYCQQYGSSPFTFGCGTKVEIKSGGGGSQVQLVQSGAEVKKPGASVKVSCKASGYTFTSYWMHWVRQRPGQCLEWMGYISPNSGYTDYHHKFKGRVTMTADKSISTAYMQLSRLTSDDTAVYYCARDPMDYWGQGTLVTVSSGGGGSGGGGSGGGGSDIQMTQSPSSLSASVGDRVTITCRASENIYSYLAWYQQKPGKAPKLLIYNAKTLVEGVPSRFSGSGSGTDFTLTISSLQPEDFGTYYCQHHYGTPRTFGCGTKLEIK

SEQ ID NO: 1669 - protein, 744 aa, Artificial Sequence
  Synthetic
QVQLVESGGGVVQPGRSLRLSCAASGFTFSNYGMHWVRQAPGKCLEWVAVISYDAWFSQYADAVKGRFTVSRDNSKNTLYLQMNSLRAEDTAVYYCARDLITFGGHYYFGMDVWGQGTTVTVSSGGGGSGGGGSGGGGSEIVLTQSPGTLSLSPGERATLSCRASQSVSSNYLAWYQQKPGQAPRLLIYAASSRVTGIPDRFSGSGSGTDFTLTISRLEPEDFAVYYCQQYGSSPFTFGCGTKVEIKSGGGGSQVQLVQSGAEVKKPGASVKVSCKASGYTFTSYWMHWVRQRPGQCLEWMGYISPNSGYTDYHHKFKGRVTMTADKSISTAYMQLSRLTSDDTAVYYCARDPMDYWGQGTLVTVSSGGGGSGGGGSGGGGSDIQMTQSPSSLSASVGDRVTITCRASENIYSYLAWYQQKPGKAPKLLIYNAKTLVEGVPSRFSGSGSGTDFTLTISSLQPEDFGTYYCQHHYGTPRTFGCGTKLEIKSGGGGSEVQLVESGGGLVQPGGSLKLSCAASGFTFNKYAMNWVRQAPGKGLEWVARIRSKYNNYATYYADSVKDRFTISRDDSKNTAYLQMNNLKTEDTAVYYCVRHGNFGNSYISYWAYWGQGTLVTVSSGGGGSGGGGSGGGGSQTVVTQEPSLTVSPGGTVTLTCGSSTGAVTSGNYPNWVQQKPGQAPRGLIGGTKFLAPGTPARFSGSLLGGKAALTLSGVQPEDEAEYYCVLWYSNRWVFGGGTKLTVL

SEQ ID NO: 1670 - protein, 1232 aa, Artificial Sequence
  Synthetic
QVQLVESGGGVVQPGRSLRLSCAASGFTFSNYGMHWVRQAPGKCLEWVAVISYDAWFSQYADAVKGRFTVSRDNSKNTLYLQMNSLRAEDTAVYYCARDLITFGGHYYFGMDVWGQGTTVTVSSGGGGSGGGGSGGGGSEIVLTQSPGTLSLSPGERATLSCRASQSVSSNYLAWYQQKPGQAPRLLIYAASSRVTGIPDRFSGSGSGTDFTLTISRLEPEDFAVYYCQQYGSSPFTFGCGTKVEIKSGGGGSQVQLVQSGAEVKKPGASVKVSCKASGYTFTSYWMHWVRQRPGQCLEWMGYISPNSGYTDYHHKFKGRVTMTADKSISTAYMQLSRLTSDDTAVYYCARDPMDYWGQGTLVTVSSGGGGSGGGGSGGGGSDIQMTQSPSSLSASVGDRVTITCRASENIYSYLAWYQQKPGKAPKLLIYNAKTLVEGVPSRFSGSGSGTDFTLTISSLQPEDFGTYYCQHHYGTPRTFGCGTKLEIKSGGGGSEVQLVESGGGLVQPGGSLKLSCAASGFTFNKYAMNWVRQAPGKGLEWVARIRSKYNNYATYYADSVKDRFTISRDDSKNTAYLQMNNLKTEDTAVYYCVRHGNFGNSYISYWAYWGQGTLVTVSSGGGGSGGGGSGGGGSQTVVTQEPSLTVSPGGTVTLTCGSSTGAVTSGNYPNWVQQKPGQAPRGLIGGTKFLAPGTPARFSGSLLGGKAALTLSGVQPEDEAEYYCVLWYSNRWVFGGGTKLTVLGGGGDKTHTCPPCPAPELLGGPSVFLFPPKPKDTLMISRTPEVTCVVVDVSHEDPEVKFNWYVDGVEVHNAKTKPCEEQYGSTYRCVSVLTVLHQDWLNGKEYKCKVSNKALPAPIEKTISKAKGQPREPQVYTLPPSREEMTKNQVSLTCLVKGFYPSDIAVEWESNGQPENNYKTTPPVLDSDGSFFLYSKLTVDKSRWQQGNVFSCSVMHEALHNHYTQKSLSLSPGKGGGGSGGGGSGGGGSGGGGSGGGGSGGGGSDKTHTCPPCPAPELLGGPSVFLFPPKPKDTLMISRTPEVTCVVVDVSHEDPEVKFNWYVDGVEVHNAKTKPCEEQYGSTYRCVSVLTVLHQDWLNGKEYKCKVSNKALPAPIEKTISKAKGQPREPQVYTLPPSREEMTKNQVSLTCLVKGFYPSDIAVEWESNGQPENNYKTTPPVLDSDGSFFLYSKLTVDKSRWQQGNVFSCSVMHEALHNHYTQKSLSLSPGK

SEQ ID NO: 1671 - protein, 500 aa, Artificial Sequence
  Synthetic
QVQLVESGGGVVQPGRSLRLSCAASGFTFSNYGMHWVRQAPGKCLEWVAVISYDAWFSQYADAVKGRFTVSRDNSKNTLYLQMNSLRAEDTAVYYCARDLITFGGHYYFGMDVWGQGTTVTVSSGGGGSGGGGSGGGGSEIVLTQSPGTLSLSPGERATLSCRASQSVSSNYLAWYQQKPGQAPRLLIYAASSRVTGIPDRFSGSGSGTDFTLTISRLEPEDFAVYYCQQYGSSPFTFGCGTKVEIKSGGGGSQVQLQQWGAGLLKPSETLSLTCAVYGGSFSGYYWSWIRQPPGKCLEWIGEINHRGSTNYNPSLKSRVTISGDTSKNQFSLKLSSVNAADTAVYYCARGYSSSWYTGYVFDYWGQGTLVTVSSGGGGSGGGGSGGGGSQSALTQPASVSGSPGQSITISCTGTSSDVFGYDYVSWYQQHPGKAPKLMIYDVSNRPSGVSNRFSGSKSGNAASLTISGLQAEDEADYYCSSYKSSSTVVFGCGTKLTVL

SEQ ID NO: 1672 - protein, 755 aa, Artificial Sequence
  Synthetic
QVQLVESGGGVVQPGRSLRLSCAASGFTFSNYGMHWVRQAPGKCLEWVAVISYDAWFSQYADAVKGRFTVSRDNSKNTLYLQMNSLRAEDTAVYYCARDLITFGGHYYFGMDVWGQGTTVTVSSGGGGSGGGGSGGGGSEIVLTQSPGTLSLSPGERATLSCRASQSVSSNYLAWYQQKPGQAPRLLIYAASSRVTGIPDRFSGSGSGTDFTLTISRLEPEDFAVYYCQQYGSSPFTFGCGTKVEIKSGGGGSQVQLQQWGAGLLKPSETLSLTCAVYGGSFSGYYWSWIRQPPGKCLEWIGEINHRGSTNYNPSLKSRVTISGDTSKNQFSLKLSSVNAADTAVYYCARGYSSSWYTGYVFDYWGQGTLVTVSSGGGGSGGGGSGGGGSQSALTQPASVSGSPGQSITISCTGTSSDVFGYDYVSWYQQHPGKAPKLMIYDVSNRPSGVSNRFSGSKSGNAASLTISGLQAEDEADYYCSSYKSSSTVVFGCGTKLTVLSGGGGSEVQLVESGGGLVQPGGSLKLSCAASGFTFNKYAMNWVRQAPGKGLEWVARIRSKYNNYATYYADSVKDRFTISRDDSKNTAYLQMNNLKTEDTAVYYCVRHGNFGNSYISYWAYWGQGTLVTVSSGGGGSGGGGSGGGGSQTVVTQEPSLTVSPGGTVTLTCGSSTGAVTSGNYPNWVQQKPGQAPRGLIGGTKFLAPGTPARFSGSLLGGKAALTLSGVQPEDEAEYYCVLWYSNRWVFGGGTKLTVL

SEQ ID NO: 1673 - protein, 1243 aa, Artificial Sequence
  Synthetic
QVQLVESGGGVVQPGRSLRLSCAASGFTFSNYGMHWVRQAPGKCLEWVAVISYDAWFSQYADAVKGRFTVSRDNSKNTLYLQMNSLRAEDTAVYYCARDLITFGGHYYFGMDVWGQGTTVTVSSGGGGSGGGGSGGGGSEIVLTQSPGTLSLSPGERATLSCRASQSVSSNYLAWYQQKPGQAPRLLIYAASSRVTGIPDRFSGSGSGTDFTLTISRLEPEDFAVYYCQQYGSSPFTFGCGTKVEIKSGGGGSQVQLQQWGAGLLKPSETLSLTCAVYGGSFSGYYWSWIRQPPGKCLEWIGEINHRGSTNYNPSLKSRVTISGDTSKNQFSLKLSSVNAADTAVYYCARGYSSSWYTGYVFDYWGQGTLVTVSSGGGGSGGGGSGGGGSQSALTQPASVSGSPGQSITISCTGTSSDVFGYDYVSWYQQHPGKAPKLMIYDVSNRPSGVSNRFSGSKSGNAASLTISGLQAEDEADYYCSSYKSSSTVVFGCGTKLTVLSGGGGSEVQLVESGGGLVQPGGSLKLSCAASGFTFNKYAMNWVRQAPGKGLEWVARIRSKYNNYATYYADSVKDRFTISRDDSKNTAYLQMNNLKTEDTAVYYCVRHGNFGNSYISYWAYWGQGTLVTVSSGGGGSGGGGSGGGGSQTVVTQEPSLTVSPGGTVTLTCGSSTGAVTSGNYPNWVQQKPGQAPRGLIGGTKFLAPGTPARFSGSLLGGKAALTLSGVQPEDEAEYYCVLWYSNRWVFGGGTKLTVLGGGGDKTHTCPPCPAPELLGGPSVFLFPPKPKDTLMISRTPEVTCVVVDVSHEDPEVKFNWYVDGVEVHNAKTKPCEEQYGSTYRCVSVLTVLHQDWLNGKEYKCKVSNKALPAPIEKTISKAKGQPREPQVYTLPPSREEMTKNQVSLTCLVKGFYPSDIAVEWESNGQPENNYKTTPPVLDSDGSFFLYSKLTVDKSRWQQGNVFSCSVMHEALHNHYTQKSLSLSPGKGGGGSGGGGSGGGGSGGGGSGGGGSGGGGSDKTHTCPPCPAPELLGGPSVFLFPPKPKDTLMISRTPEVTCVVVDVSHEDPEVKFNWYVDGVEVHNAKTKPCEEQYGSTYRCVSVLTVLHQDWLNGKEYKCKVSNKALPAPIEKTISKAKGQPREPQVYTLPPSREEMTKNQVSLTCLVKGFYPSDIAVEWESNGQPENNYKTTPPVLDSDGSFFLYSKLTVDKSRWQQGNVFSCSVMHEALHNHYTQKSLSLSPGK

SEQ ID NO: 1674 - protein, 489 aa, Artificial Sequence
  Synthetic
QVQLVESGGGVVQPGRSLRLSCAASGFTFSNYGMHWVRQAPGKCLEWVAVISYDAWFSQYADAVKGRFTVSRDNSKNTLYLQMNSLRAEDTAVYYCARDLITFGGHYYFGMDVWGQGTTVTVSSGGGGSGGGGSGGGGSEIVLTQSPGTLSLSPGERATLSCRASQSVSSNYLAWYQQKPGQAPRLLIYAASSRVTGIPDRFSGSGSGTDFTLTISRLEPEDFAVYYCQQYGSSPFTFGCGTKVEIKSGGGGSQVQLVQSGAEVKKPGASVKVSCKASGYTFTDYWMHWVRQAPGQCLEWMGYITPSTGYTDYHRKFRGRVTMTRDKSISTAYMELSRLRSDDTAVYYCARSTFDAWGQGTMVTVSSGGGGSGGGGSGGGGSDIQMTQSPSSLSASVGDRVSITCRASQEISGYLSWFQQKPGKAIKRLIYATSSLDAGVPSRFSGSGSGTDFTLTISSLQPEDFADYYCLQYASYPLTFGCGTKLEIK

SEQ ID NO: 1675 - protein, 744 aa, Artificial Sequence
  Synthetic
QVQLVESGGGVVQPGRSLRLSCAASGFTFSNYGMHWVRQAPGKCLEWVAVISYDAWFSQYADAVKGRFTVSRDNSKNTLYLQMNSLRAEDTAVYYCARDLITFGGHYYFGMDVWGQGTTVTVSSGGGGSGGGGSGGGGSEIVLTQSPGTLSLSPGERATLSCRASQSVSSNYLAWYQQKPGQAPRLLIYAASSRVTGIPDRFSGSGSGTDFTLTISRLEPEDFAVYYCQQYGSSPFTFGCGTKVEIKSGGGGSQVQLVQSGAEVKKPGASVKVSCKASGYTFTDYWMHWVRQAPGQCLEWMGYITPSTGYTDYHRKFRGRVTMTRDKSISTAYMELSRLRSDDTAVYYCARSTFDAWGQGTMVTVSSGGGGSGGGGSGGGGSDIQMTQSPSSLSASVGDRVSITCRASQEISGYLSWFQQKPGKAIKRLIYATSSLDAGVPSRFSGSGSGTDFTLTISSLQPEDFADYYCLQYASYPLTFGCGTKLEIKSGGGGSEVQLVESGGGLVQPGGSLKLSCAASGFTFNKYAMNWVRQAPGKGLEWVARIRSKYNNYATYYADSVKDRFTISRDDSKNTAYLQMNNLKTEDTAVYYCVRHGNFGNSYISYWAYWGQGTLVTVSSGGGGSGGGGSGGGGSQTVVTQEPSLTVSPGGTVTLTCGSSTGAVTSGNYPNWVQQKPGQAPRGLIGGTKFLAPGTPARFSGSLLGGKAALTLSGVQPEDEAEYYCVLWYSNRWVFGGGTKLTVL

SEQ ID NO: 1676 - protein, 1232 aa, Artificial Sequence
  Synthetic
QVQLVESGGGVVQPGRSLRLSCAASGFTFSNYGMHWVRQAPGKCLEWVAVISYDAWFSQYADAVKGRFTVSRDNSKNTLYLQMNSLRAEDTAVYYCARDLITFGGHYYFGMDVWGQGTTVTVSSGGGGSGGGGSGGGGSEIVLTQSPGTLSLSPGERATLSCRASQSVSSNYLAWYQQKPGQAPRLLIYAASSRVTGIPDRFSGSGSGTDFTLTISRLEPEDFAVYYCQQYGSSPFTFGCGTKVEIKSGGGGSQVQLVQSGAEVKKPGASVKVSCKASGYTFTDYWMHWVRQAPGQCLEWMGYITPSTGYTDYHRKFRGRVTMTRDKSISTAYMELSRLRSDDTAVYYCARSTFDAWGQGTMVTVSSGGGGSGGGGSGGGGSDIQMTQSPSSLSASVGDRVSITCRASQEISGYLSWFQQKPGKAIKRLIYATSSLDAGVPSRFSGSGSGTDFTLTISSLQPEDFADYYCLQYASYPLTFGCGTKLEIKSGGGGSEVQLVESGGGLVQPGGSLKLSCAASGFTFNKYAMNWVRQAPGKGLEWVARIRSKYNNYATYYADSVKDRFTISRDDSKNTAYLQMNNLKTEDTAVYYCVRHGNFGNSYISYWAYWGQGTLVTVSSGGGGSGGGGSGGGGSQTVVTQEPSLTVSPGGTVTLTCGSSTGAVTSGNYPNWVQQKPGQAPRGLIGGTKFLAPGTPARFSGSLLGGKAALTLSGVQPEDEAEYYCVLWYSNRWVFGGGTKLTVLGGGGDKTHTCPPCPAPELLGGPSVFLFPPKPKDTLMISRTPEVTCVVVDVSHEDPEVKFNWYVDGVEVHNAKTKPCEEQYGSTYRCVSVLTVLHQDWLNGKEYKCKVSNKALPAPIEKTISKAKGQPREPQVYTLPPSREEMTKNQVSLTCLVKGFYPSDIAVEWESNGQPENNYKTTPPVLDSDGSFFLYSKLTVDKSRWQQGNVFSCSVMHEALHNHYTQKSLSLSPGKGGGGSGGGGSGGGGSGGGGSGGGGSGGGGSDKTHTCPPCPAPELLGGPSVFLFPPKPKDTLMISRTPEVTCVVVDVSHEDPEVKFNWYVDGVEVHNAKTKPCEEQYGSTYRCVSVLTVLHQDWLNGKEYKCKVSNKALPAPIEKTISKAKGQPREPQVYTLPPSREEMTKNQVSLTCLVKGFYPSDIAVEWESNGQPENNYKTTPPVLDSDGSFFLYSKLTVDKSRWQQGNVFSCSVMHEALHNHYTQKSLSLSPGK

SEQ ID NO: 1677 - protein, 494 aa, Artificial Sequence
  Synthetic
QVQLVESGGGVVQPGRSLRLSCAASGFTFSNYGMHWVRQAPGKCLEWVAVISYDAWFSQYADAVKGRFTVSRDNSKNTLYLQMNSLRAEDTAVYYCARDLITFGGHYYFGMDVWGQGTTVTVSSGGGGSGGGGSGGGGSEIVLTQSPGTLSLSPGERATLSCRASQSVSSNYLAWYQQKPGQAPRLLIYAASSRVTGIPDRFSGSGSGTDFTLTISRLEPEDFAVYYCQQYGSSPFTFGCGTKVEIKSGGGGSQVQLVQSGAEVKKPGASVKVSCKASGYTFTSYWMHWVRQAPGQCLEWMGYITPSTGYTEYNQKFKGRVTMTRDKSTSTVYMELSSLRSEDTAVYYCARVHDYDRAMEYWGQGTTVTVSSGGGGSGGGGSGGGGSDIQMTQSPSSLSASVGDRVTITCKASQDINKYIAWYQQKPGKGPKLLIYYTSTLQPGVPSRFSGSGSGTDFTFTISSLQPEDIATYYCLQYASYPFTFGCGTRLEIK

SEQ ID NO: 1678 - protein, 749 aa, Artificial Sequence
  Synthetic
QVQLVESGGGVVQPGRSLRLSCAASGFTFSNYGMHWVRQAPGKCLEWVAVISYDAWFSQYADAVKGRFTVSRDNSKNTLYLQMNSLRAEDTAVYYCARDLITFGGHYYFGMDVWGQGTTVTVSSGGGGSGGGGSGGGGSEIVLTQSPGTLSLSPGERATLSCRASQSVSSNYLAWYQQKPGQAPRLLIYAASSRVTGIPDRFSGSGSGTDFTLTISRLEPEDFAVYYCQQYGSSPFTFGCGTKVEIKSGGGGSQVQLVQSGAEVKKPGASVKVSCKASGYTFTSYWMHWVRQAPGQCLEWMGYITPSTGYTEYNQKFKGRVTMTRDKSTSTVYMELSSLRSEDTAVYYCARVHDYDRAMEYWGQGTTVTVSSGGGGSGGGGSGGGGSDIQMTQSPSSLSASVGDRVTITCKASQDINKYIAWYQQKPGKGPKLLIYYTSTLQPGVPSRFSGSGSGTDFTFTISSLQPEDIATYYCLQYASYPFTFGCGTRLEIKSGGGGSEVQLVESGGGLVQPGGSLKLSCAASGFTFNKYAMNWVRQAPGKGLEWVARIRSKYNNYATYYADSVKDRFTISRDDSKNTAYLQMNNLKTEDTAVYYCVRHGNFGNSYISYWAYWGQGTLVTVSSGGGGSGGGGSGGGGSQTVVTQEPSLTVSPGGTVTLTCGSSTGAVTSGNYPNWVQQKPGQAPRGLIGGTKFLAPGTPARFSGSLLGGKAALTLSGVQPEDEAEYYCVLWYSNRWVFGGGTKLTVL

SEQ ID NO: 1679 - protein, 1237 aa, Artificial Sequence
  Synthetic
QVQLVESGGGVVQPGRSLRLSCAASGFTFSNYGMHWVRQAPGKCLEWVAVISYDAWFSQYADAVKGRFTVSRDNSKNTLYLQMNSLRAEDTAVYYCARDLITFGGHYYFGMDVWGQGTTVTVSSGGGGSGGGGSGGGGSEIVLTQSPGTLSLSPGERATLSCRASQSVSSNYLAWYQQKPGQAPRLLIYAASSRVTGIPDRFSGSGSGTDFTLTISRLEPEDFAVYYCQQYGSSPFTFGCGTKVEIKSGGGGSQVQLVQSGAEVKKPGASVKVSCKASGYTFTSYWMHWVRQAPGQCLEWMGYITPSTGYTEYNQKFKGRVTMTRDKSTSTVYMELSSLRSEDTAVYYCARVHDYDRAMEYWGQGTTVTVSSGGGGSGGGGSGGGGSDIQMTQSPSSLSASVGDRVTITCKASQDINKYIAWYQQKPGKGPKLLIYYTSTLQPGVPSRFSGSGSGTDFTFTISSLQPEDIATYYCLQYASYPFTFGCGTRLEIKSGGGGSEVQLVESGGGLVQPGGSLKLSCAASGFTFNKYAMNWVRQAPGKGLEWVARIRSKYNNYATYYADSVKDRFTISRDDSKNTAYLQMNNLKTEDTAVYYCVRHGNFGNSYISYWAYWGQGTLVTVSSGGGGSGGGGSGGGGSQTVVTQEPSLTVSPGGTVTLTCGSSTGAVTSGNYPNWVQQKPGQAPRGLIGGTKFLAPGTPARFSGSLLGGKAALTLSGVQPEDEAEYYCVLWYSNRWVFGGGTKLTVLGGGGDKTHTCPPCPAPELLGGPSVFLFPPKPKDTLMISRTPEVTCVVVDVSHEDPEVKFNWYVDGVEVHNAKTKPCEEQYGSTYRCVSVLTVLHQDWLNGKEYKCKVSNKALPAPIEKTISKAKGQPREPQVYTLPPSREEMTKNQVSLTCLVKGFYPSDIAVEWESNGQPENNYKTTPPVLDSDGSFFLYSKLTVDKSRWQQGNVFSCSVMHEALHNHYTQKSLSLSPGKGGGGSGGGGSGGGGSGGGGSGGGGSGGGGSDKTHTCPPCPAPELLGGPSVFLFPPKPKDTLMISRTPEVTCVVVDVSHEDPEVKFNWYVDGVEVHNAKTKPCEEQYGSTYRCVSVLTVLHQDWLNGKEYKCKVSNKALPAPIEKTISKAKGQPREPQVYTLPPSREEMTKNQVSLTCLVKGFYPSDIAVEWESNGQPENNYKTTPPVLDSDGSFFLYSKLTVDKSRWQQGNVFSCSVMHEALHNHYTQKSLSLSPGK

SEQ ID NO: 1680 - protein, 485 aa, Artificial Sequence
  Synthetic
QVQLQESGPGLVKPSETLSLTCTVSGGSISSFYWSWIRQPPGKCLEWIGRISSSGDVDYNPSLKSRVTISVDTSKNQFSLKLSSVTAADTAVYYCAREGGFYYWGQGTLVTVSSGGGGSGGGGSGGGGSEIVLTQSPGTLSLSPGERATLSCRASQSVSSSYLAWYQQKPGQAPRLLIYGASSRATGIPDRFSGSGSGTDFTLTISRLEPEDFAVYYCQQYGSSPITFGCGTKLEIKSGGGGSQVQLVQSGAEVKKPGASVKVSCKASGYTFTDYWMHWVRQAPGQCLEWMGYITPSTGYTDYNQKFKGRVTMTRDKSTSTAYMELSSLRSEDTAVYYCARNYNHRGYAMDYWGQGTTVTVSSGGGGSGGGGSGGGGSDIQMTQSPSSLSASVGDRVTITCRASENIYSNLAWYQQKPGKAPKLLIYAATNLAEGVPSRFSGSGSGTDFTLTISSLQPEDFATYYCQHFYGTPLTFGCGTKLEIK

SEQ ID NO: 1681 - protein, 740 aa, Artificial Sequence
  Synthetic
QVQLQESGPGLVKPSETLSLTCTVSGGSISSFYWSWIRQPPGKCLEWIGRISSSGDVDYNPSLKSRVTISVDTSKNQFSLKLSSVTAADTAVYYCAREGGFYYWGQGTLVTVSSGGGGSGGGGSGGGGSEIVLTQSPGTLSLSPGERATLSCRASQSVSSSYLAWYQQKPGQAPRLLIYGASSRATGIPDRFSGSGSGTDFTLTISRLEPEDFAVYYCQQYGSSPITFGCGTKLEIKSGGGGSQVQLVQSGAEVKKPGASVKVSCKASGYTFTDYWMHWVRQAPGQCLEWMGYITPSTGYTDYNQKFKGRVTMTRDKSTSTAYMELSSLRSEDTAVYYCARNYNHRGYAMDYWGQGTTVTVSSGGGGSGGGGSGGGGSDIQMTQSPSSLSASVGDRVTITCRASENIYSNLAWYQQKPGKAPKLLIYAATNLAEGVPSRFSGSGSGTDFTLTISSLQPEDFATYYCQHFYGTPLTFGCGTKLEIKSGGGGSEVQLVESGGGLVQPGGSLKLSCAASGFTFNKYAMNWVRQAPGKGLEWVARIRSKYNNYATYYADSVKDRFTISRDDSKNTAYLQMNNLKTEDTAVYYCVRHGNFGNSYISYWAYWGQGTLVTVSSGGGGSGGGGSGGGGSQTVVTQEPSLTVSPGGTVTLTCGSSTGAVTSGNYPNWVQQKPGQAPRGLIGGTKFLAPGTPARFSGSLLGGKAALTLSGVQPEDEAEYYCVLWYSNRWVFGGGTKLTVL

SEQ ID NO: 1682 - protein, 1228 aa, Artificial Sequence
  Synthetic
QVQLQESGPGLVKPSETLSLTCTVSGGSISSFYWSWIRQPPGKCLEWIGRISSSGDVDYNPSLKSRVTISVDTSKNQFSLKLSSVTAADTAVYYCAREGGFYYWGQGTLVTVSSGGGGSGGGGSGGGGSEIVLTQSPGTLSLSPGERATLSCRASQSVSSSYLAWYQQKPGQAPRLLIYGASSRATGIPDRFSGSGSGTDFTLTISRLEPEDFAVYYCQQYGSSPITFGCGTKLEIKSGGGGSQVQLVQSGAEVKKPGASVKVSCKASGYTFTDYWMHWVRQAPGQCLEWMGYITPSTGYTDYNQKFKGRVTMTRDKSTSTAYMELSSLRSEDTAVYYCARNYNHRGYAMDYWGQGTTVTVSSGGGGSGGGGSGGGGSDIQMTQSPSSLSASVGDRVTITCRASENIYSNLAWYQQKPGKAPKLLIYAATNLAEGVPSRFSGSGSGTDFTLTISSLQPEDFATYYCQHFYGTPLTFGCGTKLEIKSGGGGSEVQLVESGGGLVQPGGSLKLSCAASGFTFNKYAMNWVRQAPGKGLEWVARIRSKYNNYATYYADSVKDRFTISRDDSKNTAYLQMNNLKTEDTAVYYCVRHGNFGNSYISYWAYWGQGTLVTVSSGGGGSGGGGSGGGGSQTVVTQEPSLTVSPGGTVTLTCGSSTGAVTSGNYPNWVQQKPGQAPRGLIGGTKFLAPGTPARFSGSLLGGKAALTLSGVQPEDEAEYYCVLWYSNRWVFGGGTKLTVLGGGGDKTHTCPPCPAPELLGGPSVFLFPPKPKDTLMISRTPEVTCVVVDVSHEDPEVKFNWYVDGVEVHNAKTKPCEEQYGSTYRCVSVLTVLHQDWLNGKEYKCKVSNKALPAPIEKTISKAKGQPREPQVYTLPPSREEMTKNQVSLTCLVKGFYPSDIAVEWESNGQPENNYKTTPPVLDSDGSFFLYSKLTVDKSRWQQGNVFSCSVMHEALHNHYTQKSLSLSPGKGGGGSGGGGSGGGGSGGGGSGGGGSGGGGSDKTHTCPPCPAPELLGGPSVFLFPPKPKDTLMISRTPEVTCVVVDVSHEDPEVKFNWYVDGVEVHNAKTKPCEEQYGSTYRCVSVLTVLHQDWLNGKEYKCKVSNKALPAPIEKTISKAKGQPREPQVYTLPPSREEMTKNQVSLTCLVKGFYPSDIAVEWESNGQPENNYKTTPPVLDSDGSFFLYSKLTVDKSRWQQGNVFSCSVMHEALHNHYTQKSLSLSPGK

SEQ ID NO: 1683 - protein, 479 aa, Artificial Sequence
  Synthetic
QVQLQESGPGLVKPSETLSLTCTVSGGSISSFYWSWIRQPPGKCLEWIGRISSSGDVDYNPSLKSRVTISVDTSKNQFSLKLSSVTAADTAVYYCAREGGFYYWGQGTLVTVSSGGGGSGGGGSGGGGSEIVLTQSPGTLSLSPGERATLSCRASQSVSSSYLAWYQQKPGQAPRLLIYGASSRATGIPDRFSGSGSGTDFTLTISRLEPEDFAVYYCQQYGSSPITFGCGTKLEIKSGGGGSQVQLVQSGAEVKKPGASVKVSCKASGYTFTSYWMHWVRQRPGQCLEWMGYISPNSGYTDYHHKFKGRVTMTADKSISTAYMQLSRLTSDDTAVYYCARDPMDYWGQGTLVTVSSGGGGSGGGGSGGGGSDIQMTQSPSSLSASVGDRVTITCRASENIYSYLAWYQQKPGKAPKLLIYNAKTLVEGVPSRFSGSGSGTDFTLTISSLQPEDFGTYYCQHHYGTPRTFGCGTKLEIK

SEQ ID NO: 1684 - protein, 734 aa, Artificial Sequence
  Synthetic
QVQLQESGPGLVKPSETLSLTCTVSGGSISSFYWSWIRQPPGKCLEWIGRISSSGDVDYNPSLKSRVTISVDTSKNQFSLKLSSVTAADTAVYYCAREGGFYYWGQGTLVTVSSGGGGSGGGGSGGGGSEIVLTQSPGTLSLSPGERATLSCRASQSVSSSYLAWYQQKPGQAPRLLIYGASSRATGIPDRFSGSGSGTDFTLTISRLEPEDFAVYYCQQYGSSPITFGCGTKLEIKSGGGGSQVQLVQSGAEVKKPGASVKVSCKASGYTFTSYWMHWVRQRPGQCLEWMGYISPNSGYTDYHHKFKGRVTMTADKSISTAYMQLSRLTSDDTAVYYCARDPMDYWGQGTLVTVSSGGGGSGGGGSGGGGSDIQMTQSPSSLSASVGDRVTITCRASENIYSYLAWYQQKPGKAPKLLIYNAKTLVEGVPSRFSGSGSGTDFTLTISSLQPEDFGTYYCQHHYGTPRTFGCGTKLEIKSGGGGSEVQLVESGGGLVQPGGSLKLSCAASGFTFNKYAMNWVRQAPGKGLEWVARIRSKYNNYATYYADSVKDRFTISRDDSKNTAYLQMNNLKTEDTAVYYCVRHGNFGNSYISYWAYWGQGTLVTVSSGGGGSGGGGSGGGGSQTVVTQEPSLTVSPGGTVTLTCGSSTGAVTSGNYPNWVQQKPGQAPRGLIGGTKFLAPGTPARFSGSLLGGKAALTLSGVQPEDEAEYYCVLWYSNRWVFGGGTKLTVL

SEQ ID NO: 1685 - protein, 1222 aa, Artificial Sequence
  Synthetic
QVQLQESGPGLVKPSETLSLTCTVSGGSISSFYWSWIRQPPGKCLEWIGRISSSGDVDYNPSLKSRVTISVDTSKNQFSLKLSSVTAADTAVYYCAREGGFYYWGQGTLVTVSSGGGGSGGGGSGGGGSEIVLTQSPGTLSLSPGERATLSCRASQSVSSSYLAWYQQKPGQAPRLLIYGASSRATGIPDRFSGSGSGTDFTLTISRLEPEDFAVYYCQQYGSSPITFGCGTKLEIKSGGGGSQVQLVQSGAEVKKPGASVKVSCKASGYTFTSYWMHWVRQRPGQCLEWMGYISPNSGYTDYHHKFKGRVTMTADKSISTAYMQLSRLTSDDTAVYYCARDPMDYWGQGTLVTVSSGGGGSGGGGSGGGGSDIQMTQSPSSLSASVGDRVTITCRASENIYSYLAWYQQKPGKAPKLLIYNAKTLVEGVPSRFSGSGSGTDFTLTISSLQPEDFGTYYCQHHYGTPRTFGCGTKLEIKSGGGGSEVQLVESGGGLVQPGGSLKLSCAASGFTFNKYAMNWVRQAPGKGLEWVARIRSKYNNYATYYADSVKDRFTISRDDSKNTAYLQMNNLKTEDTAVYYCVRHGNFGNSYISYWAYWGQGTLVTVSSGGGGSGGGGSGGGGSQTVVTQEPSLTVSPGGTVTLTCGSSTGAVTSGNYPNWVQQKPGQAPRGLIGGTKFLAPGTPARFSGSLLGGKAALTLSGVQPEDEAEYYCVLWYSNRWVFGGGTKLTVLGGGGDKTHTCPPCPAPELLGGPSVFLFPPKPKDTLMISRTPEVTCVVVDVSHEDPEVKFNWYVDGVEVHNAKTKPCEEQYGSTYRCVSVLTVLHQDWLNGKEYKCKVSNKALPAPIEKTISKAKGQPREPQVYTLPPSREEMTKNQVSLTCLVKGFYPSDIAVEWESNGQPENNYKTTPPVLDSDGSFFLYSKLTVDKSRWQQGNVFSCSVMHEALHNHYTQKSLSLSPGKGGGGSGGGGSGGGGSGGGGSGGGGSGGGGSDKTHTCPPCPAPELLGGPSVFLFPPKPKDTLMISRTPEVTCVVVDVSHEDPEVKFNWYVDGVEVHNAKTKPCEEQYGSTYRCVSVLTVLHQDWLNGKEYKCKVSNKALPAPIEKTISKAKGQPREPQVYTLPPSREEMTKNQVSLTCLVKGFYPSDIAVEWESNGQPENNYKTTPPVLDSDGSFFLYSKLTVDKSRWQQGNVFSCSVMHEALHNHYTQKSLSLSPGK

SEQ ID NO: 1686 - protein, 490 aa, Artificial Sequence
  Synthetic
QVQLQESGPGLVKPSETLSLTCTVSGGSISSFYWSWIRQPPGKCLEWIGRISSSGDVDYNPSLKSRVTISVDTSKNQFSLKLSSVTAADTAVYYCAREGGFYYWGQGTLVTVSSGGGGSGGGGSGGGGSEIVLTQSPGTLSLSPGERATLSCRASQSVSSSYLAWYQQKPGQAPRLLIYGASSRATGIPDRFSGSGSGTDFTLTISRLEPEDFAVYYCQQYGSSPITFGCGTKLEIKSGGGGSQVQLQQWGAGLLKPSETLSLTCAVYGGSFSGYYWSWIRQPPGKCLEWIGEINHRGSTNYNPSLKSRVTISGDTSKNQFSLKLSSVNAADTAVYYCARGYSSSWYTGYVFDYWGQGTLVTVSSGGGGSGGGGSGGGGSQSALTQPASVSGSPGQSITISCTGTSSDVFGYDYVSWYQQHPGKAPKLMIYDVSNRPSGVSNRFSGSKSGNAASLTISGLQAEDEADYYCSSYKSSSTVVFGCGTKLTVL

SEQ ID NO: 1687 - protein, 745 aa, Artificial Sequence
  Synthetic
QVQLQESGPGLVKPSETLSLTCTVSGGSISSFYWSWIRQPPGKCLEWIGRISSSGDVDYNPSLKSRVTISVDTSKNQFSLKLSSVTAADTAVYYCAREGGFYYWGQGTLVTVSSGGGGSGGGGSGGGGSEIVLTQSPGTLSLSPGERATLSCRASQSVSSSYLAWYQQKPGQAPRLLIYGASSRATGIPDRFSGSGSGTDFTLTISRLEPEDFAVYYCQQYGSSPITFGCGTKLEIKSGGGGSQVQLQQWGAGLLKPSETLSLTCAVYGGSFSGYYWSWIRQPPGKCLEWIGEINHRGSTNYNPSLKSRVTISGDTSKNQFSLKLSSVNAADTAVYYCARGYSSSWYTGYVFDYWGQGTLVTVSSGGGGSGGGGSGGGGSQSALTQPASVSGSPGQSITISCTGTSSDVFGYDYVSWYQQHPGKAPKLMIYDVSNRPSGVSNRFSGSKSGNAASLTISGLQAEDEADYYCSSYKSSSTVVFGCGTKLTVLSGGGGSEVQLVESGGGLVQPGGSLKLSCAASGFTFNKYAMNWVRQAPGKGLEWVARIRSKYNNYATYYADSVKDRFTISRDDSKNTAYLQMNNLKTEDTAVYYCVRHGNFGNSYISYWAYWGQGTLVTVSSGGGGSGGGGSGGGGSQTVVTQEPSLTVSPGGTVTLTCGSSTGAVTSGNYPNWVQQKPGQAPRGLIGGTKFLAPGTPARFSGSLLGGKAALTLSGVQPEDEAEYYCVLWYSNRWVFGGGTKLTVL

SEQ ID NO: 1688 - protein, 1233 aa, Artificial Sequence
  Synthetic
QVQLQESGPGLVKPSETLSLTCTVSGGSISSFYWSWIRQPPGKCLEWIGRISSSGDVDYNPSLKSRVTISVDTSKNQFSLKLSSVTAADTAVYYCAREGGFYYWGQGTLVTVSSGGGGSGGGGSGGGGSEIVLTQSPGTLSLSPGERATLSCRASQSVSSSYLAWYQQKPGQAPRLLIYGASSRATGIPDRFSGSGSGTDFTLTISRLEPEDFAVYYCQQYGSSPITFGCGTKLEIKSGGGGSQVQLQQWGAGLLKPSETLSLTCAVYGGSFSGYYWSWIRQPPGKCLEWIGEINHRGSTNYNPSLKSRVTISGDTSKNQFSLKLSSVNAADTAVYYCARGYSSSWYTGYVFDYWGQGTLVTVSSGGGGSGGGGSGGGGSQSALTQPASVSGSPGQSITISCTGTSSDVFGYDYVSWYQQHPGKAPKLMIYDVSNRPSGVSNRFSGSKSGNAASLTISGLQAEDEADYYCSSYKSSSTVVFGCGTKLTVLSGGGGSEVQLVESGGGLVQPGGSLKLSCAASGFTFNKYAMNWVRQAPGKGLEWVARIRSKYNNYATYYADSVKDRFTISRDDSKNTAYLQMNNLKTEDTAVYYCVRHGNFGNSYISYWAYWGQGTLVTVSSGGGGSGGGGSGGGGSQTVVTQEPSLTVSPGGTVTLTCGSSTGAVTSGNYPNWVQQKPGQAPRGLIGGTKFLAPGTPARFSGSLLGGKAALTLSGVQPEDEAEYYCVLWYSNRWVFGGGTKLTVLGGGGDKTHTCPPCPAPELLGGPSVFLFPPKPKDTLMISRTPEVTCVVVDVSHEDPEVKFNWYVDGVEVHNAKTKPCEEQYGSTYRCVSVLTVLHQDWLNGKEYKCKVSNKALPAPIEKTISKAKGQPREPQVYTLPPSREEMTKNQVSLTCLVKGFYPSDIAVEWESNGQPENNYKTTPPVLDSDGSFFLYSKLTVDKSRWQQGNVFSCSVMHEALHNHYTQKSLSLSPGKGGGGSGGGGSGGGGSGGGGSGGGGSGGGGSDKTHTCPPCPAPELLGGPSVFLFPPKPKDTLMISRTPEVTCVVVDVSHEDPEVKFNWYVDGVEVHNAKTKPCEEQYGSTYRCVSVLTVLHQDWLNGKEYKCKVSNKALPAPIEKTISKAKGQPREPQVYTLPPSREEMTKNQVSLTCLVKGFYPSDIAVEWESNGQPENNYKTTPPVLDSDGSFFLYSKLTVDKSRWQQGNVFSCSVMHEALHNHYTQKSLSLSPGK

SEQ ID NO: 1689 - protein, 479 aa, Artificial Sequence
  Synthetic
QVQLQESGPGLVKPSETLSLTCTVSGGSISSFYWSWIRQPPGKCLEWIGRISSSGDVDYNPSLKSRVTISVDTSKNQFSLKLSSVTAADTAVYYCAREGGFYYWGQGTLVTVSSGGGGSGGGGSGGGGSEIVLTQSPGTLSLSPGERATLSCRASQSVSSSYLAWYQQKPGQAPRLLIYGASSRATGIPDRFSGSGSGTDFTLTISRLEPEDFAVYYCQQYGSSPITFGCGTKLEIKSGGGGSQVQLVQSGAEVKKPGASVKVSCKASGYTFTDYWMHWVRQAPGQCLEWMGYITPSTGYTDYHRKFRGRVTMTRDKSISTAYMELSRLRSDDTAVYYCARSTFDAWGQGTMVTVSSGGGGSGGGGSGGGGSDIQMTQSPSSLSASVGDRVSITCRASQEISGYLSWFQQKPGKAIKRLIYATSSLDAGVPSRFSGSGSGTDFTLTISSLQPEDFADYYCLQYASYPLTFGCGTKLEIK

SEQ ID NO: 1690 - protein, 734 aa, Artificial Sequence
  Synthetic
QVQLQESGPGLVKPSETLSLTCTVSGGSISSFYWSWIRQPPGKCLEWIGRISSSGDVDYNPSLKSRVTISVDTSKNQFSLKLSSVTAADTAVYYCAREGGFYYWGQGTLVTVSSGGGGSGGGGSGGGGSEIVLTQSPGTLSLSPGERATLSCRASQSVSSSYLAWYQQKPGQAPRLLIYGASSRATGIPDRFSGSGSGTDFTLTISRLEPEDFAVYYCQQYGSSPITFGCGTKLEIKSGGGGSQVQLVQSGAEVKKPGASVKVSCKASGYTFTDYWMHWVRQAPGQCLEWMGYITPSTGYTDYHRKFRGRVTMTRDKSISTAYMELSRLRSDDTAVYYCARSTFDAWGQGTMVTVSSGGGGSGGGGSGGGGSDIQMTQSPSSLSASVGDRVSITCRASQEISGYLSWFQQKPGKAIKRLIYATSSLDAGVPSRFSGSGSGTDFTLTISSLQPEDFADYYCLQYASYPLTFGCGTKLEIKSGGGGSEVQLVESGGGLVQPGGSLKLSCAASGFTFNKYAMNWVRQAPGKGLEWVARIRSKYNNYATYYADSVKDRFTISRDDSKNTAYLQMNNLKTEDTAVYYCVRHGNFGNSYISYWAYWGQGTLVTVSSGGGGSGGGGSGGGGSQTVVTQEPSLTVSPGGTVTLTCGSSTGAVTSGNYPNWVQQKPGQAPRGLIGGTKFLAPGTPARFSGSLLGGKAALTLSGVQPEDEAEYYCVLWYSNRWVFGGGTKLTVL

SEQ ID NO: 1691 - protein, 1222 aa, Artificial Sequence
  Synthetic
QVQLQESGPGLVKPSETLSLTCTVSGGSISSFYWSWIRQPPGKCLEWIGRISSSGDVDYNPSLKSRVTISVDTSKNQFSLKLSSVTAADTAVYYCAREGGFYYWGQGTLVTVSSGGGGSGGGGSGGGGSEIVLTQSPGTLSLSPGERATLSCRASQSVSSSYLAWYQQKPGQAPRLLIYGASSRATGIPDRFSGSGSGTDFTLTISRLEPEDFAVYYCQQYGSSPITFGCGTKLEIKSGGGGSQVQLVQSGAEVKKPGASVKVSCKASGYTFTDYWMHWVRQAPGQCLEWMGYITPSTGYTDYHRKFRGRVTMTRDKSISTAYMELSRLRSDDTAVYYCARSTFDAWGQGTMVTVSSGGGGSGGGGSGGGGSDIQMTQSPSSLSASVGDRVSITCRASQEISGYLSWFQQKPGKAIKRLIYATSSLDAGVPSRFSGSGSGTDFTLTISSLQPEDFADYYCLQYASYPLTFGCGTKLEIKSGGGGSEVQLVESGGGLVQPGGSLKLSCAASGFTFNKYAMNWVRQAPGKGLEWVARIRSKYNNYATYYADSVKDRFTISRDDSKNTAYLQMNNLKTEDTAVYYCVRHGNFGNSYISYWAYWGQGTLVTVSSGGGGSGGGGSGGGGSQTVVTQEPSLTVSPGGTVTLTCGSSTGAVTSGNYPNWVQQKPGQAPRGLIGGTKFLAPGTPARFSGSLLGGKAALTLSGVQPEDEAEYYCVLWYSNRWVFGGGTKLTVLGGGGDKTHTCPPCPAPELLGGPSVFLFPPKPKDTLMISRTPEVTCVVVDVSHEDPEVKFNWYVDGVEVHNAKTKPCEEQYGSTYRCVSVLTVLHQDWLNGKEYKCKVSNKALPAPIEKTISKAKGQPREPQVYTLPPSREEMTKNQVSLTCLVKGFYPSDIAVEWESNGQPENNYKTTPPVLDSDGSFFLYSKLTVDKSRWQQGNVFSCSVMHEALHNHYTQKSLSLSPGKGGGGSGGGGSGGGGSGGGGSGGGGSGGGGSDKTHTCPPCPAPELLGGPSVFLFPPKPKDTLMISRTPEVTCVVVDVSHEDPEVKFNWYVDGVEVHNAKTKPCEEQYGSTYRCVSVLTVLHQDWLNGKEYKCKVSNKALPAPIEKTISKAKGQPREPQVYTLPPSREEMTKNQVSLTCLVKGFYPSDIAVEWESNGQPENNYKTTPPVLDSDGSFFLYSKLTVDKSRWQQGNVFSCSVMHEALHNHYTQKSLSLSPGK

SEQ ID NO: 1692 - protein, 484 aa, Artificial Sequence
  Synthetic
QVQLQESGPGLVKPSETLSLTCTVSGGSISSFYWSWIRQPPGKCLEWIGRISSSGDVDYNPSLKSRVTISVDTSKNQFSLKLSSVTAADTAVYYCAREGGFYYWGQGTLVTVSSGGGGSGGGGSGGGGSEIVLTQSPGTLSLSPGERATLSCRASQSVSSSYLAWYQQKPGQAPRLLIYGASSRATGIPDRFSGSGSGTDFTLTISRLEPEDFAVYYCQQYGSSPITFGCGTKLEIKSGGGGSQVQLVQSGAEVKKPGASVKVSCKASGYTFTSYWMHWVRQAPGQCLEWMGYITPSTGYTEYNQKFKGRVTMTRDKSTSTVYMELSSLRSEDTAVYYCARVHDYDRAMEYWGQGTTVTVSSGGGGSGGGGSGGGGSDIQMTQSPSSLSASVGDRVTITCKASQDINKYIAWYQQKPGKGPKLLIYYTSTLQPGVPSRFSGSGSGTDFTFTISSLQPEDIATYYCLQYASYPFTFGCGTRLEIK

SEQ ID NO: 1693 - protein, 739 aa, Artificial Sequence
  Synthetic
QVQLQESGPGLVKPSETLSLTCTVSGGSISSFYWSWIRQPPGKCLEWIGRISSSGDVDYNPSLKSRVTISVDTSKNQFSLKLSSVTAADTAVYYCAREGGFYYWGQGTLVTVSSGGGGSGGGGSGGGGSEIVLTQSPGTLSLSPGERATLSCRASQSVSSSYLAWYQQKPGQAPRLLIYGASSRATGIPDRFSGSGSGTDFTLTISRLEPEDFAVYYCQQYGSSPITFGCGTKLEIKSGGGGSQVQLVQSGAEVKKPGASVKVSCKASGYTFTSYWMHWVRQAPGQCLEWMGYITPSTGYTEYNQKFKGRVTMTRDKSTSTVYMELSSLRSEDTAVYYCARVHDYDRAMEYWGQGTTVTVSSGGGGSGGGGSGGGGSDIQMTQSPSSLSASVGDRVTITCKASQDINKYIAWYQQKPGKGPKLLIYYTSTLQPGVPSRFSGSGSGTDFTFTISSLQPEDIATYYCLQYASYPFTFGCGTRLEIKSGGGGSEVQLVESGGGLVQPGGSLKLSCAASGFTFNKYAMNWVRQAPGKGLEWVARIRSKYNNYATYYADSVKDRFTISRDDSKNTAYLQMNNLKTEDTAVYYCVRHGNFGNSYISYWAYWGQGTLVTVSSGGGGSGGGGSGGGGSQTVVTQEPSLTVSPGGTVTLTCGSSTGAVTSGNYPNWVQQKPGQAPRGLIGGTKFLAPGTPARFSGSLLGGKAALTLSGVQPEDEAEYYCVLWYSNRWVFGGGTKLTVL

SEQ ID NO: 1694 - protein, 1227 aa, Artificial Sequence
  Synthetic
QVQLQESGPGLVKPSETLSLTCTVSGGSISSFYWSWIRQPPGKCLEWIGRISSSGDVDYNPSLKSRVTISVDTSKNQFSLKLSSVTAADTAVYYCAREGGFYYWGQGTLVTVSSGGGGSGGGGSGGGGSEIVLTQSPGTLSLSPGERATLSCRASQSVSSSYLAWYQQKPGQAPRLLIYGASSRATGIPDRFSGSGSGTDFTLTISRLEPEDFAVYYCQQYGSSPITFGCGTKLEIKSGGGGSQVQLVQSGAEVKKPGASVKVSCKASGYTFTSYWMHWVRQAPGQCLEWMGYITPSTGYTEYNQKFKGRVTMTRDKSTSTVYMELSSLRSEDTAVYYCARVHDYDRAMEYWGQGTTVTVSSGGGGSGGGGSGGGGSDIQMTQSPSSLSASVGDRVTITCKASQDINKYIAWYQQKPGKGPKLLIYYTSTLQPGVPSRFSGSGSGTDFTFTISSLQPEDIATYYCLQYASYPFTFGCGTRLEIKSGGGGSEVQLVESGGGLVQPGGSLKLSCAASGFTFNKYAMNWVRQAPGKGLEWVARIRSKYNNYATYYADSVKDRFTISRDDSKNTAYLQMNNLKTEDTAVYYCVRHGNFGNSYISYWAYWGQGTLVTVSSGGGGSGGGGSGGGGSQTVVTQEPSLTVSPGGTVTLTCGSSTGAVTSGNYPNWVQQKPGQAPRGLIGGTKFLAPGTPARFSGSLLGGKAALTLSGVQPEDEAEYYCVLWYSNRWVFGGGTKLTVLGGGGDKTHTCPPCPAPELLGGPSVFLFPPKPKDTLMISRTPEVTCVVVDVSHEDPEVKFNWYVDGVEVHNAKTKPCEEQYGSTYRCVSVLTVLHQDWLNGKEYKCKVSNKALPAPIEKTISKAKGQPREPQVYTLPPSREEMTKNQVSLTCLVKGFYPSDIAVEWESNGQPENNYKTTPPVLDSDGSFFLYSKLTVDKSRWQQGNVFSCSVMHEALHNHYTQKSLSLSPGKGGGGSGGGGSGGGGSGGGGSGGGGSGGGGSDKTHTCPPCPAPELLGGPSVFLFPPKPKDTLMISRTPEVTCVVVDVSHEDPEVKFNWYVDGVEVHNAKTKPCEEQYGSTYRCVSVLTVLHQDWLNGKEYKCKVSNKALPAPIEKTISKAKGQPREPQVYTLPPSREEMTKNQVSLTCLVKGFYPSDIAVEWESNGQPENNYKTTPPVLDSDGSFFLYSKLTVDKSRWQQGNVFSCSVMHEALHNHYTQKSLSLSPGK

SEQ ID NO: 1695 - protein, 487 aa, Artificial Sequence
  Synthetic
QVQLVQSGAEVKKPGASVKVSCKASGYTFTSYGISWVRQAPGQCLEWMGWISAYSGNAIYAQKLQGRVTMTRDTSTSTAYMELRSLRSDDTAVYYCARDPDYYGSGSYSDYWGQGTLVTVSSGGGGSGGGGSGGGGSEIVLTQSPATLSVSPGERATLSCRASQSVSSNLAWYQQKPGQAPRLLIYGASSRATGIPARFSGSGSGTEFTLTISSLQSEDFAVYYCQQYHSWPLLTFGCGTKVEIKSGGGGSQVQLVQSGAEVKKPGASVKVSCKASGYTFTDYWMHWVRQAPGQCLEWMGYITPSTGYTDYHRKFRGRVTMTRDKSISTAYMELSRLRSDDTAVYYCARSTFDAWGQGTMVTVSSGGGGSGGGGSGGGGSDIQMTQSPSSLSASVGDRVSITCRASQEISGYLSWFQQKPGKAIKRLIYATSSLDAGVPSRFSGSGSGTDFTLTISSLQPEDFADYYCLQYASYPLTFGCGTKLEIK

SEQ ID NO: 1696 - protein, 742 aa, Artificial Sequence
  Synthetic
QVQLVQSGAEVKKPGASVKVSCKASGYTFTSYGISWVRQAPGQCLEWMGWISAYSGNAIYAQKLQGRVTMTRDTSTSTAYMELRSLRSDDTAVYYCARDPDYYGSGSYSDYWGQGTLVTVSSGGGGSGGGGSGGGGSEIVLTQSPATLSVSPGERATLSCRASQSVSSNLAWYQQKPGQAPRLLIYGASSRATGIPARFSGSGSGTEFTLTISSLQSEDFAVYYCQQYHSWPLLTFGCGTKVEIKSGGGGSQVQLVQSGAEVKKPGASVKVSCKASGYTFTDYWMHWVRQAPGQCLEWMGYITPSTGYTDYHRKFRGRVTMTRDKSISTAYMELSRLRSDDTAVYYCARSTFDAWGQGTMVTVSSGGGGSGGGGSGGGGSDIQMTQSPSSLSASVGDRVSITCRASQEISGYLSWFQQKPGKAIKRLIYATSSLDAGVPSRFSGSGSGTDFTLTISSLQPEDFADYYCLQYASYPLTFGCGTKLEIKSGGGGSEVQLVESGGGLVQPGGSLKLSCAASGFTFNKYAMNWVRQAPGKGLEWVARIRSKYNNYATYYADSVKDRFTISRDDSKNTAYLQMNNLKTEDTAVYYCVRHGNFGNSYISYWAYWGQGTLVTVSSGGGGSGGGGSGGGGSQTVVTQEPSLTVSPGGTVTLTCGSSTGAVTSGNYPNWVQQKPGQAPRGLIGGTKFLAPGTPARFSGSLLGGKAALTLSGVQPEDEAEYYCVLWYSNRWVFGGGTKLTVL

SEQ ID NO: 1697 - protein, 1230 aa, Artificial Sequence
  Synthetic
QVQLVQSGAEVKKPGASVKVSCKASGYTFTSYGISWVRQAPGQCLEWMGWISAYSGNAIYAQKLQGRVTMTRDTSTSTAYMELRSLRSDDTAVYYCARDPDYYGSGSYSDYWGQGTLVTVSSGGGGSGGGGSGGGGSEIVLTQSPATLSVSPGERATLSCRASQSVSSNLAWYQQKPGQAPRLLIYGASSRATGIPARFSGSGSGTEFTLTISSLQSEDFAVYYCQQYHSWPLLTFGCGTKVEIKSGGGGSQVQLVQSGAEVKKPGASVKVSCKASGYTFTDYWMHWVRQAPGQCLEWMGYITPSTGYTDYHRKFRGRVTMTRDKSISTAYMELSRLRSDDTAVYYCARSTFDAWGQGTMVTVSSGGGGSGGGGSGGGGSDIQMTQSPSSLSASVGDRVSITCRASQEISGYLSWFQQKPGKAIKRLIYATSSLDAGVPSRFSGSGSGTDFTLTISSLQPEDFADYYCLQYASYPLTFGCGTKLEIKSGGGGSEVQLVESGGGLVQPGGSLKLSCAASGFTFNKYAMNWVRQAPGKGLEWVARIRSKYNNYATYYADSVKDRFTISRDDSKNTAYLQMNNLKTEDTAVYYCVRHGNFGNSYISYWAYWGQGTLVTVSSGGGGSGGGGSGGGGSQTVVTQEPSLTVSPGGTVTLTCGSSTGAVTSGNYPNWVQQKPGQAPRGLIGGTKFLAPGTPARFSGSLLGGKAALTLSGVQPEDEAEYYCVLWYSNRWVFGGGTKLTVLGGGGDKTHTCPPCPAPELLGGPSVFLFPPKPKDTLMISRTPEVTCVVVDVSHEDPEVKFNWYVDGVEVHNAKTKPCEEQYGSTYRCVSVLTVLHQDWLNGKEYKCKVSNKALPAPIEKTISKAKGQPREPQVYTLPPSREEMTKNQVSLTCLVKGFYPSDIAVEWESNGQPENNYKTTPPVLDSDGSFFLYSKLTVDKSRWQQGNVFSCSVMHEALHNHYTQKSLSLSPGKGGGGSGGGGSGGGGSGGGGSGGGGSGGGGSDKTHTCPPCPAPELLGGPSVFLFPPKPKDTLMISRTPEVTCVVVDVSHEDPEVKFNWYVDGVEVHNAKTKPCEEQYGSTYRCVSVLTVLHQDWLNGKEYKCKVSNKALPAPIEKTISKAKGQPREPQVYTLPPSREEMTKNQVSLTCLVKGFYPSDIAVEWESNGQPENNYKTTPPVLDSDGSFFLYSKLTVDKSRWQQGNVFSCSVMHEALHNHYTQKSLSLSPGK

SEQ ID NO: 1698 - protein, 493 aa, Artificial Sequence
  Synthetic
QVQLVQSGAEVKKPGASVKVSCKASGYTFTSYGISWVRQAPGQCLEWMGWISAYSGNAIYAQKLQGRVTMTRDTSTSTAYMELRSLRSDDTAVYYCARDPDYYGSGSYSDYWGQGTLVTVSSGGGGSGGGGSGGGGSEIVLTQSPATLSVSPGERATLSCRASQSVSSNLAWYQQKPGQAPRLLIYGASSRATGIPARFSGSGSGTEFTLTISSLQSEDFAVYYCQQYHSWPLLTFGCGTKVEIKSGGGGSQVQLVQSGAEVKKPGASVKVSCKASGYTFTDYWMHWVRQAPGQCLEWMGYITPSTGYTDYNQKFKGRVTMTRDKSTSTAYMELSSLRSEDTAVYYCARNYNHRGYAMDYWGQGTTVTVSSGGGGSGGGGSGGGGSDIQMTQSPSSLSASVGDRVTITCRASENIYSNLAWYQQKPGKAPKLLIYAATNLAEGVPSRFSGSGSGTDFTLTISSLQPEDFATYYCQHFYGTPLTFGCGTKLEIK

SEQ ID NO: 1699 - protein, 748 aa, Artificial Sequence
  Synthetic
QVQLVQSGAEVKKPGASVKVSCKASGYTFTSYGISWVRQAPGQCLEWMGWISAYSGNAIYAQKLQGRVTMTRDTSTSTAYMELRSLRSDDTAVYYCARDPDYYGSGSYSDYWGQGTLVTVSSGGGGSGGGGSGGGGSEIVLTQSPATLSVSPGERATLSCRASQSVSSNLAWYQQKPGQAPRLLIYGASSRATGIPARFSGSGSGTEFTLTISSLQSEDFAVYYCQQYHSWPLLTFGCGTKVEIKSGGGGSQVQLVQSGAEVKKPGASVKVSCKASGYTFTDYWMHWVRQAPGQCLEWMGYITPSTGYTDYNQKFKGRVTMTRDKSTSTAYMELSSLRSEDTAVYYCARNYNHRGYAMDYWGQGTTVTVSSGGGGSGGGGSGGGGSDIQMTQSPSSLSASVGDRVTITCRASENIYSNLAWYQQKPGKAPKLLIYAATNLAEGVPSRFSGSGSGTDFTLTISSLQPEDFATYYCQHFYGTPLTFGCGTKLEIKSGGGGSEVQLVESGGGLVQPGGSLKLSCAASGFTFNKYAMNWVRQAPGKGLEWVARIRSKYNNYATYYADSVKDRFTISRDDSKNTAYLQMNNLKTEDTAVYYCVRHGNFGNSYISYWAYWGQGTLVTVSSGGGGSGGGGSGGGGSQTVVTQEPSLTVSPGGTVTLTCGSSTGAVTSGNYPNWVQQKPGQAPRGLIGGTKFLAPGTPARFSGSLLGGKAALTLSGVQPEDEAEYYCVLWYSNRWVFGGGTKLTVL

SEQ ID NO: 1700 - protein, 1236 aa, Artificial Sequence
  Synthetic
QVQLVQSGAEVKKPGASVKVSCKASGYTFTSYGISWVRQAPGQCLEWMGWISAYSGNAIYAQKLQGRVTMTRDTSTSTAYMELRSLRSDDTAVYYCARDPDYYGSGSYSDYWGQGTLVTVSSGGGGSGGGGSGGGGSEIVLTQSPATLSVSPGERATLSCRASQSVSSNLAWYQQKPGQAPRLLIYGASSRATGIPARFSGSGSGTEFTLTISSLQSEDFAVYYCQQYHSWPLLTFGCGTKVEIKSGGGGSQVQLVQSGAEVKKPGASVKVSCKASGYTFTDYWMHWVRQAPGQCLEWMGYITPSTGYTDYNQKFKGRVTMTRDKSTSTAYMELSSLRSEDTAVYYCARNYNHRGYAMDYWGQGTTVTVSSGGGGSGGGGSGGGGSDIQMTQSPSSLSASVGDRVTITCRASENIYSNLAWYQQKPGKAPKLLIYAATNLAEGVPSRFSGSGSGTDFTLTISSLQPEDFATYYCQHFYGTPLTFGCGTKLEIKSGGGGSEVQLVESGGGLVQPGGSLKLSCAASGFTFNKYAMNWVRQAPGKGLEWVARIRSKYNNYATYYADSVKDRFTISRDDSKNTAYLQMNNLKTEDTAVYYCVRHGNFGNSYISYWAYWGQGTLVTVSSGGGGSGGGGSGGGGSQTVVTQEPSLTVSPGGTVTLTCGSSTGAVTSGNYPNWVQQKPGQAPRGLIGGTKFLAPGTPARFSGSLLGGKAALTLSGVQPEDEAEYYCVLWYSNRWVFGGGTKLTVLGGGGDKTHTCPPCPAPELLGGPSVFLFPPKPKDTLMISRTPEVTCVVVDVSHEDPEVKFNWYVDGVEVHNAKTKPCEEQYGSTYRCVSVLTVLHQDWLNGKEYKCKVSNKALPAPIEKTISKAKGQPREPQVYTLPPSREEMTKNQVSLTCLVKGFYPSDIAVEWESNGQPENNYKTTPPVLDSDGSFFLYSKLTVDKSRWQQGNVFSCSVMHEALHNHYTQKSLSLSPGKGGGGSGGGGSGGGGSGGGGSGGGGSGGGGSDKTHTCPPCPAPELLGGPSVFLFPPKPKDTLMISRTPEVTCVVVDVSHEDPEVKFNWYVDGVEVHNAKTKPCEEQYGSTYRCVSVLTVLHQDWLNGKEYKCKVSNKALPAPIEKTISKAKGQPREPQVYTLPPSREEMTKNQVSLTCLVKGFYPSDIAVEWESNGQPENNYKTTPPVLDSDGSFFLYSKLTVDKSRWQQGNVFSCSVMHEALHNHYTQKSLSLSPGK

SEQ ID NO: 1701 - protein, 487 aa, Artificial Sequence
  Synthetic
QVQLVQSGAEVKKPGASVKVSCKASGYTFTSYGISWVRQAPGQCLEWMGWISAYSGNAIYAQKLQGRVTMTRDTSTSTAYMELRSLRSDDTAVYYCARDPDYYGSGSYSDYWGQGTLVTVSSGGGGSGGGGSGGGGSEIVLTQSPATLSVSPGERATLSCRASQSVSSNLAWYQQKPGQAPRLLIYGASSRATGIPARFSGSGSGTEFTLTISSLQSEDFAVYYCQQYHSWPLLTFGCGTKVEIKSGGGGSQVQLVQSGAEVKKPGASVKVSCKASGYTFTSYWMHWVRQRPGQCLEWMGYISPNSGYTDYHHKFKGRVTMTADKSISTAYMQLSRLTSDDTAVYYCARDPMDYWGQGTLVTVSSGGGGSGGGGSGGGGSDIQMTQSPSSLSASVGDRVTITCRASENIYSYLAWYQQKPGKAPKLLIYNAKTLVEGVPSRFSGSGSGTDFTLTISSLQPEDFGTYYCQHHYGTPRTFGCGTKLEIK

SEQ ID NO: 1702 - protein, 742 aa, Artificial Sequence
  Synthetic
QVQLVQSGAEVKKPGASVKVSCKASGYTFTSYGISWVRQAPGQCLEWMGWISAYSGNAIYAQKLQGRVTMTRDTSTSTAYMELRSLRSDDTAVYYCARDPDYYGSGSYSDYWGQGTLVTVSSGGGGSGGGGSGGGGSEIVLTQSPATLSVSPGERATLSCRASQSVSSNLAWYQQKPGQAPRLLIYGASSRATGIPARFSGSGSGTEFTLTISSLQSEDFAVYYCQQYHSWPLLTFGCGTKVEIKSGGGGSQVQLVQSGAEVKKPGASVKVSCKASGYTFTSYWMHWVRQRPGQCLEWMGYISPNSGYTDYHHKFKGRVTMTADKSISTAYMQLSRLTSDDTAVYYCARDPMDYWGQGTLVTVSSGGGGSGGGGSGGGGSDIQMTQSPSSLSASVGDRVTITCRASENIYSYLAWYQQKPGKAPKLLIYNAKTLVEGVPSRFSGSGSGTDFTLTISSLQPEDFGTYYCQHHYGTPRTFGCGTKLEIKSGGGGSEVQLVESGGGLVQPGGSLKLSCAASGFTFNKYAMNWVRQAPGKGLEWVARIRSKYNNYATYYADSVKDRFTISRDDSKNTAYLQMNNLKTEDTAVYYCVRHGNFGNSYISYWAYWGQGTLVTVSSGGGGSGGGGSGGGGSQTVVTQEPSLTVSPGGTVTLTCGSSTGAVTSGNYPNWVQQKPGQAPRGLIGGTKFLAPGTPARFSGSLLGGKAALTLSGVQPEDEAEYYCVLWYSNRWVFGGGTKLTVL

SEQ ID NO: 1703 - protein, 1230 aa, Artificial Sequence
  Synthetic
QVQLVQSGAEVKKPGASVKVSCKASGYTFTSYGISWVRQAPGQCLEWMGWISAYSGNAIYAQKLQGRVTMTRDTSTSTAYMELRSLRSDDTAVYYCARDPDYYGSGSYSDYWGQGTLVTVSSGGGGSGGGGSGGGGSEIVLTQSPATLSVSPGERATLSCRASQSVSSNLAWYQQKPGQAPRLLIYGASSRATGIPARFSGSGSGTEFTLTISSLQSEDFAVYYCQQYHSWPLLTFGCGTKVEIKSGGGGSQVQLVQSGAEVKKPGASVKVSCKASGYTFTSYWMHWVRQRPGQCLEWMGYISPNSGYTDYHHKFKGRVTMTADKSISTAYMQLSRLTSDDTAVYYCARDPMDYWGQGTLVTVSSGGGGSGGGGSGGGGSDIQMTQSPSSLSASVGDRVTITCRASENIYSYLAWYQQKPGKAPKLLIYNAKTLVEGVPSRFSGSGSGTDFTLTISSLQPEDFGTYYCQHHYGTPRTFGCGTKLEIKSGGGGSEVQLVESGGGLVQPGGSLKLSCAASGFTFNKYAMNWVRQAPGKGLEWVARIRSKYNNYATYYADSVKDRFTISRDDSKNTAYLQMNNLKTEDTAVYYCVRHGNFGNSYISYWAYWGQGTLVTVSSGGGGSGGGGSGGGGSQTVVTQEPSLTVSPGGTVTLTCGSSTGAVTSGNYPNWVQQKPGQAPRGLIGGTKFLAPGTPARFSGSLLGGKAALTLSGVQPEDEAEYYCVLWYSNRWVFGGGTKLTVLGGGGDKTHTCPPCPAPELLGGPSVFLFPPKPKDTLMISRTPEVTCVVVDVSHEDPEVKFNWYVDGVEVHNAKTKPCEEQYGSTYRCVSVLTVLHQDWLNGKEYKCKVSNKALPAPIEKTISKAKGQPREPQVYTLPPSREEMTKNQVSLTCLVKGFYPSDIAVEWESNGQPENNYKTTPPVLDSDGSFFLYSKLTVDKSRWQQGNVFSCSVMHEALHNHYTQKSLSLSPGKGGGGSGGGGSGGGGSGGGGSGGGGSGGGGSDKTHTCPPCPAPELLGGPSVFLFPPKPKDTLMISRTPEVTCVVVDVSHEDPEVKFNWYVDGVEVHNAKTKPCEEQYGSTYRCVSVLTVLHQDWLNGKEYKCKVSNKALPAPIEKTISKAKGQPREPQVYTLPPSREEMTKNQVSLTCLVKGFYPSDIAVEWESNGQPENNYKTTPPVLDSDGSFFLYSKLTVDKSRWQQGNVFSCSVMHEALHNHYTQKSLSLSPGK

SEQ ID NO: 1704 - protein, 498 aa, Artificial Sequence
  Synthetic
QVQLVQSGAEVKKPGASVKVSCKASGYTFTSYGISWVRQAPGQCLEWMGWISAYSGNAIYAQKLQGRVTMTRDTSTSTAYMELRSLRSDDTAVYYCARDPDYYGSGSYSDYWGQGTLVTVSSGGGGSGGGGSGGGGSEIVLTQSPATLSVSPGERATLSCRASQSVSSNLAWYQQKPGQAPRLLIYGASSRATGIPARFSGSGSGTEFTLTISSLQSEDFAVYYCQQYHSWPLLTFGCGTKVEIKSGGGGSQVQLQQWGAGLLKPSETLSLTCAVYGGSFSGYYWSWIRQPPGKCLEWIGEINHRGSTNYNPSLKSRVTISGDTSKNQFSLKLSSVNAADTAVYYCARGYSSSWYTGYVFDYWGQGTLVTVSSGGGGSGGGGSGGGGSQSALTQPASVSGSPGQSITISCTGTSSDVFGYDYVSWYQQHPGKAPKLMIYDVSNRPSGVSNRFSGSKSGNAASLTISGLQAEDEADYYCSSYKSSSTVVFGCGTKLTVL

SEQ ID NO: 1705 - protein, 753 aa, Artificial Sequence
  Synthetic
QVQLVQSGAEVKKPGASVKVSCKASGYTFTSYGISWVRQAPGQCLEWMGWISAYSGNAIYAQKLQGRVTMTRDTSTSTAYMELRSLRSDDTAVYYCARDPDYYGSGSYSDYWGQGTLVTVSSGGGGSGGGGSGGGGSEIVLTQSPATLSVSPGERATLSCRASQSVSSNLAWYQQKPGQAPRLLIYGASSRATGIPARFSGSGSGTEFTLTISSLQSEDFAVYYCQQYHSWPLLTFGCGTKVEIKSGGGGSQVQLQQWGAGLLKPSETLSLTCAVYGGSFSGYYWSWIRQPPGKCLEWIGEINHRGSTNYNPSLKSRVTISGDTSKNQFSLKLSSVNAADTAVYYCARGYSSSWYTGYVFDYWGQGTLVTVSSGGGGSGGGGSGGGGSQSALTQPASVSGSPGQSITISCTGTSSDVFGYDYVSWYQQHPGKAPKLMIYDVSNRPSGVSNRFSGSKSGNAASLTISGLQAEDEADYYCSSYKSSSTVVFGCGTKLTVLSGGGGSEVQLVESGGGLVQPGGSLKLSCAASGFTFNKYAMNWVRQAPGKGLEWVARIRSKYNNYATYYADSVKDRFTISRDDSKNTAYLQMNNLKTEDTAVYYCVRHGNFGNSYISYWAYWGQGTLVTVSSGGGGSGGGGSGGGGSQTVVTQEPSLTVSPGGTVTLTCGSSTGAVTSGNYPNWVQQKPGQAPRGLIGGTKFLAPGTPARFSGSLLGGKAALTLSGVQPEDEAEYYCVLWYSNRWVFGGGTKLTVL

SEQ ID NO: 1706 - protein, 1241 aa, Artificial Sequence
  Synthetic
QVQLVQSGAEVKKPGASVKVSCKASGYTFTSYGISWVRQAPGQCLEWMGWISAYSGNAIYAQKLQGRVTMTRDTSTSTAYMELRSLRSDDTAVYYCARDPDYYGSGSYSDYWGQGTLVTVSSGGGGSGGGGSGGGGSEIVLTQSPATLSVSPGERATLSCRASQSVSSNLAWYQQKPGQAPRLLIYGASSRATGIPARFSGSGSGTEFTLTISSLQSEDFAVYYCQQYHSWPLLTFGCGTKVEIKSGGGGSQVQLQQWGAGLLKPSETLSLTCAVYGGSFSGYYWSWIRQPPGKCLEWIGEINHRGSTNYNPSLKSRVTISGDTSKNQFSLKLSSVNAADTAVYYCARGYSSSWYTGYVFDYWGQGTLVTVSSGGGGSGGGGSGGGGSQSALTQPASVSGSPGQSITISCTGTSSDVFGYDYVSWYQQHPGKAPKLMIYDVSNRPSGVSNRFSGSKSGNAASLTISGLQAEDEADYYCSSYKSSSTVVFGCGTKLTVLSGGGGSEVQLVESGGGLVQPGGSLKLSCAASGFTFNKYAMNWVRQAPGKGLEWVARIRSKYNNYATYYADSVKDRFTISRDDSKNTAYLQMNNLKTEDTAVYYCVRHGNFGNSYISYWAYWGQGTLVTVSSGGGGSGGGGSGGGGSQTVVTQEPSLTVSPGGTVTLTCGSSTGAVTSGNYPNWVQQKPGQAPRGLIGGTKFLAPGTPARFSGSLLGGKAALTLSGVQPEDEAEYYCVLWYSNRWVFGGGTKLTVLGGGGDKTHTCPPCPAPELLGGPSVFLFPPKPKDTLMISRTPEVTCVVVDVSHEDPEVKFNWYVDGVEVHNAKTKPCEEQYGSTYRCVSVLTVLHQDWLNGKEYKCKVSNKALPAPIEKTISKAKGQPREPQVYTLPPSREEMTKNQVSLTCLVKGFYPSDIAVEWESNGQPENNYKTTPPVLDSDGSFFLYSKLTVDKSRWQQGNVFSCSVMHEALHNHYTQKSLSLSPGKGGGGSGGGGSGGGGSGGGGSGGGGSGGGGSDKTHTCPPCPAPELLGGPSVFLFPPKPKDTLMISRTPEVTCVVVDVSHEDPEVKFNWYVDGVEVHNAKTKPCEEQYGSTYRCVSVLTVLHQDWLNGKEYKCKVSNKALPAPIEKTISKAKGQPREPQVYTLPPSREEMTKNQVSLTCLVKGFYPSDIAVEWESNGQPENNYKTTPPVLDSDGSFFLYSKLTVDKSRWQQGNVFSCSVMHEALHNHYTQKSLSLSPGK

SEQ ID NO: 1707 - protein, 492 aa, Artificial Sequence
  Synthetic
QVQLVQSGAEVKKPGASVKVSCKASGYTFTSYGISWVRQAPGQCLEWMGWISAYSGNAIYAQKLQGRVTMTRDTSTSTAYMELRSLRSDDTAVYYCARDPDYYGSGSYSDYWGQGTLVTVSSGGGGSGGGGSGGGGSEIVLTQSPATLSVSPGERATLSCRASQSVSSNLAWYQQKPGQAPRLLIYGASSRATGIPARFSGSGSGTEFTLTISSLQSEDFAVYYCQQYHSWPLLTFGCGTKVEIKSGGGGSQVQLVQSGAEVKKPGASVKVSCKASGYTFTSYWMHWVRQAPGQCLEWMGYITPSTGYTEYNQKFKGRVTMTRDKSTSTVYMELSSLRSEDTAVYYCARVHDYDRAMEYWGQGTTVTVSSGGGGSGGGGSGGGGSDIQMTQSPSSLSASVGDRVTITCKASQDINKYIAWYQQKPGKGPKLLIYYTSTLQPGVPSRFSGSGSGTDFTFTISSLQPEDIATYYCLQYASYPFTFGCGTRLEIK

SEQ ID NO: 1708 - protein, 747 aa, Artificial Sequence
  Synthetic
QVQLVQSGAEVKKPGASVKVSCKASGYTFTSYGISWVRQAPGQCLEWMGWISAYSGNAIYAQKLQGRVTMTRDTSTSTAYMELRSLRSDDTAVYYCARDPDYYGSGSYSDYWGQGTLVTVSSGGGGSGGGGSGGGGSEIVLTQSPATLSVSPGERATLSCRASQSVSSNLAWYQQKPGQAPRLLIYGASSRATGIPARFSGSGSGTEFTLTISSLQSEDFAVYYCQQYHSWPLLTFGCGTKVEIKSGGGGSQVQLVQSGAEVKKPGASVKVSCKASGYTFTSYWMHWVRQAPGQCLEWMGYITPSTGYTEYNQKFKGRVTMTRDKSTSTVYMELSSLRSEDTAVYYCARVHDYDRAMEYWGQGTTVTVSSGGGGSGGGGSGGGGSDIQMTQSPSSLSASVGDRVTITCKASQDINKYIAWYQQKPGKGPKLLIYYTSTLQPGVPSRFSGSGSGTDFTFTISSLQPEDIATYYCLQYASYPFTFGCGTRLEIKSGGGGSEVQLVESGGGLVQPGGSLKLSCAASGFTFNKYAMNWVRQAPGKGLEWVARIRSKYNNYATYYADSVKDRFTISRDDSKNTAYLQMNNLKTEDTAVYYCVRHGNFGNSYISYWAYWGQGTLVTVSSGGGGSGGGGSGGGGSQTVVTQEPSLTVSPGGTVTLTCGSSTGAVTSGNYPNWVQQKPGQAPRGLIGGTKFLAPGTPARFSGSLLGGKAALTLSGVQPEDEAEYYCVLWYSNRWVFGGGTKLTVL

SEQ ID NO: 1709 - protein, 1235 aa, Artificial Sequence
  Synthetic
QVQLVQSGAEVKKPGASVKVSCKASGYTFTSYGISWVRQAPGQCLEWMGWISAYSGNAIYAQKLQGRVTMTRDTSTSTAYMELRSLRSDDTAVYYCARDPDYYGSGSYSDYWGQGTLVTVSSGGGGSGGGGSGGGGSEIVLTQSPATLSVSPGERATLSCRASQSVSSNLAWYQQKPGQAPRLLIYGASSRATGIPARFSGSGSGTEFTLTISSLQSEDFAVYYCQQYHSWPLLTFGCGTKVEIKSGGGGSQVQLVQSGAEVKKPGASVKVSCKASGYTFTSYWMHWVRQAPGQCLEWMGYITPSTGYTEYNQKFKGRVTMTRDKSTSTVYMELSSLRSEDTAVYYCARVHDYDRAMEYWGQGTTVTVSSGGGGSGGGGSGGGGSDIQMTQSPSSLSASVGDRVTITCKASQDINKYIAWYQQKPGKGPKLLIYYTSTLQPGVPSRFSGSGSGTDFTFTISSLQPEDIATYYCLQYASYPFTFGCGTRLEIKSGGGGSEVQLVESGGGLVQPGGSLKLSCAASGFTFNKYAMNWVRQAPGKGLEWVARIRSKYNNYATYYADSVKDRFTISRDDSKNTAYLQMNNLKTEDTAVYYCVRHGNFGNSYISYWAYWGQGTLVTVSSGGGGSGGGGSGGGGSQTVVTQEPSLTVSPGGTVTLTCGSSTGAVTSGNYPNWVQQKPGQAPRGLIGGTKFLAPGTPARFSGSLLGGKAALTLSGVQPEDEAEYYCVLWYSNRWVFGGGTKLTVLGGGGDKTHTCPPCPAPELLGGPSVFLFPPKPKDTLMISRTPEVTCVVVDVSHEDPEVKFNWYVDGVEVHNAKTKPCEEQYGSTYRCVSVLTVLHQDWLNGKEYKCKVSNKALPAPIEKTISKAKGQPREPQVYTLPPSREEMTKNQVSLTCLVKGFYPSDIAVEWESNGQPENNYKTTPPVLDSDGSFFLYSKLTVDKSRWQQGNVFSCSVMHEALHNHYTQKSLSLSPGKGGGGSGGGGSGGGGSGGGGSGGGGSGGGGSDKTHTCPPCPAPELLGGPSVFLFPPKPKDTLMISRTPEVTCVVVDVSHEDPEVKFNWYVDGVEVHNAKTKPCEEQYGSTYRCVSVLTVLHQDWLNGKEYKCKVSNKALPAPIEKTISKAKGQPREPQVYTLPPSREEMTKNQVSLTCLVKGFYPSDIAVEWESNGQPENNYKTTPPVLDSDGSFFLYSKLTVDKSRWQQGNVFSCSVMHEALHNHYTQKSLSLSPGK

SEQ ID NO: 1710 - protein, 493 aa, Artificial Sequence
  Synthetic
QVQLVQSGAEVKKPGASVKVSCKASGYTFTSYGISWVRQAPGQCLEWMGWISAYNGQTIYAQKLQGRVTMTRDTSTSTAYMELRSLRSDDTAVYYCARDPDYYGSGSYSDYWGQGTLVTVSSGGGGSGGGGSGGGGSEIVMTQSPATLSVSPGERATLSCRASQSVSSNLAWYQQKPGQAPRLLIYGGSSRATGIPARFSGSGSGTEFTLTISSLQSEDFAVYYCQQYHSWPLLTFGCGTKVEIKSGGGGSQVQLVQSGAEVKKPGASVKVSCKASGYTFTDYWMHWVRQAPGQCLEWMGYITPSTGYTDYNQKFKGRVTMTRDKSTSTAYMELSSLRSEDTAVYYCARNYNHRGYAMDYWGQGTTVTVSSGGGGSGGGGSGGGGSDIQMTQSPSSLSASVGDRVTITCRASENIYSNLAWYQQKPGKAPKLLIYAATNLAEGVPSRFSGSGSGTDFTLTISSLQPEDFATYYCQHFYGTPLTFGCGTKLEIK

SEQ ID NO: 1711 - protein, 748 aa, Artificial Sequence
  Synthetic
QVQLVQSGAEVKKPGASVKVSCKASGYTFTSYGISWVRQAPGQCLEWMGWISAYNGQTIYAQKLQGRVTMTRDTSTSTAYMELRSLRSDDTAVYYCARDPDYYGSGSYSDYWGQGTLVTVSSGGGGSGGGGSGGGGSEIVMTQSPATLSVSPGERATLSCRASQSVSSNLAWYQQKPGQAPRLLIYGGSSRATGIPARFSGSGSGTEFTLTISSLQSEDFAVYYCQQYHSWPLLTFGCGTKVEIKSGGGGSQVQLVQSGAEVKKPGASVKVSCKASGYTFTDYWMHWVRQAPGQCLEWMGYITPSTGYTDYNQKFKGRVTMTRDKSTSTAYMELSSLRSEDTAVYYCARNYNHRGYAMDYWGQGTTVTVSSGGGGSGGGGSGGGGSDIQMTQSPSSLSASVGDRVTITCRASENIYSNLAWYQQKPGKAPKLLIYAATNLAEGVPSRFSGSGSGTDFTLTISSLQPEDFATYYCQHFYGTPLTFGCGTKLEIKSGGGGSEVQLVESGGGLVQPGGSLKLSCAASGFTFNKYAMNWVRQAPGKGLEWVARIRSKYNNYATYYADSVKDRFTISRDDSKNTAYLQMNNLKTEDTAVYYCVRHGNFGNSYISYWAYWGQGTLVTVSSGGGGSGGGGSGGGGSQTVVTQEPSLTVSPGGTVTLTCGSSTGAVTSGNYPNWVQQKPGQAPRGLIGGTKFLAPGTPARFSGSLLGGKAALTLSGVQPEDEAEYYCVLWYSNRWVFGGGTKLTVL

SEQ ID NO: 1712 - protein, 1236 aa, Artificial Sequence
  Synthetic
QVQLVQSGAEVKKPGASVKVSCKASGYTFTSYGISWVRQAPGQCLEWMGWISAYNGQTIYAQKLQGRVTMTRDTSTSTAYMELRSLRSDDTAVYYCARDPDYYGSGSYSDYWGQGTLVTVSSGGGGSGGGGSGGGGSEIVMTQSPATLSVSPGERATLSCRASQSVSSNLAWYQQKPGQAPRLLIYGGSSRATGIPARFSGSGSGTEFTLTISSLQSEDFAVYYCQQYHSWPLLTFGCGTKVEIKSGGGGSQVQLVQSGAEVKKPGASVKVSCKASGYTFTDYWMHWVRQAPGQCLEWMGYITPSTGYTDYNQKFKGRVTMTRDKSTSTAYMELSSLRSEDTAVYYCARNYNHRGYAMDYWGQGTTVTVSSGGGGSGGGGSGGGGSDIQMTQSPSSLSASVGDRVTITCRASENIYSNLAWYQQKPGKAPKLLIYAATNLAEGVPSRFSGSGSGTDFTLTISSLQPEDFATYYCQHFYGTPLTFGCGTKLEIKSGGGGSEVQLVESGGGLVQPGGSLKLSCAASGFTFNKYAMNWVRQAPGKGLEWVARIRSKYNNYATYYADSVKDRFTISRDDSKNTAYLQMNNLKTEDTAVYYCVRHGNFGNSYISYWAYWGQGTLVTVSSGGGGSGGGGSGGGGSQTVVTQEPSLTVSPGGTVTLTCGSSTGAVTSGNYPNWVQQKPGQAPRGLIGGTKFLAPGTPARFSGSLLGGKAALTLSGVQPEDEAEYYCVLWYSNRWVFGGGTKLTVLGGGGDKTHTCPPCPAPELLGGPSVFLFPPKPKDTLMISRTPEVTCVVVDVSHEDPEVKFNWYVDGVEVHNAKTKPCEEQYGSTYRCVSVLTVLHQDWLNGKEYKCKVSNKALPAPIEKTISKAKGQPREPQVYTLPPSREEMTKNQVSLTCLVKGFYPSDIAVEWESNGQPENNYKTTPPVLDSDGSFFLYSKLTVDKSRWQQGNVFSCSVMHEALHNHYTQKSLSLSPGKGGGGSGGGGSGGGGSGGGGSGGGGSGGGGSDKTHTCPPCPAPELLGGPSVFLFPPKPKDTLMISRTPEVTCVVVDVSHEDPEVKFNWYVDGVEVHNAKTKPCEEQYGSTYRCVSVLTVLHQDWLNGKEYKCKVSNKALPAPIEKTISKAKGQPREPQVYTLPPSREEMTKNQVSLTCLVKGFYPSDIAVEWESNGQPENNYKTTPPVLDSDGSFFLYSKLTVDKSRWQQGNVFSCSVMHEALHNHYTQKSLSLSPGK

SEQ ID NO: 1713 - protein, 487 aa, Artificial Sequence
  Synthetic
QVQLVQSGAEVKKPGASVKVSCKASGYTFTSYGISWVRQAPGQCLEWMGWISAYNGQTIYAQKLQGRVTMTRDTSTSTAYMELRSLRSDDTAVYYCARDPDYYGSGSYSDYWGQGTLVTVSSGGGGSGGGGSGGGGSEIVMTQSPATLSVSPGERATLSCRASQSVSSNLAWYQQKPGQAPRLLIYGGSSRATGIPARFSGSGSGTEFTLTISSLQSEDFAVYYCQQYHSWPLLTFGCGTKVEIKSGGGGSQVQLVQSGAEVKKPGASVKVSCKASGYTFTSYWMHWVRQRPGQCLEWMGYISPNSGYTDYHHKFKGRVTMTADKSISTAYMQLSRLTSDDTAVYYCARDPMDYWGQGTLVTVSSGGGGSGGGGSGGGGSDIQMTQSPSSLSASVGDRVTITCRASENIYSYLAWYQQKPGKAPKLLIYNAKTLVEGVPSRFSGSGSGTDFTLTISSLQPEDFGTYYCQHHYGTPRTFGCGTKLEIK

SEQ ID NO: 1714 - protein, 742 aa, Artificial Sequence
  Synthetic
QVQLVQSGAEVKKPGASVKVSCKASGYTFTSYGISWVRQAPGQCLEWMGWISAYNGQTIYAQKLQGRVTMTRDTSTSTAYMELRSLRSDDTAVYYCARDPDYYGSGSYSDYWGQGTLVTVSSGGGGSGGGGSGGGGSEIVMTQSPATLSVSPGERATLSCRASQSVSSNLAWYQQKPGQAPRLLIYGGSSRATGIPARFSGSGSGTEFTLTISSLQSEDFAVYYCQQYHSWPLLTFGCGTKVEIKSGGGGSQVQLVQSGAEVKKPGASVKVSCKASGYTFTSYWMHWVRQRPGQCLEWMGYISPNSGYTDYHHKFKGRVTMTADKSISTAYMQLSRLTSDDTAVYYCARDPMDYWGQGTLVTVSSGGGGSGGGGSGGGGSDIQMTQSPSSLSASVGDRVTITCRASENIYSYLAWYQQKPGKAPKLLIYNAKTLVEGVPSRFSGSGSGTDFTLTISSLQPEDFGTYYCQHHYGTPRTFGCGTKLEIKSGGGGSEVQLVESGGGLVQPGGSLKLSCAASGFTFNKYAMNWVRQAPGKGLEWVARIRSKYNNYATYYADSVKDRFTISRDDSKNTAYLQMNNLKTEDTAVYYCVRHGNFGNSYISYWAYWGQGTLVTVSSGGGGSGGGGSGGGGSQTVVTQEPSLTVSPGGTVTLTCGSSTGAVTSGNYPNWVQQKPGQAPRGLIGGTKFLAPGTPARFSGSLLGGKAALTLSGVQPEDEAEYYCVLWYSNRWVFGGGTKLTVL

SEQ ID NO: 1715 - protein, 1230 aa, Artificial Sequence
  Synthetic
QVQLVQSGAEVKKPGASVKVSCKASGYTFTSYGISWVRQAPGQCLEWMGWISAYNGQTIYAQKLQGRVTMTRDTSTSTAYMELRSLRSDDTAVYYCARDPDYYGSGSYSDYWGQGTLVTVSSGGGGSGGGGSGGGGSEIVMTQSPATLSVSPGERATLSCRASQSVSSNLAWYQQKPGQAPRLLIYGGSSRATGIPARFSGSGSGTEFTLTISSLQSEDFAVYYCQQYHSWPLLTFGCGTKVEIKSGGGGSQVQLVQSGAEVKKPGASVKVSCKASGYTFTSYWMHWVRQRPGQCLEWMGYISPNSGYTDYHHKFKGRVTMTADKSISTAYMQLSRLTSDDTAVYYCARDPMDYWGQGTLVTVSSGGGGSGGGGSGGGGSDIQMTQSPSSLSASVGDRVTITCRASENIYSYLAWYQQKPGKAPKLLIYNAKTLVEGVPSRFSGSGSGTDFTLTISSLQPEDFGTYYCQHHYGTPRTFGCGTKLEIKSGGGGSEVQLVESGGGLVQPGGSLKLSCAASGFTFNKYAMNWVRQAPGKGLEWVARIRSKYNNYATYYADSVKDRFTISRDDSKNTAYLQMNNLKTEDTAVYYCVRHGNFGNSYISYWAYWGQGTLVTVSSGGGGSGGGGSGGGGSQTVVTQEPSLTVSPGGTVTLTCGSSTGAVTSGNYPNWVQQKPGQAPRGLIGGTKFLAPGTPARFSGSLLGGKAALTLSGVQPEDEAEYYCVLWYSNRWVFGGGTKLTVLGGGGDKTHTCPPCPAPELLGGPSVFLFPPKPKDTLMISRTPEVTCVVVDVSHEDPEVKFNWYVDGVEVHNAKTKPCEEQYGSTYRCVSVLTVLHQDWLNGKEYKCKVSNKALPAPIEKTISKAKGQPREPQVYTLPPSREEMTKNQVSLTCLVKGFYPSDIAVEWESNGQPENNYKTTPPVLDSDGSFFLYSKLTVDKSRWQQGNVFSCSVMHEALHNHYTQKSLSLSPGKGGGGSGGGGSGGGGSGGGGSGGGGSGGGGSDKTHTCPPCPAPELLGGPSVFLFPPKPKDTLMISRTPEVTCVVVDVSHEDPEVKFNWYVDGVEVHNAKTKPCEEQYGSTYRCVSVLTVLHQDWLNGKEYKCKVSNKALPAPIEKTISKAKGQPREPQVYTLPPSREEMTKNQVSLTCLVKGFYPSDIAVEWESNGQPENNYKTTPPVLDSDGSFFLYSKLTVDKSRWQQGNVFSCSVMHEALHNHYTQKSLSLSPGK

SEQ ID NO: 1716 - protein, 498 aa, Artificial Sequence
  Synthetic
QVQLVQSGAEVKKPGASVKVSCKASGYTFTSYGISWVRQAPGQCLEWMGWISAYNGQTIYAQKLQGRVTMTRDTSTSTAYMELRSLRSDDTAVYYCARDPDYYGSGSYSDYWGQGTLVTVSSGGGGSGGGGSGGGGSEIVMTQSPATLSVSPGERATLSCRASQSVSSNLAWYQQKPGQAPRLLIYGGSSRATGIPARFSGSGSGTEFTLTISSLQSEDFAVYYCQQYHSWPLLTFGCGTKVEIKSGGGGSQVQLQQWGAGLLKPSETLSLTCAVYGGSFSGYYWSWIRQPPGKCLEWIGEINHRGSTNYNPSLKSRVTISGDTSKNQFSLKLSSVNAADTAVYYCARGYSSSWYTGYVFDYWGQGTLVTVSSGGGGSGGGGSGGGGSQSALTQPASVSGSPGQSITISCTGTSSDVFGYDYVSWYQQHPGKAPKLMIYDVSNRPSGVSNRFSGSKSGNAASLTISGLQAEDEADYYCSSYKSSSTVVFGCGTKLTVL

SEQ ID NO: 1717 - protein, 753 aa, Artificial Sequence
  Synthetic
QVQLVQSGAEVKKPGASVKVSCKASGYTFTSYGISWVRQAPGQCLEWMGWISAYNGQTIYAQKLQGRVTMTRDTSTSTAYMELRSLRSDDTAVYYCARDPDYYGSGSYSDYWGQGTLVTVSSGGGGSGGGGSGGGGSEIVMTQSPATLSVSPGERATLSCRASQSVSSNLAWYQQKPGQAPRLLIYGGSSRATGIPARFSGSGSGTEFTLTISSLQSEDFAVYYCQQYHSWPLLTFGCGTKVEIKSGGGGSQVQLQQWGAGLLKPSETLSLTCAVYGGSFSGYYWSWIRQPPGKCLEWIGEINHRGSTNYNPSLKSRVTISGDTSKNQFSLKLSSVNAADTAVYYCARGYSSSWYTGYVFDYWGQGTLVTVSSGGGGSGGGGSGGGGSQSALTQPASVSGSPGQSITISCTGTSSDVFGYDYVSWYQQHPGKAPKLMIYDVSNRPSGVSNRFSGSKSGNAASLTISGLQAEDEADYYCSSYKSSSTVVFGCGTKLTVLSGGGGSEVQLVESGGGLVQPGGSLKLSCAASGFTFNKYAMNWVRQAPGKGLEWVARIRSKYNNYATYYADSVKDRFTISRDDSKNTAYLQMNNLKTEDTAVYYCVRHGNFGNSYISYWAYWGQGTLVTVSSGGGGSGGGGSGGGGSQTVVTQEPSLTVSPGGTVTLTCGSSTGAVTSGNYPNWVQQKPGQAPRGLIGGTKFLAPGTPARFSGSLLGGKAALTLSGVQPEDEAEYYCVLWYSNRWVFGGGTKLTVL

SEQ ID NO: 1718 - protein, 1241 aa, Artificial Sequence
  Synthetic
QVQLVQSGAEVKKPGASVKVSCKASGYTFTSYGISWVRQAPGQCLEWMGWISAYNGQTIYAQKLQGRVTMTRDTSTSTAYMELRSLRSDDTAVYYCARDPDYYGSGSYSDYWGQGTLVTVSSGGGGSGGGGSGGGGSEIVMTQSPATLSVSPGERATLSCRASQSVSSNLAWYQQKPGQAPRLLIYGGSSRATGIPARFSGSGSGTEFTLTISSLQSEDFAVYYCQQYHSWPLLTFGCGTKVEIKSGGGGSQVQLQQWGAGLLKPSETLSLTCAVYGGSFSGYYWSWIRQPPGKCLEWIGEINHRGSTNYNPSLKSRVTISGDTSKNQFSLKLSSVNAADTAVYYCARGYSSSWYTGYVFDYWGQGTLVTVSSGGGGSGGGGSGGGGSQSALTQPASVSGSPGQSITISCTGTSSDVFGYDYVSWYQQHPGKAPKLMIYDVSNRPSGVSNRFSGSKSGNAASLTISGLQAEDEADYYCSSYKSSSTVVFGCGTKLTVLSGGGGSEVQLVESGGGLVQPGGSLKLSCAASGFTFNKYAMNWVRQAPGKGLEWVARIRSKYNNYATYYADSVKDRFTISRDDSKNTAYLQMNNLKTEDTAVYYCVRHGNFGNSYISYWAYWGQGTLVTVSSGGGGSGGGGSGGGGSQTVVTQEPSLTVSPGGTVTLTCGSSTGAVTSGNYPNWVQQKPGQAPRGLIGGTKFLAPGTPARFSGSLLGGKAALTLSGVQPEDEAEYYCVLWYSNRWVFGGGTKLTVLGGGGDKTHTCPPCPAPELLGGPSVFLFPPKPKDTLMISRTPEVTCVVVDVSHEDPEVKFNWYVDGVEVHNAKTKPCEEQYGSTYRCVSVLTVLHQDWLNGKEYKCKVSNKALPAPIEKTISKAKGQPREPQVYTLPPSREEMTKNQVSLTCLVKGFYPSDIAVEWESNGQPENNYKTTPPVLDSDGSFFLYSKLTVDKSRWQQGNVFSCSVMHEALHNHYTQKSLSLSPGKGGGGSGGGGSGGGGSGGGGSGGGGSGGGGSDKTHTCPPCPAPELLGGPSVFLFPPKPKDTLMISRTPEVTCVVVDVSHEDPEVKFNWYVDGVEVHNAKTKPCEEQYGSTYRCVSVLTVLHQDWLNGKEYKCKVSNKALPAPIEKTISKAKGQPREPQVYTLPPSREEMTKNQVSLTCLVKGFYPSDIAVEWESNGQPENNYKTTPPVLDSDGSFFLYSKLTVDKSRWQQGNVFSCSVMHEALHNHYTQKSLSLSPGK

SEQ ID NO: 1719 - protein, 487 aa, Artificial Sequence
  Synthetic
QVQLVQSGAEVKKPGASVKVSCKASGYTFTSYGISWVRQAPGQCLEWMGWISAYNGQTIYAQKLQGRVTMTRDTSTSTAYMELRSLRSDDTAVYYCARDPDYYGSGSYSDYWGQGTLVTVSSGGGGSGGGGSGGGGSEIVMTQSPATLSVSPGERATLSCRASQSVSSNLAWYQQKPGQAPRLLIYGGSSRATGIPARFSGSGSGTEFTLTISSLQSEDFAVYYCQQYHSWPLLTFGCGTKVEIKSGGGGSQVQLVQSGAEVKKPGASVKVSCKASGYTFTDYWMHWVRQAPGQCLEWMGYITPSTGYTDYHRKFRGRVTMTRDKSISTAYMELSRLRSDDTAVYYCARSTFDAWGQGTMVTVSSGGGGSGGGGSGGGGSDIQMTQSPSSLSASVGDRVSITCRASQEISGYLSWFQQKPGKAIKRLIYATSSLDAGVPSRFSGSGSGTDFTLTISSLQPEDFADYYCLQYASYPLTFGCGTKLEIK

SEQ ID NO: 1720 - protein, 742 aa, Artificial Sequence
  Synthetic
QVQLVQSGAEVKKPGASVKVSCKASGYTFTSYGISWVRQAPGQCLEWMGWISAYNGQTIYAQKLQGRVTMTRDTSTSTAYMELRSLRSDDTAVYYCARDPDYYGSGSYSDYWGQGTLVTVSSGGGGSGGGGSGGGGSEIVMTQSPATLSVSPGERATLSCRASQSVSSNLAWYQQKPGQAPRLLIYGGSSRATGIPARFSGSGSGTEFTLTISSLQSEDFAVYYCQQYHSWPLLTFGCGTKVEIKSGGGGSQVQLVQSGAEVKKPGASVKVSCKASGYTFTDYWMHWVRQAPGQCLEWMGYITPSTGYTDYHRKFRGRVTMTRDKSISTAYMELSRLRSDDTAVYYCARSTFDAWGQGTMVTVSSGGGGSGGGGSGGGGSDIQMTQSPSSLSASVGDRVSITCRASQEISGYLSWFQQKPGKAIKRLIYATSSLDAGVPSRFSGSGSGTDFTLTISSLQPEDFADYYCLQYASYPLTFGCGTKLEIKSGGGGSEVQLVESGGGLVQPGGSLKLSCAASGFTFNKYAMNWVRQAPGKGLEWVARIRSKYNNYATYYADSVKDRFTISRDDSKNTAYLQMNNLKTEDTAVYYCVRHGNFGNSYISYWAYWGQGTLVTVSSGGGGSGGGGSGGGGSQTVVTQEPSLTVSPGGTVTLTCGSSTGAVTSGNYPNWVQQKPGQAPRGLIGGTKFLAPGTPARFSGSLLGGKAALTLSGVQPEDEAEYYCVLWYSNRWVFGGGTKLTVL

SEQ ID NO: 1721 - protein, 1230 aa, Artificial Sequence
  Synthetic
QVQLVQSGAEVKKPGASVKVSCKASGYTFTSYGISWVRQAPGQCLEWMGWISAYNGQTIYAQKLQGRVTMTRDTSTSTAYMELRSLRSDDTAVYYCARDPDYYGSGSYSDYWGQGTLVTVSSGGGGSGGGGSGGGGSEIVMTQSPATLSVSPGERATLSCRASQSVSSNLAWYQQKPGQAPRLLIYGGSSRATGIPARFSGSGSGTEFTLTISSLQSEDFAVYYCQQYHSWPLLTFGCGTKVEIKSGGGGSQVQLVQSGAEVKKPGASVKVSCKASGYTFTDYWMHWVRQAPGQCLEWMGYITPSTGYTDYHRKFRGRVTMTRDKSISTAYMELSRLRSDDTAVYYCARSTFDAWGQGTMVTVSSGGGGSGGGGSGGGGSDIQMTQSPSSLSASVGDRVSITCRASQEISGYLSWFQQKPGKAIKRLIYATSSLDAGVPSRFSGSGSGTDFTLTISSLQPEDFADYYCLQYASYPLTFGCGTKLEIKSGGGGSEVQLVESGGGLVQPGGSLKLSCAASGFTFNKYAMNWVRQAPGKGLEWVARIRSKYNNYATYYADSVKDRFTISRDDSKNTAYLQMNNLKTEDTAVYYCVRHGNFGNSYISYWAYWGQGTLVTVSSGGGGSGGGGSGGGGSQTVVTQEPSLTVSPGGTVTLTCGSSTGAVTSGNYPNWVQQKPGQAPRGLIGGTKFLAPGTPARFSGSLLGGKAALTLSGVQPEDEAEYYCVLWYSNRWVFGGGTKLTVLGGGGDKTHTCPPCPAPELLGGPSVFLFPPKPKDTLMISRTPEVTCVVVDVSHEDPEVKFNWYVDGVEVHNAKTKPCEEQYGSTYRCVSVLTVLHQDWLNGKEYKCKVSNKALPAPIEKTISKAKGQPREPQVYTLPPSREEMTKNQVSLTCLVKGFYPSDIAVEWESNGQPENNYKTTPPVLDSDGSFFLYSKLTVDKSRWQQGNVFSCSVMHEALHNHYTQKSLSLSPGKGGGGSGGGGSGGGGSGGGGSGGGGSGGGGSDKTHTCPPCPAPELLGGPSVFLFPPKPKDTLMISRTPEVTCVVVDVSHEDPEVKFNWYVDGVEVHNAKTKPCEEQYGSTYRCVSVLTVLHQDWLNGKEYKCKVSNKALPAPIEKTISKAKGQPREPQVYTLPPSREEMTKNQVSLTCLVKGFYPSDIAVEWESNGQPENNYKTTPPVLDSDGSFFLYSKLTVDKSRWQQGNVFSCSVMHEALHNHYTQKSLSLSPGK

SEQ ID NO: 1722 - protein, 492 aa, Artificial Sequence
  Synthetic
QVQLVQSGAEVKKPGASVKVSCKASGYTFTSYGISWVRQAPGQCLEWMGWISAYNGQTIYAQKLQGRVTMTRDTSTSTAYMELRSLRSDDTAVYYCARDPDYYGSGSYSDYWGQGTLVTVSSGGGGSGGGGSGGGGSEIVMTQSPATLSVSPGERATLSCRASQSVSSNLAWYQQKPGQAPRLLIYGGSSRATGIPARFSGSGSGTEFTLTISSLQSEDFAVYYCQQYHSWPLLTFGCGTKVEIKSGGGGSQVQLVQSGAEVKKPGASVKVSCKASGYTFTSYWMHWVRQAPGQCLEWMGYITPSTGYTEYNQKFKGRVTMTRDKSTSTVYMELSSLRSEDTAVYYCARVHDYDRAMEYWGQGTTVTVSSGGGGSGGGGSGGGGSDIQMTQSPSSLSASVGDRVTITCKASQDINKYIAWYQQKPGKGPKLLIYYTSTLQPGVPSRFSGSGSGTDFTFTISSLQPEDIATYYCLQYASYPFTFGCGTRLEIK

SEQ ID NO: 1723 - protein, 747 aa, Artificial Sequence
  Synthetic
QVQLVQSGAEVKKPGASVKVSCKASGYTFTSYGISWVRQAPGQCLEWMGWISAYNGQTIYAQKLQGRVTMTRDTSTSTAYMELRSLRSDDTAVYYCARDPDYYGSGSYSDYWGQGTLVTVSSGGGGSGGGGSGGGGSEIVMTQSPATLSVSPGERATLSCRASQSVSSNLAWYQQKPGQAPRLLIYGGSSRATGIPARFSGSGSGTEFTLTISSLQSEDFAVYYCQQYHSWPLLTFGCGTKVEIKSGGGGSQVQLVQSGAEVKKPGASVKVSCKASGYTFTSYWMHWVRQAPGQCLEWMGYITPSTGYTEYNQKFKGRVTMTRDKSTSTVYMELSSLRSEDTAVYYCARVHDYDRAMEYWGQGTTVTVSSGGGGSGGGGSGGGGSDIQMTQSPSSLSASVGDRVTITCKASQDINKYIAWYQQKPGKGPKLLIYYTSTLQPGVPSRFSGSGSGTDFTFTISSLQPEDIATYYCLQYASYPFTFGCGTRLEIKSGGGGSEVQLVESGGGLVQPGGSLKLSCAASGFTFNKYAMNWVRQAPGKGLEWVARIRSKYNNYATYYADSVKDRFTISRDDSKNTAYLQMNNLKTEDTAVYYCVRHGNFGNSYISYWAYWGQGTLVTVSSGGGGSGGGGSGGGGSQTVVTQEPSLTVSPGGTVTLTCGSSTGAVTSGNYPNWVQQKPGQAPRGLIGGTKFLAPGTPARFSGSLLGGKAALTLSGVQPEDEAEYYCVLWYSNRWVFGGGTKLTVL

SEQ ID NO: 1724 - protein, 1235 aa, Artificial Sequence
  Synthetic
QVQLVQSGAEVKKPGASVKVSCKASGYTFTSYGISWVRQAPGQCLEWMGWISAYNGQTIYAQKLQGRVTMTRDTSTSTAYMELRSLRSDDTAVYYCARDPDYYGSGSYSDYWGQGTLVTVSSGGGGSGGGGSGGGGSEIVMTQSPATLSVSPGERATLSCRASQSVSSNLAWYQQKPGQAPRLLIYGGSSRATGIPARFSGSGSGTEFTLTISSLQSEDFAVYYCQQYHSWPLLTFGCGTKVEIKSGGGGSQVQLVQSGAEVKKPGASVKVSCKASGYTFTSYWMHWVRQAPGQCLEWMGYITPSTGYTEYNQKFKGRVTMTRDKSTSTVYMELSSLRSEDTAVYYCARVHDYDRAMEYWGQGTTVTVSSGGGGSGGGGSGGGGSDIQMTQSPSSLSASVGDRVTITCKASQDINKYIAWYQQKPGKGPKLLIYYTSTLQPGVPSRFSGSGSGTDFTFTISSLQPEDIATYYCLQYASYPFTFGCGTRLEIKSGGGGSEVQLVESGGGLVQPGGSLKLSCAASGFTFNKYAMNWVRQAPGKGLEWVARIRSKYNNYATYYADSVKDRFTISRDDSKNTAYLQMNNLKTEDTAVYYCVRHGNFGNSYISYWAYWGQGTLVTVSSGGGGSGGGGSGGGGSQTVVTQEPSLTVSPGGTVTLTCGSSTGAVTSGNYPNWVQQKPGQAPRGLIGGTKFLAPGTPARFSGSLLGGKAALTLSGVQPEDEAEYYCVLWYSNRWVFGGGTKLTVLGGGGDKTHTCPPCPAPELLGGPSVFLFPPKPKDTLMISRTPEVTCVVVDVSHEDPEVKFNWYVDGVEVHNAKTKPCEEQYGSTYRCVSVLTVLHQDWLNGKEYKCKVSNKALPAPIEKTISKAKGQPREPQVYTLPPSREEMTKNQVSLTCLVKGFYPSDIAVEWESNGQPENNYKTTPPVLDSDGSFFLYSKLTVDKSRWQQGNVFSCSVMHEALHNHYTQKSLSLSPGKGGGGSGGGGSGGGGSGGGGSGGGGSGGGGSDKTHTCPPCPAPELLGGPSVFLFPPKPKDTLMISRTPEVTCVVVDVSHEDPEVKFNWYVDGVEVHNAKTKPCEEQYGSTYRCVSVLTVLHQDWLNGKEYKCKVSNKALPAPIEKTISKAKGQPREPQVYTLPPSREEMTKNQVSLTCLVKGFYPSDIAVEWESNGQPENNYKTTPPVLDSDGSFFLYSKLTVDKSRWQQGNVFSCSVMHEALHNHYTQKSLSLSPGK

SEQ ID NO: 1725 - protein, 493 aa, Artificial Sequence
  Synthetic
QVQLVQSGAEVKKPGASVKVSCKASGYTFTSYGISWVRQAPGQCLEWMGWISAYNGQTIYAQKLQGRVTMTRDTSTSTAYMELRSLRSDDTAVYYCARDPDYYGSGSYSDYWGQGTLVTVSSGGGGSGGGGSGGGGSEIVMTQSPATLSVSPGERATLSCRASQSVSSNLAWYQQKPGQAPRLLIYGASNRATGIPARFSGSGSGTEFTLTISSLQSEDFAVYYCQQYHSWPLLTFGCGTKVEIKSGGGGSQVQLVQSGAEVKKPGASVKVSCKASGYTFTDYWMHWVRQAPGQCLEWMGYITPSTGYTDYNQKFKGRVTMTRDKSTSTAYMELSSLRSEDTAVYYCARNYNHRGYAMDYWGQGTTVTVSSGGGGSGGGGSGGGGSDIQMTQSPSSLSASVGDRVTITCRASENIYSNLAWYQQKPGKAPKLLIYAATNLAEGVPSRFSGSGSGTDFTLTISSLQPEDFATYYCQHFYGTPLTFGCGTKLEIK

SEQ ID NO: 1726 - protein, 748 aa, Artificial Sequence
  Synthetic
QVQLVQSGAEVKKPGASVKVSCKASGYTFTSYGISWVRQAPGQCLEWMGWISAYNGQTIYAQKLQGRVTMTRDTSTSTAYMELRSLRSDDTAVYYCARDPDYYGSGSYSDYWGQGTLVTVSSGGGGSGGGGSGGGGSEIVMTQSPATLSVSPGERATLSCRASQSVSSNLAWYQQKPGQAPRLLIYGASNRATGIPARFSGSGSGTEFTLTISSLQSEDFAVYYCQQYHSWPLLTFGCGTKVEIKSGGGGSQVQLVQSGAEVKKPGASVKVSCKASGYTFTDYWMHWVRQAPGQCLEWMGYITPSTGYTDYNQKFKGRVTMTRDKSTSTAYMELSSLRSEDTAVYYCARNYNHRGYAMDYWGQGTTVTVSSGGGGSGGGGSGGGGSDIQMTQSPSSLSASVGDRVTITCRASENIYSNLAWYQQKPGKAPKLLIYAATNLAEGVPSRFSGSGSGTDFTLTISSLQPEDFATYYCQHFYGTPLTFGCGTKLEIKSGGGGSEVQLVESGGGLVQPGGSLKLSCAASGFTFNKYAMNWVRQAPGKGLEWVARIRSKYNNYATYYADSVKDRFTISRDDSKNTAYLQMNNLKTEDTAVYYCVRHGNFGNSYISYWAYWGQGTLVTVSSGGGGSGGGGSGGGGSQTVVTQEPSLTVSPGGTVTLTCGSSTGAVTSGNYPNWVQQKPGQAPRGLIGGTKFLAPGTPARFSGSLLGGKAALTLSGVQPEDEAEYYCVLWYSNRWVFGGGTKLTVL

SEQ ID NO: 1727 - protein, 1236 aa, Artificial Sequence
  Synthetic
QVQLVQSGAEVKKPGASVKVSCKASGYTFTSYGISWVRQAPGQCLEWMGWISAYNGQTIYAQKLQGRVTMTRDTSTSTAYMELRSLRSDDTAVYYCARDPDYYGSGSYSDYWGQGTLVTVSSGGGGSGGGGSGGGGSEIVMTQSPATLSVSPGERATLSCRASQSVSSNLAWYQQKPGQAPRLLIYGASNRATGIPARFSGSGSGTEFTLTISSLQSEDFAVYYCQQYHSWPLLTFGCGTKVEIKSGGGGSQVQLVQSGAEVKKPGASVKVSCKASGYTFTDYWMHWVRQAPGQCLEWMGYITPSTGYTDYNQKFKGRVTMTRDKSTSTAYMELSSLRSEDTAVYYCARNYNHRGYAMDYWGQGTTVTVSSGGGGSGGGGSGGGGSDIQMTQSPSSLSASVGDRVTITCRASENIYSNLAWYQQKPGKAPKLLIYAATNLAEGVPSRFSGSGSGTDFTLTISSLQPEDFATYYCQHFYGTPLTFGCGTKLEIKSGGGGSEVQLVESGGGLVQPGGSLKLSCAASGFTFNKYAMNWVRQAPGKGLEWVARIRSKYNNYATYYADSVKDRFTISRDDSKNTAYLQMNNLKTEDTAVYYCVRHGNFGNSYISYWAYWGQGTLVTVSSGGGGSGGGGSGGGGSQTVVTQEPSLTVSPGGTVTLTCGSSTGAVTSGNYPNWVQQKPGQAPRGLIGGTKFLAPGTPARFSGSLLGGKAALTLSGVQPEDEAEYYCVLWYSNRWVFGGGTKLTVLGGGGDKTHTCPPCPAPELLGGPSVFLFPPKPKDTLMISRTPEVTCVVVDVSHEDPEVKFNWYVDGVEVHNAKTKPCEEQYGSTYRCVSVLTVLHQDWLNGKEYKCKVSNKALPAPIEKTISKAKGQPREPQVYTLPPSREEMTKNQVSLTCLVKGFYPSDIAVEWESNGQPENNYKTTPPVLDSDGSFFLYSKLTVDKSRWQQGNVFSCSVMHEALHNHYTQKSLSLSPGKGGGGSGGGGSGGGGSGGGGSGGGGSGGGGSDKTHTCPPCPAPELLGGPSVFLFPPKPKDTLMISRTPEVTCVVVDVSHEDPEVKFNWYVDGVEVHNAKTKPCEEQYGSTYRCVSVLTVLHQDWLNGKEYKCKVSNKALPAPIEKTISKAKGQPREPQVYTLPPSREEMTKNQVSLTCLVKGFYPSDIAVEWESNGQPENNYKTTPPVLDSDGSFFLYSKLTVDKSRWQQGNVFSCSVMHEALHNHYTQKSLSLSPGK

SEQ ID NO: 1728 - protein, 487 aa, Artificial Sequence
  Synthetic
QVQLVQSGAEVKKPGASVKVSCKASGYTFTSYGISWVRQAPGQCLEWMGWISAYNGQTIYAQKLQGRVTMTRDTSTSTAYMELRSLRSDDTAVYYCARDPDYYGSGSYSDYWGQGTLVTVSSGGGGSGGGGSGGGGSEIVMTQSPATLSVSPGERATLSCRASQSVSSNLAWYQQKPGQAPRLLIYGASNRATGIPARFSGSGSGTEFTLTISSLQSEDFAVYYCQQYHSWPLLTFGCGTKVEIKSGGGGSQVQLVQSGAEVKKPGASVKVSCKASGYTFTSYWMHWVRQRPGQCLEWMGYISPNSGYTDYHHKFKGRVTMTADKSISTAYMQLSRLTSDDTAVYYCARDPMDYWGQGTLVTVSSGGGGSGGGGSGGGGSDIQMTQSPSSLSASVGDRVTITCRASENIYSYLAWYQQKPGKAPKLLIYNAKTLVEGVPSRFSGSGSGTDFTLTISSLQPEDFGTYYCQHHYGTPRTFGCGTKLEIK

SEQ ID NO: 1729 - protein, 742 aa, Artificial Sequence
  Synthetic
QVQLVQSGAEVKKPGASVKVSCKASGYTFTSYGISWVRQAPGQCLEWMGWISAYNGQTIYAQKLQGRVTMTRDTSTSTAYMELRSLRSDDTAVYYCARDPDYYGSGSYSDYWGQGTLVTVSSGGGGSGGGGSGGGGSEIVMTQSPATLSVSPGERATLSCRASQSVSSNLAWYQQKPGQAPRLLIYGASNRATGIPARFSGSGSGTEFTLTISSLQSEDFAVYYCQQYHSWPLLTFGCGTKVEIKSGGGGSQVQLVQSGAEVKKPGASVKVSCKASGYTFTSYWMHWVRQRPGQCLEWMGYISPNSGYTDYHHKFKGRVTMTADKSISTAYMQLSRLTSDDTAVYYCARDPMDYWGQGTLVTVSSGGGGSGGGGSGGGGSDIQMTQSPSSLSASVGDRVTITCRASENIYSYLAWYQQKPGKAPKLLIYNAKTLVEGVPSRFSGSGSGTDFTLTISSLQPEDFGTYYCQHHYGTPRTFGCGTKLEIKSGGGGSEVQLVESGGGLVQPGGSLKLSCAASGFTFNKYAMNWVRQAPGKGLEWVARIRSKYNNYATYYADSVKDRFTISRDDSKNTAYLQMNNLKTEDTAVYYCVRHGNFGNSYISYWAYWGQGTLVTVSSGGGGSGGGGSGGGGSQTVVTQEPSLTVSPGGTVTLTCGSSTGAVTSGNYPNWVQQKPGQAPRGLIGGTKFLAPGTPARFSGSLLGGKAALTLSGVQPEDEAEYYCVLWYSNRWVFGGGTKLTVL

SEQ ID NO: 1730 - protein, 1230 aa, Artificial Sequence
  Synthetic
QVQLVQSGAEVKKPGASVKVSCKASGYTFTSYGISWVRQAPGQCLEWMGWISAYNGQTIYAQKLQGRVTMTRDTSTSTAYMELRSLRSDDTAVYYCARDPDYYGSGSYSDYWGQGTLVTVSSGGGGSGGGGSGGGGSEIVMTQSPATLSVSPGERATLSCRASQSVSSNLAWYQQKPGQAPRLLIYGASNRATGIPARFSGSGSGTEFTLTISSLQSEDFAVYYCQQYHSWPLLTFGCGTKVEIKSGGGGSQVQLVQSGAEVKKPGASVKVSCKASGYTFTSYWMHWVRQRPGQCLEWMGYISPNSGYTDYHHKFKGRVTMTADKSISTAYMQLSRLTSDDTAVYYCARDPMDYWGQGTLVTVSSGGGGSGGGGSGGGGSDIQMTQSPSSLSASVGDRVTITCRASENIYSYLAWYQQKPGKAPKLLIYNAKTLVEGVPSRFSGSGSGTDFTLTISSLQPEDFGTYYCQHHYGTPRTFGCGTKLEIKSGGGGSEVQLVESGGGLVQPGGSLKLSCAASGFTFNKYAMNWVRQAPGKGLEWVARIRSKYNNYATYYADSVKDRFTISRDDSKNTAYLQMNNLKTEDTAVYYCVRHGNFGNSYISYWAYWGQGTLVTVSSGGGGSGGGGSGGGGSQTVVTQEPSLTVSPGGTVTLTCGSSTGAVTSGNYPNWVQQKPGQAPRGLIGGTKFLAPGTPARFSGSLLGGKAALTLSGVQPEDEAEYYCVLWYSNRWVFGGGTKLTVLGGGGDKTHTCPPCPAPELLGGPSVFLFPPKPKDTLMISRTPEVTCVVVDVSHEDPEVKFNWYVDGVEVHNAKTKPCEEQYGSTYRCVSVLTVLHQDWLNGKEYKCKVSNKALPAPIEKTISKAKGQPREPQVYTLPPSREEMTKNQVSLTCLVKGFYPSDIAVEWESNGQPENNYKTTPPVLDSDGSFFLYSKLTVDKSRWQQGNVFSCSVMHEALHNHYTQKSLSLSPGKGGGGSGGGGSGGGGSGGGGSGGGGSGGGGSDKTHTCPPCPAPELLGGPSVFLFPPKPKDTLMISRTPEVTCVVVDVSHEDPEVKFNWYVDGVEVHNAKTKPCEEQYGSTYRCVSVLTVLHQDWLNGKEYKCKVSNKALPAPIEKTISKAKGQPREPQVYTLPPSREEMTKNQVSLTCLVKGFYPSDIAVEWESNGQPENNYKTTPPVLDSDGSFFLYSKLTVDKSRWQQGNVFSCSVMHEALHNHYTQKSLSLSPGK

SEQ ID NO: 1731 - protein, 498 aa, Artificial Sequence
  Synthetic
QVQLVQSGAEVKKPGASVKVSCKASGYTFTSYGISWVRQAPGQCLEWMGWISAYNGQTIYAQKLQGRVTMTRDTSTSTAYMELRSLRSDDTAVYYCARDPDYYGSGSYSDYWGQGTLVTVSSGGGGSGGGGSGGGGSEIVMTQSPATLSVSPGERATLSCRASQSVSSNLAWYQQKPGQAPRLLIYGASNRATGIPARFSGSGSGTEFTLTISSLQSEDFAVYYCQQYHSWPLLTFGCGTKVEIKSGGGGSQVQLQQWGAGLLKPSETLSLTCAVYGGSFSGYYWSWIRQPPGKCLEWIGEINHRGSTNYNPSLKSRVTISGDTSKNQFSLKLSSVNAADTAVYYCARGYSSSWYTGYVFDYWGQGTLVTVSSGGGGSGGGGSGGGGSQSALTQPASVSGSPGQSITISCTGTSSDVFGYDYVSWYQQHPGKAPKLMIYDVSNRPSGVSNRFSGSKSGNAASLTISGLQAEDEADYYCSSYKSSSTVVFGCGTKLTVL

SEQ ID NO: 1732 - protein, 753 aa, Artificial Sequence
  Synthetic
QVQLVQSGAEVKKPGASVKVSCKASGYTFTSYGISWVRQAPGQCLEWMGWISAYNGQTIYAQKLQGRVTMTRDTSTSTAYMELRSLRSDDTAVYYCARDPDYYGSGSYSDYWGQGTLVTVSSGGGGSGGGGSGGGGSEIVMTQSPATLSVSPGERATLSCRASQSVSSNLAWYQQKPGQAPRLLIYGASNRATGIPARFSGSGSGTEFTLTISSLQSEDFAVYYCQQYHSWPLLTFGCGTKVEIKSGGGGSQVQLQQWGAGLLKPSETLSLTCAVYGGSFSGYYWSWIRQPPGKCLEWIGEINHRGSTNYNPSLKSRVTISGDTSKNQFSLKLSSVNAADTAVYYCARGYSSSWYTGYVFDYWGQGTLVTVSSGGGGSGGGGSGGGGSQSALTQPASVSGSPGQSITISCTGTSSDVFGYDYVSWYQQHPGKAPKLMIYDVSNRPSGVSNRFSGSKSGNAASLTISGLQAEDEADYYCSSYKSSSTVVFGCGTKLTVLSGGGGSEVQLVESGGGLVQPGGSLKLSCAASGFTFNKYAMNWVRQAPGKGLEWVARIRSKYNNYATYYADSVKDRFTISRDDSKNTAYLQMNNLKTEDTAVYYCVRHGNFGNSYISYWAYWGQGTLVTVSSGGGGSGGGGSGGGGSQTVVTQEPSLTVSPGGTVTLTCGSSTGAVTSGNYPNWVQQKPGQAPRGLIGGTKFLAPGTPARFSGSLLGGKAALTLSGVQPEDEAEYYCVLWYSNRWVFGGGTKLTVL

SEQ ID NO: 1733 - protein, 1241 aa, Artificial Sequence
  Synthetic
QVQLVQSGAEVKKPGASVKVSCKASGYTFTSYGISWVRQAPGQCLEWMGWISAYNGQTIYAQKLQGRVTMTRDTSTSTAYMELRSLRSDDTAVYYCARDPDYYGSGSYSDYWGQGTLVTVSSGGGGSGGGGSGGGGSEIVMTQSPATLSVSPGERATLSCRASQSVSSNLAWYQQKPGQAPRLLIYGASNRATGIPARFSGSGSGTEFTLTISSLQSEDFAVYYCQQYHSWPLLTFGCGTKVEIKSGGGGSQVQLQQWGAGLLKPSETLSLTCAVYGGSFSGYYWSWIRQPPGKCLEWIGEINHRGSTNYNPSLKSRVTISGDTSKNQFSLKLSSVNAADTAVYYCARGYSSSWYTGYVFDYWGQGTLVTVSSGGGGSGGGGSGGGGSQSALTQPASVSGSPGQSITISCTGTSSDVFGYDYVSWYQQHPGKAPKLMIYDVSNRPSGVSNRFSGSKSGNAASLTISGLQAEDEADYYCSSYKSSSTVVFGCGTKLTVLSGGGGSEVQLVESGGGLVQPGGSLKLSCAASGFTFNKYAMNWVRQAPGKGLEWVARIRSKYNNYATYYADSVKDRFTISRDDSKNTAYLQMNNLKTEDTAVYYCVRHGNFGNSYISYWAYWGQGTLVTVSSGGGGSGGGGSGGGGSQTVVTQEPSLTVSPGGTVTLTCGSSTGAVTSGNYPNWVQQKPGQAPRGLIGGTKFLAPGTPARFSGSLLGGKAALTLSGVQPEDEAEYYCVLWYSNRWVFGGGTKLTVLGGGGDKTHTCPPCPAPELLGGPSVFLFPPKPKDTLMISRTPEVTCVVVDVSHEDPEVKFNWYVDGVEVHNAKTKPCEEQYGSTYRCVSVLTVLHQDWLNGKEYKCKVSNKALPAPIEKTISKAKGQPREPQVYTLPPSREEMTKNQVSLTCLVKGFYPSDIAVEWESNGQPENNYKTTPPVLDSDGSFFLYSKLTVDKSRWQQGNVFSCSVMHEALHNHYTQKSLSLSPGKGGGGSGGGGSGGGGSGGGGSGGGGSGGGGSDKTHTCPPCPAPELLGGPSVFLFPPKPKDTLMISRTPEVTCVVVDVSHEDPEVKFNWYVDGVEVHNAKTKPCEEQYGSTYRCVSVLTVLHQDWLNGKEYKCKVSNKALPAPIEKTISKAKGQPREPQVYTLPPSREEMTKNQVSLTCLVKGFYPSDIAVEWESNGQPENNYKTTPPVLDSDGSFFLYSKLTVDKSRWQQGNVFSCSVMHEALHNHYTQKSLSLSPGK

SEQ ID NO: 1734 - protein, 487 aa, Artificial Sequence
  Synthetic
QVQLVQSGAEVKKPGASVKVSCKASGYTFTSYGISWVRQAPGQCLEWMGWISAYNGQTIYAQKLQGRVTMTRDTSTSTAYMELRSLRSDDTAVYYCARDPDYYGSGSYSDYWGQGTLVTVSSGGGGSGGGGSGGGGSEIVMTQSPATLSVSPGERATLSCRASQSVSSNLAWYQQKPGQAPRLLIYGASNRATGIPARFSGSGSGTEFTLTISSLQSEDFAVYYCQQYHSWPLLTFGCGTKVEIKSGGGGSQVQLVQSGAEVKKPGASVKVSCKASGYTFTDYWMHWVRQAPGQCLEWMGYITPSTGYTDYHRKFRGRVTMTRDKSISTAYMELSRLRSDDTAVYYCARSTFDAWGQGTMVTVSSGGGGSGGGGSGGGGSDIQMTQSPSSLSASVGDRVSITCRASQEISGYLSWFQQKPGKAIKRLIYATSSLDAGVPSRFSGSGSGTDFTLTISSLQPEDFADYYCLQYASYPLTFGCGTKLEIK

SEQ ID NO: 1735 - protein, 742 aa, Artificial Sequence
  Synthetic
QVQLVQSGAEVKKPGASVKVSCKASGYTFTSYGISWVRQAPGQCLEWMGWISAYNGQTIYAQKLQGRVTMTRDTSTSTAYMELRSLRSDDTAVYYCARDPDYYGSGSYSDYWGQGTLVTVSSGGGGSGGGGSGGGGSEIVMTQSPATLSVSPGERATLSCRASQSVSSNLAWYQQKPGQAPRLLIYGASNRATGIPARFSGSGSGTEFTLTISSLQSEDFAVYYCQQYHSWPLLTFGCGTKVEIKSGGGGSQVQLVQSGAEVKKPGASVKVSCKASGYTFTDYWMHWVRQAPGQCLEWMGYITPSTGYTDYHRKFRGRVTMTRDKSISTAYMELSRLRSDDTAVYYCARSTFDAWGQGTMVTVSSGGGGSGGGGSGGGGSDIQMTQSPSSLSASVGDRVSITCRASQEISGYLSWFQQKPGKAIKRLIYATSSLDAGVPSRFSGSGSGTDFTLTISSLQPEDFADYYCLQYASYPLTFGCGTKLEIKSGGGGSEVQLVESGGGLVQPGGSLKLSCAASGFTFNKYAMNWVRQAPGKGLEWVARIRSKYNNYATYYADSVKDRFTISRDDSKNTAYLQMNNLKTEDTAVYYCVRHGNFGNSYISYWAYWGQGTLVTVSSGGGGSGGGGSGGGGSQTVVTQEPSLTVSPGGTVTLTCGSSTGAVTSGNYPNWVQQKPGQAPRGLIGGTKFLAPGTPARFSGSLLGGKAALTLSGVQPEDEAEYYCVLWYSNRWVFGGGTKLTVL

SEQ ID NO: 1736 - protein, 1230 aa, Artificial Sequence
  Synthetic
QVQLVQSGAEVKKPGASVKVSCKASGYTFTSYGISWVRQAPGQCLEWMGWISAYNGQTIYAQKLQGRVTMTRDTSTSTAYMELRSLRSDDTAVYYCARDPDYYGSGSYSDYWGQGTLVTVSSGGGGSGGGGSGGGGSEIVMTQSPATLSVSPGERATLSCRASQSVSSNLAWYQQKPGQAPRLLIYGASNRATGIPARFSGSGSGTEFTLTISSLQSEDFAVYYCQQYHSWPLLTFGCGTKVEIKSGGGGSQVQLVQSGAEVKKPGASVKVSCKASGYTFTDYWMHWVRQAPGQCLEWMGYITPSTGYTDYHRKFRGRVTMTRDKSISTAYMELSRLRSDDTAVYYCARSTFDAWGQGTMVTVSSGGGGSGGGGSGGGGSDIQMTQSPSSLSASVGDRVSITCRASQEISGYLSWFQQKPGKAIKRLIYATSSLDAGVPSRFSGSGSGTDFTLTISSLQPEDFADYYCLQYASYPLTFGCGTKLEIKSGGGGSEVQLVESGGGLVQPGGSLKLSCAASGFTFNKYAMNWVRQAPGKGLEWVARIRSKYNNYATYYADSVKDRFTISRDDSKNTAYLQMNNLKTEDTAVYYCVRHGNFGNSYISYWAYWGQGTLVTVSSGGGGSGGGGSGGGGSQTVVTQEPSLTVSPGGTVTLTCGSSTGAVTSGNYPNWVQQKPGQAPRGLIGGTKFLAPGTPARFSGSLLGGKAALTLSGVQPEDEAEYYCVLWYSNRWVFGGGTKLTVLGGGGDKTHTCPPCPAPELLGGPSVFLFPPKPKDTLMISRTPEVTCVVVDVSHEDPEVKFNWYVDGVEVHNAKTKPCEEQYGSTYRCVSVLTVLHQDWLNGKEYKCKVSNKALPAPIEKTISKAKGQPREPQVYTLPPSREEMTKNQVSLTCLVKGFYPSDIAVEWESNGQPENNYKTTPPVLDSDGSFFLYSKLTVDKSRWQQGNVFSCSVMHEALHNHYTQKSLSLSPGKGGGGSGGGGSGGGGSGGGGSGGGGSGGGGSDKTHTCPPCPAPELLGGPSVFLFPPKPKDTLMISRTPEVTCVVVDVSHEDPEVKFNWYVDGVEVHNAKTKPCEEQYGSTYRCVSVLTVLHQDWLNGKEYKCKVSNKALPAPIEKTISKAKGQPREPQVYTLPPSREEMTKNQVSLTCLVKGFYPSDIAVEWESNGQPENNYKTTPPVLDSDGSFFLYSKLTVDKSRWQQGNVFSCSVMHEALHNHYTQKSLSLSPGK

SEQ ID NO: 1737 - protein, 492 aa, Artificial Sequence
  Synthetic
QVQLVQSGAEVKKPGASVKVSCKASGYTFTSYGISWVRQAPGQCLEWMGWISAYNGQTIYAQKLQGRVTMTRDTSTSTAYMELRSLRSDDTAVYYCARDPDYYGSGSYSDYWGQGTLVTVSSGGGGSGGGGSGGGGSEIVMTQSPATLSVSPGERATLSCRASQSVSSNLAWYQQKPGQAPRLLIYGASNRATGIPARFSGSGSGTEFTLTISSLQSEDFAVYYCQQYHSWPLLTFGCGTKVEIKSGGGGSQVQLVQSGAEVKKPGASVKVSCKASGYTFTSYWMHWVRQAPGQCLEWMGYITPSTGYTEYNQKFKGRVTMTRDKSTSTVYMELSSLRSEDTAVYYCARVHDYDRAMEYWGQGTTVTVSSGGGGSGGGGSGGGGSDIQMTQSPSSLSASVGDRVTITCKASQDINKYIAWYQQKPGKGPKLLIYYTSTLQPGVPSRFSGSGSGTDFTFTISSLQPEDIATYYCLQYASYPFTFGCGTRLEIK

SEQ ID NO: 1738 - skipped

SEQ ID NO: 1739 - protein, 747 aa, Artificial Sequence
  Synthetic
QVQLVQSGAEVKKPGASVKVSCKASGYTFTSYGISWVRQAPGQCLEWMGWISAYNGQTIYAQKLQGRVTMTRDTSTSTAYMELRSLRSDDTAVYYCARDPDYYGSGSYSDYWGQGTLVTVSSGGGGSGGGGSGGGGSEIVMTQSPATLSVSPGERATLSCRASQSVSSNLAWYQQKPGQAPRLLIYGASNRATGIPARFSGSGSGTEFTLTISSLQSEDFAVYYCQQYHSWPLLTFGCGTKVEIKSGGGGSQVQLVQSGAEVKKPGASVKVSCKASGYTFTSYWMHWVRQAPGQCLEWMGYITPSTGYTEYNQKFKGRVTMTRDKSTSTVYMELSSLRSEDTAVYYCARVHDYDRAMEYWGQGTTVTVSSGGGGSGGGGSGGGGSDIQMTQSPSSLSASVGDRVTITCKASQDINKYIAWYQQKPGKGPKLLIYYTSTLQPGVPSRFSGSGSGTDFTFTISSLQPEDIATYYCLQYASYPFTFGCGTRLEIKSGGGGSEVQLVESGGGLVQPGGSLKLSCAASGFTFNKYAMNWVRQAPGKGLEWVARIRSKYNNYATYYADSVKDRFTISRDDSKNTAYLQMNNLKTEDTAVYYCVRHGNFGNSYISYWAYWGQGTLVTVSSGGGGSGGGGSGGGGSQTVVTQEPSLTVSPGGTVTLTCGSSTGAVTSGNYPNWVQQKPGQAPRGLIGGTKFLAPGTPARFSGSLLGGKAALTLSGVQPEDEAEYYCVLWYSNRWVFGGGTKLTVL

SEQ ID NO: 1740 - protein, 1235 aa, Artificial Sequence
  Synthetic
QVQLVQSGAEVKKPGASVKVSCKASGYTFTSYGISWVRQAPGQCLEWMGWISAYNGQTIYAQKLQGRVTMTRDTSTSTAYMELRSLRSDDTAVYYCARDPDYYGSGSYSDYWGQGTLVTVSSGGGGSGGGGSGGGGSEIVMTQSPATLSVSPGERATLSCRASQSVSSNLAWYQQKPGQAPRLLIYGASNRATGIPARFSGSGSGTEFTLTISSLQSEDFAVYYCQQYHSWPLLTFGCGTKVEIKSGGGGSQVQLVQSGAEVKKPGASVKVSCKASGYTFTSYWMHWVRQAPGQCLEWMGYITPSTGYTEYNQKFKGRVTMTRDKSTSTVYMELSSLRSEDTAVYYCARVHDYDRAMEYWGQGTTVTVSSGGGGSGGGGSGGGGSDIQMTQSPSSLSASVGDRVTITCKASQDINKYIAWYQQKPGKGPKLLIYYTSTLQPGVPSRFSGSGSGTDFTFTISSLQPEDIATYYCLQYASYPFTFGCGTRLEIKSGGGGSEVQLVESGGGLVQPGGSLKLSCAASGFTFNKYAMNWVRQAPGKGLEWVARIRSKYNNYATYYADSVKDRFTISRDDSKNTAYLQMNNLKTEDTAVYYCVRHGNFGNSYISYWAYWGQGTLVTVSSGGGGSGGGGSGGGGSQTVVTQEPSLTVSPGGTVTLTCGSSTGAVTSGNYPNWVQQKPGQAPRGLIGGTKFLAPGTPARFSGSLLGGKAALTLSGVQPEDEAEYYCVLWYSNRWVFGGGTKLTVLGGGGDKTHTCPPCPAPELLGGPSVFLFPPKPKDTLMISRTPEVTCVVVDVSHEDPEVKFNWYVDGVEVHNAKTKPCEEQYGSTYRCVSVLTVLHQDWLNGKEYKCKVSNKALPAPIEKTISKAKGQPREPQVYTLPPSREEMTKNQVSLTCLVKGFYPSDIAVEWESNGQPENNYKTTPPVLDSDGSFFLYSKLTVDKSRWQQGNVFSCSVMHEALHNHYTQKSLSLSPGKGGGGSGGGGSGGGGSGGGGSGGGGSGGGGSDKTHTCPPCPAPELLGGPSVFLFPPKPKDTLMISRTPEVTCVVVDVSHEDPEVKFNWYVDGVEVHNAKTKPCEEQYGSTYRCVSVLTVLHQDWLNGKEYKCKVSNKALPAPIEKTISKAKGQPREPQVYTLPPSREEMTKNQVSLTCLVKGFYPSDIAVEWESNGQPENNYKTTPPVLDSDGSFFLYSKLTVDKSRWQQGNVFSCSVMHEALHNHYTQKSLSLSPGK

SEQ ID NO: 1741 - protein, 501 aa, Artificial Sequence
  Synthetic
QVQLVESGGGVVQPGRSLRLSCAASGFTFSNYGMHWVRQAPGKCLEWVAVISYEASNKNYADAVKGRFTISRDNSKNTLYLQMNSLRAEDTAVYYCARDRFGDYSGYYYYYGMDVWGQGTTVTVSSGGGGSGGGGSGGGGSDIVMTQTPLSLPVTPGQPASISCRSSQSLLHSSGKTYLDWYLQKPGQSPQLLIYLGSNRASGVPDRFSGSGSGTDFTLKISRVEAEDVGVYYCMQATQTPFTFGCGTKVEIKSGGGGSQVQLVQSGAEVKKPGASVKVSCKASGYTFTDYWMHWVRQAPGQCLEWMGYITPSTGYTDYNQKFKGRVTMTRDKSTSTAYMELSSLRSEDTAVYYCARNYNHRGYAMDYWGQGTTVTVSSGGGGSGGGGSGGGGSDIQMTQSPSSLSASVGDRVTITCRASENIYSNLAWYQQKPGKAPKLLIYAATNLAEGVPSRFSGSGSGTDFTLTISSLQPEDFATYYCQHFYGTPLTFGCGTKLEIK

SEQ ID NO: 1742 - protein, 756 aa, Artificial Sequence
  Synthetic
QVQLVESGGGVVQPGRSLRLSCAASGFTFSNYGMHWVRQAPGKCLEWVAVISYEASNKNYADAVKGRFTISRDNSKNTLYLQMNSLRAEDTAVYYCARDRFGDYSGYYYYYGMDVWGQGTTVTVSSGGGGSGGGGSGGGGSDIVMTQTPLSLPVTPGQPASISCRSSQSLLHSSGKTYLDWYLQKPGQSPQLLIYLGSNRASGVPDRFSGSGSGTDFTLKISRVEAEDVGVYYCMQATQTPFTFGCGTKVEIKSGGGGSQVQLVQSGAEVKKPGASVKVSCKASGYTFTDYWMHWVRQAPGQCLEWMGYITPSTGYTDYNQKFKGRVTMTRDKSTSTAYMELSSLRSEDTAVYYCARNYNHRGYAMDYWGQGTTVTVSSGGGGSGGGGSGGGGSDIQMTQSPSSLSASVGDRVTITCRASENIYSNLAWYQQKPGKAPKLLIYAATNLAEGVPSRFSGSGSGTDFTLTISSLQPEDFATYYCQHFYGTPLTFGCGTKLEIKSGGGGSEVQLVESGGGLVQPGGSLKLSCAASGFTFNKYAMNWVRQAPGKGLEWVARIRSKYNNYATYYADSVKDRFTISRDDSKNTAYLQMNNLKTEDTAVYYCVRHGNFGNSYISYWAYWGQGTLVTVSSGGGGSGGGGSGGGGSQTVVTQEPSLTVSPGGTVTLTCGSSTGAVTSGNYPNWVQQKPGQAPRGLIGGTKFLAPGTPARFSGSLLGGKAALTLSGVQPEDEAEYYCVLWYSNRWVFGGGTKLTVL

SEQ ID NO: 1743 - protein, 1244 aa, Artificial Sequence
  Synthetic
QVQLVESGGGVVQPGRSLRLSCAASGFTFSNYGMHWVRQAPGKCLEWVAVISYEASNKNYADAVKGRFTISRDNSKNTLYLQMNSLRAEDTAVYYCARDRFGDYSGYYYYYGMDVWGQGTTVTVSSGGGGSGGGGSGGGGSDIVMTQTPLSLPVTPGQPASISCRSSQSLLHSSGKTYLDWYLQKPGQSPQLLIYLGSNRASGVPDRFSGSGSGTDFTLKISRVEAEDVGVYYCMQATQTPFTFGCGTKVEIKSGGGGSQVQLVQSGAEVKKPGASVKVSCKASGYTFTDYWMHWVRQAPGQCLEWMGYITPSTGYTDYNQKFKGRVTMTRDKSTSTAYMELSSLRSEDTAVYYCARNYNHRGYAMDYWGQGTTVTVSSGGGGSGGGGSGGGGSDIQMTQSPSSLSASVGDRVTITCRASENIYSNLAWYQQKPGKAPKLLIYAATNLAEGVPSRFSGSGSGTDFTLTISSLQPEDFATYYCQHFYGTPLTFGCGTKLEIKSGGGGSEVQLVESGGGLVQPGGSLKLSCAASGFTFNKYAMNWVRQAPGKGLEWVARIRSKYNNYATYYADSVKDRFTISRDDSKNTAYLQMNNLKTEDTAVYYCVRHGNFGNSYISYWAYWGQGTLVTVSSGGGGSGGGGSGGGGSQTVVTQEPSLTVSPGGTVTLTCGSSTGAVTSGNYPNWVQQKPGQAPRGLIGGTKFLAPGTPARFSGSLLGGKAALTLSGVQPEDEAEYYCVLWYSNRWVFGGGTKLTVLGGGGDKTHTCPPCPAPELLGGPSVFLFPPKPKDTLMISRTPEVTCVVVDVSHEDPEVKFNWYVDGVEVHNAKTKPCEEQYGSTYRCVSVLTVLHQDWLNGKEYKCKVSNKALPAPIEKTISKAKGQPREPQVYTLPPSREEMTKNQVSLTCLVKGFYPSDIAVEWESNGQPENNYKTTPPVLDSDGSFFLYSKLTVDKSRWQQGNVFSCSVMHEALHNHYTQKSLSLSPGKGGGGSGGGGSGGGGSGGGGSGGGGSGGGGSDKTHTCPPCPAPELLGGPSVFLFPPKPKDTLMISRTPEVTCVVVDVSHEDPEVKFNWYVDGVEVHNAKTKPCEEQYGSTYRCVSVLTVLHQDWLNGKEYKCKVSNKALPAPIEKTISKAKGQPREPQVYTLPPSREEMTKNQVSLTCLVKGFYPSDIAVEWESNGQPENNYKTTPPVLDSDGSFFLYSKLTVDKSRWQQGNVFSCSVMHEALHNHYTQKSLSLSPGK

SEQ ID NO: 1744 - protein, 495 aa, Artificial Sequence
  Synthetic
QVQLVESGGGVVQPGRSLRLSCAASGFTFSNYGMHWVRQAPGKCLEWVAVISYEASNKNYADAVKGRFTISRDNSKNTLYLQMNSLRAEDTAVYYCARDRFGDYSGYYYYYGMDVWGQGTTVTVSSGGGGSGGGGSGGGGSDIVMTQTPLSLPVTPGQPASISCRSSQSLLHSSGKTYLDWYLQKPGQSPQLLIYLGSNRASGVPDRFSGSGSGTDFTLKISRVEAEDVGVYYCMQATQTPFTFGCGTKVEIKSGGGGSQVQLVQSGAEVKKPGASVKVSCKASGYTFTSYWMHWVRQRPGQCLEWMGYISPNSGYTDYHHKFKGRVTMTADKSISTAYMQLSRLTSDDTAVYYCARDPMDYWGQGTLVTVSSGGGGSGGGGSGGGGSDIQMTQSPSSLSASVGDRVTITCRASENIYSYLAWYQQKPGKAPKLLIYNAKTLVEGVPSRFSGSGSGTDFTLTISSLQPEDFGTYYCQHHYGTPRTFGCGTKLEIK

SEQ ID NO: 1745 - protein, 750 aa, Artificial Sequence
  Synthetic
QVQLVESGGGVVQPGRSLRLSCAASGFTFSNYGMHWVRQAPGKCLEWVAVISYEASNKNYADAVKGRFTISRDNSKNTLYLQMNSLRAEDTAVYYCARDRFGDYSGYYYYYGMDVWGQGTTVTVSSGGGGSGGGGSGGGGSDIVMTQTPLSLPVTPGQPASISCRSSQSLLHSSGKTYLDWYLQKPGQSPQLLIYLGSNRASGVPDRFSGSGSGTDFTLKISRVEAEDVGVYYCMQATQTPFTFGCGTKVEIKSGGGGSQVQLVQSGAEVKKPGASVKVSCKASGYTFTSYWMHWVRQRPGQCLEWMGYISPNSGYTDYHHKFKGRVTMTADKSISTAYMQLSRLTSDDTAVYYCARDPMDYWGQGTLVTVSSGGGGSGGGGSGGGGSDIQMTQSPSSLSASVGDRVTITCRASENIYSYLAWYQQKPGKAPKLLIYNAKTLVEGVPSRFSGSGSGTDFTLTISSLQPEDFGTYYCQHHYGTPRTFGCGTKLEIKSGGGGSEVQLVESGGGLVQPGGSLKLSCAASGFTFNKYAMNWVRQAPGKGLEWVARIRSKYNNYATYYADSVKDRFTISRDDSKNTAYLQMNNLKTEDTAVYYCVRHGNFGNSYISYWAYWGQGTLVTVSSGGGGSGGGGSGGGGSQTVVTQEPSLTVSPGGTVTLTCGSSTGAVTSGNYPNWVQQKPGQAPRGLIGGTKFLAPGTPARFSGSLLGGKAALTLSGVQPEDEAEYYCVLWYSNRWVFGGGTKLTVL

SEQ ID NO: 1746 - protein, 1238 aa, Artificial Sequence
  Synthetic
QVQLVESGGGVVQPGRSLRLSCAASGFTFSNYGMHWVRQAPGKCLEWVAVISYEASNKNYADAVKGRFTISRDNSKNTLYLQMNSLRAEDTAVYYCARDRFGDYSGYYYYYGMDVWGQGTTVTVSSGGGGSGGGGSGGGGSDIVMTQTPLSLPVTPGQPASISCRSSQSLLHSSGKTYLDWYLQKPGQSPQLLIYLGSNRASGVPDRFSGSGSGTDFTLKISRVEAEDVGVYYCMQATQTPFTFGCGTKVEIKSGGGGSQVQLVQSGAEVKKPGASVKVSCKASGYTFTSYWMHWVRQRPGQCLEWMGYISPNSGYTDYHHKFKGRVTMTADKSISTAYMQLSRLTSDDTAVYYCARDPMDYWGQGTLVTVSSGGGGSGGGGSGGGGSDIQMTQSPSSLSASVGDRVTITCRASENIYSYLAWYQQKPGKAPKLLIYNAKTLVEGVPSRFSGSGSGTDFTLTISSLQPEDFGTYYCQHHYGTPRTFGCGTKLEIKSGGGGSEVQLVESGGGLVQPGGSLKLSCAASGFTFNKYAMNWVRQAPGKGLEWVARIRSKYNNYATYYADSVKDRFTISRDDSKNTAYLQMNNLKTEDTAVYYCVRHGNFGNSYISYWAYWGQGTLVTVSSGGGGSGGGGSGGGGSQTVVTQEPSLTVSPGGTVTLTCGSSTGAVTSGNYPNWVQQKPGQAPRGLIGGTKFLAPGTPARFSGSLLGGKAALTLSGVQPEDEAEYYCVLWYSNRWVFGGGTKLTVLGGGGDKTHTCPPCPAPELLGGPSVFLFPPKPKDTLMISRTPEVTCVVVDVSHEDPEVKFNWYVDGVEVHNAKTKPCEEQYGSTYRCVSVLTVLHQDWLNGKEYKCKVSNKALPAPIEKTISKAKGQPREPQVYTLPPSREEMTKNQVSLTCLVKGFYPSDIAVEWESNGQPENNYKTTPPVLDSDGSFFLYSKLTVDKSRWQQGNVFSCSVMHEALHNHYTQKSLSLSPGKGGGGSGGGGSGGGGSGGGGSGGGGSGGGGSDKTHTCPPCPAPELLGGPSVFLFPPKPKDTLMISRTPEVTCVVVDVSHEDPEVKFNWYVDGVEVHNAKTKPCEEQYGSTYRCVSVLTVLHQDWLNGKEYKCKVSNKALPAPIEKTISKAKGQPREPQVYTLPPSREEMTKNQVSLTCLVKGFYPSDIAVEWESNGQPENNYKTTPPVLDSDGSFFLYSKLTVDKSRWQQGNVFSCSVMHEALHNHYTQKSLSLSPGK

SEQ ID NO: 1747 - protein, 506 aa, Artificial Sequence
  Synthetic
QVQLVESGGGVVQPGRSLRLSCAASGFTFSNYGMHWVRQAPGKCLEWVAVISYEASNKNYADAVKGRFTISRDNSKNTLYLQMNSLRAEDTAVYYCARDRFGDYSGYYYYYGMDVWGQGTTVTVSSGGGGSGGGGSGGGGSDIVMTQTPLSLPVTPGQPASISCRSSQSLLHSSGKTYLDWYLQKPGQSPQLLIYLGSNRASGVPDRFSGSGSGTDFTLKISRVEAEDVGVYYCMQATQTPFTFGCGTKVEIKSGGGGSQVQLQQWGAGLLKPSETLSLTCAVYGGSFSGYYWSWIRQPPGKCLEWIGEINHRGSTNYNPSLKSRVTISGDTSKNQFSLKLSSVNAADTAVYYCARGYSSSWYTGYVFDYWGQGTLVTVSSGGGGSGGGGSGGGGSQSALTQPASVSGSPGQSITISCTGTSSDVFGYDYVSWYQQHPGKAPKLMIYDVSNRPSGVSNRFSGSKSGNAASLTISGLQAEDEADYYCSSYKSSSTVVFGCGTKLTVL

SEQ ID NO: 1748 - protein, 761 aa, Artificial Sequence
  Synthetic
QVQLVESGGGVVQPGRSLRLSCAASGFTFSNYGMHWVRQAPGKCLEWVAVISYEASNKNYADAVKGRFTISRDNSKNTLYLQMNSLRAEDTAVYYCARDRFGDYSGYYYYYGMDVWGQGTTVTVSSGGGGSGGGGSGGGGSDIVMTQTPLSLPVTPGQPASISCRSSQSLLHSSGKTYLDWYLQKPGQSPQLLIYLGSNRASGVPDRFSGSGSGTDFTLKISRVEAEDVGVYYCMQATQTPFTFGCGTKVEIKSGGGGSQVQLQQWGAGLLKPSETLSLTCAVYGGSFSGYYWSWIRQPPGKCLEWIGEINHRGSTNYNPSLKSRVTISGDTSKNQFSLKLSSVNAADTAVYYCARGYSSSWYTGYVFDYWGQGTLVTVSSGGGGSGGGGSGGGGSQSALTQPASVSGSPGQSITISCTGTSSDVFGYDYVSWYQQHPGKAPKLMIYDVSNRPSGVSNRFSGSKSGNAASLTISGLQAEDEADYYCSSYKSSSTVVFGCGTKLTVLSGGGGSEVQLVESGGGLVQPGGSLKLSCAASGFTFNKYAMNWVRQAPGKGLEWVARIRSKYNNYATYYADSVKDRFTISRDDSKNTAYLQMNNLKTEDTAVYYCVRHGNFGNSYISYWAYWGQGTLVTVSSGGGGSGGGGSGGGGSQTVVTQEPSLTVSPGGTVTLTCGSSTGAVTSGNYPNWVQQKPGQAPRGLIGGTKFLAPGTPARFSGSLLGGKAALTLSGVQPEDEAEYYCVLWYSNRWVFGGGTKLTVL

SEQ ID NO: 1749 - protein, 1249 aa, Artificial Sequence
  Synthetic
QVQLVESGGGVVQPGRSLRLSCAASGFTFSNYGMHWVRQAPGKCLEWVAVISYEASNKNYADAVKGRFTISRDNSKNTLYLQMNSLRAEDTAVYYCARDRFGDYSGYYYYYGMDVWGQGTTVTVSSGGGGSGGGGSGGGGSDIVMTQTPLSLPVTPGQPASISCRSSQSLLHSSGKTYLDWYLQKPGQSPQLLIYLGSNRASGVPDRFSGSGSGTDFTLKISRVEAEDVGVYYCMQATQTPFTFGCGTKVEIKSGGGGSQVQLQQWGAGLLKPSETLSLTCAVYGGSFSGYYWSWIRQPPGKCLEWIGEINHRGSTNYNPSLKSRVTISGDTSKNQFSLKLSSVNAADTAVYYCARGYSSSWYTGYVFDYWGQGTLVTVSSGGGGSGGGGSGGGGSQSALTQPASVSGSPGQSITISCTGTSSDVFGYDYVSWYQQHPGKAPKLMIYDVSNRPSGVSNRFSGSKSGNAASLTISGLQAEDEADYYCSSYKSSSTVVFGCGTKLTVLSGGGGSEVQLVESGGGLVQPGGSLKLSCAASGFTFNKYAMNWVRQAPGKGLEWVARIRSKYNNYATYYADSVKDRFTISRDDSKNTAYLQMNNLKTEDTAVYYCVRHGNFGNSYISYWAYWGQGTLVTVSSGGGGSGGGGSGGGGSQTVVTQEPSLTVSPGGTVTLTCGSSTGAVTSGNYPNWVQQKPGQAPRGLIGGTKFLAPGTPARFSGSLLGGKAALTLSGVQPEDEAEYYCVLWYSNRWVFGGGTKLTVLGGGGDKTHTCPPCPAPELLGGPSVFLFPPKPKDTLMISRTPEVTCVVVDVSHEDPEVKFNWYVDGVEVHNAKTKPCEEQYGSTYRCVSVLTVLHQDWLNGKEYKCKVSNKALPAPIEKTISKAKGQPREPQVYTLPPSREEMTKNQVSLTCLVKGFYPSDIAVEWESNGQPENNYKTTPPVLDSDGSFFLYSKLTVDKSRWQQGNVFSCSVMHEALHNHYTQKSLSLSPGKGGGGSGGGGSGGGGSGGGGSGGGGSGGGGSDKTHTCPPCPAPELLGGPSVFLFPPKPKDTLMISRTPEVTCVVVDVSHEDPEVKFNWYVDGVEVHNAKTKPCEEQYGSTYRCVSVLTVLHQDWLNGKEYKCKVSNKALPAPIEKTISKAKGQPREPQVYTLPPSREEMTKNQVSLTCLVKGFYPSDIAVEWESNGQPENNYKTTPPVLDSDGSFFLYSKLTVDKSRWQQGNVFSCSVMHEALHNHYTQKSLSLSPGK

SEQ ID NO: 1750 - protein, 495 aa, Artificial Sequence
  Synthetic
QVQLVESGGGVVQPGRSLRLSCAASGFTFSNYGMHWVRQAPGKCLEWVAVISYEASNKNYADAVKGRFTISRDNSKNTLYLQMNSLRAEDTAVYYCARDRFGDYSGYYYYYGMDVWGQGTTVTVSSGGGGSGGGGSGGGGSDIVMTQTPLSLPVTPGQPASISCRSSQSLLHSSGKTYLDWYLQKPGQSPQLLIYLGSNRASGVPDRFSGSGSGTDFTLKISRVEAEDVGVYYCMQATQTPFTFGCGTKVEIKSGGGGSQVQLVQSGAEVKKPGASVKVSCKASGYTFTDYWMHWVRQAPGQCLEWMGYITPSTGYTDYHRKFRGRVTMTRDKSISTAYMELSRLRSDDTAVYYCARSTFDAWGQGTMVTVSSGGGGSGGGGSGGGGSDIQMTQSPSSLSASVGDRVSITCRASQEISGYLSWFQQKPGKAIKRLIYATSSLDAGVPSRFSGSGSGTDFTLTISSLQPEDFADYYCLQYASYPLTFGCGTKLEIK

SEQ ID NO: 1751 - protein, 750 aa, Artificial Sequence
  Synthetic
QVQLVESGGGVVQPGRSLRLSCAASGFTFSNYGMHWVRQAPGKCLEWVAVISYEASNKNYADAVKGRFTISRDNSKNTLYLQMNSLRAEDTAVYYCARDRFGDYSGYYYYYGMDVWGQGTTVTVSSGGGGSGGGGSGGGGSDIVMTQTPLSLPVTPGQPASISCRSSQSLLHSSGKTYLDWYLQKPGQSPQLLIYLGSNRASGVPDRFSGSGSGTDFTLKISRVEAEDVGVYYCMQATQTPFTFGCGTKVEIKSGGGGSQVQLVQSGAEVKKPGASVKVSCKASGYTFTDYWMHWVRQAPGQCLEWMGYITPSTGYTDYHRKFRGRVTMTRDKSISTAYMELSRLRSDDTAVYYCARSTFDAWGQGTMVTVSSGGGGSGGGGSGGGGSDIQMTQSPSSLSASVGDRVSITCRASQEISGYLSWFQQKPGKAIKRLIYATSSLDAGVPSRFSGSGSGTDFTLTISSLQPEDFADYYCLQYASYPLTFGCGTKLEIKSGGGGSEVQLVESGGGLVQPGGSLKLSCAASGFTFNKYAMNWVRQAPGKGLEWVARIRSKYNNYATYYADSVKDRFTISRDDSKNTAYLQMNNLKTEDTAVYYCVRHGNFGNSYISYWAYWGQGTLVTVSSGGGGSGGGGSGGGGSQTVVTQEPSLTVSPGGTVTLTCGSSTGAVTSGNYPNWVQQKPGQAPRGLIGGTKFLAPGTPARFSGSLLGGKAALTLSGVQPEDEAEYYCVLWYSNRWVFGGGTKLTVL

SEQ ID NO: 1752 - protein, 495 aa, Artificial Sequence
  Synthetic
QVQLVQSGAEVKKPGASVKVSCKASGYTFTDYWMHWVRQAPGQCLEWMGYITPSSGYTDYNQKFKGRVTMTRDKSTSTVYMELSSLTSEDTAVYYCARNYLGRGYAMDYWGQGTTVTVSSGGGGSGGGGSGGGGSDIQMTQSPSSLSASVGDRVTITCRASENIYSNLAWYQQKPGKAPKLLIYAATNLAEGVPSRFSGSGSGTDFTLTISSLQPEDFATYYCQHFYGTPLTFGCGTKLEIKSGGGGSQVQLVESGGGVVQPGRSLRLSCAASGFTFSNYGMHWVRQAPGKCLEWVAVISYDAWFSQYADAVKGRFTVSRDNSKNTLYLQMNSLRAEDTAVYYCARDLITFGGHYYFGMDVWGQGTTVTVSSGGGGSGGGGSGGGGSEIVLTQSPGTLSLSPGERATLSCRASQSVSSNYLAWYQQKPGQAPRLLIYAASSRVTGIPDRFSGSGSGTDFTLTISRLEPEDFAVYYCQQYGSSPFTFGCGTKVEIK

SEQ ID NO: 1753 - protein, 750 aa, Artificial Sequence
  Synthetic
QVQLVQSGAEVKKPGASVKVSCKASGYTFTDYWMHWVRQAPGQCLEWMGYITPSSGYTDYNQKFKGRVTMTRDKSTSTVYMELSSLTSEDTAVYYCARNYLGRGYAMDYWGQGTTVTVSSGGGGSGGGGSGGGGSDIQMTQSPSSLSASVGDRVTITCRASENIYSNLAWYQQKPGKAPKLLIYAATNLAEGVPSRFSGSGSGTDFTLTISSLQPEDFATYYCQHFYGTPLTFGCGTKLEIKSGGGGSQVQLVESGGGVVQPGRSLRLSCAASGFTFSNYGMHWVRQAPGKCLEWVAVISYDAWFSQYADAVKGRFTVSRDNSKNTLYLQMNSLRAEDTAVYYCARDLITFGGHYYFGMDVWGQGTTVTVSSGGGGSGGGGSGGGGSEIVLTQSPGTLSLSPGERATLSCRASQSVSSNYLAWYQQKPGQAPRLLIYAASSRVTGIPDRFSGSGSGTDFTLTISRLEPEDFAVYYCQQYGSSPFTFGCGTKVEIKSGGGGSEVQLVESGGGLVQPGGSLKLSCAASGFTFNKYAMNWVRQAPGKGLEWVARIRSKYNNYATYYADSVKDRFTISRDDSKNTAYLQMNNLKTEDTAVYYCVRHGNFGNSYISYWAYWGQGTLVTVSSGGGGSGGGGSGGGGSQTVVTQEPSLTVSPGGTVTLTCGSSTGAVTSGNYPNWVQQKPGQAPRGLIGGTKFLAPGTPARFSGSLLGGKAALTLSGVQPEDEAEYYCVLWYSNRWVFGGGTKLTVL

SEQ ID NO: 1754 - protein, 1238 aa, Artificial Sequence
  Synthetic
QVQLVQSGAEVKKPGASVKVSCKASGYTFTDYWMHWVRQAPGQCLEWMGYITPSSGYTDYNQKFKGRVTMTRDKSTSTVYMELSSLTSEDTAVYYCARNYLGRGYAMDYWGQGTTVTVSSGGGGSGGGGSGGGGSDIQMTQSPSSLSASVGDRVTITCRASENIYSNLAWYQQKPGKAPKLLIYAATNLAEGVPSRFSGSGSGTDFTLTISSLQPEDFATYYCQHFYGTPLTFGCGTKLEIKSGGGGSQVQLVESGGGVVQPGRSLRLSCAASGFTFSNYGMHWVRQAPGKCLEWVAVISYDAWFSQYADAVKGRFTVSRDNSKNTLYLQMNSLRAEDTAVYYCARDLITFGGHYYFGMDVWGQGTTVTVSSGGGGSGGGGSGGGGSEIVLTQSPGTLSLSPGERATLSCRASQSVSSNYLAWYQQKPGQAPRLLIYAASSRVTGIPDRFSGSGSGTDFTLTISRLEPEDFAVYYCQQYGSSPFTFGCGTKVEIKSGGGGSEVQLVESGGGLVQPGGSLKLSCAASGFTFNKYAMNWVRQAPGKGLEWVARIRSKYNNYATYYADSVKDRFTISRDDSKNTAYLQMNNLKTEDTAVYYCVRHGNFGNSYISYWAYWGQGTLVTVSSGGGGSGGGGSGGGGSQTVVTQEPSLTVSPGGTVTLTCGSSTGAVTSGNYPNWVQQKPGQAPRGLIGGTKFLAPGTPARFSGSLLGGKAALTLSGVQPEDEAEYYCVLWYSNRWVFGGGTKLTVLGGGGDKTHTCPPCPAPELLGGPSVFLFPPKPKDTLMISRTPEVTCVVVDVSHEDPEVKFNWYVDGVEVHNAKTKPCEEQYGSTYRCVSVLTVLHQDWLNGKEYKCKVSNKALPAPIEKTISKAKGQPREPQVYTLPPSREEMTKNQVSLTCLVKGFYPSDIAVEWESNGQPENNYKTTPPVLDSDGSFFLYSKLTVDKSRWQQGNVFSCSVMHEALHNHYTQKSLSLSPGKGGGGSGGGGSGGGGSGGGGSGGGGSGGGGSDKTHTCPPCPAPELLGGPSVFLFPPKPKDTLMISRTPEVTCVVVDVSHEDPEVKFNWYVDGVEVHNAKTKPCEEQYGSTYRCVSVLTVLHQDWLNGKEYKCKVSNKALPAPIEKTISKAKGQPREPQVYTLPPSREEMTKNQVSLTCLVKGFYPSDIAVEWESNGQPENNYKTTPPVLDSDGSFFLYSKLTVDKSRWQQGNVFSCSVMHEALHNHYTQKSLSLSPGK

SEQ ID NO: 1755 - protein, 485 aa, Artificial Sequence
  Synthetic
QVQLVQSGAEVKKPGASVKVSCKASGYTFTDYWMHWVRQAPGQCLEWMGYITPSSGYTDYNQKFKGRVTMTRDKSTSTVYMELSSLTSEDTAVYYCARNYLGRGYAMDYWGQGTTVTVSSGGGGSGGGGSGGGGSDIQMTQSPSSLSASVGDRVTITCRASENIYSNLAWYQQKPGKAPKLLIYAATNLAEGVPSRFSGSGSGTDFTLTISSLQPEDFATYYCQHFYGTPLTFGCGTKLEIKSGGGGSQVQLQESGPGLVKPSETLSLTCTVSGGSISSFYWSWIRQPPGKCLEWIGRISSSGDVDYNPSLKSRVTISVDTSKNQFSLKLSSVTAADTAVYYCAREGGFYYWGQGTLVTVSSGGGGSGGGGSGGGGSEIVLTQSPGTLSLSPGERATLSCRASQSVSSSYLAWYQQKPGQAPRLLIYGASSRATGIPDRFSGSGSGTDFTLTISRLEPEDFAVYYCQQYGSSPITFGCGTKLEIK

SEQ ID NO: 1756 - protein, 740 aa, Artificial Sequence
  Synthetic
QVQLVQSGAEVKKPGASVKVSCKASGYTFTDYWMHWVRQAPGQCLEWMGYITPSSGYTDYNQKFKGRVTMTRDKSTSTVYMELSSLTSEDTAVYYCARNYLGRGYAMDYWGQGTTVTVSSGGGGSGGGGSGGGGSDIQMTQSPSSLSASVGDRVTITCRASENIYSNLAWYQQKPGKAPKLLIYAATNLAEGVPSRFSGSGSGTDFTLTISSLQPEDFATYYCQHFYGTPLTFGCGTKLEIKSGGGGSQVQLQESGPGLVKPSETLSLTCTVSGGSISSFYWSWIRQPPGKCLEWIGRISSSGDVDYNPSLKSRVTISVDTSKNQFSLKLSSVTAADTAVYYCAREGGFYYWGQGTLVTVSSGGGGSGGGGSGGGGSEIVLTQSPGTLSLSPGERATLSCRASQSVSSSYLAWYQQKPGQAPRLLIYGASSRATGIPDRFSGSGSGTDFTLTISRLEPEDFAVYYCQQYGSSPITFGCGTKLEIKSGGGGSEVQLVESGGGLVQPGGSLKLSCAASGFTFNKYAMNWVRQAPGKGLEWVARIRSKYNNYATYYADSVKDRFTISRDDSKNTAYLQMNNLKTEDTAVYYCVRHGNFGNSYISYWAYWGQGTLVTVSSGGGGSGGGGSGGGGSQTVVTQEPSLTVSPGGTVTLTCGSSTGAVTSGNYPNWVQQKPGQAPRGLIGGTKFLAPGTPARFSGSLLGGKAALTLSGVQPEDEAEYYCVLWYSNRWVFGGGTKLTVL

SEQ ID NO: 1757 - protein, 1228 aa, Artificial Sequence
  Synthetic
QVQLVQSGAEVKKPGASVKVSCKASGYTFTDYWMHWVRQAPGQCLEWMGYITPSSGYTDYNQKFKGRVTMTRDKSTSTVYMELSSLTSEDTAVYYCARNYLGRGYAMDYWGQGTTVTVSSGGGGSGGGGSGGGGSDIQMTQSPSSLSASVGDRVTITCRASENIYSNLAWYQQKPGKAPKLLIYAATNLAEGVPSRFSGSGSGTDFTLTISSLQPEDFATYYCQHFYGTPLTFGCGTKLEIKSGGGGSQVQLQESGPGLVKPSETLSLTCTVSGGSISSFYWSWIRQPPGKCLEWIGRISSSGDVDYNPSLKSRVTISVDTSKNQFSLKLSSVTAADTAVYYCAREGGFYYWGQGTLVTVSSGGGGSGGGGSGGGGSEIVLTQSPGTLSLSPGERATLSCRASQSVSSSYLAWYQQKPGQAPRLLIYGASSRATGIPDRFSGSGSGTDFTLTISRLEPEDFAVYYCQQYGSSPITFGCGTKLEIKSGGGGSEVQLVESGGGLVQPGGSLKLSCAASGFTFNKYAMNWVRQAPGKGLEWVARIRSKYNNYATYYADSVKDRFTISRDDSKNTAYLQMNNLKTEDTAVYYCVRHGNFGNSYISYWAYWGQGTLVTVSSGGGGSGGGGSGGGGSQTVVTQEPSLTVSPGGTVTLTCGSSTGAVTSGNYPNWVQQKPGQAPRGLIGGTKFLAPGTPARFSGSLLGGKAALTLSGVQPEDEAEYYCVLWYSNRWVFGGGTKLTVLGGGGDKTHTCPPCPAPELLGGPSVFLFPPKPKDTLMISRTPEVTCVVVDVSHEDPEVKFNWYVDGVEVHNAKTKPCEEQYGSTYRCVSVLTVLHQDWLNGKEYKCKVSNKALPAPIEKTISKAKGQPREPQVYTLPPSREEMTKNQVSLTCLVKGFYPSDIAVEWESNGQPENNYKTTPPVLDSDGSFFLYSKLTVDKSRWQQGNVFSCSVMHEALHNHYTQKSLSLSPGKGGGGSGGGGSGGGGSGGGGSGGGGSGGGGSDKTHTCPPCPAPELLGGPSVFLFPPKPKDTLMISRTPEVTCVVVDVSHEDPEVKFNWYVDGVEVHNAKTKPCEEQYGSTYRCVSVLTVLHQDWLNGKEYKCKVSNKALPAPIEKTISKAKGQPREPQVYTLPPSREEMTKNQVSLTCLVKGFYPSDIAVEWESNGQPENNYKTTPPVLDSDGSFFLYSKLTVDKSRWQQGNVFSCSVMHEALHNHYTQKSLSLSPGK

SEQ ID NO: 1758 - protein, 493 aa, Artificial Sequence
  Synthetic
QVQLVQSGAEVKKPGASVKVSCKASGYTFTDYWMHWVRQAPGQCLEWMGYITPSSGYTDYNQKFKGRVTMTRDKSTSTVYMELSSLTSEDTAVYYCARNYLGRGYAMDYWGQGTTVTVSSGGGGSGGGGSGGGGSDIQMTQSPSSLSASVGDRVTITCRASENIYSNLAWYQQKPGKAPKLLIYAATNLAEGVPSRFSGSGSGTDFTLTISSLQPEDFATYYCQHFYGTPLTFGCGTKLEIKSGGGGSQVQLVQSGAEVKKPGASVKVSCKASGYTFTSYGISWVRQAPGQCLEWMGWISAYSGNAIYAQKLQGRVTMTRDTSTSTAYMELRSLRSDDTAVYYCARDPDYYGSGSYSDYWGQGTLVTVSSGGGGSGGGGSGGGGSEIVLTQSPATLSVSPGERATLSCRASQSVSSNLAWYQQKPGQAPRLLIYGASSRATGIPARFSGSGSGTEFTLTISSLQSEDFAVYYCQQYHSWPLLTFGCGTKVEIK

SEQ ID NO: 1759 - protein, 748 aa, Artificial Sequence
  Synthetic
QVQLVQSGAEVKKPGASVKVSCKASGYTFTDYWMHWVRQAPGQCLEWMGYITPSSGYTDYNQKFKGRVTMTRDKSTSTVYMELSSLTSEDTAVYYCARNYLGRGYAMDYWGQGTTVTVSSGGGGSGGGGSGGGGSDIQMTQSPSSLSASVGDRVTITCRASENIYSNLAWYQQKPGKAPKLLIYAATNLAEGVPSRFSGSGSGTDFTLTISSLQPEDFATYYCQHFYGTPLTFGCGTKLEIKSGGGGSQVQLVQSGAEVKKPGASVKVSCKASGYTFTSYGISWVRQAPGQCLEWMGWISAYSGNAIYAQKLQGRVTMTRDTSTSTAYMELRSLRSDDTAVYYCARDPDYYGSGSYSDYWGQGTLVTVSSGGGGSGGGGSGGGGSEIVLTQSPATLSVSPGERATLSCRASQSVSSNLAWYQQKPGQAPRLLIYGASSRATGIPARFSGSGSGTEFTLTISSLQSEDFAVYYCQQYHSWPLLTFGCGTKVEIKSGGGGSEVQLVESGGGLVQPGGSLKLSCAASGFTFNKYAMNWVRQAPGKGLEWVARIRSKYNNYATYYADSVKDRFTISRDDSKNTAYLQMNNLKTEDTAVYYCVRHGNFGNSYISYWAYWGQGTLVTVSSGGGGSGGGGSGGGGSQTVVTQEPSLTVSPGGTVTLTCGSSTGAVTSGNYPNWVQQKPGQAPRGLIGGTKFLAPGTPARFSGSLLGGKAALTLSGVQPEDEAEYYCVLWYSNRWVFGGGTKLTVL

SEQ ID NO: 1760 - protein, 1236 aa, Artificial Sequence
  Synthetic
QVQLVQSGAEVKKPGASVKVSCKASGYTFTDYWMHWVRQAPGQCLEWMGYITPSSGYTDYNQKFKGRVTMTRDKSTSTVYMELSSLTSEDTAVYYCARNYLGRGYAMDYWGQGTTVTVSSGGGGSGGGGSGGGGSDIQMTQSPSSLSASVGDRVTITCRASENIYSNLAWYQQKPGKAPKLLIYAATNLAEGVPSRFSGSGSGTDFTLTISSLQPEDFATYYCQHFYGTPLTFGCGTKLEIKSGGGGSQVQLVQSGAEVKKPGASVKVSCKASGYTFTSYGISWVRQAPGQCLEWMGWISAYSGNAIYAQKLQGRVTMTRDTSTSTAYMELRSLRSDDTAVYYCARDPDYYGSGSYSDYWGQGTLVTVSSGGGGSGGGGSGGGGSEIVLTQSPATLSVSPGERATLSCRASQSVSSNLAWYQQKPGQAPRLLIYGASSRATGIPARFSGSGSGTEFTLTISSLQSEDFAVYYCQQYHSWPLLTFGCGTKVEIKSGGGGSEVQLVESGGGLVQPGGSLKLSCAASGFTFNKYAMNWVRQAPGKGLEWVARIRSKYNNYATYYADSVKDRFTISRDDSKNTAYLQMNNLKTEDTAVYYCVRHGNFGNSYISYWAYWGQGTLVTVSSGGGGSGGGGSGGGGSQTVVTQEPSLTVSPGGTVTLTCGSSTGAVTSGNYPNWVQQKPGQAPRGLIGGTKFLAPGTPARFSGSLLGGKAALTLSGVQPEDEAEYYCVLWYSNRWVFGGGTKLTVLGGGGDKTHTCPPCPAPELLGGPSVFLFPPKPKDTLMISRTPEVTCVVVDVSHEDPEVKFNWYVDGVEVHNAKTKPCEEQYGSTYRCVSVLTVLHQDWLNGKEYKCKVSNKALPAPIEKTISKAKGQPREPQVYTLPPSREEMTKNQVSLTCLVKGFYPSDIAVEWESNGQPENNYKTTPPVLDSDGSFFLYSKLTVDKSRWQQGNVFSCSVMHEALHNHYTQKSLSLSPGKGGGGSGGGGSGGGGSGGGGSGGGGSGGGGSDKTHTCPPCPAPELLGGPSVFLFPPKPKDTLMISRTPEVTCVVVDVSHEDPEVKFNWYVDGVEVHNAKTKPCEEQYGSTYRCVSVLTVLHQDWLNGKEYKCKVSNKALPAPIEKTISKAKGQPREPQVYTLPPSREEMTKNQVSLTCLVKGFYPSDIAVEWESNGQPENNYKTTPPVLDSDGSFFLYSKLTVDKSRWQQGNVFSCSVMHEALHNHYTQKSLSLSPGK

SEQ ID NO: 1761 - protein, 493 aa, Artificial Sequence
  Synthetic
QVQLVQSGAEVKKPGASVKVSCKASGYTFTDYWMHWVRQAPGQCLEWMGYITPSSGYTDYNQKFKGRVTMTRDKSTSTVYMELSSLTSEDTAVYYCARNYLGRGYAMDYWGQGTTVTVSSGGGGSGGGGSGGGGSDIQMTQSPSSLSASVGDRVTITCRASENIYSNLAWYQQKPGKAPKLLIYAATNLAEGVPSRFSGSGSGTDFTLTISSLQPEDFATYYCQHFYGTPLTFGCGTKLEIKSGGGGSQVQLVQSGAEVKKPGASVKVSCKASGYTFTSYGISWVRQAPGQCLEWMGWISAYNGQTIYAQKLQGRVTMTRDTSTSTAYMELRSLRSDDTAVYYCARDPDYYGSGSYSDYWGQGTLVTVSSGGGGSGGGGSGGGGSEIVMTQSPATLSVSPGERATLSCRASQSVSSNLAWYQQKPGQAPRLLIYGASNRATGIPARFSGSGSGTEFTLTISSLQSEDFAVYYCQQYHSWPLLTFGCGTKVEIK

SEQ ID NO: 1762 - protein, 756 aa, Artificial Sequence
  Synthetic
QVQLVQSGAEVKKPGASVKVSCKASGYTFTDYWMHWVRQAPGQCLEWMGYITPSSGYTDYNQKFKGRVTMTRDKSTSTVYMELSSLTSEDTAVYYCARNYLGRGYAMDYWGQGTTVTVSSGGGGSGGGGSGGGGSDIQMTQSPSSLSASVGDRVTITCRASENIYSNLAWYQQKPGKAPKLLIYAATNLAEGVPSRFSGSGSGTDFTLTISSLQPEDFATYYCQHFYGTPLTFGCGTKLEIKSGGGGSQVQLVESGGGVVQPGRSLRLSCAASGFTFSNYGMHWVRQAPGKCLEWVAVISYEASNKNYADAVKGRFTISRDNSKNTLYLQMNSLRAEDTAVYYCARDRFGDYSGYYYYYGMDVWGQGTTVTVSSGGGGSGGGGSGGGGSDIVMTQTPLSLPVTPGQPASISCRSSQSLLHSSGKTYLDWYLQKPGQSPQLLIYLGSNRASGVPDRFSGSGSGTDFTLKISRVEAEDVGVYYCMQATQTPFTFGCGTKVEIKSGGGGSEVQLVESGGGLVQPGGSLKLSCAASGFTFNKYAMNWVRQAPGKGLEWVARIRSKYNNYATYYADSVKDRFTISRDDSKNTAYLQMNNLKTEDTAVYYCVRHGNFGNSYISYWAYWGQGTLVTVSSGGGGSGGGGSGGGGSQTVVTQEPSLTVSPGGTVTLTCGSSTGAVTSGNYPNWVQQKPGQAPRGLIGGTKFLAPGTPARFSGSLLGGKAALTLSGVQPEDEAEYYCVLWYSNRWVFGGGTKLTVL

SEQ ID NO: 1763 - protein, 1236 aa, Artificial Sequence
  Synthetic
QVQLVQSGAEVKKPGASVKVSCKASGYTFTDYWMHWVRQAPGQCLEWMGYITPSSGYTDYNQKFKGRVTMTRDKSTSTVYMELSSLTSEDTAVYYCARNYLGRGYAMDYWGQGTTVTVSSGGGGSGGGGSGGGGSDIQMTQSPSSLSASVGDRVTITCRASENIYSNLAWYQQKPGKAPKLLIYAATNLAEGVPSRFSGSGSGTDFTLTISSLQPEDFATYYCQHFYGTPLTFGCGTKLEIKSGGGGSQVQLVQSGAEVKKPGASVKVSCKASGYTFTSYGISWVRQAPGQCLEWMGWISAYNGQTIYAQKLQGRVTMTRDTSTSTAYMELRSLRSDDTAVYYCARDPDYYGSGSYSDYWGQGTLVTVSSGGGGSGGGGSGGGGSEIVMTQSPATLSVSPGERATLSCRASQSVSSNLAWYQQKPGQAPRLLIYGASNRATGIPARFSGSGSGTEFTLTISSLQSEDFAVYYCQQYHSWPLLTFGCGTKVEIKSGGGGSEVQLVESGGGLVQPGGSLKLSCAASGFTFNKYAMNWVRQAPGKGLEWVARIRSKYNNYATYYADSVKDRFTISRDDSKNTAYLQMNNLKTEDTAVYYCVRHGNFGNSYISYWAYWGQGTLVTVSSGGGGSGGGGSGGGGSQTVVTQEPSLTVSPGGTVTLTCGSSTGAVTSGNYPNWVQQKPGQAPRGLIGGTKFLAPGTPARFSGSLLGGKAALTLSGVQPEDEAEYYCVLWYSNRWVFGGGTKLTVLGGGGDKTHTCPPCPAPELLGGPSVFLFPPKPKDTLMISRTPEVTCVVVDVSHEDPEVKFNWYVDGVEVHNAKTKPCEEQYGSTYRCVSVLTVLHQDWLNGKEYKCKVSNKALPAPIEKTISKAKGQPREPQVYTLPPSREEMTKNQVSLTCLVKGFYPSDIAVEWESNGQPENNYKTTPPVLDSDGSFFLYSKLTVDKSRWQQGNVFSCSVMHEALHNHYTQKSLSLSPGKGGGGSGGGGSGGGGSGGGGSGGGGSGGGGSDKTHTCPPCPAPELLGGPSVFLFPPKPKDTLMISRTPEVTCVVVDVSHEDPEVKFNWYVDGVEVHNAKTKPCEEQYGSTYRCVSVLTVLHQDWLNGKEYKCKVSNKALPAPIEKTISKAKGQPREPQVYTLPPSREEMTKNQVSLTCLVKGFYPSDIAVEWESNGQPENNYKTTPPVLDSDGSFFLYSKLTVDKSRWQQGNVFSCSVMHEALHNHYTQKSLSLSPGK

SEQ ID NO: 1764 - protein, 501 aa, Artificial Sequence
  Synthetic
QVQLVQSGAEVKKPGASVKVSCKASGYTFTDYWMHWVRQAPGQCLEWMGYITPSSGYTDYNQKFKGRVTMTRDKSTSTVYMELSSLTSEDTAVYYCARNYLGRGYAMDYWGQGTTVTVSSGGGGSGGGGSGGGGSDIQMTQSPSSLSASVGDRVTITCRASENIYSNLAWYQQKPGKAPKLLIYAATNLAEGVPSRFSGSGSGTDFTLTISSLQPEDFATYYCQHFYGTPLTFGCGTKLEIKSGGGGSQVQLVESGGGVVQPGRSLRLSCAASGFTFSNYGMHWVRQAPGKCLEWVAVISYEASNKNYADAVKGRFTISRDNSKNTLYLQMNSLRAEDTAVYYCARDRFGDYSGYYYYYGMDVWGQGTTVTVSSGGGGSGGGGSGGGGSDIVMTQTPLSLPVTPGQPASISCRSSQSLLHSSGKTYLDWYLQKPGQSPQLLIYLGSNRASGVPDRFSGSGSGTDFTLKISRVEAEDVGVYYCMQATQTPFTFGCGTKVEIK

SEQ ID NO: 1765 - protein, 756 aa, Artificial Sequence; identical to SEQ ID NO: 1762
  Synthetic

SEQ ID NO: 1766 - protein, 1236 aa, Artificial Sequence; identical to SEQ ID NO: 1763
  Synthetic

SEQ ID NO: 1767 - protein, 488 aa, Artificial Sequence
  Synthetic
QVQLVQSGAVVKKPGASVKVSCKASGYTFTSYWMHWVRQRPGQCLEWMGYISPNSGYTDYHQKFKGRVTMTRDKSISTAYMELSRLTSDDTAVYYCARDPMDYWGQGTLVTVSSGGGGSGGGGSGGGGSEIVLTQSPDFQSVTPKEKVTITCSASSSVNYMHWYQQKPDSSPKLLIKRTSNLASGVPSRFSGSGSGTDFTLTINSLEAEDAATYYCQQWSSYPPTFGCGTKLEIKSGGGGSQVQLVESGGGVVQPGRSLRLSCAASGFTFSNYGMHWVRQAPGKCLEWVAVISYDAWFSQYADAVKGRFTVSRDNSKNTLYLQMNSLRAEDTAVYYCARDLITFGGHYYFGMDVWGQGTTVTVSSGGGGSGGGGSGGGGSEIVLTQSPGTLSLSPGERATLSCRASQSVSSNYLAWYQQKPGQAPRLLIYAASSRVTGIPDRFSGSGSGTDFTLTISRLEPEDFAVYYCQQYGSSPFTFGCGTKVEIK

SEQ ID NO: 1768 - protein, 743 aa, Artificial Sequence
  Synthetic
QVQLVQSGAVVKKPGASVKVSCKASGYTFTSYWMHWVRQRPGQCLEWMGYISPNSGYTDYHQKFKGRVTMTRDKSISTAYMELSRLTSDDTAVYYCARDPMDYWGQGTLVTVSSGGGGSGGGGSGGGGSEIVLTQSPDFQSVTPKEKVTITCSASSSVNYMHWYQQKPDSSPKLLIKRTSNLASGVPSRFSGSGSGTDFTLTINSLEAEDAATYYCQQWSSYPPTFGCGTKLEIKSGGGGSQVQLVESGGGVVQPGRSLRLSCAASGFTFSNYGMHWVRQAPGKCLEWVAVISYDAWFSQYADAVKGRFTVSRDNSKNTLYLQMNSLRAEDTAVYYCARDLITFGGHYYFGMDVWGQGTTVTVSSGGGGSGGGGSGGGGSEIVLTQSPGTLSLSPGERATLSCRASQSVSSNYLAWYQQKPGQAPRLLIYAASSRVTGIPDRFSGSGSGTDFTLTISRLEPEDFAVYYCQQYGSSPFTFGCGTKVEIKSGGGGSEVQLVESGGGLVQPGGSLKLSCAASGFTFNKYAMNWVRQAPGKGLEWVARIRSKYNNYATYYADSVKDRFTISRDDSKNTAYLQMNNLKTEDTAVYYCVRHGNFGNSYISYWAYWGQGTLVTVSSGGGGSGGGGSGGGGSQTVVTQEPSLTVSPGGTVTLTCGSSTGAVTSGNYPNWVQQKPGQAPRGLIGGTKFLAPGTPARFSGSLLGGKAALTLSGVQPEDEAEYYCVLWYSNRWVFGGGTKLTVL

SEQ ID NO: 1769 - protein, 1244 aa, Artificial Sequence
  Synthetic
QVQLVQSGAEVKKPGASVKVSCKASGYTFTDYWMHWVRQAPGQCLEWMGYITPSSGYTDYNQKFKGRVTMTRDKSTSTVYMELSSLTSEDTAVYYCARNYLGRGYAMDYWGQGTTVTVSSGGGGSGGGGSGGGGSDIQMTQSPSSLSASVGDRVTITCRASENIYSNLAWYQQKPGKAPKLLIYAATNLAEGVPSRFSGSGSGTDFTLTISSLQPEDFATYYCQHFYGTPLTFGCGTKLEIKSGGGGSQVQLVESGGGVVQPGRSLRLSCAASGFTFSNYGMHWVRQAPGKCLEWVAVISYEASNKNYADAVKGRFTISRDNSKNTLYLQMNSLRAEDTAVYYCARDRFGDYSGYYYYYGMDVWGQGTTVTVSSGGGGSGGGGSGGGGSDIVMTQTPLSLPVTPGQPASISCRSSQSLLHSSGKTYLDWYLQKPGQSPQLLIYLGSNRASGVPDRFSGSGSGTDFTLKISRVEAEDVGVYYCMQATQTPFTFGCGTKVEIKSGGGGSEVQLVESGGGLVQPGGSLKLSCAASGFTFNKYAMNWVRQAPGKGLEWVARIRSKYNNYATYYADSVKDRFTISRDDSKNTAYLQMNNLKTEDTAVYYCVRHGNFGNSYISYWAYWGQGTLVTVSSGGGGSGGGGSGGGGSQTVVTQEPSLTVSPGGTVTLTCGSSTGAVTSGNYPNWVQQKPGQAPRGLIGGTKFLAPGTPARFSGSLLGGKAALTLSGVQPEDEAEYYCVLWYSNRWVFGGGTKLTVLGGGGDKTHTCPPCPAPELLGGPSVFLFPPKPKDTLMISRTPEVTCVVVDVSHEDPEVKFNWYVDGVEVHNAKTKPCEEQYGSTYRCVSVLTVLHQDWLNGKEYKCKVSNKALPAPIEKTISKAKGQPREPQVYTLPPSREEMTKNQVSLTCLVKGFYPSDIAVEWESNGQPENNYKTTPPVLDSDGSFFLYSKLTVDKSRWQQGNVFSCSVMHEALHNHYTQKSLSLSPGKGGGGSGGGGSGGGGSGGGGSGGGGSGGGGSDKTHTCPPCPAPELLGGPSVFLFPPKPKDTLMISRTPEVTCVVVDVSHEDPEVKFNWYVDGVEVHNAKTKPCEEQYGSTYRCVSVLTVLHQDWLNGKEYKCKVSNKALPAPIEKTISKAKGQPREPQVYTLPPSREEMTKNQVSLTCLVKGFYPSDIAVEWESNGQPENNYKTTPPVLDSDGSFFLYSKLTVDKSRWQQGNVFSCSVMHEALHNHYTQKSLSLSPGK

SEQ ID NO: 1770 - protein, 478 aa, Artificial Sequence
  Synthetic
QVQLVQSGAVVKKPGASVKVSCKASGYTFTSYWMHWVRQRPGQCLEWMGYISPNSGYTDYHQKFKGRVTMTRDKSISTAYMELSRLTSDDTAVYYCARDPMDYWGQGTLVTVSSGGGGSGGGGSGGGGSEIVLTQSPDFQSVTPKEKVTITCSASSSVNYMHWYQQKPDSSPKLLIKRTSNLASGVPSRFSGSGSGTDFTLTINSLEAEDAATYYCQQWSSYPPTFGCGTKLEIKSGGGGSQVQLQESGPGLVKPSETLSLTCTVSGGSISSFYWSWIRQPPGKCLEWIGRISSSGDVDYNPSLKSRVTISVDTSKNQFSLKLSSVTAADTAVYYCAREGGFYYWGQGTLVTVSSGGGGSGGGGSGGGGSEIVLTQSPGTLSLSPGERATLSCRASQSVSSSYLAWYQQKPGQAPRLLIYGASSRATGIPDRFSGSGSGTDFTLTISRLEPEDFAVYYCQQYGSSPITFGCGTKLEIK

SEQ ID NO: 1771 - protein, 733 aa, Artificial Sequence
  Synthetic
QVQLVQSGAVVKKPGASVKVSCKASGYTFTSYWMHWVRQRPGQCLEWMGYISPNSGYTDYHQKFKGRVTMTRDKSISTAYMELSRLTSDDTAVYYCARDPMDYWGQGTLVTVSSGGGGSGGGGSGGGGSEIVLTQSPDFQSVTPKEKVTITCSASSSVNYMHWYQQKPDSSPKLLIKRTSNLASGVPSRFSGSGSGTDFTLTINSLEAEDAATYYCQQWSSYPPTFGCGTKLEIKSGGGGSQVQLQESGPGLVKPSETLSLTCTVSGGSISSFYWSWIRQPPGKCLEWIGRISSSGDVDYNPSLKSRVTISVDTSKNQFSLKLSSVTAADTAVYYCAREGGFYYWGQGTLVTVSSGGGGSGGGGSGGGGSEIVLTQSPGTLSLSPGERATLSCRASQSVSSSYLAWYQQKPGQAPRLLIYGASSRATGIPDRFSGSGSGTDFTLTISRLEPEDFAVYYCQQYGSSPITFGCGTKLEIKSGGGGSEVQLVESGGGLVQPGGSLKLSCAASGFTFNKYAMNWVRQAPGKGLEWVARIRSKYNNYATYYADSVKDRFTISRDDSKNTAYLQMNNLKTEDTAVYYCVRHGNFGNSYISYWAYWGQGTLVTVSSGGGGSGGGGSGGGGSQTVVTQEPSLTVSPGGTVTLTCGSSTGAVTSGNYPNWVQQKPGQAPRGLIGGTKFLAPGTPARFSGSLLGGKAALTLSGVQPEDEAEYYCVLWYSNRWVFGGGTKLTVL

SEQ ID NO: 1772 - protein, 1221 aa, Artificial Sequence
  Synthetic
QVQLVQSGAVVKKPGASVKVSCKASGYTFTSYWMHWVRQRPGQCLEWMGYISPNSGYTDYHQKFKGRVTMTRDKSISTAYMELSRLTSDDTAVYYCARDPMDYWGQGTLVTVSSGGGGSGGGGSGGGGSEIVLTQSPDFQSVTPKEKVTITCSASSSVNYMHWYQQKPDSSPKLLIKRTSNLASGVPSRFSGSGSGTDFTLTINSLEAEDAATYYCQQWSSYPPTFGCGTKLEIKSGGGGSQVQLQESGPGLVKPSETLSLTCTVSGGSISSFYWSWIRQPPGKCLEWIGRISSSGDVDYNPSLKSRVTISVDTSKNQFSLKLSSVTAADTAVYYCAREGGFYYWGQGTLVTVSSGGGGSGGGGSGGGGSEIVLTQSPGTLSLSPGERATLSCRASQSVSSSYLAWYQQKPGQAPRLLIYGASSRATGIPDRFSGSGSGTDFTLTISRLEPEDFAVYYCQQYGSSPITFGCGTKLEIKSGGGGSEVQLVESGGGLVQPGGSLKLSCAASGFTFNKYAMNWVRQAPGKGLEWVARIRSKYNNYATYYADSVKDRFTISRDDSKNTAYLQMNNLKTEDTAVYYCVRHGNFGNSYISYWAYWGQGTLVTVSSGGGGSGGGGSGGGGSQTVVTQEPSLTVSPGGTVTLTCGSSTGAVTSGNYPNWVQQKPGQAPRGLIGGTKFLAPGTPARFSGSLLGGKAALTLSGVQPEDEAEYYCVLWYSNRWVFGGGTKLTVLGGGGDKTHTCPPCPAPELLGGPSVFLFPPKPKDTLMISRTPEVTCVVVDVSHEDPEVKFNWYVDGVEVHNAKTKPCEEQYGSTYRCVSVLTVLHQDWLNGKEYKCKVSNKALPAPIEKTISKAKGQPREPQVYTLPPSREEMTKNQVSLTCLVKGFYPSDIAVEWESNGQPENNYKTTPPVLDSDGSFFLYSKLTVDKSRWQQGNVFSCSVMHEALHNHYTQKSLSLSPGKGGGGSGGGGSGGGGSGGGGSGGGGSGGGGSDKTHTCPPCPAPELLGGPSVFLFPPKPKDTLMISRTPEVTCVVVDVSHEDPEVKFNWYVDGVEVHNAKTKPCEEQYGSTYRCVSVLTVLHQDWLNGKEYKCKVSNKALPAPIEKTISKAKGQPREPQVYTLPPSREEMTKNQVSLTCLVKGFYPSDIAVEWESNGQPENNYKTTPPVLDSDGSFFLYSKLTVDKSRWQQGNVFSCSVMHEALHNHYTQKSLSLSPGK

SEQ ID NO: 1773 - protein, 486 aa, Artificial Sequence
  Synthetic
QVQLVQSGAVVKKPGASVKVSCKASGYTFTSYWMHWVRQRPGQCLEWMGYISPNSGYTDYHQKFKGRVTMTRDKSISTAYMELSRLTSDDTAVYYCARDPMDYWGQGTLVTVSSGGGGSGGGGSGGGGSEIVLTQSPDFQSVTPKEKVTITCSASSSVNYMHWYQQKPDSSPKLLIKRTSNLASGVPSRFSGSGSGTDFTLTINSLEAEDAATYYCQQWSSYPPTFGCGTKLEIKSGGGGSQVQLVQSGAEVKKPGASVKVSCKASGYTFTSYGISWVRQAPGQCLEWMGWISAYSGNAIYAQKLQGRVTMTRDTSTSTAYMELRSLRSDDTAVYYCARDPDYYGSGSYSDYWGQGTLVTVSSGGGGSGGGGSGGGGSEIVLTQSPATLSVSPGERATLSCRASQSVSSNLAWYQQKPGQAPRLLIYGASSRATGIPARFSGSGSGTEFTLTISSLQSEDFAVYYCQQYHSWPLLTFGCGTKVEIK

SEQ ID NO: 1774 - protein, 741 aa, Artificial Sequence
  Synthetic
QVQLVQSGAVVKKPGASVKVSCKASGYTFTSYWMHWVRQRPGQCLEWMGYISPNSGYTDYHQKFKGRVTMTRDKSISTAYMELSRLTSDDTAVYYCARDPMDYWGQGTLVTVSSGGGGSGGGGSGGGGSEIVLTQSPDFQSVTPKEKVTITCSASSSVNYMHWYQQKPDSSPKLLIKRTSNLASGVPSRFSGSGSGTDFTLTINSLEAEDAATYYCQQWSSYPPTFGCGTKLEIKSGGGGSQVQLVQSGAEVKKPGASVKVSCKASGYTFTSYGISWVRQAPGQCLEWMGWISAYSGNAIYAQKLQGRVTMTRDTSTSTAYMELRSLRSDDTAVYYCARDPDYYGSGSYSDYWGQGTLVTVSSGGGGSGGGGSGGGGSEIVLTQSPATLSVSPGERATLSCRASQSVSSNLAWYQQKPGQAPRLLIYGASSRATGIPARFSGSGSGTEFTLTISSLQSEDFAVYYCQQYHSWPLLTFGCGTKVEIKSGGGGSEVQLVESGGGLVQPGGSLKLSCAASGFTFNKYAMNWVRQAPGKGLEWVARIRSKYNNYATYYADSVKDRFTISRDDSKNTAYLQMNNLKTEDTAVYYCVRHGNFGNSYISYWAYWGQGTLVTVSSGGGGSGGGGSGGGGSQTVVTQEPSLTVSPGGTVTLTCGSSTGAVTSGNYPNWVQQKPGQAPRGLIGGTKFLAPGTPARFSGSLLGGKAALTLSGVQPEDEAEYYCVLWYSNRWVFGGGTKLTVL

SEQ ID NO: 1775 - protein, 1229 aa, Artificial Sequence
  Synthetic
QVQLVQSGAVVKKPGASVKVSCKASGYTFTSYWMHWVRQRPGQCLEWMGYISPNSGYTDYHQKFKGRVTMTRDKSISTAYMELSRLTSDDTAVYYCARDPMDYWGQGTLVTVSSGGGGSGGGGSGGGGSEIVLTQSPDFQSVTPKEKVTITCSASSSVNYMHWYQQKPDSSPKLLIKRTSNLASGVPSRFSGSGSGTDFTLTINSLEAEDAATYYCQQWSSYPPTFGCGTKLEIKSGGGGSQVQLVQSGAEVKKPGASVKVSCKASGYTFTSYGISWVRQAPGQCLEWMGWISAYSGNAIYAQKLQGRVTMTRDTSTSTAYMELRSLRSDDTAVYYCARDPDYYGSGSYSDYWGQGTLVTVSSGGGGSGGGGSGGGGSEIVLTQSPATLSVSPGERATLSCRASQSVSSNLAWYQQKPGQAPRLLIYGASSRATGIPARFSGSGSGTEFTLTISSLQSEDFAVYYCQQYHSWPLLTFGCGTKVEIKSGGGGSEVQLVESGGGLVQPGGSLKLSCAASGFTFNKYAMNWVRQAPGKGLEWVARIRSKYNNYATYYADSVKDRFTISRDDSKNTAYLQMNNLKTEDTAVYYCVRHGNFGNSYISYWAYWGQGTLVTVSSGGGGSGGGGSGGGGSQTVVTQEPSLTVSPGGTVTLTCGSSTGAVTSGNYPNWVQQKPGQAPRGLIGGTKFLAPGTPARFSGSLLGGKAALTLSGVQPEDEAEYYCVLWYSNRWVFGGGTKLTVLGGGGDKTHTCPPCPAPELLGGPSVFLFPPKPKDTLMISRTPEVTCVVVDVSHEDPEVKFNWYVDGVEVHNAKTKPCEEQYGSTYRCVSVLTVLHQDWLNGKEYKCKVSNKALPAPIEKTISKAKGQPREPQVYTLPPSREEMTKNQVSLTCLVKGFYPSDIAVEWESNGQPENNYKTTPPVLDSDGSFFLYSKLTVDKSRWQQGNVFSCSVMHEALHNHYTQKSLSLSPGKGGGGSGGGGSGGGGSGGGGSGGGGSGGGGSDKTHTCPPCPAPELLGGPSVFLFPPKPKDTLMISRTPEVTCVVVDVSHEDPEVKFNWYVDGVEVHNAKTKPCEEQYGSTYRCVSVLTVLHQDWLNGKEYKCKVSNKALPAPIEKTISKAKGQPREPQVYTLPPSREEMTKNQVSLTCLVKGFYPSDIAVEWESNGQPENNYKTTPPVLDSDGSFFLYSKLTVDKSRWQQGNVFSCSVMHEALHNHYTQKSLSLSPGK

SEQ ID NO: 1776 - protein, 486 aa, Artificial Sequence
  Synthetic
QVQLVQSGAVVKKPGASVKVSCKASGYTFTSYWMHWVRQRPGQCLEWMGYISPNSGYTDYHQKFKGRVTMTRDKSISTAYMELSRLTSDDTAVYYCARDPMDYWGQGTLVTVSSGGGGSGGGGSGGGGSEIVLTQSPDFQSVTPKEKVTITCSASSSVNYMHWYQQKPDSSPKLLIKRTSNLASGVPSRFSGSGSGTDFTLTINSLEAEDAATYYCQQWSSYPPTFGCGTKLEIKSGGGGSQVQLVQSGAEVKKPGASVKVSCKASGYTFTSYGISWVRQAPGQCLEWMGWISAYNGQTIYAQKLQGRVTMTRDTSTSTAYMELRSLRSDDTAVYYCARDPDYYGSGSYSDYWGQGTLVTVSSGGGGSGGGGSGGGGSEIVMTQSPATLSVSPGERATLSCRASQSVSSNLAWYQQKPGQAPRLLIYGASNRATGIPARFSGSGSGTEFTLTISSLQSEDFAVYYCQQYHSWPLLTFGCGTKVEIK

SEQ ID NO: 1777 - protein, 741 aa, Artificial Sequence
  Synthetic
QVQLVQSGAVVKKPGASVKVSCKASGYTFTSYWMHWVRQRPGQCLEWMGYISPNSGYTDYHQKFKGRVTMTRDKSISTAYMELSRLTSDDTAVYYCARDPMDYWGQGTLVTVSSGGGGSGGGGSGGGGSEIVLTQSPDFQSVTPKEKVTITCSASSSVNYMHWYQQKPDSSPKLLIKRTSNLASGVPSRFSGSGSGTDFTLTINSLEAEDAATYYCQQWSSYPPTFGCGTKLEIKSGGGGSQVQLVQSGAEVKKPGASVKVSCKASGYTFTSYGISWVRQAPGQCLEWMGWISAYNGQTIYAQKLQGRVTMTRDTSTSTAYMELRSLRSDDTAVYYCARDPDYYGSGSYSDYWGQGTLVTVSSGGGGSGGGGSGGGGSEIVMTQSPATLSVSPGERATLSCRASQSVSSNLAWYQQKPGQAPRLLIYGASNRATGIPARFSGSGSGTEFTLTISSLQSEDFAVYYCQQYHSWPLLTFGCGTKVEIKSGGGGSEVQLVESGGGLVQPGGSLKLSCAASGFTFNKYAMNWVRQAPGKGLEWVARIRSKYNNYATYYADSVKDRFTISRDDSKNTAYLQMNNLKTEDTAVYYCVRHGNFGNSYISYWAYWGQGTLVTVSSGGGGSGGGGSGGGGSQTVVTQEPSLTVSPGGTVTLTCGSSTGAVTSGNYPNWVQQKPGQAPRGLIGGTKFLAPGTPARFSGSLLGGKAALTLSGVQPEDEAEYYCVLWYSNRWVFGGGTKLTVL

SEQ ID NO: 1778 - protein, 1229 aa, Artificial Sequence
  Synthetic
QVQLVQSGAVVKKPGASVKVSCKASGYTFTSYWMHWVRQRPGQCLEWMGYISPNSGYTDYHQKFKGRVTMTRDKSISTAYMELSRLTSDDTAVYYCARDPMDYWGQGTLVTVSSGGGGSGGGGSGGGGSEIVLTQSPDFQSVTPKEKVTITCSASSSVNYMHWYQQKPDSSPKLLIKRTSNLASGVPSRFSGSGSGTDFTLTINSLEAEDAATYYCQQWSSYPPTFGCGTKLEIKSGGGGSQVQLVQSGAEVKKPGASVKVSCKASGYTFTSYGISWVRQAPGQCLEWMGWISAYNGQTIYAQKLQGRVTMTRDTSTSTAYMELRSLRSDDTAVYYCARDPDYYGSGSYSDYWGQGTLVTVSSGGGGSGGGGSGGGGSEIVMTQSPATLSVSPGERATLSCRASQSVSSNLAWYQQKPGQAPRLLIYGASNRATGIPARFSGSGSGTEFTLTISSLQSEDFAVYYCQQYHSWPLLTFGCGTKVEIKSGGGGSEVQLVESGGGLVQPGGSLKLSCAASGFTFNKYAMNWVRQAPGKGLEWVARIRSKYNNYATYYADSVKDRFTISRDDSKNTAYLQMNNLKTEDTAVYYCVRHGNFGNSYISYWAYWGQGTLVTVSSGGGGSGGGGSGGGGSQTVVTQEPSLTVSPGGTVTLTCGSSTGAVTSGNYPNWVQQKPGQAPRGLIGGTKFLAPGTPARFSGSLLGGKAALTLSGVQPEDEAEYYCVLWYSNRWVFGGGTKLTVLGGGGDKTHTCPPCPAPELLGGPSVFLFPPKPKDTLMISRTPEVTCVVVDVSHEDPEVKFNWYVDGVEVHNAKTKPCEEQYGSTYRCVSVLTVLHQDWLNGKEYKCKVSNKALPAPIEKTISKAKGQPREPQVYTLPPSREEMTKNQVSLTCLVKGFYPSDIAVEWESNGQPENNYKTTPPVLDSDGSFFLYSKLTVDKSRWQQGNVFSCSVMHEALHNHYTQKSLSLSPGKGGGGSGGGGSGGGGSGGGGSGGGGSGGGGSDKTHTCPPCPAPELLGGPSVFLFPPKPKDTLMISRTPEVTCVVVDVSHEDPEVKFNWYVDGVEVHNAKTKPCEEQYGSTYRCVSVLTVLHQDWLNGKEYKCKVSNKALPAPIEKTISKAKGQPREPQVYTLPPSREEMTKNQVSLTCLVKGFYPSDIAVEWESNGQPENNYKTTPPVLDSDGSFFLYSKLTVDKSRWQQGNVFSCSVMHEALHNHYTQKSLSLSPGK

SEQ ID NO: 1779 - protein, 494 aa, Artificial Sequence
  Synthetic
QVQLVQSGAVVKKPGASVKVSCKASGYTFTSYWMHWVRQRPGQCLEWMGYISPNSGYTDYHQKFKGRVTMTRDKSISTAYMELSRLTSDDTAVYYCARDPMDYWGQGTLVTVSSGGGGSGGGGSGGGGSEIVLTQSPDFQSVTPKEKVTITCSASSSVNYMHWYQQKPDSSPKLLIKRTSNLASGVPSRFSGSGSGTDFTLTINSLEAEDAATYYCQQWSSYPPTFGCGTKLEIKSGGGGSQVQLVESGGGVVQPGRSLRLSCAASGFTFSNYGMHWVRQAPGKCLEWVAVISYEASNKNYADAVKGRFTISRDNSKNTLYLQMNSLRAEDTAVYYCARDRFGDYSGYYYYYGMDVWGQGTTVTVSSGGGGSGGGGSGGGGSDIVMTQTPLSLPVTPGQPASISCRSSQSLLHSSGKTYLDWYLQKPGQSPQLLIYLGSNRASGVPDRFSGSGSGTDFTLKISRVEAEDVGVYYCMQATQTPFTFGCGTKVEIK

SEQ ID NO: 1780 - skipped

SEQ ID NO: 1781 - protein, 1237 aa, Artificial Sequence
  Synthetic
QVQLVQSGAVVKKPGASVKVSCKASGYTFTSYWMHWVRQRPGQCLEWMGYISPNSGYTDYHQKFKGRVTMTRDKSISTAYMELSRLTSDDTAVYYCARDPMDYWGQGTLVTVSSGGGGSGGGGSGGGGSEIVLTQSPDFQSVTPKEKVTITCSASSSVNYMHWYQQKPDSSPKLLIKRTSNLASGVPSRFSGSGSGTDFTLTINSLEAEDAATYYCQQWSSYPPTFGCGTKLEIKSGGGGSQVQLVESGGGVVQPGRSLRLSCAASGFTFSNYGMHWVRQAPGKCLEWVAVISYEASNKNYADAVKGRFTISRDNSKNTLYLQMNSLRAEDTAVYYCARDRFGDYSGYYYYYGMDVWGQGTTVTVSSGGGGSGGGGSGGGGSDIVMTQTPLSLPVTPGQPASISCRSSQSLLHSSGKTYLDWYLQKPGQSPQLLIYLGSNRASGVPDRFSGSGSGTDFTLKISRVEAEDVGVYYCMQATQTPFTFGCGTKVEIKSGGGGSEVQLVESGGGLVQPGGSLKLSCAASGFTFNKYAMNWVRQAPGKGLEWVARIRSKYNNYATYYADSVKDRFTISRDDSKNTAYLQMNNLKTEDTAVYYCVRHGNFGNSYISYWAYWGQGTLVTVSSGGGGSGGGGSGGGGSQTVVTQEPSLTVSPGGTVTLTCGSSTGAVTSGNYPNWVQQKPGQAPRGLIGGTKFLAPGTPARFSGSLLGGKAALTLSGVQPEDEAEYYCVLWYSNRWVFGGGTKLTVLGGGGDKTHTCPPCPAPELLGGPSVFLFPPKPKDTLMISRTPEVTCVVVDVSHEDPEVKFNWYVDGVEVHNAKTKPCEEQYGSTYRCVSVLTVLHQDWLNGKEYKCKVSNKALPAPIEKTISKAKGQPREPQVYTLPPSREEMTKNQVSLTCLVKGFYPSDIAVEWESNGQPENNYKTTPPVLDSDGSFFLYSKLTVDKSRWQQGNVFSCSVMHEALHNHYTQKSLSLSPGKGGGGSGGGGSGGGGSGGGGSGGGGSGGGGSDKTHTCPPCPAPELLGGPSVFLFPPKPKDTLMISRTPEVTCVVVDVSHEDPEVKFNWYVDGVEVHNAKTKPCEEQYGSTYRCVSVLTVLHQDWLNGKEYKCKVSNKALPAPIEKTISKAKGQPREPQVYTLPPSREEMTKNQVSLTCLVKGFYPSDIAVEWESNGQPENNYKTTPPVLDSDGSFFLYSKLTVDKSRWQQGNVFSCSVMHEALHNHYTQKSLSLSPGK

SEQ ID NO: 1782 - protein, 500 aa, Artificial Sequence
  Synthetic
QVQLQQWGAGLLKPSETLSLTCAVYGGSFSGYYWSWIRQPPGKCLEWIGEINHRGSTNYNPSLKSRVTISGDTSKNQFSLKLSSVNAADTAVYYCARGYSSSWYTGYVFDYWGQGTLVTVSSGGGGSGGGGSGGGGSQSALTQPASVSGSPGQSITISCTGTSSDVFGYDYVSWYQQHPGKAPKLMIYDVSNRPSGVSNRFSGSKSGNAASLTISGLQAEDEADYYCSSYKSRNQVIFGCGTKLTVLSGGGGSQVQLVESGGGVVQPGRSLRLSCAASGFTFSNYGMHWVRQAPGKCLEWVAVISYDAWFSQYADAVKGRFTVSRDNSKNTLYLQMNSLRAEDTAVYYCARDLITFGGHYYFGMDVWGQGTTVTVSSGGGGSGGGGSGGGGSEIVLTQSPGTLSLSPGERATLSCRASQSVSSNYLAWYQQKPGQAPRLLIYAASSRVTGIPDRFSGSGSGTDFTLTISRLEPEDFAVYYCQQYGSSPFTFGCGTKVEIK

SEQ ID NO: 1783 - protein, 749 aa, Artificial Sequence
  Synthetic
QVQLVQSGAVVKKPGASVKVSCKASGYTFTSYWMHWVRQRPGQCLEWMGYISPNSGYTDYHQKFKGRVTMTRDKSISTAYMELSRLTSDDTAVYYCARDPMDYWGQGTLVTVSSGGGGSGGGGSGGGGSEIVLTQSPDFQSVTPKEKVTITCSASSSVNYMHWYQQKPDSSPKLLIKRTSNLASGVPSRFSGSGSGTDFTLTINSLEAEDAATYYCQQWSSYPPTFGCGTKLEIKSGGGGSQVQLVESGGGVVQPGRSLRLSCAASGFTFSNYGMHWVRQAPGKCLEWVAVISYEASNKNYADAVKGRFTISRDNSKNTLYLQMNSLRAEDTAVYYCARDRFGDYSGYYYYYGMDVWGQGTTVTVSSGGGGSGGGGSGGGGSDIVMTQTPLSLPVTPGQPASISCRSSQSLLHSSGKTYLDWYLQKPGQSPQLLIYLGSNRASGVPDRFSGSGSGTDFTLKISRVEAEDVGVYYCMQATQTPFTFGCGTKVEIKSGGGGSEVQLVESGGGLVQPGGSLKLSCAASGFTFNKYAMNWVRQAPGKGLEWVARIRSKYNNYATYYADSVKDRFTISRDDSKNTAYLQMNNLKTEDTAVYYCVRHGNFGNSYISYWAYWGQGTLVTVSSGGGGSGGGGSGGGGSQTVVTQEPSLTVSPGGTVTLTCGSSTGAVTSGNYPNWVQQKPGQAPRGLIGGTKFLAPGTPARFSGSLLGGKAALTLSGVQPEDEAEYYCVLWYSNRWVFGGGTKLTVL

SEQ ID NO: 1784 - protein, 1243 aa, Artificial Sequence
  Synthetic
QVQLQQWGAGLLKPSETLSLTCAVYGGSFSGYYWSWIRQPPGKCLEWIGEINHRGSTNYNPSLKSRVTISGDTSKNQFSLKLSSVNAADTAVYYCARGYSSSWYTGYVFDYWGQGTLVTVSSGGGGSGGGGSGGGGSQSALTQPASVSGSPGQSITISCTGTSSDVFGYDYVSWYQQHPGKAPKLMIYDVSNRPSGVSNRFSGSKSGNAASLTISGLQAEDEADYYCSSYKSRNQVIFGCGTKLTVLSGGGGSQVQLVESGGGVVQPGRSLRLSCAASGFTFSNYGMHWVRQAPGKCLEWVAVISYDAWFSQYADAVKGRFTVSRDNSKNTLYLQMNSLRAEDTAVYYCARDLITFGGHYYFGMDVWGQGTTVTVSSGGGGSGGGGSGGGGSEIVLTQSPGTLSLSPGERATLSCRASQSVSSNYLAWYQQKPGQAPRLLIYAASSRVTGIPDRFSGSGSGTDFTLTISRLEPEDFAVYYCQQYGSSPFTFGCGTKVEIKSGGGGSEVQLVESGGGLVQPGGSLKLSCAASGFTFNKYAMNWVRQAPGKGLEWVARIRSKYNNYATYYADSVKDRFTISRDDSKNTAYLQMNNLKTEDTAVYYCVRHGNFGNSYISYWAYWGQGTLVTVSSGGGGSGGGGSGGGGSQTVVTQEPSLTVSPGGTVTLTCGSSTGAVTSGNYPNWVQQKPGQAPRGLIGGTKFLAPGTPARFSGSLLGGKAALTLSGVQPEDEAEYYCVLWYSNRWVFGGGTKLTVLGGGGDKTHTCPPCPAPELLGGPSVFLFPPKPKDTLMISRTPEVTCVVVDVSHEDPEVKFNWYVDGVEVHNAKTKPCEEQYGSTYRCVSVLTVLHQDWLNGKEYKCKVSNKALPAPIEKTISKAKGQPREPQVYTLPPSREEMTKNQVSLTCLVKGFYPSDIAVEWESNGQPENNYKTTPPVLDSDGSFFLYSKLTVDKSRWQQGNVFSCSVMHEALHNHYTQKSLSLSPGKGGGGSGGGGSGGGGSGGGGSGGGGSGGGGSDKTHTCPPCPAPELLGGPSVFLFPPKPKDTLMISRTPEVTCVVVDVSHEDPEVKFNWYVDGVEVHNAKTKPCEEQYGSTYRCVSVLTVLHQDWLNGKEYKCKVSNKALPAPIEKTISKAKGQPREPQVYTLPPSREEMTKNQVSLTCLVKGFYPSDIAVEWESNGQPENNYKTTPPVLDSDGSFFLYSKLTVDKSRWQQGNVFSCSVMHEALHNHYTQKSLSLSPGK

SEQ ID NO: 1785 - protein, 490 aa, Artificial Sequence
  Synthetic
QVQLQQWGAGLLKPSETLSLTCAVYGGSFSGYYWSWIRQPPGKCLEWIGEINHRGSTNYNPSLKSRVTISGDTSKNQFSLKLSSVNAADTAVYYCARGYSSSWYTGYVFDYWGQGTLVTVSSGGGGSGGGGSGGGGSQSALTQPASVSGSPGQSITISCTGTSSDVFGYDYVSWYQQHPGKAPKLMIYDVSNRPSGVSNRFSGSKSGNAASLTISGLQAEDEADYYCSSYKSRNQVIFGCGTKLTVLSGGGGSQVQLQESGPGLVKPSETLSLTCTVSGGSISSFYWSWIRQPPGKCLEWIGRISSSGDVDYNPSLKSRVTISVDTSKNQFSLKLSSVTAADTAVYYCAREGGFYYWGQGTLVTVSSGGGGSGGGGSGGGGSEIVLTQSPGTLSLSPGERATLSCRASQSVSSSYLAWYQQKPGQAPRLLIYGASSRATGIPDRFSGSGSGTDFTLTISRLEPEDFAVYYCQQYGSSPITFGCGTKLEIK

SEQ ID NO: 1786 - protein, 755 aa, Artificial Sequence
  Synthetic
QVQLQQWGAGLLKPSETLSLTCAVYGGSFSGYYWSWIRQPPGKCLEWIGEINHRGSTNYNPSLKSRVTISGDTSKNQFSLKLSSVNAADTAVYYCARGYSSSWYTGYVFDYWGQGTLVTVSSGGGGSGGGGSGGGGSQSALTQPASVSGSPGQSITISCTGTSSDVFGYDYVSWYQQHPGKAPKLMIYDVSNRPSGVSNRFSGSKSGNAASLTISGLQAEDEADYYCSSYKSRNQVIFGCGTKLTVLSGGGGSQVQLVESGGGVVQPGRSLRLSCAASGFTFSNYGMHWVRQAPGKCLEWVAVISYDAWFSQYADAVKGRFTVSRDNSKNTLYLQMNSLRAEDTAVYYCARDLITFGGHYYFGMDVWGQGTTVTVSSGGGGSGGGGSGGGGSEIVLTQSPGTLSLSPGERATLSCRASQSVSSNYLAWYQQKPGQAPRLLIYAASSRVTGIPDRFSGSGSGTDFTLTISRLEPEDFAVYYCQQYGSSPFTFGCGTKVEIKSGGGGSEVQLVESGGGLVQPGGSLKLSCAASGFTFNKYAMNWVRQAPGKGLEWVARIRSKYNNYATYYADSVKDRFTISRDDSKNTAYLQMNNLKTEDTAVYYCVRHGNFGNSYISYWAYWGQGTLVTVSSGGGGSGGGGSGGGGSQTVVTQEPSLTVSPGGTVTLTCGSSTGAVTSGNYPNWVQQKPGQAPRGLIGGTKFLAPGTPARFSGSLLGGKAALTLSGVQPEDEAEYYCVLWYSNRWVFGGGTKLTVL

SEQ ID NO: 1787 - protein, 1233 aa, Artificial Sequence
  Synthetic
QVQLQQWGAGLLKPSETLSLTCAVYGGSFSGYYWSWIRQPPGKCLEWIGEINHRGSTNYNPSLKSRVTISGDTSKNQFSLKLSSVNAADTAVYYCARGYSSSWYTGYVFDYWGQGTLVTVSSGGGGSGGGGSGGGGSQSALTQPASVSGSPGQSITISCTGTSSDVFGYDYVSWYQQHPGKAPKLMIYDVSNRPSGVSNRFSGSKSGNAASLTISGLQAEDEADYYCSSYKSRNQVIFGCGTKLTVLSGGGGSQVQLQESGPGLVKPSETLSLTCTVSGGSISSFYWSWIRQPPGKCLEWIGRISSSGDVDYNPSLKSRVTISVDTSKNQFSLKLSSVTAADTAVYYCAREGGFYYWGQGTLVTVSSGGGGSGGGGSGGGGSEIVLTQSPGTLSLSPGERATLSCRASQSVSSSYLAWYQQKPGQAPRLLIYGASSRATGIPDRFSGSGSGTDFTLTISRLEPEDFAVYYCQQYGSSPITFGCGTKLEIKSGGGGSEVQLVESGGGLVQPGGSLKLSCAASGFTFNKYAMNWVRQAPGKGLEWVARIRSKYNNYATYYADSVKDRFTISRDDSKNTAYLQMNNLKTEDTAVYYCVRHGNFGNSYISYWAYWGQGTLVTVSSGGGGSGGGGSGGGGSQTVVTQEPSLTVSPGGTVTLTCGSSTGAVTSGNYPNWVQQKPGQAPRGLIGGTKFLAPGTPARFSGSLLGGKAALTLSGVQPEDEAEYYCVLWYSNRWVFGGGTKLTVLGGGGDKTHTCPPCPAPELLGGPSVFLFPPKPKDTLMISRTPEVTCVVVDVSHEDPEVKFNWYVDGVEVHNAKTKPCEEQYGSTYRCVSVLTVLHQDWLNGKEYKCKVSNKALPAPIEKTISKAKGQPREPQVYTLPPSREEMTKNQVSLTCLVKGFYPSDIAVEWESNGQPENNYKTTPPVLDSDGSFFLYSKLTVDKSRWQQGNVFSCSVMHEALHNHYTQKSLSLSPGKGGGGSGGGGSGGGGSGGGGSGGGGSGGGGSDKTHTCPPCPAPELLGGPSVFLFPPKPKDTLMISRTPEVTCVVVDVSHEDPEVKFNWYVDGVEVHNAKTKPCEEQYGSTYRCVSVLTVLHQDWLNGKEYKCKVSNKALPAPIEKTISKAKGQPREPQVYTLPPSREEMTKNQVSLTCLVKGFYPSDIAVEWESNGQPENNYKTTPPVLDSDGSFFLYSKLTVDKSRWQQGNVFSCSVMHEALHNHYTQKSLSLSPGK

SEQ ID NO: 1788 - protein, 498 aa, Artificial Sequence
  Synthetic
QVQLQQWGAGLLKPSETLSLTCAVYGGSFSGYYWSWIRQPPGKCLEWIGEINHRGSTNYNPSLKSRVTISGDTSKNQFSLKLSSVNAADTAVYYCARGYSSSWYTGYVFDYWGQGTLVTVSSGGGGSGGGGSGGGGSQSALTQPASVSGSPGQSITISCTGTSSDVFGYDYVSWYQQHPGKAPKLMIYDVSNRPSGVSNRFSGSKSGNAASLTISGLQAEDEADYYCSSYKSRNQVIFGCGTKLTVLSGGGGSQVQLVQSGAEVKKPGASVKVSCKASGYTFTSYGISWVRQAPGQCLEWMGWISAYSGNAIYAQKLQGRVTMTRDTSTSTAYMELRSLRSDDTAVYYCARDPDYYGSGSYSDYWGQGTLVTVSSGGGGSGGGGSGGGGSEIVLTQSPATLSVSPGERATLSCRASQSVSSNLAWYQQKPGQAPRLLIYGASSRATGIPARFSGSGSGTEFTLTISSLQSEDFAVYYCQQYHSWPLLTFGCGTKVEIK

SEQ ID NO: 1789 - protein, 745 aa, Artificial Sequence
  Synthetic
QVQLQQWGAGLLKPSETLSLTCAVYGGSFSGYYWSWIRQPPGKCLEWIGEINHRGSTNYNPSLKSRVTISGDTSKNQFSLKLSSVNAADTAVYYCARGYSSSWYTGYVFDYWGQGTLVTVSSGGGGSGGGGSGGGGSQSALTQPASVSGSPGQSITISCTGTSSDVFGYDYVSWYQQHPGKAPKLMIYDVSNRPSGVSNRFSGSKSGNAASLTISGLQAEDEADYYCSSYKSRNQVIFGCGTKLTVLSGGGGSQVQLQESGPGLVKPSETLSLTCTVSGGSISSFYWSWIRQPPGKCLEWIGRISSSGDVDYNPSLKSRVTISVDTSKNQFSLKLSSVTAADTAVYYCAREGGFYYWGQGTLVTVSSGGGGSGGGGSGGGGSEIVLTQSPGTLSLSPGERATLSCRASQSVSSSYLAWYQQKPGQAPRLLIYGASSRATGIPDRFSGSGSGTDFTLTISRLEPEDFAVYYCQQYGSSPITFGCGTKLEIKSGGGGSEVQLVESGGGLVQPGGSLKLSCAASGFTFNKYAMNWVRQAPGKGLEWVARIRSKYNNYATYYADSVKDRFTISRDDSKNTAYLQMNNLKTEDTAVYYCVRHGNFGNSYISYWAYWGQGTLVTVSSGGGGSGGGGSGGGGSQTVVTQEPSLTVSPGGTVTLTCGSSTGAVTSGNYPNWVQQKPGQAPRGLIGGTKFLAPGTPARFSGSLLGGKAALTLSGVQPEDEAEYYCVLWYSNRWVFGGGTKLTVL

SEQ ID NO: 1790 - protein, 1241 aa, Artificial Sequence
  Synthetic
QVQLQQWGAGLLKPSETLSLTCAVYGGSFSGYYWSWIRQPPGKCLEWIGEINHRGSTNYNPSLKSRVTISGDTSKNQFSLKLSSVNAADTAVYYCARGYSSSWYTGYVFDYWGQGTLVTVSSGGGGSGGGGSGGGGSQSALTQPASVSGSPGQSITISCTGTSSDVFGYDYVSWYQQHPGKAPKLMIYDVSNRPSGVSNRFSGSKSGNAASLTISGLQAEDEADYYCSSYKSRNQVIFGCGTKLTVLSGGGGSQVQLVQSGAEVKKPGASVKVSCKASGYTFTSYGISWVRQAPGQCLEWMGWISAYSGNAIYAQKLQGRVTMTRDTSTSTAYMELRSLRSDDTAVYYCARDPDYYGSGSYSDYWGQGTLVTVSSGGGGSGGGGSGGGGSEIVLTQSPATLSVSPGERATLSCRASQSVSSNLAWYQQKPGQAPRLLIYGASSRATGIPARFSGSGSGTEFTLTISSLQSEDFAVYYCQQYHSWPLLTFGCGTKVEIKSGGGGSEVQLVESGGGLVQPGGSLKLSCAASGFTFNKYAMNWVRQAPGKGLEWVARIRSKYNNYATYYADSVKDRFTISRDDSKNTAYLQMNNLKTEDTAVYYCVRHGNFGNSYISYWAYWGQGTLVTVSSGGGGSGGGGSGGGGSQTVVTQEPSLTVSPGGTVTLTCGSSTGAVTSGNYPNWVQQKPGQAPRGLIGGTKFLAPGTPARFSGSLLGGKAALTLSGVQPEDEAEYYCVLWYSNRWVFGGGTKLTVLGGGGDKTHTCPPCPAPELLGGPSVFLFPPKPKDTLMISRTPEVTCVVVDVSHEDPEVKFNWYVDGVEVHNAKTKPCEEQYGSTYRCVSVLTVLHQDWLNGKEYKCKVSNKALPAPIEKTISKAKGQPREPQVYTLPPSREEMTKNQVSLTCLVKGFYPSDIAVEWESNGQPENNYKTTPPVLDSDGSFFLYSKLTVDKSRWQQGNVFSCSVMHEALHNHYTQKSLSLSPGKGGGGSGGGGSGGGGSGGGGSGGGGSGGGGSDKTHTCPPCPAPELLGGPSVFLFPPKPKDTLMISRTPEVTCVVVDVSHEDPEVKFNWYVDGVEVHNAKTKPCEEQYGSTYRCVSVLTVLHQDWLNGKEYKCKVSNKALPAPIEKTISKAKGQPREPQVYTLPPSREEMTKNQVSLTCLVKGFYPSDIAVEWESNGQPENNYKTTPPVLDSDGSFFLYSKLTVDKSRWQQGNVFSCSVMHEALHNHYTQKSLSLSPGK

SEQ ID NO: 1791 - protein, 498 aa, Artificial Sequence
  Synthetic
QVQLQQWGAGLLKPSETLSLTCAVYGGSFSGYYWSWIRQPPGKCLEWIGEINHRGSTNYNPSLKSRVTISGDTSKNQFSLKLSSVNAADTAVYYCARGYSSSWYTGYVFDYWGQGTLVTVSSGGGGSGGGGSGGGGSQSALTQPASVSGSPGQSITISCTGTSSDVFGYDYVSWYQQHPGKAPKLMIYDVSNRPSGVSNRFSGSKSGNAASLTISGLQAEDEADYYCSSYKSRNQVIFGCGTKLTVLSGGGGSQVQLVQSGAEVKKPGASVKVSCKASGYTFTSYGISWVRQAPGQCLEWMGWISAYNGQTIYAQKLQGRVTMTRDTSTSTAYMELRSLRSDDTAVYYCARDPDYYGSGSYSDYWGQGTLVTVSSGGGGSGGGGSGGGGSEIVMTQSPATLSVSPGERATLSCRASQSVSSNLAWYQQKPGQAPRLLIYGASNRATGIPARFSGSGSGTEFTLTISSLQSEDFAVYYCQQYHSWPLLTFGCGTKVEIK

SEQ ID NO: 1792 - protein, 753 aa, Artificial Sequence
  Synthetic
QVQLQQWGAGLLKPSETLSLTCAVYGGSFSGYYWSWIRQPPGKCLEWIGEINHRGSTNYNPSLKSRVTISGDTSKNQFSLKLSSVNAADTAVYYCARGYSSSWYTGYVFDYWGQGTLVTVSSGGGGSGGGGSGGGGSQSALTQPASVSGSPGQSITISCTGTSSDVFGYDYVSWYQQHPGKAPKLMIYDVSNRPSGVSNRFSGSKSGNAASLTISGLQAEDEADYYCSSYKSRNQVIFGCGTKLTVLSGGGGSQVQLVQSGAEVKKPGASVKVSCKASGYTFTSYGISWVRQAPGQCLEWMGWISAYSGNAIYAQKLQGRVTMTRDTSTSTAYMELRSLRSDDTAVYYCARDPDYYGSGSYSDYWGQGTLVTVSSGGGGSGGGGSGGGGSEIVLTQSPATLSVSPGERATLSCRASQSVSSNLAWYQQKPGQAPRLLIYGASSRATGIPARFSGSGSGTEFTLTISSLQSEDFAVYYCQQYHSWPLLTFGCGTKVEIKSGGGGSEVQLVESGGGLVQPGGSLKLSCAASGFTFNKYAMNWVRQAPGKGLEWVARIRSKYNNYATYYADSVKDRFTISRDDSKNTAYLQMNNLKTEDTAVYYCVRHGNFGNSYISYWAYWGQGTLVTVSSGGGGSGGGGSGGGGSQTVVTQEPSLTVSPGGTVTLTCGSSTGAVTSGNYPNWVQQKPGQAPRGLIGGTKFLAPGTPARFSGSLLGGKAALTLSGVQPEDEAEYYCVLWYSNRWVFGGGTKLTVL

SEQ ID NO: 1793 - protein, 1241 aa, Artificial Sequence
  Synthetic
QVQLQQWGAGLLKPSETLSLTCAVYGGSFSGYYWSWIRQPPGKCLEWIGEINHRGSTNYNPSLKSRVTISGDTSKNQFSLKLSSVNAADTAVYYCARGYSSSWYTGYVFDYWGQGTLVTVSSGGGGSGGGGSGGGGSQSALTQPASVSGSPGQSITISCTGTSSDVFGYDYVSWYQQHPGKAPKLMIYDVSNRPSGVSNRFSGSKSGNAASLTISGLQAEDEADYYCSSYKSRNQVIFGCGTKLTVLSGGGGSQVQLVQSGAEVKKPGASVKVSCKASGYTFTSYGISWVRQAPGQCLEWMGWISAYNGQTIYAQKLQGRVTMTRDTSTSTAYMELRSLRSDDTAVYYCARDPDYYGSGSYSDYWGQGTLVTVSSGGGGSGGGGSGGGGSEIVMTQSPATLSVSPGERATLSCRASQSVSSNLAWYQQKPGQAPRLLIYGASNRATGIPARFSGSGSGTEFTLTISSLQSEDFAVYYCQQYHSWPLLTFGCGTKVEIKSGGGGSEVQLVESGGGLVQPGGSLKLSCAASGFTFNKYAMNWVRQAPGKGLEWVARIRSKYNNYATYYADSVKDRFTISRDDSKNTAYLQMNNLKTEDTAVYYCVRHGNFGNSYISYWAYWGQGTLVTVSSGGGGSGGGGSGGGGSQTVVTQEPSLTVSPGGTVTLTCGSSTGAVTSGNYPNWVQQKPGQAPRGLIGGTKFLAPGTPARFSGSLLGGKAALTLSGVQPEDEAEYYCVLWYSNRWVFGGGTKLTVLGGGGDKTHTCPPCPAPELLGGPSVFLFPPKPKDTLMISRTPEVTCVVVDVSHEDPEVKFNWYVDGVEVHNAKTKPCEEQYGSTYRCVSVLTVLHQDWLNGKEYKCKVSNKALPAPIEKTISKAKGQPREPQVYTLPPSREEMTKNQVSLTCLVKGFYPSDIAVEWESNGQPENNYKTTPPVLDSDGSFFLYSKLTVDKSRWQQGNVFSCSVMHEALHNHYTQKSLSLSPGKGGGGSGGGGSGGGGSGGGGSGGGGSGGGGSDKTHTCPPCPAPELLGGPSVFLFPPKPKDTLMISRTPEVTCVVVDVSHEDPEVKFNWYVDGVEVHNAKTKPCEEQYGSTYRCVSVLTVLHQDWLNGKEYKCKVSNKALPAPIEKTISKAKGQPREPQVYTLPPSREEMTKNQVSLTCLVKGFYPSDIAVEWESNGQPENNYKTTPPVLDSDGSFFLYSKLTVDKSRWQQGNVFSCSVMHEALHNHYTQKSLSLSPGK

SEQ ID NO: 1794 - protein, 506 aa, Artificial Sequence
  Synthetic
QVQLQQWGAGLLKPSETLSLTCAVYGGSFSGYYWSWIRQPPGKCLEWIGEINHRGSTNYNPSLKSRVTISGDTSKNQFSLKLSSVNAADTAVYYCARGYSSSWYTGYVFDYWGQGTLVTVSSGGGGSGGGGSGGGGSQSALTQPASVSGSPGQSITISCTGTSSDVFGYDYVSWYQQHPGKAPKLMIYDVSNRPSGVSNRFSGSKSGNAASLTISGLQAEDEADYYCSSYKSRNQVIFGCGTKLTVLSGGGGSQVQLVESGGGVVQPGRSLRLSCAASGFTFSNYGMHWVRQAPGKCLEWVAVISYEASNKNYADAVKGRFTISRDNSKNTLYLQMNSLRAEDTAVYYCARDRFGDYSGYYYYYGMDVWGQGTTVTVSSGGGGSGGGGSGGGGSDIVMTQTPLSLPVTPGQPASISCRSSQSLLHSSGKTYLDWYLQKPGQSPQLLIYLGSNRASGVPDRFSGSGSGTDFTLKISRVEAEDVGVYYCMQATQTPFTFGCGTKVEIK

SEQ ID NO: 1795 - protein, 761 aa, Artificial Sequence
  Synthetic
QVQLQQWGAGLLKPSETLSLTCAVYGGSFSGYYWSWIRQPPGKCLEWIGEINHRGSTNYNPSLKSRVTISGDTSKNQFSLKLSSVNAADTAVYYCARGYSSSWYTGYVFDYWGQGTLVTVSSGGGGSGGGGSGGGGSQSALTQPASVSGSPGQSITISCTGTSSDVFGYDYVSWYQQHPGKAPKLMIYDVSNRPSGVSNRFSGSKSGNAASLTISGLQAEDEADYYCSSYKSRNQVIFGCGTKLTVLSGGGGSQVQLVESGGGVVQPGRSLRLSCAASGFTFSNYGMHWVRQAPGKCLEWVAVISYEASNKNYADAVKGRFTISRDNSKNTLYLQMNSLRAEDTAVYYCARDRFGDYSGYYYYYGMDVWGQGTTVTVSSGGGGSGGGGSGGGGSDIVMTQTPLSLPVTPGQPASISCRSSQSLLHSSGKTYLDWYLQKPGQSPQLLIYLGSNRASGVPDRFSGSGSGTDFTLKISRVEAEDVGVYYCMQATQTPFTFGCGTKVEIKSGGGGSEVQLVESGGGLVQPGGSLKLSCAASGFTFNKYAMNWVRQAPGKGLEWVARIRSKYNNYATYYADSVKDRFTISRDDSKNTAYLQMNNLKTEDTAVYYCVRHGNFGNSYISYWAYWGQGTLVTVSSGGGGSGGGGSGGGGSQTVVTQEPSLTVSPGGTVTLTCGSSTGAVTSGNYPNWVQQKPGQAPRGLIGGTKFLAPGTPARFSGSLLGGKAALTLSGVQPEDEAEYYCVLWYSNRWVFGGGTKLTVL

SEQ ID NO: 1796 - protein, 1249 aa, Artificial Sequence
  Synthetic
QVQLQQWGAGLLKPSETLSLTCAVYGGSFSGYYWSWIRQPPGKCLEWIGEINHRGSTNYNPSLKSRVTISGDTSKNQFSLKLSSVNAADTAVYYCARGYSSSWYTGYVFDYWGQGTLVTVSSGGGGSGGGGSGGGGSQSALTQPASVSGSPGQSITISCTGTSSDVFGYDYVSWYQQHPGKAPKLMIYDVSNRPSGVSNRFSGSKSGNAASLTISGLQAEDEADYYCSSYKSRNQVIFGCGTKLTVLSGGGGSQVQLVESGGGVVQPGRSLRLSCAASGFTFSNYGMHWVRQAPGKCLEWVAVISYEASNKNYADAVKGRFTISRDNSKNTLYLQMNSLRAEDTAVYYCARDRFGDYSGYYYYYGMDVWGQGTTVTVSSGGGGSGGGGSGGGGSDIVMTQTPLSLPVTPGQPASISCRSSQSLLHSSGKTYLDWYLQKPGQSPQLLIYLGSNRASGVPDRFSGSGSGTDFTLKISRVEAEDVGVYYCMQATQTPFTFGCGTKVEIKSGGGGSEVQLVESGGGLVQPGGSLKLSCAASGFTFNKYAMNWVRQAPGKGLEWVARIRSKYNNYATYYADSVKDRFTISRDDSKNTAYLQMNNLKTEDTAVYYCVRHGNFGNSYISYWAYWGQGTLVTVSSGGGGSGGGGSGGGGSQTVVTQEPSLTVSPGGTVTLTCGSSTGAVTSGNYPNWVQQKPGQAPRGLIGGTKFLAPGTPARFSGSLLGGKAALTLSGVQPEDEAEYYCVLWYSNRWVFGGGTKLTVLGGGGDKTHTCPPCPAPELLGGPSVFLFPPKPKDTLMISRTPEVTCVVVDVSHEDPEVKFNWYVDGVEVHNAKTKPCEEQYGSTYRCVSVLTVLHQDWLNGKEYKCKVSNKALPAPIEKTISKAKGQPREPQVYTLPPSREEMTKNQVSLTCLVKGFYPSDIAVEWESNGQPENNYKTTPPVLDSDGSFFLYSKLTVDKSRWQQGNVFSCSVMHEALHNHYTQKSLSLSPGKGGGGSGGGGSGGGGSGGGGSGGGGSGGGGSDKTHTCPPCPAPELLGGPSVFLFPPKPKDTLMISRTPEVTCVVVDVSHEDPEVKFNWYVDGVEVHNAKTKPCEEQYGSTYRCVSVLTVLHQDWLNGKEYKCKVSNKALPAPIEKTISKAKGQPREPQVYTLPPSREEMTKNQVSLTCLVKGFYPSDIAVEWESNGQPENNYKTTPPVLDSDGSFFLYSKLTVDKSRWQQGNVFSCSVMHEALHNHYTQKSLSLSPGK

SEQ ID NO: 1797 - protein, 489 aa, Artificial Sequence
  Synthetic
QVQLVQSGAELKKPGASVKVSCKTSGYTFTDYWMHWVRQAPGQCLEWMGYITPSTGYTDYHRKFRGRVTMTRDTSISTAYMELSRLRSDDTAVYYCARSTFDAWGQGTMVTVSSGGGGSGGGGSGGGGSDIQMTQSPSSLSASVGDRVSITCRASQEISGYLSWFQQKPGKAIKRLIYATSSLDAGVPSRFSGSGSGTDFTLTISSLQPEDFADYYCLQYASYPLTFGCGTKLEIKSGGGGSQVQLVESGGGVVQPGRSLRLSCAASGFTFSNYGMHWVRQAPGKCLEWVAVISYDAWFSQYADAVKGRFTVSRDNSKNTLYLQMNSLRAEDTAVYYCARDLITFGGHYYFGMDVWGQGTTVTVSSGGGGSGGGGSGGGGSEIVLTQSPGTLSLSPGERATLSCRASQSVSSNYLAWYQQKPGQAPRLLIYAASSRVTGIPDRFSGSGSGTDFTLTISRLEPEDFAVYYCQQYGSSPFTFGCGTKVEIK

SEQ ID NO: 1798 - protein, 744 aa, Artificial Sequence
  Synthetic
QVQLVQSGAELKKPGASVKVSCKTSGYTFTDYWMHWVRQAPGQCLEWMGYITPSTGYTDYHRKFRGRVTMTRDTSISTAYMELSRLRSDDTAVYYCARSTFDAWGQGTMVTVSSGGGGSGGGGSGGGGSDIQMTQSPSSLSASVGDRVSITCRASQEISGYLSWFQQKPGKAIKRLIYATSSLDAGVPSRFSGSGSGTDFTLTISSLQPEDFADYYCLQYASYPLTFGCGTKLEIKSGGGGSQVQLVESGGGVVQPGRSLRLSCAASGFTFSNYGMHWVRQAPGKCLEWVAVISYDAWFSQYADAVKGRFTVSRDNSKNTLYLQMNSLRAEDTAVYYCARDLITFGGHYYFGMDVWGQGTTVTVSSGGGGSGGGGSGGGGSEIVLTQSPGTLSLSPGERATLSCRASQSVSSNYLAWYQQKPGQAPRLLIYAASSRVTGIPDRFSGSGSGTDFTLTISRLEPEDFAVYYCQQYGSSPFTFGCGTKVEIKSGGGGSEVQLVESGGGLVQPGGSLKLSCAASGFTFNKYAMNWVRQAPGKGLEWVARIRSKYNNYATYYADSVKDRFTISRDDSKNTAYLQMNNLKTEDTAVYYCVRHGNFGNSYISYWAYWGQGTLVTVSSGGGGSGGGGSGGGGSQTVVTQEPSLTVSPGGTVTLTCGSSTGAVTSGNYPNWVQQKPGQAPRGLIGGTKFLAPGTPARFSGSLLGGKAALTLSGVQPEDEAEYYCVLWYSNRWVFGGGTKLTVL

SEQ ID NO: 1799 - protein, 1232 aa, Artificial Sequence
  Synthetic
QVQLVQSGAELKKPGASVKVSCKTSGYTFTDYWMHWVRQAPGQCLEWMGYITPSTGYTDYHRKFRGRVTMTRDTSISTAYMELSRLRSDDTAVYYCARSTFDAWGQGTMVTVSSGGGGSGGGGSGGGGSDIQMTQSPSSLSASVGDRVSITCRASQEISGYLSWFQQKPGKAIKRLIYATSSLDAGVPSRFSGSGSGTDFTLTISSLQPEDFADYYCLQYASYPLTFGCGTKLEIKSGGGGSQVQLVESGGGVVQPGRSLRLSCAASGFTFSNYGMHWVRQAPGKCLEWVAVISYDAWFSQYADAVKGRFTVSRDNSKNTLYLQMNSLRAEDTAVYYCARDLITFGGHYYFGMDVWGQGTTVTVSSGGGGSGGGGSGGGGSEIVLTQSPGTLSLSPGERATLSCRASQSVSSNYLAWYQQKPGQAPRLLIYAASSRVTGIPDRFSGSGSGTDFTLTISRLEPEDFAVYYCQQYGSSPFTFGCGTKVEIKSGGGGSEVQLVESGGGLVQPGGSLKLSCAASGFTFNKYAMNWVRQAPGKGLEWVARIRSKYNNYATYYADSVKDRFTISRDDSKNTAYLQMNNLKTEDTAVYYCVRHGNFGNSYISYWAYWGQGTLVTVSSGGGGSGGGGSGGGGSQTVVTQEPSLTVSPGGTVTLTCGSSTGAVTSGNYPNWVQQKPGQAPRGLIGGTKFLAPGTPARFSGSLLGGKAALTLSGVQPEDEAEYYCVLWYSNRWVFGGGTKLTVLGGGGDKTHTCPPCPAPELLGGPSVFLFPPKPKDTLMISRTPEVTCVVVDVSHEDPEVKFNWYVDGVEVHNAKTKPCEEQYGSTYRCVSVLTVLHQDWLNGKEYKCKVSNKALPAPIEKTISKAKGQPREPQVYTLPPSREEMTKNQVSLTCLVKGFYPSDIAVEWESNGQPENNYKTTPPVLDSDGSFFLYSKLTVDKSRWQQGNVFSCSVMHEALHNHYTQKSLSLSPGKGGGGSGGGGSGGGGSGGGGSGGGGSGGGGSDKTHTCPPCPAPELLGGPSVFLFPPKPKDTLMISRTPEVTCVVVDVSHEDPEVKFNWYVDGVEVHNAKTKPCEEQYGSTYRCVSVLTVLHQDWLNGKEYKCKVSNKALPAPIEKTISKAKGQPREPQVYTLPPSREEMTKNQVSLTCLVKGFYPSDIAVEWESNGQPENNYKTTPPVLDSDGSFFLYSKLTVDKSRWQQGNVFSCSVMHEALHNHYTQKSLSLSPGK

SEQ ID NO: 1800 - protein, 479 aa, Artificial Sequence
  Synthetic
QVQLVQSGAELKKPGASVKVSCKTSGYTFTDYWMHWVRQAPGQCLEWMGYITPSTGYTDYHRKFRGRVTMTRDTSISTAYMELSRLRSDDTAVYYCARSTFDAWGQGTMVTVSSGGGGSGGGGSGGGGSDIQMTQSPSSLSASVGDRVSITCRASQEISGYLSWFQQKPGKAIKRLIYATSSLDAGVPSRFSGSGSGTDFTLTISSLQPEDFADYYCLQYASYPLTFGCGTKLEIKSGGGGSQVQLQESGPGLVKPSETLSLTCTVSGGSISSFYWSWIRQPPGKCLEWIGRISSSGDVDYNPSLKSRVTISVDTSKNQFSLKLSSVTAADTAVYYCAREGGFYYWGQGTLVTVSSGGGGSGGGGSGGGGSEIVLTQSPGTLSLSPGERATLSCRASQSVSSSYLAWYQQKPGQAPRLLIYGASSRATGIPDRFSGSGSGTDFTLTISRLEPEDFAVYYCQQYGSSPITFGCGTKLEIK

SEQ ID NO: 1801 - protein, 734 aa, Artificial Sequence
  Synthetic
QVQLVQSGAELKKPGASVKVSCKTSGYTFTDYWMHWVRQAPGQCLEWMGYITPSTGYTDYHRKFRGRVTMTRDTSISTAYMELSRLRSDDTAVYYCARSTFDAWGQGTMVTVSSGGGGSGGGGSGGGGSDIQMTQSPSSLSASVGDRVSITCRASQEISGYLSWFQQKPGKAIKRLIYATSSLDAGVPSRFSGSGSGTDFTLTISSLQPEDFADYYCLQYASYPLTFGCGTKLEIKSGGGGSQVQLQESGPGLVKPSETLSLTCTVSGGSISSFYWSWIRQPPGKCLEWIGRISSSGDVDYNPSLKSRVTISVDTSKNQFSLKLSSVTAADTAVYYCAREGGFYYWGQGTLVTVSSGGGGSGGGGSGGGGSEIVLTQSPGTLSLSPGERATLSCRASQSVSSSYLAWYQQKPGQAPRLLIYGASSRATGIPDRFSGSGSGTDFTLTISRLEPEDFAVYYCQQYGSSPITFGCGTKLEIKSGGGGSEVQLVESGGGLVQPGGSLKLSCAASGFTFNKYAMNWVRQAPGKGLEWVARIRSKYNNYATYYADSVKDRFTISRDDSKNTAYLQMNNLKTEDTAVYYCVRHGNFGNSYISYWAYWGQGTLVTVSSGGGGSGGGGSGGGGSQTVVTQEPSLTVSPGGTVTLTCGSSTGAVTSGNYPNWVQQKPGQAPRGLIGGTKFLAPGTPARFSGSLLGGKAALTLSGVQPEDEAEYYCVLWYSNRWVFGGGTKLTVL

SEQ ID NO: 1802 - protein, 1222 aa, Artificial Sequence
  Synthetic
QVQLVQSGAELKKPGASVKVSCKTSGYTFTDYWMHWVRQAPGQCLEWMGYITPSTGYTDYHRKFRGRVTMTRDTSISTAYMELSRLRSDDTAVYYCARSTFDAWGQGTMVTVSSGGGGSGGGGSGGGGSDIQMTQSPSSLSASVGDRVSITCRASQEISGYLSWFQQKPGKAIKRLIYATSSLDAGVPSRFSGSGSGTDFTLTISSLQPEDFADYYCLQYASYPLTFGCGTKLEIKSGGGGSQVQLQESGPGLVKPSETLSLTCTVSGGSISSFYWSWIRQPPGKCLEWIGRISSSGDVDYNPSLKSRVTISVDTSKNQFSLKLSSVTAADTAVYYCAREGGFYYWGQGTLVTVSSGGGGSGGGGSGGGGSEIVLTQSPGTLSLSPGERATLSCRASQSVSSSYLAWYQQKPGQAPRLLIYGASSRATGIPDRFSGSGSGTDFTLTISRLEPEDFAVYYCQQYGSSPITFGCGTKLEIKSGGGGSEVQLVESGGGLVQPGGSLKLSCAASGFTFNKYAMNWVRQAPGKGLEWVARIRSKYNNYATYYADSVKDRFTISRDDSKNTAYLQMNNLKTEDTAVYYCVRHGNFGNSYISYWAYWGQGTLVTVSSGGGGSGGGGSGGGGSQTVVTQEPSLTVSPGGTVTLTCGSSTGAVTSGNYPNWVQQKPGQAPRGLIGGTKFLAPGTPARFSGSLLGGKAALTLSGVQPEDEAEYYCVLWYSNRWVFGGGTKLTVLGGGGDKTHTCPPCPAPELLGGPSVFLFPPKPKDTLMISRTPEVTCVVVDVSHEDPEVKFNWYVDGVEVHNAKTKPCEEQYGSTYRCVSVLTVLHQDWLNGKEYKCKVSNKALPAPIEKTISKAKGQPREPQVYTLPPSREEMTKNQVSLTCLVKGFYPSDIAVEWESNGQPENNYKTTPPVLDSDGSFFLYSKLTVDKSRWQQGNVFSCSVMHEALHNHYTQKSLSLSPGKGGGGSGGGGSGGGGSGGGGSGGGGSGGGGSDKTHTCPPCPAPELLGGPSVFLFPPKPKDTLMISRTPEVTCVVVDVSHEDPEVKFNWYVDGVEVHNAKTKPCEEQYGSTYRCVSVLTVLHQDWLNGKEYKCKVSNKALPAPIEKTISKAKGQPREPQVYTLPPSREEMTKNQVSLTCLVKGFYPSDIAVEWESNGQPENNYKTTPPVLDSDGSFFLYSKLTVDKSRWQQGNVFSCSVMHEALHNHYTQKSLSLSPGK

SEQ ID NO: 1803 - protein, 487 aa, Artificial Sequence
  Synthetic
QVQLVQSGAELKKPGASVKVSCKTSGYTFTDYWMHWVRQAPGQCLEWMGYITPSTGYTDYHRKFRGRVTMTRDTSISTAYMELSRLRSDDTAVYYCARSTFDAWGQGTMVTVSSGGGGSGGGGSGGGGSDIQMTQSPSSLSASVGDRVSITCRASQEISGYLSWFQQKPGKAIKRLIYATSSLDAGVPSRFSGSGSGTDFTLTISSLQPEDFADYYCLQYASYPLTFGCGTKLEIKSGGGGSQVQLVQSGAEVKKPGASVKVSCKASGYTFTSYGISWVRQAPGQCLEWMGWISAYNGQTIYAQKLQGRVTMTRDTSTSTAYMELRSLRSDDTAVYYCARDPDYYGSGSYSDYWGQGTLVTVSSGGGGSGGGGSGGGGSEIVMTQSPATLSVSPGERATLSCRASQSVSSNLAWYQQKPGQAPRLLIYGASNRATGIPARFSGSGSGTEFTLTISSLQSEDFAVYYCQQYHSWPLLTFGCGTKVEIK

SEQ ID NO: 1804 - protein, 742 aa, Artificial Sequence
  Synthetic
QVQLVQSGAELKKPGASVKVSCKTSGYTFTDYWMHWVRQAPGQCLEWMGYITPSTGYTDYHRKFRGRVTMTRDTSISTAYMELSRLRSDDTAVYYCARSTFDAWGQGTMVTVSSGGGGSGGGGSGGGGSDIQMTQSPSSLSASVGDRVSITCRASQEISGYLSWFQQKPGKAIKRLIYATSSLDAGVPSRFSGSGSGTDFTLTISSLQPEDFADYYCLQYASYPLTFGCGTKLEIKSGGGGSQVQLVQSGAEVKKPGASVKVSCKASGYTFTSYGISWVRQAPGQCLEWMGWISAYNGQTIYAQKLQGRVTMTRDTSTSTAYMELRSLRSDDTAVYYCARDPDYYGSGSYSDYWGQGTLVTVSSGGGGSGGGGSGGGGSEIVMTQSPATLSVSPGERATLSCRASQSVSSNLAWYQQKPGQAPRLLIYGASNRATGIPARFSGSGSGTEFTLTISSLQSEDFAVYYCQQYHSWPLLTFGCGTKVEIKSGGGGSEVQLVESGGGLVQPGGSLKLSCAASGFTFNKYAMNWVRQAPGKGLEWVARIRSKYNNYATYYADSVKDRFTISRDDSKNTAYLQMNNLKTEDTAVYYCVRHGNFGNSYISYWAYWGQGTLVTVSSGGGGSGGGGSGGGGSQTVVTQEPSLTVSPGGTVTLTCGSSTGAVTSGNYPNWVQQKPGQAPRGLIGGTKFLAPGTPARFSGSLLGGKAALTLSGVQPEDEAEYYCVLWYSNRWVFGGGTKLTVL

SEQ ID NO: 1805 - protein, 1230 aa, Artificial Sequence
  Synthetic
QVQLVQSGAELKKPGASVKVSCKTSGYTFTDYWMHWVRQAPGQCLEWMGYITPSTGYTDYHRKFRGRVTMTRDTSISTAYMELSRLRSDDTAVYYCARSTFDAWGQGTMVTVSSGGGGSGGGGSGGGGSDIQMTQSPSSLSASVGDRVSITCRASQEISGYLSWFQQKPGKAIKRLIYATSSLDAGVPSRFSGSGSGTDFTLTISSLQPEDFADYYCLQYASYPLTFGCGTKLEIKSGGGGSQVQLVQSGAEVKKPGASVKVSCKASGYTFTSYGISWVRQAPGQCLEWMGWISAYNGQTIYAQKLQGRVTMTRDTSTSTAYMELRSLRSDDTAVYYCARDPDYYGSGSYSDYWGQGTLVTVSSGGGGSGGGGSGGGGSEIVMTQSPATLSVSPGERATLSCRASQSVSSNLAWYQQKPGQAPRLLIYGASNRATGIPARFSGSGSGTEFTLTISSLQSEDFAVYYCQQYHSWPLLTFGCGTKVEIKSGGGGSEVQLVESGGGLVQPGGSLKLSCAASGFTFNKYAMNWVRQAPGKGLEWVARIRSKYNNYATYYADSVKDRFTISRDDSKNTAYLQMNNLKTEDTAVYYCVRHGNFGNSYISYWAYWGQGTLVTVSSGGGGSGGGGSGGGGSQTVVTQEPSLTVSPGGTVTLTCGSSTGAVTSGNYPNWVQQKPGQAPRGLIGGTKFLAPGTPARFSGSLLGGKAALTLSGVQPEDEAEYYCVLWYSNRWVFGGGTKLTVLGGGGDKTHTCPPCPAPELLGGPSVFLFPPKPKDTLMISRTPEVTCVVVDVSHEDPEVKFNWYVDGVEVHNAKTKPCEEQYGSTYRCVSVLTVLHQDWLNGKEYKCKVSNKALPAPIEKTISKAKGQPREPQVYTLPPSREEMTKNQVSLTCLVKGFYPSDIAVEWESNGQPENNYKTTPPVLDSDGSFFLYSKLTVDKSRWQQGNVFSCSVMHEALHNHYTQKSLSLSPGKGGGGSGGGGSGGGGSGGGGSGGGGSGGGGSDKTHTCPPCPAPELLGGPSVFLFPPKPKDTLMISRTPEVTCVVVDVSHEDPEVKFNWYVDGVEVHNAKTKPCEEQYGSTYRCVSVLTVLHQDWLNGKEYKCKVSNKALPAPIEKTISKAKGQPREPQVYTLPPSREEMTKNQVSLTCLVKGFYPSDIAVEWESNGQPENNYKTTPPVLDSDGSFFLYSKLTVDKSRWQQGNVFSCSVMHEALHNHYTQKSLSLSPGK

SEQ ID NO: 1806 - protein, 495 aa, Artificial Sequence
  Synthetic
QVQLVQSGAELKKPGASVKVSCKTSGYTFTDYWMHWVRQAPGQCLEWMGYITPSTGYTDYHRKFRGRVTMTRDTSISTAYMELSRLRSDDTAVYYCARSTFDAWGQGTMVTVSSGGGGSGGGGSGGGGSDIQMTQSPSSLSASVGDRVSITCRASQEISGYLSWFQQKPGKAIKRLIYATSSLDAGVPSRFSGSGSGTDFTLTISSLQPEDFADYYCLQYASYPLTFGCGTKLEIKSGGGGSQVQLVESGGGVVQPGRSLRLSCAASGFTFSNYGMHWVRQAPGKCLEWVAVISYEASNKNYADAVKGRFTISRDNSKNTLYLQMNSLRAEDTAVYYCARDRFGDYSGYYYYYGMDVWGQGTTVTVSSGGGGSGGGGSGGGGSDIVMTQTPLSLPVTPGQPASISCRSSQSLLHSSGKTYLDWYLQKPGQSPQLLIYLGSNRASGVPDRFSGSGSGTDFTLKISRVEAEDVGVYYCMQATQTPFTFGCGTKVEIK

SEQ ID NO: 1807 - protein, 750 aa, Artificial Sequence
  Synthetic
QVQLVQSGAELKKPGASVKVSCKTSGYTFTDYWMHWVRQAPGQCLEWMGYITPSTGYTDYHRKFRGRVTMTRDTSISTAYMELSRLRSDDTAVYYCARSTFDAWGQGTMVTVSSGGGGSGGGGSGGGGSDIQMTQSPSSLSASVGDRVSITCRASQEISGYLSWFQQKPGKAIKRLIYATSSLDAGVPSRFSGSGSGTDFTLTISSLQPEDFADYYCLQYASYPLTFGCGTKLEIKSGGGGSQVQLVESGGGVVQPGRSLRLSCAASGFTFSNYGMHWVRQAPGKCLEWVAVISYEASNKNYADAVKGRFTISRDNSKNTLYLQMNSLRAEDTAVYYCARDRFGDYSGYYYYYGMDVWGQGTTVTVSSGGGGSGGGGSGGGGSDIVMTQTPLSLPVTPGQPASISCRSSQSLLHSSGKTYLDWYLQKPGQSPQLLIYLGSNRASGVPDRFSGSGSGTDFTLKISRVEAEDVGVYYCMQATQTPFTFGCGTKVEIKSGGGGSEVQLVESGGGLVQPGGSLKLSCAASGFTFNKYAMNWVRQAPGKGLEWVARIRSKYNNYATYYADSVKDRFTISRDDSKNTAYLQMNNLKTEDTAVYYCVRHGNFGNSYISYWAYWGQGTLVTVSSGGGGSGGGGSGGGGSQTVVTQEPSLTVSPGGTVTLTCGSSTGAVTSGNYPNWVQQKPGQAPRGLIGGTKFLAPGTPARFSGSLLGGKAALTLSGVQPEDEAEYYCVLWYSNRWVFGGGTKLTVL

SEQ ID NO: 1808 - protein, 1238 aa, Artificial Sequence
  Synthetic
QVQLVQSGAELKKPGASVKVSCKTSGYTFTDYWMHWVRQAPGQCLEWMGYITPSTGYTDYHRKFRGRVTMTRDTSISTAYMELSRLRSDDTAVYYCARSTFDAWGQGTMVTVSSGGGGSGGGGSGGGGSDIQMTQSPSSLSASVGDRVSITCRASQEISGYLSWFQQKPGKAIKRLIYATSSLDAGVPSRFSGSGSGTDFTLTISSLQPEDFADYYCLQYASYPLTFGCGTKLEIKSGGGGSQVQLVESGGGVVQPGRSLRLSCAASGFTFSNYGMHWVRQAPGKCLEWVAVISYEASNKNYADAVKGRFTISRDNSKNTLYLQMNSLRAEDTAVYYCARDRFGDYSGYYYYYGMDVWGQGTTVTVSSGGGGSGGGGSGGGGSDIVMTQTPLSLPVTPGQPASISCRSSQSLLHSSGKTYLDWYLQKPGQSPQLLIYLGSNRASGVPDRFSGSGSGTDFTLKISRVEAEDVGVYYCMQATQTPFTFGCGTKVEIKSGGGGSEVQLVESGGGLVQPGGSLKLSCAASGFTFNKYAMNWVRQAPGKGLEWVARIRSKYNNYATYYADSVKDRFTISRDDSKNTAYLQMNNLKTEDTAVYYCVRHGNFGNSYISYWAYWGQGTLVTVSSGGGGSGGGGSGGGGSQTVVTQEPSLTVSPGGTVTLTCGSSTGAVTSGNYPNWVQQKPGQAPRGLIGGTKFLAPGTPARFSGSLLGGKAALTLSGVQPEDEAEYYCVLWYSNRWVFGGGTKLTVLGGGGDKTHTCPPCPAPELLGGPSVFLFPPKPKDTLMISRTPEVTCVVVDVSHEDPEVKFNWYVDGVEVHNAKTKPCEEQYGSTYRCVSVLTVLHQDWLNGKEYKCKVSNKALPAPIEKTISKAKGQPREPQVYTLPPSREEMTKNQVSLTCLVKGFYPSDIAVEWESNGQPENNYKTTPPVLDSDGSFFLYSKLTVDKSRWQQGNVFSCSVMHEALHNHYTQKSLSLSPGKGGGGSGGGGSGGGGSGGGGSGGGGSGGGGSDKTHTCPPCPAPELLGGPSVFLFPPKPKDTLMISRTPEVTCVVVDVSHEDPEVKFNWYVDGVEVHNAKTKPCEEQYGSTYRCVSVLTVLHQDWLNGKEYKCKVSNKALPAPIEKTISKAKGQPREPQVYTLPPSREEMTKNQVSLTCLVKGFYPSDIAVEWESNGQPENNYKTTPPVLDSDGSFFLYSKLTVDKSRWQQGNVFSCSVMHEALHNHYTQKSLSLSPGK

SEQ ID NO: 1809 - protein, 494 aa, Artificial Sequence
  Synthetic
QVQLVQSGAEVKKPGASVKVSCKASGYTFTSYWMHWVRQAPGQCLEWIGYITPSTGYTEYNQKFKGRVTMTRDKSTSTVYMELSSLTSEDTAVYYCARVHDYDRAMEYWGQGTTVTVSSGGGGSGGGGSGGGGSDIQMTQSPSSLSASVGDRVTITCKASQDINKYIAWYQQKPGKGPKLLIYYTSTLQPGVPSRFSGSGSGTDFTFTISSLQPEDIATYYCLQYASYPFTFGCGTRLEIKSGGGGSQVQLVESGGGVVQPGRSLRLSCAASGFTFSNYGMHWVRQAPGKCLEWVAVISYDAWFSQYADAVKGRFTVSRDNSKNTLYLQMNSLRAEDTAVYYCARDLITFGGHYYFGMDVWGQGTTVTVSSGGGGSGGGGSGGGGSEIVLTQSPGTLSLSPGERATLSCRASQSVSSNYLAWYQQKPGQAPRLLIYAASSRVTGIPDRFSGSGSGTDFTLTISRLEPEDFAVYYCQQYGSSPFTFGCGTKVEIK

SEQ ID NO: 1810 - protein, 749 aa, Artificial Sequence
  Synthetic
QVQLVQSGAEVKKPGASVKVSCKASGYTFTSYWMHWVRQAPGQCLEWIGYITPSTGYTEYNQKFKGRVTMTRDKSTSTVYMELSSLTSEDTAVYYCARVHDYDRAMEYWGQGTTVTVSSGGGGSGGGGSGGGGSDIQMTQSPSSLSASVGDRVTITCKASQDINKYIAWYQQKPGKGPKLLIYYTSTLQPGVPSRFSGSGSGTDFTFTISSLQPEDIATYYCLQYASYPFTFGCGTRLEIKSGGGGSQVQLVESGGGVVQPGRSLRLSCAASGFTFSNYGMHWVRQAPGKCLEWVAVISYDAWFSQYADAVKGRFTVSRDNSKNTLYLQMNSLRAEDTAVYYCARDLITFGGHYYFGMDVWGQGTTVTVSSGGGGSGGGGSGGGGSEIVLTQSPGTLSLSPGERATLSCRASQSVSSNYLAWYQQKPGQAPRLLIYAASSRVTGIPDRFSGSGSGTDFTLTISRLEPEDFAVYYCQQYGSSPFTFGCGTKVEIKSGGGGSEVQLVESGGGLVQPGGSLKLSCAASGFTFNKYAMNWVRQAPGKGLEWVARIRSKYNNYATYYADSVKDRFTISRDDSKNTAYLQMNNLKTEDTAVYYCVRHGNFGNSYISYWAYWGQGTLVTVSSGGGGSGGGGSGGGGSQTVVTQEPSLTVSPGGTVTLTCGSSTGAVTSGNYPNWVQQKPGQAPRGLIGGTKFLAPGTPARFSGSLLGGKAALTLSGVQPEDEAEYYCVLWYSNRWVFGGGTKLTVL

SEQ ID NO: 1811 - protein, 1237 aa, Artificial Sequence
  Synthetic
QVQLVQSGAEVKKPGASVKVSCKASGYTFTSYWMHWVRQAPGQCLEWIGYITPSTGYTEYNQKFKGRVTMTRDKSTSTVYMELSSLTSEDTAVYYCARVHDYDRAMEYWGQGTTVTVSSGGGGSGGGGSGGGGSDIQMTQSPSSLSASVGDRVTITCKASQDINKYIAWYQQKPGKGPKLLIYYTSTLQPGVPSRFSGSGSGTDFTFTISSLQPEDIATYYCLQYASYPFTFGCGTRLEIKSGGGGSQVQLVESGGGVVQPGRSLRLSCAASGFTFSNYGMHWVRQAPGKCLEWVAVISYDAWFSQYADAVKGRFTVSRDNSKNTLYLQMNSLRAEDTAVYYCARDLITFGGHYYFGMDVWGQGTTVTVSSGGGGSGGGGSGGGGSEIVLTQSPGTLSLSPGERATLSCRASQSVSSNYLAWYQQKPGQAPRLLIYAASSRVTGIPDRFSGSGSGTDFTLTISRLEPEDFAVYYCQQYGSSPFTFGCGTKVEIKSGGGGSEVQLVESGGGLVQPGGSLKLSCAASGFTFNKYAMNWVRQAPGKGLEWVARIRSKYNNYATYYADSVKDRFTISRDDSKNTAYLQMNNLKTEDTAVYYCVRHGNFGNSYISYWAYWGQGTLVTVSSGGGGSGGGGSGGGGSQTVVTQEPSLTVSPGGTVTLTCGSSTGAVTSGNYPNWVQQKPGQAPRGLIGGTKFLAPGTPARFSGSLLGGKAALTLSGVQPEDEAEYYCVLWYSNRWVFGGGTKLTVLGGGGDKTHTCPPCPAPELLGGPSVFLFPPKPKDTLMISRTPEVTCVVVDVSHEDPEVKFNWYVDGVEVHNAKTKPCEEQYGSTYRCVSVLTVLHQDWLNGKEYKCKVSNKALPAPIEKTISKAKGQPREPQVYTLPPSREEMTKNQVSLTCLVKGFYPSDIAVEWESNGQPENNYKTTPPVLDSDGSFFLYSKLTVDKSRWQQGNVFSCSVMHEALHNHYTQKSLSLSPGKGGGGSGGGGSGGGGSGGGGSGGGGSGGGGSDKTHTCPPCPAPELLGGPSVFLFPPKPKDTLMISRTPEVTCVVVDVSHEDPEVKFNWYVDGVEVHNAKTKPCEEQYGSTYRCVSVLTVLHQDWLNGKEYKCKVSNKALPAPIEKTISKAKGQPREPQVYTLPPSREEMTKNQVSLTCLVKGFYPSDIAVEWESNGQPENNYKTTPPVLDSDGSFFLYSKLTVDKSRWQQGNVFSCSVMHEALHNHYTQKSLSLSPGK

SEQ ID NO: 1812 - protein, 484 aa, Artificial Sequence
  Synthetic
QVQLVQSGAEVKKPGASVKVSCKASGYTFTSYWMHWVRQAPGQCLEWIGYITPSTGYTEYNQKFKGRVTMTRDKSTSTVYMELSSLTSEDTAVYYCARVHDYDRAMEYWGQGTTVTVSSGGGGSGGGGSGGGGSDIQMTQSPSSLSASVGDRVTITCKASQDINKYIAWYQQKPGKGPKLLIYYTSTLQPGVPSRFSGSGSGTDFTFTISSLQPEDIATYYCLQYASYPFTFGCGTRLEIKSGGGGSQVQLQESGPGLVKPSETLSLTCTVSGGSISSFYWSWIRQPPGKCLEWIGRISSSGDVDYNPSLKSRVTISVDTSKNQFSLKLSSVTAADTAVYYCAREGGFYYWGQGTLVTVSSGGGGSGGGGSGGGGSEIVLTQSPGTLSLSPGERATLSCRASQSVSSSYLAWYQQKPGQAPRLLIYGASSRATGIPDRFSGSGSGTDFTLTISRLEPEDFAVYYCQQYGSSPITFGCGTKLEIK

SEQ ID NO: 1813 - protein, 739 aa, Artificial Sequence
  Synthetic
QVQLVQSGAEVKKPGASVKVSCKASGYTFTSYWMHWVRQAPGQCLEWIGYITPSTGYTEYNQKFKGRVTMTRDKSTSTVYMELSSLTSEDTAVYYCARVHDYDRAMEYWGQGTTVTVSSGGGGSGGGGSGGGGSDIQMTQSPSSLSASVGDRVTITCKASQDINKYIAWYQQKPGKGPKLLIYYTSTLQPGVPSRFSGSGSGTDFTFTISSLQPEDIATYYCLQYASYPFTFGCGTRLEIKSGGGGSQVQLQESGPGLVKPSETLSLTCTVSGGSISSFYWSWIRQPPGKCLEWIGRISSSGDVDYNPSLKSRVTISVDTSKNQFSLKLSSVTAADTAVYYCAREGGFYYWGQGTLVTVSSGGGGSGGGGSGGGGSEIVLTQSPGTLSLSPGERATLSCRASQSVSSSYLAWYQQKPGQAPRLLIYGASSRATGIPDRFSGSGSGTDFTLTISRLEPEDFAVYYCQQYGSSPITFGCGTKLEIKSGGGGSEVQLVESGGGLVQPGGSLKLSCAASGFTFNKYAMNWVRQAPGKGLEWVARIRSKYNNYATYYADSVKDRFTISRDDSKNTAYLQMNNLKTEDTAVYYCVRHGNFGNSYISYWAYWGQGTLVTVSSGGGGSGGGGSGGGGSQTVVTQEPSLTVSPGGTVTLTCGSSTGAVTSGNYPNWVQQKPGQAPRGLIGGTKFLAPGTPARFSGSLLGGKAALTLSGVQPEDEAEYYCVLWYSNRWVFGGGTKLTVL

SEQ ID NO: 1814 - protein, 1227 aa, Artificial Sequence
  Synthetic
QVQLVQSGAEVKKPGASVKVSCKASGYTFTSYWMHWVRQAPGQCLEWIGYITPSTGYTEYNQKFKGRVTMTRDKSTSTVYMELSSLTSEDTAVYYCARVHDYDRAMEYWGQGTTVTVSSGGGGSGGGGSGGGGSDIQMTQSPSSLSASVGDRVTITCKASQDINKYIAWYQQKPGKGPKLLIYYTSTLQPGVPSRFSGSGSGTDFTFTISSLQPEDIATYYCLQYASYPFTFGCGTRLEIKSGGGGSQVQLQESGPGLVKPSETLSLTCTVSGGSISSFYWSWIRQPPGKCLEWIGRISSSGDVDYNPSLKSRVTISVDTSKNQFSLKLSSVTAADTAVYYCAREGGFYYWGQGTLVTVSSGGGGSGGGGSGGGGSEIVLTQSPGTLSLSPGERATLSCRASQSVSSSYLAWYQQKPGQAPRLLIYGASSRATGIPDRFSGSGSGTDFTLTISRLEPEDFAVYYCQQYGSSPITFGCGTKLEIKSGGGGSEVQLVESGGGLVQPGGSLKLSCAASGFTFNKYAMNWVRQAPGKGLEWVARIRSKYNNYATYYADSVKDRFTISRDDSKNTAYLQMNNLKTEDTAVYYCVRHGNFGNSYISYWAYWGQGTLVTVSSGGGGSGGGGSGGGGSQTVVTQEPSLTVSPGGTVTLTCGSSTGAVTSGNYPNWVQQKPGQAPRGLIGGTKFLAPGTPARFSGSLLGGKAALTLSGVQPEDEAEYYCVLWYSNRWVFGGGTKLTVLGGGGDKTHTCPPCPAPELLGGPSVFLFPPKPKDTLMISRTPEVTCVVVDVSHEDPEVKFNWYVDGVEVHNAKTKPCEEQYGSTYRCVSVLTVLHQDWLNGKEYKCKVSNKALPAPIEKTISKAKGQPREPQVYTLPPSREEMTKNQVSLTCLVKGFYPSDIAVEWESNGQPENNYKTTPPVLDSDGSFFLYSKLTVDKSRWQQGNVFSCSVMHEALHNHYTQKSLSLSPGKGGGGSGGGGSGGGGSGGGGSGGGGSGGGGSDKTHTCPPCPAPELLGGPSVFLFPPKPKDTLMISRTPEVTCVVVDVSHEDPEVKFNWYVDGVEVHNAKTKPCEEQYGSTYRCVSVLTVLHQDWLNGKEYKCKVSNKALPAPIEKTISKAKGQPREPQVYTLPPSREEMTKNQVSLTCLVKGFYPSDIAVEWESNGQPENNYKTTPPVLDSDGSFFLYSKLTVDKSRWQQGNVFSCSVMHEALHNHYTQKSLSLSPGK

SEQ ID NO: 1815 - protein, 492 aa, Artificial Sequence
  Synthetic
QVQLVQSGAEVKKPGASVKVSCKASGYTFTSYWMHWVRQAPGQCLEWIGYITPSTGYTEYNQKFKGRVTMTRDKSTSTVYMELSSLTSEDTAVYYCARVHDYDRAMEYWGQGTTVTVSSGGGGSGGGGSGGGGSDIQMTQSPSSLSASVGDRVTITCKASQDINKYIAWYQQKPGKGPKLLIYYTSTLQPGVPSRFSGSGSGTDFTFTISSLQPEDIATYYCLQYASYPFTFGCGTRLEIKSGGGGSQVQLVQSGAEVKKPGASVKVSCKASGYTFTSYGISWVRQAPGQCLEWMGWISAYSGNAIYAQKLQGRVTMTRDTSTSTAYMELRSLRSDDTAVYYCARDPDYYGSGSYSDYWGQGTLVTVSSGGGGSGGGGSGGGGSEIVLTQSPATLSVSPGERATLSCRASQSVSSNLAWYQQKPGQAPRLLIYGASSRATGIPARFSGSGSGTEFTLTISSLQSEDFAVYYCQQYHSWPLLTFGCGTKVEIK

SEQ ID NO: 1816 - protein, 747 aa, Artificial Sequence
  Synthetic
QVQLVQSGAEVKKPGASVKVSCKASGYTFTSYWMHWVRQAPGQCLEWIGYITPSTGYTEYNQKFKGRVTMTRDKSTSTVYMELSSLTSEDTAVYYCARVHDYDRAMEYWGQGTTVTVSSGGGGSGGGGSGGGGSDIQMTQSPSSLSASVGDRVTITCKASQDINKYIAWYQQKPGKGPKLLIYYTSTLQPGVPSRFSGSGSGTDFTFTISSLQPEDIATYYCLQYASYPFTFGCGTRLEIKSGGGGSQVQLVQSGAEVKKPGASVKVSCKASGYTFTSYGISWVRQAPGQCLEWMGWISAYSGNAIYAQKLQGRVTMTRDTSTSTAYMELRSLRSDDTAVYYCARDPDYYGSGSYSDYWGQGTLVTVSSGGGGSGGGGSGGGGSEIVLTQSPATLSVSPGERATLSCRASQSVSSNLAWYQQKPGQAPRLLIYGASSRATGIPARFSGSGSGTEFTLTISSLQSEDFAVYYCQQYHSWPLLTFGCGTKVEIKSGGGGSEVQLVESGGGLVQPGGSLKLSCAASGFTFNKYAMNWVRQAPGKGLEWVARIRSKYNNYATYYADSVKDRFTISRDDSKNTAYLQMNNLKTEDTAVYYCVRHGNFGNSYISYWAYWGQGTLVTVSSGGGGSGGGGSGGGGSQTVVTQEPSLTVSPGGTVTLTCGSSTGAVTSGNYPNWVQQKPGQAPRGLIGGTKFLAPGTPARFSGSLLGGKAALTLSGVQPEDEAEYYCVLWYSNRWVFGGGTKLTVL

SEQ ID NO: 1817 - protein, 1235 aa, Artificial Sequence
  Synthetic
QVQLVQSGAEVKKPGASVKVSCKASGYTFTSYWMHWVRQAPGQCLEWIGYITPSTGYTEYNQKFKGRVTMTRDKSTSTVYMELSSLTSEDTAVYYCARVHDYDRAMEYWGQGTTVTVSSGGGGSGGGGSGGGGSDIQMTQSPSSLSASVGDRVTITCKASQDINKYIAWYQQKPGKGPKLLIYYTSTLQPGVPSRFSGSGSGTDFTFTISSLQPEDIATYYCLQYASYPFTFGCGTRLEIKSGGGGSQVQLVQSGAEVKKPGASVKVSCKASGYTFTSYGISWVRQAPGQCLEWMGWISAYSGNAIYAQKLQGRVTMTRDTSTSTAYMELRSLRSDDTAVYYCARDPDYYGSGSYSDYWGQGTLVTVSSGGGGSGGGGSGGGGSEIVLTQSPATLSVSPGERATLSCRASQSVSSNLAWYQQKPGQAPRLLIYGASSRATGIPARFSGSGSGTEFTLTISSLQSEDFAVYYCQQYHSWPLLTFGCGTKVEIKSGGGGSEVQLVESGGGLVQPGGSLKLSCAASGFTFNKYAMNWVRQAPGKGLEWVARIRSKYNNYATYYADSVKDRFTISRDDSKNTAYLQMNNLKTEDTAVYYCVRHGNFGNSYISYWAYWGQGTLVTVSSGGGGSGGGGSGGGGSQTVVTQEPSLTVSPGGTVTLTCGSSTGAVTSGNYPNWVQQKPGQAPRGLIGGTKFLAPGTPARFSGSLLGGKAALTLSGVQPEDEAEYYCVLWYSNRWVFGGGTKLTVLGGGGDKTHTCPPCPAPELLGGPSVFLFPPKPKDTLMISRTPEVTCVVVDVSHEDPEVKFNWYVDGVEVHNAKTKPCEEQYGSTYRCVSVLTVLHQDWLNGKEYKCKVSNKALPAPIEKTISKAKGQPREPQVYTLPPSREEMTKNQVSLTCLVKGFYPSDIAVEWESNGQPENNYKTTPPVLDSDGSFFLYSKLTVDKSRWQQGNVFSCSVMHEALHNHYTQKSLSLSPGKGGGGSGGGGSGGGGSGGGGSGGGGSGGGGSDKTHTCPPCPAPELLGGPSVFLFPPKPKDTLMISRTPEVTCVVVDVSHEDPEVKFNWYVDGVEVHNAKTKPCEEQYGSTYRCVSVLTVLHQDWLNGKEYKCKVSNKALPAPIEKTISKAKGQPREPQVYTLPPSREEMTKNQVSLTCLVKGFYPSDIAVEWESNGQPENNYKTTPPVLDSDGSFFLYSKLTVDKSRWQQGNVFSCSVMHEALHNHYTQKSLSLSPGK

SEQ ID NO: 1818 - protein, 492 aa, Artificial Sequence
  Synthetic
QVQLVQSGAEVKKPGASVKVSCKASGYTFTSYWMHWVRQAPGQCLEWIGYITPSTGYTEYNQKFKGRVTMTRDKSTSTVYMELSSLTSEDTAVYYCARVHDYDRAMEYWGQGTTVTVSSGGGGSGGGGSGGGGSDIQMTQSPSSLSASVGDRVTITCKASQDINKYIAWYQQKPGKGPKLLIYYTSTLQPGVPSRFSGSGSGTDFTFTISSLQPEDIATYYCLQYASYPFTFGCGTRLEIKSGGGGSQVQLVQSGAEVKKPGASVKVSCKASGYTFTSYGISWVRQAPGQCLEWMGWISAYNGQTIYAQKLQGRVTMTRDTSTSTAYMELRSLRSDDTAVYYCARDPDYYGSGSYSDYWGQGTLVTVSSGGGGSGGGGSGGGGSEIVMTQSPATLSVSPGERATLSCRASQSVSSNLAWYQQKPGQAPRLLIYGASNRATGIPARFSGSGSGTEFTLTISSLQSEDFAVYYCQQYHSWPLLTFGCGTKVEIK

SEQ ID NO: 1819 - protein, 747 aa, Artificial Sequence
  Synthetic
QVQLVQSGAEVKKPGASVKVSCKASGYTFTSYWMHWVRQAPGQCLEWIGYITPSTGYTEYNQKFKGRVTMTRDKSTSTVYMELSSLTSEDTAVYYCARVHDYDRAMEYWGQGTTVTVSSGGGGSGGGGSGGGGSDIQMTQSPSSLSASVGDRVTITCKASQDINKYIAWYQQKPGKGPKLLIYYTSTLQPGVPSRFSGSGSGTDFTFTISSLQPEDIATYYCLQYASYPFTFGCGTRLEIKSGGGGSQVQLVQSGAEVKKPGASVKVSCKASGYTFTSYGISWVRQAPGQCLEWMGWISAYNGQTIYAQKLQGRVTMTRDTSTSTAYMELRSLRSDDTAVYYCARDPDYYGSGSYSDYWGQGTLVTVSSGGGGSGGGGSGGGGSEIVMTQSPATLSVSPGERATLSCRASQSVSSNLAWYQQKPGQAPRLLIYGASNRATGIPARFSGSGSGTEFTLTISSLQSEDFAVYYCQQYHSWPLLTFGCGTKVEIKSGGGGSEVQLVESGGGLVQPGGSLKLSCAASGFTFNKYAMNWVRQAPGKGLEWVARIRSKYNNYATYYADSVKDRFTISRDDSKNTAYLQMNNLKTEDTAVYYCVRHGNFGNSYISYWAYWGQGTLVTVSSGGGGSGGGGSGGGGSQTVVTQEPSLTVSPGGTVTLTCGSSTGAVTSGNYPNWVQQKPGQAPRGLIGGTKFLAPGTPARFSGSLLGGKAALTLSGVQPEDEAEYYCVLWYSNRWVFGGGTKLTVL

SEQ ID NO: 1820 - protein, 1235 aa, Artificial Sequence
  Synthetic
QVQLVQSGAEVKKPGASVKVSCKASGYTFTSYWMHWVRQAPGQCLEWIGYITPSTGYTEYNQKFKGRVTMTRDKSTSTVYMELSSLTSEDTAVYYCARVHDYDRAMEYWGQGTTVTVSSGGGGSGGGGSGGGGSDIQMTQSPSSLSASVGDRVTITCKASQDINKYIAWYQQKPGKGPKLLIYYTSTLQPGVPSRFSGSGSGTDFTFTISSLQPEDIATYYCLQYASYPFTFGCGTRLEIKSGGGGSQVQLVQSGAEVKKPGASVKVSCKASGYTFTSYGISWVRQAPGQCLEWMGWISAYNGQTIYAQKLQGRVTMTRDTSTSTAYMELRSLRSDDTAVYYCARDPDYYGSGSYSDYWGQGTLVTVSSGGGGSGGGGSGGGGSEIVMTQSPATLSVSPGERATLSCRASQSVSSNLAWYQQKPGQAPRLLIYGASNRATGIPARFSGSGSGTEFTLTISSLQSEDFAVYYCQQYHSWPLLTFGCGTKVEIKSGGGGSEVQLVESGGGLVQPGGSLKLSCAASGFTFNKYAMNWVRQAPGKGLEWVARIRSKYNNYATYYADSVKDRFTISRDDSKNTAYLQMNNLKTEDTAVYYCVRHGNFGNSYISYWAYWGQGTLVTVSSGGGGSGGGGSGGGGSQTVVTQEPSLTVSPGGTVTLTCGSSTGAVTSGNYPNWVQQKPGQAPRGLIGGTKFLAPGTPARFSGSLLGGKAALTLSGVQPEDEAEYYCVLWYSNRWVFGGGTKLTVLGGGGDKTHTCPPCPAPELLGGPSVFLFPPKPKDTLMISRTPEVTCVVVDVSHEDPEVKFNWYVDGVEVHNAKTKPCEEQYGSTYRCVSVLTVLHQDWLNGKEYKCKVSNKALPAPIEKTISKAKGQPREPQVYTLPPSREEMTKNQVSLTCLVKGFYPSDIAVEWESNGQPENNYKTTPPVLDSDGSFFLYSKLTVDKSRWQQGNVFSCSVMHEALHNHYTQKSLSLSPGKGGGGSGGGGSGGGGSGGGGSGGGGSGGGGSDKTHTCPPCPAPELLGGPSVFLFPPKPKDTLMISRTPEVTCVVVDVSHEDPEVKFNWYVDGVEVHNAKTKPCEEQYGSTYRCVSVLTVLHQDWLNGKEYKCKVSNKALPAPIEKTISKAKGQPREPQVYTLPPSREEMTKNQVSLTCLVKGFYPSDIAVEWESNGQPENNYKTTPPVLDSDGSFFLYSKLTVDKSRWQQGNVFSCSVMHEALHNHYTQKSLSLSPGK

SEQ ID NO: 1821 - protein, 500 aa, Artificial Sequence
  Synthetic
QVQLVQSGAEVKKPGASVKVSCKASGYTFTSYWMHWVRQAPGQCLEWIGYITPSTGYTEYNQKFKGRVTMTRDKSTSTVYMELSSLTSEDTAVYYCARVHDYDRAMEYWGQGTTVTVSSGGGGSGGGGSGGGGSDIQMTQSPSSLSASVGDRVTITCKASQDINKYIAWYQQKPGKGPKLLIYYTSTLQPGVPSRFSGSGSGTDFTFTISSLQPEDIATYYCLQYASYPFTFGCGTRLEIKSGGGGSQVQLVESGGGVVQPGRSLRLSCAASGFTFSNYGMHWVRQAPGKCLEWVAVISYEASNKNYADAVKGRFTISRDNSKNTLYLQMNSLRAEDTAVYYCARDRFGDYSGYYYYYGMDVWGQGTTVTVSSGGGGSGGGGSGGGGSDIVMTQTPLSLPVTPGQPASISCRSSQSLLHSSGKTYLDWYLQKPGQSPQLLIYLGSNRASGVPDRFSGSGSGTDFTLKISRVEAEDVGVYYCMQATQTPFTFGCGTKVEIK

SEQ ID NO: 1822 - protein, 755 aa, Artificial Sequence
  Synthetic
QVQLVQSGAEVKKPGASVKVSCKASGYTFTSYWMHWVRQAPGQCLEWIGYITPSTGYTEYNQKFKGRVTMTRDKSTSTVYMELSSLTSEDTAVYYCARVHDYDRAMEYWGQGTTVTVSSGGGGSGGGGSGGGGSDIQMTQSPSSLSASVGDRVTITCKASQDINKYIAWYQQKPGKGPKLLIYYTSTLQPGVPSRFSGSGSGTDFTFTISSLQPEDIATYYCLQYASYPFTFGCGTRLEIKSGGGGSQVQLVESGGGVVQPGRSLRLSCAASGFTFSNYGMHWVRQAPGKCLEWVAVISYEASNKNYADAVKGRFTISRDNSKNTLYLQMNSLRAEDTAVYYCARDRFGDYSGYYYYYGMDVWGQGTTVTVSSGGGGSGGGGSGGGGSDIVMTQTPLSLPVTPGQPASISCRSSQSLLHSSGKTYLDWYLQKPGQSPQLLIYLGSNRASGVPDRFSGSGSGTDFTLKISRVEAEDVGVYYCMQATQTPFTFGCGTKVEIKSGGGGSEVQLVESGGGLVQPGGSLKLSCAASGFTFNKYAMNWVRQAPGKGLEWVARIRSKYNNYATYYADSVKDRFTISRDDSKNTAYLQMNNLKTEDTAVYYCVRHGNFGNSYISYWAYWGQGTLVTVSSGGGGSGGGGSGGGGSQTVVTQEPSLTVSPGGTVTLTCGSSTGAVTSGNYPNWVQQKPGQAPRGLIGGTKFLAPGTPARFSGSLLGGKAALTLSGVQPEDEAEYYCVLWYSNRWVFGGGTKLTVL

SEQ ID NO: 1823 - protein, 1243 aa, Artificial Sequence
  Synthetic
QVQLVQSGAEVKKPGASVKVSCKASGYTFTSYWMHWVRQAPGQCLEWIGYITPSTGYTEYNQKFKGRVTMTRDKSTSTVYMELSSLTSEDTAVYYCARVHDYDRAMEYWGQGTTVTVSSGGGGSGGGGSGGGGSDIQMTQSPSSLSASVGDRVTITCKASQDINKYIAWYQQKPGKGPKLLIYYTSTLQPGVPSRFSGSGSGTDFTFTISSLQPEDIATYYCLQYASYPFTFGCGTRLEIKSGGGGSQVQLVESGGGVVQPGRSLRLSCAASGFTFSNYGMHWVRQAPGKCLEWVAVISYEASNKNYADAVKGRFTISRDNSKNTLYLQMNSLRAEDTAVYYCARDRFGDYSGYYYYYGMDVWGQGTTVTVSSGGGGSGGGGSGGGGSDIVMTQTPLSLPVTPGQPASISCRSSQSLLHSSGKTYLDWYLQKPGQSPQLLIYLGSNRASGVPDRFSGSGSGTDFTLKISRVEAEDVGVYYCMQATQTPFTFGCGTKVEIKSGGGGSEVQLVESGGGLVQPGGSLKLSCAASGFTFNKYAMNWVRQAPGKGLEWVARIRSKYNNYATYYADSVKDRFTISRDDSKNTAYLQMNNLKTEDTAVYYCVRHGNFGNSYISYWAYWGQGTLVTVSSGGGGSGGGGSGGGGSQTVVTQEPSLTVSPGGTVTLTCGSSTGAVTSGNYPNWVQQKPGQAPRGLIGGTKFLAPGTPARFSGSLLGGKAALTLSGVQPEDEAEYYCVLWYSNRWVFGGGTKLTVLGGGGDKTHTCPPCPAPELLGGPSVFLFPPKPKDTLMISRTPEVTCVVVDVSHEDPEVKFNWYVDGVEVHNAKTKPCEEQYGSTYRCVSVLTVLHQDWLNGKEYKCKVSNKALPAPIEKTISKAKGQPREPQVYTLPPSREEMTKNQVSLTCLVKGFYPSDIAVEWESNGQPENNYKTTPPVLDSDGSFFLYSKLTVDKSRWQQGNVFSCSVMHEALHNHYTQKSLSLSPGKGGGGSGGGGSGGGGSGGGGSGGGGSGGGGSDKTHTCPPCPAPELLGGPSVFLFPPKPKDTLMISRTPEVTCVVVDVSHEDPEVKFNWYVDGVEVHNAKTKPCEEQYGSTYRCVSVLTVLHQDWLNGKEYKCKVSNKALPAPIEKTISKAKGQPREPQVYTLPPSREEMTKNQVSLTCLVKGFYPSDIAVEWESNGQPENNYKTTPPVLDSDGSFFLYSKLTVDKSRWQQGNVFSCSVMHEALHNHYTQKSLSLSPGK

SEQ ID NO: 1824 - protein, 487 aa, Artificial Sequence
  Synthetic
QVQLVQSGAELKKPGASVKVSCKTSGYTFTDYWMHWVRQAPGQCLEWMGYITPSTGYTDYHRKFRGRVTMTRDTSISTAYMELSRLRSDDTAVYYCARSTFDAWGQGTMVTVSSGGGGSGGGGSGGGGSDIQMTQSPSSLSASVGDRVSITCRASQEISGYLSWFQQKPGKAIKRLIYATSSLDAGVPSRFSGSGSGTDFTLTISSLQPEDFADYYCLQYASYPLTFGCGTKLEIKSGGGGSQVQLVQSGAEVKKPGASVKVSCKASGYTFTSYGISWVRQAPGQCLEWMGWISAYSGNAIYAQKLQGRVTMTRDTSTSTAYMELRSLRSDDTAVYYCARDPDYYGSGSYSDYWGQGTLVTVSSGGGGSGGGGSGGGGSEIVLTQSPATLSVSPGERATLSCRASQSVSSNLAWYQQKPGQAPRLLIYGASSRATGIPARFSGSGSGTEFTLTISSLQSEDFAVYYCQQYHSWPLLTFGCGTKVEIK

SEQ ID NO: 1825 - protein, 742 aa, Artificial Sequence
  Synthetic
QVQLVQSGAELKKPGASVKVSCKTSGYTFTDYWMHWVRQAPGQCLEWMGYITPSTGYTDYHRKFRGRVTMTRDTSISTAYMELSRLRSDDTAVYYCARSTFDAWGQGTMVTVSSGGGGSGGGGSGGGGSDIQMTQSPSSLSASVGDRVSITCRASQEISGYLSWFQQKPGKAIKRLIYATSSLDAGVPSRFSGSGSGTDFTLTISSLQPEDFADYYCLQYASYPLTFGCGTKLEIKSGGGGSQVQLVQSGAEVKKPGASVKVSCKASGYTFTSYGISWVRQAPGQCLEWMGWISAYSGNAIYAQKLQGRVTMTRDTSTSTAYMELRSLRSDDTAVYYCARDPDYYGSGSYSDYWGQGTLVTVSSGGGGSGGGGSGGGGSEIVLTQSPATLSVSPGERATLSCRASQSVSSNLAWYQQKPGQAPRLLIYGASSRATGIPARFSGSGSGTEFTLTISSLQSEDFAVYYCQQYHSWPLLTFGCGTKVEIKSGGGGSEVQLVESGGGLVQPGGSLKLSCAASGFTFNKYAMNWVRQAPGKGLEWVARIRSKYNNYATYYADSVKDRFTISRDDSKNTAYLQMNNLKTEDTAVYYCVRHGNFGNSYISYWAYWGQGTLVTVSSGGGGSGGGGSGGGGSQTVVTQEPSLTVSPGGTVTLTCGSSTGAVTSGNYPNWVQQKPGQAPRGLIGGTKFLAPGTPARFSGSLLGGKAALTLSGVQPEDEAEYYCVLWYSNRWVFGGGTKLTVL

SEQ ID NO: 1826 - protein, 1230 aa, Artificial Sequence
  Synthetic
QVQLVQSGAELKKPGASVKVSCKTSGYTFTDYWMHWVRQAPGQCLEWMGYITPSTGYTDYHRKFRGRVTMTRDTSISTAYMELSRLRSDDTAVYYCARSTFDAWGQGTMVTVSSGGGGSGGGGSGGGGSDIQMTQSPSSLSASVGDRVSITCRASQEISGYLSWFQQKPGKAIKRLIYATSSLDAGVPSRFSGSGSGTDFTLTISSLQPEDFADYYCLQYASYPLTFGCGTKLEIKSGGGGSQVQLVQSGAEVKKPGASVKVSCKASGYTFTSYGISWVRQAPGQCLEWMGWISAYSGNAIYAQKLQGRVTMTRDTSTSTAYMELRSLRSDDTAVYYCARDPDYYGSGSYSDYWGQGTLVTVSSGGGGSGGGGSGGGGSEIVLTQSPATLSVSPGERATLSCRASQSVSSNLAWYQQKPGQAPRLLIYGASSRATGIPARFSGSGSGTEFTLTISSLQSEDFAVYYCQQYHSWPLLTFGCGTKVEIKSGGGGSEVQLVESGGGLVQPGGSLKLSCAASGFTFNKYAMNWVRQAPGKGLEWVARIRSKYNNYATYYADSVKDRFTISRDDSKNTAYLQMNNLKTEDTAVYYCVRHGNFGNSYISYWAYWGQGTLVTVSSGGGGSGGGGSGGGGSQTVVTQEPSLTVSPGGTVTLTCGSSTGAVTSGNYPNWVQQKPGQAPRGLIGGTKFLAPGTPARFSGSLLGGKAALTLSGVQPEDEAEYYCVLWYSNRWVFGGGTKLTVLGGGGDKTHTCPPCPAPELLGGPSVFLFPPKPKDTLMISRTPEVTCVVVDVSHEDPEVKFNWYVDGVEVHNAKTKPCEEQYGSTYRCVSVLTVLHQDWLNGKEYKCKVSNKALPAPIEKTISKAKGQPREPQVYTLPPSREEMTKNQVSLTCLVKGFYPSDIAVEWESNGQPENNYKTTPPVLDSDGSFFLYSKLTVDKSRWQQGNVFSCSVMHEALHNHYTQKSLSLSPGKGGGGSGGGGSGGGGSGGGGSGGGGSGGGGSDKTHTCPPCPAPELLGGPSVFLFPPKPKDTLMISRTPEVTCVVVDVSHEDPEVKFNWYVDGVEVHNAKTKPCEEQYGSTYRCVSVLTVLHQDWLNGKEYKCKVSNKALPAPIEKTISKAKGQPREPQVYTLPPSREEMTKNQVSLTCLVKGFYPSDIAVEWESNGQPENNYKTTPPVLDSDGSFFLYSKLTVDKSRWQQGNVFSCSVMHEALHNHYTQKSLSLSPGK

SEQ ID NO: 1827 - protein, 5 aa, Artificial Sequence
  Synthetic
DYPMH

SEQ ID NO: 1828 - protein, 17 aa, Artificial Sequence
  Synthetic
GISWNSDYIVYADSVKG

SEQ ID NO: 1829 - protein, 13 aa, Artificial Sequence
  Synthetic
DTAYGGKYYAFDY

SEQ ID NO: 1830 - protein, 11 aa, Artificial Sequence
  Synthetic
RASQGISDYLA

SEQ ID NO: 1831 - protein, 7 aa, Artificial Sequence
  Synthetic
AASTLQS

SEQ ID NO: 1832 - protein, 9 aa, Artificial Sequence
  Synthetic
QKYNSAPYT

SEQ ID NO: 1833 - protein, 122 aa, Artificial Sequence
  Synthetic
EVQLVESGGGLVQPGGSLRLSCAASGFTFHDYPMHWVRQAPGKCLEWVSGISWNSDYIVYADSVKGRFTISRDNAKNSLYLQMNSLRPEDTALYYCAKDTAYGGKYYAFDYWGQGTPVTVSS

SEQ ID NO: 1834 - protein, 107 aa, Artificial Sequence
  Synthetic
DIQMTQSPSSLSASVGDRVTITCRASQGISDYLAWYQQKPGKVPKLLIYAASTLQSGVPSRFSGSGSGTDFTLTISSLQPEDVATYYCQKYNSAPYTFGCGTKLEIK

SEQ ID NO: 1835 - protein, 244 aa, Artificial Sequence
  Synthetic
EVQLVESGGGLVQPGGSLRLSCAASGFTFHDYPMHWVRQAPGKCLEWVSGISWNSDYIVYADSVKGRFTISRDNAKNSLYLQMNSLRPEDTALYYCAKDTAYGGKYYAFDYWGQGTPVTVSSGGGGSGGGGSGGGGSDIQMTQSPSSLSASVGDRVTITCRASQGISDYLAWYQQKPGKVPKLLIYAASTLQSGVPSRFSGSGSGTDFTLTISSLQPEDVATYYCQKYNSAPYTFGCGTKLEIK

SEQ ID NO: 1836 - protein, 499 aa, Artificial Sequence
  Synthetic
EVQLVESGGGLVQPGGSLRLSCAASGFTFHDYPMHWVRQAPGKCLEWVSGISWNSDYIVYADSVKGRFTISRDNAKNSLYLQMNSLRPEDTALYYCAKDTAYGGKYYAFDYWGQGTPVTVSSGGGGSGGGGSGGGGSDIQMTQSPSSLSASVGDRVTITCRASQGISDYLAWYQQKPGKVPKLLIYAASTLQSGVPSRFSGSGSGTDFTLTISSLQPEDVATYYCQKYNSAPYTFGCGTKLEIKSGGGGSEVQLVESGGGLVQPGGSLKLSCAASGFTFNKYAMNWVRQAPGKGLEWVARIRSKYNNYATYYADSVKDRFTISRDDSKNTAYLQMNNLKTEDTAVYYCVRHGNFGNSYISYWAYWGQGTLVTVSSGGGGSGGGGSGGGGSQTVVTQEPSLTVSPGGTVTLTCGSSTGAVTSGNYPNWVQQKPGQAPRGLIGGTKFLAPGTPARFSGSLLGGKAALTLSGVQPEDEAEYYCVLWYSNRWVFGGGTKLTVL

SEQ ID NO: 1837 - protein, 499 aa, Artificial Sequence
  Synthetic
EVQLVESGGGLVQPGGSLRLSCAASGFTFHDYPMHWVRQAPGKCLEWVSGISWNSDYIVYADSVKGRFTISRDNAKNSLYLQMNSLRPEDTALYYCAKDTAYGGKYYAFDYWGQGTPVTVSSGGGGSGGGGSGGGGSDIQMTQSPSSLSASVGDRVTITCRASQGISDYLAWYQQKPGKVPKLLIYAASTLQSGVPSRFSGSGSGTDFTLTISSLQPEDVATYYCQKYNSAPYTFGCGTKLEIKSGGGGSEVQLVESGGGLVQPGGSLKLSCAASGFTFNKYAINWVRQAPGKGLEWVARIRSKYNNYATYYADAVKDRFTISRDDSKNTVYLQMNNLKTEDTAVYYCARAGNFGSSYISYWAYWGQGTLVTVSSGGGGSGGGGSGGGGSQTVVTQEPSLTVSPGGTVTITCGSSTGAVTSGNYPNWVQKKPGQAPRGLIGGTKFLAPGTPARFSGSLSGGKAALTLSGVQPEDEAEYYCVLWYSNRWVFGSGTKLTVL

SEQ ID NO: 1838 - protein, 987 aa, Artificial Sequence
  Synthetic
EVQLVESGGGLVQPGGSLRLSCAASGFTFHDYPMHWVRQAPGKCLEWVSGISWNSDYIVYADSVKGRFTISRDNAKNSLYLQMNSLRPEDTALYYCAKDTAYGGKYYAFDYWGQGTPVTVSSGGGGSGGGGSGGGGSDIQMTQSPSSLSASVGDRVTITCRASQGISDYLAWYQQKPGKVPKLLIYAASTLQSGVPSRFSGSGSGTDFTLTISSLQPEDVATYYCQKYNSAPYTFGCGTKLEIKSGGGGSEVQLVESGGGLVQPGGSLKLSCAASGFTFNKYAMNWVRQAPGKGLEWVARIRSKYNNYATYYADSVKDRFTISRDDSKNTAYLQMNNLKTEDTAVYYCVRHGNFGNSYISYWAYWGQGTLVTVSSGGGGSGGGGSGGGGSQTVVTQEPSLTVSPGGTVTLTCGSSTGAVTSGNYPNWVQQKPGQAPRGLIGGTKFLAPGTPARFSGSLLGGKAALTLSGVQPEDEAEYYCVLWYSNRWVFGGGTKLTVLGGGGDKTHTCPPCPAPELLGGPSVFLFPPKPKDTLMISRTPEVTCVVVDVSHEDPEVKFNWYVDGVEVHNAKTKPCEEQYGSTYRCVSVLTVLHQDWLNGKEYKCKVSNKALPAPIEKTISKAKGQPREPQVYTLPPSREEMTKNQVSLTCLVKGFYPSDIAVEWESNGQPENNYKTTPPVLDSDGSFFLYSKLTVDKSRWQQGNVFSCSVMHEALHNHYTQKSLSLSPGKGGGGSGGGGSGGGGSGGGGSGGGGSGGGGSDKTHTCPPCPAPELLGGPSVFLFPPKPKDTLMISRTPEVTCVVVDVSHEDPEVKFNWYVDGVEVHNAKTKPCEEQYGSTYRCVSVLTVLHQDWLNGKEYKCKVSNKALPAPIEKTISKAKGQPREPQVYTLPPSREEMTKNQVSLTCLVKGFYPSDIAVEWESNGQPENNYKTTPPVLDSDGSFFLYSKLTVDKSRWQQGNVFSCSVMHEALHNHYTQKSLSLSPGK

SEQ ID NO: 1839 - protein, 987 aa, Artificial Sequence
  Synthetic
EVQLVESGGGLVQPGGSLRLSCAASGFTFHDYPMHWVRQAPGKCLEWVSGISWNSDYIVYADSVKGRFTISRDNAKNSLYLQMNSLRPEDTALYYCAKDTAYGGKYYAFDYWGQGTPVTVSSGGGGSGGGGSGGGGSDIQMTQSPSSLSASVGDRVTITCRASQGISDYLAWYQQKPGKVPKLLIYAASTLQSGVPSRFSGSGSGTDFTLTISSLQPEDVATYYCQKYNSAPYTFGCGTKLEIKSGGGGSEVQLVESGGGLVQPGGSLKLSCAASGFTFNKYAINWVRQAPGKGLEWVARIRSKYNNYATYYADAVKDRFTISRDDSKNTVYLQMNNLKTEDTAVYYCARAGNFGSSYISYWAYWGQGTLVTVSSGGGGSGGGGSGGGGSQTVVTQEPSLTVSPGGTVTITCGSSTGAVTSGNYPNWVQKKPGQAPRGLIGGTKFLAPGTPARFSGSLSGGKAALTLSGVQPEDEAEYYCVLWYSNRWVFGSGTKLTVLGGGGDKTHTCPPCPAPELLGGPSVFLFPPKPKDTLMISRTPEVTCVVVDVSHEDPEVKFNWYVDGVEVHNAKTKPCEEQYGSTYRCVSVLTVLHQDWLNGKEYKCKVSNKALPAPIEKTISKAKGQPREPQVYTLPPSREEMTKNQVSLTCLVKGFYPSDIAVEWESNGQPENNYKTTPPVLDSDGSFFLYSKLTVDKSRWQQGNVFSCSVMHEALHNHYTQKSLSLSPGKGGGGSGGGGSGGGGSGGGGSGGGGSGGGGSDKTHTCPPCPAPELLGGPSVFLFPPKPKDTLMISRTPEVTCVVVDVSHEDPEVKFNWYVDGVEVHNAKTKPCEEQYGSTYRCVSVLTVLHQDWLNGKEYKCKVSNKALPAPIEKTISKAKGQPREPQVYTLPPSREEMTKNQVSLTCLVKGFYPSDIAVEWESNGQPENNYKTTPPVLDSDGSFFLYSKLTVDKSRWQQGNVFSCSVMHEALHNHYTQKSLSLSPGK

SEQ ID NO: 1840 - protein, 5 aa, Artificial Sequence
  Synthetic
DYAMH

SEQ ID NO: 1841 - protein, 17 aa, Artificial Sequence
  Synthetic
GIAWNSDSIGYADSVKG

SEQ ID NO: 1842 - protein, 14 aa, Artificial Sequence
  Synthetic
DTLYGSGSPRAFDI

SEQ ID NO: 1843 - protein, 11 aa, Artificial Sequence
  Synthetic
RASQSVNNNLA

SEQ ID NO: 1844 - protein, 7 aa, Artificial Sequence
  Synthetic
GASTRAT

SEQ ID NO: 1845 - protein, 9 aa, Artificial Sequence
  Synthetic
QQSNNWPIT

SEQ ID NO: 1846 - protein, 123 aa, Artificial Sequence
  Synthetic
EVQLVESGGGLVQPDRSLRLSCAASGFTFRDYAMHWVRQAPGKCLEWVSGIAWNSDSIGYADSVKGRFTISRDNAKNSLFLQMHSLRPEDTALYFCAKDTLYGSGSPRAFDIWGQGTMVTVSS

SEQ ID NO: 1847 - protein, 107 aa, Artificial Sequence
  Synthetic
EIVLTQSPATLSVSPGERATLSCRASQSVNNNLAWYQQKPGQAPRLLIYGASTRATGIPARFSGSGSGTEFTLTISRLEPEDFAVYYCQQSNNWPITFGCGTRLEIK

SEQ ID NO: 1848 - protein, 245 aa, Artificial Sequence
  Synthetic
EVQLVESGGGLVQPDRSLRLSCAASGFTFRDYAMHWVRQAPGKCLEWVSGIAWNSDSIGYADSVKGRFTISRDNAKNSLFLQMHSLRPEDTALYFCAKDTLYGSGSPRAFDIWGQGTMVTVSSGGGGSGGGGSGGGGSEIVLTQSPATLSVSPGERATLSCRASQSVNNNLAWYQQKPGQAPRLLIYGASTRATGIPARFSGSGSGTEFTLTISRLEPEDFAVYYCQQSNNWPITFGCGTRLEIK

SEQ ID NO: 1849 - protein, 500 aa, Artificial Sequence
  Synthetic
EVQLVESGGGLVQPDRSLRLSCAASGFTFRDYAMHWVRQAPGKCLEWVSGIAWNSDSIGYADSVKGRFTISRDNAKNSLFLQMHSLRPEDTALYFCAKDTLYGSGSPRAFDIWGQGTMVTVSSGGGGSGGGGSGGGGSEIVLTQSPATLSVSPGERATLSCRASQSVNNNLAWYQQKPGQAPRLLIYGASTRATGIPARFSGSGSGTEFTLTISRLEPEDFAVYYCQQSNNWPITFGCGTRLEIKSGGGGSEVQLVESGGGLVQPGGSLKLSCAASGFTFNKYAMNWVRQAPGKGLEWVARIRSKYNNYATYYADSVKDRFTISRDDSKNTAYLQMNNLKTEDTAVYYCVRHGNFGNSYISYWAYWGQGTLVTVSSGGGGSGGGGSGGGGSQTVVTQEPSLTVSPGGTVTLTCGSSTGAVTSGNYPNWVQQKPGQAPRGLIGGTKFLAPGTPARFSGSLLGGKAALTLSGVQPEDEAEYYCVLWYSNRWVFGGGTKLTVL

SEQ ID NO: 1850 - protein, 500 aa, Artificial Sequence
  Synthetic
EVQLVESGGGLVQPDRSLRLSCAASGFTFRDYAMHWVRQAPGKCLEWVSGIAWNSDSIGYADSVKGRFTISRDNAKNSLFLQMHSLRPEDTALYFCAKDTLYGSGSPRAFDIWGQGTMVTVSSGGGGSGGGGSGGGGSEIVLTQSPATLSVSPGERATLSCRASQSVNNNLAWYQQKPGQAPRLLIYGASTRATGIPARFSGSGSGTEFTLTISRLEPEDFAVYYCQQSNNWPITFGCGTRLEIKSGGGGSEVQLVESGGGLVQPGGSLKLSCAASGFTFNKYAINWVRQAPGKGLEWVARIRSKYNNYATYYADAVKDRFTISRDDSKNTVYLQMNNLKTEDTAVYYCARAGNFGSSYISYWAYWGQGTLVTVSSGGGGSGGGGSGGGGSQTVVTQEPSLTVSPGGTVTITCGSSTGAVTSGNYPNWVQKKPGQAPRGLIGGTKFLAPGTPARFSGSLSGGKAALTLSGVQPEDEAEYYCVLWYSNRWVFGSGTKLTVL

SEQ ID NO: 1851 - protein, 988 aa, Artificial Sequence
  Synthetic
EVQLVESGGGLVQPDRSLRLSCAASGFTFRDYAMHWVRQAPGKCLEWVSGIAWNSDSIGYADSVKGRFTISRDNAKNSLFLQMHSLRPEDTALYFCAKDTLYGSGSPRAFDIWGQGTMVTVSSGGGGSGGGGSGGGGSEIVLTQSPATLSVSPGERATLSCRASQSVNNNLAWYQQKPGQAPRLLIYGASTRATGIPARFSGSGSGTEFTLTISRLEPEDFAVYYCQQSNNWPITFGCGTRLEIKSGGGGSEVQLVESGGGLVQPGGSLKLSCAASGFTFNKYAMNWVRQAPGKGLEWVARIRSKYNNYATYYADSVKDRFTISRDDSKNTAYLQMNNLKTEDTAVYYCVRHGNFGNSYISYWAYWGQGTLVTVSSGGGGSGGGGSGGGGSQTVVTQEPSLTVSPGGTVTLTCGSSTGAVTSGNYPNWVQQKPGQAPRGLIGGTKFLAPGTPARFSGSLLGGKAALTLSGVQPEDEAEYYCVLWYSNRWVFGGGTKLTVLGGGGDKTHTCPPCPAPELLGGPSVFLFPPKPKDTLMISRTPEVTCVVVDVSHEDPEVKFNWYVDGVEVHNAKTKPCEEQYGSTYRCVSVLTVLHQDWLNGKEYKCKVSNKALPAPIEKTISKAKGQPREPQVYTLPPSREEMTKNQVSLTCLVKGFYPSDIAVEWESNGQPENNYKTTPPVLDSDGSFFLYSKLTVDKSRWQQGNVFSCSVMHEALHNHYTQKSLSLSPGKGGGGSGGGGSGGGGSGGGGSGGGGSGGGGSDKTHTCPPCPAPELLGGPSVFLFPPKPKDTLMISRTPEVTCVVVDVSHEDPEVKFNWYVDGVEVHNAKTKPCEEQYGSTYRCVSVLTVLHQDWLNGKEYKCKVSNKALPAPIEKTISKAKGQPREPQVYTLPPSREEMTKNQVSLTCLVKGFYPSDIAVEWESNGQPENNYKTTPPVLDSDGSFFLYSKLTVDKSRWQQGNVFSCSVMHEALHNHYTQKSLSLSPGK

SEQ ID NO: 1852 - protein, 988 aa, Artificial Sequence
  Synthetic
EVQLVESGGGLVQPDRSLRLSCAASGFTFRDYAMHWVRQAPGKCLEWVSGIAWNSDSIGYADSVKGRFTISRDNAKNSLFLQMHSLRPEDTALYFCAKDTLYGSGSPRAFDIWGQGTMVTVSSGGGGSGGGGSGGGGSEIVLTQSPATLSVSPGERATLSCRASQSVNNNLAWYQQKPGQAPRLLIYGASTRATGIPARFSGSGSGTEFTLTISRLEPEDFAVYYCQQSNNWPITFGCGTRLEIKSGGGGSEVQLVESGGGLVQPGGSLKLSCAASGFTFNKYAINWVRQAPGKGLEWVARIRSKYNNYATYYADAVKDRFTISRDDSKNTVYLQMNNLKTEDTAVYYCARAGNFGSSYISYWAYWGQGTLVTVSSGGGGSGGGGSGGGGSQTVVTQEPSLTVSPGGTVTITCGSSTGAVTSGNYPNWVQKKPGQAPRGLIGGTKFLAPGTPARFSGSLSGGKAALTLSGVQPEDEAEYYCVLWYSNRWVFGSGTKLTVLGGGGDKTHTCPPCPAPELLGGPSVFLFPPKPKDTLMISRTPEVTCVVVDVSHEDPEVKFNWYVDGVEVHNAKTKPCEEQYGSTYRCVSVLTVLHQDWLNGKEYKCKVSNKALPAPIEKTISKAKGQPREPQVYTLPPSREEMTKNQVSLTCLVKGFYPSDIAVEWESNGQPENNYKTTPPVLDSDGSFFLYSKLTVDKSRWQQGNVFSCSVMHEALHNHYTQKSLSLSPGKGGGGSGGGGSGGGGSGGGGSGGGGSGGGGSDKTHTCPPCPAPELLGGPSVFLFPPKPKDTLMISRTPEVTCVVVDVSHEDPEVKFNWYVDGVEVHNAKTKPCEEQYGSTYRCVSVLTVLHQDWLNGKEYKCKVSNKALPAPIEKTISKAKGQPREPQVYTLPPSREEMTKNQVSLTCLVKGFYPSDIAVEWESNGQPENNYKTTPPVLDSDGSFFLYSKLTVDKSRWQQGNVFSCSVMHEALHNHYTQKSLSLSPGK

SEQ ID NO: 1853 - protein, 5 aa, Artificial Sequence
  Synthetic
GHAMT

SEQ ID NO: 1854 - protein, 17 aa, Artificial Sequence
  Synthetic
TIYGSGGYTYYAGSVKG

SEQ ID NO: 1855 - protein, 10 aa, Artificial Sequence
  Synthetic
VGGYDWYFDL

SEQ ID NO: 1856 - protein, 11 aa, Artificial Sequence
  Synthetic
GGHNIGSKNVH

SEQ ID NO: 1857 - protein, 7 aa, Artificial Sequence
  Synthetic
RDTNRPS

SEQ ID NO: 1858 - protein, 9 aa, Artificial Sequence
  Synthetic
QLWDSTTVV

SEQ ID NO: 1859 - protein, 119 aa, Artificial Sequence
  Synthetic
EVQLLESGGGLVQPGGSLRLSCAASGFTFSGHAMTWVRQAPGKCLEWLSTIYGSGGYTYYAGSVKGRFTISRDNSKNTLYLQMNSLRAEDTAVYYCAKVGGYDWYFDLWGRGTLVTVSS

SEQ ID NO: 1860 - protein, 106 aa, Artificial Sequence
  Synthetic
SYELTQPPSVSVALGQTARITCGGHNIGSKNVHWYQQKPGQAPVLVIYRDTNRPSGIPERFSGSNSGNTATLTISRAQAGDEADYYCQLWDSTTVVFGCGTKLTVL

SEQ ID NO: 1861 - protein, 240 aa, Artificial Sequence
  Synthetic
EVQLLESGGGLVQPGGSLRLSCAASGFTFSGHAMTWVRQAPGKCLEWLSTIYGSGGYTYYAGSVKGRFTISRDNSKNTLYLQMNSLRAEDTAVYYCAKVGGYDWYFDLWGRGTLVTVSSGGGGSGGGGSGGGGSSYELTQPPSVSVALGQTARITCGGHNIGSKNVHWYQQKPGQAPVLVIYRDTNRPSGIPERFSGSNSGNTATLTISRAQAGDEADYYCQLWDSTTVVFGCGTKLTVL

SEQ ID NO: 1862 - protein, 495 aa, Artificial Sequence
  Synthetic
EVQLLESGGGLVQPGGSLRLSCAASGFTFSGHAMTWVRQAPGKCLEWLSTIYGSGGYTYYAGSVKGRFTISRDNSKNTLYLQMNSLRAEDTAVYYCAKVGGYDWYFDLWGRGTLVTVSSGGGGSGGGGSGGGGSSYELTQPPSVSVALGQTARITCGGHNIGSKNVHWYQQKPGQAPVLVIYRDTNRPSGIPERFSGSNSGNTATLTISRAQAGDEADYYCQLWDSTTVVFGCGTKLTVLSGGGGSEVQLVESGGGLVQPGGSLKLSCAASGFTFNKYAMNWVRQAPGKGLEWVARIRSKYNNYATYYADSVKDRFTISRDDSKNTAYLQMNNLKTEDTAVYYCVRHGNFGNSYISYWAYWGQGTLVTVSSGGGGSGGGGSGGGGSQTVVTQEPSLTVSPGGTVTLTCGSSTGAVTSGNYPNWVQQKPGQAPRGLIGGTKFLAPGTPARFSGSLLGGKAALTLSGVQPEDEAEYYCVLWYSNRWVFGGGTKLTVL

SEQ ID NO: 1863 - protein, 495 aa, Artificial Sequence
  Synthetic
EVQLLESGGGLVQPGGSLRLSCAASGFTFSGHAMTWVRQAPGKCLEWLSTIYGSGGYTYYAGSVKGRFTISRDNSKNTLYLQMNSLRAEDTAVYYCAKVGGYDWYFDLWGRGTLVTVSSGGGGSGGGGSGGGGSSYELTQPPSVSVALGQTARITCGGHNIGSKNVHWYQQKPGQAPVLVIYRDTNRPSGIPERFSGSNSGNTATLTISRAQAGDEADYYCQLWDSTTVVFGCGTKLTVLSGGGGSEVQLVESGGGLVQPGGSLKLSCAASGFTFNKYAINWVRQAPGKGLEWVARIRSKYNNYATYYADAVKDRFTISRDDSKNTVYLQMNNLKTEDTAVYYCARAGNFGSSYISYWAYWGQGTLVTVSSGGGGSGGGGSGGGGSQTVVTQEPSLTVSPGGTVTITCGSSTGAVTSGNYPNWVQKKPGQAPRGLIGGTKFLAPGTPARFSGSLSGGKAALTLSGVQPEDEAEYYCVLWYSNRWVFGSGTKLTVL

SEQ ID NO: 1864 - protein, 983 aa, Artificial Sequence
  Synthetic
EVQLLESGGGLVQPGGSLRLSCAASGFTFSGHAMTWVRQAPGKCLEWLSTIYGSGGYTYYAGSVKGRFTISRDNSKNTLYLQMNSLRAEDTAVYYCAKVGGYDWYFDLWGRGTLVTVSSGGGGSGGGGSGGGGSSYELTQPPSVSVALGQTARITCGGHNIGSKNVHWYQQKPGQAPVLVIYRDTNRPSGIPERFSGSNSGNTATLTISRAQAGDEADYYCQLWDSTTVVFGCGTKLTVLSGGGGSEVQLVESGGGLVQPGGSLKLSCAASGFTFNKYAMNWVRQAPGKGLEWVARIRSKYNNYATYYADSVKDRFTISRDDSKNTAYLQMNNLKTEDTAVYYCVRHGNFGNSYISYWAYWGQGTLVTVSSGGGGSGGGGSGGGGSQTVVTQEPSLTVSPGGTVTLTCGSSTGAVTSGNYPNWVQQKPGQAPRGLIGGTKFLAPGTPARFSGSLLGGKAALTLSGVQPEDEAEYYCVLWYSNRWVFGGGTKLTVLGGGGDKTHTCPPCPAPELLGGPSVFLFPPKPKDTLMISRTPEVTCVVVDVSHEDPEVKFNWYVDGVEVHNAKTKPCEEQYGSTYRCVSVLTVLHQDWLNGKEYKCKVSNKALPAPIEKTISKAKGQPREPQVYTLPPSREEMTKNQVSLTCLVKGFYPSDIAVEWESNGQPENNYKTTPPVLDSDGSFFLYSKLTVDKSRWQQGNVFSCSVMHEALHNHYTQKSLSLSPGKGGGGSGGGGSGGGGSGGGGSGGGGSGGGGSDKTHTCPPCPAPELLGGPSVFLFPPKPKDTLMISRTPEVTCVVVDVSHEDPEVKFNWYVDGVEVHNAKTKPCEEQYGSTYRCVSVLTVLHQDWLNGKEYKCKVSNKALPAPIEKTISKAKGQPREPQVYTLPPSREEMTKNQVSLTCLVKGFYPSDIAVEWESNGQPENNYKTTPPVLDSDGSFFLYSKLTVDKSRWQQGNVFSCSVMHEALHNHYTQKSLSLSPGK

SEQ ID NO: 1865 - protein, 983 aa, Artificial Sequence
  Synthetic
EVQLLESGGGLVQPGGSLRLSCAASGFTFSGHAMTWVRQAPGKCLEWLSTIYGSGGYTYYAGSVKGRFTISRDNSKNTLYLQMNSLRAEDTAVYYCAKVGGYDWYFDLWGRGTLVTVSSGGGGSGGGGSGGGGSSYELTQPPSVSVALGQTARITCGGHNIGSKNVHWYQQKPGQAPVLVIYRDTNRPSGIPERFSGSNSGNTATLTISRAQAGDEADYYCQLWDSTTVVFGCGTKLTVLSGGGGSEVQLVESGGGLVQPGGSLKLSCAASGFTFNKYAINWVRQAPGKGLEWVARIRSKYNNYATYYADAVKDRFTISRDDSKNTVYLQMNNLKTEDTAVYYCARAGNFGSSYISYWAYWGQGTLVTVSSGGGGSGGGGSGGGGSQTVVTQEPSLTVSPGGTVTITCGSSTGAVTSGNYPNWVQKKPGQAPRGLIGGTKFLAPGTPARFSGSLSGGKAALTLSGVQPEDEAEYYCVLWYSNRWVFGSGTKLTVLGGGGDKTHTCPPCPAPELLGGPSVFLFPPKPKDTLMISRTPEVTCVVVDVSHEDPEVKFNWYVDGVEVHNAKTKPCEEQYGSTYRCVSVLTVLHQDWLNGKEYKCKVSNKALPAPIEKTISKAKGQPREPQVYTLPPSREEMTKNQVSLTCLVKGFYPSDIAVEWESNGQPENNYKTTPPVLDSDGSFFLYSKLTVDKSRWQQGNVFSCSVMHEALHNHYTQKSLSLSPGKGGGGSGGGGSGGGGSGGGGSGGGGSGGGGSDKTHTCPPCPAPELLGGPSVFLFPPKPKDTLMISRTPEVTCVVVDVSHEDPEVKFNWYVDGVEVHNAKTKPCEEQYGSTYRCVSVLTVLHQDWLNGKEYKCKVSNKALPAPIEKTISKAKGQPREPQVYTLPPSREEMTKNQVSLTCLVKGFYPSDIAVEWESNGQPENNYKTTPPVLDSDGSFFLYSKLTVDKSRWQQGNVFSCSVMHEALHNHYTQKSLSLSPGK

SEQ ID NO: 1866 - protein, 5 aa, Artificial Sequence
  Synthetic
DYTMH

SEQ ID NO: 1867 - protein, 17 aa, Artificial Sequence
  Synthetic
GIGWNGYSKGYADSVKG

SEQ ID NO: 1868 - protein, 17 aa, Artificial Sequence
  Synthetic
DYHYGSGILDNYYGLDV

SEQ ID NO: 1869 - protein, 11 aa, Artificial Sequence
  Synthetic
RASQSISNNLA

SEQ ID NO: 1870 - protein, 7 aa, Artificial Sequence
  Synthetic
GASSRAT

SEQ ID NO: 1871 - protein, 9 aa, Artificial Sequence
  Synthetic
QQYKNWPLT

SEQ ID NO: 1872 - protein, 126 aa, Artificial Sequence
  Synthetic
EVQLVESGGGLVQPGGSLTLSCAASGFTFHDYTMHWVRQTPGKCLEWLSGIGWNGYSKGYADSVKGRFTISRDNAKNSLFLQMNSLTSDDTALYYCVKDYHYGSGILDNYYGLDVWGQGTTVTVSS

SEQ ID NO: 1873 - protein, 107 aa, Artificial Sequence
  Synthetic
EIVLTQSPATLSVSPGERATLSCRASQSISNNLAWYQQKPGQAPRLLIYGASSRATGIPDRFSGSGSGTEFTLTISSLQSEDFAVYYCQQYKNWPLTFGCGTKVDIK

SEQ ID NO: 1874 - protein, 248 aa, Artificial Sequence
  Synthetic
EVQLVESGGGLVQPGGSLTLSCAASGFTFHDYTMHWVRQTPGKCLEWLSGIGWNGYSKGYADSVKGRFTISRDNAKNSLFLQMNSLTSDDTALYYCVKDYHYGSGILDNYYGLDVWGQGTTVTVSSGGGGSGGGGSGGGGSEIVLTQSPATLSVSPGERATLSCRASQSISNNLAWYQQKPGQAPRLLIYGASSRATGIPDRFSGSGSGTEFTLTISSLQSEDFAVYYCQQYKNWPLTFGCGTKVDIK

SEQ ID NO: 1875 - protein, 503 aa, Artificial Sequence
  Synthetic
EVQLVESGGGLVQPGGSLTLSCAASGFTFHDYTMHWVRQTPGKCLEWLSGIGWNGYSKGYADSVKGRFTISRDNAKNSLFLQMNSLTSDDTALYYCVKDYHYGSGILDNYYGLDVWGQGTTVTVSSGGGGSGGGGSGGGGSEIVLTQSPATLSVSPGERATLSCRASQSISNNLAWYQQKPGQAPRLLIYGASSRATGIPDRFSGSGSGTEFTLTISSLQSEDFAVYYCQQYKNWPLTFGCGTKVDIKSGGGGSEVQLVESGGGLVQPGGSLKLSCAASGFTFNKYAMNWVRQAPGKGLEWVARIRSKYNNYATYYADSVKDRFTISRDDSKNTAYLQMNNLKTEDTAVYYCVRHGNFGNSYISYWAYWGQGTLVTVSSGGGGSGGGGSGGGGSQTVVTQEPSLTVSPGGTVTLTCGSSTGAVTSGNYPNWVQQKPGQAPRGLIGGTKFLAPGTPARFSGSLLGGKAALTLSGVQPEDEAEYYCVLWYSNRWVFGGGTKLTVL

SEQ ID NO: 1876 - protein, 503 aa, Artificial Sequence
  Synthetic
EVQLVESGGGLVQPGGSLTLSCAASGFTFHDYTMHWVRQTPGKCLEWLSGIGWNGYSKGYADSVKGRFTISRDNAKNSLFLQMNSLTSDDTALYYCVKDYHYGSGILDNYYGLDVWGQGTTVTVSSGGGGSGGGGSGGGGSEIVLTQSPATLSVSPGERATLSCRASQSISNNLAWYQQKPGQAPRLLIYGASSRATGIPDRFSGSGSGTEFTLTISSLQSEDFAVYYCQQYKNWPLTFGCGTKVDIKSGGGGSEVQLVESGGGLVQPGGSLKLSCAASGFTFNKYAINWVRQAPGKGLEWVARIRSKYNNYATYYADAVKDRFTISRDDSKNTVYLQMNNLKTEDTAVYYCARAGNFGSSYISYWAYWGQGTLVTVSSGGGGSGGGGSGGGGSQTVVTQEPSLTVSPGGTVTITCGSSTGAVTSGNYPNWVQKKPGQAPRGLIGGTKFLAPGTPARFSGSLSGGKAALTLSGVQPEDEAEYYCVLWYSNRWVFGSGTKLTVL

SEQ ID NO: 1877 - protein, 991 aa, Artificial Sequence
  Synthetic
EVQLVESGGGLVQPGGSLTLSCAASGFTFHDYTMHWVRQTPGKCLEWLSGIGWNGYSKGYADSVKGRFTISRDNAKNSLFLQMNSLTSDDTALYYCVKDYHYGSGILDNYYGLDVWGQGTTVTVSSGGGGSGGGGSGGGGSEIVLTQSPATLSVSPGERATLSCRASQSISNNLAWYQQKPGQAPRLLIYGASSRATGIPDRFSGSGSGTEFTLTISSLQSEDFAVYYCQQYKNWPLTFGCGTKVDIKSGGGGSEVQLVESGGGLVQPGGSLKLSCAASGFTFNKYAMNWVRQAPGKGLEWVARIRSKYNNYATYYADSVKDRFTISRDDSKNTAYLQMNNLKTEDTAVYYCVRHGNFGNSYISYWAYWGQGTLVTVSSGGGGSGGGGSGGGGSQTVVTQEPSLTVSPGGTVTLTCGSSTGAVTSGNYPNWVQQKPGQAPRGLIGGTKFLAPGTPARFSGSLLGGKAALTLSGVQPEDEAEYYCVLWYSNRWVFGGGTKLTVLGGGGDKTHTCPPCPAPELLGGPSVFLFPPKPKDTLMISRTPEVTCVVVDVSHEDPEVKFNWYVDGVEVHNAKTKPCEEQYGSTYRCVSVLTVLHQDWLNGKEYKCKVSNKALPAPIEKTISKAKGQPREPQVYTLPPSREEMTKNQVSLTCLVKGFYPSDIAVEWESNGQPENNYKTTPPVLDSDGSFFLYSKLTVDKSRWQQGNVFSCSVMHEALHNHYTQKSLSLSPGKGGGGSGGGGSGGGGSGGGGSGGGGSGGGGSDKTHTCPPCPAPELLGGPSVFLFPPKPKDTLMISRTPEVTCVVVDVSHEDPEVKFNWYVDGVEVHNAKTKPCEEQYGSTYRCVSVLTVLHQDWLNGKEYKCKVSNKALPAPIEKTISKAKGQPREPQVYTLPPSREEMTKNQVSLTCLVKGFYPSDIAVEWESNGQPENNYKTTPPVLDSDGSFFLYSKLTVDKSRWQQGNVFSCSVMHEALHNHYTQKSLSLSPGK

SEQ ID NO: 1878 - protein, 991 aa, Artificial Sequence
  Synthetic
EVQLVESGGGLVQPGGSLTLSCAASGFTFHDYTMHWVRQTPGKCLEWLSGIGWNGYSKGYADSVKGRFTISRDNAKNSLFLQMNSLTSDDTALYYCVKDYHYGSGILDNYYGLDVWGQGTTVTVSSGGGGSGGGGSGGGGSEIVLTQSPATLSVSPGERATLSCRASQSISNNLAWYQQKPGQAPRLLIYGASSRATGIPDRFSGSGSGTEFTLTISSLQSEDFAVYYCQQYKNWPLTFGCGTKVDIKSGGGGSEVQLVESGGGLVQPGGSLKLSCAASGFTFNKYAINWVRQAPGKGLEWVARIRSKYNNYATYYADAVKDRFTISRDDSKNTVYLQMNNLKTEDTAVYYCARAGNFGSSYISYWAYWGQGTLVTVSSGGGGSGGGGSGGGGSQTVVTQEPSLTVSPGGTVTITCGSSTGAVTSGNYPNWVQKKPGQAPRGLIGGTKFLAPGTPARFSGSLSGGKAALTLSGVQPEDEAEYYCVLWYSNRWVFGSGTKLTVLGGGGDKTHTCPPCPAPELLGGPSVFLFPPKPKDTLMISRTPEVTCVVVDVSHEDPEVKFNWYVDGVEVHNAKTKPCEEQYGSTYRCVSVLTVLHQDWLNGKEYKCKVSNKALPAPIEKTISKAKGQPREPQVYTLPPSREEMTKNQVSLTCLVKGFYPSDIAVEWESNGQPENNYKTTPPVLDSDGSFFLYSKLTVDKSRWQQGNVFSCSVMHEALHNHYTQKSLSLSPGKGGGGSGGGGSGGGGSGGGGSGGGGSGGGGSDKTHTCPPCPAPELLGGPSVFLFPPKPKDTLMISRTPEVTCVVVDVSHEDPEVKFNWYVDGVEVHNAKTKPCEEQYGSTYRCVSVLTVLHQDWLNGKEYKCKVSNKALPAPIEKTISKAKGQPREPQVYTLPPSREEMTKNQVSLTCLVKGFYPSDIAVEWESNGQPENNYKTTPPVLDSDGSFFLYSKLTVDKSRWQQGNVFSCSVMHEALHNHYTQKSLSLSPGK

SEQ ID NO: 1879 - protein, 5 aa, Artificial Sequence
  Synthetic
DYTMH

SEQ ID NO: 1880 - protein, 17 aa, Artificial Sequence
  Synthetic
GISWNTGTIGYADSVKG

SEQ ID NO: 1881 - protein, 16 aa, Artificial Sequence
  Synthetic
DAFYGGDYYYNYGMDV

SEQ ID NO: 1882 - protein, 11 aa, Artificial Sequence
  Synthetic
RASQSVNNNLA

SEQ ID NO: 1883 - protein, 7 aa, Artificial Sequence
  Synthetic
GASTRAT

SEQ ID NO: 1884 - protein, 9 aa, Artificial Sequence
  Synthetic
QQYNNWPLT

SEQ ID NO: 1885 - protein, 125 aa, Artificial Sequence
  Synthetic
EVQLVESGGGLVQPGRSLRLSCAASGFTFHDYTMHWVRQAPGKCLEWVSGISWNTGTIGYADSVKGRFTISRDNAKNSLYLQMNSLRAEDTALYYCVKDAFYGGDYYYNYGMDVWGHGTTVTVSS

SEQ ID NO: 1886 - protein, 107 aa, Artificial Sequence
  Synthetic
EIVLTQSPATLSVSPGERATLSCRASQSVNNNLAWYQQKPGQAPRLLIYGASTRATGIPARFSGSGSGTDFTLTISSLQSDDFAVYYCQQYNNWPLTFGCGTKVEIK

SEQ ID NO: 1887 - protein, 247 aa, Artificial Sequence
  Synthetic
EVQLVESGGGLVQPGRSLRLSCAASGFTFHDYTMHWVRQAPGKCLEWVSGISWNTGTIGYADSVKGRFTISRDNAKNSLYLQMNSLRAEDTALYYCVKDAFYGGDYYYNYGMDVWGHGTTVTVSSGGGGSGGGGSGGGGSEIVLTQSPATLSVSPGERATLSCRASQSVNNNLAWYQQKPGQAPRLLIYGASTRATGIPARFSGSGSGTDFTLTISSLQSDDFAVYYCQQYNNWPLTFGCGTKVEIK

SEQ ID NO: 1888 - protein, 502 aa, Artificial Sequence
  Synthetic
EVQLVESGGGLVQPGRSLRLSCAASGFTFHDYTMHWVRQAPGKCLEWVSGISWNTGTIGYADSVKGRFTISRDNAKNSLYLQMNSLRAEDTALYYCVKDAFYGGDYYYNYGMDVWGHGTTVTVSSGGGGSGGGGSGGGGSEIVLTQSPATLSVSPGERATLSCRASQSVNNNLAWYQQKPGQAPRLLIYGASTRATGIPARFSGSGSGTDFTLTISSLQSDDFAVYYCQQYNNWPLTFGCGTKVEIKSGGGGSEVQLVESGGGLVQPGGSLKLSCAASGFTFNKYAMNWVRQAPGKGLEWVARIRSKYNNYATYYADSVKDRFTISRDDSKNTAYLQMNNLKTEDTAVYYCVRHGNFGNSYISYWAYWGQGTLVTVSSGGGGSGGGGSGGGGSQTVVTQEPSLTVSPGGTVTLTCGSSTGAVTSGNYPNWVQQKPGQAPRGLIGGTKFLAPGTPARFSGSLLGGKAALTLSGVQPEDEAEYYCVLWYSNRWVFGGGTKLTVL

SEQ ID NO: 1889 - protein, 502 aa, Artificial Sequence
  Synthetic
EVQLVESGGGLVQPGRSLRLSCAASGFTFHDYTMHWVRQAPGKCLEWVSGISWNTGTIGYADSVKGRFTISRDNAKNSLYLQMNSLRAEDTALYYCVKDAFYGGDYYYNYGMDVWGHGTTVTVSSGGGGSGGGGSGGGGSEIVLTQSPATLSVSPGERATLSCRASQSVNNNLAWYQQKPGQAPRLLIYGASTRATGIPARFSGSGSGTDFTLTISSLQSDDFAVYYCQQYNNWPLTFGCGTKVEIKSGGGGSEVQLVESGGGLVQPGGSLKLSCAASGFTFNKYAINWVRQAPGKGLEWVARIRSKYNNYATYYADAVKDRFTISRDDSKNTVYLQMNNLKTEDTAVYYCARAGNFGSSYISYWAYWGQGTLVTVSSGGGGSGGGGSGGGGSQTVVTQEPSLTVSPGGTVTITCGSSTGAVTSGNYPNWVQKKPGQAPRGLIGGTKFLAPGTPARFSGSLSGGKAALTLSGVQPEDEAEYYCVLWYSNRWVFGSGTKLTVL

SEQ ID NO: 1890 - protein, 990 aa, Artificial Sequence
  Synthetic
EVQLVESGGGLVQPGRSLRLSCAASGFTFHDYTMHWVRQAPGKCLEWVSGISWNTGTIGYADSVKGRFTISRDNAKNSLYLQMNSLRAEDTALYYCVKDAFYGGDYYYNYGMDVWGHGTTVTVSSGGGGSGGGGSGGGGSEIVLTQSPATLSVSPGERATLSCRASQSVNNNLAWYQQKPGQAPRLLIYGASTRATGIPARFSGSGSGTDFTLTISSLQSDDFAVYYCQQYNNWPLTFGCGTKVEIKSGGGGSEVQLVESGGGLVQPGGSLKLSCAASGFTFNKYAMNWVRQAPGKGLEWVARIRSKYNNYATYYADSVKDRFTISRDDSKNTAYLQMNNLKTEDTAVYYCVRHGNFGNSYISYWAYWGQGTLVTVSSGGGGSGGGGSGGGGSQTVVTQEPSLTVSPGGTVTLTCGSSTGAVTSGNYPNWVQQKPGQAPRGLIGGTKFLAPGTPARFSGSLLGGKAALTLSGVQPEDEAEYYCVLWYSNRWVFGGGTKLTVLGGGGDKTHTCPPCPAPELLGGPSVFLFPPKPKDTLMISRTPEVTCVVVDVSHEDPEVKFNWYVDGVEVHNAKTKPCEEQYGSTYRCVSVLTVLHQDWLNGKEYKCKVSNKALPAPIEKTISKAKGQPREPQVYTLPPSREEMTKNQVSLTCLVKGFYPSDIAVEWESNGQPENNYKTTPPVLDSDGSFFLYSKLTVDKSRWQQGNVFSCSVMHEALHNHYTQKSLSLSPGKGGGGSGGGGSGGGGSGGGGSGGGGSGGGGSDKTHTCPPCPAPELLGGPSVFLFPPKPKDTLMISRTPEVTCVVVDVSHEDPEVKFNWYVDGVEVHNAKTKPCEEQYGSTYRCVSVLTVLHQDWLNGKEYKCKVSNKALPAPIEKTISKAKGQPREPQVYTLPPSREEMTKNQVSLTCLVKGFYPSDIAVEWESNGQPENNYKTTPPVLDSDGSFFLYSKLTVDKSRWQQGNVFSCSVMHEALHNHYTQKSLSLSPGK

SEQ ID NO: 1891 - protein, 990 aa, Artificial Sequence
  Synthetic
EVQLVESGGGLVQPGRSLRLSCAASGFTFHDYTMHWVRQAPGKCLEWVSGISWNTGTIGYADSVKGRFTISRDNAKNSLYLQMNSLRAEDTALYYCVKDAFYGGDYYYNYGMDVWGHGTTVTVSSGGGGSGGGGSGGGGSEIVLTQSPATLSVSPGERATLSCRASQSVNNNLAWYQQKPGQAPRLLIYGASTRATGIPARFSGSGSGTDFTLTISSLQSDDFAVYYCQQYNNWPLTFGCGTKVEIKSGGGGSEVQLVESGGGLVQPGGSLKLSCAASGFTFNKYAINWVRQAPGKGLEWVARIRSKYNNYATYYADAVKDRFTISRDDSKNTVYLQMNNLKTEDTAVYYCARAGNFGSSYISYWAYWGQGTLVTVSSGGGGSGGGGSGGGGSQTVVTQEPSLTVSPGGTVTITCGSSTGAVTSGNYPNWVQKKPGQAPRGLIGGTKFLAPGTPARFSGSLSGGKAALTLSGVQPEDEAEYYCVLWYSNRWVFGSGTKLTVLGGGGDKTHTCPPCPAPELLGGPSVFLFPPKPKDTLMISRTPEVTCVVVDVSHEDPEVKFNWYVDGVEVHNAKTKPCEEQYGSTYRCVSVLTVLHQDWLNGKEYKCKVSNKALPAPIEKTISKAKGQPREPQVYTLPPSREEMTKNQVSLTCLVKGFYPSDIAVEWESNGQPENNYKTTPPVLDSDGSFFLYSKLTVDKSRWQQGNVFSCSVMHEALHNHYTQKSLSLSPGKGGGGSGGGGSGGGGSGGGGSGGGGSGGGGSDKTHTCPPCPAPELLGGPSVFLFPPKPKDTLMISRTPEVTCVVVDVSHEDPEVKFNWYVDGVEVHNAKTKPCEEQYGSTYRCVSVLTVLHQDWLNGKEYKCKVSNKALPAPIEKTISKAKGQPREPQVYTLPPSREEMTKNQVSLTCLVKGFYPSDIAVEWESNGQPENNYKTTPPVLDSDGSFFLYSKLTVDKSRWQQGNVFSCSVMHEALHNHYTQKSLSLSPGK

SEQ ID NO: 1892 - protein, 5 aa, Artificial Sequence
  Synthetic
DYPMH

SEQ ID NO: 1893 - protein, 17 aa, Artificial Sequence
  Synthetic
GISWNSDYIVYADSVKG

SEQ ID NO: 1894 - protein, 13 aa, Artificial Sequence
  Synthetic
DTAYGGKYSAFDY

SEQ ID NO: 1895 - protein, 11 aa, Artificial Sequence
  Synthetic
RASQSVSRNLA

SEQ ID NO: 1896 - protein, 7 aa, Artificial Sequence
  Synthetic
GASTRAT

SEQ ID NO: 1897 - protein, 9 aa, Artificial Sequence
  Synthetic
QQYNNWPLT

SEQ ID NO: 1898 - protein, 122 aa, Artificial Sequence
  Synthetic
EVQLVESGGGLVQPGRSLRLSCAASGFTFHDYPMHWVRQAPGKCLEWVSGISWNSDYIVYADSVKGRFTISRDNAKNSLYLQMNSLSAEDTALYYCAKDTAYGGKYSAFDYWGQGTLVTVSS

SEQ ID NO: 1899 - protein, 107 aa, Artificial Sequence
  Synthetic
EIVLTQSPATLSVSPGERATLSCRASQSVSRNLAWYQQKPGQAPRRLIYGASTRATGIPDRFSGSGSGTDFTLTISRLEPEDFAVYYCQQYNNWPLTFGCGTKVEIK

SEQ ID NO: 1900 - protein, 244 aa, Artificial Sequence
  Synthetic
EVQLVESGGGLVQPGRSLRLSCAASGFTFHDYPMHWVRQAPGKCLEWVSGISWNSDYIVYADSVKGRFTISRDNAKNSLYLQMNSLSAEDTALYYCAKDTAYGGKYSAFDYWGQGTLVTVSSGGGGSGGGGSGGGGSEIVLTQSPATLSVSPGERATLSCRASQSVSRNLAWYQQKPGQAPRRLIYGASTRATGIPDRFSGSGSGTDFTLTISRLEPEDFAVYYCQQYNNWPLTFGCGTKVEIK

SEQ ID NO: 1901 - protein, 499 aa, Artificial Sequence
  Synthetic
EVQLVESGGGLVQPGRSLRLSCAASGFTFHDYPMHWVRQAPGKCLEWVSGISWNSDYIVYADSVKGRFTISRDNAKNSLYLQMNSLSAEDTALYYCAKDTAYGGKYSAFDYWGQGTLVTVSSGGGGSGGGGSGGGGSEIVLTQSPATLSVSPGERATLSCRASQSVSRNLAWYQQKPGQAPRRLIYGASTRATGIPDRFSGSGSGTDFTLTISRLEPEDFAVYYCQQYNNWPLTFGCGTKVEIKSGGGGSEVQLVESGGGLVQPGGSLKLSCAASGFTFNKYAMNWVRQAPGKGLEWVARIRSKYNNYATYYADSVKDRFTISRDDSKNTAYLQMNNLKTEDTAVYYCVRHGNFGNSYISYWAYWGQGTLVTVSSGGGGSGGGGSGGGGSQTVVTQEPSLTVSPGGTVTLTCGSSTGAVTSGNYPNWVQQKPGQAPRGLIGGTKFLAPGTPARFSGSLLGGKAALTLSGVQPEDEAEYYCVLWYSNRWVFGGGTKLTVL

SEQ ID NO: 1902 - protein, 499 aa, Artificial Sequence
  Synthetic
EVQLVESGGGLVQPGRSLRLSCAASGFTFHDYPMHWVRQAPGKCLEWVSGISWNSDYIVYADSVKGRFTISRDNAKNSLYLQMNSLSAEDTALYYCAKDTAYGGKYSAFDYWGQGTLVTVSSGGGGSGGGGSGGGGSEIVLTQSPATLSVSPGERATLSCRASQSVSRNLAWYQQKPGQAPRRLIYGASTRATGIPDRFSGSGSGTDFTLTISRLEPEDFAVYYCQQYNNWPLTFGCGTKVEIKSGGGGSEVQLVESGGGLVQPGGSLKLSCAASGFTFNKYAINWVRQAPGKGLEWVARIRSKYNNYATYYADAVKDRFTISRDDSKNTVYLQMNNLKTEDTAVYYCARAGNFGSSYISYWAYWGQGTLVTVSSGGGGSGGGGSGGGGSQTVVTQEPSLTVSPGGTVTITCGSSTGAVTSGNYPNWVQKKPGQAPRGLIGGTKFLAPGTPARFSGSLSGGKAALTLSGVQPEDEAEYYCVLWYSNRWVFGSGTKLTVL

SEQ ID NO: 1903 - protein, 987 aa, Artificial Sequence
  Synthetic
EVQLVESGGGLVQPGRSLRLSCAASGFTFHDYPMHWVRQAPGKCLEWVSGISWNSDYIVYADSVKGRFTISRDNAKNSLYLQMNSLSAEDTALYYCAKDTAYGGKYSAFDYWGQGTLVTVSSGGGGSGGGGSGGGGSEIVLTQSPATLSVSPGERATLSCRASQSVSRNLAWYQQKPGQAPRRLIYGASTRATGIPDRFSGSGSGTDFTLTISRLEPEDFAVYYCQQYNNWPLTFGCGTKVEIKSGGGGSEVQLVESGGGLVQPGGSLKLSCAASGFTFNKYAMNWVRQAPGKGLEWVARIRSKYNNYATYYADSVKDRFTISRDDSKNTAYLQMNNLKTEDTAVYYCVRHGNFGNSYISYWAYWGQGTLVTVSSGGGGSGGGGSGGGGSQTVVTQEPSLTVSPGGTVTLTCGSSTGAVTSGNYPNWVQQKPGQAPRGLIGGTKFLAPGTPARFSGSLLGGKAALTLSGVQPEDEAEYYCVLWYSNRWVFGGGTKLTVLGGGGDKTHTCPPCPAPELLGGPSVFLFPPKPKDTLMISRTPEVTCVVVDVSHEDPEVKFNWYVDGVEVHNAKTKPCEEQYGSTYRCVSVLTVLHQDWLNGKEYKCKVSNKALPAPIEKTISKAKGQPREPQVYTLPPSREEMTKNQVSLTCLVKGFYPSDIAVEWESNGQPENNYKTTPPVLDSDGSFFLYSKLTVDKSRWQQGNVFSCSVMHEALHNHYTQKSLSLSPGKGGGGSGGGGSGGGGSGGGGSGGGGSGGGGSDKTHTCPPCPAPELLGGPSVFLFPPKPKDTLMISRTPEVTCVVVDVSHEDPEVKFNWYVDGVEVHNAKTKPCEEQYGSTYRCVSVLTVLHQDWLNGKEYKCKVSNKALPAPIEKTISKAKGQPREPQVYTLPPSREEMTKNQVSLTCLVKGFYPSDIAVEWESNGQPENNYKTTPPVLDSDGSFFLYSKLTVDKSRWQQGNVFSCSVMHEALHNHYTQKSLSLSPGK

SEQ ID NO: 1904 - protein, 987 aa, Artificial Sequence
  Synthetic
EVQLVESGGGLVQPGRSLRLSCAASGFTFHDYPMHWVRQAPGKCLEWVSGISWNSDYIVYADSVKGRFTISRDNAKNSLYLQMNSLSAEDTALYYCAKDTAYGGKYSAFDYWGQGTLVTVSSGGGGSGGGGSGGGGSEIVLTQSPATLSVSPGERATLSCRASQSVSRNLAWYQQKPGQAPRRLIYGASTRATGIPDRFSGSGSGTDFTLTISRLEPEDFAVYYCQQYNNWPLTFGCGTKVEIKSGGGGSEVQLVESGGGLVQPGGSLKLSCAASGFTFNKYAINWVRQAPGKGLEWVARIRSKYNNYATYYADAVKDRFTISRDDSKNTVYLQMNNLKTEDTAVYYCARAGNFGSSYISYWAYWGQGTLVTVSSGGGGSGGGGSGGGGSQTVVTQEPSLTVSPGGTVTITCGSSTGAVTSGNYPNWVQKKPGQAPRGLIGGTKFLAPGTPARFSGSLSGGKAALTLSGVQPEDEAEYYCVLWYSNRWVFGSGTKLTVLGGGGDKTHTCPPCPAPELLGGPSVFLFPPKPKDTLMISRTPEVTCVVVDVSHEDPEVKFNWYVDGVEVHNAKTKPCEEQYGSTYRCVSVLTVLHQDWLNGKEYKCKVSNKALPAPIEKTISKAKGQPREPQVYTLPPSREEMTKNQVSLTCLVKGFYPSDIAVEWESNGQPENNYKTTPPVLDSDGSFFLYSKLTVDKSRWQQGNVFSCSVMHEALHNHYTQKSLSLSPGKGGGGSGGGGSGGGGSGGGGSGGGGSGGGGSDKTHTCPPCPAPELLGGPSVFLFPPKPKDTLMISRTPEVTCVVVDVSHEDPEVKFNWYVDGVEVHNAKTKPCEEQYGSTYRCVSVLTVLHQDWLNGKEYKCKVSNKALPAPIEKTISKAKGQPREPQVYTLPPSREEMTKNQVSLTCLVKGFYPSDIAVEWESNGQPENNYKTTPPVLDSDGSFFLYSKLTVDKSRWQQGNVFSCSVMHEALHNHYTQKSLSLSPGK

SEQ ID NO: 1905 - protein, 5 aa, Artificial Sequence
  Synthetic
DYTMH

SEQ ID NO: 1906 - protein, 17 aa, Artificial Sequence
  Synthetic
GISWNSGTIGYADSVRG

SEQ ID NO: 1907 - protein, 13 aa, Artificial Sequence
  Synthetic
DGHYGAYYYGMDV

SEQ ID NO: 1908 - protein, 11 aa, Artificial Sequence
  Synthetic
RASQSVNNNLA

SEQ ID NO: 1909 - protein, 7 aa, Artificial Sequence
  Synthetic
GASTRAT

SEQ ID NO: 1910 - protein, 9 aa, Artificial Sequence
  Synthetic
QQYNDWPIT

SEQ ID NO: 1911 - protein, 122 aa, Artificial Sequence
  Synthetic
EVQLVESGGGLVQPGRSLRLSCAASGFTFHDYTMHWVRQAPGKCLEWVSGISWNSGTIGYADSVRGRFTISRDNAKNSLYLQVNSLRPEDTALYYCAKDGHYGAYYYGMDVWGQGTTVTVSS

SEQ ID NO: 1912 - protein, 107 aa, Artificial Sequence
  Synthetic
EIVLTQSPATLSVSPGERATLSCRASQSVNNNLAWYQQKPGQAPRLLIYGASTRATGIPARFSGSGSGTEFTLTISSLQSEDFAVYYCQQYNDWPITFGCGTRLEIK

SEQ ID NO: 1913 - protein, 244 aa, Artificial Sequence
  Synthetic
EVQLVESGGGLVQPGRSLRLSCAASGFTFHDYTMHWVRQAPGKCLEWVSGISWNSGTIGYADSVRGRFTISRDNAKNSLYLQVNSLRPEDTALYYCAKDGHYGAYYYGMDVWGQGTTVTVSSGGGGSGGGGSGGGGSEIVLTQSPATLSVSPGERATLSCRASQSVNNNLAWYQQKPGQAPRLLIYGASTRATGIPARFSGSGSGTEFTLTISSLQSEDFAVYYCQQYNDWPITFGCGTRLEIK

SEQ ID NO: 1914 - protein, 499 aa, Artificial Sequence
  Synthetic
EVQLVESGGGLVQPGRSLRLSCAASGFTFHDYTMHWVRQAPGKCLEWVSGISWNSGTIGYADSVRGRFTISRDNAKNSLYLQVNSLRPEDTALYYCAKDGHYGAYYYGMDVWGQGTTVTVSSGGGGSGGGGSGGGGSEIVLTQSPATLSVSPGERATLSCRASQSVNNNLAWYQQKPGQAPRLLIYGASTRATGIPARFSGSGSGTEFTLTISSLQSEDFAVYYCQQYNDWPITFGCGTRLEIKSGGGGSEVQLVESGGGLVQPGGSLKLSCAASGFTFNKYAMNWVRQAPGKGLEWVARIRSKYNNYATYYADSVKDRFTISRDDSKNTAYLQMNNLKTEDTAVYYCVRHGNFGNSYISYWAYWGQGTLVTVSSGGGGSGGGGSGGGGSQTVVTQEPSLTVSPGGTVTLTCGSSTGAVTSGNYPNWVQQKPGQAPRGLIGGTKFLAPGTPARFSGSLLGGKAALTLSGVQPEDEAEYYCVLWYSNRWVFGGGTKLTVL

SEQ ID NO: 1915 - protein, 499 aa, Artificial Sequence
  Synthetic
EVQLVESGGGLVQPGRSLRLSCAASGFTFHDYTMHWVRQAPGKCLEWVSGISWNSGTIGYADSVRGRFTISRDNAKNSLYLQVNSLRPEDTALYYCAKDGHYGAYYYGMDVWGQGTTVTVSSGGGGSGGGGSGGGGSEIVLTQSPATLSVSPGERATLSCRASQSVNNNLAWYQQKPGQAPRLLIYGASTRATGIPARFSGSGSGTEFTLTISSLQSEDFAVYYCQQYNDWPITFGCGTRLEIKSGGGGSEVQLVESGGGLVQPGGSLKLSCAASGFTFNKYAINWVRQAPGKGLEWVARIRSKYNNYATYYADAVKDRFTISRDDSKNTVYLQMNNLKTEDTAVYYCARAGNFGSSYISYWAYWGQGTLVTVSSGGGGSGGGGSGGGGSQTVVTQEPSLTVSPGGTVTITCGSSTGAVTSGNYPNWVQKKPGQAPRGLIGGTKFLAPGTPARFSGSLSGGKAALTLSGVQPEDEAEYYCVLWYSNRWVFGSGTKLTVL

SEQ ID NO: 1916 - protein, 987 aa, Artificial Sequence
  Synthetic
EVQLVESGGGLVQPGRSLRLSCAASGFTFHDYTMHWVRQAPGKCLEWVSGISWNSGTIGYADSVRGRFTISRDNAKNSLYLQVNSLRPEDTALYYCAKDGHYGAYYYGMDVWGQGTTVTVSSGGGGSGGGGSGGGGSEIVLTQSPATLSVSPGERATLSCRASQSVNNNLAWYQQKPGQAPRLLIYGASTRATGIPARFSGSGSGTEFTLTISSLQSEDFAVYYCQQYNDWPITFGCGTRLEIKSGGGGSEVQLVESGGGLVQPGGSLKLSCAASGFTFNKYAMNWVRQAPGKGLEWVARIRSKYNNYATYYADSVKDRFTISRDDSKNTAYLQMNNLKTEDTAVYYCVRHGNFGNSYISYWAYWGQGTLVTVSSGGGGSGGGGSGGGGSQTVVTQEPSLTVSPGGTVTLTCGSSTGAVTSGNYPNWVQQKPGQAPRGLIGGTKFLAPGTPARFSGSLLGGKAALTLSGVQPEDEAEYYCVLWYSNRWVFGGGTKLTVLGGGGDKTHTCPPCPAPELLGGPSVFLFPPKPKDTLMISRTPEVTCVVVDVSHEDPEVKFNWYVDGVEVHNAKTKPCEEQYGSTYRCVSVLTVLHQDWLNGKEYKCKVSNKALPAPIEKTISKAKGQPREPQVYTLPPSREEMTKNQVSLTCLVKGFYPSDIAVEWESNGQPENNYKTTPPVLDSDGSFFLYSKLTVDKSRWQQGNVFSCSVMHEALHNHYTQKSLSLSPGKGGGGSGGGGSGGGGSGGGGSGGGGSGGGGSDKTHTCPPCPAPELLGGPSVFLFPPKPKDTLMISRTPEVTCVVVDVSHEDPEVKFNWYVDGVEVHNAKTKPCEEQYGSTYRCVSVLTVLHQDWLNGKEYKCKVSNKALPAPIEKTISKAKGQPREPQVYTLPPSREEMTKNQVSLTCLVKGFYPSDIAVEWESNGQPENNYKTTPPVLDSDGSFFLYSKLTVDKSRWQQGNVFSCSVMHEALHNHYTQKSLSLSPGK

SEQ ID NO: 1917 - protein, 987 aa, Artificial Sequence
  Synthetic
EVQLVESGGGLVQPGRSLRLSCAASGFTFHDYTMHWVRQAPGKCLEWVSGISWNSGTIGYADSVRGRFTISRDNAKNSLYLQVNSLRPEDTALYYCAKDGHYGAYYYGMDVWGQGTTVTVSSGGGGSGGGGSGGGGSEIVLTQSPATLSVSPGERATLSCRASQSVNNNLAWYQQKPGQAPRLLIYGASTRATGIPARFSGSGSGTEFTLTISSLQSEDFAVYYCQQYNDWPITFGCGTRLEIKSGGGGSEVQLVESGGGLVQPGGSLKLSCAASGFTFNKYAINWVRQAPGKGLEWVARIRSKYNNYATYYADAVKDRFTISRDDSKNTVYLQMNNLKTEDTAVYYCARAGNFGSSYISYWAYWGQGTLVTVSSGGGGSGGGGSGGGGSQTVVTQEPSLTVSPGGTVTITCGSSTGAVTSGNYPNWVQKKPGQAPRGLIGGTKFLAPGTPARFSGSLSGGKAALTLSGVQPEDEAEYYCVLWYSNRWVFGSGTKLTVLGGGGDKTHTCPPCPAPELLGGPSVFLFPPKPKDTLMISRTPEVTCVVVDVSHEDPEVKFNWYVDGVEVHNAKTKPCEEQYGSTYRCVSVLTVLHQDWLNGKEYKCKVSNKALPAPIEKTISKAKGQPREPQVYTLPPSREEMTKNQVSLTCLVKGFYPSDIAVEWESNGQPENNYKTTPPVLDSDGSFFLYSKLTVDKSRWQQGNVFSCSVMHEALHNHYTQKSLSLSPGKGGGGSGGGGSGGGGSGGGGSGGGGSGGGGSDKTHTCPPCPAPELLGGPSVFLFPPKPKDTLMISRTPEVTCVVVDVSHEDPEVKFNWYVDGVEVHNAKTKPCEEQYGSTYRCVSVLTVLHQDWLNGKEYKCKVSNKALPAPIEKTISKAKGQPREPQVYTLPPSREEMTKNQVSLTCLVKGFYPSDIAVEWESNGQPENNYKTTPPVLDSDGSFFLYSKLTVDKSRWQQGNVFSCSVMHEALHNHYTQKSLSLSPGK

SEQ ID NO: 1918 - protein, 492 aa, Artificial Sequence
  Synthetic
QVQLQESGPGLVKPSETLSLTCTVSGGSISSFYWSWIRQPPGKCLEWIGRISSSGDVDYNPSLKSRVTISVDTSKNQFSLKLSSVTAADTAVYYCAREGGFYYWGQGTLVTVSSGGGGSGGGGSGGGGSEIVLTQSPGTLSLSPGERATLSCRASQSVSSSYLAWYQQKPGQAPRLLIYGASSRATGIPDRFSGSGSGTDFTLTISRLEPEDFAVYYCQQYGSSPITFGCGTKLEIKSGGGGSEVQLVESGGGLVQPGGSLKLSCAASGFTFNKYAINWVRQAPGKGLEWVARIRSKYNNYATYYADAVKDRFTISRDDSKNTVYLQMNNLKTEDTAVYYCARAGNFGSSYISYWAYWGQGTLVTVSSGGGGSGGGGSGGGGSQTVVTQEPSLTVSPGGTVTITCGSSTGAVTSGNYPNWVQKKPGQAPRGLIGGTKFLAPGTPARFSGSLSGGKAALTLSGVQPEDEAEYYCVLWYSNRWVFGSGTKLTVL

SEQ ID NO: 1919 - protein, 980 aa, Artificial Sequence
  Synthetic
QVQLQESGPGLVKPSETLSLTCTVSGGSISSFYWSWIRQPPGKCLEWIGRISSSGDVDYNPSLKSRVTISVDTSKNQFSLKLSSVTAADTAVYYCAREGGFYYWGQGTLVTVSSGGGGSGGGGSGGGGSEIVLTQSPGTLSLSPGERATLSCRASQSVSSSYLAWYQQKPGQAPRLLIYGASSRATGIPDRFSGSGSGTDFTLTISRLEPEDFAVYYCQQYGSSPITFGCGTKLEIKSGGGGSEVQLVESGGGLVQPGGSLKLSCAASGFTFNKYAINWVRQAPGKGLEWVARIRSKYNNYATYYADAVKDRFTISRDDSKNTVYLQMNNLKTEDTAVYYCARAGNFGSSYISYWAYWGQGTLVTVSSGGGGSGGGGSGGGGSQTVVTQEPSLTVSPGGTVTITCGSSTGAVTSGNYPNWVQKKPGQAPRGLIGGTKFLAPGTPARFSGSLSGGKAALTLSGVQPEDEAEYYCVLWYSNRWVFGSGTKLTVLGGGGDKTHTCPPCPAPELLGGPSVFLFPPKPKDTLMISRTPEVTCVVVDVSHEDPEVKFNWYVDGVEVHNAKTKPCEEQYGSTYRCVSVLTVLHQDWLNGKEYKCKVSNKALPAPIEKTISKAKGQPREPQVYTLPPSREEMTKNQVSLTCLVKGFYPSDIAVEWESNGQPENNYKTTPPVLDSDGSFFLYSKLTVDKSRWQQGNVFSCSVMHEALHNHYTQKSLSLSPGKGGGGSGGGGSGGGGSGGGGSGGGGSGGGGSDKTHTCPPCPAPELLGGPSVFLFPPKPKDTLMISRTPEVTCVVVDVSHEDPEVKFNWYVDGVEVHNAKTKPCEEQYGSTYRCVSVLTVLHQDWLNGKEYKCKVSNKALPAPIEKTISKAKGQPREPQVYTLPPSREEMTKNQVSLTCLVKGFYPSDIAVEWESNGQPENNYKTTPPVLDSDGSFFLYSKLTVDKSRWQQGNVFSCSVMHEALHNHYTQKSLSLSPGK

SEQ ID NO: 1920 - protein, 500 aa, Artificial Sequence
  Synthetic
QVQLVQSGAEVKKPGASVKVSCKASGYTFTSYGISWVRQAPGQCLEWMGWISAYSGNAIYAQKLQGRVTMTRDTSTSTAYMELRSLRSDDTAVYYCARDPDYYGSGSYSDYWGQGTLVTVSSGGGGSGGGGSGGGGSEIVLTQSPATLSVSPGERATLSCRASQSVSSNLAWYQQKPGQAPRLLIYGASSRATGIPARFSGSGSGTEFTLTISSLQSEDFAVYYCQQYHSWPLLTFGCGTKVEIKSGGGGSEVQLVESGGGLVQPGGSLKLSCAASGFTFNKYAINWVRQAPGKGLEWVARIRSKYNNYATYYADAVKDRFTISRDDSKNTVYLQMNNLKTEDTAVYYCARAGNFGSSYISYWAYWGQGTLVTVSSGGGGSGGGGSGGGGSQTVVTQEPSLTVSPGGTVTITCGSSTGAVTSGNYPNWVQKKPGQAPRGLIGGTKFLAPGTPARFSGSLSGGKAALTLSGVQPEDEAEYYCVLWYSNRWVFGSGTKLTVL

SEQ ID NO: 1921 - protein, 988 aa, Artificial Sequence
  Synthetic
QVQLVQSGAEVKKPGASVKVSCKASGYTFTSYGISWVRQAPGQCLEWMGWISAYSGNAIYAQKLQGRVTMTRDTSTSTAYMELRSLRSDDTAVYYCARDPDYYGSGSYSDYWGQGTLVTVSSGGGGSGGGGSGGGGSEIVLTQSPATLSVSPGERATLSCRASQSVSSNLAWYQQKPGQAPRLLIYGASSRATGIPARFSGSGSGTEFTLTISSLQSEDFAVYYCQQYHSWPLLTFGCGTKVEIKSGGGGSEVQLVESGGGLVQPGGSLKLSCAASGFTFNKYAINWVRQAPGKGLEWVARIRSKYNNYATYYADAVKDRFTISRDDSKNTVYLQMNNLKTEDTAVYYCARAGNFGSSYISYWAYWGQGTLVTVSSGGGGSGGGGSGGGGSQTVVTQEPSLTVSPGGTVTITCGSSTGAVTSGNYPNWVQKKPGQAPRGLIGGTKFLAPGTPARFSGSLSGGKAALTLSGVQPEDEAEYYCVLWYSNRWVFGSGTKLTVLGGGGDKTHTCPPCPAPELLGGPSVFLFPPKPKDTLMISRTPEVTCVVVDVSHEDPEVKFNWYVDGVEVHNAKTKPCEEQYGSTYRCVSVLTVLHQDWLNGKEYKCKVSNKALPAPIEKTISKAKGQPREPQVYTLPPSREEMTKNQVSLTCLVKGFYPSDIAVEWESNGQPENNYKTTPPVLDSDGSFFLYSKLTVDKSRWQQGNVFSCSVMHEALHNHYTQKSLSLSPGKGGGGSGGGGSGGGGSGGGGSGGGGSGGGGSDKTHTCPPCPAPELLGGPSVFLFPPKPKDTLMISRTPEVTCVVVDVSHEDPEVKFNWYVDGVEVHNAKTKPCEEQYGSTYRCVSVLTVLHQDWLNGKEYKCKVSNKALPAPIEKTISKAKGQPREPQVYTLPPSREEMTKNQVSLTCLVKGFYPSDIAVEWESNGQPENNYKTTPPVLDSDGSFFLYSKLTVDKSRWQQGNVFSCSVMHEALHNHYTQKSLSLSPGK

SEQ ID NO: 1922 - protein, 7 aa, Artificial Sequence
  Synthetic
SKSAAWN

SEQ ID NO: 1923 - protein, 18 aa, Artificial Sequence
  Synthetic
RTFYRSTWYNDYAVSVKS

SEQ ID NO: 1924 - protein, 11 aa, Artificial Sequence
  Synthetic
EGQWLVYGMDV

SEQ ID NO: 1925 - protein, 13 aa, Artificial Sequence
  Synthetic
SGSSSNIGSNTVN

SEQ ID NO: 1926 - protein, 7 aa, Artificial Sequence
  Synthetic
RNNQRPS

SEQ ID NO: 1927 - protein, 11 aa, Artificial Sequence
  Synthetic
AAWDDSLSGRV

SEQ ID NO: 1928 - protein, 123 aa, Artificial Sequence
  Synthetic
QVQLQQSGPGLVKPSQTLSLTCAISGDSVSSKSAAWNWIRQSPSGCLEWLGRTFYRSTWYNDYAVSVKSRITINPDTSKNQFSLQLNSVTPEDTAVYYCAREGQWLVYGMDVWGQGTTVTVSS

SEQ ID NO: 1929 - protein, 110 aa, Artificial Sequence
  Synthetic
QSVLTQPPSASGTPGQRITISCSGSSSNIGSNTVNWYQQLPGTAPKLLIYRNNQRPSGVPDRFSGSKSGTSASLAISGLRSEDEADYYCAAWDDSLSGRVFGCGTKLTVL

SEQ ID NO: 1930 - protein, 248 aa, Artificial Sequence
  Synthetic
QVQLQQSGPGLVKPSQTLSLTCAISGDSVSSKSAAWNWIRQSPSGCLEWLGRTFYRSTWYNDYAVSVKSRITINPDTSKNQFSLQLNSVTPEDTAVYYCAREGQWLVYGMDVWGQGTTVTVSSGGGGSGGGGSGGGGSQSVLTQPPSASGTPGQRITISCSGSSSNIGSNTVNWYQQLPGTAPKLLIYRNNQRPSGVPDRFSGSKSGTSASLAISGLRSEDEADYYCAAWDDSLSGRVFGCGTKLTVL

SEQ ID NO: 1931 - protein, 503 aa, Artificial Sequence
  Synthetic
QVQLQQSGPGLVKPSQTLSLTCAISGDSVSSKSAAWNWIRQSPSGCLEWLGRTFYRSTWYNDYAVSVKSRITINPDTSKNQFSLQLNSVTPEDTAVYYCAREGQWLVYGMDVWGQGTTVTVSSGGGGSGGGGSGGGGSQSVLTQPPSASGTPGQRITISCSGSSSNIGSNTVNWYQQLPGTAPKLLIYRNNQRPSGVPDRFSGSKSGTSASLAISGLRSEDEADYYCAAWDDSLSGRVFGCGTKLTVLSGGGGSEVQLVESGGGLVQPGGSLKLSCAASGFTFNKYAMNWVRQAPGKGLEWVARIRSKYNNYATYYADSVKDRFTISRDDSKNTAYLQMNNLKTEDTAVYYCVRHGNFGNSYISYWAYWGQGTLVTVSSGGGGSGGGGSGGGGSQTVVTQEPSLTVSPGGTVTLTCGSSTGAVTSGNYPNWVQQKPGQAPRGLIGGTKFLAPGTPARFSGSLLGGKAALTLSGVQPEDEAEYYCVLWYSNRWVFGGGTKLTVL

SEQ ID NO: 1932 - protein, 503 aa, Artificial Sequence
  Synthetic
QVQLQQSGPGLVKPSQTLSLTCAISGDSVSSKSAAWNWIRQSPSGCLEWLGRTFYRSTWYNDYAVSVKSRITINPDTSKNQFSLQLNSVTPEDTAVYYCAREGQWLVYGMDVWGQGTTVTVSSGGGGSGGGGSGGGGSQSVLTQPPSASGTPGQRITISCSGSSSNIGSNTVNWYQQLPGTAPKLLIYRNNQRPSGVPDRFSGSKSGTSASLAISGLRSEDEADYYCAAWDDSLSGRVFGCGTKLTVLSGGGGSEVQLVESGGGLVQPGGSLKLSCAASGFTFNKYAINWVRQAPGKGLEWVARIRSKYNNYATYYADAVKDRFTISRDDSKNTVYLQMNNLKTEDTAVYYCARAGNFGSSYISYWAYWGQGTLVTVSSGGGGSGGGGSGGGGSQTVVTQEPSLTVSPGGTVTITCGSSTGAVTSGNYPNWVQKKPGQAPRGLIGGTKFLAPGTPARFSGSLSGGKAALTLSGVQPEDEAEYYCVLWYSNRWVFGSGTKLTVL

SEQ ID NO: 1933 - protein, 991 aa, Artificial Sequence
  Synthetic
QVQLQQSGPGLVKPSQTLSLTCAISGDSVSSKSAAWNWIRQSPSGCLEWLGRTFYRSTWYNDYAVSVKSRITINPDTSKNQFSLQLNSVTPEDTAVYYCAREGQWLVYGMDVWGQGTTVTVSSGGGGSGGGGSGGGGSQSVLTQPPSASGTPGQRITISCSGSSSNIGSNTVNWYQQLPGTAPKLLIYRNNQRPSGVPDRFSGSKSGTSASLAISGLRSEDEADYYCAAWDDSLSGRVFGCGTKLTVLSGGGGSEVQLVESGGGLVQPGGSLKLSCAASGFTFNKYAMNWVRQAPGKGLEWVARIRSKYNNYATYYADSVKDRFTISRDDSKNTAYLQMNNLKTEDTAVYYCVRHGNFGNSYISYWAYWGQGTLVTVSSGGGGSGGGGSGGGGSQTVVTQEPSLTVSPGGTVTLTCGSSTGAVTSGNYPNWVQQKPGQAPRGLIGGTKFLAPGTPARFSGSLLGGKAALTLSGVQPEDEAEYYCVLWYSNRWVFGGGTKLTVLGGGGDKTHTCPPCPAPELLGGPSVFLFPPKPKDTLMISRTPEVTCVVVDVSHEDPEVKFNWYVDGVEVHNAKTKPCEEQYGSTYRCVSVLTVLHQDWLNGKEYKCKVSNKALPAPIEKTISKAKGQPREPQVYTLPPSREEMTKNQVSLTCLVKGFYPSDIAVEWESNGQPENNYKTTPPVLDSDGSFFLYSKLTVDKSRWQQGNVFSCSVMHEALHNHYTQKSLSLSPGKGGGGSGGGGSGGGGSGGGGSGGGGSGGGGSDKTHTCPPCPAPELLGGPSVFLFPPKPKDTLMISRTPEVTCVVVDVSHEDPEVKFNWYVDGVEVHNAKTKPCEEQYGSTYRCVSVLTVLHQDWLNGKEYKCKVSNKALPAPIEKTISKAKGQPREPQVYTLPPSREEMTKNQVSLTCLVKGFYPSDIAVEWESNGQPENNYKTTPPVLDSDGSFFLYSKLTVDKSRWQQGNVFSCSVMHEALHNHYTQKSLSLSPGK

SEQ ID NO: 1934 - protein, 991 aa, Artificial Sequence
  Synthetic
QVQLQQSGPGLVKPSQTLSLTCAISGDSVSSKSAAWNWIRQSPSGCLEWLGRTFYRSTWYNDYAVSVKSRITINPDTSKNQFSLQLNSVTPEDTAVYYCAREGQWLVYGMDVWGQGTTVTVSSGGGGSGGGGSGGGGSQSVLTQPPSASGTPGQRITISCSGSSSNIGSNTVNWYQQLPGTAPKLLIYRNNQRPSGVPDRFSGSKSGTSASLAISGLRSEDEADYYCAAWDDSLSGRVFGCGTKLTVLSGGGGSEVQLVESGGGLVQPGGSLKLSCAASGFTFNKYAINWVRQAPGKGLEWVARIRSKYNNYATYYADAVKDRFTISRDDSKNTVYLQMNNLKTEDTAVYYCARAGNFGSSYISYWAYWGQGTLVTVSSGGGGSGGGGSGGGGSQTVVTQEPSLTVSPGGTVTITCGSSTGAVTSGNYPNWVQKKPGQAPRGLIGGTKFLAPGTPARFSGSLSGGKAALTLSGVQPEDEAEYYCVLWYSNRWVFGSGTKLTVLGGGGDKTHTCPPCPAPELLGGPSVFLFPPKPKDTLMISRTPEVTCVVVDVSHEDPEVKFNWYVDGVEVHNAKTKPCEEQYGSTYRCVSVLTVLHQDWLNGKEYKCKVSNKALPAPIEKTISKAKGQPREPQVYTLPPSREEMTKNQVSLTCLVKGFYPSDIAVEWESNGQPENNYKTTPPVLDSDGSFFLYSKLTVDKSRWQQGNVFSCSVMHEALHNHYTQKSLSLSPGKGGGGSGGGGSGGGGSGGGGSGGGGSGGGGSDKTHTCPPCPAPELLGGPSVFLFPPKPKDTLMISRTPEVTCVVVDVSHEDPEVKFNWYVDGVEVHNAKTKPCEEQYGSTYRCVSVLTVLHQDWLNGKEYKCKVSNKALPAPIEKTISKAKGQPREPQVYTLPPSREEMTKNQVSLTCLVKGFYPSDIAVEWESNGQPENNYKTTPPVLDSDGSFFLYSKLTVDKSRWQQGNVFSCSVMHEALHNHYTQKSLSLSPGK

SEQ ID NO: 1935 - protein, 7 aa, Artificial Sequence
  Synthetic
SKSAAWN

SEQ ID NO: 1936 - protein, 18 aa, Artificial Sequence
  Synthetic
RTFYRSTWYNDYAVSVKS

SEQ ID NO: 1937 - protein, 11 aa, Artificial Sequence
  Synthetic
EGQWLVYGMDV

SEQ ID NO: 1938 - protein, 14 aa, Artificial Sequence
  Synthetic
TGTSSDVGSYNLVS

SEQ ID NO: 1939 - protein, 7 aa, Artificial Sequence
  Synthetic
DVSKRPS

SEQ ID NO: 1940 - protein, 11 aa, Artificial Sequence
  Synthetic
AAWDDSLNGRV

SEQ ID NO: 1941 - protein, 123 aa, Artificial Sequence
  Synthetic
QVQLQQSGPGLVKPSQTLSLTCAISGDSVSSKSAAWNWIRQSPSGCLEWLGRTFYRSTWYNDYAVSVKSRITINPDTSKNQFSLQLNSVIPEDTAVYYCAREGQWLVYGMDVWGQGTTVTVSS

SEQ ID NO: 1942 - protein, 111 aa, Artificial Sequence
  Synthetic
QSALTQPASASGSPGQSITISCTGTSSDVGSYNLVSWYQQHPGKAPKLMIYDVSKRPSGVPDRFSGSKSGNTASLTISGLQAEDEADYYCAAWDDSLNGRVFGCGTKVTVL

SEQ ID NO: 1943 - protein, 249 aa, Artificial Sequence
  Synthetic
QVQLQQSGPGLVKPSQTLSLTCAISGDSVSSKSAAWNWIRQSPSGCLEWLGRTFYRSTWYNDYAVSVKSRITINPDTSKNQFSLQLNSVIPEDTAVYYCAREGQWLVYGMDVWGQGTTVTVSSGGGGSGGGGSGGGGSQSALTQPASASGSPGQSITISCTGTSSDVGSYNLVSWYQQHPGKAPKLMIYDVSKRPSGVPDRFSGSKSGNTASLTISGLQAEDEADYYCAAWDDSLNGRVFGCGTKVTVL

SEQ ID NO: 1944 - protein, 504 aa, Artificial Sequence
  Synthetic
QVQLQQSGPGLVKPSQTLSLTCAISGDSVSSKSAAWNWIRQSPSGCLEWLGRTFYRSTWYNDYAVSVKSRITINPDTSKNQFSLQLNSVIPEDTAVYYCAREGQWLVYGMDVWGQGTTVTVSSGGGGSGGGGSGGGGSQSALTQPASASGSPGQSITISCTGTSSDVGSYNLVSWYQQHPGKAPKLMIYDVSKRPSGVPDRFSGSKSGNTASLTISGLQAEDEADYYCAAWDDSLNGRVFGCGTKVTVLSGGGGSEVQLVESGGGLVQPGGSLKLSCAASGFTFNKYAMNWVRQAPGKGLEWVARIRSKYNNYATYYADSVKDRFTISRDDSKNTAYLQMNNLKTEDTAVYYCVRHGNFGNSYISYWAYWGQGTLVTVSSGGGGSGGGGSGGGGSQTVVTQEPSLTVSPGGTVTLTCGSSTGAVTSGNYPNWVQQKPGQAPRGLIGGTKFLAPGTPARFSGSLLGGKAALTLSGVQPEDEAEYYCVLWYSNRWVFGGGTKLTVL

SEQ ID NO: 1945 - protein, 504 aa, Artificial Sequence
  Synthetic
QVQLQQSGPGLVKPSQTLSLTCAISGDSVSSKSAAWNWIRQSPSGCLEWLGRTFYRSTWYNDYAVSVKSRITINPDTSKNQFSLQLNSVIPEDTAVYYCAREGQWLVYGMDVWGQGTTVTVSSGGGGSGGGGSGGGGSQSALTQPASASGSPGQSITISCTGTSSDVGSYNLVSWYQQHPGKAPKLMIYDVSKRPSGVPDRFSGSKSGNTASLTISGLQAEDEADYYCAAWDDSLNGRVFGCGTKVTVLSGGGGSEVQLVESGGGLVQPGGSLKLSCAASGFTFNKYAINWVRQAPGKGLEWVARIRSKYNNYATYYADAVKDRFTISRDDSKNTVYLQMNNLKTEDTAVYYCARAGNFGSSYISYWAYWGQGTLVTVSSGGGGSGGGGSGGGGSQTVVTQEPSLTVSPGGTVTITCGSSTGAVTSGNYPNWVQKKPGQAPRGLIGGTKFLAPGTPARFSGSLSGGKAALTLSGVQPEDEAEYYCVLWYSNRWVFGSGTKLTVL

SEQ ID NO: 1946 - protein, 992 aa, Artificial Sequence
  Synthetic
QVQLQQSGPGLVKPSQTLSLTCAISGDSVSSKSAAWNWIRQSPSGCLEWLGRTFYRSTWYNDYAVSVKSRITINPDTSKNQFSLQLNSVIPEDTAVYYCAREGQWLVYGMDVWGQGTTVTVSSGGGGSGGGGSGGGGSQSALTQPASASGSPGQSITISCTGTSSDVGSYNLVSWYQQHPGKAPKLMIYDVSKRPSGVPDRFSGSKSGNTASLTISGLQAEDEADYYCAAWDDSLNGRVFGCGTKVTVLSGGGGSEVQLVESGGGLVQPGGSLKLSCAASGFTFNKYAMNWVRQAPGKGLEWVARIRSKYNNYATYYADSVKDRFTISRDDSKNTAYLQMNNLKTEDTAVYYCVRHGNFGNSYISYWAYWGQGTLVTVSSGGGGSGGGGSGGGGSQTVVTQEPSLTVSPGGTVTLTCGSSTGAVTSGNYPNWVQQKPGQAPRGLIGGTKFLAPGTPARFSGSLLGGKAALTLSGVQPEDEAEYYCVLWYSNRWVFGGGTKLTVLGGGGDKTHTCPPCPAPELLGGPSVFLFPPKPKDTLMISRTPEVTCVVVDVSHEDPEVKFNWYVDGVEVHNAKTKPCEEQYGSTYRCVSVLTVLHQDWLNGKEYKCKVSNKALPAPIEKTISKAKGQPREPQVYTLPPSREEMTKNQVSLTCLVKGFYPSDIAVEWESNGQPENNYKTTPPVLDSDGSFFLYSKLTVDKSRWQQGNVFSCSVMHEALHNHYTQKSLSLSPGKGGGGSGGGGSGGGGSGGGGSGGGGSGGGGSDKTHTCPPCPAPELLGGPSVFLFPPKPKDTLMISRTPEVTCVVVDVSHEDPEVKFNWYVDGVEVHNAKTKPCEEQYGSTYRCVSVLTVLHQDWLNGKEYKCKVSNKALPAPIEKTISKAKGQPREPQVYTLPPSREEMTKNQVSLTCLVKGFYPSDIAVEWESNGQPENNYKTTPPVLDSDGSFFLYSKLTVDKSRWQQGNVFSCSVMHEALHNHYTQKSLSLSPGK

SEQ ID NO: 1947 - protein, 992 aa, Artificial Sequence
  Synthetic
QVQLQQSGPGLVKPSQTLSLTCAISGDSVSSKSAAWNWIRQSPSGCLEWLGRTFYRSTWYNDYAVSVKSRITINPDTSKNQFSLQLNSVIPEDTAVYYCAREGQWLVYGMDVWGQGTTVTVSSGGGGSGGGGSGGGGSQSALTQPASASGSPGQSITISCTGTSSDVGSYNLVSWYQQHPGKAPKLMIYDVSKRPSGVPDRFSGSKSGNTASLTISGLQAEDEADYYCAAWDDSLNGRVFGCGTKVTVLSGGGGSEVQLVESGGGLVQPGGSLKLSCAASGFTFNKYAINWVRQAPGKGLEWVARIRSKYNNYATYYADAVKDRFTISRDDSKNTVYLQMNNLKTEDTAVYYCARAGNFGSSYISYWAYWGQGTLVTVSSGGGGSGGGGSGGGGSQTVVTQEPSLTVSPGGTVTITCGSSTGAVTSGNYPNWVQKKPGQAPRGLIGGTKFLAPGTPARFSGSLSGGKAALTLSGVQPEDEAEYYCVLWYSNRWVFGSGTKLTVLGGGGDKTHTCPPCPAPELLGGPSVFLFPPKPKDTLMISRTPEVTCVVVDVSHEDPEVKFNWYVDGVEVHNAKTKPCEEQYGSTYRCVSVLTVLHQDWLNGKEYKCKVSNKALPAPIEKTISKAKGQPREPQVYTLPPSREEMTKNQVSLTCLVKGFYPSDIAVEWESNGQPENNYKTTPPVLDSDGSFFLYSKLTVDKSRWQQGNVFSCSVMHEALHNHYTQKSLSLSPGKGGGGSGGGGSGGGGSGGGGSGGGGSGGGGSDKTHTCPPCPAPELLGGPSVFLFPPKPKDTLMISRTPEVTCVVVDVSHEDPEVKFNWYVDGVEVHNAKTKPCEEQYGSTYRCVSVLTVLHQDWLNGKEYKCKVSNKALPAPIEKTISKAKGQPREPQVYTLPPSREEMTKNQVSLTCLVKGFYPSDIAVEWESNGQPENNYKTTPPVLDSDGSFFLYSKLTVDKSRWQQGNVFSCSVMHEALHNHYTQKSLSLSPGK

SEQ ID NO: 1948 - protein, 7 aa, Artificial Sequence
  Synthetic
SKSVAWN

SEQ ID NO: 1949 - protein, 18 aa, Artificial Sequence
  Synthetic
RTFYRSAWYNDYAVSVRS

SEQ ID NO: 1950 - protein, 12 aa, Artificial Sequence
  Synthetic
ELTGDLHDAFDI

SEQ ID NO: 1951 - protein, 11 aa, Artificial Sequence
  Synthetic
RASQSISSYLN

SEQ ID NO: 1952 - protein, 7 aa, Artificial Sequence
  Synthetic
AASSLQS

SEQ ID NO: 1953 - protein, 9 aa, Artificial Sequence
  Synthetic
QQSYSTPLT

SEQ ID NO: 1954 - protein, 124 aa, Artificial Sequence
  Synthetic
QVQLQQSGPGLVKPSQTLSLTCAISGDSVSSKSVAWNWIRQSPSRCLEWLGRTFYRSAWYNDYAVSVRSRITINPDTSRNQFSLQLNSVTPEDTAVYYCARELTGDLHDAFDIWGQGTMVTVSS

SEQ ID NO: 1955 - protein, 107 aa, Artificial Sequence
  Synthetic
DIQMTQSPSSLSASVGDRVTITCRASQSISSYLNWYQQKPGKAPKLLIYAASSLQSGVPSRFSGSGSGTDFTLTISSLQPEDFATYYCQQSYSTPLTFGCGTKVDIK

SEQ ID NO: 1956 - protein, 246 aa, Artificial Sequence
  Synthetic
QVQLQQSGPGLVKPSQTLSLTCAISGDSVSSKSVAWNWIRQSPSRCLEWLGRTFYRSAWYNDYAVSVRSRITINPDTSRNQFSLQLNSVTPEDTAVYYCARELTGDLHDAFDIWGQGTMVTVSSGGGGSGGGGSGGGGSDIQMTQSPSSLSASVGDRVTITCRASQSISSYLNWYQQKPGKAPKLLIYAASSLQSGVPSRFSGSGSGTDFTLTISSLQPEDFATYYCQQSYSTPLTFGCGTKVDIK

SEQ ID NO: 1957 - protein, 501 aa, Artificial Sequence
  Synthetic
QVQLQQSGPGLVKPSQTLSLTCAISGDSVSSKSVAWNWIRQSPSRCLEWLGRTFYRSAWYNDYAVSVRSRITINPDTSRNQFSLQLNSVTPEDTAVYYCARELTGDLHDAFDIWGQGTMVTVSSGGGGSGGGGSGGGGSDIQMTQSPSSLSASVGDRVTITCRASQSISSYLNWYQQKPGKAPKLLIYAASSLQSGVPSRFSGSGSGTDFTLTISSLQPEDFATYYCQQSYSTPLTFGCGTKVDIKSGGGGSEVQLVESGGGLVQPGGSLKLSCAASGFTFNKYAMNWVRQAPGKGLEWVARIRSKYNNYATYYADSVKDRFTISRDDSKNTAYLQMNNLKTEDTAVYYCVRHGNFGNSYISYWAYWGQGTLVTVSSGGGGSGGGGSGGGGSQTVVTQEPSLTVSPGGTVTLTCGSSTGAVTSGNYPNWVQQKPGQAPRGLIGGTKFLAPGTPARFSGSLLGGKAALTLSGVQPEDEAEYYCVLWYSNRWVFGGGTKLTVL

SEQ ID NO: 1958 - protein, 501 aa, Artificial Sequence
  Synthetic
QVQLQQSGPGLVKPSQTLSLTCAISGDSVSSKSVAWNWIRQSPSRCLEWLGRTFYRSAWYNDYAVSVRSRITINPDTSRNQFSLQLNSVTPEDTAVYYCARELTGDLHDAFDIWGQGTMVTVSSGGGGSGGGGSGGGGSDIQMTQSPSSLSASVGDRVTITCRASQSISSYLNWYQQKPGKAPKLLIYAASSLQSGVPSRFSGSGSGTDFTLTISSLQPEDFATYYCQQSYSTPLTFGCGTKVDIKSGGGGSEVQLVESGGGLVQPGGSLKLSCAASGFTFNKYAINWVRQAPGKGLEWVARIRSKYNNYATYYADAVKDRFTISRDDSKNTVYLQMNNLKTEDTAVYYCARAGNFGSSYISYWAYWGQGTLVTVSSGGGGSGGGGSGGGGSQTVVTQEPSLTVSPGGTVTITCGSSTGAVTSGNYPNWVQKKPGQAPRGLIGGTKFLAPGTPARFSGSLSGGKAALTLSGVQPEDEAEYYCVLWYSNRWVFGSGTKLTVL

SEQ ID NO: 1959 - protein, 989 aa, Artificial Sequence
  Synthetic
QVQLQQSGPGLVKPSQTLSLTCAISGDSVSSKSVAWNWIRQSPSRCLEWLGRTFYRSAWYNDYAVSVRSRITINPDTSRNQFSLQLNSVTPEDTAVYYCARELTGDLHDAFDIWGQGTMVTVSSGGGGSGGGGSGGGGSDIQMTQSPSSLSASVGDRVTITCRASQSISSYLNWYQQKPGKAPKLLIYAASSLQSGVPSRFSGSGSGTDFTLTISSLQPEDFATYYCQQSYSTPLTFGCGTKVDIKSGGGGSEVQLVESGGGLVQPGGSLKLSCAASGFTFNKYAMNWVRQAPGKGLEWVARIRSKYNNYATYYADSVKDRFTISRDDSKNTAYLQMNNLKTEDTAVYYCVRHGNFGNSYISYWAYWGQGTLVTVSSGGGGSGGGGSGGGGSQTVVTQEPSLTVSPGGTVTLTCGSSTGAVTSGNYPNWVQQKPGQAPRGLIGGTKFLAPGTPARFSGSLLGGKAALTLSGVQPEDEAEYYCVLWYSNRWVFGGGTKLTVLGGGGDKTHTCPPCPAPELLGGPSVFLFPPKPKDTLMISRTPEVTCVVVDVSHEDPEVKFNWYVDGVEVHNAKTKPCEEQYGSTYRCVSVLTVLHQDWLNGKEYKCKVSNKALPAPIEKTISKAKGQPREPQVYTLPPSREEMTKNQVSLTCLVKGFYPSDIAVEWESNGQPENNYKTTPPVLDSDGSFFLYSKLTVDKSRWQQGNVFSCSVMHEALHNHYTQKSLSLSPGKGGGGSGGGGSGGGGSGGGGSGGGGSGGGGSDKTHTCPPCPAPELLGGPSVFLFPPKPKDTLMISRTPEVTCVVVDVSHEDPEVKFNWYVDGVEVHNAKTKPCEEQYGSTYRCVSVLTVLHQDWLNGKEYKCKVSNKALPAPIEKTISKAKGQPREPQVYTLPPSREEMTKNQVSLTCLVKGFYPSDIAVEWESNGQPENNYKTTPPVLDSDGSFFLYSKLTVDKSRWQQGNVFSCSVMHEALHNHYTQKSLSLSPGK

SEQ ID NO: 1960 - protein, 989 aa, Artificial Sequence
  Synthetic
QVQLQQSGPGLVKPSQTLSLTCAISGDSVSSKSVAWNWIRQSPSRCLEWLGRTFYRSAWYNDYAVSVRSRITINPDTSRNQFSLQLNSVTPEDTAVYYCARELTGDLHDAFDIWGQGTMVTVSSGGGGSGGGGSGGGGSDIQMTQSPSSLSASVGDRVTITCRASQSISSYLNWYQQKPGKAPKLLIYAASSLQSGVPSRFSGSGSGTDFTLTISSLQPEDFATYYCQQSYSTPLTFGCGTKVDIKSGGGGSEVQLVESGGGLVQPGGSLKLSCAASGFTFNKYAINWVRQAPGKGLEWVARIRSKYNNYATYYADAVKDRFTISRDDSKNTVYLQMNNLKTEDTAVYYCARAGNFGSSYISYWAYWGQGTLVTVSSGGGGSGGGGSGGGGSQTVVTQEPSLTVSPGGTVTITCGSSTGAVTSGNYPNWVQKKPGQAPRGLIGGTKFLAPGTPARFSGSLSGGKAALTLSGVQPEDEAEYYCVLWYSNRWVFGSGTKLTVLGGGGDKTHTCPPCPAPELLGGPSVFLFPPKPKDTLMISRTPEVTCVVVDVSHEDPEVKFNWYVDGVEVHNAKTKPCEEQYGSTYRCVSVLTVLHQDWLNGKEYKCKVSNKALPAPIEKTISKAKGQPREPQVYTLPPSREEMTKNQVSLTCLVKGFYPSDIAVEWESNGQPENNYKTTPPVLDSDGSFFLYSKLTVDKSRWQQGNVFSCSVMHEALHNHYTQKSLSLSPGKGGGGSGGGGSGGGGSGGGGSGGGGSGGGGSDKTHTCPPCPAPELLGGPSVFLFPPKPKDTLMISRTPEVTCVVVDVSHEDPEVKFNWYVDGVEVHNAKTKPCEEQYGSTYRCVSVLTVLHQDWLNGKEYKCKVSNKALPAPIEKTISKAKGQPREPQVYTLPPSREEMTKNQVSLTCLVKGFYPSDIAVEWESNGQPENNYKTTPPVLDSDGSFFLYSKLTVDKSRWQQGNVFSCSVMHEALHNHYTQKSLSLSPGK

SEQ ID NO: 1961 - protein, 5 aa, Artificial Sequence
  Synthetic
NYGIS

SEQ ID NO: 1962 - protein, 17 aa, Artificial Sequence
  Synthetic
WISAYNGKTSYAQKFQG

SEQ ID NO: 1963 - protein, 7 aa, Artificial Sequence
  Synthetic
STGDGEY

SEQ ID NO: 1964 - protein, 11 aa, Artificial Sequence
  Synthetic
RASQSVSSNLA

SEQ ID NO: 1965 - protein, 7 aa, Artificial Sequence
  Synthetic
GASTRAT

SEQ ID NO: 1966 - protein, 10 aa, Artificial Sequence
  Synthetic
QQYHTWPVLT

SEQ ID NO: 1967 - protein, 116 aa, Artificial Sequence
  Synthetic
QVQLVQSGAEVKKPGASVKVSCKASGYTFNNYGISWVRQAPGQCLEWMGWISAYNGKTSYAQKFQGRVTMTTDTSTGTAYMELRSLRSDDTAVYYCARSTGDGEYWGQGTLVTVSS

SEQ ID NO: 1968 - protein, 108 aa, Artificial Sequence
  Synthetic
EIVMTQSPATLSVSPGERATLSCRASQSVSSNLAWYQQKPGQAPRLLIYGASTRATGIPARFSGGGSGTEFTLTISSLQSEDFAVYYCQQYHTWPVLTFGCGTKVEIK

SEQ ID NO: 1969 - protein, 239 aa, Artificial Sequence
  Synthetic
QVQLVQSGAEVKKPGASVKVSCKASGYTFNNYGISWVRQAPGQCLEWMGWISAYNGKTSYAQKFQGRVTMTTDTSTGTAYMELRSLRSDDTAVYYCARSTGDGEYWGQGTLVTVSSGGGGSGGGGSGGGGSEIVMTQSPATLSVSPGERATLSCRASQSVSSNLAWYQQKPGQAPRLLIYGASTRATGIPARFSGGGSGTEFTLTISSLQSEDFAVYYCQQYHTWPVLTFGCGTKVEIK

SEQ ID NO: 1970 - protein, 494 aa, Artificial Sequence
  Synthetic
QVQLVQSGAEVKKPGASVKVSCKASGYTFNNYGISWVRQAPGQCLEWMGWISAYNGKTSYAQKFQGRVTMTTDTSTGTAYMELRSLRSDDTAVYYCARSTGDGEYWGQGTLVTVSSGGGGSGGGGSGGGGSEIVMTQSPATLSVSPGERATLSCRASQSVSSNLAWYQQKPGQAPRLLIYGASTRATGIPARFSGGGSGTEFTLTISSLQSEDFAVYYCQQYHTWPVLTFGCGTKVEIKSGGGGSEVQLVESGGGLVQPGGSLKLSCAASGFTFNKYAMNWVRQAPGKGLEWVARIRSKYNNYATYYADSVKDRFTISRDDSKNTAYLQMNNLKTEDTAVYYCVRHGNFGNSYISYWAYWGQGTLVTVSSGGGGSGGGGSGGGGSQTVVTQEPSLTVSPGGTVTLTCGSSTGAVTSGNYPNWVQQKPGQAPRGLIGGTKFLAPGTPARFSGSLLGGKAALTLSGVQPEDEAEYYCVLWYSNRWVFGGGTKLTVL

SEQ ID NO: 1971 - protein, 494 aa, Artificial Sequence
  Synthetic
QVQLVQSGAEVKKPGASVKVSCKASGYTFNNYGISWVRQAPGQCLEWMGWISAYNGKTSYAQKFQGRVTMTTDTSTGTAYMELRSLRSDDTAVYYCARSTGDGEYWGQGTLVTVSSGGGGSGGGGSGGGGSEIVMTQSPATLSVSPGERATLSCRASQSVSSNLAWYQQKPGQAPRLLIYGASTRATGIPARFSGGGSGTEFTLTISSLQSEDFAVYYCQQYHTWPVLTFGCGTKVEIKSGGGGSEVQLVESGGGLVQPGGSLKLSCAASGFTFNKYAINWVRQAPGKGLEWVARIRSKYNNYATYYADAVKDRFTISRDDSKNTVYLQMNNLKTEDTAVYYCARAGNFGSSYISYWAYWGQGTLVTVSSGGGGSGGGGSGGGGSQTVVTQEPSLTVSPGGTVTITCGSSTGAVTSGNYPNWVQKKPGQAPRGLIGGTKFLAPGTPARFSGSLSGGKAALTLSGVQPEDEAEYYCVLWYSNRWVFGSGTKLTVL

SEQ ID NO: 1972 - protein, 982 aa, Artificial Sequence
  Synthetic
QVQLVQSGAEVKKPGASVKVSCKASGYTFNNYGISWVRQAPGQCLEWMGWISAYNGKTSYAQKFQGRVTMTTDTSTGTAYMELRSLRSDDTAVYYCARSTGDGEYWGQGTLVTVSSGGGGSGGGGSGGGGSEIVMTQSPATLSVSPGERATLSCRASQSVSSNLAWYQQKPGQAPRLLIYGASTRATGIPARFSGGGSGTEFTLTISSLQSEDFAVYYCQQYHTWPVLTFGCGTKVEIKSGGGGSEVQLVESGGGLVQPGGSLKLSCAASGFTFNKYAMNWVRQAPGKGLEWVARIRSKYNNYATYYADSVKDRFTISRDDSKNTAYLQMNNLKTEDTAVYYCVRHGNFGNSYISYWAYWGQGTLVTVSSGGGGSGGGGSGGGGSQTVVTQEPSLTVSPGGTVTLTCGSSTGAVTSGNYPNWVQQKPGQAPRGLIGGTKFLAPGTPARFSGSLLGGKAALTLSGVQPEDEAEYYCVLWYSNRWVFGGGTKLTVLGGGGDKTHTCPPCPAPELLGGPSVFLFPPKPKDTLMISRTPEVTCVVVDVSHEDPEVKFNWYVDGVEVHNAKTKPCEEQYGSTYRCVSVLTVLHQDWLNGKEYKCKVSNKALPAPIEKTISKAKGQPREPQVYTLPPSREEMTKNQVSLTCLVKGFYPSDIAVEWESNGQPENNYKTTPPVLDSDGSFFLYSKLTVDKSRWQQGNVFSCSVMHEALHNHYTQKSLSLSPGKGGGGSGGGGSGGGGSGGGGSGGGGSGGGGSDKTHTCPPCPAPELLGGPSVFLFPPKPKDTLMISRTPEVTCVVVDVSHEDPEVKFNWYVDGVEVHNAKTKPCEEQYGSTYRCVSVLTVLHQDWLNGKEYKCKVSNKALPAPIEKTISKAKGQPREPQVYTLPPSREEMTKNQVSLTCLVKGFYPSDIAVEWESNGQPENNYKTTPPVLDSDGSFFLYSKLTVDKSRWQQGNVFSCSVMHEALHNHYTQKSLSLSPGK

SEQ ID NO: 1973 - protein, 982 aa, Artificial Sequence
  Synthetic
QVQLVQSGAEVKKPGASVKVSCKASGYTFNNYGISWVRQAPGQCLEWMGWISAYNGKTSYAQKFQGRVTMTTDTSTGTAYMELRSLRSDDTAVYYCARSTGDGEYWGQGTLVTVSSGGGGSGGGGSGGGGSEIVMTQSPATLSVSPGERATLSCRASQSVSSNLAWYQQKPGQAPRLLIYGASTRATGIPARFSGGGSGTEFTLTISSLQSEDFAVYYCQQYHTWPVLTFGCGTKVEIKSGGGGSEVQLVESGGGLVQPGGSLKLSCAASGFTFNKYAINWVRQAPGKGLEWVARIRSKYNNYATYYADAVKDRFTISRDDSKNTVYLQMNNLKTEDTAVYYCARAGNFGSSYISYWAYWGQGTLVTVSSGGGGSGGGGSGGGGSQTVVTQEPSLTVSPGGTVTITCGSSTGAVTSGNYPNWVQKKPGQAPRGLIGGTKFLAPGTPARFSGSLSGGKAALTLSGVQPEDEAEYYCVLWYSNRWVFGSGTKLTVLGGGGDKTHTCPPCPAPELLGGPSVFLFPPKPKDTLMISRTPEVTCVVVDVSHEDPEVKFNWYVDGVEVHNAKTKPCEEQYGSTYRCVSVLTVLHQDWLNGKEYKCKVSNKALPAPIEKTISKAKGQPREPQVYTLPPSREEMTKNQVSLTCLVKGFYPSDIAVEWESNGQPENNYKTTPPVLDSDGSFFLYSKLTVDKSRWQQGNVFSCSVMHEALHNHYTQKSLSLSPGKGGGGSGGGGSGGGGSGGGGSGGGGSGGGGSDKTHTCPPCPAPELLGGPSVFLFPPKPKDTLMISRTPEVTCVVVDVSHEDPEVKFNWYVDGVEVHNAKTKPCEEQYGSTYRCVSVLTVLHQDWLNGKEYKCKVSNKALPAPIEKTISKAKGQPREPQVYTLPPSREEMTKNQVSLTCLVKGFYPSDIAVEWESNGQPENNYKTTPPVLDSDGSFFLYSKLTVDKSRWQQGNVFSCSVMHEALHNHYTQKSLSLSPGK

SEQ ID NO: 1974 - protein, 7 aa, Artificial Sequence
  Synthetic
SKSAAWN

SEQ ID NO: 1975 - protein, 18 aa, Artificial Sequence
  Synthetic
RTFYRSTWYNDYAVSVKS

SEQ ID NO: 1976 - protein, 11 aa, Artificial Sequence
  Synthetic
EGQWLVYGMDV

SEQ ID NO: 1977 - protein, 13 aa, Artificial Sequence
  Synthetic
SGSSSNIGSNTVN

SEQ ID NO: 1978 - protein, 7 aa, Artificial Sequence
  Synthetic
SNNQRPS

SEQ ID NO: 1979 - protein, 11 aa, Artificial Sequence
  Synthetic
AAWDDSLSGPV

SEQ ID NO: 1980 - protein, 123 aa, Artificial Sequence; identical to SEQ ID NO: 1941
  Synthetic

SEQ ID NO: 1981 - protein, 110 aa, Artificial Sequence
  Synthetic
QSVLTQPPSASGTPGQRVTISCSGSSSNIGSNTVNWYQQLPGTAPKLLIYSNNQRPSGVPDRFSGSKSGTSASLAISGLRSEDEADYYCAAWDDSLSGPVFGCGTKVTVL

SEQ ID NO: 1982 - protein, 248 aa, Artificial Sequence
  Synthetic
QVQLQQSGPGLVKPSQTLSLTCAISGDSVSSKSAAWNWIRQSPSGCLEWLGRTFYRSTWYNDYAVSVKSRITINPDTSKNQFSLQLNSVIPEDTAVYYCAREGQWLVYGMDVWGQGTTVTVSSGGGGSGGGGSGGGGSQSVLTQPPSASGTPGQRVTISCSGSSSNIGSNTVNWYQQLPGTAPKLLIYSNNQRPSGVPDRFSGSKSGTSASLAISGLRSEDEADYYCAAWDDSLSGPVFGCGTKVTVL

SEQ ID NO: 1983 - protein, 503 aa, Artificial Sequence
  Synthetic
QVQLQQSGPGLVKPSQTLSLTCAISGDSVSSKSAAWNWIRQSPSGCLEWLGRTFYRSTWYNDYAVSVKSRITINPDTSKNQFSLQLNSVIPEDTAVYYCAREGQWLVYGMDVWGQGTTVTVSSGGGGSGGGGSGGGGSQSVLTQPPSASGTPGQRVTISCSGSSSNIGSNTVNWYQQLPGTAPKLLIYSNNQRPSGVPDRFSGSKSGTSASLAISGLRSEDEADYYCAAWDDSLSGPVFGCGTKVTVLSGGGGSEVQLVESGGGLVQPGGSLKLSCAASGFTFNKYAMNWVRQAPGKGLEWVARIRSKYNNYATYYADSVKDRFTISRDDSKNTAYLQMNNLKTEDTAVYYCVRHGNFGNSYISYWAYWGQGTLVTVSSGGGGSGGGGSGGGGSQTVVTQEPSLTVSPGGTVTLTCGSSTGAVTSGNYPNWVQQKPGQAPRGLIGGTKFLAPGTPARFSGSLLGGKAALTLSGVQPEDEAEYYCVLWYSNRWVFGGGTKLTVL

SEQ ID NO: 1984 - protein, 503 aa, Artificial Sequence
  Synthetic
QVQLQQSGPGLVKPSQTLSLTCAISGDSVSSKSAAWNWIRQSPSGCLEWLGRTFYRSTWYNDYAVSVKSRITINPDTSKNQFSLQLNSVIPEDTAVYYCAREGQWLVYGMDVWGQGTTVTVSSGGGGSGGGGSGGGGSQSVLTQPPSASGTPGQRVTISCSGSSSNIGSNTVNWYQQLPGTAPKLLIYSNNQRPSGVPDRFSGSKSGTSASLAISGLRSEDEADYYCAAWDDSLSGPVFGCGTKVTVLSGGGGSEVQLVESGGGLVQPGGSLKLSCAASGFTFNKYAINWVRQAPGKGLEWVARIRSKYNNYATYYADAVKDRFTISRDDSKNTVYLQMNNLKTEDTAVYYCARAGNFGSSYISYWAYWGQGTLVTVSSGGGGSGGGGSGGGGSQTVVTQEPSLTVSPGGTVTITCGSSTGAVTSGNYPNWVQKKPGQAPRGLIGGTKFLAPGTPARFSGSLSGGKAALTLSGVQPEDEAEYYCVLWYSNRWVFGSGTKLTVL

SEQ ID NO: 1985 - protein, 991 aa, Artificial Sequence
  Synthetic
QVQLQQSGPGLVKPSQTLSLTCAISGDSVSSKSAAWNWIRQSPSGCLEWLGRTFYRSTWYNDYAVSVKSRITINPDTSKNQFSLQLNSVIPEDTAVYYCAREGQWLVYGMDVWGQGTTVTVSSGGGGSGGGGSGGGGSQSVLTQPPSASGTPGQRVTISCSGSSSNIGSNTVNWYQQLPGTAPKLLIYSNNQRPSGVPDRFSGSKSGTSASLAISGLRSEDEADYYCAAWDDSLSGPVFGCGTKVTVLSGGGGSEVQLVESGGGLVQPGGSLKLSCAASGFTFNKYAMNWVRQAPGKGLEWVARIRSKYNNYATYYADSVKDRFTISRDDSKNTAYLQMNNLKTEDTAVYYCVRHGNFGNSYISYWAYWGQGTLVTVSSGGGGSGGGGSGGGGSQTVVTQEPSLTVSPGGTVTLTCGSSTGAVTSGNYPNWVQQKPGQAPRGLIGGTKFLAPGTPARFSGSLLGGKAALTLSGVQPEDEAEYYCVLWYSNRWVFGGGTKLTVLGGGGDKTHTCPPCPAPELLGGPSVFLFPPKPKDTLMISRTPEVTCVVVDVSHEDPEVKFNWYVDGVEVHNAKTKPCEEQYGSTYRCVSVLTVLHQDWLNGKEYKCKVSNKALPAPIEKTISKAKGQPREPQVYTLPPSREEMTKNQVSLTCLVKGFYPSDIAVEWESNGQPENNYKTTPPVLDSDGSFFLYSKLTVDKSRWQQGNVFSCSVMHEALHNHYTQKSLSLSPGKGGGGSGGGGSGGGGSGGGGSGGGGSGGGGSDKTHTCPPCPAPELLGGPSVFLFPPKPKDTLMISRTPEVTCVVVDVSHEDPEVKFNWYVDGVEVHNAKTKPCEEQYGSTYRCVSVLTVLHQDWLNGKEYKCKVSNKALPAPIEKTISKAKGQPREPQVYTLPPSREEMTKNQVSLTCLVKGFYPSDIAVEWESNGQPENNYKTTPPVLDSDGSFFLYSKLTVDKSRWQQGNVFSCSVMHEALHNHYTQKSLSLSPGK

SEQ ID NO: 1986 - protein, 991 aa, Artificial Sequence
  Synthetic
QVQLQQSGPGLVKPSQTLSLTCAISGDSVSSKSAAWNWIRQSPSGCLEWLGRTFYRSTWYNDYAVSVKSRITINPDTSKNQFSLQLNSVIPEDTAVYYCAREGQWLVYGMDVWGQGTTVTVSSGGGGSGGGGSGGGGSQSVLTQPPSASGTPGQRVTISCSGSSSNIGSNTVNWYQQLPGTAPKLLIYSNNQRPSGVPDRFSGSKSGTSASLAISGLRSEDEADYYCAAWDDSLSGPVFGCGTKVTVLSGGGGSEVQLVESGGGLVQPGGSLKLSCAASGFTFNKYAINWVRQAPGKGLEWVARIRSKYNNYATYYADAVKDRFTISRDDSKNTVYLQMNNLKTEDTAVYYCARAGNFGSSYISYWAYWGQGTLVTVSSGGGGSGGGGSGGGGSQTVVTQEPSLTVSPGGTVTITCGSSTGAVTSGNYPNWVQKKPGQAPRGLIGGTKFLAPGTPARFSGSLSGGKAALTLSGVQPEDEAEYYCVLWYSNRWVFGSGTKLTVLGGGGDKTHTCPPCPAPELLGGPSVFLFPPKPKDTLMISRTPEVTCVVVDVSHEDPEVKFNWYVDGVEVHNAKTKPCEEQYGSTYRCVSVLTVLHQDWLNGKEYKCKVSNKALPAPIEKTISKAKGQPREPQVYTLPPSREEMTKNQVSLTCLVKGFYPSDIAVEWESNGQPENNYKTTPPVLDSDGSFFLYSKLTVDKSRWQQGNVFSCSVMHEALHNHYTQKSLSLSPGKGGGGSGGGGSGGGGSGGGGSGGGGSGGGGSDKTHTCPPCPAPELLGGPSVFLFPPKPKDTLMISRTPEVTCVVVDVSHEDPEVKFNWYVDGVEVHNAKTKPCEEQYGSTYRCVSVLTVLHQDWLNGKEYKCKVSNKALPAPIEKTISKAKGQPREPQVYTLPPSREEMTKNQVSLTCLVKGFYPSDIAVEWESNGQPENNYKTTPPVLDSDGSFFLYSKLTVDKSRWQQGNVFSCSVMHEALHNHYTQKSLSLSPGK

SEQ ID NO: 1987 - protein, 7 aa, Artificial Sequence
  Synthetic
SKSAAWN

SEQ ID NO: 1988 - protein, 18 aa, Artificial Sequence
  Synthetic
RTFYRSTWYNDYAVSVKS

SEQ ID NO: 1989 - protein, 11 aa, Artificial Sequence
  Synthetic
EGQWLVYGMDV

SEQ ID NO: 1990 - protein, 13 aa, Artificial Sequence
  Synthetic
SGSSSNIGSNTVN

SEQ ID NO: 1991 - protein, 7 aa, Artificial Sequence
  Synthetic
RNNQRPS

SEQ ID NO: 1992 - protein, 11 aa, Artificial Sequence
  Synthetic
AAWDDSLNGRV

SEQ ID NO: 1993 - protein, 123 aa, Artificial Sequence; identical to SEQ ID NO: 1941
  Synthetic

SEQ ID NO: 1994 - protein, 110 aa, Artificial Sequence
  Synthetic
QSVLTQPPSASGTPGQRITISCSGSSSNIGSNTVNWYQQLPGTAPKLLIYRNNQRPSGVPDRFSGSKSGTSASLAISGLQSEDEADYYCAAWDDSLNGRVFGCGTKLTVL

SEQ ID NO: 1995 - protein, 248 aa, Artificial Sequence
  Synthetic
QVQLQQSGPGLVKPSQTLSLTCAISGDSVSSKSAAWNWIRQSPSGCLEWLGRTFYRSTWYNDYAVSVKSRITINPDTSKNQFSLQLNSVIPEDTAVYYCAREGQWLVYGMDVWGQGTTVTVSSGGGGSGGGGSGGGGSQSVLTQPPSASGTPGQRITISCSGSSSNIGSNTVNWYQQLPGTAPKLLIYRNNQRPSGVPDRFSGSKSGTSASLAISGLQSEDEADYYCAAWDDSLNGRVFGCGTKLTVL

SEQ ID NO: 1996 - protein, 503 aa, Artificial Sequence
  Synthetic
QVQLQQSGPGLVKPSQTLSLTCAISGDSVSSKSAAWNWIRQSPSGCLEWLGRTFYRSTWYNDYAVSVKSRITINPDTSKNQFSLQLNSVIPEDTAVYYCAREGQWLVYGMDVWGQGTTVTVSSGGGGSGGGGSGGGGSQSVLTQPPSASGTPGQRITISCSGSSSNIGSNTVNWYQQLPGTAPKLLIYRNNQRPSGVPDRFSGSKSGTSASLAISGLQSEDEADYYCAAWDDSLNGRVFGCGTKLTVLSGGGGSEVQLVESGGGLVQPGGSLKLSCAASGFTFNKYAMNWVRQAPGKGLEWVARIRSKYNNYATYYADSVKDRFTISRDDSKNTAYLQMNNLKTEDTAVYYCVRHGNFGNSYISYWAYWGQGTLVTVSSGGGGSGGGGSGGGGSQTVVTQEPSLTVSPGGTVTLTCGSSTGAVTSGNYPNWVQQKPGQAPRGLIGGTKFLAPGTPARFSGSLLGGKAALTLSGVQPEDEAEYYCVLWYSNRWVFGGGTKLTVL

SEQ ID NO: 1997 - protein, 503 aa, Artificial Sequence
  Synthetic
QVQLQQSGPGLVKPSQTLSLTCAISGDSVSSKSAAWNWIRQSPSGCLEWLGRTFYRSTWYNDYAVSVKSRITINPDTSKNQFSLQLNSVIPEDTAVYYCAREGQWLVYGMDVWGQGTTVTVSSGGGGSGGGGSGGGGSQSVLTQPPSASGTPGQRITISCSGSSSNIGSNTVNWYQQLPGTAPKLLIYRNNQRPSGVPDRFSGSKSGTSASLAISGLQSEDEADYYCAAWDDSLNGRVFGCGTKLTVLSGGGGSEVQLVESGGGLVQPGGSLKLSCAASGFTFNKYAINWVRQAPGKGLEWVARIRSKYNNYATYYADAVKDRFTISRDDSKNTVYLQMNNLKTEDTAVYYCARAGNFGSSYISYWAYWGQGTLVTVSSGGGGSGGGGSGGGGSQTVVTQEPSLTVSPGGTVTITCGSSTGAVTSGNYPNWVQKKPGQAPRGLIGGTKFLAPGTPARFSGSLSGGKAALTLSGVQPEDEAEYYCVLWYSNRWVFGSGTKLTVL

SEQ ID NO: 1998 - protein, 991 aa, Artificial Sequence
  Synthetic
QVQLQQSGPGLVKPSQTLSLTCAISGDSVSSKSAAWNWIRQSPSGCLEWLGRTFYRSTWYNDYAVSVKSRITINPDTSKNQFSLQLNSVIPEDTAVYYCAREGQWLVYGMDVWGQGTTVTVSSGGGGSGGGGSGGGGSQSVLTQPPSASGTPGQRITISCSGSSSNIGSNTVNWYQQLPGTAPKLLIYRNNQRPSGVPDRFSGSKSGTSASLAISGLQSEDEADYYCAAWDDSLNGRVFGCGTKLTVLSGGGGSEVQLVESGGGLVQPGGSLKLSCAASGFTFNKYAMNWVRQAPGKGLEWVARIRSKYNNYATYYADSVKDRFTISRDDSKNTAYLQMNNLKTEDTAVYYCVRHGNFGNSYISYWAYWGQGTLVTVSSGGGGSGGGGSGGGGSQTVVTQEPSLTVSPGGTVTLTCGSSTGAVTSGNYPNWVQQKPGQAPRGLIGGTKFLAPGTPARFSGSLLGGKAALTLSGVQPEDEAEYYCVLWYSNRWVFGGGTKLTVLGGGGDKTHTCPPCPAPELLGGPSVFLFPPKPKDTLMISRTPEVTCVVVDVSHEDPEVKFNWYVDGVEVHNAKTKPCEEQYGSTYRCVSVLTVLHQDWLNGKEYKCKVSNKALPAPIEKTISKAKGQPREPQVYTLPPSREEMTKNQVSLTCLVKGFYPSDIAVEWESNGQPENNYKTTPPVLDSDGSFFLYSKLTVDKSRWQQGNVFSCSVMHEALHNHYTQKSLSLSPGKGGGGSGGGGSGGGGSGGGGSGGGGSGGGGSDKTHTCPPCPAPELLGGPSVFLFPPKPKDTLMISRTPEVTCVVVDVSHEDPEVKFNWYVDGVEVHNAKTKPCEEQYGSTYRCVSVLTVLHQDWLNGKEYKCKVSNKALPAPIEKTISKAKGQPREPQVYTLPPSREEMTKNQVSLTCLVKGFYPSDIAVEWESNGQPENNYKTTPPVLDSDGSFFLYSKLTVDKSRWQQGNVFSCSVMHEALHNHYTQKSLSLSPGK

SEQ ID NO: 1999 - protein, 991 aa, Artificial Sequence
  Synthetic
QVQLQQSGPGLVKPSQTLSLTCAISGDSVSSKSAAWNWIRQSPSGCLEWLGRTFYRSTWYNDYAVSVKSRITINPDTSKNQFSLQLNSVIPEDTAVYYCAREGQWLVYGMDVWGQGTTVTVSSGGGGSGGGGSGGGGSQSVLTQPPSASGTPGQRITISCSGSSSNIGSNTVNWYQQLPGTAPKLLIYRNNQRPSGVPDRFSGSKSGTSASLAISGLQSEDEADYYCAAWDDSLNGRVFGCGTKLTVLSGGGGSEVQLVESGGGLVQPGGSLKLSCAASGFTFNKYAINWVRQAPGKGLEWVARIRSKYNNYATYYADAVKDRFTISRDDSKNTVYLQMNNLKTEDTAVYYCARAGNFGSSYISYWAYWGQGTLVTVSSGGGGSGGGGSGGGGSQTVVTQEPSLTVSPGGTVTITCGSSTGAVTSGNYPNWVQKKPGQAPRGLIGGTKFLAPGTPARFSGSLSGGKAALTLSGVQPEDEAEYYCVLWYSNRWVFGSGTKLTVLGGGGDKTHTCPPCPAPELLGGPSVFLFPPKPKDTLMISRTPEVTCVVVDVSHEDPEVKFNWYVDGVEVHNAKTKPCEEQYGSTYRCVSVLTVLHQDWLNGKEYKCKVSNKALPAPIEKTISKAKGQPREPQVYTLPPSREEMTKNQVSLTCLVKGFYPSDIAVEWESNGQPENNYKTTPPVLDSDGSFFLYSKLTVDKSRWQQGNVFSCSVMHEALHNHYTQKSLSLSPGKGGGGSGGGGSGGGGSGGGGSGGGGSGGGGSDKTHTCPPCPAPELLGGPSVFLFPPKPKDTLMISRTPEVTCVVVDVSHEDPEVKFNWYVDGVEVHNAKTKPCEEQYGSTYRCVSVLTVLHQDWLNGKEYKCKVSNKALPAPIEKTISKAKGQPREPQVYTLPPSREEMTKNQVSLTCLVKGFYPSDIAVEWESNGQPENNYKTTPPVLDSDGSFFLYSKLTVDKSRWQQGNVFSCSVMHEALHNHYTQKSLSLSPGK

SEQ ID NO: 2000 - protein, 7 aa, Artificial Sequence
  Synthetic
SNSAAWN

SEQ ID NO: 2001 - protein, 18 aa, Artificial Sequence
  Synthetic
RTYYRSTWYNDYAVSVKS

SEQ ID NO: 2002 - protein, 13 aa, Artificial Sequence
  Synthetic
DVDTADYYYGMDV

SEQ ID NO: 2003 - protein, 11 aa, Artificial Sequence
  Synthetic
RASQTISSYLN

SEQ ID NO: 2004 - protein, 7 aa, Artificial Sequence
  Synthetic
AASSLQS

SEQ ID NO: 2005 - protein, 9 aa, Artificial Sequence
  Synthetic
QQSYSTPIT

SEQ ID NO: 2006 - protein, 125 aa, Artificial Sequence
  Synthetic
QVQLQQSGPGLVKPSQTLSLTCAISGDSVSSNSAAWNWIRQSPSRCLEWLGRTYYRSTWYNDYAVSVKSRITINPDTSKNQFSLQLNSVTPEDTAVYYCARDVDTADYYYGMDVWGQGTTVTVSS

SEQ ID NO: 2007 - protein, 107 aa, Artificial Sequence
  Synthetic
DIQLTQSPSSLSASVGDRVTITCRASQTISSYLNWFQQKPGKAPKLLIYAASSLQSGVPSRFSGSGSGTDFTLTISSLQPEDFATYYCQQSYSTPITFGCGTRLEIK

SEQ ID NO: 2008 - protein, 247 aa, Artificial Sequence
  Synthetic
QVQLQQSGPGLVKPSQTLSLTCAISGDSVSSNSAAWNWIRQSPSRCLEWLGRTYYRSTWYNDYAVSVKSRITINPDTSKNQFSLQLNSVTPEDTAVYYCARDVDTADYYYGMDVWGQGTTVTVSSGGGGSGGGGSGGGGSDIQLTQSPSSLSASVGDRVTITCRASQTISSYLNWFQQKPGKAPKLLIYAASSLQSGVPSRFSGSGSGTDFTLTISSLQPEDFATYYCQQSYSTPITFGCGTRLEIK

SEQ ID NO: 2009 - protein, 502 aa, Artificial Sequence
  Synthetic
QVQLQQSGPGLVKPSQTLSLTCAISGDSVSSNSAAWNWIRQSPSRCLEWLGRTYYRSTWYNDYAVSVKSRITINPDTSKNQFSLQLNSVTPEDTAVYYCARDVDTADYYYGMDVWGQGTTVTVSSGGGGSGGGGSGGGGSDIQLTQSPSSLSASVGDRVTITCRASQTISSYLNWFQQKPGKAPKLLIYAASSLQSGVPSRFSGSGSGTDFTLTISSLQPEDFATYYCQQSYSTPITFGCGTRLEIKSGGGGSEVQLVESGGGLVQPGGSLKLSCAASGFTFNKYAMNWVRQAPGKGLEWVARIRSKYNNYATYYADSVKDRFTISRDDSKNTAYLQMNNLKTEDTAVYYCVRHGNFGNSYISYWAYWGQGTLVTVSSGGGGSGGGGSGGGGSQTVVTQEPSLTVSPGGTVTLTCGSSTGAVTSGNYPNWVQQKPGQAPRGLIGGTKFLAPGTPARFSGSLLGGKAALTLSGVQPEDEAEYYCVLWYSNRWVFGGGTKLTVL

SEQ ID NO: 2010 - protein, 502 aa, Artificial Sequence
  Synthetic
QVQLQQSGPGLVKPSQTLSLTCAISGDSVSSNSAAWNWIRQSPSRCLEWLGRTYYRSTWYNDYAVSVKSRITINPDTSKNQFSLQLNSVTPEDTAVYYCARDVDTADYYYGMDVWGQGTTVTVSSGGGGSGGGGSGGGGSDIQLTQSPSSLSASVGDRVTITCRASQTISSYLNWFQQKPGKAPKLLIYAASSLQSGVPSRFSGSGSGTDFTLTISSLQPEDFATYYCQQSYSTPITFGCGTRLEIKSGGGGSEVQLVESGGGLVQPGGSLKLSCAASGFTFNKYAINWVRQAPGKGLEWVARIRSKYNNYATYYADAVKDRFTISRDDSKNTVYLQMNNLKTEDTAVYYCARAGNFGSSYISYWAYWGQGTLVTVSSGGGGSGGGGSGGGGSQTVVTQEPSLTVSPGGTVTITCGSSTGAVTSGNYPNWVQKKPGQAPRGLIGGTKFLAPGTPARFSGSLSGGKAALTLSGVQPEDEAEYYCVLWYSNRWVFGSGTKLTVL

SEQ ID NO: 2011 - protein, 990 aa, Artificial Sequence
  Synthetic
QVQLQQSGPGLVKPSQTLSLTCAISGDSVSSNSAAWNWIRQSPSRCLEWLGRTYYRSTWYNDYAVSVKSRITINPDTSKNQFSLQLNSVTPEDTAVYYCARDVDTADYYYGMDVWGQGTTVTVSSGGGGSGGGGSGGGGSDIQLTQSPSSLSASVGDRVTITCRASQTISSYLNWFQQKPGKAPKLLIYAASSLQSGVPSRFSGSGSGTDFTLTISSLQPEDFATYYCQQSYSTPITFGCGTRLEIKSGGGGSEVQLVESGGGLVQPGGSLKLSCAASGFTFNKYAMNWVRQAPGKGLEWVARIRSKYNNYATYYADSVKDRFTISRDDSKNTAYLQMNNLKTEDTAVYYCVRHGNFGNSYISYWAYWGQGTLVTVSSGGGGSGGGGSGGGGSQTVVTQEPSLTVSPGGTVTLTCGSSTGAVTSGNYPNWVQQKPGQAPRGLIGGTKFLAPGTPARFSGSLLGGKAALTLSGVQPEDEAEYYCVLWYSNRWVFGGGTKLTVLGGGGDKTHTCPPCPAPELLGGPSVFLFPPKPKDTLMISRTPEVTCVVVDVSHEDPEVKFNWYVDGVEVHNAKTKPCEEQYGSTYRCVSVLTVLHQDWLNGKEYKCKVSNKALPAPIEKTISKAKGQPREPQVYTLPPSREEMTKNQVSLTCLVKGFYPSDIAVEWESNGQPENNYKTTPPVLDSDGSFFLYSKLTVDKSRWQQGNVFSCSVMHEALHNHYTQKSLSLSPGKGGGGSGGGGSGGGGSGGGGSGGGGSGGGGSDKTHTCPPCPAPELLGGPSVFLFPPKPKDTLMISRTPEVTCVVVDVSHEDPEVKFNWYVDGVEVHNAKTKPCEEQYGSTYRCVSVLTVLHQDWLNGKEYKCKVSNKALPAPIEKTISKAKGQPREPQVYTLPPSREEMTKNQVSLTCLVKGFYPSDIAVEWESNGQPENNYKTTPPVLDSDGSFFLYSKLTVDKSRWQQGNVFSCSVMHEALHNHYTQKSLSLSPGK

SEQ ID NO: 2012 - protein, 990 aa, Artificial Sequence
  Synthetic
QVQLQQSGPGLVKPSQTLSLTCAISGDSVSSNSAAWNWIRQSPSRCLEWLGRTYYRSTWYNDYAVSVKSRITINPDTSKNQFSLQLNSVTPEDTAVYYCARDVDTADYYYGMDVWGQGTTVTVSSGGGGSGGGGSGGGGSDIQLTQSPSSLSASVGDRVTITCRASQTISSYLNWFQQKPGKAPKLLIYAASSLQSGVPSRFSGSGSGTDFTLTISSLQPEDFATYYCQQSYSTPITFGCGTRLEIKSGGGGSEVQLVESGGGLVQPGGSLKLSCAASGFTFNKYAINWVRQAPGKGLEWVARIRSKYNNYATYYADAVKDRFTISRDDSKNTVYLQMNNLKTEDTAVYYCARAGNFGSSYISYWAYWGQGTLVTVSSGGGGSGGGGSGGGGSQTVVTQEPSLTVSPGGTVTITCGSSTGAVTSGNYPNWVQKKPGQAPRGLIGGTKFLAPGTPARFSGSLSGGKAALTLSGVQPEDEAEYYCVLWYSNRWVFGSGTKLTVLGGGGDKTHTCPPCPAPELLGGPSVFLFPPKPKDTLMISRTPEVTCVVVDVSHEDPEVKFNWYVDGVEVHNAKTKPCEEQYGSTYRCVSVLTVLHQDWLNGKEYKCKVSNKALPAPIEKTISKAKGQPREPQVYTLPPSREEMTKNQVSLTCLVKGFYPSDIAVEWESNGQPENNYKTTPPVLDSDGSFFLYSKLTVDKSRWQQGNVFSCSVMHEALHNHYTQKSLSLSPGKGGGGSGGGGSGGGGSGGGGSGGGGSGGGGSDKTHTCPPCPAPELLGGPSVFLFPPKPKDTLMISRTPEVTCVVVDVSHEDPEVKFNWYVDGVEVHNAKTKPCEEQYGSTYRCVSVLTVLHQDWLNGKEYKCKVSNKALPAPIEKTISKAKGQPREPQVYTLPPSREEMTKNQVSLTCLVKGFYPSDIAVEWESNGQPENNYKTTPPVLDSDGSFFLYSKLTVDKSRWQQGNVFSCSVMHEALHNHYTQKSLSLSPGK

SEQ ID NO: 2013 - protein, 7 aa, Artificial Sequence
  Synthetic
SNSAAWN

SEQ ID NO: 2014 - protein, 18 aa, Artificial Sequence
  Synthetic
RTFYRSTWYNDYAVSVKS

SEQ ID NO: 2015 - protein, 12 aa, Artificial Sequence
  Synthetic
ELTGDRDDAFDI

SEQ ID NO: 2016 - protein, 11 aa, Artificial Sequence
  Synthetic
RASQSISSYLN

SEQ ID NO: 2017 - protein, 7 aa, Artificial Sequence
  Synthetic
TASSLQS

SEQ ID NO: 2018 - protein, 9 aa, Artificial Sequence
  Synthetic
QQSYSIPPS

SEQ ID NO: 2019 - protein, 124 aa, Artificial Sequence
  Synthetic
QVQLQQSGPGLMKPSQTLSLTCAISGDSVSSNSAAWNWIRQSPSRCLEWLGRTFYRSTWYNDYAVSVKSRITINPDTSQNQFSLQLNSVTPEDTAVYYCARELTGDRDDAFDIWGLGTMVTVSS

SEQ ID NO: 2020 - protein, 107 aa, Artificial Sequence
  Synthetic
DIQMTQSPSSLSASVGDRVTITCRASQSISSYLNWYQQKPGKAPKLLIYTASSLQSGVPSRFSGSGSGTDFTLTISSLQPEDFATYYCQQSYSIPPSFGCGTKLEIK

SEQ ID NO: 2021 - protein, 246 aa, Artificial Sequence
  Synthetic
QVQLQQSGPGLMKPSQTLSLTCAISGDSVSSNSAAWNWIRQSPSRCLEWLGRTFYRSTWYNDYAVSVKSRITINPDTSQNQFSLQLNSVTPEDTAVYYCARELTGDRDDAFDIWGLGTMVTVSSGGGGSGGGGSGGGGSDIQMTQSPSSLSASVGDRVTITCRASQSISSYLNWYQQKPGKAPKLLIYTASSLQSGVPSRFSGSGSGTDFTLTISSLQPEDFATYYCQQSYSIPPSFGCGTKLEIK

SEQ ID NO: 2022 - protein, 501 aa, Artificial Sequence
  Synthetic
QVQLQQSGPGLMKPSQTLSLTCAISGDSVSSNSAAWNWIRQSPSRCLEWLGRTFYRSTWYNDYAVSVKSRITINPDTSQNQFSLQLNSVTPEDTAVYYCARELTGDRDDAFDIWGLGTMVTVSSGGGGSGGGGSGGGGSDIQMTQSPSSLSASVGDRVTITCRASQSISSYLNWYQQKPGKAPKLLIYTASSLQSGVPSRFSGSGSGTDFTLTISSLQPEDFATYYCQQSYSIPPSFGCGTKLEIKSGGGGSEVQLVESGGGLVQPGGSLKLSCAASGFTFNKYAMNWVRQAPGKGLEWVARIRSKYNNYATYYADSVKDRFTISRDDSKNTAYLQMNNLKTEDTAVYYCVRHGNFGNSYISYWAYWGQGTLVTVSSGGGGSGGGGSGGGGSQTVVTQEPSLTVSPGGTVTLTCGSSTGAVTSGNYPNWVQQKPGQAPRGLIGGTKFLAPGTPARFSGSLLGGKAALTLSGVQPEDEAEYYCVLWYSNRWVFGGGTKLTVL

SEQ ID NO: 2023 - protein, 501 aa, Artificial Sequence
  Synthetic
QVQLQQSGPGLMKPSQTLSLTCAISGDSVSSNSAAWNWIRQSPSRCLEWLGRTFYRSTWYNDYAVSVKSRITINPDTSQNQFSLQLNSVTPEDTAVYYCARELTGDRDDAFDIWGLGTMVTVSSGGGGSGGGGSGGGGSDIQMTQSPSSLSASVGDRVTITCRASQSISSYLNWYQQKPGKAPKLLIYTASSLQSGVPSRFSGSGSGTDFTLTISSLQPEDFATYYCQQSYSIPPSFGCGTKLEIKSGGGGSEVQLVESGGGLVQPGGSLKLSCAASGFTFNKYAINWVRQAPGKGLEWVARIRSKYNNYATYYADAVKDRFTISRDDSKNTVYLQMNNLKTEDTAVYYCARAGNFGSSYISYWAYWGQGTLVTVSSGGGGSGGGGSGGGGSQTVVTQEPSLTVSPGGTVTITCGSSTGAVTSGNYPNWVQKKPGQAPRGLIGGTKFLAPGTPARFSGSLSGGKAALTLSGVQPEDEAEYYCVLWYSNRWVFGSGTKLTVL

SEQ ID NO: 2024 - protein, 989 aa, Artificial Sequence
  Synthetic
QVQLQQSGPGLMKPSQTLSLTCAISGDSVSSNSAAWNWIRQSPSRCLEWLGRTFYRSTWYNDYAVSVKSRITINPDTSQNQFSLQLNSVTPEDTAVYYCARELTGDRDDAFDIWGLGTMVTVSSGGGGSGGGGSGGGGSDIQMTQSPSSLSASVGDRVTITCRASQSISSYLNWYQQKPGKAPKLLIYTASSLQSGVPSRFSGSGSGTDFTLTISSLQPEDFATYYCQQSYSIPPSFGCGTKLEIKSGGGGSEVQLVESGGGLVQPGGSLKLSCAASGFTFNKYAMNWVRQAPGKGLEWVARIRSKYNNYATYYADSVKDRFTISRDDSKNTAYLQMNNLKTEDTAVYYCVRHGNFGNSYISYWAYWGQGTLVTVSSGGGGSGGGGSGGGGSQTVVTQEPSLTVSPGGTVTLTCGSSTGAVTSGNYPNWVQQKPGQAPRGLIGGTKFLAPGTPARFSGSLLGGKAALTLSGVQPEDEAEYYCVLWYSNRWVFGGGTKLTVLGGGGDKTHTCPPCPAPELLGGPSVFLFPPKPKDTLMISRTPEVTCVVVDVSHEDPEVKFNWYVDGVEVHNAKTKPCEEQYGSTYRCVSVLTVLHQDWLNGKEYKCKVSNKALPAPIEKTISKAKGQPREPQVYTLPPSREEMTKNQVSLTCLVKGFYPSDIAVEWESNGQPENNYKTTPPVLDSDGSFFLYSKLTVDKSRWQQGNVFSCSVMHEALHNHYTQKSLSLSPGKGGGGSGGGGSGGGGSGGGGSGGGGSGGGGSDKTHTCPPCPAPELLGGPSVFLFPPKPKDTLMISRTPEVTCVVVDVSHEDPEVKFNWYVDGVEVHNAKTKPCEEQYGSTYRCVSVLTVLHQDWLNGKEYKCKVSNKALPAPIEKTISKAKGQPREPQVYTLPPSREEMTKNQVSLTCLVKGFYPSDIAVEWESNGQPENNYKTTPPVLDSDGSFFLYSKLTVDKSRWQQGNVFSCSVMHEALHNHYTQKSLSLSPGK

SEQ ID NO: 2025 - protein, 989 aa, Artificial Sequence
  Synthetic
QVQLQQSGPGLMKPSQTLSLTCAISGDSVSSNSAAWNWIRQSPSRCLEWLGRTFYRSTWYNDYAVSVKSRITINPDTSQNQFSLQLNSVTPEDTAVYYCARELTGDRDDAFDIWGLGTMVTVSSGGGGSGGGGSGGGGSDIQMTQSPSSLSASVGDRVTITCRASQSISSYLNWYQQKPGKAPKLLIYTASSLQSGVPSRFSGSGSGTDFTLTISSLQPEDFATYYCQQSYSIPPSFGCGTKLEIKSGGGGSEVQLVESGGGLVQPGGSLKLSCAASGFTFNKYAINWVRQAPGKGLEWVARIRSKYNNYATYYADAVKDRFTISRDDSKNTVYLQMNNLKTEDTAVYYCARAGNFGSSYISYWAYWGQGTLVTVSSGGGGSGGGGSGGGGSQTVVTQEPSLTVSPGGTVTITCGSSTGAVTSGNYPNWVQKKPGQAPRGLIGGTKFLAPGTPARFSGSLSGGKAALTLSGVQPEDEAEYYCVLWYSNRWVFGSGTKLTVLGGGGDKTHTCPPCPAPELLGGPSVFLFPPKPKDTLMISRTPEVTCVVVDVSHEDPEVKFNWYVDGVEVHNAKTKPCEEQYGSTYRCVSVLTVLHQDWLNGKEYKCKVSNKALPAPIEKTISKAKGQPREPQVYTLPPSREEMTKNQVSLTCLVKGFYPSDIAVEWESNGQPENNYKTTPPVLDSDGSFFLYSKLTVDKSRWQQGNVFSCSVMHEALHNHYTQKSLSLSPGKGGGGSGGGGSGGGGSGGGGSGGGGSGGGGSDKTHTCPPCPAPELLGGPSVFLFPPKPKDTLMISRTPEVTCVVVDVSHEDPEVKFNWYVDGVEVHNAKTKPCEEQYGSTYRCVSVLTVLHQDWLNGKEYKCKVSNKALPAPIEKTISKAKGQPREPQVYTLPPSREEMTKNQVSLTCLVKGFYPSDIAVEWESNGQPENNYKTTPPVLDSDGSFFLYSKLTVDKSRWQQGNVFSCSVMHEALHNHYTQKSLSLSPGK

SEQ ID NO: 2026 - protein, 5 aa, Artificial Sequence
  Synthetic
AYGIS

SEQ ID NO: 2027 - protein, 17 aa, Artificial Sequence
  Synthetic
WISAYTGKTSYAQKFQG

SEQ ID NO: 2028 - protein, 7 aa, Artificial Sequence
  Synthetic
STGDGEY

SEQ ID NO: 2029 - protein, 11 aa, Artificial Sequence
  Synthetic
RASQSVSSNLA

SEQ ID NO: 2030 - protein, 7 aa, Artificial Sequence
  Synthetic
GASTRAT

SEQ ID NO: 2031 - protein, 10 aa, Artificial Sequence
  Synthetic
QQYHTWPVLT

SEQ ID NO: 2032 - protein, 116 aa, Artificial Sequence
  Synthetic
QVQLVQSGAEVKKPGASVKVSCKASGYTFTAYGISWVRQAPGQCLEWMGWISAYTGKTSYAQKFQGRVTMTTDTSTGTAYMELRSLRSDDTAVYYCARSTGDGEYWGQGTLVTVSS

SEQ ID NO: 2033 - protein, 108 aa, Artificial Sequence
  Synthetic
EIVLTQSPATLSVSPGERATLSCRASQSVSSNLAWYQQKPGQTPRLLIYGASTRATGFPARFSGSGSGTEFTLTISSLQSEDFAVYYCQQYHTWPVLTFGCGTKLEIK

SEQ ID NO: 2034 - protein, 239 aa, Artificial Sequence
  Synthetic
QVQLVQSGAEVKKPGASVKVSCKASGYTFTAYGISWVRQAPGQCLEWMGWISAYTGKTSYAQKFQGRVTMTTDTSTGTAYMELRSLRSDDTAVYYCARSTGDGEYWGQGTLVTVSSGGGGSGGGGSGGGGSEIVLTQSPATLSVSPGERATLSCRASQSVSSNLAWYQQKPGQTPRLLIYGASTRATGFPARFSGSGSGTEFTLTISSLQSEDFAVYYCQQYHTWPVLTFGCGTKLEIK

SEQ ID NO: 2035 - protein, 494 aa, Artificial Sequence
  Synthetic
QVQLVQSGAEVKKPGASVKVSCKASGYTFTAYGISWVRQAPGQCLEWMGWISAYTGKTSYAQKFQGRVTMTTDTSTGTAYMELRSLRSDDTAVYYCARSTGDGEYWGQGTLVTVSSGGGGSGGGGSGGGGSEIVLTQSPATLSVSPGERATLSCRASQSVSSNLAWYQQKPGQTPRLLIYGASTRATGFPARFSGSGSGTEFTLTISSLQSEDFAVYYCQQYHTWPVLTFGCGTKLEIKSGGGGSEVQLVESGGGLVQPGGSLKLSCAASGFTFNKYAMNWVRQAPGKGLEWVARIRSKYNNYATYYADSVKDRFTISRDDSKNTAYLQMNNLKTEDTAVYYCVRHGNFGNSYISYWAYWGQGTLVTVSSGGGGSGGGGSGGGGSQTVVTQEPSLTVSPGGTVTLTCGSSTGAVTSGNYPNWVQQKPGQAPRGLIGGTKFLAPGTPARFSGSLLGGKAALTLSGVQPEDEAEYYCVLWYSNRWVFGGGTKLTVL

SEQ ID NO: 2036 - protein, 494 aa, Artificial Sequence
  Synthetic
QVQLVQSGAEVKKPGASVKVSCKASGYTFTAYGISWVRQAPGQCLEWMGWISAYTGKTSYAQKFQGRVTMTTDTSTGTAYMELRSLRSDDTAVYYCARSTGDGEYWGQGTLVTVSSGGGGSGGGGSGGGGSEIVLTQSPATLSVSPGERATLSCRASQSVSSNLAWYQQKPGQTPRLLIYGASTRATGFPARFSGSGSGTEFTLTISSLQSEDFAVYYCQQYHTWPVLTFGCGTKLEIKSGGGGSEVQLVESGGGLVQPGGSLKLSCAASGFTFNKYAINWVRQAPGKGLEWVARIRSKYNNYATYYADAVKDRFTISRDDSKNTVYLQMNNLKTEDTAVYYCARAGNFGSSYISYWAYWGQGTLVTVSSGGGGSGGGGSGGGGSQTVVTQEPSLTVSPGGTVTITCGSSTGAVTSGNYPNWVQKKPGQAPRGLIGGTKFLAPGTPARFSGSLSGGKAALTLSGVQPEDEAEYYCVLWYSNRWVFGSGTKLTVL

SEQ ID NO: 2037 - protein, 982 aa, Artificial Sequence
  Synthetic
QVQLVQSGAEVKKPGASVKVSCKASGYTFTAYGISWVRQAPGQCLEWMGWISAYTGKTSYAQKFQGRVTMTTDTSTGTAYMELRSLRSDDTAVYYCARSTGDGEYWGQGTLVTVSSGGGGSGGGGSGGGGSEIVLTQSPATLSVSPGERATLSCRASQSVSSNLAWYQQKPGQTPRLLIYGASTRATGFPARFSGSGSGTEFTLTISSLQSEDFAVYYCQQYHTWPVLTFGCGTKLEIKSGGGGSEVQLVESGGGLVQPGGSLKLSCAASGFTFNKYAMNWVRQAPGKGLEWVARIRSKYNNYATYYADSVKDRFTISRDDSKNTAYLQMNNLKTEDTAVYYCVRHGNFGNSYISYWAYWGQGTLVTVSSGGGGSGGGGSGGGGSQTVVTQEPSLTVSPGGTVTLTCGSSTGAVTSGNYPNWVQQKPGQAPRGLIGGTKFLAPGTPARFSGSLLGGKAALTLSGVQPEDEAEYYCVLWYSNRWVFGGGTKLTVLGGGGDKTHTCPPCPAPELLGGPSVFLFPPKPKDTLMISRTPEVTCVVVDVSHEDPEVKFNWYVDGVEVHNAKTKPCEEQYGSTYRCVSVLTVLHQDWLNGKEYKCKVSNKALPAPIEKTISKAKGQPREPQVYTLPPSREEMTKNQVSLTCLVKGFYPSDIAVEWESNGQPENNYKTTPPVLDSDGSFFLYSKLTVDKSRWQQGNVFSCSVMHEALHNHYTQKSLSLSPGKGGGGSGGGGSGGGGSGGGGSGGGGSGGGGSDKTHTCPPCPAPELLGGPSVFLFPPKPKDTLMISRTPEVTCVVVDVSHEDPEVKFNWYVDGVEVHNAKTKPCEEQYGSTYRCVSVLTVLHQDWLNGKEYKCKVSNKALPAPIEKTISKAKGQPREPQVYTLPPSREEMTKNQVSLTCLVKGFYPSDIAVEWESNGQPENNYKTTPPVLDSDGSFFLYSKLTVDKSRWQQGNVFSCSVMHEALHNHYTQKSLSLSPGK

SEQ ID NO: 2038 - protein, 982 aa, Artificial Sequence
  Synthetic
QVQLVQSGAEVKKPGASVKVSCKASGYTFTAYGISWVRQAPGQCLEWMGWISAYTGKTSYAQKFQGRVTMTTDTSTGTAYMELRSLRSDDTAVYYCARSTGDGEYWGQGTLVTVSSGGGGSGGGGSGGGGSEIVLTQSPATLSVSPGERATLSCRASQSVSSNLAWYQQKPGQTPRLLIYGASTRATGFPARFSGSGSGTEFTLTISSLQSEDFAVYYCQQYHTWPVLTFGCGTKLEIKSGGGGSEVQLVESGGGLVQPGGSLKLSCAASGFTFNKYAINWVRQAPGKGLEWVARIRSKYNNYATYYADAVKDRFTISRDDSKNTVYLQMNNLKTEDTAVYYCARAGNFGSSYISYWAYWGQGTLVTVSSGGGGSGGGGSGGGGSQTVVTQEPSLTVSPGGTVTITCGSSTGAVTSGNYPNWVQKKPGQAPRGLIGGTKFLAPGTPARFSGSLSGGKAALTLSGVQPEDEAEYYCVLWYSNRWVFGSGTKLTVLGGGGDKTHTCPPCPAPELLGGPSVFLFPPKPKDTLMISRTPEVTCVVVDVSHEDPEVKFNWYVDGVEVHNAKTKPCEEQYGSTYRCVSVLTVLHQDWLNGKEYKCKVSNKALPAPIEKTISKAKGQPREPQVYTLPPSREEMTKNQVSLTCLVKGFYPSDIAVEWESNGQPENNYKTTPPVLDSDGSFFLYSKLTVDKSRWQQGNVFSCSVMHEALHNHYTQKSLSLSPGKGGGGSGGGGSGGGGSGGGGSGGGGSGGGGSDKTHTCPPCPAPELLGGPSVFLFPPKPKDTLMISRTPEVTCVVVDVSHEDPEVKFNWYVDGVEVHNAKTKPCEEQYGSTYRCVSVLTVLHQDWLNGKEYKCKVSNKALPAPIEKTISKAKGQPREPQVYTLPPSREEMTKNQVSLTCLVKGFYPSDIAVEWESNGQPENNYKTTPPVLDSDGSFFLYSKLTVDKSRWQQGNVFSCSVMHEALHNHYTQKSLSLSPGK

SEQ ID NO: 2039 - protein, 5 aa, Artificial Sequence
  Synthetic
DYGMY

SEQ ID NO: 2040 - protein, 17 aa, Artificial Sequence
  Synthetic
DIWYDGSDKDYADSVKG

SEQ ID NO: 2041 - protein, 11 aa, Artificial Sequence
  Synthetic
HEDYYYYGMDV

SEQ ID NO: 2042 - protein, 14 aa, Artificial Sequence
  Synthetic
TGTSSDVGGYNYVS

SEQ ID NO: 2043 - protein, 7 aa, Artificial Sequence
  Synthetic
EVSNRPS

SEQ ID NO: 2044 - protein, 10 aa, Artificial Sequence
  Synthetic
SSYTTSSTLV

SEQ ID NO: 2045 - protein, 120 aa, Artificial Sequence
  Synthetic
QVQLVESGGGVVQPGRSLRLSCAASGFTFSDYGMYWVRQAPGKCLEWVADIWYDGSDKDYADSVKGRFTISRDNSKNTLYLQMNSLRAEDTAVYYCARHEDYYYYGMDVWGQGTTVTVSS

SEQ ID NO: 2046 - protein, 110 aa, Artificial Sequence
  Synthetic
QSALTQPASVSGSPGQSITISCTGTSSDVGGYNYVSWYQQHPGKAPKLMIFEVSNRPSGVSNRFSGSKSGNTASLTISGLQAEDEADYYCSSYTTSSTLVFGCGTKLTVL

SEQ ID NO: 2047 - protein, 245 aa, Artificial Sequence
  Synthetic
QVQLVESGGGVVQPGRSLRLSCAASGFTFSDYGMYWVRQAPGKCLEWVADIWYDGSDKDYADSVKGRFTISRDNSKNTLYLQMNSLRAEDTAVYYCARHEDYYYYGMDVWGQGTTVTVSSGGGGSGGGGSGGGGSQSALTQPASVSGSPGQSITISCTGTSSDVGGYNYVSWYQQHPGKAPKLMIFEVSNRPSGVSNRFSGSKSGNTASLTISGLQAEDEADYYCSSYTTSSTLVFGCGTKLTVL

SEQ ID NO: 2048 - protein, 500 aa, Artificial Sequence
  Synthetic
QVQLVESGGGVVQPGRSLRLSCAASGFTFSDYGMYWVRQAPGKCLEWVADIWYDGSDKDYADSVKGRFTISRDNSKNTLYLQMNSLRAEDTAVYYCARHEDYYYYGMDVWGQGTTVTVSSGGGGSGGGGSGGGGSQSALTQPASVSGSPGQSITISCTGTSSDVGGYNYVSWYQQHPGKAPKLMIFEVSNRPSGVSNRFSGSKSGNTASLTISGLQAEDEADYYCSSYTTSSTLVFGCGTKLTVLSGGGGSEVQLVESGGGLVQPGGSLKLSCAASGFTFNKYAMNWVRQAPGKGLEWVARIRSKYNNYATYYADSVKDRFTISRDDSKNTAYLQMNNLKTEDTAVYYCVRHGNFGNSYISYWAYWGQGTLVTVSSGGGGSGGGGSGGGGSQTVVTQEPSLTVSPGGTVTLTCGSSTGAVTSGNYPNWVQQKPGQAPRGLIGGTKFLAPGTPARFSGSLLGGKAALTLSGVQPEDEAEYYCVLWYSNRWVFGGGTKLTVL

SEQ ID NO: 2049 - protein, 500 aa, Artificial Sequence
  Synthetic
QVQLVESGGGVVQPGRSLRLSCAASGFTFSDYGMYWVRQAPGKCLEWVADIWYDGSDKDYADSVKGRFTISRDNSKNTLYLQMNSLRAEDTAVYYCARHEDYYYYGMDVWGQGTTVTVSSGGGGSGGGGSGGGGSQSALTQPASVSGSPGQSITISCTGTSSDVGGYNYVSWYQQHPGKAPKLMIFEVSNRPSGVSNRFSGSKSGNTASLTISGLQAEDEADYYCSSYTTSSTLVFGCGTKLTVLSGGGGSEVQLVESGGGLVQPGGSLKLSCAASGFTFNKYAINWVRQAPGKGLEWVARIRSKYNNYATYYADAVKDRFTISRDDSKNTVYLQMNNLKTEDTAVYYCARAGNFGSSYISYWAYWGQGTLVTVSSGGGGSGGGGSGGGGSQTVVTQEPSLTVSPGGTVTITCGSSTGAVTSGNYPNWVQKKPGQAPRGLIGGTKFLAPGTPARFSGSLSGGKAALTLSGVQPEDEAEYYCVLWYSNRWVFGSGTKLTVL

SEQ ID NO: 2050 - protein, 988 aa, Artificial Sequence
  Synthetic
QVQLVESGGGVVQPGRSLRLSCAASGFTFSDYGMYWVRQAPGKCLEWVADIWYDGSDKDYADSVKGRFTISRDNSKNTLYLQMNSLRAEDTAVYYCARHEDYYYYGMDVWGQGTTVTVSSGGGGSGGGGSGGGGSQSALTQPASVSGSPGQSITISCTGTSSDVGGYNYVSWYQQHPGKAPKLMIFEVSNRPSGVSNRFSGSKSGNTASLTISGLQAEDEADYYCSSYTTSSTLVFGCGTKLTVLSGGGGSEVQLVESGGGLVQPGGSLKLSCAASGFTFNKYAMNWVRQAPGKGLEWVARIRSKYNNYATYYADSVKDRFTISRDDSKNTAYLQMNNLKTEDTAVYYCVRHGNFGNSYISYWAYWGQGTLVTVSSGGGGSGGGGSGGGGSQTVVTQEPSLTVSPGGTVTLTCGSSTGAVTSGNYPNWVQQKPGQAPRGLIGGTKFLAPGTPARFSGSLLGGKAALTLSGVQPEDEAEYYCVLWYSNRWVFGGGTKLTVLGGGGDKTHTCPPCPAPELLGGPSVFLFPPKPKDTLMISRTPEVTCVVVDVSHEDPEVKFNWYVDGVEVHNAKTKPCEEQYGSTYRCVSVLTVLHQDWLNGKEYKCKVSNKALPAPIEKTISKAKGQPREPQVYTLPPSREEMTKNQVSLTCLVKGFYPSDIAVEWESNGQPENNYKTTPPVLDSDGSFFLYSKLTVDKSRWQQGNVFSCSVMHEALHNHYTQKSLSLSPGKGGGGSGGGGSGGGGSGGGGSGGGGSGGGGSDKTHTCPPCPAPELLGGPSVFLFPPKPKDTLMISRTPEVTCVVVDVSHEDPEVKFNWYVDGVEVHNAKTKPCEEQYGSTYRCVSVLTVLHQDWLNGKEYKCKVSNKALPAPIEKTISKAKGQPREPQVYTLPPSREEMTKNQVSLTCLVKGFYPSDIAVEWESNGQPENNYKTTPPVLDSDGSFFLYSKLTVDKSRWQQGNVFSCSVMHEALHNHYTQKSLSLSPGK

SEQ ID NO: 2051 - protein, 988 aa, Artificial Sequence
  Synthetic
QVQLVESGGGVVQPGRSLRLSCAASGFTFSDYGMYWVRQAPGKCLEWVADIWYDGSDKDYADSVKGRFTISRDNSKNTLYLQMNSLRAEDTAVYYCARHEDYYYYGMDVWGQGTTVTVSSGGGGSGGGGSGGGGSQSALTQPASVSGSPGQSITISCTGTSSDVGGYNYVSWYQQHPGKAPKLMIFEVSNRPSGVSNRFSGSKSGNTASLTISGLQAEDEADYYCSSYTTSSTLVFGCGTKLTVLSGGGGSEVQLVESGGGLVQPGGSLKLSCAASGFTFNKYAINWVRQAPGKGLEWVARIRSKYNNYATYYADAVKDRFTISRDDSKNTVYLQMNNLKTEDTAVYYCARAGNFGSSYISYWAYWGQGTLVTVSSGGGGSGGGGSGGGGSQTVVTQEPSLTVSPGGTVTITCGSSTGAVTSGNYPNWVQKKPGQAPRGLIGGTKFLAPGTPARFSGSLSGGKAALTLSGVQPEDEAEYYCVLWYSNRWVFGSGTKLTVLGGGGDKTHTCPPCPAPELLGGPSVFLFPPKPKDTLMISRTPEVTCVVVDVSHEDPEVKFNWYVDGVEVHNAKTKPCEEQYGSTYRCVSVLTVLHQDWLNGKEYKCKVSNKALPAPIEKTISKAKGQPREPQVYTLPPSREEMTKNQVSLTCLVKGFYPSDIAVEWESNGQPENNYKTTPPVLDSDGSFFLYSKLTVDKSRWQQGNVFSCSVMHEALHNHYTQKSLSLSPGKGGGGSGGGGSGGGGSGGGGSGGGGSGGGGSDKTHTCPPCPAPELLGGPSVFLFPPKPKDTLMISRTPEVTCVVVDVSHEDPEVKFNWYVDGVEVHNAKTKPCEEQYGSTYRCVSVLTVLHQDWLNGKEYKCKVSNKALPAPIEKTISKAKGQPREPQVYTLPPSREEMTKNQVSLTCLVKGFYPSDIAVEWESNGQPENNYKTTPPVLDSDGSFFLYSKLTVDKSRWQQGNVFSCSVMHEALHNHYTQKSLSLSPGK

SEQ ID NO: 2052 - protein, 7 aa, Artificial Sequence
  Synthetic
SGDYFWG

SEQ ID NO: 2053 - protein, 16 aa, Artificial Sequence
  Synthetic
TIFYSGSTYYNPSLKS

SEQ ID NO: 2054 - protein, 8 aa, Artificial Sequence
  Synthetic
YSFGSFDY

SEQ ID NO: 2055 - protein, 16 aa, Artificial Sequence
  Synthetic
RSSQSLLYSHGYNYLD

SEQ ID NO: 2056 - protein, 7 aa, Artificial Sequence
  Synthetic
LGSNRAS

SEQ ID NO: 2057 - protein, 9 aa, Artificial Sequence
  Synthetic
MQALQTPYT

SEQ ID NO: 2058 - protein, 118 aa, Artificial Sequence
  Synthetic
QVQLQESGPGLVKPSETLSLTCTVSGASISSGDYFWGWIRQPPGRCLEWIGTIFYSGSTYYNPSLKSRVTMSVDTSKNQFSLTLRSVTAADTAIYYCASYSFGSFDYWGQGTLVTVSS

SEQ ID NO: 2059 - protein, 112 aa, Artificial Sequence
  Synthetic
DIVLTQSPLSLPVTPGEPASISCRSSQSLLYSHGYNYLDWYLQKPGQSPQLLIYLGSNRASGVPDRFSGSGSGTDFTLKISRVEAEDVGVYYCMQALQTPYTFGCGTKVEIK

SEQ ID NO: 2060 - protein, 245 aa, Artificial Sequence
  Synthetic
QVQLQESGPGLVKPSETLSLTCTVSGASISSGDYFWGWIRQPPGRCLEWIGTIFYSGSTYYNPSLKSRVTMSVDTSKNQFSLTLRSVTAADTAIYYCASYSFGSFDYWGQGTLVTVSSGGGGSGGGGSGGGGSDIVLTQSPLSLPVTPGEPASISCRSSQSLLYSHGYNYLDWYLQKPGQSPQLLIYLGSNRASGVPDRFSGSGSGTDFTLKISRVEAEDVGVYYCMQALQTPYTFGCGTKVEIK

SEQ ID NO: 2061 - protein, 500 aa, Artificial Sequence
  Synthetic
QVQLQESGPGLVKPSETLSLTCTVSGASISSGDYFWGWIRQPPGRCLEWIGTIFYSGSTYYNPSLKSRVTMSVDTSKNQFSLTLRSVTAADTAIYYCASYSFGSFDYWGQGTLVTVSSGGGGSGGGGSGGGGSDIVLTQSPLSLPVTPGEPASISCRSSQSLLYSHGYNYLDWYLQKPGQSPQLLIYLGSNRASGVPDRFSGSGSGTDFTLKISRVEAEDVGVYYCMQALQTPYTFGCGTKVEIKSGGGGSEVQLVESGGGLVQPGGSLKLSCAASGFTFNKYAMNWVRQAPGKGLEWVARIRSKYNNYATYYADSVKDRFTISRDDSKNTAYLQMNNLKTEDTAVYYCVRHGNFGNSYISYWAYWGQGTLVTVSSGGGGSGGGGSGGGGSQTVVTQEPSLTVSPGGTVTLTCGSSTGAVTSGNYPNWVQQKPGQAPRGLIGGTKFLAPGTPARFSGSLLGGKAALTLSGVQPEDEAEYYCVLWYSNRWVFGGGTKLTVL

SEQ ID NO: 2062 - protein, 500 aa, Artificial Sequence
  Synthetic
QVQLQESGPGLVKPSETLSLTCTVSGASISSGDYFWGWIRQPPGRCLEWIGTIFYSGSTYYNPSLKSRVTMSVDTSKNQFSLTLRSVTAADTAIYYCASYSFGSFDYWGQGTLVTVSSGGGGSGGGGSGGGGSDIVLTQSPLSLPVTPGEPASISCRSSQSLLYSHGYNYLDWYLQKPGQSPQLLIYLGSNRASGVPDRFSGSGSGTDFTLKISRVEAEDVGVYYCMQALQTPYTFGCGTKVEIKSGGGGSEVQLVESGGGLVQPGGSLKLSCAASGFTFNKYAINWVRQAPGKGLEWVARIRSKYNNYATYYADAVKDRFTISRDDSKNTVYLQMNNLKTEDTAVYYCARAGNFGSSYISYWAYWGQGTLVTVSSGGGGSGGGGSGGGGSQTVVTQEPSLTVSPGGTVTITCGSSTGAVTSGNYPNWVQKKPGQAPRGLIGGTKFLAPGTPARFSGSLSGGKAALTLSGVQPEDEAEYYCVLWYSNRWVFGSGTKLTVL

SEQ ID NO: 2063 - protein, 988 aa, Artificial Sequence
  Synthetic
QVQLQESGPGLVKPSETLSLTCTVSGASISSGDYFWGWIRQPPGRCLEWIGTIFYSGSTYYNPSLKSRVTMSVDTSKNQFSLTLRSVTAADTAIYYCASYSFGSFDYWGQGTLVTVSSGGGGSGGGGSGGGGSDIVLTQSPLSLPVTPGEPASISCRSSQSLLYSHGYNYLDWYLQKPGQSPQLLIYLGSNRASGVPDRFSGSGSGTDFTLKISRVEAEDVGVYYCMQALQTPYTFGCGTKVEIKSGGGGSEVQLVESGGGLVQPGGSLKLSCAASGFTFNKYAMNWVRQAPGKGLEWVARIRSKYNNYATYYADSVKDRFTISRDDSKNTAYLQMNNLKTEDTAVYYCVRHGNFGNSYISYWAYWGQGTLVTVSSGGGGSGGGGSGGGGSQTVVTQEPSLTVSPGGTVTLTCGSSTGAVTSGNYPNWVQQKPGQAPRGLIGGTKFLAPGTPARFSGSLLGGKAALTLSGVQPEDEAEYYCVLWYSNRWVFGGGTKLTVLGGGGDKTHTCPPCPAPELLGGPSVFLFPPKPKDTLMISRTPEVTCVVVDVSHEDPEVKFNWYVDGVEVHNAKTKPCEEQYGSTYRCVSVLTVLHQDWLNGKEYKCKVSNKALPAPIEKTISKAKGQPREPQVYTLPPSREEMTKNQVSLTCLVKGFYPSDIAVEWESNGQPENNYKTTPPVLDSDGSFFLYSKLTVDKSRWQQGNVFSCSVMHEALHNHYTQKSLSLSPGKGGGGSGGGGSGGGGSGGGGSGGGGSGGGGSDKTHTCPPCPAPELLGGPSVFLFPPKPKDTLMISRTPEVTCVVVDVSHEDPEVKFNWYVDGVEVHNAKTKPCEEQYGSTYRCVSVLTVLHQDWLNGKEYKCKVSNKALPAPIEKTISKAKGQPREPQVYTLPPSREEMTKNQVSLTCLVKGFYPSDIAVEWESNGQPENNYKTTPPVLDSDGSFFLYSKLTVDKSRWQQGNVFSCSVMHEALHNHYTQKSLSLSPGK

SEQ ID NO: 2064 - protein, 988 aa, Artificial Sequence
  Synthetic
QVQLQESGPGLVKPSETLSLTCTVSGASISSGDYFWGWIRQPPGRCLEWIGTIFYSGSTYYNPSLKSRVTMSVDTSKNQFSLTLRSVTAADTAIYYCASYSFGSFDYWGQGTLVTVSSGGGGSGGGGSGGGGSDIVLTQSPLSLPVTPGEPASISCRSSQSLLYSHGYNYLDWYLQKPGQSPQLLIYLGSNRASGVPDRFSGSGSGTDFTLKISRVEAEDVGVYYCMQALQTPYTFGCGTKVEIKSGGGGSEVQLVESGGGLVQPGGSLKLSCAASGFTFNKYAINWVRQAPGKGLEWVARIRSKYNNYATYYADAVKDRFTISRDDSKNTVYLQMNNLKTEDTAVYYCARAGNFGSSYISYWAYWGQGTLVTVSSGGGGSGGGGSGGGGSQTVVTQEPSLTVSPGGTVTITCGSSTGAVTSGNYPNWVQKKPGQAPRGLIGGTKFLAPGTPARFSGSLSGGKAALTLSGVQPEDEAEYYCVLWYSNRWVFGSGTKLTVLGGGGDKTHTCPPCPAPELLGGPSVFLFPPKPKDTLMISRTPEVTCVVVDVSHEDPEVKFNWYVDGVEVHNAKTKPCEEQYGSTYRCVSVLTVLHQDWLNGKEYKCKVSNKALPAPIEKTISKAKGQPREPQVYTLPPSREEMTKNQVSLTCLVKGFYPSDIAVEWESNGQPENNYKTTPPVLDSDGSFFLYSKLTVDKSRWQQGNVFSCSVMHEALHNHYTQKSLSLSPGKGGGGSGGGGSGGGGSGGGGSGGGGSGGGGSDKTHTCPPCPAPELLGGPSVFLFPPKPKDTLMISRTPEVTCVVVDVSHEDPEVKFNWYVDGVEVHNAKTKPCEEQYGSTYRCVSVLTVLHQDWLNGKEYKCKVSNKALPAPIEKTISKAKGQPREPQVYTLPPSREEMTKNQVSLTCLVKGFYPSDIAVEWESNGQPENNYKTTPPVLDSDGSFFLYSKLTVDKSRWQQGNVFSCSVMHEALHNHYTQKSLSLSPGK

SEQ ID NO: 2065 - protein, 7 aa, Artificial Sequence
  Synthetic
NSDYFWG

SEQ ID NO: 2066 - protein, 16 aa, Artificial Sequence
  Synthetic
TIYYSGRTYYNPSLKS

SEQ ID NO: 2067 - protein, 8 aa, Artificial Sequence
  Synthetic
YQYGSFDY

SEQ ID NO: 2068 - protein, 16 aa, Artificial Sequence
  Synthetic
RSSQSLLHSNGYNYLD

SEQ ID NO: 2069 - protein, 7 aa, Artificial Sequence
  Synthetic
LGSNRAS

SEQ ID NO: 2070 - protein, 9 aa, Artificial Sequence
  Synthetic
MQALQTPYT

SEQ ID NO: 2071 - protein, 118 aa, Artificial Sequence
  Synthetic
QLQLQESGPGLVKPSETLSLTCFVSGGSISNSDYFWGWIRQPPGKCLEWIGTIYYSGRTYYNPSLKSRVTISVDTSKNQFSLMLSSVTAVDTAVYYCARYQYGSFDYWGQGTLVTVSS

SEQ ID NO: 2072 - protein, 112 aa, Artificial Sequence
  Synthetic
DIVMTQTPLSLPVTPGEPASISCRSSQSLLHSNGYNYLDWYLQKPGQSPQLLIYLGSNRASGVPDRFSGSGSGTDFTLKISRVEAEDVGVYYCMQALQTPYTFGCGTKVEIR

SEQ ID NO: 2073 - protein, 245 aa, Artificial Sequence
  Synthetic
QLQLQESGPGLVKPSETLSLTCFVSGGSISNSDYFWGWIRQPPGKCLEWIGTIYYSGRTYYNPSLKSRVTISVDTSKNQFSLMLSSVTAVDTAVYYCARYQYGSFDYWGQGTLVTVSSGGGGSGGGGSGGGGSDIVMTQTPLSLPVTPGEPASISCRSSQSLLHSNGYNYLDWYLQKPGQSPQLLIYLGSNRASGVPDRFSGSGSGTDFTLKISRVEAEDVGVYYCMQALQTPYTFGCGTKVEIR

SEQ ID NO: 2074 - protein, 500 aa, Artificial Sequence
  Synthetic
QLQLQESGPGLVKPSETLSLTCFVSGGSISNSDYFWGWIRQPPGKCLEWIGTIYYSGRTYYNPSLKSRVTISVDTSKNQFSLMLSSVTAVDTAVYYCARYQYGSFDYWGQGTLVTVSSGGGGSGGGGSGGGGSDIVMTQTPLSLPVTPGEPASISCRSSQSLLHSNGYNYLDWYLQKPGQSPQLLIYLGSNRASGVPDRFSGSGSGTDFTLKISRVEAEDVGVYYCMQALQTPYTFGCGTKVEIRSGGGGSEVQLVESGGGLVQPGGSLKLSCAASGFTFNKYAMNWVRQAPGKGLEWVARIRSKYNNYATYYADSVKDRFTISRDDSKNTAYLQMNNLKTEDTAVYYCVRHGNFGNSYISYWAYWGQGTLVTVSSGGGGSGGGGSGGGGSQTVVTQEPSLTVSPGGTVTLTCGSSTGAVTSGNYPNWVQQKPGQAPRGLIGGTKFLAPGTPARFSGSLLGGKAALTLSGVQPEDEAEYYCVLWYSNRWVFGGGTKLTVL

SEQ ID NO: 2075 - protein, 500 aa, Artificial Sequence
  Synthetic
QLQLQESGPGLVKPSETLSLTCFVSGGSISNSDYFWGWIRQPPGKCLEWIGTIYYSGRTYYNPSLKSRVTISVDTSKNQFSLMLSSVTAVDTAVYYCARYQYGSFDYWGQGTLVTVSSGGGGSGGGGSGGGGSDIVMTQTPLSLPVTPGEPASISCRSSQSLLHSNGYNYLDWYLQKPGQSPQLLIYLGSNRASGVPDRFSGSGSGTDFTLKISRVEAEDVGVYYCMQALQTPYTFGCGTKVEIRSGGGGSEVQLVESGGGLVQPGGSLKLSCAASGFTFNKYAINWVRQAPGKGLEWVARIRSKYNNYATYYADAVKDRFTISRDDSKNTVYLQMNNLKTEDTAVYYCARAGNFGSSYISYWAYWGQGTLVTVSSGGGGSGGGGSGGGGSQTVVTQEPSLTVSPGGTVTITCGSSTGAVTSGNYPNWVQKKPGQAPRGLIGGTKFLAPGTPARFSGSLSGGKAALTLSGVQPEDEAEYYCVLWYSNRWVFGSGTKLTVL

SEQ ID NO: 2076 - protein, 988 aa, Artificial Sequence
  Synthetic
QLQLQESGPGLVKPSETLSLTCFVSGGSISNSDYFWGWIRQPPGKCLEWIGTIYYSGRTYYNPSLKSRVTISVDTSKNQFSLMLSSVTAVDTAVYYCARYQYGSFDYWGQGTLVTVSSGGGGSGGGGSGGGGSDIVMTQTPLSLPVTPGEPASISCRSSQSLLHSNGYNYLDWYLQKPGQSPQLLIYLGSNRASGVPDRFSGSGSGTDFTLKISRVEAEDVGVYYCMQALQTPYTFGCGTKVEIRSGGGGSEVQLVESGGGLVQPGGSLKLSCAASGFTFNKYAMNWVRQAPGKGLEWVARIRSKYNNYATYYADSVKDRFTISRDDSKNTAYLQMNNLKTEDTAVYYCVRHGNFGNSYISYWAYWGQGTLVTVSSGGGGSGGGGSGGGGSQTVVTQEPSLTVSPGGTVTLTCGSSTGAVTSGNYPNWVQQKPGQAPRGLIGGTKFLAPGTPARFSGSLLGGKAALTLSGVQPEDEAEYYCVLWYSNRWVFGGGTKLTVLGGGGDKTHTCPPCPAPELLGGPSVFLFPPKPKDTLMISRTPEVTCVVVDVSHEDPEVKFNWYVDGVEVHNAKTKPCEEQYGSTYRCVSVLTVLHQDWLNGKEYKCKVSNKALPAPIEKTISKAKGQPREPQVYTLPPSREEMTKNQVSLTCLVKGFYPSDIAVEWESNGQPENNYKTTPPVLDSDGSFFLYSKLTVDKSRWQQGNVFSCSVMHEALHNHYTQKSLSLSPGKGGGGSGGGGSGGGGSGGGGSGGGGSGGGGSDKTHTCPPCPAPELLGGPSVFLFPPKPKDTLMISRTPEVTCVVVDVSHEDPEVKFNWYVDGVEVHNAKTKPCEEQYGSTYRCVSVLTVLHQDWLNGKEYKCKVSNKALPAPIEKTISKAKGQPREPQVYTLPPSREEMTKNQVSLTCLVKGFYPSDIAVEWESNGQPENNYKTTPPVLDSDGSFFLYSKLTVDKSRWQQGNVFSCSVMHEALHNHYTQKSLSLSPGK

SEQ ID NO: 2077 - protein, 988 aa, Artificial Sequence
  Synthetic
QLQLQESGPGLVKPSETLSLTCFVSGGSISNSDYFWGWIRQPPGKCLEWIGTIYYSGRTYYNPSLKSRVTISVDTSKNQFSLMLSSVTAVDTAVYYCARYQYGSFDYWGQGTLVTVSSGGGGSGGGGSGGGGSDIVMTQTPLSLPVTPGEPASISCRSSQSLLHSNGYNYLDWYLQKPGQSPQLLIYLGSNRASGVPDRFSGSGSGTDFTLKISRVEAEDVGVYYCMQALQTPYTFGCGTKVEIRSGGGGSEVQLVESGGGLVQPGGSLKLSCAASGFTFNKYAINWVRQAPGKGLEWVARIRSKYNNYATYYADAVKDRFTISRDDSKNTVYLQMNNLKTEDTAVYYCARAGNFGSSYISYWAYWGQGTLVTVSSGGGGSGGGGSGGGGSQTVVTQEPSLTVSPGGTVTITCGSSTGAVTSGNYPNWVQKKPGQAPRGLIGGTKFLAPGTPARFSGSLSGGKAALTLSGVQPEDEAEYYCVLWYSNRWVFGSGTKLTVLGGGGDKTHTCPPCPAPELLGGPSVFLFPPKPKDTLMISRTPEVTCVVVDVSHEDPEVKFNWYVDGVEVHNAKTKPCEEQYGSTYRCVSVLTVLHQDWLNGKEYKCKVSNKALPAPIEKTISKAKGQPREPQVYTLPPSREEMTKNQVSLTCLVKGFYPSDIAVEWESNGQPENNYKTTPPVLDSDGSFFLYSKLTVDKSRWQQGNVFSCSVMHEALHNHYTQKSLSLSPGKGGGGSGGGGSGGGGSGGGGSGGGGSGGGGSDKTHTCPPCPAPELLGGPSVFLFPPKPKDTLMISRTPEVTCVVVDVSHEDPEVKFNWYVDGVEVHNAKTKPCEEQYGSTYRCVSVLTVLHQDWLNGKEYKCKVSNKALPAPIEKTISKAKGQPREPQVYTLPPSREEMTKNQVSLTCLVKGFYPSDIAVEWESNGQPENNYKTTPPVLDSDGSFFLYSKLTVDKSRWQQGNVFSCSVMHEALHNHYTQKSLSLSPGK

SEQ ID NO: 2078 - protein, 5 aa, Artificial Sequence
  Synthetic
SYGIS

SEQ ID NO: 2079 - protein, 17 aa, Artificial Sequence
  Synthetic
WMSPYNGNAIYAQKLQG

SEQ ID NO: 2080 - protein, 13 aa, Artificial Sequence
  Synthetic
DPDYYGSGSYSDY

SEQ ID NO: 2081 - protein, 11 aa, Artificial Sequence
  Synthetic
RASQSVSSNLA

SEQ ID NO: 2082 - protein, 7 aa, Artificial Sequence
  Synthetic
GASSRAT

SEQ ID NO: 2083 - protein, 10 aa, Artificial Sequence
  Synthetic
QQYHSWPLLT

SEQ ID NO: 2084 - protein, 122 aa, Artificial Sequence
  Synthetic
QVQLVQSGGEVKKPGASVKVSCKASGYTFTSYGISWVRQAPGQCLEWMGWMSPYNGNAIYAQKLQGRVTMTRDTSTSTAYMELRSLRSDDTAVYYCARDPDYYGSGSYSDYWGQGTLVTVSS

SEQ ID NO: 2085 - protein, 108 aa, Artificial Sequence; identical to SEQ ID NO: 1507
  Synthetic

SEQ ID NO: 2086 - protein, 245 aa, Artificial Sequence
  Synthetic
QVQLVQSGGEVKKPGASVKVSCKASGYTFTSYGISWVRQAPGQCLEWMGWMSPYNGNAIYAQKLQGRVTMTRDTSTSTAYMELRSLRSDDTAVYYCARDPDYYGSGSYSDYWGQGTLVTVSSGGGGSGGGGSGGGGSEIVLTQSPATLSVSPGERATLSCRASQSVSSNLAWYQQKPGQAPRLLIYGASSRATGIPARFSGSGSGTEFTLTISSLQSEDFAVYYCQQYHSWPLLTFGCGTKVEIK

SEQ ID NO: 2087 - protein, 500 aa, Artificial Sequence
  Synthetic
QVQLVQSGGEVKKPGASVKVSCKASGYTFTSYGISWVRQAPGQCLEWMGWMSPYNGNAIYAQKLQGRVTMTRDTSTSTAYMELRSLRSDDTAVYYCARDPDYYGSGSYSDYWGQGTLVTVSSGGGGSGGGGSGGGGSEIVLTQSPATLSVSPGERATLSCRASQSVSSNLAWYQQKPGQAPRLLIYGASSRATGIPARFSGSGSGTEFTLTISSLQSEDFAVYYCQQYHSWPLLTFGCGTKVEIKSGGGGSEVQLVESGGGLVQPGGSLKLSCAASGFTFNKYAMNWVRQAPGKGLEWVARIRSKYNNYATYYADSVKDRFTISRDDSKNTAYLQMNNLKTEDTAVYYCVRHGNFGNSYISYWAYWGQGTLVTVSSGGGGSGGGGSGGGGSQTVVTQEPSLTVSPGGTVTLTCGSSTGAVTSGNYPNWVQQKPGQAPRGLIGGTKFLAPGTPARFSGSLLGGKAALTLSGVQPEDEAEYYCVLWYSNRWVFGGGTKLTVL

SEQ ID NO: 2088 - protein, 500 aa, Artificial Sequence
  Synthetic
QVQLVQSGGEVKKPGASVKVSCKASGYTFTSYGISWVRQAPGQCLEWMGWMSPYNGNAIYAQKLQGRVTMTRDTSTSTAYMELRSLRSDDTAVYYCARDPDYYGSGSYSDYWGQGTLVTVSSGGGGSGGGGSGGGGSEIVLTQSPATLSVSPGERATLSCRASQSVSSNLAWYQQKPGQAPRLLIYGASSRATGIPARFSGSGSGTEFTLTISSLQSEDFAVYYCQQYHSWPLLTFGCGTKVEIKSGGGGSEVQLVESGGGLVQPGGSLKLSCAASGFTFNKYAINWVRQAPGKGLEWVARIRSKYNNYATYYADAVKDRFTISRDDSKNTVYLQMNNLKTEDTAVYYCARAGNFGSSYISYWAYWGQGTLVTVSSGGGGSGGGGSGGGGSQTVVTQEPSLTVSPGGTVTITCGSSTGAVTSGNYPNWVQKKPGQAPRGLIGGTKFLAPGTPARFSGSLSGGKAALTLSGVQPEDEAEYYCVLWYSNRWVFGSGTKLTVL

SEQ ID NO: 2089 - protein, 988 aa, Artificial Sequence
  Synthetic
QVQLVQSGGEVKKPGASVKVSCKASGYTFTSYGISWVRQAPGQCLEWMGWMSPYNGNAIYAQKLQGRVTMTRDTSTSTAYMELRSLRSDDTAVYYCARDPDYYGSGSYSDYWGQGTLVTVSSGGGGSGGGGSGGGGSEIVLTQSPATLSVSPGERATLSCRASQSVSSNLAWYQQKPGQAPRLLIYGASSRATGIPARFSGSGSGTEFTLTISSLQSEDFAVYYCQQYHSWPLLTFGCGTKVEIKSGGGGSEVQLVESGGGLVQPGGSLKLSCAASGFTFNKYAMNWVRQAPGKGLEWVARIRSKYNNYATYYADSVKDRFTISRDDSKNTAYLQMNNLKTEDTAVYYCVRHGNFGNSYISYWAYWGQGTLVTVSSGGGGSGGGGSGGGGSQTVVTQEPSLTVSPGGTVTLTCGSSTGAVTSGNYPNWVQQKPGQAPRGLIGGTKFLAPGTPARFSGSLLGGKAALTLSGVQPEDEAEYYCVLWYSNRWVFGGGTKLTVLGGGGDKTHTCPPCPAPELLGGPSVFLFPPKPKDTLMISRTPEVTCVVVDVSHEDPEVKFNWYVDGVEVHNAKTKPCEEQYGSTYRCVSVLTVLHQDWLNGKEYKCKVSNKALPAPIEKTISKAKGQPREPQVYTLPPSREEMTKNQVSLTCLVKGFYPSDIAVEWESNGQPENNYKTTPPVLDSDGSFFLYSKLTVDKSRWQQGNVFSCSVMHEALHNHYTQKSLSLSPGKGGGGSGGGGSGGGGSGGGGSGGGGSGGGGSDKTHTCPPCPAPELLGGPSVFLFPPKPKDTLMISRTPEVTCVVVDVSHEDPEVKFNWYVDGVEVHNAKTKPCEEQYGSTYRCVSVLTVLHQDWLNGKEYKCKVSNKALPAPIEKTISKAKGQPREPQVYTLPPSREEMTKNQVSLTCLVKGFYPSDIAVEWESNGQPENNYKTTPPVLDSDGSFFLYSKLTVDKSRWQQGNVFSCSVMHEALHNHYTQKSLSLSPGK

SEQ ID NO: 2090 - protein, 988 aa, Artificial Sequence
  Synthetic
QVQLVQSGGEVKKPGASVKVSCKASGYTFTSYGISWVRQAPGQCLEWMGWMSPYNGNAIYAQKLQGRVTMTRDTSTSTAYMELRSLRSDDTAVYYCARDPDYYGSGSYSDYWGQGTLVTVSSGGGGSGGGGSGGGGSEIVLTQSPATLSVSPGERATLSCRASQSVSSNLAWYQQKPGQAPRLLIYGASSRATGIPARFSGSGSGTEFTLTISSLQSEDFAVYYCQQYHSWPLLTFGCGTKVEIKSGGGGSEVQLVESGGGLVQPGGSLKLSCAASGFTFNKYAINWVRQAPGKGLEWVARIRSKYNNYATYYADAVKDRFTISRDDSKNTVYLQMNNLKTEDTAVYYCARAGNFGSSYISYWAYWGQGTLVTVSSGGGGSGGGGSGGGGSQTVVTQEPSLTVSPGGTVTITCGSSTGAVTSGNYPNWVQKKPGQAPRGLIGGTKFLAPGTPARFSGSLSGGKAALTLSGVQPEDEAEYYCVLWYSNRWVFGSGTKLTVLGGGGDKTHTCPPCPAPELLGGPSVFLFPPKPKDTLMISRTPEVTCVVVDVSHEDPEVKFNWYVDGVEVHNAKTKPCEEQYGSTYRCVSVLTVLHQDWLNGKEYKCKVSNKALPAPIEKTISKAKGQPREPQVYTLPPSREEMTKNQVSLTCLVKGFYPSDIAVEWESNGQPENNYKTTPPVLDSDGSFFLYSKLTVDKSRWQQGNVFSCSVMHEALHNHYTQKSLSLSPGKGGGGSGGGGSGGGGSGGGGSGGGGSGGGGSDKTHTCPPCPAPELLGGPSVFLFPPKPKDTLMISRTPEVTCVVVDVSHEDPEVKFNWYVDGVEVHNAKTKPCEEQYGSTYRCVSVLTVLHQDWLNGKEYKCKVSNKALPAPIEKTISKAKGQPREPQVYTLPPSREEMTKNQVSLTCLVKGFYPSDIAVEWESNGQPENNYKTTPPVLDSDGSFFLYSKLTVDKSRWQQGNVFSCSVMHEALHNHYTQKSLSLSPGK

SEQ ID NO: 2091 - protein, 5 aa, Artificial Sequence
  Synthetic
SYGIS

SEQ ID NO: 2092 - protein, 17 aa, Artificial Sequence
  Synthetic
WISAYNGNTIYAQKFQG

SEQ ID NO: 2093 - protein, 13 aa, Artificial Sequence
  Synthetic
DPDYYGSGSYSDY

SEQ ID NO: 2094 - protein, 11 aa, Artificial Sequence
  Synthetic
RASQSVSSNLA

SEQ ID NO: 2095 - protein, 7 aa, Artificial Sequence
  Synthetic
GASSRAT

SEQ ID NO: 2096 - protein, 10 aa, Artificial Sequence
  Synthetic
QQYHSWPLLT

SEQ ID NO: 2097 - protein, 122 aa, Artificial Sequence
  Synthetic
QVQLVQSGAEVKKPGASVKVSCKASGYTFTSYGISWVRQAPGQCLEWMGWISAYNGNTIYAQKFQGRVTLTRDTSTSTAYMELRSLRSDDTAMYYCARDPDYYGSGSYSDYWGQGTLVTVSS

SEQ ID NO: 2098 - protein, 108 aa, Artificial Sequence; identical to SEQ ID NO: 1507
  Synthetic

SEQ ID NO: 2099 - protein, 245 aa, Artificial Sequence
  Synthetic
QVQLVQSGAEVKKPGASVKVSCKASGYTFTSYGISWVRQAPGQCLEWMGWISAYNGNTIYAQKFQGRVTLTRDTSTSTAYMELRSLRSDDTAMYYCARDPDYYGSGSYSDYWGQGTLVTVSSGGGGSGGGGSGGGGSEIVLTQSPATLSVSPGERATLSCRASQSVSSNLAWYQQKPGQAPRLLIYGASSRATGIPARFSGSGSGTEFTLTISSLQSEDFAVYYCQQYHSWPLLTFGCGTKVEIK

SEQ ID NO: 2100 - protein, 500 aa, Artificial Sequence
  Synthetic
QVQLVQSGAEVKKPGASVKVSCKASGYTFTSYGISWVRQAPGQCLEWMGWISAYNGNTIYAQKFQGRVTLTRDTSTSTAYMELRSLRSDDTAMYYCARDPDYYGSGSYSDYWGQGTLVTVSSGGGGSGGGGSGGGGSEIVLTQSPATLSVSPGERATLSCRASQSVSSNLAWYQQKPGQAPRLLIYGASSRATGIPARFSGSGSGTEFTLTISSLQSEDFAVYYCQQYHSWPLLTFGCGTKVEIKSGGGGSEVQLVESGGGLVQPGGSLKLSCAASGFTFNKYAMNWVRQAPGKGLEWVARIRSKYNNYATYYADSVKDRFTISRDDSKNTAYLQMNNLKTEDTAVYYCVRHGNFGNSYISYWAYWGQGTLVTVSSGGGGSGGGGSGGGGSQTVVTQEPSLTVSPGGTVTLTCGSSTGAVTSGNYPNWVQQKPGQAPRGLIGGTKFLAPGTPARFSGSLLGGKAALTLSGVQPEDEAEYYCVLWYSNRWVFGGGTKLTVL

SEQ ID NO: 2101 - protein, 500 aa, Artificial Sequence
  Synthetic
QVQLVQSGAEVKKPGASVKVSCKASGYTFTSYGISWVRQAPGQCLEWMGWISAYNGNTIYAQKFQGRVTLTRDTSTSTAYMELRSLRSDDTAMYYCARDPDYYGSGSYSDYWGQGTLVTVSSGGGGSGGGGSGGGGSEIVLTQSPATLSVSPGERATLSCRASQSVSSNLAWYQQKPGQAPRLLIYGASSRATGIPARFSGSGSGTEFTLTISSLQSEDFAVYYCQQYHSWPLLTFGCGTKVEIKSGGGGSEVQLVESGGGLVQPGGSLKLSCAASGFTFNKYAINWVRQAPGKGLEWVARIRSKYNNYATYYADAVKDRFTISRDDSKNTVYLQMNNLKTEDTAVYYCARAGNFGSSYISYWAYWGQGTLVTVSSGGGGSGGGGSGGGGSQTVVTQEPSLTVSPGGTVTITCGSSTGAVTSGNYPNWVQKKPGQAPRGLIGGTKFLAPGTPARFSGSLSGGKAALTLSGVQPEDEAEYYCVLWYSNRWVFGSGTKLTVL

SEQ ID NO: 2102 - protein, 988 aa, Artificial Sequence
  Synthetic
QVQLVQSGAEVKKPGASVKVSCKASGYTFTSYGISWVRQAPGQCLEWMGWISAYNGNTIYAQKFQGRVTLTRDTSTSTAYMELRSLRSDDTAMYYCARDPDYYGSGSYSDYWGQGTLVTVSSGGGGSGGGGSGGGGSEIVLTQSPATLSVSPGERATLSCRASQSVSSNLAWYQQKPGQAPRLLIYGASSRATGIPARFSGSGSGTEFTLTISSLQSEDFAVYYCQQYHSWPLLTFGCGTKVEIKSGGGGSEVQLVESGGGLVQPGGSLKLSCAASGFTFNKYAMNWVRQAPGKGLEWVARIRSKYNNYATYYADSVKDRFTISRDDSKNTAYLQMNNLKTEDTAVYYCVRHGNFGNSYISYWAYWGQGTLVTVSSGGGGSGGGGSGGGGSQTVVTQEPSLTVSPGGTVTLTCGSSTGAVTSGNYPNWVQQKPGQAPRGLIGGTKFLAPGTPARFSGSLLGGKAALTLSGVQPEDEAEYYCVLWYSNRWVFGGGTKLTVLGGGGDKTHTCPPCPAPELLGGPSVFLFPPKPKDTLMISRTPEVTCVVVDVSHEDPEVKFNWYVDGVEVHNAKTKPCEEQYGSTYRCVSVLTVLHQDWLNGKEYKCKVSNKALPAPIEKTISKAKGQPREPQVYTLPPSREEMTKNQVSLTCLVKGFYPSDIAVEWESNGQPENNYKTTPPVLDSDGSFFLYSKLTVDKSRWQQGNVFSCSVMHEALHNHYTQKSLSLSPGKGGGGSGGGGSGGGGSGGGGSGGGGSGGGGSDKTHTCPPCPAPELLGGPSVFLFPPKPKDTLMISRTPEVTCVVVDVSHEDPEVKFNWYVDGVEVHNAKTKPCEEQYGSTYRCVSVLTVLHQDWLNGKEYKCKVSNKALPAPIEKTISKAKGQPREPQVYTLPPSREEMTKNQVSLTCLVKGFYPSDIAVEWESNGQPENNYKTTPPVLDSDGSFFLYSKLTVDKSRWQQGNVFSCSVMHEALHNHYTQKSLSLSPGK

SEQ ID NO: 2103 - protein, 988 aa, Artificial Sequence
  Synthetic
QVQLVQSGAEVKKPGASVKVSCKASGYTFTSYGISWVRQAPGQCLEWMGWISAYNGNTIYAQKFQGRVTLTRDTSTSTAYMELRSLRSDDTAMYYCARDPDYYGSGSYSDYWGQGTLVTVSSGGGGSGGGGSGGGGSEIVLTQSPATLSVSPGERATLSCRASQSVSSNLAWYQQKPGQAPRLLIYGASSRATGIPARFSGSGSGTEFTLTISSLQSEDFAVYYCQQYHSWPLLTFGCGTKVEIKSGGGGSEVQLVESGGGLVQPGGSLKLSCAASGFTFNKYAINWVRQAPGKGLEWVARIRSKYNNYATYYADAVKDRFTISRDDSKNTVYLQMNNLKTEDTAVYYCARAGNFGSSYISYWAYWGQGTLVTVSSGGGGSGGGGSGGGGSQTVVTQEPSLTVSPGGTVTITCGSSTGAVTSGNYPNWVQKKPGQAPRGLIGGTKFLAPGTPARFSGSLSGGKAALTLSGVQPEDEAEYYCVLWYSNRWVFGSGTKLTVLGGGGDKTHTCPPCPAPELLGGPSVFLFPPKPKDTLMISRTPEVTCVVVDVSHEDPEVKFNWYVDGVEVHNAKTKPCEEQYGSTYRCVSVLTVLHQDWLNGKEYKCKVSNKALPAPIEKTISKAKGQPREPQVYTLPPSREEMTKNQVSLTCLVKGFYPSDIAVEWESNGQPENNYKTTPPVLDSDGSFFLYSKLTVDKSRWQQGNVFSCSVMHEALHNHYTQKSLSLSPGKGGGGSGGGGSGGGGSGGGGSGGGGSGGGGSDKTHTCPPCPAPELLGGPSVFLFPPKPKDTLMISRTPEVTCVVVDVSHEDPEVKFNWYVDGVEVHNAKTKPCEEQYGSTYRCVSVLTVLHQDWLNGKEYKCKVSNKALPAPIEKTISKAKGQPREPQVYTLPPSREEMTKNQVSLTCLVKGFYPSDIAVEWESNGQPENNYKTTPPVLDSDGSFFLYSKLTVDKSRWQQGNVFSCSVMHEALHNHYTQKSLSLSPGK

SEQ ID NO: 2104 - protein, 5 aa, Artificial Sequence
  Synthetic
TYGIS

SEQ ID NO: 2105 - protein, 17 aa, Artificial Sequence
  Synthetic
WISPKNGVTTYAQKFQG

SEQ ID NO: 2106 - protein, 13 aa, Artificial Sequence
  Synthetic
DPDYYGSGSYSDY

SEQ ID NO: 2107 - protein, 11 aa, Artificial Sequence
  Synthetic
RASQSVSSNLA

SEQ ID NO: 2108 - protein, 7 aa, Artificial Sequence
  Synthetic
GASSRAT

SEQ ID NO: 2109 - protein, 10 aa, Artificial Sequence
  Synthetic
QQYHSWPLLT

SEQ ID NO: 2110 - protein, 122 aa, Artificial Sequence
  Synthetic
QVQLVQSGAEVKKPGASVKVSCKASGYTFTTYGISWVRQAPGQCLEWMGWISPKNGVTTYAQKFQGRVTITADESTSTAYMELSRLTSDDTAMYYCARDPDYYGSGSYSDYWGQGTLVTVSS

SEQ ID NO: 2111 - protein, 108 aa, Artificial Sequence; identical to SEQ ID NO: 1507
  Synthetic

SEQ ID NO: 2112 - protein, 245 aa, Artificial Sequence
  Synthetic
QVQLVQSGAEVKKPGASVKVSCKASGYTFTTYGISWVRQAPGQCLEWMGWISPKNGVTTYAQKFQGRVTITADESTSTAYMELSRLTSDDTAMYYCARDPDYYGSGSYSDYWGQGTLVTVSSGGGGSGGGGSGGGGSEIVLTQSPATLSVSPGERATLSCRASQSVSSNLAWYQQKPGQAPRLLIYGASSRATGIPARFSGSGSGTEFTLTISSLQSEDFAVYYCQQYHSWPLLTFGCGTKVEIK

SEQ ID NO: 2113 - protein, 500 aa, Artificial Sequence
  Synthetic
QVQLVQSGAEVKKPGASVKVSCKASGYTFTTYGISWVRQAPGQCLEWMGWISPKNGVTTYAQKFQGRVTITADESTSTAYMELSRLTSDDTAMYYCARDPDYYGSGSYSDYWGQGTLVTVSSGGGGSGGGGSGGGGSEIVLTQSPATLSVSPGERATLSCRASQSVSSNLAWYQQKPGQAPRLLIYGASSRATGIPARFSGSGSGTEFTLTISSLQSEDFAVYYCQQYHSWPLLTFGCGTKVEIKSGGGGSEVQLVESGGGLVQPGGSLKLSCAASGFTFNKYAMNWVRQAPGKGLEWVARIRSKYNNYATYYADSVKDRFTISRDDSKNTAYLQMNNLKTEDTAVYYCVRHGNFGNSYISYWAYWGQGTLVTVSSGGGGSGGGGSGGGGSQTVVTQEPSLTVSPGGTVTLTCGSSTGAVTSGNYPNWVQQKPGQAPRGLIGGTKFLAPGTPARFSGSLLGGKAALTLSGVQPEDEAEYYCVLWYSNRWVFGGGTKLTVL

SEQ ID NO: 2114 - protein, 500 aa, Artificial Sequence
  Synthetic
QVQLVQSGAEVKKPGASVKVSCKASGYTFTTYGISWVRQAPGQCLEWMGWISPKNGVTTYAQKFQGRVTITADESTSTAYMELSRLTSDDTAMYYCARDPDYYGSGSYSDYWGQGTLVTVSSGGGGSGGGGSGGGGSEIVLTQSPATLSVSPGERATLSCRASQSVSSNLAWYQQKPGQAPRLLIYGASSRATGIPARFSGSGSGTEFTLTISSLQSEDFAVYYCQQYHSWPLLTFGCGTKVEIKSGGGGSEVQLVESGGGLVQPGGSLKLSCAASGFTFNKYAINWVRQAPGKGLEWVARIRSKYNNYATYYADAVKDRFTISRDDSKNTVYLQMNNLKTEDTAVYYCARAGNFGSSYISYWAYWGQGTLVTVSSGGGGSGGGGSGGGGSQTVVTQEPSLTVSPGGTVTITCGSSTGAVTSGNYPNWVQKKPGQAPRGLIGGTKFLAPGTPARFSGSLSGGKAALTLSGVQPEDEAEYYCVLWYSNRWVFGSGTKLTVL

SEQ ID NO: 2115 - protein, 988 aa, Artificial Sequence
  Synthetic
QVQLVQSGAEVKKPGASVKVSCKASGYTFTTYGISWVRQAPGQCLEWMGWISPKNGVTTYAQKFQGRVTITADESTSTAYMELSRLTSDDTAMYYCARDPDYYGSGSYSDYWGQGTLVTVSSGGGGSGGGGSGGGGSEIVLTQSPATLSVSPGERATLSCRASQSVSSNLAWYQQKPGQAPRLLIYGASSRATGIPARFSGSGSGTEFTLTISSLQSEDFAVYYCQQYHSWPLLTFGCGTKVEIKSGGGGSEVQLVESGGGLVQPGGSLKLSCAASGFTFNKYAMNWVRQAPGKGLEWVARIRSKYNNYATYYADSVKDRFTISRDDSKNTAYLQMNNLKTEDTAVYYCVRHGNFGNSYISYWAYWGQGTLVTVSSGGGGSGGGGSGGGGSQTVVTQEPSLTVSPGGTVTLTCGSSTGAVTSGNYPNWVQQKPGQAPRGLIGGTKFLAPGTPARFSGSLLGGKAALTLSGVQPEDEAEYYCVLWYSNRWVFGGGTKLTVLGGGGDKTHTCPPCPAPELLGGPSVFLFPPKPKDTLMISRTPEVTCVVVDVSHEDPEVKFNWYVDGVEVHNAKTKPCEEQYGSTYRCVSVLTVLHQDWLNGKEYKCKVSNKALPAPIEKTISKAKGQPREPQVYTLPPSREEMTKNQVSLTCLVKGFYPSDIAVEWESNGQPENNYKTTPPVLDSDGSFFLYSKLTVDKSRWQQGNVFSCSVMHEALHNHYTQKSLSLSPGKGGGGSGGGGSGGGGSGGGGSGGGGSGGGGSDKTHTCPPCPAPELLGGPSVFLFPPKPKDTLMISRTPEVTCVVVDVSHEDPEVKFNWYVDGVEVHNAKTKPCEEQYGSTYRCVSVLTVLHQDWLNGKEYKCKVSNKALPAPIEKTISKAKGQPREPQVYTLPPSREEMTKNQVSLTCLVKGFYPSDIAVEWESNGQPENNYKTTPPVLDSDGSFFLYSKLTVDKSRWQQGNVFSCSVMHEALHNHYTQKSLSLSPGK

SEQ ID NO: 2116 - protein, 988 aa, Artificial Sequence
  Synthetic
QVQLVQSGAEVKKPGASVKVSCKASGYTFTTYGISWVRQAPGQCLEWMGWISPKNGVTTYAQKFQGRVTITADESTSTAYMELSRLTSDDTAMYYCARDPDYYGSGSYSDYWGQGTLVTVSSGGGGSGGGGSGGGGSEIVLTQSPATLSVSPGERATLSCRASQSVSSNLAWYQQKPGQAPRLLIYGASSRATGIPARFSGSGSGTEFTLTISSLQSEDFAVYYCQQYHSWPLLTFGCGTKVEIKSGGGGSEVQLVESGGGLVQPGGSLKLSCAASGFTFNKYAINWVRQAPGKGLEWVARIRSKYNNYATYYADAVKDRFTISRDDSKNTVYLQMNNLKTEDTAVYYCARAGNFGSSYISYWAYWGQGTLVTVSSGGGGSGGGGSGGGGSQTVVTQEPSLTVSPGGTVTITCGSSTGAVTSGNYPNWVQKKPGQAPRGLIGGTKFLAPGTPARFSGSLSGGKAALTLSGVQPEDEAEYYCVLWYSNRWVFGSGTKLTVLGGGGDKTHTCPPCPAPELLGGPSVFLFPPKPKDTLMISRTPEVTCVVVDVSHEDPEVKFNWYVDGVEVHNAKTKPCEEQYGSTYRCVSVLTVLHQDWLNGKEYKCKVSNKALPAPIEKTISKAKGQPREPQVYTLPPSREEMTKNQVSLTCLVKGFYPSDIAVEWESNGQPENNYKTTPPVLDSDGSFFLYSKLTVDKSRWQQGNVFSCSVMHEALHNHYTQKSLSLSPGKGGGGSGGGGSGGGGSGGGGSGGGGSGGGGSDKTHTCPPCPAPELLGGPSVFLFPPKPKDTLMISRTPEVTCVVVDVSHEDPEVKFNWYVDGVEVHNAKTKPCEEQYGSTYRCVSVLTVLHQDWLNGKEYKCKVSNKALPAPIEKTISKAKGQPREPQVYTLPPSREEMTKNQVSLTCLVKGFYPSDIAVEWESNGQPENNYKTTPPVLDSDGSFFLYSKLTVDKSRWQQGNVFSCSVMHEALHNHYTQKSLSLSPGK

SEQ ID NO: 2117 - protein, 5 aa, Artificial Sequence
  Synthetic
SYGIS

SEQ ID NO: 2118 - protein, 17 aa, Artificial Sequence
  Synthetic
WISAYTGETLYAQKLQG

SEQ ID NO: 2119 - protein, 13 aa, Artificial Sequence
  Synthetic
DPDYYGSGSYSDY

SEQ ID NO: 2120 - protein, 11 aa, Artificial Sequence
  Synthetic
RASQSVSSNLA

SEQ ID NO: 2121 - protein, 7 aa, Artificial Sequence
  Synthetic
GASSRAT

SEQ ID NO: 2122 - protein, 10 aa, Artificial Sequence
  Synthetic
QQYHSWPLLT

SEQ ID NO: 2123 - protein, 122 aa, Artificial Sequence
  Synthetic
QVQLVQSGGEVKKPGASVKVSCKASGYTFTSYGISWVRQAPGQCLEWMGWISAYTGETLYAQKLQGRVTMTRDTSTSTAYMELRSLRSDDTAVYYCARDPDYYGSGSYSDYWGQGTLVTVSS

SEQ ID NO: 2124 - protein, 108 aa, Artificial Sequence; identical to SEQ ID NO: 1507
  Synthetic

SEQ ID NO: 2125 - protein, 245 aa, Artificial Sequence
  Synthetic
QVQLVQSGGEVKKPGASVKVSCKASGYTFTSYGISWVRQAPGQCLEWMGWISAYTGETLYAQKLQGRVTMTRDTSTSTAYMELRSLRSDDTAVYYCARDPDYYGSGSYSDYWGQGTLVTVSSGGGGSGGGGSGGGGSEIVLTQSPATLSVSPGERATLSCRASQSVSSNLAWYQQKPGQAPRLLIYGASSRATGIPARFSGSGSGTEFTLTISSLQSEDFAVYYCQQYHSWPLLTFGCGTKVEIK

SEQ ID NO: 2126 - protein, 500 aa, Artificial Sequence
  Synthetic
QVQLVQSGGEVKKPGASVKVSCKASGYTFTSYGISWVRQAPGQCLEWMGWISAYTGETLYAQKLQGRVTMTRDTSTSTAYMELRSLRSDDTAVYYCARDPDYYGSGSYSDYWGQGTLVTVSSGGGGSGGGGSGGGGSEIVLTQSPATLSVSPGERATLSCRASQSVSSNLAWYQQKPGQAPRLLIYGASSRATGIPARFSGSGSGTEFTLTISSLQSEDFAVYYCQQYHSWPLLTFGCGTKVEIKSGGGGSEVQLVESGGGLVQPGGSLKLSCAASGFTFNKYAMNWVRQAPGKGLEWVARIRSKYNNYATYYADSVKDRFTISRDDSKNTAYLQMNNLKTEDTAVYYCVRHGNFGNSYISYWAYWGQGTLVTVSSGGGGSGGGGSGGGGSQTVVTQEPSLTVSPGGTVTLTCGSSTGAVTSGNYPNWVQQKPGQAPRGLIGGTKFLAPGTPARFSGSLLGGKAALTLSGVQPEDEAEYYCVLWYSNRWVFGGGTKLTVL

SEQ ID NO: 2127 - protein, 500 aa, Artificial Sequence
  Synthetic
QVQLVQSGGEVKKPGASVKVSCKASGYTFTSYGISWVRQAPGQCLEWMGWISAYTGETLYAQKLQGRVTMTRDTSTSTAYMELRSLRSDDTAVYYCARDPDYYGSGSYSDYWGQGTLVTVSSGGGGSGGGGSGGGGSEIVLTQSPATLSVSPGERATLSCRASQSVSSNLAWYQQKPGQAPRLLIYGASSRATGIPARFSGSGSGTEFTLTISSLQSEDFAVYYCQQYHSWPLLTFGCGTKVEIKSGGGGSEVQLVESGGGLVQPGGSLKLSCAASGFTFNKYAINWVRQAPGKGLEWVARIRSKYNNYATYYADAVKDRFTISRDDSKNTVYLQMNNLKTEDTAVYYCARAGNFGSSYISYWAYWGQGTLVTVSSGGGGSGGGGSGGGGSQTVVTQEPSLTVSPGGTVTITCGSSTGAVTSGNYPNWVQKKPGQAPRGLIGGTKFLAPGTPARFSGSLSGGKAALTLSGVQPEDEAEYYCVLWYSNRWVFGSGTKLTVL

SEQ ID NO: 2128 - protein, 988 aa, Artificial Sequence
  Synthetic
QVQLVQSGGEVKKPGASVKVSCKASGYTFTSYGISWVRQAPGQCLEWMGWISAYTGETLYAQKLQGRVTMTRDTSTSTAYMELRSLRSDDTAVYYCARDPDYYGSGSYSDYWGQGTLVTVSSGGGGSGGGGSGGGGSEIVLTQSPATLSVSPGERATLSCRASQSVSSNLAWYQQKPGQAPRLLIYGASSRATGIPARFSGSGSGTEFTLTISSLQSEDFAVYYCQQYHSWPLLTFGCGTKVEIKSGGGGSEVQLVESGGGLVQPGGSLKLSCAASGFTFNKYAMNWVRQAPGKGLEWVARIRSKYNNYATYYADSVKDRFTISRDDSKNTAYLQMNNLKTEDTAVYYCVRHGNFGNSYISYWAYWGQGTLVTVSSGGGGSGGGGSGGGGSQTVVTQEPSLTVSPGGTVTLTCGSSTGAVTSGNYPNWVQQKPGQAPRGLIGGTKFLAPGTPARFSGSLLGGKAALTLSGVQPEDEAEYYCVLWYSNRWVFGGGTKLTVLGGGGDKTHTCPPCPAPELLGGPSVFLFPPKPKDTLMISRTPEVTCVVVDVSHEDPEVKFNWYVDGVEVHNAKTKPCEEQYGSTYRCVSVLTVLHQDWLNGKEYKCKVSNKALPAPIEKTISKAKGQPREPQVYTLPPSREEMTKNQVSLTCLVKGFYPSDIAVEWESNGQPENNYKTTPPVLDSDGSFFLYSKLTVDKSRWQQGNVFSCSVMHEALHNHYTQKSLSLSPGKGGGGSGGGGSGGGGSGGGGSGGGGSGGGGSDKTHTCPPCPAPELLGGPSVFLFPPKPKDTLMISRTPEVTCVVVDVSHEDPEVKFNWYVDGVEVHNAKTKPCEEQYGSTYRCVSVLTVLHQDWLNGKEYKCKVSNKALPAPIEKTISKAKGQPREPQVYTLPPSREEMTKNQVSLTCLVKGFYPSDIAVEWESNGQPENNYKTTPPVLDSDGSFFLYSKLTVDKSRWQQGNVFSCSVMHEALHNHYTQKSLSLSPGK

SEQ ID NO: 2129 - protein, 988 aa, Artificial Sequence
  Synthetic
QVQLVQSGGEVKKPGASVKVSCKASGYTFTSYGISWVRQAPGQCLEWMGWISAYTGETLYAQKLQGRVTMTRDTSTSTAYMELRSLRSDDTAVYYCARDPDYYGSGSYSDYWGQGTLVTVSSGGGGSGGGGSGGGGSEIVLTQSPATLSVSPGERATLSCRASQSVSSNLAWYQQKPGQAPRLLIYGASSRATGIPARFSGSGSGTEFTLTISSLQSEDFAVYYCQQYHSWPLLTFGCGTKVEIKSGGGGSEVQLVESGGGLVQPGGSLKLSCAASGFTFNKYAINWVRQAPGKGLEWVARIRSKYNNYATYYADAVKDRFTISRDDSKNTVYLQMNNLKTEDTAVYYCARAGNFGSSYISYWAYWGQGTLVTVSSGGGGSGGGGSGGGGSQTVVTQEPSLTVSPGGTVTITCGSSTGAVTSGNYPNWVQKKPGQAPRGLIGGTKFLAPGTPARFSGSLSGGKAALTLSGVQPEDEAEYYCVLWYSNRWVFGSGTKLTVLGGGGDKTHTCPPCPAPELLGGPSVFLFPPKPKDTLMISRTPEVTCVVVDVSHEDPEVKFNWYVDGVEVHNAKTKPCEEQYGSTYRCVSVLTVLHQDWLNGKEYKCKVSNKALPAPIEKTISKAKGQPREPQVYTLPPSREEMTKNQVSLTCLVKGFYPSDIAVEWESNGQPENNYKTTPPVLDSDGSFFLYSKLTVDKSRWQQGNVFSCSVMHEALHNHYTQKSLSLSPGKGGGGSGGGGSGGGGSGGGGSGGGGSGGGGSDKTHTCPPCPAPELLGGPSVFLFPPKPKDTLMISRTPEVTCVVVDVSHEDPEVKFNWYVDGVEVHNAKTKPCEEQYGSTYRCVSVLTVLHQDWLNGKEYKCKVSNKALPAPIEKTISKAKGQPREPQVYTLPPSREEMTKNQVSLTCLVKGFYPSDIAVEWESNGQPENNYKTTPPVLDSDGSFFLYSKLTVDKSRWQQGNVFSCSVMHEALHNHYTQKSLSLSPGK

SEQ ID NO: 2130 - protein, 5 aa, Artificial Sequence
  Synthetic
SYGIS

SEQ ID NO: 2131 - protein, 17 aa, Artificial Sequence
  Synthetic
WISPQTGNAIYAQKLQG

SEQ ID NO: 2132 - protein, 13 aa, Artificial Sequence
  Synthetic
DPDYYGSGSYSDY

SEQ ID NO: 2133 - protein, 11 aa, Artificial Sequence
  Synthetic
RASQSVSSNLA

SEQ ID NO: 2134 - protein, 7 aa, Artificial Sequence
  Synthetic
GASSRAT

SEQ ID NO: 2135 - protein, 10 aa, Artificial Sequence
  Synthetic
QQYHSWPLLT

SEQ ID NO: 2136 - protein, 122 aa, Artificial Sequence
  Synthetic
QVQLVQSGGEVKKPGASVKVSCKASGYTFTSYGISWVRQAPGQCLEWMGWISPQTGNAIYAQKLQGRVTMTRDTSTSTAYMELRSLRSDDTAVYYCARDPDYYGSGSYSDYWGQGTLVTVSS

SEQ ID NO: 2137 - protein, 108 aa, Artificial Sequence; identical to SEQ ID NO: 1507
  Synthetic

SEQ ID NO: 2138 - protein, 245 aa, Artificial Sequence
  Synthetic
QVQLVQSGGEVKKPGASVKVSCKASGYTFTSYGISWVRQAPGQCLEWMGWISPQTGNAIYAQKLQGRVTMTRDTSTSTAYMELRSLRSDDTAVYYCARDPDYYGSGSYSDYWGQGTLVTVSSGGGGSGGGGSGGGGSEIVLTQSPATLSVSPGERATLSCRASQSVSSNLAWYQQKPGQAPRLLIYGASSRATGIPARFSGSGSGTEFTLTISSLQSEDFAVYYCQQYHSWPLLTFGCGTKVEIK

SEQ ID NO: 2139 - protein, 500 aa, Artificial Sequence
  Synthetic
QVQLVQSGGEVKKPGASVKVSCKASGYTFTSYGISWVRQAPGQCLEWMGWISPQTGNAIYAQKLQGRVTMTRDTSTSTAYMELRSLRSDDTAVYYCARDPDYYGSGSYSDYWGQGTLVTVSSGGGGSGGGGSGGGGSEIVLTQSPATLSVSPGERATLSCRASQSVSSNLAWYQQKPGQAPRLLIYGASSRATGIPARFSGSGSGTEFTLTISSLQSEDFAVYYCQQYHSWPLLTFGCGTKVEIKSGGGGSEVQLVESGGGLVQPGGSLKLSCAASGFTFNKYAMNWVRQAPGKGLEWVARIRSKYNNYATYYADSVKDRFTISRDDSKNTAYLQMNNLKTEDTAVYYCVRHGNFGNSYISYWAYWGQGTLVTVSSGGGGSGGGGSGGGGSQTVVTQEPSLTVSPGGTVTLTCGSSTGAVTSGNYPNWVQQKPGQAPRGLIGGTKFLAPGTPARFSGSLLGGKAALTLSGVQPEDEAEYYCVLWYSNRWVFGGGTKLTVL

SEQ ID NO: 2140 - protein, 500 aa, Artificial Sequence
  Synthetic
QVQLVQSGGEVKKPGASVKVSCKASGYTFTSYGISWVRQAPGQCLEWMGWISPQTGNAIYAQKLQGRVTMTRDTSTSTAYMELRSLRSDDTAVYYCARDPDYYGSGSYSDYWGQGTLVTVSSGGGGSGGGGSGGGGSEIVLTQSPATLSVSPGERATLSCRASQSVSSNLAWYQQKPGQAPRLLIYGASSRATGIPARFSGSGSGTEFTLTISSLQSEDFAVYYCQQYHSWPLLTFGCGTKVEIKSGGGGSEVQLVESGGGLVQPGGSLKLSCAASGFTFNKYAINWVRQAPGKGLEWVARIRSKYNNYATYYADAVKDRFTISRDDSKNTVYLQMNNLKTEDTAVYYCARAGNFGSSYISYWAYWGQGTLVTVSSGGGGSGGGGSGGGGSQTVVTQEPSLTVSPGGTVTITCGSSTGAVTSGNYPNWVQKKPGQAPRGLIGGTKFLAPGTPARFSGSLSGGKAALTLSGVQPEDEAEYYCVLWYSNRWVFGSGTKLTVL

SEQ ID NO: 2141 - protein, 988 aa, Artificial Sequence
  Synthetic
QVQLVQSGGEVKKPGASVKVSCKASGYTFTSYGISWVRQAPGQCLEWMGWISPQTGNAIYAQKLQGRVTMTRDTSTSTAYMELRSLRSDDTAVYYCARDPDYYGSGSYSDYWGQGTLVTVSSGGGGSGGGGSGGGGSEIVLTQSPATLSVSPGERATLSCRASQSVSSNLAWYQQKPGQAPRLLIYGASSRATGIPARFSGSGSGTEFTLTISSLQSEDFAVYYCQQYHSWPLLTFGCGTKVEIKSGGGGSEVQLVESGGGLVQPGGSLKLSCAASGFTFNKYAMNWVRQAPGKGLEWVARIRSKYNNYATYYADSVKDRFTISRDDSKNTAYLQMNNLKTEDTAVYYCVRHGNFGNSYISYWAYWGQGTLVTVSSGGGGSGGGGSGGGGSQTVVTQEPSLTVSPGGTVTLTCGSSTGAVTSGNYPNWVQQKPGQAPRGLIGGTKFLAPGTPARFSGSLLGGKAALTLSGVQPEDEAEYYCVLWYSNRWVFGGGTKLTVLGGGGDKTHTCPPCPAPELLGGPSVFLFPPKPKDTLMISRTPEVTCVVVDVSHEDPEVKFNWYVDGVEVHNAKTKPCEEQYGSTYRCVSVLTVLHQDWLNGKEYKCKVSNKALPAPIEKTISKAKGQPREPQVYTLPPSREEMTKNQVSLTCLVKGFYPSDIAVEWESNGQPENNYKTTPPVLDSDGSFFLYSKLTVDKSRWQQGNVFSCSVMHEALHNHYTQKSLSLSPGKGGGGSGGGGSGGGGSGGGGSGGGGSGGGGSDKTHTCPPCPAPELLGGPSVFLFPPKPKDTLMISRTPEVTCVVVDVSHEDPEVKFNWYVDGVEVHNAKTKPCEEQYGSTYRCVSVLTVLHQDWLNGKEYKCKVSNKALPAPIEKTISKAKGQPREPQVYTLPPSREEMTKNQVSLTCLVKGFYPSDIAVEWESNGQPENNYKTTPPVLDSDGSFFLYSKLTVDKSRWQQGNVFSCSVMHEALHNHYTQKSLSLSPGK

SEQ ID NO: 2142 - protein, 988 aa, Artificial Sequence
  Synthetic
QVQLVQSGGEVKKPGASVKVSCKASGYTFTSYGISWVRQAPGQCLEWMGWISPQTGNAIYAQKLQGRVTMTRDTSTSTAYMELRSLRSDDTAVYYCARDPDYYGSGSYSDYWGQGTLVTVSSGGGGSGGGGSGGGGSEIVLTQSPATLSVSPGERATLSCRASQSVSSNLAWYQQKPGQAPRLLIYGASSRATGIPARFSGSGSGTEFTLTISSLQSEDFAVYYCQQYHSWPLLTFGCGTKVEIKSGGGGSEVQLVESGGGLVQPGGSLKLSCAASGFTFNKYAINWVRQAPGKGLEWVARIRSKYNNYATYYADAVKDRFTISRDDSKNTVYLQMNNLKTEDTAVYYCARAGNFGSSYISYWAYWGQGTLVTVSSGGGGSGGGGSGGGGSQTVVTQEPSLTVSPGGTVTITCGSSTGAVTSGNYPNWVQKKPGQAPRGLIGGTKFLAPGTPARFSGSLSGGKAALTLSGVQPEDEAEYYCVLWYSNRWVFGSGTKLTVLGGGGDKTHTCPPCPAPELLGGPSVFLFPPKPKDTLMISRTPEVTCVVVDVSHEDPEVKFNWYVDGVEVHNAKTKPCEEQYGSTYRCVSVLTVLHQDWLNGKEYKCKVSNKALPAPIEKTISKAKGQPREPQVYTLPPSREEMTKNQVSLTCLVKGFYPSDIAVEWESNGQPENNYKTTPPVLDSDGSFFLYSKLTVDKSRWQQGNVFSCSVMHEALHNHYTQKSLSLSPGKGGGGSGGGGSGGGGSGGGGSGGGGSGGGGSDKTHTCPPCPAPELLGGPSVFLFPPKPKDTLMISRTPEVTCVVVDVSHEDPEVKFNWYVDGVEVHNAKTKPCEEQYGSTYRCVSVLTVLHQDWLNGKEYKCKVSNKALPAPIEKTISKAKGQPREPQVYTLPPSREEMTKNQVSLTCLVKGFYPSDIAVEWESNGQPENNYKTTPPVLDSDGSFFLYSKLTVDKSRWQQGNVFSCSVMHEALHNHYTQKSLSLSPGK

SEQ ID NO: 2143 - protein, 5 aa, Artificial Sequence
  Synthetic
SYGIS

SEQ ID NO: 2144 - protein, 17 aa, Artificial Sequence
  Synthetic
WISAYNGNAIYAQKLQG

SEQ ID NO: 2145 - protein, 13 aa, Artificial Sequence
  Synthetic
DPDYYGSGSYSDY

SEQ ID NO: 2146 - protein, 11 aa, Artificial Sequence
  Synthetic
RASQSVSSNLA

SEQ ID NO: 2147 - protein, 7 aa, Artificial Sequence
  Synthetic
GASSRAT

SEQ ID NO: 2148 - protein, 10 aa, Artificial Sequence
  Synthetic
QQYHSWPILH

SEQ ID NO: 2149 - protein, 122 aa, Artificial Sequence
  Synthetic
QVQLVQSGAEVKKPGASVKVSCKASGYTFTSYGISWVRQAPGQCLEWMGWISAYNGNAIYAQKLQGRVTMTRDTSTSTAYMELRSLRSDDTAVYYCARDPDYYGSGSYSDYWGQGTLVTVSS

SEQ ID NO: 2150 - protein, 108 aa, Artificial Sequence
  Synthetic
EIVLTQSPATLSVSPGERATLSCRASQSVSSNLAWYQQKPGQAPRLLIYGASSRATGIPARFSGSGSGTEFTLTISSLQSEDFAVYYCQQYHSWPILHFGCGTKVEIK

SEQ ID NO: 2151 - protein, 245 aa, Artificial Sequence
  Synthetic
QVQLVQSGAEVKKPGASVKVSCKASGYTFTSYGISWVRQAPGQCLEWMGWISAYNGNAIYAQKLQGRVTMTRDTSTSTAYMELRSLRSDDTAVYYCARDPDYYGSGSYSDYWGQGTLVTVSSGGGGSGGGGSGGGGSEIVLTQSPATLSVSPGERATLSCRASQSVSSNLAWYQQKPGQAPRLLIYGASSRATGIPARFSGSGSGTEFTLTISSLQSEDFAVYYCQQYHSWPILHFGCGTKVEIK

SEQ ID NO: 2152 - protein, 500 aa, Artificial Sequence
  Synthetic
QVQLVQSGAEVKKPGASVKVSCKASGYTFTSYGISWVRQAPGQCLEWMGWISAYNGNAIYAQKLQGRVTMTRDTSTSTAYMELRSLRSDDTAVYYCARDPDYYGSGSYSDYWGQGTLVTVSSGGGGSGGGGSGGGGSEIVLTQSPATLSVSPGERATLSCRASQSVSSNLAWYQQKPGQAPRLLIYGASSRATGIPARFSGSGSGTEFTLTISSLQSEDFAVYYCQQYHSWPILHFGCGTKVEIKSGGGGSEVQLVESGGGLVQPGGSLKLSCAASGFTFNKYAMNWVRQAPGKGLEWVARIRSKYNNYATYYADSVKDRFTISRDDSKNTAYLQMNNLKTEDTAVYYCVRHGNFGNSYISYWAYWGQGTLVTVSSGGGGSGGGGSGGGGSQTVVTQEPSLTVSPGGTVTLTCGSSTGAVTSGNYPNWVQQKPGQAPRGLIGGTKFLAPGTPARFSGSLLGGKAALTLSGVQPEDEAEYYCVLWYSNRWVFGGGTKLTVL

SEQ ID NO: 2153 - protein, 500 aa, Artificial Sequence
  Synthetic
QVQLVQSGAEVKKPGASVKVSCKASGYTFTSYGISWVRQAPGQCLEWMGWISAYNGNAIYAQKLQGRVTMTRDTSTSTAYMELRSLRSDDTAVYYCARDPDYYGSGSYSDYWGQGTLVTVSSGGGGSGGGGSGGGGSEIVLTQSPATLSVSPGERATLSCRASQSVSSNLAWYQQKPGQAPRLLIYGASSRATGIPARFSGSGSGTEFTLTISSLQSEDFAVYYCQQYHSWPILHFGCGTKVEIKSGGGGSEVQLVESGGGLVQPGGSLKLSCAASGFTFNKYAINWVRQAPGKGLEWVARIRSKYNNYATYYADAVKDRFTISRDDSKNTVYLQMNNLKTEDTAVYYCARAGNFGSSYISYWAYWGQGTLVTVSSGGGGSGGGGSGGGGSQTVVTQEPSLTVSPGGTVTITCGSSTGAVTSGNYPNWVQKKPGQAPRGLIGGTKFLAPGTPARFSGSLSGGKAALTLSGVQPEDEAEYYCVLWYSNRWVFGSGTKLTVL

SEQ ID NO: 2154 - protein, 988 aa, Artificial Sequence
  Synthetic
QVQLVQSGAEVKKPGASVKVSCKASGYTFTSYGISWVRQAPGQCLEWMGWISAYNGNAIYAQKLQGRVTMTRDTSTSTAYMELRSLRSDDTAVYYCARDPDYYGSGSYSDYWGQGTLVTVSSGGGGSGGGGSGGGGSEIVLTQSPATLSVSPGERATLSCRASQSVSSNLAWYQQKPGQAPRLLIYGASSRATGIPARFSGSGSGTEFTLTISSLQSEDFAVYYCQQYHSWPILHFGCGTKVEIKSGGGGSEVQLVESGGGLVQPGGSLKLSCAASGFTFNKYAMNWVRQAPGKGLEWVARIRSKYNNYATYYADSVKDRFTISRDDSKNTAYLQMNNLKTEDTAVYYCVRHGNFGNSYISYWAYWGQGTLVTVSSGGGGSGGGGSGGGGSQTVVTQEPSLTVSPGGTVTLTCGSSTGAVTSGNYPNWVQQKPGQAPRGLIGGTKFLAPGTPARFSGSLLGGKAALTLSGVQPEDEAEYYCVLWYSNRWVFGGGTKLTVLGGGGDKTHTCPPCPAPELLGGPSVFLFPPKPKDTLMISRTPEVTCVVVDVSHEDPEVKFNWYVDGVEVHNAKTKPCEEQYGSTYRCVSVLTVLHQDWLNGKEYKCKVSNKALPAPIEKTISKAKGQPREPQVYTLPPSREEMTKNQVSLTCLVKGFYPSDIAVEWESNGQPENNYKTTPPVLDSDGSFFLYSKLTVDKSRWQQGNVFSCSVMHEALHNHYTQKSLSLSPGKGGGGSGGGGSGGGGSGGGGSGGGGSGGGGSDKTHTCPPCPAPELLGGPSVFLFPPKPKDTLMISRTPEVTCVVVDVSHEDPEVKFNWYVDGVEVHNAKTKPCEEQYGSTYRCVSVLTVLHQDWLNGKEYKCKVSNKALPAPIEKTISKAKGQPREPQVYTLPPSREEMTKNQVSLTCLVKGFYPSDIAVEWESNGQPENNYKTTPPVLDSDGSFFLYSKLTVDKSRWQQGNVFSCSVMHEALHNHYTQKSLSLSPGK

SEQ ID NO: 2155 - protein, 988 aa, Artificial Sequence
  Synthetic
QVQLVQSGAEVKKPGASVKVSCKASGYTFTSYGISWVRQAPGQCLEWMGWISAYNGNAIYAQKLQGRVTMTRDTSTSTAYMELRSLRSDDTAVYYCARDPDYYGSGSYSDYWGQGTLVTVSSGGGGSGGGGSGGGGSEIVLTQSPATLSVSPGERATLSCRASQSVSSNLAWYQQKPGQAPRLLIYGASSRATGIPARFSGSGSGTEFTLTISSLQSEDFAVYYCQQYHSWPILHFGCGTKVEIKSGGGGSEVQLVESGGGLVQPGGSLKLSCAASGFTFNKYAINWVRQAPGKGLEWVARIRSKYNNYATYYADAVKDRFTISRDDSKNTVYLQMNNLKTEDTAVYYCARAGNFGSSYISYWAYWGQGTLVTVSSGGGGSGGGGSGGGGSQTVVTQEPSLTVSPGGTVTITCGSSTGAVTSGNYPNWVQKKPGQAPRGLIGGTKFLAPGTPARFSGSLSGGKAALTLSGVQPEDEAEYYCVLWYSNRWVFGSGTKLTVLGGGGDKTHTCPPCPAPELLGGPSVFLFPPKPKDTLMISRTPEVTCVVVDVSHEDPEVKFNWYVDGVEVHNAKTKPCEEQYGSTYRCVSVLTVLHQDWLNGKEYKCKVSNKALPAPIEKTISKAKGQPREPQVYTLPPSREEMTKNQVSLTCLVKGFYPSDIAVEWESNGQPENNYKTTPPVLDSDGSFFLYSKLTVDKSRWQQGNVFSCSVMHEALHNHYTQKSLSLSPGKGGGGSGGGGSGGGGSGGGGSGGGGSGGGGSDKTHTCPPCPAPELLGGPSVFLFPPKPKDTLMISRTPEVTCVVVDVSHEDPEVKFNWYVDGVEVHNAKTKPCEEQYGSTYRCVSVLTVLHQDWLNGKEYKCKVSNKALPAPIEKTISKAKGQPREPQVYTLPPSREEMTKNQVSLTCLVKGFYPSDIAVEWESNGQPENNYKTTPPVLDSDGSFFLYSKLTVDKSRWQQGNVFSCSVMHEALHNHYTQKSLSLSPGK

SEQ ID NO: 2156 - protein, 5 aa, Artificial Sequence
  Synthetic
SYGIS

SEQ ID NO: 2157 - protein, 17 aa, Artificial Sequence
  Synthetic
WISAYNGNTVYAQKLQD

SEQ ID NO: 2158 - protein, 7 aa, Artificial Sequence
  Synthetic
DGDPLDY

SEQ ID NO: 2159 - protein, 11 aa, Artificial Sequence
  Synthetic
RASQSVSSNLA

SEQ ID NO: 2160 - protein, 7 aa, Artificial Sequence
  Synthetic
GASTRAT

SEQ ID NO: 2161 - protein, 10 aa, Artificial Sequence
  Synthetic
QQYHTWPPVT

SEQ ID NO: 2162 - protein, 116 aa, Artificial Sequence
  Synthetic
QVQLVQSGAEVKKPGASVKVSCKASGYTFTSYGISWVRQAPGQCLEWMGWISAYNGNTVYAQKLQDRVTMTTDTSTSTAYMELRSLRSDDTAVYFCVRDGDPLDYWGQGTLVTVSS

SEQ ID NO: 2163 - protein, 108 aa, Artificial Sequence
  Synthetic
EIVLTQSPGTLSLSPGERATLSCRASQSVSSNLAWYQQKPGQAPRLLIYGASTRATGIPARFSGSGSGTEFTLTISSLQSEDFAVYYCQQYHTWPPVTFGCGTKVEIK

SEQ ID NO: 2164 - protein, 239 aa, Artificial Sequence
  Synthetic
QVQLVQSGAEVKKPGASVKVSCKASGYTFTSYGISWVRQAPGQCLEWMGWISAYNGNTVYAQKLQDRVTMTTDTSTSTAYMELRSLRSDDTAVYFCVRDGDPLDYWGQGTLVTVSSGGGGSGGGGSGGGGSEIVLTQSPGTLSLSPGERATLSCRASQSVSSNLAWYQQKPGQAPRLLIYGASTRATGIPARFSGSGSGTEFTLTISSLQSEDFAVYYCQQYHTWPPVTFGCGTKVEIK

SEQ ID NO: 2165 - protein, 494 aa, Artificial Sequence
  Synthetic
QVQLVQSGAEVKKPGASVKVSCKASGYTFTSYGISWVRQAPGQCLEWMGWISAYNGNTVYAQKLQDRVTMTTDTSTSTAYMELRSLRSDDTAVYFCVRDGDPLDYWGQGTLVTVSSGGGGSGGGGSGGGGSEIVLTQSPGTLSLSPGERATLSCRASQSVSSNLAWYQQKPGQAPRLLIYGASTRATGIPARFSGSGSGTEFTLTISSLQSEDFAVYYCQQYHTWPPVTFGCGTKVEIKSGGGGSEVQLVESGGGLVQPGGSLKLSCAASGFTFNKYAMNWVRQAPGKGLEWVARIRSKYNNYATYYADSVKDRFTISRDDSKNTAYLQMNNLKTEDTAVYYCVRHGNFGNSYISYWAYWGQGTLVTVSSGGGGSGGGGSGGGGSQTVVTQEPSLTVSPGGTVTLTCGSSTGAVTSGNYPNWVQQKPGQAPRGLIGGTKFLAPGTPARFSGSLLGGKAALTLSGVQPEDEAEYYCVLWYSNRWVFGGGTKLTVL

SEQ ID NO: 2166 - protein, 494 aa, Artificial Sequence
  Synthetic
QVQLVQSGAEVKKPGASVKVSCKASGYTFTSYGISWVRQAPGQCLEWMGWISAYNGNTVYAQKLQDRVTMTTDTSTSTAYMELRSLRSDDTAVYFCVRDGDPLDYWGQGTLVTVSSGGGGSGGGGSGGGGSEIVLTQSPGTLSLSPGERATLSCRASQSVSSNLAWYQQKPGQAPRLLIYGASTRATGIPARFSGSGSGTEFTLTISSLQSEDFAVYYCQQYHTWPPVTFGCGTKVEIKSGGGGSEVQLVESGGGLVQPGGSLKLSCAASGFTFNKYAINWVRQAPGKGLEWVARIRSKYNNYATYYADAVKDRFTISRDDSKNTVYLQMNNLKTEDTAVYYCARAGNFGSSYISYWAYWGQGTLVTVSSGGGGSGGGGSGGGGSQTVVTQEPSLTVSPGGTVTITCGSSTGAVTSGNYPNWVQKKPGQAPRGLIGGTKFLAPGTPARFSGSLSGGKAALTLSGVQPEDEAEYYCVLWYSNRWVFGSGTKLTVL

SEQ ID NO: 2167 - protein, 982 aa, Artificial Sequence
  Synthetic
QVQLVQSGAEVKKPGASVKVSCKASGYTFTSYGISWVRQAPGQCLEWMGWISAYNGNTVYAQKLQDRVTMTTDTSTSTAYMELRSLRSDDTAVYFCVRDGDPLDYWGQGTLVTVSSGGGGSGGGGSGGGGSEIVLTQSPGTLSLSPGERATLSCRASQSVSSNLAWYQQKPGQAPRLLIYGASTRATGIPARFSGSGSGTEFTLTISSLQSEDFAVYYCQQYHTWPPVTFGCGTKVEIKSGGGGSEVQLVESGGGLVQPGGSLKLSCAASGFTFNKYAMNWVRQAPGKGLEWVARIRSKYNNYATYYADSVKDRFTISRDDSKNTAYLQMNNLKTEDTAVYYCVRHGNFGNSYISYWAYWGQGTLVTVSSGGGGSGGGGSGGGGSQTVVTQEPSLTVSPGGTVTLTCGSSTGAVTSGNYPNWVQQKPGQAPRGLIGGTKFLAPGTPARFSGSLLGGKAALTLSGVQPEDEAEYYCVLWYSNRWVFGGGTKLTVLGGGGDKTHTCPPCPAPELLGGPSVFLFPPKPKDTLMISRTPEVTCVVVDVSHEDPEVKFNWYVDGVEVHNAKTKPCEEQYGSTYRCVSVLTVLHQDWLNGKEYKCKVSNKALPAPIEKTISKAKGQPREPQVYTLPPSREEMTKNQVSLTCLVKGFYPSDIAVEWESNGQPENNYKTTPPVLDSDGSFFLYSKLTVDKSRWQQGNVFSCSVMHEALHNHYTQKSLSLSPGKGGGGSGGGGSGGGGSGGGGSGGGGSGGGGSDKTHTCPPCPAPELLGGPSVFLFPPKPKDTLMISRTPEVTCVVVDVSHEDPEVKFNWYVDGVEVHNAKTKPCEEQYGSTYRCVSVLTVLHQDWLNGKEYKCKVSNKALPAPIEKTISKAKGQPREPQVYTLPPSREEMTKNQVSLTCLVKGFYPSDIAVEWESNGQPENNYKTTPPVLDSDGSFFLYSKLTVDKSRWQQGNVFSCSVMHEALHNHYTQKSLSLSPGK

SEQ ID NO: 2168 - protein, 982 aa, Artificial Sequence
  Synthetic
QVQLVQSGAEVKKPGASVKVSCKASGYTFTSYGISWVRQAPGQCLEWMGWISAYNGNTVYAQKLQDRVTMTTDTSTSTAYMELRSLRSDDTAVYFCVRDGDPLDYWGQGTLVTVSSGGGGSGGGGSGGGGSEIVLTQSPGTLSLSPGERATLSCRASQSVSSNLAWYQQKPGQAPRLLIYGASTRATGIPARFSGSGSGTEFTLTISSLQSEDFAVYYCQQYHTWPPVTFGCGTKVEIKSGGGGSEVQLVESGGGLVQPGGSLKLSCAASGFTFNKYAINWVRQAPGKGLEWVARIRSKYNNYATYYADAVKDRFTISRDDSKNTVYLQMNNLKTEDTAVYYCARAGNFGSSYISYWAYWGQGTLVTVSSGGGGSGGGGSGGGGSQTVVTQEPSLTVSPGGTVTITCGSSTGAVTSGNYPNWVQKKPGQAPRGLIGGTKFLAPGTPARFSGSLSGGKAALTLSGVQPEDEAEYYCVLWYSNRWVFGSGTKLTVLGGGGDKTHTCPPCPAPELLGGPSVFLFPPKPKDTLMISRTPEVTCVVVDVSHEDPEVKFNWYVDGVEVHNAKTKPCEEQYGSTYRCVSVLTVLHQDWLNGKEYKCKVSNKALPAPIEKTISKAKGQPREPQVYTLPPSREEMTKNQVSLTCLVKGFYPSDIAVEWESNGQPENNYKTTPPVLDSDGSFFLYSKLTVDKSRWQQGNVFSCSVMHEALHNHYTQKSLSLSPGKGGGGSGGGGSGGGGSGGGGSGGGGSGGGGSDKTHTCPPCPAPELLGGPSVFLFPPKPKDTLMISRTPEVTCVVVDVSHEDPEVKFNWYVDGVEVHNAKTKPCEEQYGSTYRCVSVLTVLHQDWLNGKEYKCKVSNKALPAPIEKTISKAKGQPREPQVYTLPPSREEMTKNQVSLTCLVKGFYPSDIAVEWESNGQPENNYKTTPPVLDSDGSFFLYSKLTVDKSRWQQGNVFSCSVMHEALHNHYTQKSLSLSPGK

SEQ ID NO: 2169 - protein, 5 aa, Artificial Sequence
  Synthetic
SYGIT

SEQ ID NO: 2170 - protein, 17 aa, Artificial Sequence
  Synthetic
WISAYNGNTIYAQKLQG

SEQ ID NO: 2171 - protein, 7 aa, Artificial Sequence
  Synthetic
DSNHEDF

SEQ ID NO: 2172 - protein, 11 aa, Artificial Sequence
  Synthetic
RASQSVSSNLA

SEQ ID NO: 2173 - protein, 7 aa, Artificial Sequence
  Synthetic
GASTRAT

SEQ ID NO: 2174 - protein, 10 aa, Artificial Sequence
  Synthetic
QQYHTWPPVT

SEQ ID NO: 2175 - protein, 116 aa, Artificial Sequence
  Synthetic
QVQLVQSGAEVKKPGASVKVSCKASGYSFTSYGITWVRQAPGQCLEWMGWISAYNGNTIYAQKLQGRVTMTTDTSTSTAYMELRSLRSDDTAVYYCVRDSNHEDFWGQGTLVTVSS

SEQ ID NO: 2176 - protein, 108 aa, Artificial Sequence
  Synthetic
EIVLTQSPATLSVSPGERATLSCRASQSVSSNLAWYQQKPGQAPRLLIYGASTRATGIPARFSGSGSGTEFTLTISSLQSEDFAVYYCQQYHTWPPVTFGCGTKVEIK

SEQ ID NO: 2177 - protein, 239 aa, Artificial Sequence
  Synthetic
QVQLVQSGAEVKKPGASVKVSCKASGYSFTSYGITWVRQAPGQCLEWMGWISAYNGNTIYAQKLQGRVTMTTDTSTSTAYMELRSLRSDDTAVYYCVRDSNHEDFWGQGTLVTVSSGGGGSGGGGSGGGGSEIVLTQSPATLSVSPGERATLSCRASQSVSSNLAWYQQKPGQAPRLLIYGASTRATGIPARFSGSGSGTEFTLTISSLQSEDFAVYYCQQYHTWPPVTFGCGTKVEIK

SEQ ID NO: 2178 - protein, 494 aa, Artificial Sequence
  Synthetic
QVQLVQSGAEVKKPGASVKVSCKASGYSFTSYGITWVRQAPGQCLEWMGWISAYNGNTIYAQKLQGRVTMTTDTSTSTAYMELRSLRSDDTAVYYCVRDSNHEDFWGQGTLVTVSSGGGGSGGGGSGGGGSEIVLTQSPATLSVSPGERATLSCRASQSVSSNLAWYQQKPGQAPRLLIYGASTRATGIPARFSGSGSGTEFTLTISSLQSEDFAVYYCQQYHTWPPVTFGCGTKVEIKSGGGGSEVQLVESGGGLVQPGGSLKLSCAASGFTFNKYAMNWVRQAPGKGLEWVARIRSKYNNYATYYADSVKDRFTISRDDSKNTAYLQMNNLKTEDTAVYYCVRHGNFGNSYISYWAYWGQGTLVTVSSGGGGSGGGGSGGGGSQTVVTQEPSLTVSPGGTVTLTCGSSTGAVTSGNYPNWVQQKPGQAPRGLIGGTKFLAPGTPARFSGSLLGGKAALTLSGVQPEDEAEYYCVLWYSNRWVFGGGTKLTVL

SEQ ID NO: 2179 - protein, 494 aa, Artificial Sequence
  Synthetic
QVQLVQSGAEVKKPGASVKVSCKASGYSFTSYGITWVRQAPGQCLEWMGWISAYNGNTIYAQKLQGRVTMTTDTSTSTAYMELRSLRSDDTAVYYCVRDSNHEDFWGQGTLVTVSSGGGGSGGGGSGGGGSEIVLTQSPATLSVSPGERATLSCRASQSVSSNLAWYQQKPGQAPRLLIYGASTRATGIPARFSGSGSGTEFTLTISSLQSEDFAVYYCQQYHTWPPVTFGCGTKVEIKSGGGGSEVQLVESGGGLVQPGGSLKLSCAASGFTFNKYAINWVRQAPGKGLEWVARIRSKYNNYATYYADAVKDRFTISRDDSKNTVYLQMNNLKTEDTAVYYCARAGNFGSSYISYWAYWGQGTLVTVSSGGGGSGGGGSGGGGSQTVVTQEPSLTVSPGGTVTITCGSSTGAVTSGNYPNWVQKKPGQAPRGLIGGTKFLAPGTPARFSGSLSGGKAALTLSGVQPEDEAEYYCVLWYSNRWVFGSGTKLTVL

SEQ ID NO: 2180 - protein, 982 aa, Artificial Sequence
  Synthetic
QVQLVQSGAEVKKPGASVKVSCKASGYSFTSYGITWVRQAPGQCLEWMGWISAYNGNTIYAQKLQGRVTMTTDTSTSTAYMELRSLRSDDTAVYYCVRDSNHEDFWGQGTLVTVSSGGGGSGGGGSGGGGSEIVLTQSPATLSVSPGERATLSCRASQSVSSNLAWYQQKPGQAPRLLIYGASTRATGIPARFSGSGSGTEFTLTISSLQSEDFAVYYCQQYHTWPPVTFGCGTKVEIKSGGGGSEVQLVESGGGLVQPGGSLKLSCAASGFTFNKYAMNWVRQAPGKGLEWVARIRSKYNNYATYYADSVKDRFTISRDDSKNTAYLQMNNLKTEDTAVYYCVRHGNFGNSYISYWAYWGQGTLVTVSSGGGGSGGGGSGGGGSQTVVTQEPSLTVSPGGTVTLTCGSSTGAVTSGNYPNWVQQKPGQAPRGLIGGTKFLAPGTPARFSGSLLGGKAALTLSGVQPEDEAEYYCVLWYSNRWVFGGGTKLTVLGGGGDKTHTCPPCPAPELLGGPSVFLFPPKPKDTLMISRTPEVTCVVVDVSHEDPEVKFNWYVDGVEVHNAKTKPCEEQYGSTYRCVSVLTVLHQDWLNGKEYKCKVSNKALPAPIEKTISKAKGQPREPQVYTLPPSREEMTKNQVSLTCLVKGFYPSDIAVEWESNGQPENNYKTTPPVLDSDGSFFLYSKLTVDKSRWQQGNVFSCSVMHEALHNHYTQKSLSLSPGKGGGGSGGGGSGGGGSGGGGSGGGGSGGGGSDKTHTCPPCPAPELLGGPSVFLFPPKPKDTLMISRTPEVTCVVVDVSHEDPEVKFNWYVDGVEVHNAKTKPCEEQYGSTYRCVSVLTVLHQDWLNGKEYKCKVSNKALPAPIEKTISKAKGQPREPQVYTLPPSREEMTKNQVSLTCLVKGFYPSDIAVEWESNGQPENNYKTTPPVLDSDGSFFLYSKLTVDKSRWQQGNVFSCSVMHEALHNHYTQKSLSLSPGK

SEQ ID NO: 2181 - protein, 982 aa, Artificial Sequence
  Synthetic
QVQLVQSGAEVKKPGASVKVSCKASGYSFTSYGITWVRQAPGQCLEWMGWISAYNGNTIYAQKLQGRVTMTTDTSTSTAYMELRSLRSDDTAVYYCVRDSNHEDFWGQGTLVTVSSGGGGSGGGGSGGGGSEIVLTQSPATLSVSPGERATLSCRASQSVSSNLAWYQQKPGQAPRLLIYGASTRATGIPARFSGSGSGTEFTLTISSLQSEDFAVYYCQQYHTWPPVTFGCGTKVEIKSGGGGSEVQLVESGGGLVQPGGSLKLSCAASGFTFNKYAINWVRQAPGKGLEWVARIRSKYNNYATYYADAVKDRFTISRDDSKNTVYLQMNNLKTEDTAVYYCARAGNFGSSYISYWAYWGQGTLVTVSSGGGGSGGGGSGGGGSQTVVTQEPSLTVSPGGTVTITCGSSTGAVTSGNYPNWVQKKPGQAPRGLIGGTKFLAPGTPARFSGSLSGGKAALTLSGVQPEDEAEYYCVLWYSNRWVFGSGTKLTVLGGGGDKTHTCPPCPAPELLGGPSVFLFPPKPKDTLMISRTPEVTCVVVDVSHEDPEVKFNWYVDGVEVHNAKTKPCEEQYGSTYRCVSVLTVLHQDWLNGKEYKCKVSNKALPAPIEKTISKAKGQPREPQVYTLPPSREEMTKNQVSLTCLVKGFYPSDIAVEWESNGQPENNYKTTPPVLDSDGSFFLYSKLTVDKSRWQQGNVFSCSVMHEALHNHYTQKSLSLSPGKGGGGSGGGGSGGGGSGGGGSGGGGSGGGGSDKTHTCPPCPAPELLGGPSVFLFPPKPKDTLMISRTPEVTCVVVDVSHEDPEVKFNWYVDGVEVHNAKTKPCEEQYGSTYRCVSVLTVLHQDWLNGKEYKCKVSNKALPAPIEKTISKAKGQPREPQVYTLPPSREEMTKNQVSLTCLVKGFYPSDIAVEWESNGQPENNYKTTPPVLDSDGSFFLYSKLTVDKSRWQQGNVFSCSVMHEALHNHYTQKSLSLSPGK

SEQ ID NO: 2182 - protein, 5 aa, Artificial Sequence
  Synthetic
SYGIS

SEQ ID NO: 2183 - protein, 17 aa, Artificial Sequence
  Synthetic
WISAYNGNTIYAQKLQG

SEQ ID NO: 2184 - protein, 9 aa, Artificial Sequence
  Synthetic
DPGVTGDDY

SEQ ID NO: 2185 - protein, 11 aa, Artificial Sequence
  Synthetic
RASLSVSSNLA

SEQ ID NO: 2186 - protein, 7 aa, Artificial Sequence
  Synthetic
GASTRAT

SEQ ID NO: 2187 - protein, 10 aa, Artificial Sequence
  Synthetic
QQYHSWPALT

SEQ ID NO: 2188 - protein, 118 aa, Artificial Sequence
  Synthetic
QVQLVQSGAEVKKPGESLKISCKGSGYSFTSYGISWVRQAPGQCLEWMGWISAYNGNTIYAQKLQGRVTMTTDTSTSTAYMELRRLRSDDTAVYYCARDPGVTGDDYWGQGTLVTVSS

SEQ ID NO: 2189 - protein, 108 aa, Artificial Sequence
  Synthetic
EIVLTQSPATLSVSPGERATLSCRASLSVSSNLAWYQQKPGQAPRLLIYGASTRATGIPARFSGSGSGTEFTLTISSLQSEDFAVYFCQQYHSWPALTFGCGTKVEIK

SEQ ID NO: 2190 - protein, 241 aa, Artificial Sequence
  Synthetic
QVQLVQSGAEVKKPGESLKISCKGSGYSFTSYGISWVRQAPGQCLEWMGWISAYNGNTIYAQKLQGRVTMTTDTSTSTAYMELRRLRSDDTAVYYCARDPGVTGDDYWGQGTLVTVSSGGGGSGGGGSGGGGSEIVLTQSPATLSVSPGERATLSCRASLSVSSNLAWYQQKPGQAPRLLIYGASTRATGIPARFSGSGSGTEFTLTISSLQSEDFAVYFCQQYHSWPALTFGCGTKVEIK

SEQ ID NO: 2191 - protein, 496 aa, Artificial Sequence
  Synthetic
QVQLVQSGAEVKKPGESLKISCKGSGYSFTSYGISWVRQAPGQCLEWMGWISAYNGNTIYAQKLQGRVTMTTDTSTSTAYMELRRLRSDDTAVYYCARDPGVTGDDYWGQGTLVTVSSGGGGSGGGGSGGGGSEIVLTQSPATLSVSPGERATLSCRASLSVSSNLAWYQQKPGQAPRLLIYGASTRATGIPARFSGSGSGTEFTLTISSLQSEDFAVYFCQQYHSWPALTFGCGTKVEIKSGGGGSEVQLVESGGGLVQPGGSLKLSCAASGFTFNKYAMNWVRQAPGKGLEWVARIRSKYNNYATYYADSVKDRFTISRDDSKNTAYLQMNNLKTEDTAVYYCVRHGNFGNSYISYWAYWGQGTLVTVSSGGGGSGGGGSGGGGSQTVVTQEPSLTVSPGGTVTLTCGSSTGAVTSGNYPNWVQQKPGQAPRGLIGGTKFLAPGTPARFSGSLLGGKAALTLSGVQPEDEAEYYCVLWYSNRWVFGGGTKLTVL

SEQ ID NO: 2192 - protein, 496 aa, Artificial Sequence
  Synthetic
QVQLVQSGAEVKKPGESLKISCKGSGYSFTSYGISWVRQAPGQCLEWMGWISAYNGNTIYAQKLQGRVTMTTDTSTSTAYMELRRLRSDDTAVYYCARDPGVTGDDYWGQGTLVTVSSGGGGSGGGGSGGGGSEIVLTQSPATLSVSPGERATLSCRASLSVSSNLAWYQQKPGQAPRLLIYGASTRATGIPARFSGSGSGTEFTLTISSLQSEDFAVYFCQQYHSWPALTFGCGTKVEIKSGGGGSEVQLVESGGGLVQPGGSLKLSCAASGFTFNKYAINWVRQAPGKGLEWVARIRSKYNNYATYYADAVKDRFTISRDDSKNTVYLQMNNLKTEDTAVYYCARAGNFGSSYISYWAYWGQGTLVTVSSGGGGSGGGGSGGGGSQTVVTQEPSLTVSPGGTVTITCGSSTGAVTSGNYPNWVQKKPGQAPRGLIGGTKFLAPGTPARFSGSLSGGKAALTLSGVQPEDEAEYYCVLWYSNRWVFGSGTKLTVL

SEQ ID NO: 2193 - protein, 984 aa, Artificial Sequence
  Synthetic
QVQLVQSGAEVKKPGESLKISCKGSGYSFTSYGISWVRQAPGQCLEWMGWISAYNGNTIYAQKLQGRVTMTTDTSTSTAYMELRRLRSDDTAVYYCARDPGVTGDDYWGQGTLVTVSSGGGGSGGGGSGGGGSEIVLTQSPATLSVSPGERATLSCRASLSVSSNLAWYQQKPGQAPRLLIYGASTRATGIPARFSGSGSGTEFTLTISSLQSEDFAVYFCQQYHSWPALTFGCGTKVEIKSGGGGSEVQLVESGGGLVQPGGSLKLSCAASGFTFNKYAMNWVRQAPGKGLEWVARIRSKYNNYATYYADSVKDRFTISRDDSKNTAYLQMNNLKTEDTAVYYCVRHGNFGNSYISYWAYWGQGTLVTVSSGGGGSGGGGSGGGGSQTVVTQEPSLTVSPGGTVTLTCGSSTGAVTSGNYPNWVQQKPGQAPRGLIGGTKFLAPGTPARFSGSLLGGKAALTLSGVQPEDEAEYYCVLWYSNRWVFGGGTKLTVLGGGGDKTHTCPPCPAPELLGGPSVFLFPPKPKDTLMISRTPEVTCVVVDVSHEDPEVKFNWYVDGVEVHNAKTKPCEEQYGSTYRCVSVLTVLHQDWLNGKEYKCKVSNKALPAPIEKTISKAKGQPREPQVYTLPPSREEMTKNQVSLTCLVKGFYPSDIAVEWESNGQPENNYKTTPPVLDSDGSFFLYSKLTVDKSRWQQGNVFSCSVMHEALHNHYTQKSLSLSPGKGGGGSGGGGSGGGGSGGGGSGGGGSGGGGSDKTHTCPPCPAPELLGGPSVFLFPPKPKDTLMISRTPEVTCVVVDVSHEDPEVKFNWYVDGVEVHNAKTKPCEEQYGSTYRCVSVLTVLHQDWLNGKEYKCKVSNKALPAPIEKTISKAKGQPREPQVYTLPPSREEMTKNQVSLTCLVKGFYPSDIAVEWESNGQPENNYKTTPPVLDSDGSFFLYSKLTVDKSRWQQGNVFSCSVMHEALHNHYTQKSLSLSPGK

SEQ ID NO: 2194 - protein, 984 aa, Artificial Sequence
  Synthetic
QVQLVQSGAEVKKPGESLKISCKGSGYSFTSYGISWVRQAPGQCLEWMGWISAYNGNTIYAQKLQGRVTMTTDTSTSTAYMELRRLRSDDTAVYYCARDPGVTGDDYWGQGTLVTVSSGGGGSGGGGSGGGGSEIVLTQSPATLSVSPGERATLSCRASLSVSSNLAWYQQKPGQAPRLLIYGASTRATGIPARFSGSGSGTEFTLTISSLQSEDFAVYFCQQYHSWPALTFGCGTKVEIKSGGGGSEVQLVESGGGLVQPGGSLKLSCAASGFTFNKYAINWVRQAPGKGLEWVARIRSKYNNYATYYADAVKDRFTISRDDSKNTVYLQMNNLKTEDTAVYYCARAGNFGSSYISYWAYWGQGTLVTVSSGGGGSGGGGSGGGGSQTVVTQEPSLTVSPGGTVTITCGSSTGAVTSGNYPNWVQKKPGQAPRGLIGGTKFLAPGTPARFSGSLSGGKAALTLSGVQPEDEAEYYCVLWYSNRWVFGSGTKLTVLGGGGDKTHTCPPCPAPELLGGPSVFLFPPKPKDTLMISRTPEVTCVVVDVSHEDPEVKFNWYVDGVEVHNAKTKPCEEQYGSTYRCVSVLTVLHQDWLNGKEYKCKVSNKALPAPIEKTISKAKGQPREPQVYTLPPSREEMTKNQVSLTCLVKGFYPSDIAVEWESNGQPENNYKTTPPVLDSDGSFFLYSKLTVDKSRWQQGNVFSCSVMHEALHNHYTQKSLSLSPGKGGGGSGGGGSGGGGSGGGGSGGGGSGGGGSDKTHTCPPCPAPELLGGPSVFLFPPKPKDTLMISRTPEVTCVVVDVSHEDPEVKFNWYVDGVEVHNAKTKPCEEQYGSTYRCVSVLTVLHQDWLNGKEYKCKVSNKALPAPIEKTISKAKGQPREPQVYTLPPSREEMTKNQVSLTCLVKGFYPSDIAVEWESNGQPENNYKTTPPVLDSDGSFFLYSKLTVDKSRWQQGNVFSCSVMHEALHNHYTQKSLSLSPGK

SEQ ID NO: 2195 - protein, 5 aa, Artificial Sequence
  Synthetic
SYGIS

SEQ ID NO: 2196 - protein, 17 aa, Artificial Sequence
  Synthetic
WISPYSGAPTYAQKVQG

SEQ ID NO: 2197 - protein, 7 aa, Artificial Sequence
  Synthetic
DGLEEDY

SEQ ID NO: 2198 - protein, 11 aa, Artificial Sequence
  Synthetic
RASQSVSSNLA

SEQ ID NO: 2199 - protein, 7 aa, Artificial Sequence
  Synthetic
GASTRAT

SEQ ID NO: 2200 - protein, 10 aa, Artificial Sequence
  Synthetic
QQYHSWPALT

SEQ ID NO: 2201 - protein, 116 aa, Artificial Sequence
  Synthetic
QVQLVQSGAEVKKPGASVKVSCKTSGYPFTSYGISWVRQAPGQCLEWMGWISPYSGAPTYAQKVQGRVTMTTDTSTTTAYMELRSLRSDDTAVYYCVRDGLEEDYWGQGTLVTVSS

SEQ ID NO: 2202 - protein, 108 aa, Artificial Sequence
  Synthetic
EIVLTQSPATLSVSPGEGATLSCRASQSVSSNLAWYQQSPGQAPRLLIYGASTRATGIPARFSGSGSGTEFTLTISSLQSEDFAVYYCQQYHSWPALTFGCGTKVDIK

SEQ ID NO: 2203 - protein, 239 aa, Artificial Sequence
  Synthetic
QVQLVQSGAEVKKPGASVKVSCKTSGYPFTSYGISWVRQAPGQCLEWMGWISPYSGAPTYAQKVQGRVTMTTDTSTTTAYMELRSLRSDDTAVYYCVRDGLEEDYWGQGTLVTVSSGGGGSGGGGSGGGGSEIVLTQSPATLSVSPGEGATLSCRASQSVSSNLAWYQQSPGQAPRLLIYGASTRATGIPARFSGSGSGTEFTLTISSLQSEDFAVYYCQQYHSWPALTFGCGTKVDIK

SEQ ID NO: 2204 - protein, 494 aa, Artificial Sequence
  Synthetic
QVQLVQSGAEVKKPGASVKVSCKTSGYPFTSYGISWVRQAPGQCLEWMGWISPYSGAPTYAQKVQGRVTMTTDTSTTTAYMELRSLRSDDTAVYYCVRDGLEEDYWGQGTLVTVSSGGGGSGGGGSGGGGSEIVLTQSPATLSVSPGEGATLSCRASQSVSSNLAWYQQSPGQAPRLLIYGASTRATGIPARFSGSGSGTEFTLTISSLQSEDFAVYYCQQYHSWPALTFGCGTKVDIKSGGGGSEVQLVESGGGLVQPGGSLKLSCAASGFTFNKYAMNWVRQAPGKGLEWVARIRSKYNNYATYYADSVKDRFTISRDDSKNTAYLQMNNLKTEDTAVYYCVRHGNFGNSYISYWAYWGQGTLVTVSSGGGGSGGGGSGGGGSQTVVTQEPSLTVSPGGTVTLTCGSSTGAVTSGNYPNWVQQKPGQAPRGLIGGTKFLAPGTPARFSGSLLGGKAALTLSGVQPEDEAEYYCVLWYSNRWVFGGGTKLTVL

SEQ ID NO: 2205 - protein, 494 aa, Artificial Sequence
  Synthetic
QVQLVQSGAEVKKPGASVKVSCKTSGYPFTSYGISWVRQAPGQCLEWMGWISPYSGAPTYAQKVQGRVTMTTDTSTTTAYMELRSLRSDDTAVYYCVRDGLEEDYWGQGTLVTVSSGGGGSGGGGSGGGGSEIVLTQSPATLSVSPGEGATLSCRASQSVSSNLAWYQQSPGQAPRLLIYGASTRATGIPARFSGSGSGTEFTLTISSLQSEDFAVYYCQQYHSWPALTFGCGTKVDIKSGGGGSEVQLVESGGGLVQPGGSLKLSCAASGFTFNKYAINWVRQAPGKGLEWVARIRSKYNNYATYYADAVKDRFTISRDDSKNTVYLQMNNLKTEDTAVYYCARAGNFGSSYISYWAYWGQGTLVTVSSGGGGSGGGGSGGGGSQTVVTQEPSLTVSPGGTVTITCGSSTGAVTSGNYPNWVQKKPGQAPRGLIGGTKFLAPGTPARFSGSLSGGKAALTLSGVQPEDEAEYYCVLWYSNRWVFGSGTKLTVL

SEQ ID NO: 2206 - protein, 982 aa, Artificial Sequence
  Synthetic
QVQLVQSGAEVKKPGASVKVSCKTSGYPFTSYGISWVRQAPGQCLEWMGWISPYSGAPTYAQKVQGRVTMTTDTSTTTAYMELRSLRSDDTAVYYCVRDGLEEDYWGQGTLVTVSSGGGGSGGGGSGGGGSEIVLTQSPATLSVSPGEGATLSCRASQSVSSNLAWYQQSPGQAPRLLIYGASTRATGIPARFSGSGSGTEFTLTISSLQSEDFAVYYCQQYHSWPALTFGCGTKVDIKSGGGGSEVQLVESGGGLVQPGGSLKLSCAASGFTFNKYAMNWVRQAPGKGLEWVARIRSKYNNYATYYADSVKDRFTISRDDSKNTAYLQMNNLKTEDTAVYYCVRHGNFGNSYISYWAYWGQGTLVTVSSGGGGSGGGGSGGGGSQTVVTQEPSLTVSPGGTVTLTCGSSTGAVTSGNYPNWVQQKPGQAPRGLIGGTKFLAPGTPARFSGSLLGGKAALTLSGVQPEDEAEYYCVLWYSNRWVFGGGTKLTVLGGGGDKTHTCPPCPAPELLGGPSVFLFPPKPKDTLMISRTPEVTCVVVDVSHEDPEVKFNWYVDGVEVHNAKTKPCEEQYGSTYRCVSVLTVLHQDWLNGKEYKCKVSNKALPAPIEKTISKAKGQPREPQVYTLPPSREEMTKNQVSLTCLVKGFYPSDIAVEWESNGQPENNYKTTPPVLDSDGSFFLYSKLTVDKSRWQQGNVFSCSVMHEALHNHYTQKSLSLSPGKGGGGSGGGGSGGGGSGGGGSGGGGSGGGGSDKTHTCPPCPAPELLGGPSVFLFPPKPKDTLMISRTPEVTCVVVDVSHEDPEVKFNWYVDGVEVHNAKTKPCEEQYGSTYRCVSVLTVLHQDWLNGKEYKCKVSNKALPAPIEKTISKAKGQPREPQVYTLPPSREEMTKNQVSLTCLVKGFYPSDIAVEWESNGQPENNYKTTPPVLDSDGSFFLYSKLTVDKSRWQQGNVFSCSVMHEALHNHYTQKSLSLSPGK

SEQ ID NO: 2207 - protein, 982 aa, Artificial Sequence
  Synthetic
QVQLVQSGAEVKKPGASVKVSCKTSGYPFTSYGISWVRQAPGQCLEWMGWISPYSGAPTYAQKVQGRVTMTTDTSTTTAYMELRSLRSDDTAVYYCVRDGLEEDYWGQGTLVTVSSGGGGSGGGGSGGGGSEIVLTQSPATLSVSPGEGATLSCRASQSVSSNLAWYQQSPGQAPRLLIYGASTRATGIPARFSGSGSGTEFTLTISSLQSEDFAVYYCQQYHSWPALTFGCGTKVDIKSGGGGSEVQLVESGGGLVQPGGSLKLSCAASGFTFNKYAINWVRQAPGKGLEWVARIRSKYNNYATYYADAVKDRFTISRDDSKNTVYLQMNNLKTEDTAVYYCARAGNFGSSYISYWAYWGQGTLVTVSSGGGGSGGGGSGGGGSQTVVTQEPSLTVSPGGTVTITCGSSTGAVTSGNYPNWVQKKPGQAPRGLIGGTKFLAPGTPARFSGSLSGGKAALTLSGVQPEDEAEYYCVLWYSNRWVFGSGTKLTVLGGGGDKTHTCPPCPAPELLGGPSVFLFPPKPKDTLMISRTPEVTCVVVDVSHEDPEVKFNWYVDGVEVHNAKTKPCEEQYGSTYRCVSVLTVLHQDWLNGKEYKCKVSNKALPAPIEKTISKAKGQPREPQVYTLPPSREEMTKNQVSLTCLVKGFYPSDIAVEWESNGQPENNYKTTPPVLDSDGSFFLYSKLTVDKSRWQQGNVFSCSVMHEALHNHYTQKSLSLSPGKGGGGSGGGGSGGGGSGGGGSGGGGSGGGGSDKTHTCPPCPAPELLGGPSVFLFPPKPKDTLMISRTPEVTCVVVDVSHEDPEVKFNWYVDGVEVHNAKTKPCEEQYGSTYRCVSVLTVLHQDWLNGKEYKCKVSNKALPAPIEKTISKAKGQPREPQVYTLPPSREEMTKNQVSLTCLVKGFYPSDIAVEWESNGQPENNYKTTPPVLDSDGSFFLYSKLTVDKSRWQQGNVFSCSVMHEALHNHYTQKSLSLSPGK

SEQ ID NO: 2208 - protein, 7 aa, Artificial Sequence
  Synthetic
SGGYYWS

SEQ ID NO: 2209 - protein, 16 aa, Artificial Sequence
  Synthetic
YIYFTGYTYYNPSLKS

SEQ ID NO: 2210 - protein, 17 aa, Artificial Sequence
  Synthetic
GRLGFGEFGYYYYGMDV

SEQ ID NO: 2211 - protein, 14 aa, Artificial Sequence
  Synthetic
TGTSSDVGGYNYVS

SEQ ID NO: 2212 - protein, 7 aa, Artificial Sequence
  Synthetic
EVSNRPS

SEQ ID NO: 2213 - protein, 10 aa, Artificial Sequence
  Synthetic
SSYAGSNNWV

SEQ ID NO: 2214 - protein, 127 aa, Artificial Sequence
  Synthetic
QVQLQESGPGLVKPSQTLSLTCTVSGDSISSGGYYWSWIRQHPGKCLEWIGYIYFTGYTYYNPSLKSRLTISVDTSKNQFSLKLSSVTAADTAVYYCARGRLGFGEFGYYYYGMDVWGQGTAVTVSS

SEQ ID NO: 2215 - protein, 110 aa, Artificial Sequence
  Synthetic
QSALTQPPSASGSPGQSITISCTGTSSDVGGYNYVSWYQQHPGKAPKLIIYEVSNRPSGVPDRFSGSKSGNTASLTVSGLQAEDEADYYCSSYAGSNNWVFGCGTKLTVL

SEQ ID NO: 2216 - protein, 252 aa, Artificial Sequence
  Synthetic
QVQLQESGPGLVKPSQTLSLTCTVSGDSISSGGYYWSWIRQHPGKCLEWIGYIYFTGYTYYNPSLKSRLTISVDTSKNQFSLKLSSVTAADTAVYYCARGRLGFGEFGYYYYGMDVWGQGTAVTVSSGGGGSGGGGSGGGGSQSALTQPPSASGSPGQSITISCTGTSSDVGGYNYVSWYQQHPGKAPKLIIYEVSNRPSGVPDRFSGSKSGNTASLTVSGLQAEDEADYYCSSYAGSNNWVFGCGTKLTVL

SEQ ID NO: 2217 - protein, 507 aa, Artificial Sequence
  Synthetic
QVQLQESGPGLVKPSQTLSLTCTVSGDSISSGGYYWSWIRQHPGKCLEWIGYIYFTGYTYYNPSLKSRLTISVDTSKNQFSLKLSSVTAADTAVYYCARGRLGFGEFGYYYYGMDVWGQGTAVTVSSGGGGSGGGGSGGGGSQSALTQPPSASGSPGQSITISCTGTSSDVGGYNYVSWYQQHPGKAPKLIIYEVSNRPSGVPDRFSGSKSGNTASLTVSGLQAEDEADYYCSSYAGSNNWVFGCGTKLTVLSGGGGSEVQLVESGGGLVQPGGSLKLSCAASGFTFNKYAMNWVRQAPGKGLEWVARIRSKYNNYATYYADSVKDRFTISRDDSKNTAYLQMNNLKTEDTAVYYCVRHGNFGNSYISYWAYWGQGTLVTVSSGGGGSGGGGSGGGGSQTVVTQEPSLTVSPGGTVTLTCGSSTGAVTSGNYPNWVQQKPGQAPRGLIGGTKFLAPGTPARFSGSLLGGKAALTLSGVQPEDEAEYYCVLWYSNRWVFGGGTKLTVL

SEQ ID NO: 2218 - protein, 507 aa, Artificial Sequence
  Synthetic
QVQLQESGPGLVKPSQTLSLTCTVSGDSISSGGYYWSWIRQHPGKCLEWIGYIYFTGYTYYNPSLKSRLTISVDTSKNQFSLKLSSVTAADTAVYYCARGRLGFGEFGYYYYGMDVWGQGTAVTVSSGGGGSGGGGSGGGGSQSALTQPPSASGSPGQSITISCTGTSSDVGGYNYVSWYQQHPGKAPKLIIYEVSNRPSGVPDRFSGSKSGNTASLTVSGLQAEDEADYYCSSYAGSNNWVFGCGTKLTVLSGGGGSEVQLVESGGGLVQPGGSLKLSCAASGFTFNKYAINWVRQAPGKGLEWVARIRSKYNNYATYYADAVKDRFTISRDDSKNTVYLQMNNLKTEDTAVYYCARAGNFGSSYISYWAYWGQGTLVTVSSGGGGSGGGGSGGGGSQTVVTQEPSLTVSPGGTVTITCGSSTGAVTSGNYPNWVQKKPGQAPRGLIGGTKFLAPGTPARFSGSLSGGKAALTLSGVQPEDEAEYYCVLWYSNRWVFGSGTKLTVL

SEQ ID NO: 2219 - protein, 995 aa, Artificial Sequence
  Synthetic
QVQLQESGPGLVKPSQTLSLTCTVSGDSISSGGYYWSWIRQHPGKCLEWIGYIYFTGYTYYNPSLKSRLTISVDTSKNQFSLKLSSVTAADTAVYYCARGRLGFGEFGYYYYGMDVWGQGTAVTVSSGGGGSGGGGSGGGGSQSALTQPPSASGSPGQSITISCTGTSSDVGGYNYVSWYQQHPGKAPKLIIYEVSNRPSGVPDRFSGSKSGNTASLTVSGLQAEDEADYYCSSYAGSNNWVFGCGTKLTVLSGGGGSEVQLVESGGGLVQPGGSLKLSCAASGFTFNKYAMNWVRQAPGKGLEWVARIRSKYNNYATYYADSVKDRFTISRDDSKNTAYLQMNNLKTEDTAVYYCVRHGNFGNSYISYWAYWGQGTLVTVSSGGGGSGGGGSGGGGSQTVVTQEPSLTVSPGGTVTLTCGSSTGAVTSGNYPNWVQQKPGQAPRGLIGGTKFLAPGTPARFSGSLLGGKAALTLSGVQPEDEAEYYCVLWYSNRWVFGGGTKLTVLGGGGDKTHTCPPCPAPELLGGPSVFLFPPKPKDTLMISRTPEVTCVVVDVSHEDPEVKFNWYVDGVEVHNAKTKPCEEQYGSTYRCVSVLTVLHQDWLNGKEYKCKVSNKALPAPIEKTISKAKGQPREPQVYTLPPSREEMTKNQVSLTCLVKGFYPSDIAVEWESNGQPENNYKTTPPVLDSDGSFFLYSKLTVDKSRWQQGNVFSCSVMHEALHNHYTQKSLSLSPGKGGGGSGGGGSGGGGSGGGGSGGGGSGGGGSDKTHTCPPCPAPELLGGPSVFLFPPKPKDTLMISRTPEVTCVVVDVSHEDPEVKFNWYVDGVEVHNAKTKPCEEQYGSTYRCVSVLTVLHQDWLNGKEYKCKVSNKALPAPIEKTISKAKGQPREPQVYTLPPSREEMTKNQVSLTCLVKGFYPSDIAVEWESNGQPENNYKTTPPVLDSDGSFFLYSKLTVDKSRWQQGNVFSCSVMHEALHNHYTQKSLSLSPGK

SEQ ID NO: 2220 - protein, 995 aa, Artificial Sequence
  Synthetic
QVQLQESGPGLVKPSQTLSLTCTVSGDSISSGGYYWSWIRQHPGKCLEWIGYIYFTGYTYYNPSLKSRLTISVDTSKNQFSLKLSSVTAADTAVYYCARGRLGFGEFGYYYYGMDVWGQGTAVTVSSGGGGSGGGGSGGGGSQSALTQPPSASGSPGQSITISCTGTSSDVGGYNYVSWYQQHPGKAPKLIIYEVSNRPSGVPDRFSGSKSGNTASLTVSGLQAEDEADYYCSSYAGSNNWVFGCGTKLTVLSGGGGSEVQLVESGGGLVQPGGSLKLSCAASGFTFNKYAINWVRQAPGKGLEWVARIRSKYNNYATYYADAVKDRFTISRDDSKNTVYLQMNNLKTEDTAVYYCARAGNFGSSYISYWAYWGQGTLVTVSSGGGGSGGGGSGGGGSQTVVTQEPSLTVSPGGTVTITCGSSTGAVTSGNYPNWVQKKPGQAPRGLIGGTKFLAPGTPARFSGSLSGGKAALTLSGVQPEDEAEYYCVLWYSNRWVFGSGTKLTVLGGGGDKTHTCPPCPAPELLGGPSVFLFPPKPKDTLMISRTPEVTCVVVDVSHEDPEVKFNWYVDGVEVHNAKTKPCEEQYGSTYRCVSVLTVLHQDWLNGKEYKCKVSNKALPAPIEKTISKAKGQPREPQVYTLPPSREEMTKNQVSLTCLVKGFYPSDIAVEWESNGQPENNYKTTPPVLDSDGSFFLYSKLTVDKSRWQQGNVFSCSVMHEALHNHYTQKSLSLSPGKGGGGSGGGGSGGGGSGGGGSGGGGSGGGGSDKTHTCPPCPAPELLGGPSVFLFPPKPKDTLMISRTPEVTCVVVDVSHEDPEVKFNWYVDGVEVHNAKTKPCEEQYGSTYRCVSVLTVLHQDWLNGKEYKCKVSNKALPAPIEKTISKAKGQPREPQVYTLPPSREEMTKNQVSLTCLVKGFYPSDIAVEWESNGQPENNYKTTPPVLDSDGSFFLYSKLTVDKSRWQQGNVFSCSVMHEALHNHYTQKSLSLSPGK

SEQ ID NO: 2221 - protein, 5 aa, Artificial Sequence
  Synthetic
NYGIS

SEQ ID NO: 2222 - protein, 17 aa, Artificial Sequence
  Synthetic
WISAYNGKTSYAQKFQG

SEQ ID NO: 2223 - protein, 10 aa, Artificial Sequence
  Synthetic
DLDFLTGWEY

SEQ ID NO: 2224 - protein, 11 aa, Artificial Sequence
  Synthetic
RASQSVNSNLA

SEQ ID NO: 2225 - protein, 7 aa, Artificial Sequence
  Synthetic
GASTRAT

SEQ ID NO: 2226 - protein, 10 aa, Artificial Sequence
  Synthetic
QQYHTWPVLT

SEQ ID NO: 2227 - protein, 119 aa, Artificial Sequence
  Synthetic
QVQLVQSGAEVKKPGASVKVSCKASGYTFNNYGISWVRQAPGQCLEWMGWISAYNGKTSYAQKFQGRVTMTTDTSTGTAYMELRSLRSDDTAVYYCARDLDFLTGWEYWGQGTLVTVSS

SEQ ID NO: 2228 - protein, 108 aa, Artificial Sequence
  Synthetic
EIVLTQSPATLSVSPGERATLSCRASQSVNSNLAWYQQKPGQAPRLLIYGASTRATGIPARFSGSGSGTEFTLTISSLQSEDFAVYYCQQYHTWPVLTFGCGTKVEIK

SEQ ID NO: 2229 - protein, 242 aa, Artificial Sequence
  Synthetic
QVQLVQSGAEVKKPGASVKVSCKASGYTFNNYGISWVRQAPGQCLEWMGWISAYNGKTSYAQKFQGRVTMTTDTSTGTAYMELRSLRSDDTAVYYCARDLDFLTGWEYWGQGTLVTVSSGGGGSGGGGSGGGGSEIVLTQSPATLSVSPGERATLSCRASQSVNSNLAWYQQKPGQAPRLLIYGASTRATGIPARFSGSGSGTEFTLTISSLQSEDFAVYYCQQYHTWPVLTFGCGTKVEIK

SEQ ID NO: 2230 - protein, 497 aa, Artificial Sequence
  Synthetic
QVQLVQSGAEVKKPGASVKVSCKASGYTFNNYGISWVRQAPGQCLEWMGWISAYNGKTSYAQKFQGRVTMTTDTSTGTAYMELRSLRSDDTAVYYCARDLDFLTGWEYWGQGTLVTVSSGGGGSGGGGSGGGGSEIVLTQSPATLSVSPGERATLSCRASQSVNSNLAWYQQKPGQAPRLLIYGASTRATGIPARFSGSGSGTEFTLTISSLQSEDFAVYYCQQYHTWPVLTFGCGTKVEIKSGGGGSEVQLVESGGGLVQPGGSLKLSCAASGFTFNKYAMNWVRQAPGKGLEWVARIRSKYNNYATYYADSVKDRFTISRDDSKNTAYLQMNNLKTEDTAVYYCVRHGNFGNSYISYWAYWGQGTLVTVSSGGGGSGGGGSGGGGSQTVVTQEPSLTVSPGGTVTLTCGSSTGAVTSGNYPNWVQQKPGQAPRGLIGGTKFLAPGTPARFSGSLLGGKAALTLSGVQPEDEAEYYCVLWYSNRWVFGGGTKLTVL

SEQ ID NO: 2231 - protein, 497 aa, Artificial Sequence
  Synthetic
QVQLVQSGAEVKKPGASVKVSCKASGYTFNNYGISWVRQAPGQCLEWMGWISAYNGKTSYAQKFQGRVTMTTDTSTGTAYMELRSLRSDDTAVYYCARDLDFLTGWEYWGQGTLVTVSSGGGGSGGGGSGGGGSEIVLTQSPATLSVSPGERATLSCRASQSVNSNLAWYQQKPGQAPRLLIYGASTRATGIPARFSGSGSGTEFTLTISSLQSEDFAVYYCQQYHTWPVLTFGCGTKVEIKSGGGGSEVQLVESGGGLVQPGGSLKLSCAASGFTFNKYAINWVRQAPGKGLEWVARIRSKYNNYATYYADAVKDRFTISRDDSKNTVYLQMNNLKTEDTAVYYCARAGNFGSSYISYWAYWGQGTLVTVSSGGGGSGGGGSGGGGSQTVVTQEPSLTVSPGGTVTITCGSSTGAVTSGNYPNWVQKKPGQAPRGLIGGTKFLAPGTPARFSGSLSGGKAALTLSGVQPEDEAEYYCVLWYSNRWVFGSGTKLTVL

SEQ ID NO: 2232 - protein, 985 aa, Artificial Sequence
  Synthetic
QVQLVQSGAEVKKPGASVKVSCKASGYTFNNYGISWVRQAPGQCLEWMGWISAYNGKTSYAQKFQGRVTMTTDTSTGTAYMELRSLRSDDTAVYYCARDLDFLTGWEYWGQGTLVTVSSGGGGSGGGGSGGGGSEIVLTQSPATLSVSPGERATLSCRASQSVNSNLAWYQQKPGQAPRLLIYGASTRATGIPARFSGSGSGTEFTLTISSLQSEDFAVYYCQQYHTWPVLTFGCGTKVEIKSGGGGSEVQLVESGGGLVQPGGSLKLSCAASGFTFNKYAMNWVRQAPGKGLEWVARIRSKYNNYATYYADSVKDRFTISRDDSKNTAYLQMNNLKTEDTAVYYCVRHGNFGNSYISYWAYWGQGTLVTVSSGGGGSGGGGSGGGGSQTVVTQEPSLTVSPGGTVTLTCGSSTGAVTSGNYPNWVQQKPGQAPRGLIGGTKFLAPGTPARFSGSLLGGKAALTLSGVQPEDEAEYYCVLWYSNRWVFGGGTKLTVLGGGGDKTHTCPPCPAPELLGGPSVFLFPPKPKDTLMISRTPEVTCVVVDVSHEDPEVKFNWYVDGVEVHNAKTKPCEEQYGSTYRCVSVLTVLHQDWLNGKEYKCKVSNKALPAPIEKTISKAKGQPREPQVYTLPPSREEMTKNQVSLTCLVKGFYPSDIAVEWESNGQPENNYKTTPPVLDSDGSFFLYSKLTVDKSRWQQGNVFSCSVMHEALHNHYTQKSLSLSPGKGGGGSGGGGSGGGGSGGGGSGGGGSGGGGSDKTHTCPPCPAPELLGGPSVFLFPPKPKDTLMISRTPEVTCVVVDVSHEDPEVKFNWYVDGVEVHNAKTKPCEEQYGSTYRCVSVLTVLHQDWLNGKEYKCKVSNKALPAPIEKTISKAKGQPREPQVYTLPPSREEMTKNQVSLTCLVKGFYPSDIAVEWESNGQPENNYKTTPPVLDSDGSFFLYSKLTVDKSRWQQGNVFSCSVMHEALHNHYTQKSLSLSPGK

SEQ ID NO: 2233 - protein, 985 aa, Artificial Sequence
  Synthetic
QVQLVQSGAEVKKPGASVKVSCKASGYTFNNYGISWVRQAPGQCLEWMGWISAYNGKTSYAQKFQGRVTMTTDTSTGTAYMELRSLRSDDTAVYYCARDLDFLTGWEYWGQGTLVTVSSGGGGSGGGGSGGGGSEIVLTQSPATLSVSPGERATLSCRASQSVNSNLAWYQQKPGQAPRLLIYGASTRATGIPARFSGSGSGTEFTLTISSLQSEDFAVYYCQQYHTWPVLTFGCGTKVEIKSGGGGSEVQLVESGGGLVQPGGSLKLSCAASGFTFNKYAINWVRQAPGKGLEWVARIRSKYNNYATYYADAVKDRFTISRDDSKNTVYLQMNNLKTEDTAVYYCARAGNFGSSYISYWAYWGQGTLVTVSSGGGGSGGGGSGGGGSQTVVTQEPSLTVSPGGTVTITCGSSTGAVTSGNYPNWVQKKPGQAPRGLIGGTKFLAPGTPARFSGSLSGGKAALTLSGVQPEDEAEYYCVLWYSNRWVFGSGTKLTVLGGGGDKTHTCPPCPAPELLGGPSVFLFPPKPKDTLMISRTPEVTCVVVDVSHEDPEVKFNWYVDGVEVHNAKTKPCEEQYGSTYRCVSVLTVLHQDWLNGKEYKCKVSNKALPAPIEKTISKAKGQPREPQVYTLPPSREEMTKNQVSLTCLVKGFYPSDIAVEWESNGQPENNYKTTPPVLDSDGSFFLYSKLTVDKSRWQQGNVFSCSVMHEALHNHYTQKSLSLSPGKGGGGSGGGGSGGGGSGGGGSGGGGSGGGGSDKTHTCPPCPAPELLGGPSVFLFPPKPKDTLMISRTPEVTCVVVDVSHEDPEVKFNWYVDGVEVHNAKTKPCEEQYGSTYRCVSVLTVLHQDWLNGKEYKCKVSNKALPAPIEKTISKAKGQPREPQVYTLPPSREEMTKNQVSLTCLVKGFYPSDIAVEWESNGQPENNYKTTPPVLDSDGSFFLYSKLTVDKSRWQQGNVFSCSVMHEALHNHYTQKSLSLSPGK

SEQ ID NO: 2234 - protein, 5 aa, Artificial Sequence
  Synthetic
SYGMH

SEQ ID NO: 2235 - protein, 17 aa, Artificial Sequence
  Synthetic
VIWNDGSNKYYADSVKG

SEQ ID NO: 2236 - protein, 12 aa, Artificial Sequence
  Synthetic
SLPRPHYYGMDV

SEQ ID NO: 2237 - protein, 11 aa, Artificial Sequence
  Synthetic
SGDKLGDKYVS

SEQ ID NO: 2238 - protein, 7 aa, Artificial Sequence
  Synthetic
QDSKRPS

SEQ ID NO: 2239 - protein, 9 aa, Artificial Sequence
  Synthetic
QAWDSSTVV

SEQ ID NO: 2240 - protein, 121 aa, Artificial Sequence
  Synthetic
QVQLVESGGGVVQPGRSLRLSCAASGFTFSSYGMHWVRQAPGKCLEWVAVIWNDGSNKYYADSVKGRFTISRDNSKNTVYLQMNSLRAEDTAVYYCARSLPRPHYYGMDVWGQGTTVTVSS

SEQ ID NO: 2241 - protein, 106 aa, Artificial Sequence
  Synthetic
SYELTQPASVSVSPGQTASITCSGDKLGDKYVSWYQQKPGQSPVLVIYQDSKRPSGIPERFSGSNSGNTATLTISGTQAMDEADYYCQAWDSSTVVFGCGTKLTVL

SEQ ID NO: 2242 - protein, 242 aa, Artificial Sequence
  Synthetic
QVQLVESGGGVVQPGRSLRLSCAASGFTFSSYGMHWVRQAPGKCLEWVAVIWNDGSNKYYADSVKGRFTISRDNSKNTVYLQMNSLRAEDTAVYYCARSLPRPHYYGMDVWGQGTTVTVSSGGGGSGGGGSGGGGSSYELTQPASVSVSPGQTASITCSGDKLGDKYVSWYQQKPGQSPVLVIYQDSKRPSGIPERFSGSNSGNTATLTISGTQAMDEADYYCQAWDSSTVVFGCGTKLTVL

SEQ ID NO: 2243 - protein, 497 aa, Artificial Sequence
  Synthetic
QVQLVESGGGVVQPGRSLRLSCAASGFTFSSYGMHWVRQAPGKCLEWVAVIWNDGSNKYYADSVKGRFTISRDNSKNTVYLQMNSLRAEDTAVYYCARSLPRPHYYGMDVWGQGTTVTVSSGGGGSGGGGSGGGGSSYELTQPASVSVSPGQTASITCSGDKLGDKYVSWYQQKPGQSPVLVIYQDSKRPSGIPERFSGSNSGNTATLTISGTQAMDEADYYCQAWDSSTVVFGCGTKLTVLSGGGGSEVQLVESGGGLVQPGGSLKLSCAASGFTFNKYAMNWVRQAPGKGLEWVARIRSKYNNYATYYADSVKDRFTISRDDSKNTAYLQMNNLKTEDTAVYYCVRHGNFGNSYISYWAYWGQGTLVTVSSGGGGSGGGGSGGGGSQTVVTQEPSLTVSPGGTVTLTCGSSTGAVTSGNYPNWVQQKPGQAPRGLIGGTKFLAPGTPARFSGSLLGGKAALTLSGVQPEDEAEYYCVLWYSNRWVFGGGTKLTVL

SEQ ID NO: 2244 - protein, 497 aa, Artificial Sequence
  Synthetic
QVQLVESGGGVVQPGRSLRLSCAASGFTFSSYGMHWVRQAPGKCLEWVAVIWNDGSNKYYADSVKGRFTISRDNSKNTVYLQMNSLRAEDTAVYYCARSLPRPHYYGMDVWGQGTTVTVSSGGGGSGGGGSGGGGSSYELTQPASVSVSPGQTASITCSGDKLGDKYVSWYQQKPGQSPVLVIYQDSKRPSGIPERFSGSNSGNTATLTISGTQAMDEADYYCQAWDSSTVVFGCGTKLTVLSGGGGSEVQLVESGGGLVQPGGSLKLSCAASGFTFNKYAINWVRQAPGKGLEWVARIRSKYNNYATYYADAVKDRFTISRDDSKNTVYLQMNNLKTEDTAVYYCARAGNFGSSYISYWAYWGQGTLVTVSSGGGGSGGGGSGGGGSQTVVTQEPSLTVSPGGTVTITCGSSTGAVTSGNYPNWVQKKPGQAPRGLIGGTKFLAPGTPARFSGSLSGGKAALTLSGVQPEDEAEYYCVLWYSNRWVFGSGTKLTVL

SEQ ID NO: 2245 - protein, 985 aa, Artificial Sequence
  Synthetic
QVQLVESGGGVVQPGRSLRLSCAASGFTFSSYGMHWVRQAPGKCLEWVAVIWNDGSNKYYADSVKGRFTISRDNSKNTVYLQMNSLRAEDTAVYYCARSLPRPHYYGMDVWGQGTTVTVSSGGGGSGGGGSGGGGSSYELTQPASVSVSPGQTASITCSGDKLGDKYVSWYQQKPGQSPVLVIYQDSKRPSGIPERFSGSNSGNTATLTISGTQAMDEADYYCQAWDSSTVVFGCGTKLTVLSGGGGSEVQLVESGGGLVQPGGSLKLSCAASGFTFNKYAMNWVRQAPGKGLEWVARIRSKYNNYATYYADSVKDRFTISRDDSKNTAYLQMNNLKTEDTAVYYCVRHGNFGNSYISYWAYWGQGTLVTVSSGGGGSGGGGSGGGGSQTVVTQEPSLTVSPGGTVTLTCGSSTGAVTSGNYPNWVQQKPGQAPRGLIGGTKFLAPGTPARFSGSLLGGKAALTLSGVQPEDEAEYYCVLWYSNRWVFGGGTKLTVLGGGGDKTHTCPPCPAPELLGGPSVFLFPPKPKDTLMISRTPEVTCVVVDVSHEDPEVKFNWYVDGVEVHNAKTKPCEEQYGSTYRCVSVLTVLHQDWLNGKEYKCKVSNKALPAPIEKTISKAKGQPREPQVYTLPPSREEMTKNQVSLTCLVKGFYPSDIAVEWESNGQPENNYKTTPPVLDSDGSFFLYSKLTVDKSRWQQGNVFSCSVMHEALHNHYTQKSLSLSPGKGGGGSGGGGSGGGGSGGGGSGGGGSGGGGSDKTHTCPPCPAPELLGGPSVFLFPPKPKDTLMISRTPEVTCVVVDVSHEDPEVKFNWYVDGVEVHNAKTKPCEEQYGSTYRCVSVLTVLHQDWLNGKEYKCKVSNKALPAPIEKTISKAKGQPREPQVYTLPPSREEMTKNQVSLTCLVKGFYPSDIAVEWESNGQPENNYKTTPPVLDSDGSFFLYSKLTVDKSRWQQGNVFSCSVMHEALHNHYTQKSLSLSPGK

SEQ ID NO: 2246 - protein, 985 aa, Artificial Sequence
  Synthetic
QVQLVESGGGVVQPGRSLRLSCAASGFTFSSYGMHWVRQAPGKCLEWVAVIWNDGSNKYYADSVKGRFTISRDNSKNTVYLQMNSLRAEDTAVYYCARSLPRPHYYGMDVWGQGTTVTVSSGGGGSGGGGSGGGGSSYELTQPASVSVSPGQTASITCSGDKLGDKYVSWYQQKPGQSPVLVIYQDSKRPSGIPERFSGSNSGNTATLTISGTQAMDEADYYCQAWDSSTVVFGCGTKLTVLSGGGGSEVQLVESGGGLVQPGGSLKLSCAASGFTFNKYAINWVRQAPGKGLEWVARIRSKYNNYATYYADAVKDRFTISRDDSKNTVYLQMNNLKTEDTAVYYCARAGNFGSSYISYWAYWGQGTLVTVSSGGGGSGGGGSGGGGSQTVVTQEPSLTVSPGGTVTITCGSSTGAVTSGNYPNWVQKKPGQAPRGLIGGTKFLAPGTPARFSGSLSGGKAALTLSGVQPEDEAEYYCVLWYSNRWVFGSGTKLTVLGGGGDKTHTCPPCPAPELLGGPSVFLFPPKPKDTLMISRTPEVTCVVVDVSHEDPEVKFNWYVDGVEVHNAKTKPCEEQYGSTYRCVSVLTVLHQDWLNGKEYKCKVSNKALPAPIEKTISKAKGQPREPQVYTLPPSREEMTKNQVSLTCLVKGFYPSDIAVEWESNGQPENNYKTTPPVLDSDGSFFLYSKLTVDKSRWQQGNVFSCSVMHEALHNHYTQKSLSLSPGKGGGGSGGGGSGGGGSGGGGSGGGGSGGGGSDKTHTCPPCPAPELLGGPSVFLFPPKPKDTLMISRTPEVTCVVVDVSHEDPEVKFNWYVDGVEVHNAKTKPCEEQYGSTYRCVSVLTVLHQDWLNGKEYKCKVSNKALPAPIEKTISKAKGQPREPQVYTLPPSREEMTKNQVSLTCLVKGFYPSDIAVEWESNGQPENNYKTTPPVLDSDGSFFLYSKLTVDKSRWQQGNVFSCSVMHEALHNHYTQKSLSLSPGK

SEQ ID NO: 2247 - protein, 5 aa, Artificial Sequence
  Synthetic
AYGMH

SEQ ID NO: 2248 - protein, 17 aa, Artificial Sequence
  Synthetic
VILYDGSNKYYADSVKG

SEQ ID NO: 2249 - protein, 13 aa, Artificial Sequence
  Synthetic
GSGWLQLGDYFDY

SEQ ID NO: 2250 - protein, 14 aa, Artificial Sequence
  Synthetic
TGTSSDVGGYNYVS

SEQ ID NO: 2251 - protein, 7 aa, Artificial Sequence
  Synthetic
EVSNRPS

SEQ ID NO: 2252 - protein, 10 aa, Artificial Sequence
  Synthetic
SSYTSSSTLV

SEQ ID NO: 2253 - protein, 122 aa, Artificial Sequence
  Synthetic
QVQLVESGGGVVQPGRSLRLSCAASGFTFSAYGMHWVRQAPGKCLEWVAVILYDGSNKYYADSVKGRFTISRDNSKNTLYLQMNSLRAEDTAVYYCARGSGWLQLGDYFDYWGQGTLVTVSS

SEQ ID NO: 2254 - protein, 110 aa, Artificial Sequence
  Synthetic
QSALTQPPSVSGSPGQSITISCTGTSSDVGGYNYVSWYQQHPGKAPKLMIYEVSNRPSGVSNRFSGSKSGNTASLTISGLQAEDEADYYCSSYTSSSTLVFGCGTKLTVL

SEQ ID NO: 2255 - protein, 247 aa, Artificial Sequence
  Synthetic
QVQLVESGGGVVQPGRSLRLSCAASGFTFSAYGMHWVRQAPGKCLEWVAVILYDGSNKYYADSVKGRFTISRDNSKNTLYLQMNSLRAEDTAVYYCARGSGWLQLGDYFDYWGQGTLVTVSSGGGGSGGGGSGGGGSQSALTQPPSVSGSPGQSITISCTGTSSDVGGYNYVSWYQQHPGKAPKLMIYEVSNRPSGVSNRFSGSKSGNTASLTISGLQAEDEADYYCSSYTSSSTLVFGCGTKLTVL

SEQ ID NO: 2256 - protein, 502 aa, Artificial Sequence
  Synthetic
QVQLVESGGGVVQPGRSLRLSCAASGFTFSAYGMHWVRQAPGKCLEWVAVILYDGSNKYYADSVKGRFTISRDNSKNTLYLQMNSLRAEDTAVYYCARGSGWLQLGDYFDYWGQGTLVTVSSGGGGSGGGGSGGGGSQSALTQPPSVSGSPGQSITISCTGTSSDVGGYNYVSWYQQHPGKAPKLMIYEVSNRPSGVSNRFSGSKSGNTASLTISGLQAEDEADYYCSSYTSSSTLVFGCGTKLTVLSGGGGSEVQLVESGGGLVQPGGSLKLSCAASGFTFNKYAMNWVRQAPGKGLEWVARIRSKYNNYATYYADSVKDRFTISRDDSKNTAYLQMNNLKTEDTAVYYCVRHGNFGNSYISYWAYWGQGTLVTVSSGGGGSGGGGSGGGGSQTVVTQEPSLTVSPGGTVTLTCGSSTGAVTSGNYPNWVQQKPGQAPRGLIGGTKFLAPGTPARFSGSLLGGKAALTLSGVQPEDEAEYYCVLWYSNRWVFGGGTKLTVL

SEQ ID NO: 2257 - protein, 502 aa, Artificial Sequence
  Synthetic
QVQLVESGGGVVQPGRSLRLSCAASGFTFSAYGMHWVRQAPGKCLEWVAVILYDGSNKYYADSVKGRFTISRDNSKNTLYLQMNSLRAEDTAVYYCARGSGWLQLGDYFDYWGQGTLVTVSSGGGGSGGGGSGGGGSQSALTQPPSVSGSPGQSITISCTGTSSDVGGYNYVSWYQQHPGKAPKLMIYEVSNRPSGVSNRFSGSKSGNTASLTISGLQAEDEADYYCSSYTSSSTLVFGCGTKLTVLSGGGGSEVQLVESGGGLVQPGGSLKLSCAASGFTFNKYAINWVRQAPGKGLEWVARIRSKYNNYATYYADAVKDRFTISRDDSKNTVYLQMNNLKTEDTAVYYCARAGNFGSSYISYWAYWGQGTLVTVSSGGGGSGGGGSGGGGSQTVVTQEPSLTVSPGGTVTITCGSSTGAVTSGNYPNWVQKKPGQAPRGLIGGTKFLAPGTPARFSGSLSGGKAALTLSGVQPEDEAEYYCVLWYSNRWVFGSGTKLTVL

SEQ ID NO: 2258 - protein, 990 aa, Artificial Sequence
  Synthetic
QVQLVESGGGVVQPGRSLRLSCAASGFTFSAYGMHWVRQAPGKCLEWVAVILYDGSNKYYADSVKGRFTISRDNSKNTLYLQMNSLRAEDTAVYYCARGSGWLQLGDYFDYWGQGTLVTVSSGGGGSGGGGSGGGGSQSALTQPPSVSGSPGQSITISCTGTSSDVGGYNYVSWYQQHPGKAPKLMIYEVSNRPSGVSNRFSGSKSGNTASLTISGLQAEDEADYYCSSYTSSSTLVFGCGTKLTVLSGGGGSEVQLVESGGGLVQPGGSLKLSCAASGFTFNKYAMNWVRQAPGKGLEWVARIRSKYNNYATYYADSVKDRFTISRDDSKNTAYLQMNNLKTEDTAVYYCVRHGNFGNSYISYWAYWGQGTLVTVSSGGGGSGGGGSGGGGSQTVVTQEPSLTVSPGGTVTLTCGSSTGAVTSGNYPNWVQQKPGQAPRGLIGGTKFLAPGTPARFSGSLLGGKAALTLSGVQPEDEAEYYCVLWYSNRWVFGGGTKLTVLGGGGDKTHTCPPCPAPELLGGPSVFLFPPKPKDTLMISRTPEVTCVVVDVSHEDPEVKFNWYVDGVEVHNAKTKPCEEQYGSTYRCVSVLTVLHQDWLNGKEYKCKVSNKALPAPIEKTISKAKGQPREPQVYTLPPSREEMTKNQVSLTCLVKGFYPSDIAVEWESNGQPENNYKTTPPVLDSDGSFFLYSKLTVDKSRWQQGNVFSCSVMHEALHNHYTQKSLSLSPGKGGGGSGGGGSGGGGSGGGGSGGGGSGGGGSDKTHTCPPCPAPELLGGPSVFLFPPKPKDTLMISRTPEVTCVVVDVSHEDPEVKFNWYVDGVEVHNAKTKPCEEQYGSTYRCVSVLTVLHQDWLNGKEYKCKVSNKALPAPIEKTISKAKGQPREPQVYTLPPSREEMTKNQVSLTCLVKGFYPSDIAVEWESNGQPENNYKTTPPVLDSDGSFFLYSKLTVDKSRWQQGNVFSCSVMHEALHNHYTQKSLSLSPGK

SEQ ID NO: 2259 - protein, 990 aa, Artificial Sequence
  Synthetic
QVQLVESGGGVVQPGRSLRLSCAASGFTFSAYGMHWVRQAPGKCLEWVAVILYDGSNKYYADSVKGRFTISRDNSKNTLYLQMNSLRAEDTAVYYCARGSGWLQLGDYFDYWGQGTLVTVSSGGGGSGGGGSGGGGSQSALTQPPSVSGSPGQSITISCTGTSSDVGGYNYVSWYQQHPGKAPKLMIYEVSNRPSGVSNRFSGSKSGNTASLTISGLQAEDEADYYCSSYTSSSTLVFGCGTKLTVLSGGGGSEVQLVESGGGLVQPGGSLKLSCAASGFTFNKYAINWVRQAPGKGLEWVARIRSKYNNYATYYADAVKDRFTISRDDSKNTVYLQMNNLKTEDTAVYYCARAGNFGSSYISYWAYWGQGTLVTVSSGGGGSGGGGSGGGGSQTVVTQEPSLTVSPGGTVTITCGSSTGAVTSGNYPNWVQKKPGQAPRGLIGGTKFLAPGTPARFSGSLSGGKAALTLSGVQPEDEAEYYCVLWYSNRWVFGSGTKLTVLGGGGDKTHTCPPCPAPELLGGPSVFLFPPKPKDTLMISRTPEVTCVVVDVSHEDPEVKFNWYVDGVEVHNAKTKPCEEQYGSTYRCVSVLTVLHQDWLNGKEYKCKVSNKALPAPIEKTISKAKGQPREPQVYTLPPSREEMTKNQVSLTCLVKGFYPSDIAVEWESNGQPENNYKTTPPVLDSDGSFFLYSKLTVDKSRWQQGNVFSCSVMHEALHNHYTQKSLSLSPGKGGGGSGGGGSGGGGSGGGGSGGGGSGGGGSDKTHTCPPCPAPELLGGPSVFLFPPKPKDTLMISRTPEVTCVVVDVSHEDPEVKFNWYVDGVEVHNAKTKPCEEQYGSTYRCVSVLTVLHQDWLNGKEYKCKVSNKALPAPIEKTISKAKGQPREPQVYTLPPSREEMTKNQVSLTCLVKGFYPSDIAVEWESNGQPENNYKTTPPVLDSDGSFFLYSKLTVDKSRWQQGNVFSCSVMHEALHNHYTQKSLSLSPGK

SEQ ID NO: 2260 - protein, 501 aa, Artificial Sequence
  Synthetic
QVQLQQSGPGLVKPSQTLSLTCAISGDSVSSNSAAWNWIRQSPSRCLEWLGRTYYRSKWYNDYAVSVKSRITINPDTSKNQFSLQLNSVTPEDTAVYYCAREVTGDLEDAFDIWGQGTMVTVSSGGGGSGGGGSGGGGSDIQMTQSPSSLSASVGDRVTITCRASQTIWSYLNWYQQRPGKAPNLLIYAASSLQSGVPSRFSGRGSGTDFTLTISSLQAEDFATYYCQQSYSIPQTFGCGTKLEIKSGGGGSEVQLVESGGGLVQPGGSLKLSCAASGFTFNKYAMNWVRQAPGKGLEWVARIRSKYNNYATYYADSVKDRFTISRDDSKNTAYLQMNNLKTEDTAVYYCVRHGNFGNSYISYWAYWGQGTLVTVSSGGGGSGGGGSGGGGSQTVVTQEPSLTVSPGGTVTLTCGSSTGAVTSGNYPNWVQQKPGQAPRGLIGGTKFLAPGTPARFSGSLLGGKAALTLSGVQPEDEAEYYCVLWYSNRWVFGGGTKLTVL

SEQ ID NO: 2261 - protein, 501 aa, Artificial Sequence
  Synthetic
QVQLQQSGPGLVKPSQTLSLTCAISGDSVSSNSAAWNWIRQSPSRCLEWLGRTYYRSKWYNDYAVSVKSRITINPDTSKNQFSLQLNSVTPEDTAVYYCAREVTGDLEDAFDIWGQGTMVTVSSGGGGSGGGGSGGGGSDIQMTQSPSSLSASVGDRVTITCRASQTIWSYLNWYQQRPGKAPNLLIYAASSLQSGVPSRFSGRGSGTDFTLTISSLQAEDFATYYCQQSYSIPQTFGCGTKLEIKSGGGGSEVQLVESGGGLVQPGGSLKLSCAASGFTFNKYAINWVRQAPGKGLEWVARIRSKYNNYATYYADAVKDRFTISRDDSKNTVYLQMNNLKTEDTAVYYCARAGNFGSSYISYWAYWGQGTLVTVSSGGGGSGGGGSGGGGSQTVVTQEPSLTVSPGGTVTITCGSSTGAVTSGNYPNWVQKKPGQAPRGLIGGTKFLAPGTPARFSGSLSGGKAALTLSGVQPEDEAEYYCVLWYSNRWVFGSGTKLTVL

SEQ ID NO: 2262 - protein, 989 aa, Artificial Sequence
  Synthetic
QVQLQQSGPGLVKPSQTLSLTCAISGDSVSSNSAAWNWIRQSPSRCLEWLGRTYYRSKWYNDYAVSVKSRITINPDTSKNQFSLQLNSVTPEDTAVYYCAREVTGDLEDAFDIWGQGTMVTVSSGGGGSGGGGSGGGGSDIQMTQSPSSLSASVGDRVTITCRASQTIWSYLNWYQQRPGKAPNLLIYAASSLQSGVPSRFSGRGSGTDFTLTISSLQAEDFATYYCQQSYSIPQTFGCGTKLEIKSGGGGSEVQLVESGGGLVQPGGSLKLSCAASGFTFNKYAMNWVRQAPGKGLEWVARIRSKYNNYATYYADSVKDRFTISRDDSKNTAYLQMNNLKTEDTAVYYCVRHGNFGNSYISYWAYWGQGTLVTVSSGGGGSGGGGSGGGGSQTVVTQEPSLTVSPGGTVTLTCGSSTGAVTSGNYPNWVQQKPGQAPRGLIGGTKFLAPGTPARFSGSLLGGKAALTLSGVQPEDEAEYYCVLWYSNRWVFGGGTKLTVLGGGGDKTHTCPPCPAPELLGGPSVFLFPPKPKDTLMISRTPEVTCVVVDVSHEDPEVKFNWYVDGVEVHNAKTKPCEEQYGSTYRCVSVLTVLHQDWLNGKEYKCKVSNKALPAPIEKTISKAKGQPREPQVYTLPPSREEMTKNQVSLTCLVKGFYPSDIAVEWESNGQPENNYKTTPPVLDSDGSFFLYSKLTVDKSRWQQGNVFSCSVMHEALHNHYTQKSLSLSPGKGGGGSGGGGSGGGGSGGGGSGGGGSGGGGSDKTHTCPPCPAPELLGGPSVFLFPPKPKDTLMISRTPEVTCVVVDVSHEDPEVKFNWYVDGVEVHNAKTKPCEEQYGSTYRCVSVLTVLHQDWLNGKEYKCKVSNKALPAPIEKTISKAKGQPREPQVYTLPPSREEMTKNQVSLTCLVKGFYPSDIAVEWESNGQPENNYKTTPPVLDSDGSFFLYSKLTVDKSRWQQGNVFSCSVMHEALHNHYTQKSLSLSPGK

SEQ ID NO: 2263 - protein, 989 aa, Artificial Sequence
  Synthetic
QVQLQQSGPGLVKPSQTLSLTCAISGDSVSSNSAAWNWIRQSPSRCLEWLGRTYYRSKWYNDYAVSVKSRITINPDTSKNQFSLQLNSVTPEDTAVYYCAREVTGDLEDAFDIWGQGTMVTVSSGGGGSGGGGSGGGGSDIQMTQSPSSLSASVGDRVTITCRASQTIWSYLNWYQQRPGKAPNLLIYAASSLQSGVPSRFSGRGSGTDFTLTISSLQAEDFATYYCQQSYSIPQTFGCGTKLEIKSGGGGSEVQLVESGGGLVQPGGSLKLSCAASGFTFNKYAINWVRQAPGKGLEWVARIRSKYNNYATYYADAVKDRFTISRDDSKNTVYLQMNNLKTEDTAVYYCARAGNFGSSYISYWAYWGQGTLVTVSSGGGGSGGGGSGGGGSQTVVTQEPSLTVSPGGTVTITCGSSTGAVTSGNYPNWVQKKPGQAPRGLIGGTKFLAPGTPARFSGSLSGGKAALTLSGVQPEDEAEYYCVLWYSNRWVFGSGTKLTVLGGGGDKTHTCPPCPAPELLGGPSVFLFPPKPKDTLMISRTPEVTCVVVDVSHEDPEVKFNWYVDGVEVHNAKTKPCEEQYGSTYRCVSVLTVLHQDWLNGKEYKCKVSNKALPAPIEKTISKAKGQPREPQVYTLPPSREEMTKNQVSLTCLVKGFYPSDIAVEWESNGQPENNYKTTPPVLDSDGSFFLYSKLTVDKSRWQQGNVFSCSVMHEALHNHYTQKSLSLSPGKGGGGSGGGGSGGGGSGGGGSGGGGSGGGGSDKTHTCPPCPAPELLGGPSVFLFPPKPKDTLMISRTPEVTCVVVDVSHEDPEVKFNWYVDGVEVHNAKTKPCEEQYGSTYRCVSVLTVLHQDWLNGKEYKCKVSNKALPAPIEKTISKAKGQPREPQVYTLPPSREEMTKNQVSLTCLVKGFYPSDIAVEWESNGQPENNYKTTPPVLDSDGSFFLYSKLTVDKSRWQQGNVFSCSVMHEALHNHYTQKSLSLSPGK

SEQ ID NO: 2264 - protein, 495 aa, Artificial Sequence
  Synthetic
EVQLVESGGGLVQPGGSLRLSCAASGFTFHDYPMHWVRQAPGKCLEWVSGISWNSDYIVYADSVKGRFTISRDNAKNSLYLQMNSLRPEDTALYYCAKDTAYGGKYYAFDYWGQGTPVTVSSGGGGSGGGGSGGGGSDIQMTQSPSSLSASVGDRVTITCRASQGISDYLAWYQQKPGKVPKLLIYAASTLQSGVPSRFSGSGSGTDFTLTISSLQPEDVATYYCQKYNSAPYTFGCGTKLEIKSGGGGSQVQLVQSGGEVKKPGASVKVSCKASGYTFTSYGISWVRQAPGQCLEWMGWMSPYNGNAIYAQKLQGRVTMTRDTSTSTAYMELRSLRSDDTAVYYCARDPDYYGSGSYSDYWGQGTLVTVSSGGGGSGGGGSGGGGSEIVLTQSPATLSVSPGERATLSCRASQSVSSNLAWYQQKPGQAPRLLIYGASSRATGIPARFSGSGSGTEFTLTISSLQSEDFAVYYCQQYHSWPLLTFGCGTKVEIK

SEQ ID NO: 2265 - protein, 495 aa, Artificial Sequence
  Synthetic
EVQLVESGGGLVQPGGSLRLSCAASGFTFHDYPMHWVRQAPGKCLEWVSGISWNSDYIVYADSVKGRFTISRDNAKNSLYLQMNSLRPEDTALYYCAKDTAYGGKYYAFDYWGQGTPVTVSSGGGGQGGGGQGGGGQEIQMTQSPSSLSASVGDRVTITCRASQGISDYLAWYQQKPGKVPKLLIYAASTLQSGVPSRFSGSGSGTDFTLTISSLQPEDVATYYCQKYNSAPYTFGCGTKLEIKSGGGGQQVQLVQSGGEVKKPGASVKVSCKASGYTFTSYGISWVRQAPGQCLEWMGWMSPYNGNAIYAQKLQGRVTMTRDTSTSTAYMELRSLRSDDTAVYYCARDPDYYGSGSYSDYWGQGTLVTVSSGGGGQGGGGQGGGGQEIVLTQSPATLSVSPGERATLSCRASQSVSSNLAWYQQKPGQAPRLLIYGASSRATGIPARFSGSGSGTEFTLTISSLQSEDFAVYYCQQYHSWPLLTFGCGTKVEIK

SEQ ID NO: 2266 - protein, 750 aa, Artificial Sequence
  Synthetic
EVQLVESGGGLVQPGGSLRLSCAASGFTFHDYPMHWVRQAPGKCLEWVSGISWNSDYIVYADSVKGRFTISRDNAKNSLYLQMNSLRPEDTALYYCAKDTAYGGKYYAFDYWGQGTPVTVSSGGGGSGGGGSGGGGSDIQMTQSPSSLSASVGDRVTITCRASQGISDYLAWYQQKPGKVPKLLIYAASTLQSGVPSRFSGSGSGTDFTLTISSLQPEDVATYYCQKYNSAPYTFGCGTKLEIKSGGGGSQVQLVQSGGEVKKPGASVKVSCKASGYTFTSYGISWVRQAPGQCLEWMGWMSPYNGNAIYAQKLQGRVTMTRDTSTSTAYMELRSLRSDDTAVYYCARDPDYYGSGSYSDYWGQGTLVTVSSGGGGSGGGGSGGGGSEIVLTQSPATLSVSPGERATLSCRASQSVSSNLAWYQQKPGQAPRLLIYGASSRATGIPARFSGSGSGTEFTLTISSLQSEDFAVYYCQQYHSWPLLTFGCGTKVEIKSGGGGSEVQLVESGGGLVQPGGSLKLSCAASGFTFNKYAMNWVRQAPGKGLEWVARIRSKYNNYATYYADSVKDRFTISRDDSKNTAYLQMNNLKTEDTAVYYCVRHGNFGNSYISYWAYWGQGTLVTVSSGGGGSGGGGSGGGGSQTVVTQEPSLTVSPGGTVTLTCGSSTGAVTSGNYPNWVQQKPGQAPRGLIGGTKFLAPGTPARFSGSLLGGKAALTLSGVQPEDEAEYYCVLWYSNRWVFGGGTKLTVL

SEQ ID NO: 2267 - protein, 750 aa, Artificial Sequence
  Synthetic
EVQLVESGGGLVQPGGSLRLSCAASGFTFHDYPMHWVRQAPGKCLEWVSGISWNSDYIVYADSVKGRFTISRDNAKNSLYLQMNSLRPEDTALYYCAKDTAYGGKYYAFDYWGQGTPVTVSSGGGGQGGGGQGGGGQEIQMTQSPSSLSASVGDRVTITCRASQGISDYLAWYQQKPGKVPKLLIYAASTLQSGVPSRFSGSGSGTDFTLTISSLQPEDVATYYCQKYNSAPYTFGCGTKLEIKSGGGGQQVQLVQSGGEVKKPGASVKVSCKASGYTFTSYGISWVRQAPGQCLEWMGWMSPYNGNAIYAQKLQGRVTMTRDTSTSTAYMELRSLRSDDTAVYYCARDPDYYGSGSYSDYWGQGTLVTVSSGGGGQGGGGQGGGGQEIVLTQSPATLSVSPGERATLSCRASQSVSSNLAWYQQKPGQAPRLLIYGASSRATGIPARFSGSGSGTEFTLTISSLQSEDFAVYYCQQYHSWPLLTFGCGTKVEIKSGGGGQEVQLVESGGGLVQPGGSLKLSCAASGFTFNKYAMNWVRQAPGKGLEWVARIRSKYNNYATYYADSVKDRFTISRDDSKNTAYLQMNNLKTEDTAVYYCVRHGNFGNSYISYWAYWGQGTLVTVSSGGGGQGGGGQGGGGQQTVVTQEPSLTVSPGGTVTLTCGSSTGAVTSGNYPNWVQQKPGQAPRGLIGGTKFLAPGTPARFSGSLLGGKAALTLSGVQPEDEAEYYCVLWYSNRWVFGGGTKLTVL

SEQ ID NO: 2268 - protein, 750 aa, Artificial Sequence
  Synthetic
EVQLVESGGGLVQPGGSLRLSCAASGFTFHDYPMHWVRQAPGKCLEWVSGISWNSDYIVYADSVKGRFTISRDNAKNSLYLQMNSLRPEDTALYYCAKDTAYGGKYYAFDYWGQGTPVTVSSGGGGSGGGGSGGGGSDIQMTQSPSSLSASVGDRVTITCRASQGISDYLAWYQQKPGKVPKLLIYAASTLQSGVPSRFSGSGSGTDFTLTISSLQPEDVATYYCQKYNSAPYTFGCGTKLEIKSGGGGSQVQLVQSGGEVKKPGASVKVSCKASGYTFTSYGISWVRQAPGQCLEWMGWMSPYNGNAIYAQKLQGRVTMTRDTSTSTAYMELRSLRSDDTAVYYCARDPDYYGSGSYSDYWGQGTLVTVSSGGGGSGGGGSGGGGSEIVLTQSPATLSVSPGERATLSCRASQSVSSNLAWYQQKPGQAPRLLIYGASSRATGIPARFSGSGSGTEFTLTISSLQSEDFAVYYCQQYHSWPLLTFGCGTKVEIKSGGGGSEVQLVESGGGLVQPGGSLKLSCAASGFTFNKYAINWVRQAPGKGLEWVARIRSKYNNYATYYADAVKDRFTISRDDSKNTVYLQMNNLKTEDTAVYYCARAGNFGSSYISYWAYWGQGTLVTVSSGGGGSGGGGSGGGGSQTVVTQEPSLTVSPGGTVTITCGSSTGAVTSGNYPNWVQKKPGQAPRGLIGGTKFLAPGTPARFSGSLSGGKAALTLSGVQPEDEAEYYCVLWYSNRWVFGSGTKLTVL

SEQ ID NO: 2269 - protein, 750 aa, Artificial Sequence
  Synthetic
EVQLVESGGGLVQPGGSLRLSCAASGFTFHDYPMHWVRQAPGKCLEWVSGISWNSDYIVYADSVKGRFTISRDNAKNSLYLQMNSLRPEDTALYYCAKDTAYGGKYYAFDYWGQGTPVTVSSGGGGQGGGGQGGGGQEIQMTQSPSSLSASVGDRVTITCRASQGISDYLAWYQQKPGKVPKLLIYAASTLQSGVPSRFSGSGSGTDFTLTISSLQPEDVATYYCQKYNSAPYTFGCGTKLEIKSGGGGQQVQLVQSGGEVKKPGASVKVSCKASGYTFTSYGISWVRQAPGQCLEWMGWMSPYNGNAIYAQKLQGRVTMTRDTSTSTAYMELRSLRSDDTAVYYCARDPDYYGSGSYSDYWGQGTLVTVSSGGGGQGGGGQGGGGQEIVLTQSPATLSVSPGERATLSCRASQSVSSNLAWYQQKPGQAPRLLIYGASSRATGIPARFSGSGSGTEFTLTISSLQSEDFAVYYCQQYHSWPLLTFGCGTKVEIKSGGGGQEVQLVESGGGLVQPGGSLKLSCAASGFTFNKYAINWVRQAPGKGLEWVARIRSKYNNYATYYADAVKDRFTISRDDSKNTVYLQMNNLKTEDTAVYYCARAGNFGSSYISYWAYWGQGTLVTVSSGGGGQGGGGQGGGGQQTVVTQEPSLTVSPGGTVTITCGSSTGAVTSGNYPNWVQKKPGQAPRGLIGGTKFLAPGTPARFSGSLSGGKAALTLSGVQPEDEAEYYCVLWYSNRWVFGSGTKLTVL

SEQ ID NO: 2270 - protein, 1238 aa, Artificial Sequence
  Synthetic
EVQLVESGGGLVQPGGSLRLSCAASGFTFHDYPMHWVRQAPGKCLEWVSGISWNSDYIVYADSVKGRFTISRDNAKNSLYLQMNSLRPEDTALYYCAKDTAYGGKYYAFDYWGQGTPVTVSSGGGGSGGGGSGGGGSDIQMTQSPSSLSASVGDRVTITCRASQGISDYLAWYQQKPGKVPKLLIYAASTLQSGVPSRFSGSGSGTDFTLTISSLQPEDVATYYCQKYNSAPYTFGCGTKLEIKSGGGGSQVQLVQSGGEVKKPGASVKVSCKASGYTFTSYGISWVRQAPGQCLEWMGWMSPYNGNAIYAQKLQGRVTMTRDTSTSTAYMELRSLRSDDTAVYYCARDPDYYGSGSYSDYWGQGTLVTVSSGGGGSGGGGSGGGGSEIVLTQSPATLSVSPGERATLSCRASQSVSSNLAWYQQKPGQAPRLLIYGASSRATGIPARFSGSGSGTEFTLTISSLQSEDFAVYYCQQYHSWPLLTFGCGTKVEIKSGGGGSEVQLVESGGGLVQPGGSLKLSCAASGFTFNKYAMNWVRQAPGKGLEWVARIRSKYNNYATYYADSVKDRFTISRDDSKNTAYLQMNNLKTEDTAVYYCVRHGNFGNSYISYWAYWGQGTLVTVSSGGGGSGGGGSGGGGSQTVVTQEPSLTVSPGGTVTLTCGSSTGAVTSGNYPNWVQQKPGQAPRGLIGGTKFLAPGTPARFSGSLLGGKAALTLSGVQPEDEAEYYCVLWYSNRWVFGGGTKLTVLGGGGDKTHTCPPCPAPELLGGPSVFLFPPKPKDTLMISRTPEVTCVVVDVSHEDPEVKFNWYVDGVEVHNAKTKPCEEQYGSTYRCVSVLTVLHQDWLNGKEYKCKVSNKALPAPIEKTISKAKGQPREPQVYTLPPSREEMTKNQVSLTCLVKGFYPSDIAVEWESNGQPENNYKTTPPVLDSDGSFFLYSKLTVDKSRWQQGNVFSCSVMHEALHNHYTQKSLSLSPGKGGGGSGGGGSGGGGSGGGGSGGGGSGGGGSDKTHTCPPCPAPELLGGPSVFLFPPKPKDTLMISRTPEVTCVVVDVSHEDPEVKFNWYVDGVEVHNAKTKPCEEQYGSTYRCVSVLTVLHQDWLNGKEYKCKVSNKALPAPIEKTISKAKGQPREPQVYTLPPSREEMTKNQVSLTCLVKGFYPSDIAVEWESNGQPENNYKTTPPVLDSDGSFFLYSKLTVDKSRWQQGNVFSCSVMHEALHNHYTQKSLSLSPGK

SEQ ID NO: 2271 - protein, 1228 aa, Artificial Sequence
  Synthetic
EVQLVESGGGLVQPGGSLRLSCAASGFTFHDYPMHWVRQAPGKCLEWVSGISWNSDYIVYADSVKGRFTISRDNAKNSLYLQMNSLRPEDTALYYCAKDTAYGGKYYAFDYWGQGTPVTVSSGGGGQGGGGQGGGGQEIQMTQSPSSLSASVGDRVTITCRASQGISDYLAWYQQKPGKVPKLLIYAASTLQSGVPSRFSGSGSGTDFTLTISSLQPEDVATYYCQKYNSAPYTFGCGTKLEIKSGGGGQQVQLVQSGGEVKKPGASVKVSCKASGYTFTSYGISWVRQAPGQCLEWMGWMSPYNGNAIYAQKLQGRVTMTRDTSTSTAYMELRSLRSDDTAVYYCARDPDYYGSGSYSDYWGQGTLVTVSSGGGGQGGGGQGGGGQEIVLTQSPATLSVSPGERATLSCRASQSVSSNLAWYQQKPGQAPRLLIYGASSRATGIPARFSGSGSGTEFTLTISSLQSEDFAVYYCQQYHSWPLLTFGCGTKVEIKSGGGGQEVQLVESGGGLVQPGGSLKLSCAASGFTFNKYAMNWVRQAPGKGLEWVARIRSKYNNYATYYADSVKDRFTISRDDSKNTAYLQMNNLKTEDTAVYYCVRHGNFGNSYISYWAYWGQGTLVTVSSGGGGQGGGGQGGGGQQTVVTQEPSLTVSPGGTVTLTCGSSTGAVTSGNYPNWVQQKPGQAPRGLIGGTKFLAPGTPARFSGSLLGGKAALTLSGVQPEDEAEYYCVLWYSNRWVFGGGTKLTVLGGGGCPPCPAPELLGGPSVFLFPPKPKDTLMISRTPEVTCVVVDVSHEEPEVKFNWYVDGVEVHNAKTKPCEEQYGSTYRCVSVLTVLHQDWLNGKEYKCKVSNKALPAPIEKTISKAKGQPREPQVYTLPPSREEMTKNQVSLTCLVKGFYPSDIAVEWESNGQPENNYKTTPPVLDSDGSFFLYSKLTVDKSRWQQGNVFSCSVMHEALHNHYTQKSLSLSPGKGGGGQGGGGQGGGGQGGGGQGGGGQGGGGQCPPCPAPELLGGPSVFLFPPKPKDTLMISRTPEVTCVVVDVSHEEPEVKFNWYVDGVEVHNAKTKPCEEQYGSTYRCVSVLTVLHQDWLNGKEYKCKVSNKALPAPIEKTISKAKGQPREPQVYTLPPSREEMTKNQVSLTCLVKGFYPSDIAVEWESNGQPENNYKTTPPVLDSDGSFFLYSKLTVDKSRWQQGNVFSCSVMHEALHNHYTQKSLSLSPGK

SEQ ID NO: 2272 - protein, 1238 aa, Artificial Sequence
  Synthetic
EVQLVESGGGLVQPGGSLRLSCAASGFTFHDYPMHWVRQAPGKCLEWVSGISWNSDYIVYADSVKGRFTISRDNAKNSLYLQMNSLRPEDTALYYCAKDTAYGGKYYAFDYWGQGTPVTVSSGGGGSGGGGSGGGGSDIQMTQSPSSLSASVGDRVTITCRASQGISDYLAWYQQKPGKVPKLLIYAASTLQSGVPSRFSGSGSGTDFTLTISSLQPEDVATYYCQKYNSAPYTFGCGTKLEIKSGGGGSQVQLVQSGGEVKKPGASVKVSCKASGYTFTSYGISWVRQAPGQCLEWMGWMSPYNGNAIYAQKLQGRVTMTRDTSTSTAYMELRSLRSDDTAVYYCARDPDYYGSGSYSDYWGQGTLVTVSSGGGGSGGGGSGGGGSEIVLTQSPATLSVSPGERATLSCRASQSVSSNLAWYQQKPGQAPRLLIYGASSRATGIPARFSGSGSGTEFTLTISSLQSEDFAVYYCQQYHSWPLLTFGCGTKVEIKSGGGGSEVQLVESGGGLVQPGGSLKLSCAASGFTFNKYAINWVRQAPGKGLEWVARIRSKYNNYATYYADAVKDRFTISRDDSKNTVYLQMNNLKTEDTAVYYCARAGNFGSSYISYWAYWGQGTLVTVSSGGGGSGGGGSGGGGSQTVVTQEPSLTVSPGGTVTITCGSSTGAVTSGNYPNWVQKKPGQAPRGLIGGTKFLAPGTPARFSGSLSGGKAALTLSGVQPEDEAEYYCVLWYSNRWVFGSGTKLTVLGGGGDKTHTCPPCPAPELLGGPSVFLFPPKPKDTLMISRTPEVTCVVVDVSHEDPEVKFNWYVDGVEVHNAKTKPCEEQYGSTYRCVSVLTVLHQDWLNGKEYKCKVSNKALPAPIEKTISKAKGQPREPQVYTLPPSREEMTKNQVSLTCLVKGFYPSDIAVEWESNGQPENNYKTTPPVLDSDGSFFLYSKLTVDKSRWQQGNVFSCSVMHEALHNHYTQKSLSLSPGKGGGGSGGGGSGGGGSGGGGSGGGGSGGGGSDKTHTCPPCPAPELLGGPSVFLFPPKPKDTLMISRTPEVTCVVVDVSHEDPEVKFNWYVDGVEVHNAKTKPCEEQYGSTYRCVSVLTVLHQDWLNGKEYKCKVSNKALPAPIEKTISKAKGQPREPQVYTLPPSREEMTKNQVSLTCLVKGFYPSDIAVEWESNGQPENNYKTTPPVLDSDGSFFLYSKLTVDKSRWQQGNVFSCSVMHEALHNHYTQKSLSLSPGK

SEQ ID NO: 2273 - protein, 1228 aa, Artificial Sequence
  Synthetic
EVQLVESGGGLVQPGGSLRLSCAASGFTFHDYPMHWVRQAPGKCLEWVSGISWNSDYIVYADSVKGRFTISRDNAKNSLYLQMNSLRPEDTALYYCAKDTAYGGKYYAFDYWGQGTPVTVSSGGGGQGGGGQGGGGQEIQMTQSPSSLSASVGDRVTITCRASQGISDYLAWYQQKPGKVPKLLIYAASTLQSGVPSRFSGSGSGTDFTLTISSLQPEDVATYYCQKYNSAPYTFGCGTKLEIKSGGGGQQVQLVQSGGEVKKPGASVKVSCKASGYTFTSYGISWVRQAPGQCLEWMGWMSPYNGNAIYAQKLQGRVTMTRDTSTSTAYMELRSLRSDDTAVYYCARDPDYYGSGSYSDYWGQGTLVTVSSGGGGQGGGGQGGGGQEIVLTQSPATLSVSPGERATLSCRASQSVSSNLAWYQQKPGQAPRLLIYGASSRATGIPARFSGSGSGTEFTLTISSLQSEDFAVYYCQQYHSWPLLTFGCGTKVEIKSGGGGQEVQLVESGGGLVQPGGSLKLSCAASGFTFNKYAINWVRQAPGKGLEWVARIRSKYNNYATYYADAVKDRFTISRDDSKNTVYLQMNNLKTEDTAVYYCARAGNFGSSYISYWAYWGQGTLVTVSSGGGGQGGGGQGGGGQQTVVTQEPSLTVSPGGTVTITCGSSTGAVTSGNYPNWVQKKPGQAPRGLIGGTKFLAPGTPARFSGSLSGGKAALTLSGVQPEDEAEYYCVLWYSNRWVFGSGTKLTVLGGGGCPPCPAPELLGGPSVFLFPPKPKDTLMISRTPEVTCVVVDVSHEEPEVKFNWYVDGVEVHNAKTKPCEEQYGSTYRCVSVLTVLHQDWLNGKEYKCKVSNKALPAPIEKTISKAKGQPREPQVYTLPPSREEMTKNQVSLTCLVKGFYPSDIAVEWESNGQPENNYKTTPPVLDSDGSFFLYSKLTVDKSRWQQGNVFSCSVMHEALHNHYTQKSLSLSPGKGGGGQGGGGQGGGGQGGGGQGGGGQGGGGQCPPCPAPELLGGPSVFLFPPKPKDTLMISRTPEVTCVVVDVSHEEPEVKFNWYVDGVEVHNAKTKPCEEQYGSTYRCVSVLTVLHQDWLNGKEYKCKVSNKALPAPIEKTISKAKGQPREPQVYTLPPSREEMTKNQVSLTCLVKGFYPSDIAVEWESNGQPENNYKTTPPVLDSDGSFFLYSKLTVDKSRWQQGNVFSCSVMHEALHNHYTQKSLSLSPGK

SEQ ID NO: 2274 - protein, 495 aa, Artificial Sequence
  Synthetic
EVQLVESGGGLVQPGGSLRLSCAASGFTFHDYPMHWVRQAPGKCLEWVSGISWNSDYIVYADSVKGRFTISRDNAKNSLYLQMNSLRPEDTALYYCAKDTAYGGKYYAFDYWGQGTPVTVSSGGGGSGGGGSGGGGSDIQMTQSPSSLSASVGDRVTITCRASQGISDYLAWYQQKPGKVPKLLIYAASTLQSGVPSRFSGSGSGTDFTLTISSLQPEDVATYYCQKYNSAPYTFGCGTKLEIKSGGGGSQVQLVQSGAEVKKPGASVKVSCKASGYTFTSYGISWVRQAPGQCLEWMGWISAYNGNTIYAQKFQGRVTLTRDTSTSTAYMELRSLRSDDTAMYYCARDPDYYGSGSYSDYWGQGTLVTVSSGGGGSGGGGSGGGGSEIVLTQSPATLSVSPGERATLSCRASQSVSSNLAWYQQKPGQAPRLLIYGASSRATGIPARFSGSGSGTEFTLTISSLQSEDFAVYYCQQYHSWPLLTFGCGTKVEIK

SEQ ID NO: 2275 - protein, 495 aa, Artificial Sequence
  Synthetic
EVQLVESGGGLVQPGGSLRLSCAASGFTFHDYPMHWVRQAPGKCLEWVSGISWNSDYIVYADSVKGRFTISRDNAKNSLYLQMNSLRPEDTALYYCAKDTAYGGKYYAFDYWGQGTPVTVSSGGGGQGGGGQGGGGQEIQMTQSPSSLSASVGDRVTITCRASQGISDYLAWYQQKPGKVPKLLIYAASTLQSGVPSRFSGSGSGTDFTLTISSLQPEDVATYYCQKYNSAPYTFGCGTKLEIKSGGGGQQVQLVQSGAEVKKPGASVKVSCKASGYTFTSYGISWVRQAPGQCLEWMGWISAYNGNTIYAQKFQGRVTLTRDTSTSTAYMELRSLRSDDTAMYYCARDPDYYGSGSYSDYWGQGTLVTVSSGGGGQGGGGQGGGGQEIVLTQSPATLSVSPGERATLSCRASQSVSSNLAWYQQKPGQAPRLLIYGASSRATGIPARFSGSGSGTEFTLTISSLQSEDFAVYYCQQYHSWPLLTFGCGTKVEIK

SEQ ID NO: 2276 - protein, 750 aa, Artificial Sequence
  Synthetic
EVQLVESGGGLVQPGGSLRLSCAASGFTFHDYPMHWVRQAPGKCLEWVSGISWNSDYIVYADSVKGRFTISRDNAKNSLYLQMNSLRPEDTALYYCAKDTAYGGKYYAFDYWGQGTPVTVSSGGGGSGGGGSGGGGSDIQMTQSPSSLSASVGDRVTITCRASQGISDYLAWYQQKPGKVPKLLIYAASTLQSGVPSRFSGSGSGTDFTLTISSLQPEDVATYYCQKYNSAPYTFGCGTKLEIKSGGGGSQVQLVQSGAEVKKPGASVKVSCKASGYTFTSYGISWVRQAPGQCLEWMGWISAYNGNTIYAQKFQGRVTLTRDTSTSTAYMELRSLRSDDTAMYYCARDPDYYGSGSYSDYWGQGTLVTVSSGGGGSGGGGSGGGGSEIVLTQSPATLSVSPGERATLSCRASQSVSSNLAWYQQKPGQAPRLLIYGASSRATGIPARFSGSGSGTEFTLTISSLQSEDFAVYYCQQYHSWPLLTFGCGTKVEIKSGGGGSEVQLVESGGGLVQPGGSLKLSCAASGFTFNKYAMNWVRQAPGKGLEWVARIRSKYNNYATYYADSVKDRFTISRDDSKNTAYLQMNNLKTEDTAVYYCVRHGNFGNSYISYWAYWGQGTLVTVSSGGGGSGGGGSGGGGSQTVVTQEPSLTVSPGGTVTLTCGSSTGAVTSGNYPNWVQQKPGQAPRGLIGGTKFLAPGTPARFSGSLLGGKAALTLSGVQPEDEAEYYCVLWYSNRWVFGGGTKLTVL

SEQ ID NO: 2277 - protein, 750 aa, Artificial Sequence
  Synthetic
EVQLVESGGGLVQPGGSLRLSCAASGFTFHDYPMHWVRQAPGKCLEWVSGISWNSDYIVYADSVKGRFTISRDNAKNSLYLQMNSLRPEDTALYYCAKDTAYGGKYYAFDYWGQGTPVTVSSGGGGQGGGGQGGGGQEIQMTQSPSSLSASVGDRVTITCRASQGISDYLAWYQQKPGKVPKLLIYAASTLQSGVPSRFSGSGSGTDFTLTISSLQPEDVATYYCQKYNSAPYTFGCGTKLEIKSGGGGQQVQLVQSGAEVKKPGASVKVSCKASGYTFTSYGISWVRQAPGQCLEWMGWISAYNGNTIYAQKFQGRVTLTRDTSTSTAYMELRSLRSDDTAMYYCARDPDYYGSGSYSDYWGQGTLVTVSSGGGGQGGGGQGGGGQEIVLTQSPATLSVSPGERATLSCRASQSVSSNLAWYQQKPGQAPRLLIYGASSRATGIPARFSGSGSGTEFTLTISSLQSEDFAVYYCQQYHSWPLLTFGCGTKVEIKSGGGGQEVQLVESGGGLVQPGGSLKLSCAASGFTFNKYAMNWVRQAPGKGLEWVARIRSKYNNYATYYADSVKDRFTISRDDSKNTAYLQMNNLKTEDTAVYYCVRHGNFGNSYISYWAYWGQGTLVTVSSGGGGQGGGGQGGGGQQTVVTQEPSLTVSPGGTVTLTCGSSTGAVTSGNYPNWVQQKPGQAPRGLIGGTKFLAPGTPARFSGSLLGGKAALTLSGVQPEDEAEYYCVLWYSNRWVFGGGTKLTVL

SEQ ID NO: 2278 - protein, 750 aa, Artificial Sequence
  Synthetic
EVQLVESGGGLVQPGGSLRLSCAASGFTFHDYPMHWVRQAPGKCLEWVSGISWNSDYIVYADSVKGRFTISRDNAKNSLYLQMNSLRPEDTALYYCAKDTAYGGKYYAFDYWGQGTPVTVSSGGGGSGGGGSGGGGSDIQMTQSPSSLSASVGDRVTITCRASQGISDYLAWYQQKPGKVPKLLIYAASTLQSGVPSRFSGSGSGTDFTLTISSLQPEDVATYYCQKYNSAPYTFGCGTKLEIKSGGGGSQVQLVQSGAEVKKPGASVKVSCKASGYTFTSYGISWVRQAPGQCLEWMGWISAYNGNTIYAQKFQGRVTLTRDTSTSTAYMELRSLRSDDTAMYYCARDPDYYGSGSYSDYWGQGTLVTVSSGGGGSGGGGSGGGGSEIVLTQSPATLSVSPGERATLSCRASQSVSSNLAWYQQKPGQAPRLLIYGASSRATGIPARFSGSGSGTEFTLTISSLQSEDFAVYYCQQYHSWPLLTFGCGTKVEIKSGGGGSEVQLVESGGGLVQPGGSLKLSCAASGFTFNKYAINWVRQAPGKGLEWVARIRSKYNNYATYYADAVKDRFTISRDDSKNTVYLQMNNLKTEDTAVYYCARAGNFGSSYISYWAYWGQGTLVTVSSGGGGSGGGGSGGGGSQTVVTQEPSLTVSPGGTVTITCGSSTGAVTSGNYPNWVQKKPGQAPRGLIGGTKFLAPGTPARFSGSLSGGKAALTLSGVQPEDEAEYYCVLWYSNRWVFGSGTKLTVL

SEQ ID NO: 2279 - protein, 750 aa, Artificial Sequence
  Synthetic
EVQLVESGGGLVQPGGSLRLSCAASGFTFHDYPMHWVRQAPGKCLEWVSGISWNSDYIVYADSVKGRFTISRDNAKNSLYLQMNSLRPEDTALYYCAKDTAYGGKYYAFDYWGQGTPVTVSSGGGGQGGGGQGGGGQEIQMTQSPSSLSASVGDRVTITCRASQGISDYLAWYQQKPGKVPKLLIYAASTLQSGVPSRFSGSGSGTDFTLTISSLQPEDVATYYCQKYNSAPYTFGCGTKLEIKSGGGGQQVQLVQSGAEVKKPGASVKVSCKASGYTFTSYGISWVRQAPGQCLEWMGWISAYNGNTIYAQKFQGRVTLTRDTSTSTAYMELRSLRSDDTAMYYCARDPDYYGSGSYSDYWGQGTLVTVSSGGGGQGGGGQGGGGQEIVLTQSPATLSVSPGERATLSCRASQSVSSNLAWYQQKPGQAPRLLIYGASSRATGIPARFSGSGSGTEFTLTISSLQSEDFAVYYCQQYHSWPLLTFGCGTKVEIKSGGGGQEVQLVESGGGLVQPGGSLKLSCAASGFTFNKYAINWVRQAPGKGLEWVARIRSKYNNYATYYADAVKDRFTISRDDSKNTVYLQMNNLKTEDTAVYYCARAGNFGSSYISYWAYWGQGTLVTVSSGGGGQGGGGQGGGGQQTVVTQEPSLTVSPGGTVTITCGSSTGAVTSGNYPNWVQKKPGQAPRGLIGGTKFLAPGTPARFSGSLSGGKAALTLSGVQPEDEAEYYCVLWYSNRWVFGSGTKLTVL

SEQ ID NO: 2280 - protein, 1238 aa, Artificial Sequence
  Synthetic
EVQLVESGGGLVQPGGSLRLSCAASGFTFHDYPMHWVRQAPGKCLEWVSGISWNSDYIVYADSVKGRFTISRDNAKNSLYLQMNSLRPEDTALYYCAKDTAYGGKYYAFDYWGQGTPVTVSSGGGGSGGGGSGGGGSDIQMTQSPSSLSASVGDRVTITCRASQGISDYLAWYQQKPGKVPKLLIYAASTLQSGVPSRFSGSGSGTDFTLTISSLQPEDVATYYCQKYNSAPYTFGCGTKLEIKSGGGGSQVQLVQSGAEVKKPGASVKVSCKASGYTFTSYGISWVRQAPGQCLEWMGWISAYNGNTIYAQKFQGRVTLTRDTSTSTAYMELRSLRSDDTAMYYCARDPDYYGSGSYSDYWGQGTLVTVSSGGGGSGGGGSGGGGSEIVLTQSPATLSVSPGERATLSCRASQSVSSNLAWYQQKPGQAPRLLIYGASSRATGIPARFSGSGSGTEFTLTISSLQSEDFAVYYCQQYHSWPLLTFGCGTKVEIKSGGGGSEVQLVESGGGLVQPGGSLKLSCAASGFTFNKYAMNWVRQAPGKGLEWVARIRSKYNNYATYYADSVKDRFTISRDDSKNTAYLQMNNLKTEDTAVYYCVRHGNFGNSYISYWAYWGQGTLVTVSSGGGGSGGGGSGGGGSQTVVTQEPSLTVSPGGTVTLTCGSSTGAVTSGNYPNWVQQKPGQAPRGLIGGTKFLAPGTPARFSGSLLGGKAALTLSGVQPEDEAEYYCVLWYSNRWVFGGGTKLTVLGGGGDKTHTCPPCPAPELLGGPSVFLFPPKPKDTLMISRTPEVTCVVVDVSHEDPEVKFNWYVDGVEVHNAKTKPCEEQYGSTYRCVSVLTVLHQDWLNGKEYKCKVSNKALPAPIEKTISKAKGQPREPQVYTLPPSREEMTKNQVSLTCLVKGFYPSDIAVEWESNGQPENNYKTTPPVLDSDGSFFLYSKLTVDKSRWQQGNVFSCSVMHEALHNHYTQKSLSLSPGKGGGGSGGGGSGGGGSGGGGSGGGGSGGGGSDKTHTCPPCPAPELLGGPSVFLFPPKPKDTLMISRTPEVTCVVVDVSHEDPEVKFNWYVDGVEVHNAKTKPCEEQYGSTYRCVSVLTVLHQDWLNGKEYKCKVSNKALPAPIEKTISKAKGQPREPQVYTLPPSREEMTKNQVSLTCLVKGFYPSDIAVEWESNGQPENNYKTTPPVLDSDGSFFLYSKLTVDKSRWQQGNVFSCSVMHEALHNHYTQKSLSLSPGK

SEQ ID NO: 2281 - protein, 1228 aa, Artificial Sequence
  Synthetic
EVQLVESGGGLVQPGGSLRLSCAASGFTFHDYPMHWVRQAPGKCLEWVSGISWNSDYIVYADSVKGRFTISRDNAKNSLYLQMNSLRPEDTALYYCAKDTAYGGKYYAFDYWGQGTPVTVSSGGGGQGGGGQGGGGQEIQMTQSPSSLSASVGDRVTITCRASQGISDYLAWYQQKPGKVPKLLIYAASTLQSGVPSRFSGSGSGTDFTLTISSLQPEDVATYYCQKYNSAPYTFGCGTKLEIKSGGGGQQVQLVQSGAEVKKPGASVKVSCKASGYTFTSYGISWVRQAPGQCLEWMGWISAYNGNTIYAQKFQGRVTLTRDTSTSTAYMELRSLRSDDTAMYYCARDPDYYGSGSYSDYWGQGTLVTVSSGGGGQGGGGQGGGGQEIVLTQSPATLSVSPGERATLSCRASQSVSSNLAWYQQKPGQAPRLLIYGASSRATGIPARFSGSGSGTEFTLTISSLQSEDFAVYYCQQYHSWPLLTFGCGTKVEIKSGGGGQEVQLVESGGGLVQPGGSLKLSCAASGFTFNKYAMNWVRQAPGKGLEWVARIRSKYNNYATYYADSVKDRFTISRDDSKNTAYLQMNNLKTEDTAVYYCVRHGNFGNSYISYWAYWGQGTLVTVSSGGGGQGGGGQGGGGQQTVVTQEPSLTVSPGGTVTLTCGSSTGAVTSGNYPNWVQQKPGQAPRGLIGGTKFLAPGTPARFSGSLLGGKAALTLSGVQPEDEAEYYCVLWYSNRWVFGGGTKLTVLGGGGCPPCPAPELLGGPSVFLFPPKPKDTLMISRTPEVTCVVVDVSHEEPEVKFNWYVDGVEVHNAKTKPCEEQYGSTYRCVSVLTVLHQDWLNGKEYKCKVSNKALPAPIEKTISKAKGQPREPQVYTLPPSREEMTKNQVSLTCLVKGFYPSDIAVEWESNGQPENNYKTTPPVLDSDGSFFLYSKLTVDKSRWQQGNVFSCSVMHEALHNHYTQKSLSLSPGKGGGGQGGGGQGGGGQGGGGQGGGGQGGGGQCPPCPAPELLGGPSVFLFPPKPKDTLMISRTPEVTCVVVDVSHEEPEVKFNWYVDGVEVHNAKTKPCEEQYGSTYRCVSVLTVLHQDWLNGKEYKCKVSNKALPAPIEKTISKAKGQPREPQVYTLPPSREEMTKNQVSLTCLVKGFYPSDIAVEWESNGQPENNYKTTPPVLDSDGSFFLYSKLTVDKSRWQQGNVFSCSVMHEALHNHYTQKSLSLSPGK

SEQ ID NO: 2282 - protein, 1238 aa, Artificial Sequence
  Synthetic
EVQLVESGGGLVQPGGSLRLSCAASGFTFHDYPMHWVRQAPGKCLEWVSGISWNSDYIVYADSVKGRFTISRDNAKNSLYLQMNSLRPEDTALYYCAKDTAYGGKYYAFDYWGQGTPVTVSSGGGGSGGGGSGGGGSDIQMTQSPSSLSASVGDRVTITCRASQGISDYLAWYQQKPGKVPKLLIYAASTLQSGVPSRFSGSGSGTDFTLTISSLQPEDVATYYCQKYNSAPYTFGCGTKLEIKSGGGGSQVQLVQSGAEVKKPGASVKVSCKASGYTFTSYGISWVRQAPGQCLEWMGWISAYNGNTIYAQKFQGRVTLTRDTSTSTAYMELRSLRSDDTAMYYCARDPDYYGSGSYSDYWGQGTLVTVSSGGGGSGGGGSGGGGSEIVLTQSPATLSVSPGERATLSCRASQSVSSNLAWYQQKPGQAPRLLIYGASSRATGIPARFSGSGSGTEFTLTISSLQSEDFAVYYCQQYHSWPLLTFGCGTKVEIKSGGGGSEVQLVESGGGLVQPGGSLKLSCAASGFTFNKYAINWVRQAPGKGLEWVARIRSKYNNYATYYADAVKDRFTISRDDSKNTVYLQMNNLKTEDTAVYYCARAGNFGSSYISYWAYWGQGTLVTVSSGGGGSGGGGSGGGGSQTVVTQEPSLTVSPGGTVTITCGSSTGAVTSGNYPNWVQKKPGQAPRGLIGGTKFLAPGTPARFSGSLSGGKAALTLSGVQPEDEAEYYCVLWYSNRWVFGSGTKLTVLGGGGDKTHTCPPCPAPELLGGPSVFLFPPKPKDTLMISRTPEVTCVVVDVSHEDPEVKFNWYVDGVEVHNAKTKPCEEQYGSTYRCVSVLTVLHQDWLNGKEYKCKVSNKALPAPIEKTISKAKGQPREPQVYTLPPSREEMTKNQVSLTCLVKGFYPSDIAVEWESNGQPENNYKTTPPVLDSDGSFFLYSKLTVDKSRWQQGNVFSCSVMHEALHNHYTQKSLSLSPGKGGGGSGGGGSGGGGSGGGGSGGGGSGGGGSDKTHTCPPCPAPELLGGPSVFLFPPKPKDTLMISRTPEVTCVVVDVSHEDPEVKFNWYVDGVEVHNAKTKPCEEQYGSTYRCVSVLTVLHQDWLNGKEYKCKVSNKALPAPIEKTISKAKGQPREPQVYTLPPSREEMTKNQVSLTCLVKGFYPSDIAVEWESNGQPENNYKTTPPVLDSDGSFFLYSKLTVDKSRWQQGNVFSCSVMHEALHNHYTQKSLSLSPGK

SEQ ID NO: 2283 - protein, 1228 aa, Artificial Sequence
  Synthetic
EVQLVESGGGLVQPGGSLRLSCAASGFTFHDYPMHWVRQAPGKCLEWVSGISWNSDYIVYADSVKGRFTISRDNAKNSLYLQMNSLRPEDTALYYCAKDTAYGGKYYAFDYWGQGTPVTVSSGGGGQGGGGQGGGGQEIQMTQSPSSLSASVGDRVTITCRASQGISDYLAWYQQKPGKVPKLLIYAASTLQSGVPSRFSGSGSGTDFTLTISSLQPEDVATYYCQKYNSAPYTFGCGTKLEIKSGGGGQQVQLVQSGAEVKKPGASVKVSCKASGYTFTSYGISWVRQAPGQCLEWMGWISAYNGNTIYAQKFQGRVTLTRDTSTSTAYMELRSLRSDDTAMYYCARDPDYYGSGSYSDYWGQGTLVTVSSGGGGQGGGGQGGGGQEIVLTQSPATLSVSPGERATLSCRASQSVSSNLAWYQQKPGQAPRLLIYGASSRATGIPARFSGSGSGTEFTLTISSLQSEDFAVYYCQQYHSWPLLTFGCGTKVEIKSGGGGQEVQLVESGGGLVQPGGSLKLSCAASGFTFNKYAINWVRQAPGKGLEWVARIRSKYNNYATYYADAVKDRFTISRDDSKNTVYLQMNNLKTEDTAVYYCARAGNFGSSYISYWAYWGQGTLVTVSSGGGGQGGGGQGGGGQQTVVTQEPSLTVSPGGTVTITCGSSTGAVTSGNYPNWVQKKPGQAPRGLIGGTKFLAPGTPARFSGSLSGGKAALTLSGVQPEDEAEYYCVLWYSNRWVFGSGTKLTVLGGGGCPPCPAPELLGGPSVFLFPPKPKDTLMISRTPEVTCVVVDVSHEEPEVKFNWYVDGVEVHNAKTKPCEEQYGSTYRCVSVLTVLHQDWLNGKEYKCKVSNKALPAPIEKTISKAKGQPREPQVYTLPPSREEMTKNQVSLTCLVKGFYPSDIAVEWESNGQPENNYKTTPPVLDSDGSFFLYSKLTVDKSRWQQGNVFSCSVMHEALHNHYTQKSLSLSPGKGGGGQGGGGQGGGGQGGGGQGGGGQGGGGQCPPCPAPELLGGPSVFLFPPKPKDTLMISRTPEVTCVVVDVSHEEPEVKFNWYVDGVEVHNAKTKPCEEQYGSTYRCVSVLTVLHQDWLNGKEYKCKVSNKALPAPIEKTISKAKGQPREPQVYTLPPSREEMTKNQVSLTCLVKGFYPSDIAVEWESNGQPENNYKTTPPVLDSDGSFFLYSKLTVDKSRWQQGNVFSCSVMHEALHNHYTQKSLSLSPGK

SEQ ID NO: 2284 - protein, 495 aa, Artificial Sequence
  Synthetic
EVQLVESGGGLVQPGGSLRLSCAASGFTFHDYPMHWVRQAPGKCLEWVSGISWNSDYIVYADSVKGRFTISRDNAKNSLYLQMNSLRPEDTALYYCAKDTAYGGKYYAFDYWGQGTPVTVSSGGGGSGGGGSGGGGSDIQMTQSPSSLSASVGDRVTITCRASQGISDYLAWYQQKPGKVPKLLIYAASTLQSGVPSRFSGSGSGTDFTLTISSLQPEDVATYYCQKYNSAPYTFGCGTKLEIKSGGGGSQVQLVQSGAEVKKPGASVKVSCKASGYTFTTYGISWVRQAPGQCLEWMGWISPKNGVTTYAQKFQGRVTITADESTSTAYMELSRLTSDDTAMYYCARDPDYYGSGSYSDYWGQGTLVTVSSGGGGSGGGGSGGGGSEIVLTQSPATLSVSPGERATLSCRASQSVSSNLAWYQQKPGQAPRLLIYGASSRATGIPARFSGSGSGTEFTLTISSLQSEDFAVYYCQQYHSWPLLTFGCGTKVEIK

SEQ ID NO: 2285 - protein, 495 aa, Artificial Sequence
  Synthetic
EVQLVESGGGLVQPGGSLRLSCAASGFTFHDYPMHWVRQAPGKCLEWVSGISWNSDYIVYADSVKGRFTISRDNAKNSLYLQMNSLRPEDTALYYCAKDTAYGGKYYAFDYWGQGTPVTVSSGGGGQGGGGQGGGGQEIQMTQSPSSLSASVGDRVTITCRASQGISDYLAWYQQKPGKVPKLLIYAASTLQSGVPSRFSGSGSGTDFTLTISSLQPEDVATYYCQKYNSAPYTFGCGTKLEIKSGGGGQQVQLVQSGAEVKKPGASVKVSCKASGYTFTTYGISWVRQAPGQCLEWMGWISPKNGVTTYAQKFQGRVTITADESTSTAYMELSRLTSDDTAMYYCARDPDYYGSGSYSDYWGQGTLVTVSSGGGGQGGGGQGGGGQEIVLTQSPATLSVSPGERATLSCRASQSVSSNLAWYQQKPGQAPRLLIYGASSRATGIPARFSGSGSGTEFTLTISSLQSEDFAVYYCQQYHSWPLLTFGCGTKVEIK

SEQ ID NO: 2286 - protein, 750 aa, Artificial Sequence
  Synthetic
EVQLVESGGGLVQPGGSLRLSCAASGFTFHDYPMHWVRQAPGKCLEWVSGISWNSDYIVYADSVKGRFTISRDNAKNSLYLQMNSLRPEDTALYYCAKDTAYGGKYYAFDYWGQGTPVTVSSGGGGSGGGGSGGGGSDIQMTQSPSSLSASVGDRVTITCRASQGISDYLAWYQQKPGKVPKLLIYAASTLQSGVPSRFSGSGSGTDFTLTISSLQPEDVATYYCQKYNSAPYTFGCGTKLEIKSGGGGSQVQLVQSGAEVKKPGASVKVSCKASGYTFTTYGISWVRQAPGQCLEWMGWISPKNGVTTYAQKFQGRVTITADESTSTAYMELSRLTSDDTAMYYCARDPDYYGSGSYSDYWGQGTLVTVSSGGGGSGGGGSGGGGSEIVLTQSPATLSVSPGERATLSCRASQSVSSNLAWYQQKPGQAPRLLIYGASSRATGIPARFSGSGSGTEFTLTISSLQSEDFAVYYCQQYHSWPLLTFGCGTKVEIKSGGGGSEVQLVESGGGLVQPGGSLKLSCAASGFTFNKYAMNWVRQAPGKGLEWVARIRSKYNNYATYYADSVKDRFTISRDDSKNTAYLQMNNLKTEDTAVYYCVRHGNFGNSYISYWAYWGQGTLVTVSSGGGGSGGGGSGGGGSQTVVTQEPSLTVSPGGTVTLTCGSSTGAVTSGNYPNWVQQKPGQAPRGLIGGTKFLAPGTPARFSGSLLGGKAALTLSGVQPEDEAEYYCVLWYSNRWVFGGGTKLTVL

SEQ ID NO: 2287 - protein, 750 aa, Artificial Sequence
  Synthetic
EVQLVESGGGLVQPGGSLRLSCAASGFTFHDYPMHWVRQAPGKCLEWVSGISWNSDYIVYADSVKGRFTISRDNAKNSLYLQMNSLRPEDTALYYCAKDTAYGGKYYAFDYWGQGTPVTVSSGGGGQGGGGQGGGGQEIQMTQSPSSLSASVGDRVTITCRASQGISDYLAWYQQKPGKVPKLLIYAASTLQSGVPSRFSGSGSGTDFTLTISSLQPEDVATYYCQKYNSAPYTFGCGTKLEIKSGGGGQQVQLVQSGAEVKKPGASVKVSCKASGYTFTTYGISWVRQAPGQCLEWMGWISPKNGVTTYAQKFQGRVTITADESTSTAYMELSRLTSDDTAMYYCARDPDYYGSGSYSDYWGQGTLVTVSSGGGGQGGGGQGGGGQEIVLTQSPATLSVSPGERATLSCRASQSVSSNLAWYQQKPGQAPRLLIYGASSRATGIPARFSGSGSGTEFTLTISSLQSEDFAVYYCQQYHSWPLLTFGCGTKVEIKSGGGGQEVQLVESGGGLVQPGGSLKLSCAASGFTFNKYAMNWVRQAPGKGLEWVARIRSKYNNYATYYADSVKDRFTISRDDSKNTAYLQMNNLKTEDTAVYYCVRHGNFGNSYISYWAYWGQGTLVTVSSGGGGQGGGGQGGGGQQTVVTQEPSLTVSPGGTVTLTCGSSTGAVTSGNYPNWVQQKPGQAPRGLIGGTKFLAPGTPARFSGSLLGGKAALTLSGVQPEDEAEYYCVLWYSNRWVFGGGTKLTVL

SEQ ID NO: 2288 - protein, 750 aa, Artificial Sequence
  Synthetic
EVQLVESGGGLVQPGGSLRLSCAASGFTFHDYPMHWVRQAPGKCLEWVSGISWNSDYIVYADSVKGRFTISRDNAKNSLYLQMNSLRPEDTALYYCAKDTAYGGKYYAFDYWGQGTPVTVSSGGGGSGGGGSGGGGSDIQMTQSPSSLSASVGDRVTITCRASQGISDYLAWYQQKPGKVPKLLIYAASTLQSGVPSRFSGSGSGTDFTLTISSLQPEDVATYYCQKYNSAPYTFGCGTKLEIKSGGGGSQVQLVQSGAEVKKPGASVKVSCKASGYTFTTYGISWVRQAPGQCLEWMGWISPKNGVTTYAQKFQGRVTITADESTSTAYMELSRLTSDDTAMYYCARDPDYYGSGSYSDYWGQGTLVTVSSGGGGSGGGGSGGGGSEIVLTQSPATLSVSPGERATLSCRASQSVSSNLAWYQQKPGQAPRLLIYGASSRATGIPARFSGSGSGTEFTLTISSLQSEDFAVYYCQQYHSWPLLTFGCGTKVEIKSGGGGSEVQLVESGGGLVQPGGSLKLSCAASGFTFNKYAINWVRQAPGKGLEWVARIRSKYNNYATYYADAVKDRFTISRDDSKNTVYLQMNNLKTEDTAVYYCARAGNFGSSYISYWAYWGQGTLVTVSSGGGGSGGGGSGGGGSQTVVTQEPSLTVSPGGTVTITCGSSTGAVTSGNYPNWVQKKPGQAPRGLIGGTKFLAPGTPARFSGSLSGGKAALTLSGVQPEDEAEYYCVLWYSNRWVFGSGTKLTVL

SEQ ID NO: 2289 - protein, 750 aa, Artificial Sequence
  Synthetic
EVQLVESGGGLVQPGGSLRLSCAASGFTFHDYPMHWVRQAPGKCLEWVSGISWNSDYIVYADSVKGRFTISRDNAKNSLYLQMNSLRPEDTALYYCAKDTAYGGKYYAFDYWGQGTPVTVSSGGGGQGGGGQGGGGQEIQMTQSPSSLSASVGDRVTITCRASQGISDYLAWYQQKPGKVPKLLIYAASTLQSGVPSRFSGSGSGTDFTLTISSLQPEDVATYYCQKYNSAPYTFGCGTKLEIKSGGGGQQVQLVQSGAEVKKPGASVKVSCKASGYTFTTYGISWVRQAPGQCLEWMGWISPKNGVTTYAQKFQGRVTITADESTSTAYMELSRLTSDDTAMYYCARDPDYYGSGSYSDYWGQGTLVTVSSGGGGQGGGGQGGGGQEIVLTQSPATLSVSPGERATLSCRASQSVSSNLAWYQQKPGQAPRLLIYGASSRATGIPARFSGSGSGTEFTLTISSLQSEDFAVYYCQQYHSWPLLTFGCGTKVEIKSGGGGQEVQLVESGGGLVQPGGSLKLSCAASGFTFNKYAINWVRQAPGKGLEWVARIRSKYNNYATYYADAVKDRFTISRDDSKNTVYLQMNNLKTEDTAVYYCARAGNFGSSYISYWAYWGQGTLVTVSSGGGGQGGGGQGGGGQQTVVTQEPSLTVSPGGTVTITCGSSTGAVTSGNYPNWVQKKPGQAPRGLIGGTKFLAPGTPARFSGSLSGGKAALTLSGVQPEDEAEYYCVLWYSNRWVFGSGTKLTVL

SEQ ID NO: 2290 - protein, 1238 aa, Artificial Sequence
  Synthetic
EVQLVESGGGLVQPGGSLRLSCAASGFTFHDYPMHWVRQAPGKCLEWVSGISWNSDYIVYADSVKGRFTISRDNAKNSLYLQMNSLRPEDTALYYCAKDTAYGGKYYAFDYWGQGTPVTVSSGGGGSGGGGSGGGGSDIQMTQSPSSLSASVGDRVTITCRASQGISDYLAWYQQKPGKVPKLLIYAASTLQSGVPSRFSGSGSGTDFTLTISSLQPEDVATYYCQKYNSAPYTFGCGTKLEIKSGGGGSQVQLVQSGAEVKKPGASVKVSCKASGYTFTTYGISWVRQAPGQCLEWMGWISPKNGVTTYAQKFQGRVTITADESTSTAYMELSRLTSDDTAMYYCARDPDYYGSGSYSDYWGQGTLVTVSSGGGGSGGGGSGGGGSEIVLTQSPATLSVSPGERATLSCRASQSVSSNLAWYQQKPGQAPRLLIYGASSRATGIPARFSGSGSGTEFTLTISSLQSEDFAVYYCQQYHSWPLLTFGCGTKVEIKSGGGGSEVQLVESGGGLVQPGGSLKLSCAASGFTFNKYAMNWVRQAPGKGLEWVARIRSKYNNYATYYADSVKDRFTISRDDSKNTAYLQMNNLKTEDTAVYYCVRHGNFGNSYISYWAYWGQGTLVTVSSGGGGSGGGGSGGGGSQTVVTQEPSLTVSPGGTVTLTCGSSTGAVTSGNYPNWVQQKPGQAPRGLIGGTKFLAPGTPARFSGSLLGGKAALTLSGVQPEDEAEYYCVLWYSNRWVFGGGTKLTVLGGGGDKTHTCPPCPAPELLGGPSVFLFPPKPKDTLMISRTPEVTCVVVDVSHEDPEVKFNWYVDGVEVHNAKTKPCEEQYGSTYRCVSVLTVLHQDWLNGKEYKCKVSNKALPAPIEKTISKAKGQPREPQVYTLPPSREEMTKNQVSLTCLVKGFYPSDIAVEWESNGQPENNYKTTPPVLDSDGSFFLYSKLTVDKSRWQQGNVFSCSVMHEALHNHYTQKSLSLSPGKGGGGSGGGGSGGGGSGGGGSGGGGSGGGGSDKTHTCPPCPAPELLGGPSVFLFPPKPKDTLMISRTPEVTCVVVDVSHEDPEVKFNWYVDGVEVHNAKTKPCEEQYGSTYRCVSVLTVLHQDWLNGKEYKCKVSNKALPAPIEKTISKAKGQPREPQVYTLPPSREEMTKNQVSLTCLVKGFYPSDIAVEWESNGQPENNYKTTPPVLDSDGSFFLYSKLTVDKSRWQQGNVFSCSVMHEALHNHYTQKSLSLSPGK

SEQ ID NO: 2291 - protein, 1228 aa, Artificial Sequence
  Synthetic
EVQLVESGGGLVQPGGSLRLSCAASGFTFHDYPMHWVRQAPGKCLEWVSGISWNSDYIVYADSVKGRFTISRDNAKNSLYLQMNSLRPEDTALYYCAKDTAYGGKYYAFDYWGQGTPVTVSSGGGGQGGGGQGGGGQEIQMTQSPSSLSASVGDRVTITCRASQGISDYLAWYQQKPGKVPKLLIYAASTLQSGVPSRFSGSGSGTDFTLTISSLQPEDVATYYCQKYNSAPYTFGCGTKLEIKSGGGGQQVQLVQSGAEVKKPGASVKVSCKASGYTFTTYGISWVRQAPGQCLEWMGWISPKNGVTTYAQKFQGRVTITADESTSTAYMELSRLTSDDTAMYYCARDPDYYGSGSYSDYWGQGTLVTVSSGGGGQGGGGQGGGGQEIVLTQSPATLSVSPGERATLSCRASQSVSSNLAWYQQKPGQAPRLLIYGASSRATGIPARFSGSGSGTEFTLTISSLQSEDFAVYYCQQYHSWPLLTFGCGTKVEIKSGGGGQEVQLVESGGGLVQPGGSLKLSCAASGFTFNKYAMNWVRQAPGKGLEWVARIRSKYNNYATYYADSVKDRFTISRDDSKNTAYLQMNNLKTEDTAVYYCVRHGNFGNSYISYWAYWGQGTLVTVSSGGGGQGGGGQGGGGQQTVVTQEPSLTVSPGGTVTLTCGSSTGAVTSGNYPNWVQQKPGQAPRGLIGGTKFLAPGTPARFSGSLLGGKAALTLSGVQPEDEAEYYCVLWYSNRWVFGGGTKLTVLGGGGCPPCPAPELLGGPSVFLFPPKPKDTLMISRTPEVTCVVVDVSHEEPEVKFNWYVDGVEVHNAKTKPCEEQYGSTYRCVSVLTVLHQDWLNGKEYKCKVSNKALPAPIEKTISKAKGQPREPQVYTLPPSREEMTKNQVSLTCLVKGFYPSDIAVEWESNGQPENNYKTTPPVLDSDGSFFLYSKLTVDKSRWQQGNVFSCSVMHEALHNHYTQKSLSLSPGKGGGGQGGGGQGGGGQGGGGQGGGGQGGGGQCPPCPAPELLGGPSVFLFPPKPKDTLMISRTPEVTCVVVDVSHEEPEVKFNWYVDGVEVHNAKTKPCEEQYGSTYRCVSVLTVLHQDWLNGKEYKCKVSNKALPAPIEKTISKAKGQPREPQVYTLPPSREEMTKNQVSLTCLVKGFYPSDIAVEWESNGQPENNYKTTPPVLDSDGSFFLYSKLTVDKSRWQQGNVFSCSVMHEALHNHYTQKSLSLSPGK

SEQ ID NO: 2292 - protein, 1238 aa, Artificial Sequence
  Synthetic
EVQLVESGGGLVQPGGSLRLSCAASGFTFHDYPMHWVRQAPGKCLEWVSGISWNSDYIVYADSVKGRFTISRDNAKNSLYLQMNSLRPEDTALYYCAKDTAYGGKYYAFDYWGQGTPVTVSSGGGGSGGGGSGGGGSDIQMTQSPSSLSASVGDRVTITCRASQGISDYLAWYQQKPGKVPKLLIYAASTLQSGVPSRFSGSGSGTDFTLTISSLQPEDVATYYCQKYNSAPYTFGCGTKLEIKSGGGGSQVQLVQSGAEVKKPGASVKVSCKASGYTFTTYGISWVRQAPGQCLEWMGWISPKNGVTTYAQKFQGRVTITADESTSTAYMELSRLTSDDTAMYYCARDPDYYGSGSYSDYWGQGTLVTVSSGGGGSGGGGSGGGGSEIVLTQSPATLSVSPGERATLSCRASQSVSSNLAWYQQKPGQAPRLLIYGASSRATGIPARFSGSGSGTEFTLTISSLQSEDFAVYYCQQYHSWPLLTFGCGTKVEIKSGGGGSEVQLVESGGGLVQPGGSLKLSCAASGFTFNKYAINWVRQAPGKGLEWVARIRSKYNNYATYYADAVKDRFTISRDDSKNTVYLQMNNLKTEDTAVYYCARAGNFGSSYISYWAYWGQGTLVTVSSGGGGSGGGGSGGGGSQTVVTQEPSLTVSPGGTVTITCGSSTGAVTSGNYPNWVQKKPGQAPRGLIGGTKFLAPGTPARFSGSLSGGKAALTLSGVQPEDEAEYYCVLWYSNRWVFGSGTKLTVLGGGGDKTHTCPPCPAPELLGGPSVFLFPPKPKDTLMISRTPEVTCVVVDVSHEDPEVKFNWYVDGVEVHNAKTKPCEEQYGSTYRCVSVLTVLHQDWLNGKEYKCKVSNKALPAPIEKTISKAKGQPREPQVYTLPPSREEMTKNQVSLTCLVKGFYPSDIAVEWESNGQPENNYKTTPPVLDSDGSFFLYSKLTVDKSRWQQGNVFSCSVMHEALHNHYTQKSLSLSPGKGGGGSGGGGSGGGGSGGGGSGGGGSGGGGSDKTHTCPPCPAPELLGGPSVFLFPPKPKDTLMISRTPEVTCVVVDVSHEDPEVKFNWYVDGVEVHNAKTKPCEEQYGSTYRCVSVLTVLHQDWLNGKEYKCKVSNKALPAPIEKTISKAKGQPREPQVYTLPPSREEMTKNQVSLTCLVKGFYPSDIAVEWESNGQPENNYKTTPPVLDSDGSFFLYSKLTVDKSRWQQGNVFSCSVMHEALHNHYTQKSLSLSPGK

SEQ ID NO: 2293 - protein, 1228 aa, Artificial Sequence
  Synthetic
EVQLVESGGGLVQPGGSLRLSCAASGFTFHDYPMHWVRQAPGKCLEWVSGISWNSDYIVYADSVKGRFTISRDNAKNSLYLQMNSLRPEDTALYYCAKDTAYGGKYYAFDYWGQGTPVTVSSGGGGQGGGGQGGGGQEIQMTQSPSSLSASVGDRVTITCRASQGISDYLAWYQQKPGKVPKLLIYAASTLQSGVPSRFSGSGSGTDFTLTISSLQPEDVATYYCQKYNSAPYTFGCGTKLEIKSGGGGQQVQLVQSGAEVKKPGASVKVSCKASGYTFTTYGISWVRQAPGQCLEWMGWISPKNGVTTYAQKFQGRVTITADESTSTAYMELSRLTSDDTAMYYCARDPDYYGSGSYSDYWGQGTLVTVSSGGGGQGGGGQGGGGQEIVLTQSPATLSVSPGERATLSCRASQSVSSNLAWYQQKPGQAPRLLIYGASSRATGIPARFSGSGSGTEFTLTISSLQSEDFAVYYCQQYHSWPLLTFGCGTKVEIKSGGGGQEVQLVESGGGLVQPGGSLKLSCAASGFTFNKYAINWVRQAPGKGLEWVARIRSKYNNYATYYADAVKDRFTISRDDSKNTVYLQMNNLKTEDTAVYYCARAGNFGSSYISYWAYWGQGTLVTVSSGGGGQGGGGQGGGGQQTVVTQEPSLTVSPGGTVTITCGSSTGAVTSGNYPNWVQKKPGQAPRGLIGGTKFLAPGTPARFSGSLSGGKAALTLSGVQPEDEAEYYCVLWYSNRWVFGSGTKLTVLGGGGCPPCPAPELLGGPSVFLFPPKPKDTLMISRTPEVTCVVVDVSHEEPEVKFNWYVDGVEVHNAKTKPCEEQYGSTYRCVSVLTVLHQDWLNGKEYKCKVSNKALPAPIEKTISKAKGQPREPQVYTLPPSREEMTKNQVSLTCLVKGFYPSDIAVEWESNGQPENNYKTTPPVLDSDGSFFLYSKLTVDKSRWQQGNVFSCSVMHEALHNHYTQKSLSLSPGKGGGGQGGGGQGGGGQGGGGQGGGGQGGGGQCPPCPAPELLGGPSVFLFPPKPKDTLMISRTPEVTCVVVDVSHEEPEVKFNWYVDGVEVHNAKTKPCEEQYGSTYRCVSVLTVLHQDWLNGKEYKCKVSNKALPAPIEKTISKAKGQPREPQVYTLPPSREEMTKNQVSLTCLVKGFYPSDIAVEWESNGQPENNYKTTPPVLDSDGSFFLYSKLTVDKSRWQQGNVFSCSVMHEALHNHYTQKSLSLSPGK

SEQ ID NO: 2294 - protein, 495 aa, Artificial Sequence
  Synthetic
EVQLVESGGGLVQPGGSLRLSCAASGFTFHDYPMHWVRQAPGKCLEWVSGISWNSDYIVYADSVKGRFTISRDNAKNSLYLQMNSLRPEDTALYYCAKDTAYGGKYYAFDYWGQGTPVTVSSGGGGSGGGGSGGGGSDIQMTQSPSSLSASVGDRVTITCRASQGISDYLAWYQQKPGKVPKLLIYAASTLQSGVPSRFSGSGSGTDFTLTISSLQPEDVATYYCQKYNSAPYTFGCGTKLEIKSGGGGSQVQLVQSGGEVKKPGASVKVSCKASGYTFTSYGISWVRQAPGQCLEWMGWISAYTGETLYAQKLQGRVTMTRDTSTSTAYMELRSLRSDDTAVYYCARDPDYYGSGSYSDYWGQGTLVTVSSGGGGSGGGGSGGGGSEIVLTQSPATLSVSPGERATLSCRASQSVSSNLAWYQQKPGQAPRLLIYGASSRATGIPARFSGSGSGTEFTLTISSLQSEDFAVYYCQQYHSWPLLTFGCGTKVEIK

SEQ ID NO: 2295 - protein, 495 aa, Artificial Sequence
  Synthetic
EVQLVESGGGLVQPGGSLRLSCAASGFTFHDYPMHWVRQAPGKCLEWVSGISWNSDYIVYADSVKGRFTISRDNAKNSLYLQMNSLRPEDTALYYCAKDTAYGGKYYAFDYWGQGTPVTVSSGGGGQGGGGQGGGGQEIQMTQSPSSLSASVGDRVTITCRASQGISDYLAWYQQKPGKVPKLLIYAASTLQSGVPSRFSGSGSGTDFTLTISSLQPEDVATYYCQKYNSAPYTFGCGTKLEIKSGGGGQQVQLVQSGGEVKKPGASVKVSCKASGYTFTSYGISWVRQAPGQCLEWMGWISAYTGETLYAQKLQGRVTMTRDTSTSTAYMELRSLRSDDTAVYYCARDPDYYGSGSYSDYWGQGTLVTVSSGGGGQGGGGQGGGGQEIVLTQSPATLSVSPGERATLSCRASQSVSSNLAWYQQKPGQAPRLLIYGASSRATGIPARFSGSGSGTEFTLTISSLQSEDFAVYYCQQYHSWPLLTFGCGTKVEIK

SEQ ID NO: 2296 - protein, 750 aa, Artificial Sequence
  Synthetic
EVQLVESGGGLVQPGGSLRLSCAASGFTFHDYPMHWVRQAPGKCLEWVSGISWNSDYIVYADSVKGRFTISRDNAKNSLYLQMNSLRPEDTALYYCAKDTAYGGKYYAFDYWGQGTPVTVSSGGGGSGGGGSGGGGSDIQMTQSPSSLSASVGDRVTITCRASQGISDYLAWYQQKPGKVPKLLIYAASTLQSGVPSRFSGSGSGTDFTLTISSLQPEDVATYYCQKYNSAPYTFGCGTKLEIKSGGGGSQVQLVQSGGEVKKPGASVKVSCKASGYTFTSYGISWVRQAPGQCLEWMGWISAYTGETLYAQKLQGRVTMTRDTSTSTAYMELRSLRSDDTAVYYCARDPDYYGSGSYSDYWGQGTLVTVSSGGGGSGGGGSGGGGSEIVLTQSPATLSVSPGERATLSCRASQSVSSNLAWYQQKPGQAPRLLIYGASSRATGIPARFSGSGSGTEFTLTISSLQSEDFAVYYCQQYHSWPLLTFGCGTKVEIKSGGGGSEVQLVESGGGLVQPGGSLKLSCAASGFTFNKYAMNWVRQAPGKGLEWVARIRSKYNNYATYYADSVKDRFTISRDDSKNTAYLQMNNLKTEDTAVYYCVRHGNFGNSYISYWAYWGQGTLVTVSSGGGGSGGGGSGGGGSQTVVTQEPSLTVSPGGTVTLTCGSSTGAVTSGNYPNWVQQKPGQAPRGLIGGTKFLAPGTPARFSGSLLGGKAALTLSGVQPEDEAEYYCVLWYSNRWVFGGGTKLTVL

SEQ ID NO: 2297 - protein, 750 aa, Artificial Sequence
  Synthetic
EVQLVESGGGLVQPGGSLRLSCAASGFTFHDYPMHWVRQAPGKCLEWVSGISWNSDYIVYADSVKGRFTISRDNAKNSLYLQMNSLRPEDTALYYCAKDTAYGGKYYAFDYWGQGTPVTVSSGGGGQGGGGQGGGGQEIQMTQSPSSLSASVGDRVTITCRASQGISDYLAWYQQKPGKVPKLLIYAASTLQSGVPSRFSGSGSGTDFTLTISSLQPEDVATYYCQKYNSAPYTFGCGTKLEIKSGGGGQQVQLVQSGGEVKKPGASVKVSCKASGYTFTSYGISWVRQAPGQCLEWMGWISAYTGETLYAQKLQGRVTMTRDTSTSTAYMELRSLRSDDTAVYYCARDPDYYGSGSYSDYWGQGTLVTVSSGGGGQGGGGQGGGGQEIVLTQSPATLSVSPGERATLSCRASQSVSSNLAWYQQKPGQAPRLLIYGASSRATGIPARFSGSGSGTEFTLTISSLQSEDFAVYYCQQYHSWPLLTFGCGTKVEIKSGGGGQEVQLVESGGGLVQPGGSLKLSCAASGFTFNKYAMNWVRQAPGKGLEWVARIRSKYNNYATYYADSVKDRFTISRDDSKNTAYLQMNNLKTEDTAVYYCVRHGNFGNSYISYWAYWGQGTLVTVSSGGGGQGGGGQGGGGQQTVVTQEPSLTVSPGGTVTLTCGSSTGAVTSGNYPNWVQQKPGQAPRGLIGGTKFLAPGTPARFSGSLLGGKAALTLSGVQPEDEAEYYCVLWYSNRWVFGGGTKLTVL

SEQ ID NO: 2298 - protein, 750 aa, Artificial Sequence
  Synthetic
EVQLVESGGGLVQPGGSLRLSCAASGFTFHDYPMHWVRQAPGKCLEWVSGISWNSDYIVYADSVKGRFTISRDNAKNSLYLQMNSLRPEDTALYYCAKDTAYGGKYYAFDYWGQGTPVTVSSGGGGSGGGGSGGGGSDIQMTQSPSSLSASVGDRVTITCRASQGISDYLAWYQQKPGKVPKLLIYAASTLQSGVPSRFSGSGSGTDFTLTISSLQPEDVATYYCQKYNSAPYTFGCGTKLEIKSGGGGSQVQLVQSGGEVKKPGASVKVSCKASGYTFTSYGISWVRQAPGQCLEWMGWISAYTGETLYAQKLQGRVTMTRDTSTSTAYMELRSLRSDDTAVYYCARDPDYYGSGSYSDYWGQGTLVTVSSGGGGSGGGGSGGGGSEIVLTQSPATLSVSPGERATLSCRASQSVSSNLAWYQQKPGQAPRLLIYGASSRATGIPARFSGSGSGTEFTLTISSLQSEDFAVYYCQQYHSWPLLTFGCGTKVEIKSGGGGSEVQLVESGGGLVQPGGSLKLSCAASGFTFNKYAINWVRQAPGKGLEWVARIRSKYNNYATYYADAVKDRFTISRDDSKNTVYLQMNNLKTEDTAVYYCARAGNFGSSYISYWAYWGQGTLVTVSSGGGGSGGGGSGGGGSQTVVTQEPSLTVSPGGTVTITCGSSTGAVTSGNYPNWVQKKPGQAPRGLIGGTKFLAPGTPARFSGSLSGGKAALTLSGVQPEDEAEYYCVLWYSNRWVFGSGTKLTVL

SEQ ID NO: 2299 - protein, 750 aa, Artificial Sequence
  Synthetic
EVQLVESGGGLVQPGGSLRLSCAASGFTFHDYPMHWVRQAPGKCLEWVSGISWNSDYIVYADSVKGRFTISRDNAKNSLYLQMNSLRPEDTALYYCAKDTAYGGKYYAFDYWGQGTPVTVSSGGGGQGGGGQGGGGQEIQMTQSPSSLSASVGDRVTITCRASQGISDYLAWYQQKPGKVPKLLIYAASTLQSGVPSRFSGSGSGTDFTLTISSLQPEDVATYYCQKYNSAPYTFGCGTKLEIKSGGGGQQVQLVQSGGEVKKPGASVKVSCKASGYTFTSYGISWVRQAPGQCLEWMGWISAYTGETLYAQKLQGRVTMTRDTSTSTAYMELRSLRSDDTAVYYCARDPDYYGSGSYSDYWGQGTLVTVSSGGGGQGGGGQGGGGQEIVLTQSPATLSVSPGERATLSCRASQSVSSNLAWYQQKPGQAPRLLIYGASSRATGIPARFSGSGSGTEFTLTISSLQSEDFAVYYCQQYHSWPLLTFGCGTKVEIKSGGGGQEVQLVESGGGLVQPGGSLKLSCAASGFTFNKYAINWVRQAPGKGLEWVARIRSKYNNYATYYADAVKDRFTISRDDSKNTVYLQMNNLKTEDTAVYYCARAGNFGSSYISYWAYWGQGTLVTVSSGGGGQGGGGQGGGGQQTVVTQEPSLTVSPGGTVTITCGSSTGAVTSGNYPNWVQKKPGQAPRGLIGGTKFLAPGTPARFSGSLSGGKAALTLSGVQPEDEAEYYCVLWYSNRWVFGSGTKLTVL

SEQ ID NO: 2300 - protein, 1238 aa, Artificial Sequence
  Synthetic
EVQLVESGGGLVQPGGSLRLSCAASGFTFHDYPMHWVRQAPGKCLEWVSGISWNSDYIVYADSVKGRFTISRDNAKNSLYLQMNSLRPEDTALYYCAKDTAYGGKYYAFDYWGQGTPVTVSSGGGGSGGGGSGGGGSDIQMTQSPSSLSASVGDRVTITCRASQGISDYLAWYQQKPGKVPKLLIYAASTLQSGVPSRFSGSGSGTDFTLTISSLQPEDVATYYCQKYNSAPYTFGCGTKLEIKSGGGGSQVQLVQSGGEVKKPGASVKVSCKASGYTFTSYGISWVRQAPGQCLEWMGWISAYTGETLYAQKLQGRVTMTRDTSTSTAYMELRSLRSDDTAVYYCARDPDYYGSGSYSDYWGQGTLVTVSSGGGGSGGGGSGGGGSEIVLTQSPATLSVSPGERATLSCRASQSVSSNLAWYQQKPGQAPRLLIYGASSRATGIPARFSGSGSGTEFTLTISSLQSEDFAVYYCQQYHSWPLLTFGCGTKVEIKSGGGGSEVQLVESGGGLVQPGGSLKLSCAASGFTFNKYAMNWVRQAPGKGLEWVARIRSKYNNYATYYADSVKDRFTISRDDSKNTAYLQMNNLKTEDTAVYYCVRHGNFGNSYISYWAYWGQGTLVTVSSGGGGSGGGGSGGGGSQTVVTQEPSLTVSPGGTVTLTCGSSTGAVTSGNYPNWVQQKPGQAPRGLIGGTKFLAPGTPARFSGSLLGGKAALTLSGVQPEDEAEYYCVLWYSNRWVFGGGTKLTVLGGGGDKTHTCPPCPAPELLGGPSVFLFPPKPKDTLMISRTPEVTCVVVDVSHEDPEVKFNWYVDGVEVHNAKTKPCEEQYGSTYRCVSVLTVLHQDWLNGKEYKCKVSNKALPAPIEKTISKAKGQPREPQVYTLPPSREEMTKNQVSLTCLVKGFYPSDIAVEWESNGQPENNYKTTPPVLDSDGSFFLYSKLTVDKSRWQQGNVFSCSVMHEALHNHYTQKSLSLSPGKGGGGSGGGGSGGGGSGGGGSGGGGSGGGGSDKTHTCPPCPAPELLGGPSVFLFPPKPKDTLMISRTPEVTCVVVDVSHEDPEVKFNWYVDGVEVHNAKTKPCEEQYGSTYRCVSVLTVLHQDWLNGKEYKCKVSNKALPAPIEKTISKAKGQPREPQVYTLPPSREEMTKNQVSLTCLVKGFYPSDIAVEWESNGQPENNYKTTPPVLDSDGSFFLYSKLTVDKSRWQQGNVFSCSVMHEALHNHYTQKSLSLSPGK

SEQ ID NO: 2301 - protein, 1228 aa, Artificial Sequence
  Synthetic
EVQLVESGGGLVQPGGSLRLSCAASGFTFHDYPMHWVRQAPGKCLEWVSGISWNSDYIVYADSVKGRFTISRDNAKNSLYLQMNSLRPEDTALYYCAKDTAYGGKYYAFDYWGQGTPVTVSSGGGGQGGGGQGGGGQEIQMTQSPSSLSASVGDRVTITCRASQGISDYLAWYQQKPGKVPKLLIYAASTLQSGVPSRFSGSGSGTDFTLTISSLQPEDVATYYCQKYNSAPYTFGCGTKLEIKSGGGGQQVQLVQSGGEVKKPGASVKVSCKASGYTFTSYGISWVRQAPGQCLEWMGWISAYTGETLYAQKLQGRVTMTRDTSTSTAYMELRSLRSDDTAVYYCARDPDYYGSGSYSDYWGQGTLVTVSSGGGGQGGGGQGGGGQEIVLTQSPATLSVSPGERATLSCRASQSVSSNLAWYQQKPGQAPRLLIYGASSRATGIPARFSGSGSGTEFTLTISSLQSEDFAVYYCQQYHSWPLLTFGCGTKVEIKSGGGGQEVQLVESGGGLVQPGGSLKLSCAASGFTFNKYAMNWVRQAPGKGLEWVARIRSKYNNYATYYADSVKDRFTISRDDSKNTAYLQMNNLKTEDTAVYYCVRHGNFGNSYISYWAYWGQGTLVTVSSGGGGQGGGGQGGGGQQTVVTQEPSLTVSPGGTVTLTCGSSTGAVTSGNYPNWVQQKPGQAPRGLIGGTKFLAPGTPARFSGSLLGGKAALTLSGVQPEDEAEYYCVLWYSNRWVFGGGTKLTVLGGGGCPPCPAPELLGGPSVFLFPPKPKDTLMISRTPEVTCVVVDVSHEEPEVKFNWYVDGVEVHNAKTKPCEEQYGSTYRCVSVLTVLHQDWLNGKEYKCKVSNKALPAPIEKTISKAKGQPREPQVYTLPPSREEMTKNQVSLTCLVKGFYPSDIAVEWESNGQPENNYKTTPPVLDSDGSFFLYSKLTVDKSRWQQGNVFSCSVMHEALHNHYTQKSLSLSPGKGGGGQGGGGQGGGGQGGGGQGGGGQGGGGQCPPCPAPELLGGPSVFLFPPKPKDTLMISRTPEVTCVVVDVSHEEPEVKFNWYVDGVEVHNAKTKPCEEQYGSTYRCVSVLTVLHQDWLNGKEYKCKVSNKALPAPIEKTISKAKGQPREPQVYTLPPSREEMTKNQVSLTCLVKGFYPSDIAVEWESNGQPENNYKTTPPVLDSDGSFFLYSKLTVDKSRWQQGNVFSCSVMHEALHNHYTQKSLSLSPGK

SEQ ID NO: 2302 - protein, 1238 aa, Artificial Sequence
  Synthetic
EVQLVESGGGLVQPGGSLRLSCAASGFTFHDYPMHWVRQAPGKCLEWVSGISWNSDYIVYADSVKGRFTISRDNAKNSLYLQMNSLRPEDTALYYCAKDTAYGGKYYAFDYWGQGTPVTVSSGGGGSGGGGSGGGGSDIQMTQSPSSLSASVGDRVTITCRASQGISDYLAWYQQKPGKVPKLLIYAASTLQSGVPSRFSGSGSGTDFTLTISSLQPEDVATYYCQKYNSAPYTFGCGTKLEIKSGGGGSQVQLVQSGGEVKKPGASVKVSCKASGYTFTSYGISWVRQAPGQCLEWMGWISAYTGETLYAQKLQGRVTMTRDTSTSTAYMELRSLRSDDTAVYYCARDPDYYGSGSYSDYWGQGTLVTVSSGGGGSGGGGSGGGGSEIVLTQSPATLSVSPGERATLSCRASQSVSSNLAWYQQKPGQAPRLLIYGASSRATGIPARFSGSGSGTEFTLTISSLQSEDFAVYYCQQYHSWPLLTFGCGTKVEIKSGGGGSEVQLVESGGGLVQPGGSLKLSCAASGFTFNKYAINWVRQAPGKGLEWVARIRSKYNNYATYYADAVKDRFTISRDDSKNTVYLQMNNLKTEDTAVYYCARAGNFGSSYISYWAYWGQGTLVTVSSGGGGSGGGGSGGGGSQTVVTQEPSLTVSPGGTVTITCGSSTGAVTSGNYPNWVQKKPGQAPRGLIGGTKFLAPGTPARFSGSLSGGKAALTLSGVQPEDEAEYYCVLWYSNRWVFGSGTKLTVLGGGGDKTHTCPPCPAPELLGGPSVFLFPPKPKDTLMISRTPEVTCVVVDVSHEDPEVKFNWYVDGVEVHNAKTKPCEEQYGSTYRCVSVLTVLHQDWLNGKEYKCKVSNKALPAPIEKTISKAKGQPREPQVYTLPPSREEMTKNQVSLTCLVKGFYPSDIAVEWESNGQPENNYKTTPPVLDSDGSFFLYSKLTVDKSRWQQGNVFSCSVMHEALHNHYTQKSLSLSPGKGGGGSGGGGSGGGGSGGGGSGGGGSGGGGSDKTHTCPPCPAPELLGGPSVFLFPPKPKDTLMISRTPEVTCVVVDVSHEDPEVKFNWYVDGVEVHNAKTKPCEEQYGSTYRCVSVLTVLHQDWLNGKEYKCKVSNKALPAPIEKTISKAKGQPREPQVYTLPPSREEMTKNQVSLTCLVKGFYPSDIAVEWESNGQPENNYKTTPPVLDSDGSFFLYSKLTVDKSRWQQGNVFSCSVMHEALHNHYTQKSLSLSPGK

SEQ ID NO: 2303 - protein, 1228 aa, Artificial Sequence
  Synthetic
EVQLVESGGGLVQPGGSLRLSCAASGFTFHDYPMHWVRQAPGKCLEWVSGISWNSDYIVYADSVKGRFTISRDNAKNSLYLQMNSLRPEDTALYYCAKDTAYGGKYYAFDYWGQGTPVTVSSGGGGQGGGGQGGGGQEIQMTQSPSSLSASVGDRVTITCRASQGISDYLAWYQQKPGKVPKLLIYAASTLQSGVPSRFSGSGSGTDFTLTISSLQPEDVATYYCQKYNSAPYTFGCGTKLEIKSGGGGQQVQLVQSGGEVKKPGASVKVSCKASGYTFTSYGISWVRQAPGQCLEWMGWISAYTGETLYAQKLQGRVTMTRDTSTSTAYMELRSLRSDDTAVYYCARDPDYYGSGSYSDYWGQGTLVTVSSGGGGQGGGGQGGGGQEIVLTQSPATLSVSPGERATLSCRASQSVSSNLAWYQQKPGQAPRLLIYGASSRATGIPARFSGSGSGTEFTLTISSLQSEDFAVYYCQQYHSWPLLTFGCGTKVEIKSGGGGQEVQLVESGGGLVQPGGSLKLSCAASGFTFNKYAINWVRQAPGKGLEWVARIRSKYNNYATYYADAVKDRFTISRDDSKNTVYLQMNNLKTEDTAVYYCARAGNFGSSYISYWAYWGQGTLVTVSSGGGGQGGGGQGGGGQQTVVTQEPSLTVSPGGTVTITCGSSTGAVTSGNYPNWVQKKPGQAPRGLIGGTKFLAPGTPARFSGSLSGGKAALTLSGVQPEDEAEYYCVLWYSNRWVFGSGTKLTVLGGGGCPPCPAPELLGGPSVFLFPPKPKDTLMISRTPEVTCVVVDVSHEEPEVKFNWYVDGVEVHNAKTKPCEEQYGSTYRCVSVLTVLHQDWLNGKEYKCKVSNKALPAPIEKTISKAKGQPREPQVYTLPPSREEMTKNQVSLTCLVKGFYPSDIAVEWESNGQPENNYKTTPPVLDSDGSFFLYSKLTVDKSRWQQGNVFSCSVMHEALHNHYTQKSLSLSPGKGGGGQGGGGQGGGGQGGGGQGGGGQGGGGQCPPCPAPELLGGPSVFLFPPKPKDTLMISRTPEVTCVVVDVSHEEPEVKFNWYVDGVEVHNAKTKPCEEQYGSTYRCVSVLTVLHQDWLNGKEYKCKVSNKALPAPIEKTISKAKGQPREPQVYTLPPSREEMTKNQVSLTCLVKGFYPSDIAVEWESNGQPENNYKTTPPVLDSDGSFFLYSKLTVDKSRWQQGNVFSCSVMHEALHNHYTQKSLSLSPGK

SEQ ID NO: 2304 - protein, 495 aa, Artificial Sequence
  Synthetic
EVQLVESGGGLVQPGGSLRLSCAASGFTFHDYPMHWVRQAPGKCLEWVSGISWNSDYIVYADSVKGRFTISRDNAKNSLYLQMNSLRPEDTALYYCAKDTAYGGKYYAFDYWGQGTPVTVSSGGGGSGGGGSGGGGSDIQMTQSPSSLSASVGDRVTITCRASQGISDYLAWYQQKPGKVPKLLIYAASTLQSGVPSRFSGSGSGTDFTLTISSLQPEDVATYYCQKYNSAPYTFGCGTKLEIKSGGGGSQVQLVQSGGEVKKPGASVKVSCKASGYTFTSYGISWVRQAPGQCLEWMGWISPQTGNAIYAQKLQGRVTMTRDTSTSTAYMELRSLRSDDTAVYYCARDPDYYGSGSYSDYWGQGTLVTVSSGGGGSGGGGSGGGGSEIVLTQSPATLSVSPGERATLSCRASQSVSSNLAWYQQKPGQAPRLLIYGASSRATGIPARFSGSGSGTEFTLTISSLQSEDFAVYYCQQYHSWPLLTFGCGTKVEIK

SEQ ID NO: 2305 - protein, 495 aa, Artificial Sequence
  Synthetic
EVQLVESGGGLVQPGGSLRLSCAASGFTFHDYPMHWVRQAPGKCLEWVSGISWNSDYIVYADSVKGRFTISRDNAKNSLYLQMNSLRPEDTALYYCAKDTAYGGKYYAFDYWGQGTPVTVSSGGGGQGGGGQGGGGQEIQMTQSPSSLSASVGDRVTITCRASQGISDYLAWYQQKPGKVPKLLIYAASTLQSGVPSRFSGSGSGTDFTLTISSLQPEDVATYYCQKYNSAPYTFGCGTKLEIKSGGGGQQVQLVQSGGEVKKPGASVKVSCKASGYTFTSYGISWVRQAPGQCLEWMGWISPQTGNAIYAQKLQGRVTMTRDTSTSTAYMELRSLRSDDTAVYYCARDPDYYGSGSYSDYWGQGTLVTVSSGGGGQGGGGQGGGGQEIVLTQSPATLSVSPGERATLSCRASQSVSSNLAWYQQKPGQAPRLLIYGASSRATGIPARFSGSGSGTEFTLTISSLQSEDFAVYYCQQYHSWPLLTFGCGTKVEIK

SEQ ID NO: 2306 - protein, 750 aa, Artificial Sequence
  Synthetic
EVQLVESGGGLVQPGGSLRLSCAASGFTFHDYPMHWVRQAPGKCLEWVSGISWNSDYIVYADSVKGRFTISRDNAKNSLYLQMNSLRPEDTALYYCAKDTAYGGKYYAFDYWGQGTPVTVSSGGGGSGGGGSGGGGSDIQMTQSPSSLSASVGDRVTITCRASQGISDYLAWYQQKPGKVPKLLIYAASTLQSGVPSRFSGSGSGTDFTLTISSLQPEDVATYYCQKYNSAPYTFGCGTKLEIKSGGGGSQVQLVQSGGEVKKPGASVKVSCKASGYTFTSYGISWVRQAPGQCLEWMGWISPQTGNAIYAQKLQGRVTMTRDTSTSTAYMELRSLRSDDTAVYYCARDPDYYGSGSYSDYWGQGTLVTVSSGGGGSGGGGSGGGGSEIVLTQSPATLSVSPGERATLSCRASQSVSSNLAWYQQKPGQAPRLLIYGASSRATGIPARFSGSGSGTEFTLTISSLQSEDFAVYYCQQYHSWPLLTFGCGTKVEIKSGGGGSEVQLVESGGGLVQPGGSLKLSCAASGFTFNKYAMNWVRQAPGKGLEWVARIRSKYNNYATYYADSVKDRFTISRDDSKNTAYLQMNNLKTEDTAVYYCVRHGNFGNSYISYWAYWGQGTLVTVSSGGGGSGGGGSGGGGSQTVVTQEPSLTVSPGGTVTLTCGSSTGAVTSGNYPNWVQQKPGQAPRGLIGGTKFLAPGTPARFSGSLLGGKAALTLSGVQPEDEAEYYCVLWYSNRWVFGGGTKLTVL

SEQ ID NO: 2307 - protein, 750 aa, Artificial Sequence
  Synthetic
EVQLVESGGGLVQPGGSLRLSCAASGFTFHDYPMHWVRQAPGKCLEWVSGISWNSDYIVYADSVKGRFTISRDNAKNSLYLQMNSLRPEDTALYYCAKDTAYGGKYYAFDYWGQGTPVTVSSGGGGQGGGGQGGGGQEIQMTQSPSSLSASVGDRVTITCRASQGISDYLAWYQQKPGKVPKLLIYAASTLQSGVPSRFSGSGSGTDFTLTISSLQPEDVATYYCQKYNSAPYTFGCGTKLEIKSGGGGQQVQLVQSGGEVKKPGASVKVSCKASGYTFTSYGISWVRQAPGQCLEWMGWISPQTGNAIYAQKLQGRVTMTRDTSTSTAYMELRSLRSDDTAVYYCARDPDYYGSGSYSDYWGQGTLVTVSSGGGGQGGGGQGGGGQEIVLTQSPATLSVSPGERATLSCRASQSVSSNLAWYQQKPGQAPRLLIYGASSRATGIPARFSGSGSGTEFTLTISSLQSEDFAVYYCQQYHSWPLLTFGCGTKVEIKSGGGGQEVQLVESGGGLVQPGGSLKLSCAASGFTFNKYAMNWVRQAPGKGLEWVARIRSKYNNYATYYADSVKDRFTISRDDSKNTAYLQMNNLKTEDTAVYYCVRHGNFGNSYISYWAYWGQGTLVTVSSGGGGQGGGGQGGGGQQTVVTQEPSLTVSPGGTVTLTCGSSTGAVTSGNYPNWVQQKPGQAPRGLIGGTKFLAPGTPARFSGSLLGGKAALTLSGVQPEDEAEYYCVLWYSNRWVFGGGTKLTVL

SEQ ID NO: 2308 - protein, 750 aa, Artificial Sequence
  Synthetic
EVQLVESGGGLVQPGGSLRLSCAASGFTFHDYPMHWVRQAPGKCLEWVSGISWNSDYIVYADSVKGRFTISRDNAKNSLYLQMNSLRPEDTALYYCAKDTAYGGKYYAFDYWGQGTPVTVSSGGGGSGGGGSGGGGSDIQMTQSPSSLSASVGDRVTITCRASQGISDYLAWYQQKPGKVPKLLIYAASTLQSGVPSRFSGSGSGTDFTLTISSLQPEDVATYYCQKYNSAPYTFGCGTKLEIKSGGGGSQVQLVQSGGEVKKPGASVKVSCKASGYTFTSYGISWVRQAPGQCLEWMGWISPQTGNAIYAQKLQGRVTMTRDTSTSTAYMELRSLRSDDTAVYYCARDPDYYGSGSYSDYWGQGTLVTVSSGGGGSGGGGSGGGGSEIVLTQSPATLSVSPGERATLSCRASQSVSSNLAWYQQKPGQAPRLLIYGASSRATGIPARFSGSGSGTEFTLTISSLQSEDFAVYYCQQYHSWPLLTFGCGTKVEIKSGGGGSEVQLVESGGGLVQPGGSLKLSCAASGFTFNKYAINWVRQAPGKGLEWVARIRSKYNNYATYYADAVKDRFTISRDDSKNTVYLQMNNLKTEDTAVYYCARAGNFGSSYISYWAYWGQGTLVTVSSGGGGSGGGGSGGGGSQTVVTQEPSLTVSPGGTVTITCGSSTGAVTSGNYPNWVQKKPGQAPRGLIGGTKFLAPGTPARFSGSLSGGKAALTLSGVQPEDEAEYYCVLWYSNRWVFGSGTKLTVL

SEQ ID NO: 2309 - protein, 750 aa, Artificial Sequence
  Synthetic
EVQLVESGGGLVQPGGSLRLSCAASGFTFHDYPMHWVRQAPGKCLEWVSGISWNSDYIVYADSVKGRFTISRDNAKNSLYLQMNSLRPEDTALYYCAKDTAYGGKYYAFDYWGQGTPVTVSSGGGGQGGGGQGGGGQEIQMTQSPSSLSASVGDRVTITCRASQGISDYLAWYQQKPGKVPKLLIYAASTLQSGVPSRFSGSGSGTDFTLTISSLQPEDVATYYCQKYNSAPYTFGCGTKLEIKSGGGGQQVQLVQSGGEVKKPGASVKVSCKASGYTFTSYGISWVRQAPGQCLEWMGWISPQTGNAIYAQKLQGRVTMTRDTSTSTAYMELRSLRSDDTAVYYCARDPDYYGSGSYSDYWGQGTLVTVSSGGGGQGGGGQGGGGQEIVLTQSPATLSVSPGERATLSCRASQSVSSNLAWYQQKPGQAPRLLIYGASSRATGIPARFSGSGSGTEFTLTISSLQSEDFAVYYCQQYHSWPLLTFGCGTKVEIKSGGGGQEVQLVESGGGLVQPGGSLKLSCAASGFTFNKYAINWVRQAPGKGLEWVARIRSKYNNYATYYADAVKDRFTISRDDSKNTVYLQMNNLKTEDTAVYYCARAGNFGSSYISYWAYWGQGTLVTVSSGGGGQGGGGQGGGGQQTVVTQEPSLTVSPGGTVTITCGSSTGAVTSGNYPNWVQKKPGQAPRGLIGGTKFLAPGTPARFSGSLSGGKAALTLSGVQPEDEAEYYCVLWYSNRWVFGSGTKLTVL

SEQ ID NO: 2310 - protein, 1238 aa, Artificial Sequence
  Synthetic
EVQLVESGGGLVQPGGSLRLSCAASGFTFHDYPMHWVRQAPGKCLEWVSGISWNSDYIVYADSVKGRFTISRDNAKNSLYLQMNSLRPEDTALYYCAKDTAYGGKYYAFDYWGQGTPVTVSSGGGGSGGGGSGGGGSDIQMTQSPSSLSASVGDRVTITCRASQGISDYLAWYQQKPGKVPKLLIYAASTLQSGVPSRFSGSGSGTDFTLTISSLQPEDVATYYCQKYNSAPYTFGCGTKLEIKSGGGGSQVQLVQSGGEVKKPGASVKVSCKASGYTFTSYGISWVRQAPGQCLEWMGWISPQTGNAIYAQKLQGRVTMTRDTSTSTAYMELRSLRSDDTAVYYCARDPDYYGSGSYSDYWGQGTLVTVSSGGGGSGGGGSGGGGSEIVLTQSPATLSVSPGERATLSCRASQSVSSNLAWYQQKPGQAPRLLIYGASSRATGIPARFSGSGSGTEFTLTISSLQSEDFAVYYCQQYHSWPLLTFGCGTKVEIKSGGGGSEVQLVESGGGLVQPGGSLKLSCAASGFTFNKYAMNWVRQAPGKGLEWVARIRSKYNNYATYYADSVKDRFTISRDDSKNTAYLQMNNLKTEDTAVYYCVRHGNFGNSYISYWAYWGQGTLVTVSSGGGGSGGGGSGGGGSQTVVTQEPSLTVSPGGTVTLTCGSSTGAVTSGNYPNWVQQKPGQAPRGLIGGTKFLAPGTPARFSGSLLGGKAALTLSGVQPEDEAEYYCVLWYSNRWVFGGGTKLTVLGGGGDKTHTCPPCPAPELLGGPSVFLFPPKPKDTLMISRTPEVTCVVVDVSHEDPEVKFNWYVDGVEVHNAKTKPCEEQYGSTYRCVSVLTVLHQDWLNGKEYKCKVSNKALPAPIEKTISKAKGQPREPQVYTLPPSREEMTKNQVSLTCLVKGFYPSDIAVEWESNGQPENNYKTTPPVLDSDGSFFLYSKLTVDKSRWQQGNVFSCSVMHEALHNHYTQKSLSLSPGKGGGGSGGGGSGGGGSGGGGSGGGGSGGGGSDKTHTCPPCPAPELLGGPSVFLFPPKPKDTLMISRTPEVTCVVVDVSHEDPEVKFNWYVDGVEVHNAKTKPCEEQYGSTYRCVSVLTVLHQDWLNGKEYKCKVSNKALPAPIEKTISKAKGQPREPQVYTLPPSREEMTKNQVSLTCLVKGFYPSDIAVEWESNGQPENNYKTTPPVLDSDGSFFLYSKLTVDKSRWQQGNVFSCSVMHEALHNHYTQKSLSLSPGK

SEQ ID NO: 2311 - protein, 1228 aa, Artificial Sequence
  Synthetic
EVQLVESGGGLVQPGGSLRLSCAASGFTFHDYPMHWVRQAPGKCLEWVSGISWNSDYIVYADSVKGRFTISRDNAKNSLYLQMNSLRPEDTALYYCAKDTAYGGKYYAFDYWGQGTPVTVSSGGGGQGGGGQGGGGQEIQMTQSPSSLSASVGDRVTITCRASQGISDYLAWYQQKPGKVPKLLIYAASTLQSGVPSRFSGSGSGTDFTLTISSLQPEDVATYYCQKYNSAPYTFGCGTKLEIKSGGGGQQVQLVQSGGEVKKPGASVKVSCKASGYTFTSYGISWVRQAPGQCLEWMGWISPQTGNAIYAQKLQGRVTMTRDTSTSTAYMELRSLRSDDTAVYYCARDPDYYGSGSYSDYWGQGTLVTVSSGGGGQGGGGQGGGGQEIVLTQSPATLSVSPGERATLSCRASQSVSSNLAWYQQKPGQAPRLLIYGASSRATGIPARFSGSGSGTEFTLTISSLQSEDFAVYYCQQYHSWPLLTFGCGTKVEIKSGGGGQEVQLVESGGGLVQPGGSLKLSCAASGFTFNKYAMNWVRQAPGKGLEWVARIRSKYNNYATYYADSVKDRFTISRDDSKNTAYLQMNNLKTEDTAVYYCVRHGNFGNSYISYWAYWGQGTLVTVSSGGGGQGGGGQGGGGQQTVVTQEPSLTVSPGGTVTLTCGSSTGAVTSGNYPNWVQQKPGQAPRGLIGGTKFLAPGTPARFSGSLLGGKAALTLSGVQPEDEAEYYCVLWYSNRWVFGGGTKLTVLGGGGCPPCPAPELLGGPSVFLFPPKPKDTLMISRTPEVTCVVVDVSHEEPEVKFNWYVDGVEVHNAKTKPCEEQYGSTYRCVSVLTVLHQDWLNGKEYKCKVSNKALPAPIEKTISKAKGQPREPQVYTLPPSREEMTKNQVSLTCLVKGFYPSDIAVEWESNGQPENNYKTTPPVLDSDGSFFLYSKLTVDKSRWQQGNVFSCSVMHEALHNHYTQKSLSLSPGKGGGGQGGGGQGGGGQGGGGQGGGGQGGGGQCPPCPAPELLGGPSVFLFPPKPKDTLMISRTPEVTCVVVDVSHEEPEVKFNWYVDGVEVHNAKTKPCEEQYGSTYRCVSVLTVLHQDWLNGKEYKCKVSNKALPAPIEKTISKAKGQPREPQVYTLPPSREEMTKNQVSLTCLVKGFYPSDIAVEWESNGQPENNYKTTPPVLDSDGSFFLYSKLTVDKSRWQQGNVFSCSVMHEALHNHYTQKSLSLSPGK

SEQ ID NO: 2312 - protein, 1238 aa, Artificial Sequence
  Synthetic
EVQLVESGGGLVQPGGSLRLSCAASGFTFHDYPMHWVRQAPGKCLEWVSGISWNSDYIVYADSVKGRFTISRDNAKNSLYLQMNSLRPEDTALYYCAKDTAYGGKYYAFDYWGQGTPVTVSSGGGGSGGGGSGGGGSDIQMTQSPSSLSASVGDRVTITCRASQGISDYLAWYQQKPGKVPKLLIYAASTLQSGVPSRFSGSGSGTDFTLTISSLQPEDVATYYCQKYNSAPYTFGCGTKLEIKSGGGGSQVQLVQSGGEVKKPGASVKVSCKASGYTFTSYGISWVRQAPGQCLEWMGWISPQTGNAIYAQKLQGRVTMTRDTSTSTAYMELRSLRSDDTAVYYCARDPDYYGSGSYSDYWGQGTLVTVSSGGGGSGGGGSGGGGSEIVLTQSPATLSVSPGERATLSCRASQSVSSNLAWYQQKPGQAPRLLIYGASSRATGIPARFSGSGSGTEFTLTISSLQSEDFAVYYCQQYHSWPLLTFGCGTKVEIKSGGGGSEVQLVESGGGLVQPGGSLKLSCAASGFTFNKYAINWVRQAPGKGLEWVARIRSKYNNYATYYADAVKDRFTISRDDSKNTVYLQMNNLKTEDTAVYYCARAGNFGSSYISYWAYWGQGTLVTVSSGGGGSGGGGSGGGGSQTVVTQEPSLTVSPGGTVTITCGSSTGAVTSGNYPNWVQKKPGQAPRGLIGGTKFLAPGTPARFSGSLSGGKAALTLSGVQPEDEAEYYCVLWYSNRWVFGSGTKLTVLGGGGDKTHTCPPCPAPELLGGPSVFLFPPKPKDTLMISRTPEVTCVVVDVSHEDPEVKFNWYVDGVEVHNAKTKPCEEQYGSTYRCVSVLTVLHQDWLNGKEYKCKVSNKALPAPIEKTISKAKGQPREPQVYTLPPSREEMTKNQVSLTCLVKGFYPSDIAVEWESNGQPENNYKTTPPVLDSDGSFFLYSKLTVDKSRWQQGNVFSCSVMHEALHNHYTQKSLSLSPGKGGGGSGGGGSGGGGSGGGGSGGGGSGGGGSDKTHTCPPCPAPELLGGPSVFLFPPKPKDTLMISRTPEVTCVVVDVSHEDPEVKFNWYVDGVEVHNAKTKPCEEQYGSTYRCVSVLTVLHQDWLNGKEYKCKVSNKALPAPIEKTISKAKGQPREPQVYTLPPSREEMTKNQVSLTCLVKGFYPSDIAVEWESNGQPENNYKTTPPVLDSDGSFFLYSKLTVDKSRWQQGNVFSCSVMHEALHNHYTQKSLSLSPGK

SEQ ID NO: 2313 - protein, 1228 aa, Artificial Sequence
  Synthetic
EVQLVESGGGLVQPGGSLRLSCAASGFTFHDYPMHWVRQAPGKCLEWVSGISWNSDYIVYADSVKGRFTISRDNAKNSLYLQMNSLRPEDTALYYCAKDTAYGGKYYAFDYWGQGTPVTVSSGGGGQGGGGQGGGGQEIQMTQSPSSLSASVGDRVTITCRASQGISDYLAWYQQKPGKVPKLLIYAASTLQSGVPSRFSGSGSGTDFTLTISSLQPEDVATYYCQKYNSAPYTFGCGTKLEIKSGGGGQQVQLVQSGGEVKKPGASVKVSCKASGYTFTSYGISWVRQAPGQCLEWMGWISPQTGNAIYAQKLQGRVTMTRDTSTSTAYMELRSLRSDDTAVYYCARDPDYYGSGSYSDYWGQGTLVTVSSGGGGQGGGGQGGGGQEIVLTQSPATLSVSPGERATLSCRASQSVSSNLAWYQQKPGQAPRLLIYGASSRATGIPARFSGSGSGTEFTLTISSLQSEDFAVYYCQQYHSWPLLTFGCGTKVEIKSGGGGQEVQLVESGGGLVQPGGSLKLSCAASGFTFNKYAINWVRQAPGKGLEWVARIRSKYNNYATYYADAVKDRFTISRDDSKNTVYLQMNNLKTEDTAVYYCARAGNFGSSYISYWAYWGQGTLVTVSSGGGGQGGGGQGGGGQQTVVTQEPSLTVSPGGTVTITCGSSTGAVTSGNYPNWVQKKPGQAPRGLIGGTKFLAPGTPARFSGSLSGGKAALTLSGVQPEDEAEYYCVLWYSNRWVFGSGTKLTVLGGGGCPPCPAPELLGGPSVFLFPPKPKDTLMISRTPEVTCVVVDVSHEEPEVKFNWYVDGVEVHNAKTKPCEEQYGSTYRCVSVLTVLHQDWLNGKEYKCKVSNKALPAPIEKTISKAKGQPREPQVYTLPPSREEMTKNQVSLTCLVKGFYPSDIAVEWESNGQPENNYKTTPPVLDSDGSFFLYSKLTVDKSRWQQGNVFSCSVMHEALHNHYTQKSLSLSPGKGGGGQGGGGQGGGGQGGGGQGGGGQGGGGQCPPCPAPELLGGPSVFLFPPKPKDTLMISRTPEVTCVVVDVSHEEPEVKFNWYVDGVEVHNAKTKPCEEQYGSTYRCVSVLTVLHQDWLNGKEYKCKVSNKALPAPIEKTISKAKGQPREPQVYTLPPSREEMTKNQVSLTCLVKGFYPSDIAVEWESNGQPENNYKTTPPVLDSDGSFFLYSKLTVDKSRWQQGNVFSCSVMHEALHNHYTQKSLSLSPGK

SEQ ID NO: 2314 - protein, 495 aa, Artificial Sequence
  Synthetic
EVQLVESGGGLVQPGGSLRLSCAASGFTFHDYPMHWVRQAPGKCLEWVSGISWNSDYIVYADSVKGRFTISRDNAKNSLYLQMNSLRPEDTALYYCAKDTAYGGKYYAFDYWGQGTPVTVSSGGGGSGGGGSGGGGSDIQMTQSPSSLSASVGDRVTITCRASQGISDYLAWYQQKPGKVPKLLIYAASTLQSGVPSRFSGSGSGTDFTLTISSLQPEDVATYYCQKYNSAPYTFGCGTKLEIKSGGGGSQVQLVQSGAEVKKPGASVKVSCKASGYTFTSYGISWVRQAPGQCLEWMGWISAYNGNAIYAQKLQGRVTMTRDTSTSTAYMELRSLRSDDTAVYYCARDPDYYGSGSYSDYWGQGTLVTVSSGGGGSGGGGSGGGGSEIVLTQSPATLSVSPGERATLSCRASQSVSSNLAWYQQKPGQAPRLLIYGASSRATGIPARFSGSGSGTEFTLTISSLQSEDFAVYYCQQYHSWPILHFGCGTKVEIK

SEQ ID NO: 2315 - protein, 495 aa, Artificial Sequence
  Synthetic
EVQLVESGGGLVQPGGSLRLSCAASGFTFHDYPMHWVRQAPGKCLEWVSGISWNSDYIVYADSVKGRFTISRDNAKNSLYLQMNSLRPEDTALYYCAKDTAYGGKYYAFDYWGQGTPVTVSSGGGGQGGGGQGGGGQEIQMTQSPSSLSASVGDRVTITCRASQGISDYLAWYQQKPGKVPKLLIYAASTLQSGVPSRFSGSGSGTDFTLTISSLQPEDVATYYCQKYNSAPYTFGCGTKLEIKSGGGGQQVQLVQSGAEVKKPGASVKVSCKASGYTFTSYGISWVRQAPGQCLEWMGWISAYNGNAIYAQKLQGRVTMTRDTSTSTAYMELRSLRSDDTAVYYCARDPDYYGSGSYSDYWGQGTLVTVSSGGGGQGGGGQGGGGQEIVLTQSPATLSVSPGERATLSCRASQSVSSNLAWYQQKPGQAPRLLIYGASSRATGIPARFSGSGSGTEFTLTISSLQSEDFAVYYCQQYHSWPILHFGCGTKVEIK

SEQ ID NO: 2316 - protein, 750 aa, Artificial Sequence
  Synthetic
EVQLVESGGGLVQPGGSLRLSCAASGFTFHDYPMHWVRQAPGKCLEWVSGISWNSDYIVYADSVKGRFTISRDNAKNSLYLQMNSLRPEDTALYYCAKDTAYGGKYYAFDYWGQGTPVTVSSGGGGSGGGGSGGGGSDIQMTQSPSSLSASVGDRVTITCRASQGISDYLAWYQQKPGKVPKLLIYAASTLQSGVPSRFSGSGSGTDFTLTISSLQPEDVATYYCQKYNSAPYTFGCGTKLEIKSGGGGSQVQLVQSGAEVKKPGASVKVSCKASGYTFTSYGISWVRQAPGQCLEWMGWISAYNGNAIYAQKLQGRVTMTRDTSTSTAYMELRSLRSDDTAVYYCARDPDYYGSGSYSDYWGQGTLVTVSSGGGGSGGGGSGGGGSEIVLTQSPATLSVSPGERATLSCRASQSVSSNLAWYQQKPGQAPRLLIYGASSRATGIPARFSGSGSGTEFTLTISSLQSEDFAVYYCQQYHSWPILHFGCGTKVEIKSGGGGSEVQLVESGGGLVQPGGSLKLSCAASGFTFNKYAMNWVRQAPGKGLEWVARIRSKYNNYATYYADSVKDRFTISRDDSKNTAYLQMNNLKTEDTAVYYCVRHGNFGNSYISYWAYWGQGTLVTVSSGGGGSGGGGSGGGGSQTVVTQEPSLTVSPGGTVTLTCGSSTGAVTSGNYPNWVQQKPGQAPRGLIGGTKFLAPGTPARFSGSLLGGKAALTLSGVQPEDEAEYYCVLWYSNRWVFGGGTKLTVL

SEQ ID NO: 2317 - protein, 750 aa, Artificial Sequence
  Synthetic
EVQLVESGGGLVQPGGSLRLSCAASGFTFHDYPMHWVRQAPGKCLEWVSGISWNSDYIVYADSVKGRFTISRDNAKNSLYLQMNSLRPEDTALYYCAKDTAYGGKYYAFDYWGQGTPVTVSSGGGGQGGGGQGGGGQEIQMTQSPSSLSASVGDRVTITCRASQGISDYLAWYQQKPGKVPKLLIYAASTLQSGVPSRFSGSGSGTDFTLTISSLQPEDVATYYCQKYNSAPYTFGCGTKLEIKSGGGGQQVQLVQSGAEVKKPGASVKVSCKASGYTFTSYGISWVRQAPGQCLEWMGWISAYNGNAIYAQKLQGRVTMTRDTSTSTAYMELRSLRSDDTAVYYCARDPDYYGSGSYSDYWGQGTLVTVSSGGGGQGGGGQGGGGQEIVLTQSPATLSVSPGERATLSCRASQSVSSNLAWYQQKPGQAPRLLIYGASSRATGIPARFSGSGSGTEFTLTISSLQSEDFAVYYCQQYHSWPILHFGCGTKVEIKSGGGGQEVQLVESGGGLVQPGGSLKLSCAASGFTFNKYAMNWVRQAPGKGLEWVARIRSKYNNYATYYADSVKDRFTISRDDSKNTAYLQMNNLKTEDTAVYYCVRHGNFGNSYISYWAYWGQGTLVTVSSGGGGQGGGGQGGGGQQTVVTQEPSLTVSPGGTVTLTCGSSTGAVTSGNYPNWVQQKPGQAPRGLIGGTKFLAPGTPARFSGSLLGGKAALTLSGVQPEDEAEYYCVLWYSNRWVFGGGTKLTVL

SEQ ID NO: 2318 - protein, 750 aa, Artificial Sequence
  Synthetic
EVQLVESGGGLVQPGGSLRLSCAASGFTFHDYPMHWVRQAPGKCLEWVSGISWNSDYIVYADSVKGRFTISRDNAKNSLYLQMNSLRPEDTALYYCAKDTAYGGKYYAFDYWGQGTPVTVSSGGGGSGGGGSGGGGSDIQMTQSPSSLSASVGDRVTITCRASQGISDYLAWYQQKPGKVPKLLIYAASTLQSGVPSRFSGSGSGTDFTLTISSLQPEDVATYYCQKYNSAPYTFGCGTKLEIKSGGGGSQVQLVQSGAEVKKPGASVKVSCKASGYTFTSYGISWVRQAPGQCLEWMGWISAYNGNAIYAQKLQGRVTMTRDTSTSTAYMELRSLRSDDTAVYYCARDPDYYGSGSYSDYWGQGTLVTVSSGGGGSGGGGSGGGGSEIVLTQSPATLSVSPGERATLSCRASQSVSSNLAWYQQKPGQAPRLLIYGASSRATGIPARFSGSGSGTEFTLTISSLQSEDFAVYYCQQYHSWPILHFGCGTKVEIKSGGGGSEVQLVESGGGLVQPGGSLKLSCAASGFTFNKYAINWVRQAPGKGLEWVARIRSKYNNYATYYADAVKDRFTISRDDSKNTVYLQMNNLKTEDTAVYYCARAGNFGSSYISYWAYWGQGTLVTVSSGGGGSGGGGSGGGGSQTVVTQEPSLTVSPGGTVTITCGSSTGAVTSGNYPNWVQKKPGQAPRGLIGGTKFLAPGTPARFSGSLSGGKAALTLSGVQPEDEAEYYCVLWYSNRWVFGSGTKLTVL

SEQ ID NO: 2319 - protein, 750 aa, Artificial Sequence
  Synthetic
EVQLVESGGGLVQPGGSLRLSCAASGFTFHDYPMHWVRQAPGKCLEWVSGISWNSDYIVYADSVKGRFTISRDNAKNSLYLQMNSLRPEDTALYYCAKDTAYGGKYYAFDYWGQGTPVTVSSGGGGQGGGGQGGGGQEIQMTQSPSSLSASVGDRVTITCRASQGISDYLAWYQQKPGKVPKLLIYAASTLQSGVPSRFSGSGSGTDFTLTISSLQPEDVATYYCQKYNSAPYTFGCGTKLEIKSGGGGQQVQLVQSGAEVKKPGASVKVSCKASGYTFTSYGISWVRQAPGQCLEWMGWISAYNGNAIYAQKLQGRVTMTRDTSTSTAYMELRSLRSDDTAVYYCARDPDYYGSGSYSDYWGQGTLVTVSSGGGGQGGGGQGGGGQEIVLTQSPATLSVSPGERATLSCRASQSVSSNLAWYQQKPGQAPRLLIYGASSRATGIPARFSGSGSGTEFTLTISSLQSEDFAVYYCQQYHSWPILHFGCGTKVEIKSGGGGQEVQLVESGGGLVQPGGSLKLSCAASGFTFNKYAINWVRQAPGKGLEWVARIRSKYNNYATYYADAVKDRFTISRDDSKNTVYLQMNNLKTEDTAVYYCARAGNFGSSYISYWAYWGQGTLVTVSSGGGGQGGGGQGGGGQQTVVTQEPSLTVSPGGTVTITCGSSTGAVTSGNYPNWVQKKPGQAPRGLIGGTKFLAPGTPARFSGSLSGGKAALTLSGVQPEDEAEYYCVLWYSNRWVFGSGTKLTVL

SEQ ID NO: 2320 - protein, 1238 aa, Artificial Sequence
  Synthetic
EVQLVESGGGLVQPGGSLRLSCAASGFTFHDYPMHWVRQAPGKCLEWVSGISWNSDYIVYADSVKGRFTISRDNAKNSLYLQMNSLRPEDTALYYCAKDTAYGGKYYAFDYWGQGTPVTVSSGGGGSGGGGSGGGGSDIQMTQSPSSLSASVGDRVTITCRASQGISDYLAWYQQKPGKVPKLLIYAASTLQSGVPSRFSGSGSGTDFTLTISSLQPEDVATYYCQKYNSAPYTFGCGTKLEIKSGGGGSQVQLVQSGAEVKKPGASVKVSCKASGYTFTSYGISWVRQAPGQCLEWMGWISAYNGNAIYAQKLQGRVTMTRDTSTSTAYMELRSLRSDDTAVYYCARDPDYYGSGSYSDYWGQGTLVTVSSGGGGSGGGGSGGGGSEIVLTQSPATLSVSPGERATLSCRASQSVSSNLAWYQQKPGQAPRLLIYGASSRATGIPARFSGSGSGTEFTLTISSLQSEDFAVYYCQQYHSWPILHFGCGTKVEIKSGGGGSEVQLVESGGGLVQPGGSLKLSCAASGFTFNKYAMNWVRQAPGKGLEWVARIRSKYNNYATYYADSVKDRFTISRDDSKNTAYLQMNNLKTEDTAVYYCVRHGNFGNSYISYWAYWGQGTLVTVSSGGGGSGGGGSGGGGSQTVVTQEPSLTVSPGGTVTLTCGSSTGAVTSGNYPNWVQQKPGQAPRGLIGGTKFLAPGTPARFSGSLLGGKAALTLSGVQPEDEAEYYCVLWYSNRWVFGGGTKLTVLGGGGDKTHTCPPCPAPELLGGPSVFLFPPKPKDTLMISRTPEVTCVVVDVSHEDPEVKFNWYVDGVEVHNAKTKPCEEQYGSTYRCVSVLTVLHQDWLNGKEYKCKVSNKALPAPIEKTISKAKGQPREPQVYTLPPSREEMTKNQVSLTCLVKGFYPSDIAVEWESNGQPENNYKTTPPVLDSDGSFFLYSKLTVDKSRWQQGNVFSCSVMHEALHNHYTQKSLSLSPGKGGGGSGGGGSGGGGSGGGGSGGGGSGGGGSDKTHTCPPCPAPELLGGPSVFLFPPKPKDTLMISRTPEVTCVVVDVSHEDPEVKFNWYVDGVEVHNAKTKPCEEQYGSTYRCVSVLTVLHQDWLNGKEYKCKVSNKALPAPIEKTISKAKGQPREPQVYTLPPSREEMTKNQVSLTCLVKGFYPSDIAVEWESNGQPENNYKTTPPVLDSDGSFFLYSKLTVDKSRWQQGNVFSCSVMHEALHNHYTQKSLSLSPGK

SEQ ID NO: 2321 - protein, 1228 aa, Artificial Sequence
  Synthetic
EVQLVESGGGLVQPGGSLRLSCAASGFTFHDYPMHWVRQAPGKCLEWVSGISWNSDYIVYADSVKGRFTISRDNAKNSLYLQMNSLRPEDTALYYCAKDTAYGGKYYAFDYWGQGTPVTVSSGGGGQGGGGQGGGGQEIQMTQSPSSLSASVGDRVTITCRASQGISDYLAWYQQKPGKVPKLLIYAASTLQSGVPSRFSGSGSGTDFTLTISSLQPEDVATYYCQKYNSAPYTFGCGTKLEIKSGGGGQQVQLVQSGAEVKKPGASVKVSCKASGYTFTSYGISWVRQAPGQCLEWMGWISAYNGNAIYAQKLQGRVTMTRDTSTSTAYMELRSLRSDDTAVYYCARDPDYYGSGSYSDYWGQGTLVTVSSGGGGQGGGGQGGGGQEIVLTQSPATLSVSPGERATLSCRASQSVSSNLAWYQQKPGQAPRLLIYGASSRATGIPARFSGSGSGTEFTLTISSLQSEDFAVYYCQQYHSWPILHFGCGTKVEIKSGGGGQEVQLVESGGGLVQPGGSLKLSCAASGFTFNKYAMNWVRQAPGKGLEWVARIRSKYNNYATYYADSVKDRFTISRDDSKNTAYLQMNNLKTEDTAVYYCVRHGNFGNSYISYWAYWGQGTLVTVSSGGGGQGGGGQGGGGQQTVVTQEPSLTVSPGGTVTLTCGSSTGAVTSGNYPNWVQQKPGQAPRGLIGGTKFLAPGTPARFSGSLLGGKAALTLSGVQPEDEAEYYCVLWYSNRWVFGGGTKLTVLGGGGCPPCPAPELLGGPSVFLFPPKPKDTLMISRTPEVTCVVVDVSHEEPEVKFNWYVDGVEVHNAKTKPCEEQYGSTYRCVSVLTVLHQDWLNGKEYKCKVSNKALPAPIEKTISKAKGQPREPQVYTLPPSREEMTKNQVSLTCLVKGFYPSDIAVEWESNGQPENNYKTTPPVLDSDGSFFLYSKLTVDKSRWQQGNVFSCSVMHEALHNHYTQKSLSLSPGKGGGGQGGGGQGGGGQGGGGQGGGGQGGGGQCPPCPAPELLGGPSVFLFPPKPKDTLMISRTPEVTCVVVDVSHEEPEVKFNWYVDGVEVHNAKTKPCEEQYGSTYRCVSVLTVLHQDWLNGKEYKCKVSNKALPAPIEKTISKAKGQPREPQVYTLPPSREEMTKNQVSLTCLVKGFYPSDIAVEWESNGQPENNYKTTPPVLDSDGSFFLYSKLTVDKSRWQQGNVFSCSVMHEALHNHYTQKSLSLSPGK

SEQ ID NO: 2322 - protein, 1238 aa, Artificial Sequence
  Synthetic
EVQLVESGGGLVQPGGSLRLSCAASGFTFHDYPMHWVRQAPGKCLEWVSGISWNSDYIVYADSVKGRFTISRDNAKNSLYLQMNSLRPEDTALYYCAKDTAYGGKYYAFDYWGQGTPVTVSSGGGGSGGGGSGGGGSDIQMTQSPSSLSASVGDRVTITCRASQGISDYLAWYQQKPGKVPKLLIYAASTLQSGVPSRFSGSGSGTDFTLTISSLQPEDVATYYCQKYNSAPYTFGCGTKLEIKSGGGGSQVQLVQSGAEVKKPGASVKVSCKASGYTFTSYGISWVRQAPGQCLEWMGWISAYNGNAIYAQKLQGRVTMTRDTSTSTAYMELRSLRSDDTAVYYCARDPDYYGSGSYSDYWGQGTLVTVSSGGGGSGGGGSGGGGSEIVLTQSPATLSVSPGERATLSCRASQSVSSNLAWYQQKPGQAPRLLIYGASSRATGIPARFSGSGSGTEFTLTISSLQSEDFAVYYCQQYHSWPILHFGCGTKVEIKSGGGGSEVQLVESGGGLVQPGGSLKLSCAASGFTFNKYAINWVRQAPGKGLEWVARIRSKYNNYATYYADAVKDRFTISRDDSKNTVYLQMNNLKTEDTAVYYCARAGNFGSSYISYWAYWGQGTLVTVSSGGGGSGGGGSGGGGSQTVVTQEPSLTVSPGGTVTITCGSSTGAVTSGNYPNWVQKKPGQAPRGLIGGTKFLAPGTPARFSGSLSGGKAALTLSGVQPEDEAEYYCVLWYSNRWVFGSGTKLTVLGGGGDKTHTCPPCPAPELLGGPSVFLFPPKPKDTLMISRTPEVTCVVVDVSHEDPEVKFNWYVDGVEVHNAKTKPCEEQYGSTYRCVSVLTVLHQDWLNGKEYKCKVSNKALPAPIEKTISKAKGQPREPQVYTLPPSREEMTKNQVSLTCLVKGFYPSDIAVEWESNGQPENNYKTTPPVLDSDGSFFLYSKLTVDKSRWQQGNVFSCSVMHEALHNHYTQKSLSLSPGKGGGGSGGGGSGGGGSGGGGSGGGGSGGGGSDKTHTCPPCPAPELLGGPSVFLFPPKPKDTLMISRTPEVTCVVVDVSHEDPEVKFNWYVDGVEVHNAKTKPCEEQYGSTYRCVSVLTVLHQDWLNGKEYKCKVSNKALPAPIEKTISKAKGQPREPQVYTLPPSREEMTKNQVSLTCLVKGFYPSDIAVEWESNGQPENNYKTTPPVLDSDGSFFLYSKLTVDKSRWQQGNVFSCSVMHEALHNHYTQKSLSLSPGK

SEQ ID NO: 2323 - protein, 1228 aa, Artificial Sequence
  Synthetic
EVQLVESGGGLVQPGGSLRLSCAASGFTFHDYPMHWVRQAPGKCLEWVSGISWNSDYIVYADSVKGRFTISRDNAKNSLYLQMNSLRPEDTALYYCAKDTAYGGKYYAFDYWGQGTPVTVSSGGGGQGGGGQGGGGQEIQMTQSPSSLSASVGDRVTITCRASQGISDYLAWYQQKPGKVPKLLIYAASTLQSGVPSRFSGSGSGTDFTLTISSLQPEDVATYYCQKYNSAPYTFGCGTKLEIKSGGGGQQVQLVQSGAEVKKPGASVKVSCKASGYTFTSYGISWVRQAPGQCLEWMGWISAYNGNAIYAQKLQGRVTMTRDTSTSTAYMELRSLRSDDTAVYYCARDPDYYGSGSYSDYWGQGTLVTVSSGGGGQGGGGQGGGGQEIVLTQSPATLSVSPGERATLSCRASQSVSSNLAWYQQKPGQAPRLLIYGASSRATGIPARFSGSGSGTEFTLTISSLQSEDFAVYYCQQYHSWPILHFGCGTKVEIKSGGGGQEVQLVESGGGLVQPGGSLKLSCAASGFTFNKYAINWVRQAPGKGLEWVARIRSKYNNYATYYADAVKDRFTISRDDSKNTVYLQMNNLKTEDTAVYYCARAGNFGSSYISYWAYWGQGTLVTVSSGGGGQGGGGQGGGGQQTVVTQEPSLTVSPGGTVTITCGSSTGAVTSGNYPNWVQKKPGQAPRGLIGGTKFLAPGTPARFSGSLSGGKAALTLSGVQPEDEAEYYCVLWYSNRWVFGSGTKLTVLGGGGCPPCPAPELLGGPSVFLFPPKPKDTLMISRTPEVTCVVVDVSHEEPEVKFNWYVDGVEVHNAKTKPCEEQYGSTYRCVSVLTVLHQDWLNGKEYKCKVSNKALPAPIEKTISKAKGQPREPQVYTLPPSREEMTKNQVSLTCLVKGFYPSDIAVEWESNGQPENNYKTTPPVLDSDGSFFLYSKLTVDKSRWQQGNVFSCSVMHEALHNHYTQKSLSLSPGKGGGGQGGGGQGGGGQGGGGQGGGGQGGGGQCPPCPAPELLGGPSVFLFPPKPKDTLMISRTPEVTCVVVDVSHEEPEVKFNWYVDGVEVHNAKTKPCEEQYGSTYRCVSVLTVLHQDWLNGKEYKCKVSNKALPAPIEKTISKAKGQPREPQVYTLPPSREEMTKNQVSLTCLVKGFYPSDIAVEWESNGQPENNYKTTPPVLDSDGSFFLYSKLTVDKSRWQQGNVFSCSVMHEALHNHYTQKSLSLSPGK

SEQ ID NO: 2324 - protein, 489 aa, Artificial Sequence
  Synthetic
EVQLVESGGGLVQPGGSLRLSCAASGFTFHDYPMHWVRQAPGKCLEWVSGISWNSDYIVYADSVKGRFTISRDNAKNSLYLQMNSLRPEDTALYYCAKDTAYGGKYYAFDYWGQGTPVTVSSGGGGSGGGGSGGGGSDIQMTQSPSSLSASVGDRVTITCRASQGISDYLAWYQQKPGKVPKLLIYAASTLQSGVPSRFSGSGSGTDFTLTISSLQPEDVATYYCQKYNSAPYTFGCGTKLEIKSGGGGSQVQLVQSGAEVKKPGASVKVSCKASGYTFTSYGISWVRQAPGQCLEWMGWISAYNGNTVYAQKLQDRVTMTTDTSTSTAYMELRSLRSDDTAVYFCVRDGDPLDYWGQGTLVTVSSGGGGSGGGGSGGGGSEIVLTQSPGTLSLSPGERATLSCRASQSVSSNLAWYQQKPGQAPRLLIYGASTRATGIPARFSGSGSGTEFTLTISSLQSEDFAVYYCQQYHTWPPVTFGCGTKVEIK

SEQ ID NO: 2325 - protein, 489 aa, Artificial Sequence
  Synthetic
EVQLVESGGGLVQPGGSLRLSCAASGFTFHDYPMHWVRQAPGKCLEWVSGISWNSDYIVYADSVKGRFTISRDNAKNSLYLQMNSLRPEDTALYYCAKDTAYGGKYYAFDYWGQGTPVTVSSGGGGQGGGGQGGGGQEIQMTQSPSSLSASVGDRVTITCRASQGISDYLAWYQQKPGKVPKLLIYAASTLQSGVPSRFSGSGSGTDFTLTISSLQPEDVATYYCQKYNSAPYTFGCGTKLEIKSGGGGQQVQLVQSGAEVKKPGASVKVSCKASGYTFTSYGISWVRQAPGQCLEWMGWISAYNGNTVYAQKLQDRVTMTTDTSTSTAYMELRSLRSDDTAVYFCVRDGDPLDYWGQGTLVTVSSGGGGQGGGGQGGGGQEIVLTQSPGTLSLSPGERATLSCRASQSVSSNLAWYQQKPGQAPRLLIYGASTRATGIPARFSGSGSGTEFTLTISSLQSEDFAVYYCQQYHTWPPVTFGCGTKVEIK

SEQ ID NO: 2326 - protein, 744 aa, Artificial Sequence
  Synthetic
EVQLVESGGGLVQPGGSLRLSCAASGFTFHDYPMHWVRQAPGKCLEWVSGISWNSDYIVYADSVKGRFTISRDNAKNSLYLQMNSLRPEDTALYYCAKDTAYGGKYYAFDYWGQGTPVTVSSGGGGSGGGGSGGGGSDIQMTQSPSSLSASVGDRVTITCRASQGISDYLAWYQQKPGKVPKLLIYAASTLQSGVPSRFSGSGSGTDFTLTISSLQPEDVATYYCQKYNSAPYTFGCGTKLEIKSGGGGSQVQLVQSGAEVKKPGASVKVSCKASGYTFTSYGISWVRQAPGQCLEWMGWISAYNGNTVYAQKLQDRVTMTTDTSTSTAYMELRSLRSDDTAVYFCVRDGDPLDYWGQGTLVTVSSGGGGSGGGGSGGGGSEIVLTQSPGTLSLSPGERATLSCRASQSVSSNLAWYQQKPGQAPRLLIYGASTRATGIPARFSGSGSGTEFTLTISSLQSEDFAVYYCQQYHTWPPVTFGCGTKVEIKSGGGGSEVQLVESGGGLVQPGGSLKLSCAASGFTFNKYAMNWVRQAPGKGLEWVARIRSKYNNYATYYADSVKDRFTISRDDSKNTAYLQMNNLKTEDTAVYYCVRHGNFGNSYISYWAYWGQGTLVTVSSGGGGSGGGGSGGGGSQTVVTQEPSLTVSPGGTVTLTCGSSTGAVTSGNYPNWVQQKPGQAPRGLIGGTKFLAPGTPARFSGSLLGGKAALTLSGVQPEDEAEYYCVLWYSNRWVFGGGTKLTVL

SEQ ID NO: 2327 - protein, 744 aa, Artificial Sequence
  Synthetic
EVQLVESGGGLVQPGGSLRLSCAASGFTFHDYPMHWVRQAPGKCLEWVSGISWNSDYIVYADSVKGRFTISRDNAKNSLYLQMNSLRPEDTALYYCAKDTAYGGKYYAFDYWGQGTPVTVSSGGGGQGGGGQGGGGQEIQMTQSPSSLSASVGDRVTITCRASQGISDYLAWYQQKPGKVPKLLIYAASTLQSGVPSRFSGSGSGTDFTLTISSLQPEDVATYYCQKYNSAPYTFGCGTKLEIKSGGGGQQVQLVQSGAEVKKPGASVKVSCKASGYTFTSYGISWVRQAPGQCLEWMGWISAYNGNTVYAQKLQDRVTMTTDTSTSTAYMELRSLRSDDTAVYFCVRDGDPLDYWGQGTLVTVSSGGGGQGGGGQGGGGQEIVLTQSPGTLSLSPGERATLSCRASQSVSSNLAWYQQKPGQAPRLLIYGASTRATGIPARFSGSGSGTEFTLTISSLQSEDFAVYYCQQYHTWPPVTFGCGTKVEIKSGGGGQEVQLVESGGGLVQPGGSLKLSCAASGFTFNKYAMNWVRQAPGKGLEWVARIRSKYNNYATYYADSVKDRFTISRDDSKNTAYLQMNNLKTEDTAVYYCVRHGNFGNSYISYWAYWGQGTLVTVSSGGGGQGGGGQGGGGQQTVVTQEPSLTVSPGGTVTLTCGSSTGAVTSGNYPNWVQQKPGQAPRGLIGGTKFLAPGTPARFSGSLLGGKAALTLSGVQPEDEAEYYCVLWYSNRWVFGGGTKLTVL

SEQ ID NO: 2328 - protein, 744 aa, Artificial Sequence
  Synthetic
EVQLVESGGGLVQPGGSLRLSCAASGFTFHDYPMHWVRQAPGKCLEWVSGISWNSDYIVYADSVKGRFTISRDNAKNSLYLQMNSLRPEDTALYYCAKDTAYGGKYYAFDYWGQGTPVTVSSGGGGSGGGGSGGGGSDIQMTQSPSSLSASVGDRVTITCRASQGISDYLAWYQQKPGKVPKLLIYAASTLQSGVPSRFSGSGSGTDFTLTISSLQPEDVATYYCQKYNSAPYTFGCGTKLEIKSGGGGSQVQLVQSGAEVKKPGASVKVSCKASGYTFTSYGISWVRQAPGQCLEWMGWISAYNGNTVYAQKLQDRVTMTTDTSTSTAYMELRSLRSDDTAVYFCVRDGDPLDYWGQGTLVTVSSGGGGSGGGGSGGGGSEIVLTQSPGTLSLSPGERATLSCRASQSVSSNLAWYQQKPGQAPRLLIYGASTRATGIPARFSGSGSGTEFTLTISSLQSEDFAVYYCQQYHTWPPVTFGCGTKVEIKSGGGGSEVQLVESGGGLVQPGGSLKLSCAASGFTFNKYAINWVRQAPGKGLEWVARIRSKYNNYATYYADAVKDRFTISRDDSKNTVYLQMNNLKTEDTAVYYCARAGNFGSSYISYWAYWGQGTLVTVSSGGGGSGGGGSGGGGSQTVVTQEPSLTVSPGGTVTITCGSSTGAVTSGNYPNWVQKKPGQAPRGLIGGTKFLAPGTPARFSGSLSGGKAALTLSGVQPEDEAEYYCVLWYSNRWVFGSGTKLTVL

SEQ ID NO: 2329 - protein, 744 aa, Artificial Sequence
  Synthetic
EVQLVESGGGLVQPGGSLRLSCAASGFTFHDYPMHWVRQAPGKCLEWVSGISWNSDYIVYADSVKGRFTISRDNAKNSLYLQMNSLRPEDTALYYCAKDTAYGGKYYAFDYWGQGTPVTVSSGGGGQGGGGQGGGGQEIQMTQSPSSLSASVGDRVTITCRASQGISDYLAWYQQKPGKVPKLLIYAASTLQSGVPSRFSGSGSGTDFTLTISSLQPEDVATYYCQKYNSAPYTFGCGTKLEIKSGGGGQQVQLVQSGAEVKKPGASVKVSCKASGYTFTSYGISWVRQAPGQCLEWMGWISAYNGNTVYAQKLQDRVTMTTDTSTSTAYMELRSLRSDDTAVYFCVRDGDPLDYWGQGTLVTVSSGGGGQGGGGQGGGGQEIVLTQSPGTLSLSPGERATLSCRASQSVSSNLAWYQQKPGQAPRLLIYGASTRATGIPARFSGSGSGTEFTLTISSLQSEDFAVYYCQQYHTWPPVTFGCGTKVEIKSGGGGQEVQLVESGGGLVQPGGSLKLSCAASGFTFNKYAINWVRQAPGKGLEWVARIRSKYNNYATYYADAVKDRFTISRDDSKNTVYLQMNNLKTEDTAVYYCARAGNFGSSYISYWAYWGQGTLVTVSSGGGGQGGGGQGGGGQQTVVTQEPSLTVSPGGTVTITCGSSTGAVTSGNYPNWVQKKPGQAPRGLIGGTKFLAPGTPARFSGSLSGGKAALTLSGVQPEDEAEYYCVLWYSNRWVFGSGTKLTVL

SEQ ID NO: 2330 - protein, 1232 aa, Artificial Sequence
  Synthetic
EVQLVESGGGLVQPGGSLRLSCAASGFTFHDYPMHWVRQAPGKCLEWVSGISWNSDYIVYADSVKGRFTISRDNAKNSLYLQMNSLRPEDTALYYCAKDTAYGGKYYAFDYWGQGTPVTVSSGGGGSGGGGSGGGGSDIQMTQSPSSLSASVGDRVTITCRASQGISDYLAWYQQKPGKVPKLLIYAASTLQSGVPSRFSGSGSGTDFTLTISSLQPEDVATYYCQKYNSAPYTFGCGTKLEIKSGGGGSQVQLVQSGAEVKKPGASVKVSCKASGYTFTSYGISWVRQAPGQCLEWMGWISAYNGNTVYAQKLQDRVTMTTDTSTSTAYMELRSLRSDDTAVYFCVRDGDPLDYWGQGTLVTVSSGGGGSGGGGSGGGGSEIVLTQSPGTLSLSPGERATLSCRASQSVSSNLAWYQQKPGQAPRLLIYGASTRATGIPARFSGSGSGTEFTLTISSLQSEDFAVYYCQQYHTWPPVTFGCGTKVEIKSGGGGSEVQLVESGGGLVQPGGSLKLSCAASGFTFNKYAMNWVRQAPGKGLEWVARIRSKYNNYATYYADSVKDRFTISRDDSKNTAYLQMNNLKTEDTAVYYCVRHGNFGNSYISYWAYWGQGTLVTVSSGGGGSGGGGSGGGGSQTVVTQEPSLTVSPGGTVTLTCGSSTGAVTSGNYPNWVQQKPGQAPRGLIGGTKFLAPGTPARFSGSLLGGKAALTLSGVQPEDEAEYYCVLWYSNRWVFGGGTKLTVLGGGGDKTHTCPPCPAPELLGGPSVFLFPPKPKDTLMISRTPEVTCVVVDVSHEDPEVKFNWYVDGVEVHNAKTKPCEEQYGSTYRCVSVLTVLHQDWLNGKEYKCKVSNKALPAPIEKTISKAKGQPREPQVYTLPPSREEMTKNQVSLTCLVKGFYPSDIAVEWESNGQPENNYKTTPPVLDSDGSFFLYSKLTVDKSRWQQGNVFSCSVMHEALHNHYTQKSLSLSPGKGGGGSGGGGSGGGGSGGGGSGGGGSGGGGSDKTHTCPPCPAPELLGGPSVFLFPPKPKDTLMISRTPEVTCVVVDVSHEDPEVKFNWYVDGVEVHNAKTKPCEEQYGSTYRCVSVLTVLHQDWLNGKEYKCKVSNKALPAPIEKTISKAKGQPREPQVYTLPPSREEMTKNQVSLTCLVKGFYPSDIAVEWESNGQPENNYKTTPPVLDSDGSFFLYSKLTVDKSRWQQGNVFSCSVMHEALHNHYTQKSLSLSPGK

SEQ ID NO: 2331 - protein, 1222 aa, Artificial Sequence
  Synthetic
EVQLVESGGGLVQPGGSLRLSCAASGFTFHDYPMHWVRQAPGKCLEWVSGISWNSDYIVYADSVKGRFTISRDNAKNSLYLQMNSLRPEDTALYYCAKDTAYGGKYYAFDYWGQGTPVTVSSGGGGQGGGGQGGGGQEIQMTQSPSSLSASVGDRVTITCRASQGISDYLAWYQQKPGKVPKLLIYAASTLQSGVPSRFSGSGSGTDFTLTISSLQPEDVATYYCQKYNSAPYTFGCGTKLEIKSGGGGQQVQLVQSGAEVKKPGASVKVSCKASGYTFTSYGISWVRQAPGQCLEWMGWISAYNGNTVYAQKLQDRVTMTTDTSTSTAYMELRSLRSDDTAVYFCVRDGDPLDYWGQGTLVTVSSGGGGQGGGGQGGGGQEIVLTQSPGTLSLSPGERATLSCRASQSVSSNLAWYQQKPGQAPRLLIYGASTRATGIPARFSGSGSGTEFTLTISSLQSEDFAVYYCQQYHTWPPVTFGCGTKVEIKSGGGGQEVQLVESGGGLVQPGGSLKLSCAASGFTFNKYAMNWVRQAPGKGLEWVARIRSKYNNYATYYADSVKDRFTISRDDSKNTAYLQMNNLKTEDTAVYYCVRHGNFGNSYISYWAYWGQGTLVTVSSGGGGQGGGGQGGGGQQTVVTQEPSLTVSPGGTVTLTCGSSTGAVTSGNYPNWVQQKPGQAPRGLIGGTKFLAPGTPARFSGSLLGGKAALTLSGVQPEDEAEYYCVLWYSNRWVFGGGTKLTVLGGGGCPPCPAPELLGGPSVFLFPPKPKDTLMISRTPEVTCVVVDVSHEEPEVKFNWYVDGVEVHNAKTKPCEEQYGSTYRCVSVLTVLHQDWLNGKEYKCKVSNKALPAPIEKTISKAKGQPREPQVYTLPPSREEMTKNQVSLTCLVKGFYPSDIAVEWESNGQPENNYKTTPPVLDSDGSFFLYSKLTVDKSRWQQGNVFSCSVMHEALHNHYTQKSLSLSPGKGGGGQGGGGQGGGGQGGGGQGGGGQGGGGQCPPCPAPELLGGPSVFLFPPKPKDTLMISRTPEVTCVVVDVSHEEPEVKFNWYVDGVEVHNAKTKPCEEQYGSTYRCVSVLTVLHQDWLNGKEYKCKVSNKALPAPIEKTISKAKGQPREPQVYTLPPSREEMTKNQVSLTCLVKGFYPSDIAVEWESNGQPENNYKTTPPVLDSDGSFFLYSKLTVDKSRWQQGNVFSCSVMHEALHNHYTQKSLSLSPGK

SEQ ID NO: 2332 - protein, 1232 aa, Artificial Sequence
  Synthetic
EVQLVESGGGLVQPGGSLRLSCAASGFTFHDYPMHWVRQAPGKCLEWVSGISWNSDYIVYADSVKGRFTISRDNAKNSLYLQMNSLRPEDTALYYCAKDTAYGGKYYAFDYWGQGTPVTVSSGGGGSGGGGSGGGGSDIQMTQSPSSLSASVGDRVTITCRASQGISDYLAWYQQKPGKVPKLLIYAASTLQSGVPSRFSGSGSGTDFTLTISSLQPEDVATYYCQKYNSAPYTFGCGTKLEIKSGGGGSQVQLVQSGAEVKKPGASVKVSCKASGYTFTSYGISWVRQAPGQCLEWMGWISAYNGNTVYAQKLQDRVTMTTDTSTSTAYMELRSLRSDDTAVYFCVRDGDPLDYWGQGTLVTVSSGGGGSGGGGSGGGGSEIVLTQSPGTLSLSPGERATLSCRASQSVSSNLAWYQQKPGQAPRLLIYGASTRATGIPARFSGSGSGTEFTLTISSLQSEDFAVYYCQQYHTWPPVTFGCGTKVEIKSGGGGSEVQLVESGGGLVQPGGSLKLSCAASGFTFNKYAINWVRQAPGKGLEWVARIRSKYNNYATYYADAVKDRFTISRDDSKNTVYLQMNNLKTEDTAVYYCARAGNFGSSYISYWAYWGQGTLVTVSSGGGGSGGGGSGGGGSQTVVTQEPSLTVSPGGTVTITCGSSTGAVTSGNYPNWVQKKPGQAPRGLIGGTKFLAPGTPARFSGSLSGGKAALTLSGVQPEDEAEYYCVLWYSNRWVFGSGTKLTVLGGGGDKTHTCPPCPAPELLGGPSVFLFPPKPKDTLMISRTPEVTCVVVDVSHEDPEVKFNWYVDGVEVHNAKTKPCEEQYGSTYRCVSVLTVLHQDWLNGKEYKCKVSNKALPAPIEKTISKAKGQPREPQVYTLPPSREEMTKNQVSLTCLVKGFYPSDIAVEWESNGQPENNYKTTPPVLDSDGSFFLYSKLTVDKSRWQQGNVFSCSVMHEALHNHYTQKSLSLSPGKGGGGSGGGGSGGGGSGGGGSGGGGSGGGGSDKTHTCPPCPAPELLGGPSVFLFPPKPKDTLMISRTPEVTCVVVDVSHEDPEVKFNWYVDGVEVHNAKTKPCEEQYGSTYRCVSVLTVLHQDWLNGKEYKCKVSNKALPAPIEKTISKAKGQPREPQVYTLPPSREEMTKNQVSLTCLVKGFYPSDIAVEWESNGQPENNYKTTPPVLDSDGSFFLYSKLTVDKSRWQQGNVFSCSVMHEALHNHYTQKSLSLSPGK

SEQ ID NO: 2333 - protein, 1222 aa, Artificial Sequence
  Synthetic
EVQLVESGGGLVQPGGSLRLSCAASGFTFHDYPMHWVRQAPGKCLEWVSGISWNSDYIVYADSVKGRFTISRDNAKNSLYLQMNSLRPEDTALYYCAKDTAYGGKYYAFDYWGQGTPVTVSSGGGGQGGGGQGGGGQEIQMTQSPSSLSASVGDRVTITCRASQGISDYLAWYQQKPGKVPKLLIYAASTLQSGVPSRFSGSGSGTDFTLTISSLQPEDVATYYCQKYNSAPYTFGCGTKLEIKSGGGGQQVQLVQSGAEVKKPGASVKVSCKASGYTFTSYGISWVRQAPGQCLEWMGWISAYNGNTVYAQKLQDRVTMTTDTSTSTAYMELRSLRSDDTAVYFCVRDGDPLDYWGQGTLVTVSSGGGGQGGGGQGGGGQEIVLTQSPGTLSLSPGERATLSCRASQSVSSNLAWYQQKPGQAPRLLIYGASTRATGIPARFSGSGSGTEFTLTISSLQSEDFAVYYCQQYHTWPPVTFGCGTKVEIKSGGGGQEVQLVESGGGLVQPGGSLKLSCAASGFTFNKYAINWVRQAPGKGLEWVARIRSKYNNYATYYADAVKDRFTISRDDSKNTVYLQMNNLKTEDTAVYYCARAGNFGSSYISYWAYWGQGTLVTVSSGGGGQGGGGQGGGGQQTVVTQEPSLTVSPGGTVTITCGSSTGAVTSGNYPNWVQKKPGQAPRGLIGGTKFLAPGTPARFSGSLSGGKAALTLSGVQPEDEAEYYCVLWYSNRWVFGSGTKLTVLGGGGCPPCPAPELLGGPSVFLFPPKPKDTLMISRTPEVTCVVVDVSHEEPEVKFNWYVDGVEVHNAKTKPCEEQYGSTYRCVSVLTVLHQDWLNGKEYKCKVSNKALPAPIEKTISKAKGQPREPQVYTLPPSREEMTKNQVSLTCLVKGFYPSDIAVEWESNGQPENNYKTTPPVLDSDGSFFLYSKLTVDKSRWQQGNVFSCSVMHEALHNHYTQKSLSLSPGKGGGGQGGGGQGGGGQGGGGQGGGGQGGGGQCPPCPAPELLGGPSVFLFPPKPKDTLMISRTPEVTCVVVDVSHEEPEVKFNWYVDGVEVHNAKTKPCEEQYGSTYRCVSVLTVLHQDWLNGKEYKCKVSNKALPAPIEKTISKAKGQPREPQVYTLPPSREEMTKNQVSLTCLVKGFYPSDIAVEWESNGQPENNYKTTPPVLDSDGSFFLYSKLTVDKSRWQQGNVFSCSVMHEALHNHYTQKSLSLSPGK

SEQ ID NO: 2334 - protein, 489 aa, Artificial Sequence
  Synthetic
EVQLVESGGGLVQPGGSLRLSCAASGFTFHDYPMHWVRQAPGKCLEWVSGISWNSDYIVYADSVKGRFTISRDNAKNSLYLQMNSLRPEDTALYYCAKDTAYGGKYYAFDYWGQGTPVTVSSGGGGSGGGGSGGGGSDIQMTQSPSSLSASVGDRVTITCRASQGISDYLAWYQQKPGKVPKLLIYAASTLQSGVPSRFSGSGSGTDFTLTISSLQPEDVATYYCQKYNSAPYTFGCGTKLEIKSGGGGSQVQLVQSGAEVKKPGASVKVSCKASGYSFTSYGITWVRQAPGQCLEWMGWISAYNGNTIYAQKLQGRVTMTTDTSTSTAYMELRSLRSDDTAVYYCVRDSNHEDFWGQGTLVTVSSGGGGSGGGGSGGGGSEIVLTQSPATLSVSPGERATLSCRASQSVSSNLAWYQQKPGQAPRLLIYGASTRATGIPARFSGSGSGTEFTLTISSLQSEDFAVYYCQQYHTWPPVTFGCGTKVEIK

SEQ ID NO: 2335 - protein, 489 aa, Artificial Sequence
  Synthetic
EVQLVESGGGLVQPGGSLRLSCAASGFTFHDYPMHWVRQAPGKCLEWVSGISWNSDYIVYADSVKGRFTISRDNAKNSLYLQMNSLRPEDTALYYCAKDTAYGGKYYAFDYWGQGTPVTVSSGGGGQGGGGQGGGGQEIQMTQSPSSLSASVGDRVTITCRASQGISDYLAWYQQKPGKVPKLLIYAASTLQSGVPSRFSGSGSGTDFTLTISSLQPEDVATYYCQKYNSAPYTFGCGTKLEIKSGGGGQQVQLVQSGAEVKKPGASVKVSCKASGYSFTSYGITWVRQAPGQCLEWMGWISAYNGNTIYAQKLQGRVTMTTDTSTSTAYMELRSLRSDDTAVYYCVRDSNHEDFWGQGTLVTVSSGGGGQGGGGQGGGGQEIVLTQSPATLSVSPGERATLSCRASQSVSSNLAWYQQKPGQAPRLLIYGASTRATGIPARFSGSGSGTEFTLTISSLQSEDFAVYYCQQYHTWPPVTFGCGTKVEIK

SEQ ID NO: 2336 - protein, 744 aa, Artificial Sequence
  Synthetic
EVQLVESGGGLVQPGGSLRLSCAASGFTFHDYPMHWVRQAPGKCLEWVSGISWNSDYIVYADSVKGRFTISRDNAKNSLYLQMNSLRPEDTALYYCAKDTAYGGKYYAFDYWGQGTPVTVSSGGGGSGGGGSGGGGSDIQMTQSPSSLSASVGDRVTITCRASQGISDYLAWYQQKPGKVPKLLIYAASTLQSGVPSRFSGSGSGTDFTLTISSLQPEDVATYYCQKYNSAPYTFGCGTKLEIKSGGGGSQVQLVQSGAEVKKPGASVKVSCKASGYSFTSYGITWVRQAPGQCLEWMGWISAYNGNTIYAQKLQGRVTMTTDTSTSTAYMELRSLRSDDTAVYYCVRDSNHEDFWGQGTLVTVSSGGGGSGGGGSGGGGSEIVLTQSPATLSVSPGERATLSCRASQSVSSNLAWYQQKPGQAPRLLIYGASTRATGIPARFSGSGSGTEFTLTISSLQSEDFAVYYCQQYHTWPPVTFGCGTKVEIKSGGGGSEVQLVESGGGLVQPGGSLKLSCAASGFTFNKYAMNWVRQAPGKGLEWVARIRSKYNNYATYYADSVKDRFTISRDDSKNTAYLQMNNLKTEDTAVYYCVRHGNFGNSYISYWAYWGQGTLVTVSSGGGGSGGGGSGGGGSQTVVTQEPSLTVSPGGTVTLTCGSSTGAVTSGNYPNWVQQKPGQAPRGLIGGTKFLAPGTPARFSGSLLGGKAALTLSGVQPEDEAEYYCVLWYSNRWVFGGGTKLTVL

SEQ ID NO: 2337 - protein, 744 aa, Artificial Sequence
  Synthetic
EVQLVESGGGLVQPGGSLRLSCAASGFTFHDYPMHWVRQAPGKCLEWVSGISWNSDYIVYADSVKGRFTISRDNAKNSLYLQMNSLRPEDTALYYCAKDTAYGGKYYAFDYWGQGTPVTVSSGGGGQGGGGQGGGGQEIQMTQSPSSLSASVGDRVTITCRASQGISDYLAWYQQKPGKVPKLLIYAASTLQSGVPSRFSGSGSGTDFTLTISSLQPEDVATYYCQKYNSAPYTFGCGTKLEIKSGGGGQQVQLVQSGAEVKKPGASVKVSCKASGYSFTSYGITWVRQAPGQCLEWMGWISAYNGNTIYAQKLQGRVTMTTDTSTSTAYMELRSLRSDDTAVYYCVRDSNHEDFWGQGTLVTVSSGGGGQGGGGQGGGGQEIVLTQSPATLSVSPGERATLSCRASQSVSSNLAWYQQKPGQAPRLLIYGASTRATGIPARFSGSGSGTEFTLTISSLQSEDFAVYYCQQYHTWPPVTFGCGTKVEIKSGGGGQEVQLVESGGGLVQPGGSLKLSCAASGFTFNKYAMNWVRQAPGKGLEWVARIRSKYNNYATYYADSVKDRFTISRDDSKNTAYLQMNNLKTEDTAVYYCVRHGNFGNSYISYWAYWGQGTLVTVSSGGGGQGGGGQGGGGQQTVVTQEPSLTVSPGGTVTLTCGSSTGAVTSGNYPNWVQQKPGQAPRGLIGGTKFLAPGTPARFSGSLLGGKAALTLSGVQPEDEAEYYCVLWYSNRWVFGGGTKLTVL

SEQ ID NO: 2338 - protein, 744 aa, Artificial Sequence
  Synthetic
EVQLVESGGGLVQPGGSLRLSCAASGFTFHDYPMHWVRQAPGKCLEWVSGISWNSDYIVYADSVKGRFTISRDNAKNSLYLQMNSLRPEDTALYYCAKDTAYGGKYYAFDYWGQGTPVTVSSGGGGSGGGGSGGGGSDIQMTQSPSSLSASVGDRVTITCRASQGISDYLAWYQQKPGKVPKLLIYAASTLQSGVPSRFSGSGSGTDFTLTISSLQPEDVATYYCQKYNSAPYTFGCGTKLEIKSGGGGSQVQLVQSGAEVKKPGASVKVSCKASGYSFTSYGITWVRQAPGQCLEWMGWISAYNGNTIYAQKLQGRVTMTTDTSTSTAYMELRSLRSDDTAVYYCVRDSNHEDFWGQGTLVTVSSGGGGSGGGGSGGGGSEIVLTQSPATLSVSPGERATLSCRASQSVSSNLAWYQQKPGQAPRLLIYGASTRATGIPARFSGSGSGTEFTLTISSLQSEDFAVYYCQQYHTWPPVTFGCGTKVEIKSGGGGSEVQLVESGGGLVQPGGSLKLSCAASGFTFNKYAINWVRQAPGKGLEWVARIRSKYNNYATYYADAVKDRFTISRDDSKNTVYLQMNNLKTEDTAVYYCARAGNFGSSYISYWAYWGQGTLVTVSSGGGGSGGGGSGGGGSQTVVTQEPSLTVSPGGTVTITCGSSTGAVTSGNYPNWVQKKPGQAPRGLIGGTKFLAPGTPARFSGSLSGGKAALTLSGVQPEDEAEYYCVLWYSNRWVFGSGTKLTVL

SEQ ID NO: 2339 - protein, 744 aa, Artificial Sequence
  Synthetic
EVQLVESGGGLVQPGGSLRLSCAASGFTFHDYPMHWVRQAPGKCLEWVSGISWNSDYIVYADSVKGRFTISRDNAKNSLYLQMNSLRPEDTALYYCAKDTAYGGKYYAFDYWGQGTPVTVSSGGGGQGGGGQGGGGQEIQMTQSPSSLSASVGDRVTITCRASQGISDYLAWYQQKPGKVPKLLIYAASTLQSGVPSRFSGSGSGTDFTLTISSLQPEDVATYYCQKYNSAPYTFGCGTKLEIKSGGGGQQVQLVQSGAEVKKPGASVKVSCKASGYSFTSYGITWVRQAPGQCLEWMGWISAYNGNTIYAQKLQGRVTMTTDTSTSTAYMELRSLRSDDTAVYYCVRDSNHEDFWGQGTLVTVSSGGGGQGGGGQGGGGQEIVLTQSPATLSVSPGERATLSCRASQSVSSNLAWYQQKPGQAPRLLIYGASTRATGIPARFSGSGSGTEFTLTISSLQSEDFAVYYCQQYHTWPPVTFGCGTKVEIKSGGGGQEVQLVESGGGLVQPGGSLKLSCAASGFTFNKYAINWVRQAPGKGLEWVARIRSKYNNYATYYADAVKDRFTISRDDSKNTVYLQMNNLKTEDTAVYYCARAGNFGSSYISYWAYWGQGTLVTVSSGGGGQGGGGQGGGGQQTVVTQEPSLTVSPGGTVTITCGSSTGAVTSGNYPNWVQKKPGQAPRGLIGGTKFLAPGTPARFSGSLSGGKAALTLSGVQPEDEAEYYCVLWYSNRWVFGSGTKLTVL

SEQ ID NO: 2340 - protein, 1232 aa, Artificial Sequence
  Synthetic
EVQLVESGGGLVQPGGSLRLSCAASGFTFHDYPMHWVRQAPGKCLEWVSGISWNSDYIVYADSVKGRFTISRDNAKNSLYLQMNSLRPEDTALYYCAKDTAYGGKYYAFDYWGQGTPVTVSSGGGGSGGGGSGGGGSDIQMTQSPSSLSASVGDRVTITCRASQGISDYLAWYQQKPGKVPKLLIYAASTLQSGVPSRFSGSGSGTDFTLTISSLQPEDVATYYCQKYNSAPYTFGCGTKLEIKSGGGGSQVQLVQSGAEVKKPGASVKVSCKASGYSFTSYGITWVRQAPGQCLEWMGWISAYNGNTIYAQKLQGRVTMTTDTSTSTAYMELRSLRSDDTAVYYCVRDSNHEDFWGQGTLVTVSSGGGGSGGGGSGGGGSEIVLTQSPATLSVSPGERATLSCRASQSVSSNLAWYQQKPGQAPRLLIYGASTRATGIPARFSGSGSGTEFTLTISSLQSEDFAVYYCQQYHTWPPVTFGCGTKVEIKSGGGGSEVQLVESGGGLVQPGGSLKLSCAASGFTFNKYAMNWVRQAPGKGLEWVARIRSKYNNYATYYADSVKDRFTISRDDSKNTAYLQMNNLKTEDTAVYYCVRHGNFGNSYISYWAYWGQGTLVTVSSGGGGSGGGGSGGGGSQTVVTQEPSLTVSPGGTVTLTCGSSTGAVTSGNYPNWVQQKPGQAPRGLIGGTKFLAPGTPARFSGSLLGGKAALTLSGVQPEDEAEYYCVLWYSNRWVFGGGTKLTVLGGGGDKTHTCPPCPAPELLGGPSVFLFPPKPKDTLMISRTPEVTCVVVDVSHEDPEVKFNWYVDGVEVHNAKTKPCEEQYGSTYRCVSVLTVLHQDWLNGKEYKCKVSNKALPAPIEKTISKAKGQPREPQVYTLPPSREEMTKNQVSLTCLVKGFYPSDIAVEWESNGQPENNYKTTPPVLDSDGSFFLYSKLTVDKSRWQQGNVFSCSVMHEALHNHYTQKSLSLSPGKGGGGSGGGGSGGGGSGGGGSGGGGSGGGGSDKTHTCPPCPAPELLGGPSVFLFPPKPKDTLMISRTPEVTCVVVDVSHEDPEVKFNWYVDGVEVHNAKTKPCEEQYGSTYRCVSVLTVLHQDWLNGKEYKCKVSNKALPAPIEKTISKAKGQPREPQVYTLPPSREEMTKNQVSLTCLVKGFYPSDIAVEWESNGQPENNYKTTPPVLDSDGSFFLYSKLTVDKSRWQQGNVFSCSVMHEALHNHYTQKSLSLSPGK

SEQ ID NO: 2341 - protein, 1222 aa, Artificial Sequence
  Synthetic
EVQLVESGGGLVQPGGSLRLSCAASGFTFHDYPMHWVRQAPGKCLEWVSGISWNSDYIVYADSVKGRFTISRDNAKNSLYLQMNSLRPEDTALYYCAKDTAYGGKYYAFDYWGQGTPVTVSSGGGGQGGGGQGGGGQEIQMTQSPSSLSASVGDRVTITCRASQGISDYLAWYQQKPGKVPKLLIYAASTLQSGVPSRFSGSGSGTDFTLTISSLQPEDVATYYCQKYNSAPYTFGCGTKLEIKSGGGGQQVQLVQSGAEVKKPGASVKVSCKASGYSFTSYGITWVRQAPGQCLEWMGWISAYNGNTIYAQKLQGRVTMTTDTSTSTAYMELRSLRSDDTAVYYCVRDSNHEDFWGQGTLVTVSSGGGGQGGGGQGGGGQEIVLTQSPATLSVSPGERATLSCRASQSVSSNLAWYQQKPGQAPRLLIYGASTRATGIPARFSGSGSGTEFTLTISSLQSEDFAVYYCQQYHTWPPVTFGCGTKVEIKSGGGGQEVQLVESGGGLVQPGGSLKLSCAASGFTFNKYAMNWVRQAPGKGLEWVARIRSKYNNYATYYADSVKDRFTISRDDSKNTAYLQMNNLKTEDTAVYYCVRHGNFGNSYISYWAYWGQGTLVTVSSGGGGQGGGGQGGGGQQTVVTQEPSLTVSPGGTVTLTCGSSTGAVTSGNYPNWVQQKPGQAPRGLIGGTKFLAPGTPARFSGSLLGGKAALTLSGVQPEDEAEYYCVLWYSNRWVFGGGTKLTVLGGGGCPPCPAPELLGGPSVFLFPPKPKDTLMISRTPEVTCVVVDVSHEEPEVKFNWYVDGVEVHNAKTKPCEEQYGSTYRCVSVLTVLHQDWLNGKEYKCKVSNKALPAPIEKTISKAKGQPREPQVYTLPPSREEMTKNQVSLTCLVKGFYPSDIAVEWESNGQPENNYKTTPPVLDSDGSFFLYSKLTVDKSRWQQGNVFSCSVMHEALHNHYTQKSLSLSPGKGGGGQGGGGQGGGGQGGGGQGGGGQGGGGQCPPCPAPELLGGPSVFLFPPKPKDTLMISRTPEVTCVVVDVSHEEPEVKFNWYVDGVEVHNAKTKPCEEQYGSTYRCVSVLTVLHQDWLNGKEYKCKVSNKALPAPIEKTISKAKGQPREPQVYTLPPSREEMTKNQVSLTCLVKGFYPSDIAVEWESNGQPENNYKTTPPVLDSDGSFFLYSKLTVDKSRWQQGNVFSCSVMHEALHNHYTQKSLSLSPGK

SEQ ID NO: 2342 - protein, 1232 aa, Artificial Sequence
  Synthetic
EVQLVESGGGLVQPGGSLRLSCAASGFTFHDYPMHWVRQAPGKCLEWVSGISWNSDYIVYADSVKGRFTISRDNAKNSLYLQMNSLRPEDTALYYCAKDTAYGGKYYAFDYWGQGTPVTVSSGGGGSGGGGSGGGGSDIQMTQSPSSLSASVGDRVTITCRASQGISDYLAWYQQKPGKVPKLLIYAASTLQSGVPSRFSGSGSGTDFTLTISSLQPEDVATYYCQKYNSAPYTFGCGTKLEIKSGGGGSQVQLVQSGAEVKKPGASVKVSCKASGYSFTSYGITWVRQAPGQCLEWMGWISAYNGNTIYAQKLQGRVTMTTDTSTSTAYMELRSLRSDDTAVYYCVRDSNHEDFWGQGTLVTVSSGGGGSGGGGSGGGGSEIVLTQSPATLSVSPGERATLSCRASQSVSSNLAWYQQKPGQAPRLLIYGASTRATGIPARFSGSGSGTEFTLTISSLQSEDFAVYYCQQYHTWPPVTFGCGTKVEIKSGGGGSEVQLVESGGGLVQPGGSLKLSCAASGFTFNKYAINWVRQAPGKGLEWVARIRSKYNNYATYYADAVKDRFTISRDDSKNTVYLQMNNLKTEDTAVYYCARAGNFGSSYISYWAYWGQGTLVTVSSGGGGSGGGGSGGGGSQTVVTQEPSLTVSPGGTVTITCGSSTGAVTSGNYPNWVQKKPGQAPRGLIGGTKFLAPGTPARFSGSLSGGKAALTLSGVQPEDEAEYYCVLWYSNRWVFGSGTKLTVLGGGGDKTHTCPPCPAPELLGGPSVFLFPPKPKDTLMISRTPEVTCVVVDVSHEDPEVKFNWYVDGVEVHNAKTKPCEEQYGSTYRCVSVLTVLHQDWLNGKEYKCKVSNKALPAPIEKTISKAKGQPREPQVYTLPPSREEMTKNQVSLTCLVKGFYPSDIAVEWESNGQPENNYKTTPPVLDSDGSFFLYSKLTVDKSRWQQGNVFSCSVMHEALHNHYTQKSLSLSPGKGGGGSGGGGSGGGGSGGGGSGGGGSGGGGSDKTHTCPPCPAPELLGGPSVFLFPPKPKDTLMISRTPEVTCVVVDVSHEDPEVKFNWYVDGVEVHNAKTKPCEEQYGSTYRCVSVLTVLHQDWLNGKEYKCKVSNKALPAPIEKTISKAKGQPREPQVYTLPPSREEMTKNQVSLTCLVKGFYPSDIAVEWESNGQPENNYKTTPPVLDSDGSFFLYSKLTVDKSRWQQGNVFSCSVMHEALHNHYTQKSLSLSPGK

SEQ ID NO: 2343 - protein, 1222 aa, Artificial Sequence
  Synthetic
EVQLVESGGGLVQPGGSLRLSCAASGFTFHDYPMHWVRQAPGKCLEWVSGISWNSDYIVYADSVKGRFTISRDNAKNSLYLQMNSLRPEDTALYYCAKDTAYGGKYYAFDYWGQGTPVTVSSGGGGQGGGGQGGGGQEIQMTQSPSSLSASVGDRVTITCRASQGISDYLAWYQQKPGKVPKLLIYAASTLQSGVPSRFSGSGSGTDFTLTISSLQPEDVATYYCQKYNSAPYTFGCGTKLEIKSGGGGQQVQLVQSGAEVKKPGASVKVSCKASGYSFTSYGITWVRQAPGQCLEWMGWISAYNGNTIYAQKLQGRVTMTTDTSTSTAYMELRSLRSDDTAVYYCVRDSNHEDFWGQGTLVTVSSGGGGQGGGGQGGGGQEIVLTQSPATLSVSPGERATLSCRASQSVSSNLAWYQQKPGQAPRLLIYGASTRATGIPARFSGSGSGTEFTLTISSLQSEDFAVYYCQQYHTWPPVTFGCGTKVEIKSGGGGQEVQLVESGGGLVQPGGSLKLSCAASGFTFNKYAINWVRQAPGKGLEWVARIRSKYNNYATYYADAVKDRFTISRDDSKNTVYLQMNNLKTEDTAVYYCARAGNFGSSYISYWAYWGQGTLVTVSSGGGGQGGGGQGGGGQQTVVTQEPSLTVSPGGTVTITCGSSTGAVTSGNYPNWVQKKPGQAPRGLIGGTKFLAPGTPARFSGSLSGGKAALTLSGVQPEDEAEYYCVLWYSNRWVFGSGTKLTVLGGGGCPPCPAPELLGGPSVFLFPPKPKDTLMISRTPEVTCVVVDVSHEEPEVKFNWYVDGVEVHNAKTKPCEEQYGSTYRCVSVLTVLHQDWLNGKEYKCKVSNKALPAPIEKTISKAKGQPREPQVYTLPPSREEMTKNQVSLTCLVKGFYPSDIAVEWESNGQPENNYKTTPPVLDSDGSFFLYSKLTVDKSRWQQGNVFSCSVMHEALHNHYTQKSLSLSPGKGGGGQGGGGQGGGGQGGGGQGGGGQGGGGQCPPCPAPELLGGPSVFLFPPKPKDTLMISRTPEVTCVVVDVSHEEPEVKFNWYVDGVEVHNAKTKPCEEQYGSTYRCVSVLTVLHQDWLNGKEYKCKVSNKALPAPIEKTISKAKGQPREPQVYTLPPSREEMTKNQVSLTCLVKGFYPSDIAVEWESNGQPENNYKTTPPVLDSDGSFFLYSKLTVDKSRWQQGNVFSCSVMHEALHNHYTQKSLSLSPGK

SEQ ID NO: 2344 - protein, 491 aa, Artificial Sequence
  Synthetic
EVQLVESGGGLVQPGGSLRLSCAASGFTFHDYPMHWVRQAPGKCLEWVSGISWNSDYIVYADSVKGRFTISRDNAKNSLYLQMNSLRPEDTALYYCAKDTAYGGKYYAFDYWGQGTPVTVSSGGGGSGGGGSGGGGSDIQMTQSPSSLSASVGDRVTITCRASQGISDYLAWYQQKPGKVPKLLIYAASTLQSGVPSRFSGSGSGTDFTLTISSLQPEDVATYYCQKYNSAPYTFGCGTKLEIKSGGGGSQVQLVQSGAEVKKPGESLKISCKGSGYSFTSYGISWVRQAPGQCLEWMGWISAYNGNTIYAQKLQGRVTMTTDTSTSTAYMELRRLRSDDTAVYYCARDPGVTGDDYWGQGTLVTVSSGGGGSGGGGSGGGGSEIVLTQSPATLSVSPGERATLSCRASLSVSSNLAWYQQKPGQAPRLLIYGASTRATGIPARFSGSGSGTEFTLTISSLQSEDFAVYFCQQYHSWPALTFGCGTKVEIK

SEQ ID NO: 2345 - protein, 491 aa, Artificial Sequence
  Synthetic
EVQLVESGGGLVQPGGSLRLSCAASGFTFHDYPMHWVRQAPGKCLEWVSGISWNSDYIVYADSVKGRFTISRDNAKNSLYLQMNSLRPEDTALYYCAKDTAYGGKYYAFDYWGQGTPVTVSSGGGGQGGGGQGGGGQEIQMTQSPSSLSASVGDRVTITCRASQGISDYLAWYQQKPGKVPKLLIYAASTLQSGVPSRFSGSGSGTDFTLTISSLQPEDVATYYCQKYNSAPYTFGCGTKLEIKSGGGGQQVQLVQSGAEVKKPGESLKISCKGSGYSFTSYGISWVRQAPGQCLEWMGWISAYNGNTIYAQKLQGRVTMTTDTSTSTAYMELRRLRSDDTAVYYCARDPGVTGDDYWGQGTLVTVSSGGGGQGGGGQGGGGQEIVLTQSPATLSVSPGERATLSCRASLSVSSNLAWYQQKPGQAPRLLIYGASTRATGIPARFSGSGSGTEFTLTISSLQSEDFAVYFCQQYHSWPALTFGCGTKVEIK

SEQ ID NO: 2346 - protein, 746 aa, Artificial Sequence
  Synthetic
EVQLVESGGGLVQPGGSLRLSCAASGFTFHDYPMHWVRQAPGKCLEWVSGISWNSDYIVYADSVKGRFTISRDNAKNSLYLQMNSLRPEDTALYYCAKDTAYGGKYYAFDYWGQGTPVTVSSGGGGSGGGGSGGGGSDIQMTQSPSSLSASVGDRVTITCRASQGISDYLAWYQQKPGKVPKLLIYAASTLQSGVPSRFSGSGSGTDFTLTISSLQPEDVATYYCQKYNSAPYTFGCGTKLEIKSGGGGSQVQLVQSGAEVKKPGESLKISCKGSGYSFTSYGISWVRQAPGQCLEWMGWISAYNGNTIYAQKLQGRVTMTTDTSTSTAYMELRRLRSDDTAVYYCARDPGVTGDDYWGQGTLVTVSSGGGGSGGGGSGGGGSEIVLTQSPATLSVSPGERATLSCRASLSVSSNLAWYQQKPGQAPRLLIYGASTRATGIPARFSGSGSGTEFTLTISSLQSEDFAVYFCQQYHSWPALTFGCGTKVEIKSGGGGSEVQLVESGGGLVQPGGSLKLSCAASGFTFNKYAMNWVRQAPGKGLEWVARIRSKYNNYATYYADSVKDRFTISRDDSKNTAYLQMNNLKTEDTAVYYCVRHGNFGNSYISYWAYWGQGTLVTVSSGGGGSGGGGSGGGGSQTVVTQEPSLTVSPGGTVTLTCGSSTGAVTSGNYPNWVQQKPGQAPRGLIGGTKFLAPGTPARFSGSLLGGKAALTLSGVQPEDEAEYYCVLWYSNRWVFGGGTKLTVL

SEQ ID NO: 2347 - protein, 746 aa, Artificial Sequence
  Synthetic
EVQLVESGGGLVQPGGSLRLSCAASGFTFHDYPMHWVRQAPGKCLEWVSGISWNSDYIVYADSVKGRFTISRDNAKNSLYLQMNSLRPEDTALYYCAKDTAYGGKYYAFDYWGQGTPVTVSSGGGGQGGGGQGGGGQEIQMTQSPSSLSASVGDRVTITCRASQGISDYLAWYQQKPGKVPKLLIYAASTLQSGVPSRFSGSGSGTDFTLTISSLQPEDVATYYCQKYNSAPYTFGCGTKLEIKSGGGGQQVQLVQSGAEVKKPGESLKISCKGSGYSFTSYGISWVRQAPGQCLEWMGWISAYNGNTIYAQKLQGRVTMTTDTSTSTAYMELRRLRSDDTAVYYCARDPGVTGDDYWGQGTLVTVSSGGGGQGGGGQGGGGQEIVLTQSPATLSVSPGERATLSCRASLSVSSNLAWYQQKPGQAPRLLIYGASTRATGIPARFSGSGSGTEFTLTISSLQSEDFAVYFCQQYHSWPALTFGCGTKVEIKSGGGGQEVQLVESGGGLVQPGGSLKLSCAASGFTFNKYAMNWVRQAPGKGLEWVARIRSKYNNYATYYADSVKDRFTISRDDSKNTAYLQMNNLKTEDTAVYYCVRHGNFGNSYISYWAYWGQGTLVTVSSGGGGQGGGGQGGGGQQTVVTQEPSLTVSPGGTVTLTCGSSTGAVTSGNYPNWVQQKPGQAPRGLIGGTKFLAPGTPARFSGSLLGGKAALTLSGVQPEDEAEYYCVLWYSNRWVFGGGTKLTVL

SEQ ID NO: 2348 - protein, 746 aa, Artificial Sequence
  Synthetic
EVQLVESGGGLVQPGGSLRLSCAASGFTFHDYPMHWVRQAPGKCLEWVSGISWNSDYIVYADSVKGRFTISRDNAKNSLYLQMNSLRPEDTALYYCAKDTAYGGKYYAFDYWGQGTPVTVSSGGGGSGGGGSGGGGSDIQMTQSPSSLSASVGDRVTITCRASQGISDYLAWYQQKPGKVPKLLIYAASTLQSGVPSRFSGSGSGTDFTLTISSLQPEDVATYYCQKYNSAPYTFGCGTKLEIKSGGGGSQVQLVQSGAEVKKPGESLKISCKGSGYSFTSYGISWVRQAPGQCLEWMGWISAYNGNTIYAQKLQGRVTMTTDTSTSTAYMELRRLRSDDTAVYYCARDPGVTGDDYWGQGTLVTVSSGGGGSGGGGSGGGGSEIVLTQSPATLSVSPGERATLSCRASLSVSSNLAWYQQKPGQAPRLLIYGASTRATGIPARFSGSGSGTEFTLTISSLQSEDFAVYFCQQYHSWPALTFGCGTKVEIKSGGGGSEVQLVESGGGLVQPGGSLKLSCAASGFTFNKYAINWVRQAPGKGLEWVARIRSKYNNYATYYADAVKDRFTISRDDSKNTVYLQMNNLKTEDTAVYYCARAGNFGSSYISYWAYWGQGTLVTVSSGGGGSGGGGSGGGGSQTVVTQEPSLTVSPGGTVTITCGSSTGAVTSGNYPNWVQKKPGQAPRGLIGGTKFLAPGTPARFSGSLSGGKAALTLSGVQPEDEAEYYCVLWYSNRWVFGSGTKLTVL

SEQ ID NO: 2349 - protein, 746 aa, Artificial Sequence
  Synthetic
EVQLVESGGGLVQPGGSLRLSCAASGFTFHDYPMHWVRQAPGKCLEWVSGISWNSDYIVYADSVKGRFTISRDNAKNSLYLQMNSLRPEDTALYYCAKDTAYGGKYYAFDYWGQGTPVTVSSGGGGQGGGGQGGGGQEIQMTQSPSSLSASVGDRVTITCRASQGISDYLAWYQQKPGKVPKLLIYAASTLQSGVPSRFSGSGSGTDFTLTISSLQPEDVATYYCQKYNSAPYTFGCGTKLEIKSGGGGQQVQLVQSGAEVKKPGESLKISCKGSGYSFTSYGISWVRQAPGQCLEWMGWISAYNGNTIYAQKLQGRVTMTTDTSTSTAYMELRRLRSDDTAVYYCARDPGVTGDDYWGQGTLVTVSSGGGGQGGGGQGGGGQEIVLTQSPATLSVSPGERATLSCRASLSVSSNLAWYQQKPGQAPRLLIYGASTRATGIPARFSGSGSGTEFTLTISSLQSEDFAVYFCQQYHSWPALTFGCGTKVEIKSGGGGQEVQLVESGGGLVQPGGSLKLSCAASGFTFNKYAINWVRQAPGKGLEWVARIRSKYNNYATYYADAVKDRFTISRDDSKNTVYLQMNNLKTEDTAVYYCARAGNFGSSYISYWAYWGQGTLVTVSSGGGGQGGGGQGGGGQQTVVTQEPSLTVSPGGTVTITCGSSTGAVTSGNYPNWVQKKPGQAPRGLIGGTKFLAPGTPARFSGSLSGGKAALTLSGVQPEDEAEYYCVLWYSNRWVFGSGTKLTVL

SEQ ID NO: 2350 - protein, 1234 aa, Artificial Sequence
  Synthetic
EVQLVESGGGLVQPGGSLRLSCAASGFTFHDYPMHWVRQAPGKCLEWVSGISWNSDYIVYADSVKGRFTISRDNAKNSLYLQMNSLRPEDTALYYCAKDTAYGGKYYAFDYWGQGTPVTVSSGGGGSGGGGSGGGGSDIQMTQSPSSLSASVGDRVTITCRASQGISDYLAWYQQKPGKVPKLLIYAASTLQSGVPSRFSGSGSGTDFTLTISSLQPEDVATYYCQKYNSAPYTFGCGTKLEIKSGGGGSQVQLVQSGAEVKKPGESLKISCKGSGYSFTSYGISWVRQAPGQCLEWMGWISAYNGNTIYAQKLQGRVTMTTDTSTSTAYMELRRLRSDDTAVYYCARDPGVTGDDYWGQGTLVTVSSGGGGSGGGGSGGGGSEIVLTQSPATLSVSPGERATLSCRASLSVSSNLAWYQQKPGQAPRLLIYGASTRATGIPARFSGSGSGTEFTLTISSLQSEDFAVYFCQQYHSWPALTFGCGTKVEIKSGGGGSEVQLVESGGGLVQPGGSLKLSCAASGFTFNKYAMNWVRQAPGKGLEWVARIRSKYNNYATYYADSVKDRFTISRDDSKNTAYLQMNNLKTEDTAVYYCVRHGNFGNSYISYWAYWGQGTLVTVSSGGGGSGGGGSGGGGSQTVVTQEPSLTVSPGGTVTLTCGSSTGAVTSGNYPNWVQQKPGQAPRGLIGGTKFLAPGTPARFSGSLLGGKAALTLSGVQPEDEAEYYCVLWYSNRWVFGGGTKLTVLGGGGDKTHTCPPCPAPELLGGPSVFLFPPKPKDTLMISRTPEVTCVVVDVSHEDPEVKFNWYVDGVEVHNAKTKPCEEQYGSTYRCVSVLTVLHQDWLNGKEYKCKVSNKALPAPIEKTISKAKGQPREPQVYTLPPSREEMTKNQVSLTCLVKGFYPSDIAVEWESNGQPENNYKTTPPVLDSDGSFFLYSKLTVDKSRWQQGNVFSCSVMHEALHNHYTQKSLSLSPGKGGGGSGGGGSGGGGSGGGGSGGGGSGGGGSDKTHTCPPCPAPELLGGPSVFLFPPKPKDTLMISRTPEVTCVVVDVSHEDPEVKFNWYVDGVEVHNAKTKPCEEQYGSTYRCVSVLTVLHQDWLNGKEYKCKVSNKALPAPIEKTISKAKGQPREPQVYTLPPSREEMTKNQVSLTCLVKGFYPSDIAVEWESNGQPENNYKTTPPVLDSDGSFFLYSKLTVDKSRWQQGNVFSCSVMHEALHNHYTQKSLSLSPGK

SEQ ID NO: 2351 - protein, 1224 aa, Artificial Sequence
  Synthetic
EVQLVESGGGLVQPGGSLRLSCAASGFTFHDYPMHWVRQAPGKCLEWVSGISWNSDYIVYADSVKGRFTISRDNAKNSLYLQMNSLRPEDTALYYCAKDTAYGGKYYAFDYWGQGTPVTVSSGGGGQGGGGQGGGGQEIQMTQSPSSLSASVGDRVTITCRASQGISDYLAWYQQKPGKVPKLLIYAASTLQSGVPSRFSGSGSGTDFTLTISSLQPEDVATYYCQKYNSAPYTFGCGTKLEIKSGGGGQQVQLVQSGAEVKKPGESLKISCKGSGYSFTSYGISWVRQAPGQCLEWMGWISAYNGNTIYAQKLQGRVTMTTDTSTSTAYMELRRLRSDDTAVYYCARDPGVTGDDYWGQGTLVTVSSGGGGQGGGGQGGGGQEIVLTQSPATLSVSPGERATLSCRASLSVSSNLAWYQQKPGQAPRLLIYGASTRATGIPARFSGSGSGTEFTLTISSLQSEDFAVYFCQQYHSWPALTFGCGTKVEIKSGGGGQEVQLVESGGGLVQPGGSLKLSCAASGFTFNKYAMNWVRQAPGKGLEWVARIRSKYNNYATYYADSVKDRFTISRDDSKNTAYLQMNNLKTEDTAVYYCVRHGNFGNSYISYWAYWGQGTLVTVSSGGGGQGGGGQGGGGQQTVVTQEPSLTVSPGGTVTLTCGSSTGAVTSGNYPNWVQQKPGQAPRGLIGGTKFLAPGTPARFSGSLLGGKAALTLSGVQPEDEAEYYCVLWYSNRWVFGGGTKLTVLGGGGCPPCPAPELLGGPSVFLFPPKPKDTLMISRTPEVTCVVVDVSHEEPEVKFNWYVDGVEVHNAKTKPCEEQYGSTYRCVSVLTVLHQDWLNGKEYKCKVSNKALPAPIEKTISKAKGQPREPQVYTLPPSREEMTKNQVSLTCLVKGFYPSDIAVEWESNGQPENNYKTTPPVLDSDGSFFLYSKLTVDKSRWQQGNVFSCSVMHEALHNHYTQKSLSLSPGKGGGGQGGGGQGGGGQGGGGQGGGGQGGGGQCPPCPAPELLGGPSVFLFPPKPKDTLMISRTPEVTCVVVDVSHEEPEVKFNWYVDGVEVHNAKTKPCEEQYGSTYRCVSVLTVLHQDWLNGKEYKCKVSNKALPAPIEKTISKAKGQPREPQVYTLPPSREEMTKNQVSLTCLVKGFYPSDIAVEWESNGQPENNYKTTPPVLDSDGSFFLYSKLTVDKSRWQQGNVFSCSVMHEALHNHYTQKSLSLSPGK

SEQ ID NO: 2352 - protein, 1234 aa, Artificial Sequence
  Synthetic
EVQLVESGGGLVQPGGSLRLSCAASGFTFHDYPMHWVRQAPGKCLEWVSGISWNSDYIVYADSVKGRFTISRDNAKNSLYLQMNSLRPEDTALYYCAKDTAYGGKYYAFDYWGQGTPVTVSSGGGGSGGGGSGGGGSDIQMTQSPSSLSASVGDRVTITCRASQGISDYLAWYQQKPGKVPKLLIYAASTLQSGVPSRFSGSGSGTDFTLTISSLQPEDVATYYCQKYNSAPYTFGCGTKLEIKSGGGGSQVQLVQSGAEVKKPGESLKISCKGSGYSFTSYGISWVRQAPGQCLEWMGWISAYNGNTIYAQKLQGRVTMTTDTSTSTAYMELRRLRSDDTAVYYCARDPGVTGDDYWGQGTLVTVSSGGGGSGGGGSGGGGSEIVLTQSPATLSVSPGERATLSCRASLSVSSNLAWYQQKPGQAPRLLIYGASTRATGIPARFSGSGSGTEFTLTISSLQSEDFAVYFCQQYHSWPALTFGCGTKVEIKSGGGGSEVQLVESGGGLVQPGGSLKLSCAASGFTFNKYAINWVRQAPGKGLEWVARIRSKYNNYATYYADAVKDRFTISRDDSKNTVYLQMNNLKTEDTAVYYCARAGNFGSSYISYWAYWGQGTLVTVSSGGGGSGGGGSGGGGSQTVVTQEPSLTVSPGGTVTITCGSSTGAVTSGNYPNWVQKKPGQAPRGLIGGTKFLAPGTPARFSGSLSGGKAALTLSGVQPEDEAEYYCVLWYSNRWVFGSGTKLTVLGGGGDKTHTCPPCPAPELLGGPSVFLFPPKPKDTLMISRTPEVTCVVVDVSHEDPEVKFNWYVDGVEVHNAKTKPCEEQYGSTYRCVSVLTVLHQDWLNGKEYKCKVSNKALPAPIEKTISKAKGQPREPQVYTLPPSREEMTKNQVSLTCLVKGFYPSDIAVEWESNGQPENNYKTTPPVLDSDGSFFLYSKLTVDKSRWQQGNVFSCSVMHEALHNHYTQKSLSLSPGKGGGGSGGGGSGGGGSGGGGSGGGGSGGGGSDKTHTCPPCPAPELLGGPSVFLFPPKPKDTLMISRTPEVTCVVVDVSHEDPEVKFNWYVDGVEVHNAKTKPCEEQYGSTYRCVSVLTVLHQDWLNGKEYKCKVSNKALPAPIEKTISKAKGQPREPQVYTLPPSREEMTKNQVSLTCLVKGFYPSDIAVEWESNGQPENNYKTTPPVLDSDGSFFLYSKLTVDKSRWQQGNVFSCSVMHEALHNHYTQKSLSLSPGK

SEQ ID NO: 2353 - protein, 1224 aa, Artificial Sequence
  Synthetic
EVQLVESGGGLVQPGGSLRLSCAASGFTFHDYPMHWVRQAPGKCLEWVSGISWNSDYIVYADSVKGRFTISRDNAKNSLYLQMNSLRPEDTALYYCAKDTAYGGKYYAFDYWGQGTPVTVSSGGGGQGGGGQGGGGQEIQMTQSPSSLSASVGDRVTITCRASQGISDYLAWYQQKPGKVPKLLIYAASTLQSGVPSRFSGSGSGTDFTLTISSLQPEDVATYYCQKYNSAPYTFGCGTKLEIKSGGGGQQVQLVQSGAEVKKPGESLKISCKGSGYSFTSYGISWVRQAPGQCLEWMGWISAYNGNTIYAQKLQGRVTMTTDTSTSTAYMELRRLRSDDTAVYYCARDPGVTGDDYWGQGTLVTVSSGGGGQGGGGQGGGGQEIVLTQSPATLSVSPGERATLSCRASLSVSSNLAWYQQKPGQAPRLLIYGASTRATGIPARFSGSGSGTEFTLTISSLQSEDFAVYFCQQYHSWPALTFGCGTKVEIKSGGGGQEVQLVESGGGLVQPGGSLKLSCAASGFTFNKYAINWVRQAPGKGLEWVARIRSKYNNYATYYADAVKDRFTISRDDSKNTVYLQMNNLKTEDTAVYYCARAGNFGSSYISYWAYWGQGTLVTVSSGGGGQGGGGQGGGGQQTVVTQEPSLTVSPGGTVTITCGSSTGAVTSGNYPNWVQKKPGQAPRGLIGGTKFLAPGTPARFSGSLSGGKAALTLSGVQPEDEAEYYCVLWYSNRWVFGSGTKLTVLGGGGCPPCPAPELLGGPSVFLFPPKPKDTLMISRTPEVTCVVVDVSHEEPEVKFNWYVDGVEVHNAKTKPCEEQYGSTYRCVSVLTVLHQDWLNGKEYKCKVSNKALPAPIEKTISKAKGQPREPQVYTLPPSREEMTKNQVSLTCLVKGFYPSDIAVEWESNGQPENNYKTTPPVLDSDGSFFLYSKLTVDKSRWQQGNVFSCSVMHEALHNHYTQKSLSLSPGKGGGGQGGGGQGGGGQGGGGQGGGGQGGGGQCPPCPAPELLGGPSVFLFPPKPKDTLMISRTPEVTCVVVDVSHEEPEVKFNWYVDGVEVHNAKTKPCEEQYGSTYRCVSVLTVLHQDWLNGKEYKCKVSNKALPAPIEKTISKAKGQPREPQVYTLPPSREEMTKNQVSLTCLVKGFYPSDIAVEWESNGQPENNYKTTPPVLDSDGSFFLYSKLTVDKSRWQQGNVFSCSVMHEALHNHYTQKSLSLSPGK

SEQ ID NO: 2354 - protein, 489 aa, Artificial Sequence
  Synthetic
EVQLVESGGGLVQPGGSLRLSCAASGFTFHDYPMHWVRQAPGKCLEWVSGISWNSDYIVYADSVKGRFTISRDNAKNSLYLQMNSLRPEDTALYYCAKDTAYGGKYYAFDYWGQGTPVTVSSGGGGSGGGGSGGGGSDIQMTQSPSSLSASVGDRVTITCRASQGISDYLAWYQQKPGKVPKLLIYAASTLQSGVPSRFSGSGSGTDFTLTISSLQPEDVATYYCQKYNSAPYTFGCGTKLEIKSGGGGSQVQLVQSGAEVKKPGASVKVSCKTSGYPFTSYGISWVRQAPGQCLEWMGWISPYSGAPTYAQKVQGRVTMTTDTSTTTAYMELRSLRSDDTAVYYCVRDGLEEDYWGQGTLVTVSSGGGGSGGGGSGGGGSEIVLTQSPATLSVSPGEGATLSCRASQSVSSNLAWYQQSPGQAPRLLIYGASTRATGIPARFSGSGSGTEFTLTISSLQSEDFAVYYCQQYHSWPALTFGCGTKVDIK

SEQ ID NO: 2355 - protein, 489 aa, Artificial Sequence
  Synthetic
EVQLVESGGGLVQPGGSLRLSCAASGFTFHDYPMHWVRQAPGKCLEWVSGISWNSDYIVYADSVKGRFTISRDNAKNSLYLQMNSLRPEDTALYYCAKDTAYGGKYYAFDYWGQGTPVTVSSGGGGQGGGGQGGGGQEIQMTQSPSSLSASVGDRVTITCRASQGISDYLAWYQQKPGKVPKLLIYAASTLQSGVPSRFSGSGSGTDFTLTISSLQPEDVATYYCQKYNSAPYTFGCGTKLEIKSGGGGQQVQLVQSGAEVKKPGASVKVSCKTSGYPFTSYGISWVRQAPGQCLEWMGWISPYSGAPTYAQKVQGRVTMTTDTSTTTAYMELRSLRSDDTAVYYCVRDGLEEDYWGQGTLVTVSSGGGGQGGGGQGGGGQEIVLTQSPATLSVSPGEGATLSCRASQSVSSNLAWYQQSPGQAPRLLIYGASTRATGIPARFSGSGSGTEFTLTISSLQSEDFAVYYCQQYHSWPALTFGCGTKVDIK

SEQ ID NO: 2356 - protein, 744 aa, Artificial Sequence
  Synthetic
EVQLVESGGGLVQPGGSLRLSCAASGFTFHDYPMHWVRQAPGKCLEWVSGISWNSDYIVYADSVKGRFTISRDNAKNSLYLQMNSLRPEDTALYYCAKDTAYGGKYYAFDYWGQGTPVTVSSGGGGSGGGGSGGGGSDIQMTQSPSSLSASVGDRVTITCRASQGISDYLAWYQQKPGKVPKLLIYAASTLQSGVPSRFSGSGSGTDFTLTISSLQPEDVATYYCQKYNSAPYTFGCGTKLEIKSGGGGSQVQLVQSGAEVKKPGASVKVSCKTSGYPFTSYGISWVRQAPGQCLEWMGWISPYSGAPTYAQKVQGRVTMTTDTSTTTAYMELRSLRSDDTAVYYCVRDGLEEDYWGQGTLVTVSSGGGGSGGGGSGGGGSEIVLTQSPATLSVSPGEGATLSCRASQSVSSNLAWYQQSPGQAPRLLIYGASTRATGIPARFSGSGSGTEFTLTISSLQSEDFAVYYCQQYHSWPALTFGCGTKVDIKSGGGGSEVQLVESGGGLVQPGGSLKLSCAASGFTFNKYAMNWVRQAPGKGLEWVARIRSKYNNYATYYADSVKDRFTISRDDSKNTAYLQMNNLKTEDTAVYYCVRHGNFGNSYISYWAYWGQGTLVTVSSGGGGSGGGGSGGGGSQTVVTQEPSLTVSPGGTVTLTCGSSTGAVTSGNYPNWVQQKPGQAPRGLIGGTKFLAPGTPARFSGSLLGGKAALTLSGVQPEDEAEYYCVLWYSNRWVFGGGTKLTVL

SEQ ID NO: 2357 - protein, 744 aa, Artificial Sequence
  Synthetic
EVQLVESGGGLVQPGGSLRLSCAASGFTFHDYPMHWVRQAPGKCLEWVSGISWNSDYIVYADSVKGRFTISRDNAKNSLYLQMNSLRPEDTALYYCAKDTAYGGKYYAFDYWGQGTPVTVSSGGGGQGGGGQGGGGQEIQMTQSPSSLSASVGDRVTITCRASQGISDYLAWYQQKPGKVPKLLIYAASTLQSGVPSRFSGSGSGTDFTLTISSLQPEDVATYYCQKYNSAPYTFGCGTKLEIKSGGGGQQVQLVQSGAEVKKPGASVKVSCKTSGYPFTSYGISWVRQAPGQCLEWMGWISPYSGAPTYAQKVQGRVTMTTDTSTTTAYMELRSLRSDDTAVYYCVRDGLEEDYWGQGTLVTVSSGGGGQGGGGQGGGGQEIVLTQSPATLSVSPGEGATLSCRASQSVSSNLAWYQQSPGQAPRLLIYGASTRATGIPARFSGSGSGTEFTLTISSLQSEDFAVYYCQQYHSWPALTFGCGTKVDIKSGGGGQEVQLVESGGGLVQPGGSLKLSCAASGFTFNKYAMNWVRQAPGKGLEWVARIRSKYNNYATYYADSVKDRFTISRDDSKNTAYLQMNNLKTEDTAVYYCVRHGNFGNSYISYWAYWGQGTLVTVSSGGGGQGGGGQGGGGQQTVVTQEPSLTVSPGGTVTLTCGSSTGAVTSGNYPNWVQQKPGQAPRGLIGGTKFLAPGTPARFSGSLLGGKAALTLSGVQPEDEAEYYCVLWYSNRWVFGGGTKLTVL

SEQ ID NO: 2358 - protein, 744 aa, Artificial Sequence
  Synthetic
EVQLVESGGGLVQPGGSLRLSCAASGFTFHDYPMHWVRQAPGKCLEWVSGISWNSDYIVYADSVKGRFTISRDNAKNSLYLQMNSLRPEDTALYYCAKDTAYGGKYYAFDYWGQGTPVTVSSGGGGSGGGGSGGGGSDIQMTQSPSSLSASVGDRVTITCRASQGISDYLAWYQQKPGKVPKLLIYAASTLQSGVPSRFSGSGSGTDFTLTISSLQPEDVATYYCQKYNSAPYTFGCGTKLEIKSGGGGSQVQLVQSGAEVKKPGASVKVSCKTSGYPFTSYGISWVRQAPGQCLEWMGWISPYSGAPTYAQKVQGRVTMTTDTSTTTAYMELRSLRSDDTAVYYCVRDGLEEDYWGQGTLVTVSSGGGGSGGGGSGGGGSEIVLTQSPATLSVSPGEGATLSCRASQSVSSNLAWYQQSPGQAPRLLIYGASTRATGIPARFSGSGSGTEFTLTISSLQSEDFAVYYCQQYHSWPALTFGCGTKVDIKSGGGGSEVQLVESGGGLVQPGGSLKLSCAASGFTFNKYAINWVRQAPGKGLEWVARIRSKYNNYATYYADAVKDRFTISRDDSKNTVYLQMNNLKTEDTAVYYCARAGNFGSSYISYWAYWGQGTLVTVSSGGGGSGGGGSGGGGSQTVVTQEPSLTVSPGGTVTITCGSSTGAVTSGNYPNWVQKKPGQAPRGLIGGTKFLAPGTPARFSGSLSGGKAALTLSGVQPEDEAEYYCVLWYSNRWVFGSGTKLTVL

SEQ ID NO: 2359 - protein, 744 aa, Artificial Sequence
  Synthetic
EVQLVESGGGLVQPGGSLRLSCAASGFTFHDYPMHWVRQAPGKCLEWVSGISWNSDYIVYADSVKGRFTISRDNAKNSLYLQMNSLRPEDTALYYCAKDTAYGGKYYAFDYWGQGTPVTVSSGGGGQGGGGQGGGGQEIQMTQSPSSLSASVGDRVTITCRASQGISDYLAWYQQKPGKVPKLLIYAASTLQSGVPSRFSGSGSGTDFTLTISSLQPEDVATYYCQKYNSAPYTFGCGTKLEIKSGGGGQQVQLVQSGAEVKKPGASVKVSCKTSGYPFTSYGISWVRQAPGQCLEWMGWISPYSGAPTYAQKVQGRVTMTTDTSTTTAYMELRSLRSDDTAVYYCVRDGLEEDYWGQGTLVTVSSGGGGQGGGGQGGGGQEIVLTQSPATLSVSPGEGATLSCRASQSVSSNLAWYQQSPGQAPRLLIYGASTRATGIPARFSGSGSGTEFTLTISSLQSEDFAVYYCQQYHSWPALTFGCGTKVDIKSGGGGQEVQLVESGGGLVQPGGSLKLSCAASGFTFNKYAINWVRQAPGKGLEWVARIRSKYNNYATYYADAVKDRFTISRDDSKNTVYLQMNNLKTEDTAVYYCARAGNFGSSYISYWAYWGQGTLVTVSSGGGGQGGGGQGGGGQQTVVTQEPSLTVSPGGTVTITCGSSTGAVTSGNYPNWVQKKPGQAPRGLIGGTKFLAPGTPARFSGSLSGGKAALTLSGVQPEDEAEYYCVLWYSNRWVFGSGTKLTVL

SEQ ID NO: 2360 - protein, 1232 aa, Artificial Sequence
  Synthetic
EVQLVESGGGLVQPGGSLRLSCAASGFTFHDYPMHWVRQAPGKCLEWVSGISWNSDYIVYADSVKGRFTISRDNAKNSLYLQMNSLRPEDTALYYCAKDTAYGGKYYAFDYWGQGTPVTVSSGGGGSGGGGSGGGGSDIQMTQSPSSLSASVGDRVTITCRASQGISDYLAWYQQKPGKVPKLLIYAASTLQSGVPSRFSGSGSGTDFTLTISSLQPEDVATYYCQKYNSAPYTFGCGTKLEIKSGGGGSQVQLVQSGAEVKKPGASVKVSCKTSGYPFTSYGISWVRQAPGQCLEWMGWISPYSGAPTYAQKVQGRVTMTTDTSTTTAYMELRSLRSDDTAVYYCVRDGLEEDYWGQGTLVTVSSGGGGSGGGGSGGGGSEIVLTQSPATLSVSPGEGATLSCRASQSVSSNLAWYQQSPGQAPRLLIYGASTRATGIPARFSGSGSGTEFTLTISSLQSEDFAVYYCQQYHSWPALTFGCGTKVDIKSGGGGSEVQLVESGGGLVQPGGSLKLSCAASGFTFNKYAMNWVRQAPGKGLEWVARIRSKYNNYATYYADSVKDRFTISRDDSKNTAYLQMNNLKTEDTAVYYCVRHGNFGNSYISYWAYWGQGTLVTVSSGGGGSGGGGSGGGGSQTVVTQEPSLTVSPGGTVTLTCGSSTGAVTSGNYPNWVQQKPGQAPRGLIGGTKFLAPGTPARFSGSLLGGKAALTLSGVQPEDEAEYYCVLWYSNRWVFGGGTKLTVLGGGGDKTHTCPPCPAPELLGGPSVFLFPPKPKDTLMISRTPEVTCVVVDVSHEDPEVKFNWYVDGVEVHNAKTKPCEEQYGSTYRCVSVLTVLHQDWLNGKEYKCKVSNKALPAPIEKTISKAKGQPREPQVYTLPPSREEMTKNQVSLTCLVKGFYPSDIAVEWESNGQPENNYKTTPPVLDSDGSFFLYSKLTVDKSRWQQGNVFSCSVMHEALHNHYTQKSLSLSPGKGGGGSGGGGSGGGGSGGGGSGGGGSGGGGSDKTHTCPPCPAPELLGGPSVFLFPPKPKDTLMISRTPEVTCVVVDVSHEDPEVKFNWYVDGVEVHNAKTKPCEEQYGSTYRCVSVLTVLHQDWLNGKEYKCKVSNKALPAPIEKTISKAKGQPREPQVYTLPPSREEMTKNQVSLTCLVKGFYPSDIAVEWESNGQPENNYKTTPPVLDSDGSFFLYSKLTVDKSRWQQGNVFSCSVMHEALHNHYTQKSLSLSPGK

SEQ ID NO: 2361 - protein, 1222 aa, Artificial Sequence
  Synthetic
EVQLVESGGGLVQPGGSLRLSCAASGFTFHDYPMHWVRQAPGKCLEWVSGISWNSDYIVYADSVKGRFTISRDNAKNSLYLQMNSLRPEDTALYYCAKDTAYGGKYYAFDYWGQGTPVTVSSGGGGQGGGGQGGGGQEIQMTQSPSSLSASVGDRVTITCRASQGISDYLAWYQQKPGKVPKLLIYAASTLQSGVPSRFSGSGSGTDFTLTISSLQPEDVATYYCQKYNSAPYTFGCGTKLEIKSGGGGQQVQLVQSGAEVKKPGASVKVSCKTSGYPFTSYGISWVRQAPGQCLEWMGWISPYSGAPTYAQKVQGRVTMTTDTSTTTAYMELRSLRSDDTAVYYCVRDGLEEDYWGQGTLVTVSSGGGGQGGGGQGGGGQEIVLTQSPATLSVSPGEGATLSCRASQSVSSNLAWYQQSPGQAPRLLIYGASTRATGIPARFSGSGSGTEFTLTISSLQSEDFAVYYCQQYHSWPALTFGCGTKVDIKSGGGGQEVQLVESGGGLVQPGGSLKLSCAASGFTFNKYAMNWVRQAPGKGLEWVARIRSKYNNYATYYADSVKDRFTISRDDSKNTAYLQMNNLKTEDTAVYYCVRHGNFGNSYISYWAYWGQGTLVTVSSGGGGQGGGGQGGGGQQTVVTQEPSLTVSPGGTVTLTCGSSTGAVTSGNYPNWVQQKPGQAPRGLIGGTKFLAPGTPARFSGSLLGGKAALTLSGVQPEDEAEYYCVLWYSNRWVFGGGTKLTVLGGGGCPPCPAPELLGGPSVFLFPPKPKDTLMISRTPEVTCVVVDVSHEEPEVKFNWYVDGVEVHNAKTKPCEEQYGSTYRCVSVLTVLHQDWLNGKEYKCKVSNKALPAPIEKTISKAKGQPREPQVYTLPPSREEMTKNQVSLTCLVKGFYPSDIAVEWESNGQPENNYKTTPPVLDSDGSFFLYSKLTVDKSRWQQGNVFSCSVMHEALHNHYTQKSLSLSPGKGGGGQGGGGQGGGGQGGGGQGGGGQGGGGQCPPCPAPELLGGPSVFLFPPKPKDTLMISRTPEVTCVVVDVSHEEPEVKFNWYVDGVEVHNAKTKPCEEQYGSTYRCVSVLTVLHQDWLNGKEYKCKVSNKALPAPIEKTISKAKGQPREPQVYTLPPSREEMTKNQVSLTCLVKGFYPSDIAVEWESNGQPENNYKTTPPVLDSDGSFFLYSKLTVDKSRWQQGNVFSCSVMHEALHNHYTQKSLSLSPGK

SEQ ID NO: 2362 - protein, 1232 aa, Artificial Sequence
  Synthetic
EVQLVESGGGLVQPGGSLRLSCAASGFTFHDYPMHWVRQAPGKCLEWVSGISWNSDYIVYADSVKGRFTISRDNAKNSLYLQMNSLRPEDTALYYCAKDTAYGGKYYAFDYWGQGTPVTVSSGGGGSGGGGSGGGGSDIQMTQSPSSLSASVGDRVTITCRASQGISDYLAWYQQKPGKVPKLLIYAASTLQSGVPSRFSGSGSGTDFTLTISSLQPEDVATYYCQKYNSAPYTFGCGTKLEIKSGGGGSQVQLVQSGAEVKKPGASVKVSCKTSGYPFTSYGISWVRQAPGQCLEWMGWISPYSGAPTYAQKVQGRVTMTTDTSTTTAYMELRSLRSDDTAVYYCVRDGLEEDYWGQGTLVTVSSGGGGSGGGGSGGGGSEIVLTQSPATLSVSPGEGATLSCRASQSVSSNLAWYQQSPGQAPRLLIYGASTRATGIPARFSGSGSGTEFTLTISSLQSEDFAVYYCQQYHSWPALTFGCGTKVDIKSGGGGSEVQLVESGGGLVQPGGSLKLSCAASGFTFNKYAINWVRQAPGKGLEWVARIRSKYNNYATYYADAVKDRFTISRDDSKNTVYLQMNNLKTEDTAVYYCARAGNFGSSYISYWAYWGQGTLVTVSSGGGGSGGGGSGGGGSQTVVTQEPSLTVSPGGTVTITCGSSTGAVTSGNYPNWVQKKPGQAPRGLIGGTKFLAPGTPARFSGSLSGGKAALTLSGVQPEDEAEYYCVLWYSNRWVFGSGTKLTVLGGGGDKTHTCPPCPAPELLGGPSVFLFPPKPKDTLMISRTPEVTCVVVDVSHEDPEVKFNWYVDGVEVHNAKTKPCEEQYGSTYRCVSVLTVLHQDWLNGKEYKCKVSNKALPAPIEKTISKAKGQPREPQVYTLPPSREEMTKNQVSLTCLVKGFYPSDIAVEWESNGQPENNYKTTPPVLDSDGSFFLYSKLTVDKSRWQQGNVFSCSVMHEALHNHYTQKSLSLSPGKGGGGSGGGGSGGGGSGGGGSGGGGSGGGGSDKTHTCPPCPAPELLGGPSVFLFPPKPKDTLMISRTPEVTCVVVDVSHEDPEVKFNWYVDGVEVHNAKTKPCEEQYGSTYRCVSVLTVLHQDWLNGKEYKCKVSNKALPAPIEKTISKAKGQPREPQVYTLPPSREEMTKNQVSLTCLVKGFYPSDIAVEWESNGQPENNYKTTPPVLDSDGSFFLYSKLTVDKSRWQQGNVFSCSVMHEALHNHYTQKSLSLSPGK

SEQ ID NO: 2363 - protein, 1222 aa, Artificial Sequence
  Synthetic
EVQLVESGGGLVQPGGSLRLSCAASGFTFHDYPMHWVRQAPGKCLEWVSGISWNSDYIVYADSVKGRFTISRDNAKNSLYLQMNSLRPEDTALYYCAKDTAYGGKYYAFDYWGQGTPVTVSSGGGGQGGGGQGGGGQEIQMTQSPSSLSASVGDRVTITCRASQGISDYLAWYQQKPGKVPKLLIYAASTLQSGVPSRFSGSGSGTDFTLTISSLQPEDVATYYCQKYNSAPYTFGCGTKLEIKSGGGGQQVQLVQSGAEVKKPGASVKVSCKTSGYPFTSYGISWVRQAPGQCLEWMGWISPYSGAPTYAQKVQGRVTMTTDTSTTTAYMELRSLRSDDTAVYYCVRDGLEEDYWGQGTLVTVSSGGGGQGGGGQGGGGQEIVLTQSPATLSVSPGEGATLSCRASQSVSSNLAWYQQSPGQAPRLLIYGASTRATGIPARFSGSGSGTEFTLTISSLQSEDFAVYYCQQYHSWPALTFGCGTKVDIKSGGGGQEVQLVESGGGLVQPGGSLKLSCAASGFTFNKYAINWVRQAPGKGLEWVARIRSKYNNYATYYADAVKDRFTISRDDSKNTVYLQMNNLKTEDTAVYYCARAGNFGSSYISYWAYWGQGTLVTVSSGGGGQGGGGQGGGGQQTVVTQEPSLTVSPGGTVTITCGSSTGAVTSGNYPNWVQKKPGQAPRGLIGGTKFLAPGTPARFSGSLSGGKAALTLSGVQPEDEAEYYCVLWYSNRWVFGSGTKLTVLGGGGCPPCPAPELLGGPSVFLFPPKPKDTLMISRTPEVTCVVVDVSHEEPEVKFNWYVDGVEVHNAKTKPCEEQYGSTYRCVSVLTVLHQDWLNGKEYKCKVSNKALPAPIEKTISKAKGQPREPQVYTLPPSREEMTKNQVSLTCLVKGFYPSDIAVEWESNGQPENNYKTTPPVLDSDGSFFLYSKLTVDKSRWQQGNVFSCSVMHEALHNHYTQKSLSLSPGKGGGGQGGGGQGGGGQGGGGQGGGGQGGGGQCPPCPAPELLGGPSVFLFPPKPKDTLMISRTPEVTCVVVDVSHEEPEVKFNWYVDGVEVHNAKTKPCEEQYGSTYRCVSVLTVLHQDWLNGKEYKCKVSNKALPAPIEKTISKAKGQPREPQVYTLPPSREEMTKNQVSLTCLVKGFYPSDIAVEWESNGQPENNYKTTPPVLDSDGSFFLYSKLTVDKSRWQQGNVFSCSVMHEALHNHYTQKSLSLSPGK

SEQ ID NO: 2364 - protein, 489 aa, Artificial Sequence
  Synthetic
EVQLVESGGGLVQPGGSLRLSCAASGFTFHDYPMHWVRQAPGKCLEWVSGISWNSDYIVYADSVKGRFTISRDNAKNSLYLQMNSLRPEDTALYYCAKDTAYGGKYYAFDYWGQGTPVTVSSGGGGSGGGGSGGGGSDIQMTQSPSSLSASVGDRVTITCRASQGISDYLAWYQQKPGKVPKLLIYAASTLQSGVPSRFSGSGSGTDFTLTISSLQPEDVATYYCQKYNSAPYTFGCGTKLEIKSGGGGSQVQLVQSGAEVKKPGASVKVSCKASGYTFNNYGISWVRQAPGQCLEWMGWISAYNGKTSYAQKFQGRVTMTTDTSTGTAYMELRSLRSDDTAVYYCARSTGDGEYWGQGTLVTVSSGGGGSGGGGSGGGGSEIVMTQSPATLSVSPGERATLSCRASQSVSSNLAWYQQKPGQAPRLLIYGASTRATGIPARFSGGGSGTEFTLTISSLQSEDFAVYYCQQYHTWPVLTFGCGTKVEIK

SEQ ID NO: 2365 - protein, 489 aa, Artificial Sequence
  Synthetic
EVQLVESGGGLVQPGGSLRLSCAASGFTFHDYPMHWVRQAPGKCLEWVSGISWNSDYIVYADSVKGRFTISRDNAKNSLYLQMNSLRPEDTALYYCAKDTAYGGKYYAFDYWGQGTPVTVSSGGGGQGGGGQGGGGQEIQMTQSPSSLSASVGDRVTITCRASQGISDYLAWYQQKPGKVPKLLIYAASTLQSGVPSRFSGSGSGTDFTLTISSLQPEDVATYYCQKYNSAPYTFGCGTKLEIKSGGGGQQVQLVQSGAEVKKPGASVKVSCKASGYTFNNYGISWVRQAPGQCLEWMGWISAYNGKTSYAQKFQGRVTMTTDTSTGTAYMELRSLRSDDTAVYYCARSTGDGEYWGQGTLVTVSSGGGGQGGGGQGGGGQEIVMTQSPATLSVSPGERATLSCRASQSVSSNLAWYQQKPGQAPRLLIYGASTRATGIPARFSGGGSGTEFTLTISSLQSEDFAVYYCQQYHTWPVLTFGCGTKVEIK

SEQ ID NO: 2366 - protein, 744 aa, Artificial Sequence
  Synthetic
EVQLVESGGGLVQPGGSLRLSCAASGFTFHDYPMHWVRQAPGKCLEWVSGISWNSDYIVYADSVKGRFTISRDNAKNSLYLQMNSLRPEDTALYYCAKDTAYGGKYYAFDYWGQGTPVTVSSGGGGSGGGGSGGGGSDIQMTQSPSSLSASVGDRVTITCRASQGISDYLAWYQQKPGKVPKLLIYAASTLQSGVPSRFSGSGSGTDFTLTISSLQPEDVATYYCQKYNSAPYTFGCGTKLEIKSGGGGSQVQLVQSGAEVKKPGASVKVSCKASGYTFNNYGISWVRQAPGQCLEWMGWISAYNGKTSYAQKFQGRVTMTTDTSTGTAYMELRSLRSDDTAVYYCARSTGDGEYWGQGTLVTVSSGGGGSGGGGSGGGGSEIVMTQSPATLSVSPGERATLSCRASQSVSSNLAWYQQKPGQAPRLLIYGASTRATGIPARFSGGGSGTEFTLTISSLQSEDFAVYYCQQYHTWPVLTFGCGTKVEIKSGGGGSEVQLVESGGGLVQPGGSLKLSCAASGFTFNKYAMNWVRQAPGKGLEWVARIRSKYNNYATYYADSVKDRFTISRDDSKNTAYLQMNNLKTEDTAVYYCVRHGNFGNSYISYWAYWGQGTLVTVSSGGGGSGGGGSGGGGSQTVVTQEPSLTVSPGGTVTLTCGSSTGAVTSGNYPNWVQQKPGQAPRGLIGGTKFLAPGTPARFSGSLLGGKAALTLSGVQPEDEAEYYCVLWYSNRWVFGGGTKLTVL

SEQ ID NO: 2367 - protein, 744 aa, Artificial Sequence
  Synthetic
EVQLVESGGGLVQPGGSLRLSCAASGFTFHDYPMHWVRQAPGKCLEWVSGISWNSDYIVYADSVKGRFTISRDNAKNSLYLQMNSLRPEDTALYYCAKDTAYGGKYYAFDYWGQGTPVTVSSGGGGQGGGGQGGGGQEIQMTQSPSSLSASVGDRVTITCRASQGISDYLAWYQQKPGKVPKLLIYAASTLQSGVPSRFSGSGSGTDFTLTISSLQPEDVATYYCQKYNSAPYTFGCGTKLEIKSGGGGQQVQLVQSGAEVKKPGASVKVSCKASGYTFNNYGISWVRQAPGQCLEWMGWISAYNGKTSYAQKFQGRVTMTTDTSTGTAYMELRSLRSDDTAVYYCARSTGDGEYWGQGTLVTVSSGGGGQGGGGQGGGGQEIVMTQSPATLSVSPGERATLSCRASQSVSSNLAWYQQKPGQAPRLLIYGASTRATGIPARFSGGGSGTEFTLTISSLQSEDFAVYYCQQYHTWPVLTFGCGTKVEIKSGGGGQEVQLVESGGGLVQPGGSLKLSCAASGFTFNKYAMNWVRQAPGKGLEWVARIRSKYNNYATYYADSVKDRFTISRDDSKNTAYLQMNNLKTEDTAVYYCVRHGNFGNSYISYWAYWGQGTLVTVSSGGGGQGGGGQGGGGQQTVVTQEPSLTVSPGGTVTLTCGSSTGAVTSGNYPNWVQQKPGQAPRGLIGGTKFLAPGTPARFSGSLLGGKAALTLSGVQPEDEAEYYCVLWYSNRWVFGGGTKLTVL

SEQ ID NO: 2368 - protein, 744 aa, Artificial Sequence
  Synthetic
EVQLVESGGGLVQPGGSLRLSCAASGFTFHDYPMHWVRQAPGKCLEWVSGISWNSDYIVYADSVKGRFTISRDNAKNSLYLQMNSLRPEDTALYYCAKDTAYGGKYYAFDYWGQGTPVTVSSGGGGSGGGGSGGGGSDIQMTQSPSSLSASVGDRVTITCRASQGISDYLAWYQQKPGKVPKLLIYAASTLQSGVPSRFSGSGSGTDFTLTISSLQPEDVATYYCQKYNSAPYTFGCGTKLEIKSGGGGSQVQLVQSGAEVKKPGASVKVSCKASGYTFNNYGISWVRQAPGQCLEWMGWISAYNGKTSYAQKFQGRVTMTTDTSTGTAYMELRSLRSDDTAVYYCARSTGDGEYWGQGTLVTVSSGGGGSGGGGSGGGGSEIVMTQSPATLSVSPGERATLSCRASQSVSSNLAWYQQKPGQAPRLLIYGASTRATGIPARFSGGGSGTEFTLTISSLQSEDFAVYYCQQYHTWPVLTFGCGTKVEIKSGGGGSEVQLVESGGGLVQPGGSLKLSCAASGFTFNKYAINWVRQAPGKGLEWVARIRSKYNNYATYYADAVKDRFTISRDDSKNTVYLQMNNLKTEDTAVYYCARAGNFGSSYISYWAYWGQGTLVTVSSGGGGSGGGGSGGGGSQTVVTQEPSLTVSPGGTVTITCGSSTGAVTSGNYPNWVQKKPGQAPRGLIGGTKFLAPGTPARFSGSLSGGKAALTLSGVQPEDEAEYYCVLWYSNRWVFGSGTKLTVL

SEQ ID NO: 2369 - protein, 744 aa, Artificial Sequence
  Synthetic
EVQLVESGGGLVQPGGSLRLSCAASGFTFHDYPMHWVRQAPGKCLEWVSGISWNSDYIVYADSVKGRFTISRDNAKNSLYLQMNSLRPEDTALYYCAKDTAYGGKYYAFDYWGQGTPVTVSSGGGGQGGGGQGGGGQEIQMTQSPSSLSASVGDRVTITCRASQGISDYLAWYQQKPGKVPKLLIYAASTLQSGVPSRFSGSGSGTDFTLTISSLQPEDVATYYCQKYNSAPYTFGCGTKLEIKSGGGGQQVQLVQSGAEVKKPGASVKVSCKASGYTFNNYGISWVRQAPGQCLEWMGWISAYNGKTSYAQKFQGRVTMTTDTSTGTAYMELRSLRSDDTAVYYCARSTGDGEYWGQGTLVTVSSGGGGQGGGGQGGGGQEIVMTQSPATLSVSPGERATLSCRASQSVSSNLAWYQQKPGQAPRLLIYGASTRATGIPARFSGGGSGTEFTLTISSLQSEDFAVYYCQQYHTWPVLTFGCGTKVEIKSGGGGQEVQLVESGGGLVQPGGSLKLSCAASGFTFNKYAINWVRQAPGKGLEWVARIRSKYNNYATYYADAVKDRFTISRDDSKNTVYLQMNNLKTEDTAVYYCARAGNFGSSYISYWAYWGQGTLVTVSSGGGGQGGGGQGGGGQQTVVTQEPSLTVSPGGTVTITCGSSTGAVTSGNYPNWVQKKPGQAPRGLIGGTKFLAPGTPARFSGSLSGGKAALTLSGVQPEDEAEYYCVLWYSNRWVFGSGTKLTVL

SEQ ID NO: 2370 - protein, 1232 aa, Artificial Sequence
  Synthetic
EVQLVESGGGLVQPGGSLRLSCAASGFTFHDYPMHWVRQAPGKCLEWVSGISWNSDYIVYADSVKGRFTISRDNAKNSLYLQMNSLRPEDTALYYCAKDTAYGGKYYAFDYWGQGTPVTVSSGGGGSGGGGSGGGGSDIQMTQSPSSLSASVGDRVTITCRASQGISDYLAWYQQKPGKVPKLLIYAASTLQSGVPSRFSGSGSGTDFTLTISSLQPEDVATYYCQKYNSAPYTFGCGTKLEIKSGGGGSQVQLVQSGAEVKKPGASVKVSCKASGYTFNNYGISWVRQAPGQCLEWMGWISAYNGKTSYAQKFQGRVTMTTDTSTGTAYMELRSLRSDDTAVYYCARSTGDGEYWGQGTLVTVSSGGGGSGGGGSGGGGSEIVMTQSPATLSVSPGERATLSCRASQSVSSNLAWYQQKPGQAPRLLIYGASTRATGIPARFSGGGSGTEFTLTISSLQSEDFAVYYCQQYHTWPVLTFGCGTKVEIKSGGGGSEVQLVESGGGLVQPGGSLKLSCAASGFTFNKYAMNWVRQAPGKGLEWVARIRSKYNNYATYYADSVKDRFTISRDDSKNTAYLQMNNLKTEDTAVYYCVRHGNFGNSYISYWAYWGQGTLVTVSSGGGGSGGGGSGGGGSQTVVTQEPSLTVSPGGTVTLTCGSSTGAVTSGNYPNWVQQKPGQAPRGLIGGTKFLAPGTPARFSGSLLGGKAALTLSGVQPEDEAEYYCVLWYSNRWVFGGGTKLTVLGGGGDKTHTCPPCPAPELLGGPSVFLFPPKPKDTLMISRTPEVTCVVVDVSHEDPEVKFNWYVDGVEVHNAKTKPCEEQYGSTYRCVSVLTVLHQDWLNGKEYKCKVSNKALPAPIEKTISKAKGQPREPQVYTLPPSREEMTKNQVSLTCLVKGFYPSDIAVEWESNGQPENNYKTTPPVLDSDGSFFLYSKLTVDKSRWQQGNVFSCSVMHEALHNHYTQKSLSLSPGKGGGGSGGGGSGGGGSGGGGSGGGGSGGGGSDKTHTCPPCPAPELLGGPSVFLFPPKPKDTLMISRTPEVTCVVVDVSHEDPEVKFNWYVDGVEVHNAKTKPCEEQYGSTYRCVSVLTVLHQDWLNGKEYKCKVSNKALPAPIEKTISKAKGQPREPQVYTLPPSREEMTKNQVSLTCLVKGFYPSDIAVEWESNGQPENNYKTTPPVLDSDGSFFLYSKLTVDKSRWQQGNVFSCSVMHEALHNHYTQKSLSLSPGK

SEQ ID NO: 2371 - protein, 1222 aa, Artificial Sequence
  Synthetic
EVQLVESGGGLVQPGGSLRLSCAASGFTFHDYPMHWVRQAPGKCLEWVSGISWNSDYIVYADSVKGRFTISRDNAKNSLYLQMNSLRPEDTALYYCAKDTAYGGKYYAFDYWGQGTPVTVSSGGGGQGGGGQGGGGQEIQMTQSPSSLSASVGDRVTITCRASQGISDYLAWYQQKPGKVPKLLIYAASTLQSGVPSRFSGSGSGTDFTLTISSLQPEDVATYYCQKYNSAPYTFGCGTKLEIKSGGGGQQVQLVQSGAEVKKPGASVKVSCKASGYTFNNYGISWVRQAPGQCLEWMGWISAYNGKTSYAQKFQGRVTMTTDTSTGTAYMELRSLRSDDTAVYYCARSTGDGEYWGQGTLVTVSSGGGGQGGGGQGGGGQEIVMTQSPATLSVSPGERATLSCRASQSVSSNLAWYQQKPGQAPRLLIYGASTRATGIPARFSGGGSGTEFTLTISSLQSEDFAVYYCQQYHTWPVLTFGCGTKVEIKSGGGGQEVQLVESGGGLVQPGGSLKLSCAASGFTFNKYAMNWVRQAPGKGLEWVARIRSKYNNYATYYADSVKDRFTISRDDSKNTAYLQMNNLKTEDTAVYYCVRHGNFGNSYISYWAYWGQGTLVTVSSGGGGQGGGGQGGGGQQTVVTQEPSLTVSPGGTVTLTCGSSTGAVTSGNYPNWVQQKPGQAPRGLIGGTKFLAPGTPARFSGSLLGGKAALTLSGVQPEDEAEYYCVLWYSNRWVFGGGTKLTVLGGGGCPPCPAPELLGGPSVFLFPPKPKDTLMISRTPEVTCVVVDVSHEEPEVKFNWYVDGVEVHNAKTKPCEEQYGSTYRCVSVLTVLHQDWLNGKEYKCKVSNKALPAPIEKTISKAKGQPREPQVYTLPPSREEMTKNQVSLTCLVKGFYPSDIAVEWESNGQPENNYKTTPPVLDSDGSFFLYSKLTVDKSRWQQGNVFSCSVMHEALHNHYTQKSLSLSPGKGGGGQGGGGQGGGGQGGGGQGGGGQGGGGQCPPCPAPELLGGPSVFLFPPKPKDTLMISRTPEVTCVVVDVSHEEPEVKFNWYVDGVEVHNAKTKPCEEQYGSTYRCVSVLTVLHQDWLNGKEYKCKVSNKALPAPIEKTISKAKGQPREPQVYTLPPSREEMTKNQVSLTCLVKGFYPSDIAVEWESNGQPENNYKTTPPVLDSDGSFFLYSKLTVDKSRWQQGNVFSCSVMHEALHNHYTQKSLSLSPGK

SEQ ID NO: 2372 - protein, 1232 aa, Artificial Sequence
  Synthetic
EVQLVESGGGLVQPGGSLRLSCAASGFTFHDYPMHWVRQAPGKCLEWVSGISWNSDYIVYADSVKGRFTISRDNAKNSLYLQMNSLRPEDTALYYCAKDTAYGGKYYAFDYWGQGTPVTVSSGGGGSGGGGSGGGGSDIQMTQSPSSLSASVGDRVTITCRASQGISDYLAWYQQKPGKVPKLLIYAASTLQSGVPSRFSGSGSGTDFTLTISSLQPEDVATYYCQKYNSAPYTFGCGTKLEIKSGGGGSQVQLVQSGAEVKKPGASVKVSCKASGYTFNNYGISWVRQAPGQCLEWMGWISAYNGKTSYAQKFQGRVTMTTDTSTGTAYMELRSLRSDDTAVYYCARSTGDGEYWGQGTLVTVSSGGGGSGGGGSGGGGSEIVMTQSPATLSVSPGERATLSCRASQSVSSNLAWYQQKPGQAPRLLIYGASTRATGIPARFSGGGSGTEFTLTISSLQSEDFAVYYCQQYHTWPVLTFGCGTKVEIKSGGGGSEVQLVESGGGLVQPGGSLKLSCAASGFTFNKYAINWVRQAPGKGLEWVARIRSKYNNYATYYADAVKDRFTISRDDSKNTVYLQMNNLKTEDTAVYYCARAGNFGSSYISYWAYWGQGTLVTVSSGGGGSGGGGSGGGGSQTVVTQEPSLTVSPGGTVTITCGSSTGAVTSGNYPNWVQKKPGQAPRGLIGGTKFLAPGTPARFSGSLSGGKAALTLSGVQPEDEAEYYCVLWYSNRWVFGSGTKLTVLGGGGDKTHTCPPCPAPELLGGPSVFLFPPKPKDTLMISRTPEVTCVVVDVSHEDPEVKFNWYVDGVEVHNAKTKPCEEQYGSTYRCVSVLTVLHQDWLNGKEYKCKVSNKALPAPIEKTISKAKGQPREPQVYTLPPSREEMTKNQVSLTCLVKGFYPSDIAVEWESNGQPENNYKTTPPVLDSDGSFFLYSKLTVDKSRWQQGNVFSCSVMHEALHNHYTQKSLSLSPGKGGGGSGGGGSGGGGSGGGGSGGGGSGGGGSDKTHTCPPCPAPELLGGPSVFLFPPKPKDTLMISRTPEVTCVVVDVSHEDPEVKFNWYVDGVEVHNAKTKPCEEQYGSTYRCVSVLTVLHQDWLNGKEYKCKVSNKALPAPIEKTISKAKGQPREPQVYTLPPSREEMTKNQVSLTCLVKGFYPSDIAVEWESNGQPENNYKTTPPVLDSDGSFFLYSKLTVDKSRWQQGNVFSCSVMHEALHNHYTQKSLSLSPGK

SEQ ID NO: 2373 - protein, 1222 aa, Artificial Sequence
  Synthetic
EVQLVESGGGLVQPGGSLRLSCAASGFTFHDYPMHWVRQAPGKCLEWVSGISWNSDYIVYADSVKGRFTISRDNAKNSLYLQMNSLRPEDTALYYCAKDTAYGGKYYAFDYWGQGTPVTVSSGGGGQGGGGQGGGGQEIQMTQSPSSLSASVGDRVTITCRASQGISDYLAWYQQKPGKVPKLLIYAASTLQSGVPSRFSGSGSGTDFTLTISSLQPEDVATYYCQKYNSAPYTFGCGTKLEIKSGGGGQQVQLVQSGAEVKKPGASVKVSCKASGYTFNNYGISWVRQAPGQCLEWMGWISAYNGKTSYAQKFQGRVTMTTDTSTGTAYMELRSLRSDDTAVYYCARSTGDGEYWGQGTLVTVSSGGGGQGGGGQGGGGQEIVMTQSPATLSVSPGERATLSCRASQSVSSNLAWYQQKPGQAPRLLIYGASTRATGIPARFSGGGSGTEFTLTISSLQSEDFAVYYCQQYHTWPVLTFGCGTKVEIKSGGGGQEVQLVESGGGLVQPGGSLKLSCAASGFTFNKYAINWVRQAPGKGLEWVARIRSKYNNYATYYADAVKDRFTISRDDSKNTVYLQMNNLKTEDTAVYYCARAGNFGSSYISYWAYWGQGTLVTVSSGGGGQGGGGQGGGGQQTVVTQEPSLTVSPGGTVTITCGSSTGAVTSGNYPNWVQKKPGQAPRGLIGGTKFLAPGTPARFSGSLSGGKAALTLSGVQPEDEAEYYCVLWYSNRWVFGSGTKLTVLGGGGCPPCPAPELLGGPSVFLFPPKPKDTLMISRTPEVTCVVVDVSHEEPEVKFNWYVDGVEVHNAKTKPCEEQYGSTYRCVSVLTVLHQDWLNGKEYKCKVSNKALPAPIEKTISKAKGQPREPQVYTLPPSREEMTKNQVSLTCLVKGFYPSDIAVEWESNGQPENNYKTTPPVLDSDGSFFLYSKLTVDKSRWQQGNVFSCSVMHEALHNHYTQKSLSLSPGKGGGGQGGGGQGGGGQGGGGQGGGGQGGGGQCPPCPAPELLGGPSVFLFPPKPKDTLMISRTPEVTCVVVDVSHEEPEVKFNWYVDGVEVHNAKTKPCEEQYGSTYRCVSVLTVLHQDWLNGKEYKCKVSNKALPAPIEKTISKAKGQPREPQVYTLPPSREEMTKNQVSLTCLVKGFYPSDIAVEWESNGQPENNYKTTPPVLDSDGSFFLYSKLTVDKSRWQQGNVFSCSVMHEALHNHYTQKSLSLSPGK

SEQ ID NO: 2374 - protein, 498 aa, Artificial Sequence
  Synthetic
EVQLVESGGGLVQPGGSLRLSCAASGFTFHDYPMHWVRQAPGKCLEWVSGISWNSDYIVYADSVKGRFTISRDNAKNSLYLQMNSLRPEDTALYYCAKDTAYGGKYYAFDYWGQGTPVTVSSGGGGSGGGGSGGGGSDIQMTQSPSSLSASVGDRVTITCRASQGISDYLAWYQQKPGKVPKLLIYAASTLQSGVPSRFSGSGSGTDFTLTISSLQPEDVATYYCQKYNSAPYTFGCGTKLEIKSGGGGSQVQLQQSGPGLVKPSQTLSLTCAISGDSVSSKSAAWNWIRQSPSGCLEWLGRTFYRSTWYNDYAVSVKSRITINPDTSKNQFSLQLNSVIPEDTAVYYCAREGQWLVYGMDVWGQGTTVTVSSGGGGSGGGGSGGGGSQSVLTQPPSASGTPGQRITISCSGSSSNIGSNTVNWYQQLPGTAPKLLIYRNNQRPSGVPDRFSGSKSGTSASLAISGLQSEDEADYYCAAWDDSLNGRVFGCGTKLTVL

SEQ ID NO: 2375 - protein, 498 aa, Artificial Sequence
  Synthetic
EVQLVESGGGLVQPGGSLRLSCAASGFTFHDYPMHWVRQAPGKCLEWVSGISWNSDYIVYADSVKGRFTISRDNAKNSLYLQMNSLRPEDTALYYCAKDTAYGGKYYAFDYWGQGTPVTVSSGGGGQGGGGQGGGGQEIQMTQSPSSLSASVGDRVTITCRASQGISDYLAWYQQKPGKVPKLLIYAASTLQSGVPSRFSGSGSGTDFTLTISSLQPEDVATYYCQKYNSAPYTFGCGTKLEIKSGGGGQQVQLQQSGPGLVKPSQTLSLTCAISGDSVSSKSAAWNWIRQSPSGCLEWLGRTFYRSTWYNDYAVSVKSRITINPDTSKNQFSLQLNSVIPEDTAVYYCAREGQWLVYGMDVWGQGTTVTVSSGGGGQGGGGQGGGGQQSVLTQPPSASGTPGQRITISCSGSSSNIGSNTVNWYQQLPGTAPKLLIYRNNQRPSGVPDRFSGSKSGTSASLAISGLQSEDEADYYCAAWDDSLNGRVFGCGTKLTVL

SEQ ID NO: 2376 - protein, 753 aa, Artificial Sequence
  Synthetic
EVQLVESGGGLVQPGGSLRLSCAASGFTFHDYPMHWVRQAPGKCLEWVSGISWNSDYIVYADSVKGRFTISRDNAKNSLYLQMNSLRPEDTALYYCAKDTAYGGKYYAFDYWGQGTPVTVSSGGGGSGGGGSGGGGSDIQMTQSPSSLSASVGDRVTITCRASQGISDYLAWYQQKPGKVPKLLIYAASTLQSGVPSRFSGSGSGTDFTLTISSLQPEDVATYYCQKYNSAPYTFGCGTKLEIKSGGGGSQVQLQQSGPGLVKPSQTLSLTCAISGDSVSSKSAAWNWIRQSPSGCLEWLGRTFYRSTWYNDYAVSVKSRITINPDTSKNQFSLQLNSVIPEDTAVYYCAREGQWLVYGMDVWGQGTTVTVSSGGGGSGGGGSGGGGSQSVLTQPPSASGTPGQRITISCSGSSSNIGSNTVNWYQQLPGTAPKLLIYRNNQRPSGVPDRFSGSKSGTSASLAISGLQSEDEADYYCAAWDDSLNGRVFGCGTKLTVLSGGGGSEVQLVESGGGLVQPGGSLKLSCAASGFTFNKYAMNWVRQAPGKGLEWVARIRSKYNNYATYYADSVKDRFTISRDDSKNTAYLQMNNLKTEDTAVYYCVRHGNFGNSYISYWAYWGQGTLVTVSSGGGGSGGGGSGGGGSQTVVTQEPSLTVSPGGTVTLTCGSSTGAVTSGNYPNWVQQKPGQAPRGLIGGTKFLAPGTPARFSGSLLGGKAALTLSGVQPEDEAEYYCVLWYSNRWVFGGGTKLTVL

SEQ ID NO: 2377 - protein, 753 aa, Artificial Sequence
  Synthetic
EVQLVESGGGLVQPGGSLRLSCAASGFTFHDYPMHWVRQAPGKCLEWVSGISWNSDYIVYADSVKGRFTISRDNAKNSLYLQMNSLRPEDTALYYCAKDTAYGGKYYAFDYWGQGTPVTVSSGGGGQGGGGQGGGGQEIQMTQSPSSLSASVGDRVTITCRASQGISDYLAWYQQKPGKVPKLLIYAASTLQSGVPSRFSGSGSGTDFTLTISSLQPEDVATYYCQKYNSAPYTFGCGTKLEIKSGGGGQQVQLQQSGPGLVKPSQTLSLTCAISGDSVSSKSAAWNWIRQSPSGCLEWLGRTFYRSTWYNDYAVSVKSRITINPDTSKNQFSLQLNSVIPEDTAVYYCAREGQWLVYGMDVWGQGTTVTVSSGGGGQGGGGQGGGGQQSVLTQPPSASGTPGQRITISCSGSSSNIGSNTVNWYQQLPGTAPKLLIYRNNQRPSGVPDRFSGSKSGTSASLAISGLQSEDEADYYCAAWDDSLNGRVFGCGTKLTVLSGGGGQEVQLVESGGGLVQPGGSLKLSCAASGFTFNKYAMNWVRQAPGKGLEWVARIRSKYNNYATYYADSVKDRFTISRDDSKNTAYLQMNNLKTEDTAVYYCVRHGNFGNSYISYWAYWGQGTLVTVSSGGGGQGGGGQGGGGQQTVVTQEPSLTVSPGGTVTLTCGSSTGAVTSGNYPNWVQQKPGQAPRGLIGGTKFLAPGTPARFSGSLLGGKAALTLSGVQPEDEAEYYCVLWYSNRWVFGGGTKLTVL

SEQ ID NO: 2378 - protein, 753 aa, Artificial Sequence
  Synthetic
EVQLVESGGGLVQPGGSLRLSCAASGFTFHDYPMHWVRQAPGKCLEWVSGISWNSDYIVYADSVKGRFTISRDNAKNSLYLQMNSLRPEDTALYYCAKDTAYGGKYYAFDYWGQGTPVTVSSGGGGSGGGGSGGGGSDIQMTQSPSSLSASVGDRVTITCRASQGISDYLAWYQQKPGKVPKLLIYAASTLQSGVPSRFSGSGSGTDFTLTISSLQPEDVATYYCQKYNSAPYTFGCGTKLEIKSGGGGSQVQLQQSGPGLVKPSQTLSLTCAISGDSVSSKSAAWNWIRQSPSGCLEWLGRTFYRSTWYNDYAVSVKSRITINPDTSKNQFSLQLNSVIPEDTAVYYCAREGQWLVYGMDVWGQGTTVTVSSGGGGSGGGGSGGGGSQSVLTQPPSASGTPGQRITISCSGSSSNIGSNTVNWYQQLPGTAPKLLIYRNNQRPSGVPDRFSGSKSGTSASLAISGLQSEDEADYYCAAWDDSLNGRVFGCGTKLTVLSGGGGSEVQLVESGGGLVQPGGSLKLSCAASGFTFNKYAINWVRQAPGKGLEWVARIRSKYNNYATYYADAVKDRFTISRDDSKNTVYLQMNNLKTEDTAVYYCARAGNFGSSYISYWAYWGQGTLVTVSSGGGGSGGGGSGGGGSQTVVTQEPSLTVSPGGTVTITCGSSTGAVTSGNYPNWVQKKPGQAPRGLIGGTKFLAPGTPARFSGSLSGGKAALTLSGVQPEDEAEYYCVLWYSNRWVFGSGTKLTVL

SEQ ID NO: 2379 - protein, 753 aa, Artificial Sequence
  Synthetic
EVQLVESGGGLVQPGGSLRLSCAASGFTFHDYPMHWVRQAPGKCLEWVSGISWNSDYIVYADSVKGRFTISRDNAKNSLYLQMNSLRPEDTALYYCAKDTAYGGKYYAFDYWGQGTPVTVSSGGGGQGGGGQGGGGQEIQMTQSPSSLSASVGDRVTITCRASQGISDYLAWYQQKPGKVPKLLIYAASTLQSGVPSRFSGSGSGTDFTLTISSLQPEDVATYYCQKYNSAPYTFGCGTKLEIKSGGGGQQVQLQQSGPGLVKPSQTLSLTCAISGDSVSSKSAAWNWIRQSPSGCLEWLGRTFYRSTWYNDYAVSVKSRITINPDTSKNQFSLQLNSVIPEDTAVYYCAREGQWLVYGMDVWGQGTTVTVSSGGGGQGGGGQGGGGQQSVLTQPPSASGTPGQRITISCSGSSSNIGSNTVNWYQQLPGTAPKLLIYRNNQRPSGVPDRFSGSKSGTSASLAISGLQSEDEADYYCAAWDDSLNGRVFGCGTKLTVLSGGGGQEVQLVESGGGLVQPGGSLKLSCAASGFTFNKYAINWVRQAPGKGLEWVARIRSKYNNYATYYADAVKDRFTISRDDSKNTVYLQMNNLKTEDTAVYYCARAGNFGSSYISYWAYWGQGTLVTVSSGGGGQGGGGQGGGGQQTVVTQEPSLTVSPGGTVTITCGSSTGAVTSGNYPNWVQKKPGQAPRGLIGGTKFLAPGTPARFSGSLSGGKAALTLSGVQPEDEAEYYCVLWYSNRWVFGSGTKLTVL

SEQ ID NO: 2380 - protein, 1241 aa, Artificial Sequence
  Synthetic
EVQLVESGGGLVQPGGSLRLSCAASGFTFHDYPMHWVRQAPGKCLEWVSGISWNSDYIVYADSVKGRFTISRDNAKNSLYLQMNSLRPEDTALYYCAKDTAYGGKYYAFDYWGQGTPVTVSSGGGGSGGGGSGGGGSDIQMTQSPSSLSASVGDRVTITCRASQGISDYLAWYQQKPGKVPKLLIYAASTLQSGVPSRFSGSGSGTDFTLTISSLQPEDVATYYCQKYNSAPYTFGCGTKLEIKSGGGGSQVQLQQSGPGLVKPSQTLSLTCAISGDSVSSKSAAWNWIRQSPSGCLEWLGRTFYRSTWYNDYAVSVKSRITINPDTSKNQFSLQLNSVIPEDTAVYYCAREGQWLVYGMDVWGQGTTVTVSSGGGGSGGGGSGGGGSQSVLTQPPSASGTPGQRITISCSGSSSNIGSNTVNWYQQLPGTAPKLLIYRNNQRPSGVPDRFSGSKSGTSASLAISGLQSEDEADYYCAAWDDSLNGRVFGCGTKLTVLSGGGGSEVQLVESGGGLVQPGGSLKLSCAASGFTFNKYAMNWVRQAPGKGLEWVARIRSKYNNYATYYADSVKDRFTISRDDSKNTAYLQMNNLKTEDTAVYYCVRHGNFGNSYISYWAYWGQGTLVTVSSGGGGSGGGGSGGGGSQTVVTQEPSLTVSPGGTVTLTCGSSTGAVTSGNYPNWVQQKPGQAPRGLIGGTKFLAPGTPARFSGSLLGGKAALTLSGVQPEDEAEYYCVLWYSNRWVFGGGTKLTVLGGGGDKTHTCPPCPAPELLGGPSVFLFPPKPKDTLMISRTPEVTCVVVDVSHEDPEVKFNWYVDGVEVHNAKTKPCEEQYGSTYRCVSVLTVLHQDWLNGKEYKCKVSNKALPAPIEKTISKAKGQPREPQVYTLPPSREEMTKNQVSLTCLVKGFYPSDIAVEWESNGQPENNYKTTPPVLDSDGSFFLYSKLTVDKSRWQQGNVFSCSVMHEALHNHYTQKSLSLSPGKGGGGSGGGGSGGGGSGGGGSGGGGSGGGGSDKTHTCPPCPAPELLGGPSVFLFPPKPKDTLMISRTPEVTCVVVDVSHEDPEVKFNWYVDGVEVHNAKTKPCEEQYGSTYRCVSVLTVLHQDWLNGKEYKCKVSNKALPAPIEKTISKAKGQPREPQVYTLPPSREEMTKNQVSLTCLVKGFYPSDIAVEWESNGQPENNYKTTPPVLDSDGSFFLYSKLTVDKSRWQQGNVFSCSVMHEALHNHYTQKSLSLSPGK

SEQ ID NO: 2381 - protein, 1231 aa, Artificial Sequence
  Synthetic
EVQLVESGGGLVQPGGSLRLSCAASGFTFHDYPMHWVRQAPGKCLEWVSGISWNSDYIVYADSVKGRFTISRDNAKNSLYLQMNSLRPEDTALYYCAKDTAYGGKYYAFDYWGQGTPVTVSSGGGGQGGGGQGGGGQEIQMTQSPSSLSASVGDRVTITCRASQGISDYLAWYQQKPGKVPKLLIYAASTLQSGVPSRFSGSGSGTDFTLTISSLQPEDVATYYCQKYNSAPYTFGCGTKLEIKSGGGGQQVQLQQSGPGLVKPSQTLSLTCAISGDSVSSKSAAWNWIRQSPSGCLEWLGRTFYRSTWYNDYAVSVKSRITINPDTSKNQFSLQLNSVIPEDTAVYYCAREGQWLVYGMDVWGQGTTVTVSSGGGGQGGGGQGGGGQQSVLTQPPSASGTPGQRITISCSGSSSNIGSNTVNWYQQLPGTAPKLLIYRNNQRPSGVPDRFSGSKSGTSASLAISGLQSEDEADYYCAAWDDSLNGRVFGCGTKLTVLSGGGGQEVQLVESGGGLVQPGGSLKLSCAASGFTFNKYAMNWVRQAPGKGLEWVARIRSKYNNYATYYADSVKDRFTISRDDSKNTAYLQMNNLKTEDTAVYYCVRHGNFGNSYISYWAYWGQGTLVTVSSGGGGQGGGGQGGGGQQTVVTQEPSLTVSPGGTVTLTCGSSTGAVTSGNYPNWVQQKPGQAPRGLIGGTKFLAPGTPARFSGSLLGGKAALTLSGVQPEDEAEYYCVLWYSNRWVFGGGTKLTVLGGGGCPPCPAPELLGGPSVFLFPPKPKDTLMISRTPEVTCVVVDVSHEEPEVKFNWYVDGVEVHNAKTKPCEEQYGSTYRCVSVLTVLHQDWLNGKEYKCKVSNKALPAPIEKTISKAKGQPREPQVYTLPPSREEMTKNQVSLTCLVKGFYPSDIAVEWESNGQPENNYKTTPPVLDSDGSFFLYSKLTVDKSRWQQGNVFSCSVMHEALHNHYTQKSLSLSPGKGGGGQGGGGQGGGGQGGGGQGGGGQGGGGQCPPCPAPELLGGPSVFLFPPKPKDTLMISRTPEVTCVVVDVSHEEPEVKFNWYVDGVEVHNAKTKPCEEQYGSTYRCVSVLTVLHQDWLNGKEYKCKVSNKALPAPIEKTISKAKGQPREPQVYTLPPSREEMTKNQVSLTCLVKGFYPSDIAVEWESNGQPENNYKTTPPVLDSDGSFFLYSKLTVDKSRWQQGNVFSCSVMHEALHNHYTQKSLSLSPGK

SEQ ID NO: 2382 - protein, 1241 aa, Artificial Sequence
  Synthetic
EVQLVESGGGLVQPGGSLRLSCAASGFTFHDYPMHWVRQAPGKCLEWVSGISWNSDYIVYADSVKGRFTISRDNAKNSLYLQMNSLRPEDTALYYCAKDTAYGGKYYAFDYWGQGTPVTVSSGGGGSGGGGSGGGGSDIQMTQSPSSLSASVGDRVTITCRASQGISDYLAWYQQKPGKVPKLLIYAASTLQSGVPSRFSGSGSGTDFTLTISSLQPEDVATYYCQKYNSAPYTFGCGTKLEIKSGGGGSQVQLQQSGPGLVKPSQTLSLTCAISGDSVSSKSAAWNWIRQSPSGCLEWLGRTFYRSTWYNDYAVSVKSRITINPDTSKNQFSLQLNSVIPEDTAVYYCAREGQWLVYGMDVWGQGTTVTVSSGGGGSGGGGSGGGGSQSVLTQPPSASGTPGQRITISCSGSSSNIGSNTVNWYQQLPGTAPKLLIYRNNQRPSGVPDRFSGSKSGTSASLAISGLQSEDEADYYCAAWDDSLNGRVFGCGTKLTVLSGGGGSEVQLVESGGGLVQPGGSLKLSCAASGFTFNKYAINWVRQAPGKGLEWVARIRSKYNNYATYYADAVKDRFTISRDDSKNTVYLQMNNLKTEDTAVYYCARAGNFGSSYISYWAYWGQGTLVTVSSGGGGSGGGGSGGGGSQTVVTQEPSLTVSPGGTVTITCGSSTGAVTSGNYPNWVQKKPGQAPRGLIGGTKFLAPGTPARFSGSLSGGKAALTLSGVQPEDEAEYYCVLWYSNRWVFGSGTKLTVLGGGGDKTHTCPPCPAPELLGGPSVFLFPPKPKDTLMISRTPEVTCVVVDVSHEDPEVKFNWYVDGVEVHNAKTKPCEEQYGSTYRCVSVLTVLHQDWLNGKEYKCKVSNKALPAPIEKTISKAKGQPREPQVYTLPPSREEMTKNQVSLTCLVKGFYPSDIAVEWESNGQPENNYKTTPPVLDSDGSFFLYSKLTVDKSRWQQGNVFSCSVMHEALHNHYTQKSLSLSPGKGGGGSGGGGSGGGGSGGGGSGGGGSGGGGSDKTHTCPPCPAPELLGGPSVFLFPPKPKDTLMISRTPEVTCVVVDVSHEDPEVKFNWYVDGVEVHNAKTKPCEEQYGSTYRCVSVLTVLHQDWLNGKEYKCKVSNKALPAPIEKTISKAKGQPREPQVYTLPPSREEMTKNQVSLTCLVKGFYPSDIAVEWESNGQPENNYKTTPPVLDSDGSFFLYSKLTVDKSRWQQGNVFSCSVMHEALHNHYTQKSLSLSPGK

SEQ ID NO: 2383 - protein, 1231 aa, Artificial Sequence
  Synthetic
EVQLVESGGGLVQPGGSLRLSCAASGFTFHDYPMHWVRQAPGKCLEWVSGISWNSDYIVYADSVKGRFTISRDNAKNSLYLQMNSLRPEDTALYYCAKDTAYGGKYYAFDYWGQGTPVTVSSGGGGQGGGGQGGGGQEIQMTQSPSSLSASVGDRVTITCRASQGISDYLAWYQQKPGKVPKLLIYAASTLQSGVPSRFSGSGSGTDFTLTISSLQPEDVATYYCQKYNSAPYTFGCGTKLEIKSGGGGQQVQLQQSGPGLVKPSQTLSLTCAISGDSVSSKSAAWNWIRQSPSGCLEWLGRTFYRSTWYNDYAVSVKSRITINPDTSKNQFSLQLNSVIPEDTAVYYCAREGQWLVYGMDVWGQGTTVTVSSGGGGQGGGGQGGGGQQSVLTQPPSASGTPGQRITISCSGSSSNIGSNTVNWYQQLPGTAPKLLIYRNNQRPSGVPDRFSGSKSGTSASLAISGLQSEDEADYYCAAWDDSLNGRVFGCGTKLTVLSGGGGQEVQLVESGGGLVQPGGSLKLSCAASGFTFNKYAINWVRQAPGKGLEWVARIRSKYNNYATYYADAVKDRFTISRDDSKNTVYLQMNNLKTEDTAVYYCARAGNFGSSYISYWAYWGQGTLVTVSSGGGGQGGGGQGGGGQQTVVTQEPSLTVSPGGTVTITCGSSTGAVTSGNYPNWVQKKPGQAPRGLIGGTKFLAPGTPARFSGSLSGGKAALTLSGVQPEDEAEYYCVLWYSNRWVFGSGTKLTVLGGGGCPPCPAPELLGGPSVFLFPPKPKDTLMISRTPEVTCVVVDVSHEEPEVKFNWYVDGVEVHNAKTKPCEEQYGSTYRCVSVLTVLHQDWLNGKEYKCKVSNKALPAPIEKTISKAKGQPREPQVYTLPPSREEMTKNQVSLTCLVKGFYPSDIAVEWESNGQPENNYKTTPPVLDSDGSFFLYSKLTVDKSRWQQGNVFSCSVMHEALHNHYTQKSLSLSPGKGGGGQGGGGQGGGGQGGGGQGGGGQGGGGQCPPCPAPELLGGPSVFLFPPKPKDTLMISRTPEVTCVVVDVSHEEPEVKFNWYVDGVEVHNAKTKPCEEQYGSTYRCVSVLTVLHQDWLNGKEYKCKVSNKALPAPIEKTISKAKGQPREPQVYTLPPSREEMTKNQVSLTCLVKGFYPSDIAVEWESNGQPENNYKTTPPVLDSDGSFFLYSKLTVDKSRWQQGNVFSCSVMHEALHNHYTQKSLSLSPGK

SEQ ID NO: 2384 - protein, 492 aa, Artificial Sequence
  Synthetic
EVQLVESGGGLVQPGGSLRLSCAASGFTFHDYPMHWVRQAPGKCLEWVSGISWNSDYIVYADSVKGRFTISRDNAKNSLYLQMNSLRPEDTALYYCAKDTAYGGKYYAFDYWGQGTPVTVSSGGGGSGGGGSGGGGSDIQMTQSPSSLSASVGDRVTITCRASQGISDYLAWYQQKPGKVPKLLIYAASTLQSGVPSRFSGSGSGTDFTLTISSLQPEDVATYYCQKYNSAPYTFGCGTKLEIKSGGGGSQVQLVQSGAEVKKPGASVKVSCKASGYTFNNYGISWVRQAPGQCLEWMGWISAYNGKTSYAQKFQGRVTMTTDTSTGTAYMELRSLRSDDTAVYYCARDLDFLTGWEYWGQGTLVTVSSGGGGSGGGGSGGGGSEIVLTQSPATLSVSPGERATLSCRASQSVNSNLAWYQQKPGQAPRLLIYGASTRATGIPARFSGSGSGTEFTLTISSLQSEDFAVYYCQQYHTWPVLTFGCGTKVEIK

SEQ ID NO: 2385 - protein, 492 aa, Artificial Sequence
  Synthetic
EVQLVESGGGLVQPGGSLRLSCAASGFTFHDYPMHWVRQAPGKCLEWVSGISWNSDYIVYADSVKGRFTISRDNAKNSLYLQMNSLRPEDTALYYCAKDTAYGGKYYAFDYWGQGTPVTVSSGGGGQGGGGQGGGGQEIQMTQSPSSLSASVGDRVTITCRASQGISDYLAWYQQKPGKVPKLLIYAASTLQSGVPSRFSGSGSGTDFTLTISSLQPEDVATYYCQKYNSAPYTFGCGTKLEIKSGGGGQQVQLVQSGAEVKKPGASVKVSCKASGYTFNNYGISWVRQAPGQCLEWMGWISAYNGKTSYAQKFQGRVTMTTDTSTGTAYMELRSLRSDDTAVYYCARDLDFLTGWEYWGQGTLVTVSSGGGGQGGGGQGGGGQEIVLTQSPATLSVSPGERATLSCRASQSVNSNLAWYQQKPGQAPRLLIYGASTRATGIPARFSGSGSGTEFTLTISSLQSEDFAVYYCQQYHTWPVLTFGCGTKVEIK

SEQ ID NO: 2386 - protein, 747 aa, Artificial Sequence
  Synthetic
EVQLVESGGGLVQPGGSLRLSCAASGFTFHDYPMHWVRQAPGKCLEWVSGISWNSDYIVYADSVKGRFTISRDNAKNSLYLQMNSLRPEDTALYYCAKDTAYGGKYYAFDYWGQGTPVTVSSGGGGSGGGGSGGGGSDIQMTQSPSSLSASVGDRVTITCRASQGISDYLAWYQQKPGKVPKLLIYAASTLQSGVPSRFSGSGSGTDFTLTISSLQPEDVATYYCQKYNSAPYTFGCGTKLEIKSGGGGSQVQLVQSGAEVKKPGASVKVSCKASGYTFNNYGISWVRQAPGQCLEWMGWISAYNGKTSYAQKFQGRVTMTTDTSTGTAYMELRSLRSDDTAVYYCARDLDFLTGWEYWGQGTLVTVSSGGGGSGGGGSGGGGSEIVLTQSPATLSVSPGERATLSCRASQSVNSNLAWYQQKPGQAPRLLIYGASTRATGIPARFSGSGSGTEFTLTISSLQSEDFAVYYCQQYHTWPVLTFGCGTKVEIKSGGGGSEVQLVESGGGLVQPGGSLKLSCAASGFTFNKYAMNWVRQAPGKGLEWVARIRSKYNNYATYYADSVKDRFTISRDDSKNTAYLQMNNLKTEDTAVYYCVRHGNFGNSYISYWAYWGQGTLVTVSSGGGGSGGGGSGGGGSQTVVTQEPSLTVSPGGTVTLTCGSSTGAVTSGNYPNWVQQKPGQAPRGLIGGTKFLAPGTPARFSGSLLGGKAALTLSGVQPEDEAEYYCVLWYSNRWVFGGGTKLTVL

SEQ ID NO: 2387 - protein, 747 aa, Artificial Sequence
  Synthetic
EVQLVESGGGLVQPGGSLRLSCAASGFTFHDYPMHWVRQAPGKCLEWVSGISWNSDYIVYADSVKGRFTISRDNAKNSLYLQMNSLRPEDTALYYCAKDTAYGGKYYAFDYWGQGTPVTVSSGGGGQGGGGQGGGGQEIQMTQSPSSLSASVGDRVTITCRASQGISDYLAWYQQKPGKVPKLLIYAASTLQSGVPSRFSGSGSGTDFTLTISSLQPEDVATYYCQKYNSAPYTFGCGTKLEIKSGGGGQQVQLVQSGAEVKKPGASVKVSCKASGYTFNNYGISWVRQAPGQCLEWMGWISAYNGKTSYAQKFQGRVTMTTDTSTGTAYMELRSLRSDDTAVYYCARDLDFLTGWEYWGQGTLVTVSSGGGGQGGGGQGGGGQEIVLTQSPATLSVSPGERATLSCRASQSVNSNLAWYQQKPGQAPRLLIYGASTRATGIPARFSGSGSGTEFTLTISSLQSEDFAVYYCQQYHTWPVLTFGCGTKVEIKSGGGGQEVQLVESGGGLVQPGGSLKLSCAASGFTFNKYAMNWVRQAPGKGLEWVARIRSKYNNYATYYADSVKDRFTISRDDSKNTAYLQMNNLKTEDTAVYYCVRHGNFGNSYISYWAYWGQGTLVTVSSGGGGQGGGGQGGGGQQTVVTQEPSLTVSPGGTVTLTCGSSTGAVTSGNYPNWVQQKPGQAPRGLIGGTKFLAPGTPARFSGSLLGGKAALTLSGVQPEDEAEYYCVLWYSNRWVFGGGTKLTVL

SEQ ID NO: 2388 - protein, 747 aa, Artificial Sequence
  Synthetic
EVQLVESGGGLVQPGGSLRLSCAASGFTFHDYPMHWVRQAPGKCLEWVSGISWNSDYIVYADSVKGRFTISRDNAKNSLYLQMNSLRPEDTALYYCAKDTAYGGKYYAFDYWGQGTPVTVSSGGGGSGGGGSGGGGSDIQMTQSPSSLSASVGDRVTITCRASQGISDYLAWYQQKPGKVPKLLIYAASTLQSGVPSRFSGSGSGTDFTLTISSLQPEDVATYYCQKYNSAPYTFGCGTKLEIKSGGGGSQVQLVQSGAEVKKPGASVKVSCKASGYTFNNYGISWVRQAPGQCLEWMGWISAYNGKTSYAQKFQGRVTMTTDTSTGTAYMELRSLRSDDTAVYYCARDLDFLTGWEYWGQGTLVTVSSGGGGSGGGGSGGGGSEIVLTQSPATLSVSPGERATLSCRASQSVNSNLAWYQQKPGQAPRLLIYGASTRATGIPARFSGSGSGTEFTLTISSLQSEDFAVYYCQQYHTWPVLTFGCGTKVEIKSGGGGSEVQLVESGGGLVQPGGSLKLSCAASGFTFNKYAINWVRQAPGKGLEWVARIRSKYNNYATYYADAVKDRFTISRDDSKNTVYLQMNNLKTEDTAVYYCARAGNFGSSYISYWAYWGQGTLVTVSSGGGGSGGGGSGGGGSQTVVTQEPSLTVSPGGTVTITCGSSTGAVTSGNYPNWVQKKPGQAPRGLIGGTKFLAPGTPARFSGSLSGGKAALTLSGVQPEDEAEYYCVLWYSNRWVFGSGTKLTVL

SEQ ID NO: 2389 - protein, 747 aa, Artificial Sequence
  Synthetic
EVQLVESGGGLVQPGGSLRLSCAASGFTFHDYPMHWVRQAPGKCLEWVSGISWNSDYIVYADSVKGRFTISRDNAKNSLYLQMNSLRPEDTALYYCAKDTAYGGKYYAFDYWGQGTPVTVSSGGGGQGGGGQGGGGQEIQMTQSPSSLSASVGDRVTITCRASQGISDYLAWYQQKPGKVPKLLIYAASTLQSGVPSRFSGSGSGTDFTLTISSLQPEDVATYYCQKYNSAPYTFGCGTKLEIKSGGGGQQVQLVQSGAEVKKPGASVKVSCKASGYTFNNYGISWVRQAPGQCLEWMGWISAYNGKTSYAQKFQGRVTMTTDTSTGTAYMELRSLRSDDTAVYYCARDLDFLTGWEYWGQGTLVTVSSGGGGQGGGGQGGGGQEIVLTQSPATLSVSPGERATLSCRASQSVNSNLAWYQQKPGQAPRLLIYGASTRATGIPARFSGSGSGTEFTLTISSLQSEDFAVYYCQQYHTWPVLTFGCGTKVEIKSGGGGQEVQLVESGGGLVQPGGSLKLSCAASGFTFNKYAINWVRQAPGKGLEWVARIRSKYNNYATYYADAVKDRFTISRDDSKNTVYLQMNNLKTEDTAVYYCARAGNFGSSYISYWAYWGQGTLVTVSSGGGGQGGGGQGGGGQQTVVTQEPSLTVSPGGTVTITCGSSTGAVTSGNYPNWVQKKPGQAPRGLIGGTKFLAPGTPARFSGSLSGGKAALTLSGVQPEDEAEYYCVLWYSNRWVFGSGTKLTVL

SEQ ID NO: 2390 - protein, 1235 aa, Artificial Sequence
  Synthetic
EVQLVESGGGLVQPGGSLRLSCAASGFTFHDYPMHWVRQAPGKCLEWVSGISWNSDYIVYADSVKGRFTISRDNAKNSLYLQMNSLRPEDTALYYCAKDTAYGGKYYAFDYWGQGTPVTVSSGGGGSGGGGSGGGGSDIQMTQSPSSLSASVGDRVTITCRASQGISDYLAWYQQKPGKVPKLLIYAASTLQSGVPSRFSGSGSGTDFTLTISSLQPEDVATYYCQKYNSAPYTFGCGTKLEIKSGGGGSQVQLVQSGAEVKKPGASVKVSCKASGYTFNNYGISWVRQAPGQCLEWMGWISAYNGKTSYAQKFQGRVTMTTDTSTGTAYMELRSLRSDDTAVYYCARDLDFLTGWEYWGQGTLVTVSSGGGGSGGGGSGGGGSEIVLTQSPATLSVSPGERATLSCRASQSVNSNLAWYQQKPGQAPRLLIYGASTRATGIPARFSGSGSGTEFTLTISSLQSEDFAVYYCQQYHTWPVLTFGCGTKVEIKSGGGGSEVQLVESGGGLVQPGGSLKLSCAASGFTFNKYAMNWVRQAPGKGLEWVARIRSKYNNYATYYADSVKDRFTISRDDSKNTAYLQMNNLKTEDTAVYYCVRHGNFGNSYISYWAYWGQGTLVTVSSGGGGSGGGGSGGGGSQTVVTQEPSLTVSPGGTVTLTCGSSTGAVTSGNYPNWVQQKPGQAPRGLIGGTKFLAPGTPARFSGSLLGGKAALTLSGVQPEDEAEYYCVLWYSNRWVFGGGTKLTVLGGGGDKTHTCPPCPAPELLGGPSVFLFPPKPKDTLMISRTPEVTCVVVDVSHEDPEVKFNWYVDGVEVHNAKTKPCEEQYGSTYRCVSVLTVLHQDWLNGKEYKCKVSNKALPAPIEKTISKAKGQPREPQVYTLPPSREEMTKNQVSLTCLVKGFYPSDIAVEWESNGQPENNYKTTPPVLDSDGSFFLYSKLTVDKSRWQQGNVFSCSVMHEALHNHYTQKSLSLSPGKGGGGSGGGGSGGGGSGGGGSGGGGSGGGGSDKTHTCPPCPAPELLGGPSVFLFPPKPKDTLMISRTPEVTCVVVDVSHEDPEVKFNWYVDGVEVHNAKTKPCEEQYGSTYRCVSVLTVLHQDWLNGKEYKCKVSNKALPAPIEKTISKAKGQPREPQVYTLPPSREEMTKNQVSLTCLVKGFYPSDIAVEWESNGQPENNYKTTPPVLDSDGSFFLYSKLTVDKSRWQQGNVFSCSVMHEALHNHYTQKSLSLSPGK

SEQ ID NO: 2391 - protein, 1225 aa, Artificial Sequence
  Synthetic
EVQLVESGGGLVQPGGSLRLSCAASGFTFHDYPMHWVRQAPGKCLEWVSGISWNSDYIVYADSVKGRFTISRDNAKNSLYLQMNSLRPEDTALYYCAKDTAYGGKYYAFDYWGQGTPVTVSSGGGGQGGGGQGGGGQEIQMTQSPSSLSASVGDRVTITCRASQGISDYLAWYQQKPGKVPKLLIYAASTLQSGVPSRFSGSGSGTDFTLTISSLQPEDVATYYCQKYNSAPYTFGCGTKLEIKSGGGGQQVQLVQSGAEVKKPGASVKVSCKASGYTFNNYGISWVRQAPGQCLEWMGWISAYNGKTSYAQKFQGRVTMTTDTSTGTAYMELRSLRSDDTAVYYCARDLDFLTGWEYWGQGTLVTVSSGGGGQGGGGQGGGGQEIVLTQSPATLSVSPGERATLSCRASQSVNSNLAWYQQKPGQAPRLLIYGASTRATGIPARFSGSGSGTEFTLTISSLQSEDFAVYYCQQYHTWPVLTFGCGTKVEIKSGGGGQEVQLVESGGGLVQPGGSLKLSCAASGFTFNKYAMNWVRQAPGKGLEWVARIRSKYNNYATYYADSVKDRFTISRDDSKNTAYLQMNNLKTEDTAVYYCVRHGNFGNSYISYWAYWGQGTLVTVSSGGGGQGGGGQGGGGQQTVVTQEPSLTVSPGGTVTLTCGSSTGAVTSGNYPNWVQQKPGQAPRGLIGGTKFLAPGTPARFSGSLLGGKAALTLSGVQPEDEAEYYCVLWYSNRWVFGGGTKLTVLGGGGCPPCPAPELLGGPSVFLFPPKPKDTLMISRTPEVTCVVVDVSHEEPEVKFNWYVDGVEVHNAKTKPCEEQYGSTYRCVSVLTVLHQDWLNGKEYKCKVSNKALPAPIEKTISKAKGQPREPQVYTLPPSREEMTKNQVSLTCLVKGFYPSDIAVEWESNGQPENNYKTTPPVLDSDGSFFLYSKLTVDKSRWQQGNVFSCSVMHEALHNHYTQKSLSLSPGKGGGGQGGGGQGGGGQGGGGQGGGGQGGGGQCPPCPAPELLGGPSVFLFPPKPKDTLMISRTPEVTCVVVDVSHEEPEVKFNWYVDGVEVHNAKTKPCEEQYGSTYRCVSVLTVLHQDWLNGKEYKCKVSNKALPAPIEKTISKAKGQPREPQVYTLPPSREEMTKNQVSLTCLVKGFYPSDIAVEWESNGQPENNYKTTPPVLDSDGSFFLYSKLTVDKSRWQQGNVFSCSVMHEALHNHYTQKSLSLSPGK

SEQ ID NO: 2392 - protein, 1235 aa, Artificial Sequence
  Synthetic
EVQLVESGGGLVQPGGSLRLSCAASGFTFHDYPMHWVRQAPGKCLEWVSGISWNSDYIVYADSVKGRFTISRDNAKNSLYLQMNSLRPEDTALYYCAKDTAYGGKYYAFDYWGQGTPVTVSSGGGGSGGGGSGGGGSDIQMTQSPSSLSASVGDRVTITCRASQGISDYLAWYQQKPGKVPKLLIYAASTLQSGVPSRFSGSGSGTDFTLTISSLQPEDVATYYCQKYNSAPYTFGCGTKLEIKSGGGGSQVQLVQSGAEVKKPGASVKVSCKASGYTFNNYGISWVRQAPGQCLEWMGWISAYNGKTSYAQKFQGRVTMTTDTSTGTAYMELRSLRSDDTAVYYCARDLDFLTGWEYWGQGTLVTVSSGGGGSGGGGSGGGGSEIVLTQSPATLSVSPGERATLSCRASQSVNSNLAWYQQKPGQAPRLLIYGASTRATGIPARFSGSGSGTEFTLTISSLQSEDFAVYYCQQYHTWPVLTFGCGTKVEIKSGGGGSEVQLVESGGGLVQPGGSLKLSCAASGFTFNKYAINWVRQAPGKGLEWVARIRSKYNNYATYYADAVKDRFTISRDDSKNTVYLQMNNLKTEDTAVYYCARAGNFGSSYISYWAYWGQGTLVTVSSGGGGSGGGGSGGGGSQTVVTQEPSLTVSPGGTVTITCGSSTGAVTSGNYPNWVQKKPGQAPRGLIGGTKFLAPGTPARFSGSLSGGKAALTLSGVQPEDEAEYYCVLWYSNRWVFGSGTKLTVLGGGGDKTHTCPPCPAPELLGGPSVFLFPPKPKDTLMISRTPEVTCVVVDVSHEDPEVKFNWYVDGVEVHNAKTKPCEEQYGSTYRCVSVLTVLHQDWLNGKEYKCKVSNKALPAPIEKTISKAKGQPREPQVYTLPPSREEMTKNQVSLTCLVKGFYPSDIAVEWESNGQPENNYKTTPPVLDSDGSFFLYSKLTVDKSRWQQGNVFSCSVMHEALHNHYTQKSLSLSPGKGGGGSGGGGSGGGGSGGGGSGGGGSGGGGSDKTHTCPPCPAPELLGGPSVFLFPPKPKDTLMISRTPEVTCVVVDVSHEDPEVKFNWYVDGVEVHNAKTKPCEEQYGSTYRCVSVLTVLHQDWLNGKEYKCKVSNKALPAPIEKTISKAKGQPREPQVYTLPPSREEMTKNQVSLTCLVKGFYPSDIAVEWESNGQPENNYKTTPPVLDSDGSFFLYSKLTVDKSRWQQGNVFSCSVMHEALHNHYTQKSLSLSPGK

SEQ ID NO: 2393 - protein, 1225 aa, Artificial Sequence
  Synthetic
EVQLVESGGGLVQPGGSLRLSCAASGFTFHDYPMHWVRQAPGKCLEWVSGISWNSDYIVYADSVKGRFTISRDNAKNSLYLQMNSLRPEDTALYYCAKDTAYGGKYYAFDYWGQGTPVTVSSGGGGQGGGGQGGGGQEIQMTQSPSSLSASVGDRVTITCRASQGISDYLAWYQQKPGKVPKLLIYAASTLQSGVPSRFSGSGSGTDFTLTISSLQPEDVATYYCQKYNSAPYTFGCGTKLEIKSGGGGQQVQLVQSGAEVKKPGASVKVSCKASGYTFNNYGISWVRQAPGQCLEWMGWISAYNGKTSYAQKFQGRVTMTTDTSTGTAYMELRSLRSDDTAVYYCARDLDFLTGWEYWGQGTLVTVSSGGGGQGGGGQGGGGQEIVLTQSPATLSVSPGERATLSCRASQSVNSNLAWYQQKPGQAPRLLIYGASTRATGIPARFSGSGSGTEFTLTISSLQSEDFAVYYCQQYHTWPVLTFGCGTKVEIKSGGGGQEVQLVESGGGLVQPGGSLKLSCAASGFTFNKYAINWVRQAPGKGLEWVARIRSKYNNYATYYADAVKDRFTISRDDSKNTVYLQMNNLKTEDTAVYYCARAGNFGSSYISYWAYWGQGTLVTVSSGGGGQGGGGQGGGGQQTVVTQEPSLTVSPGGTVTITCGSSTGAVTSGNYPNWVQKKPGQAPRGLIGGTKFLAPGTPARFSGSLSGGKAALTLSGVQPEDEAEYYCVLWYSNRWVFGSGTKLTVLGGGGCPPCPAPELLGGPSVFLFPPKPKDTLMISRTPEVTCVVVDVSHEEPEVKFNWYVDGVEVHNAKTKPCEEQYGSTYRCVSVLTVLHQDWLNGKEYKCKVSNKALPAPIEKTISKAKGQPREPQVYTLPPSREEMTKNQVSLTCLVKGFYPSDIAVEWESNGQPENNYKTTPPVLDSDGSFFLYSKLTVDKSRWQQGNVFSCSVMHEALHNHYTQKSLSLSPGKGGGGQGGGGQGGGGQGGGGQGGGGQGGGGQCPPCPAPELLGGPSVFLFPPKPKDTLMISRTPEVTCVVVDVSHEEPEVKFNWYVDGVEVHNAKTKPCEEQYGSTYRCVSVLTVLHQDWLNGKEYKCKVSNKALPAPIEKTISKAKGQPREPQVYTLPPSREEMTKNQVSLTCLVKGFYPSDIAVEWESNGQPENNYKTTPPVLDSDGSFFLYSKLTVDKSRWQQGNVFSCSVMHEALHNHYTQKSLSLSPGK

SEQ ID NO: 2394 - protein, 495 aa, Artificial Sequence
  Synthetic
EVQLVESGGGLVQPGGSLRLSCAASGFTFHDYPMHWVRQAPGKCLEWVSGISWNSDYIVYADSVKGRFTISRDNAKNSLYLQMNSLRPEDTALYYCAKDTAYGGKYYAFDYWGQGTPVTVSSGGGGSGGGGSGGGGSDIQMTQSPSSLSASVGDRVTITCRASQGISDYLAWYQQKPGKVPKLLIYAASTLQSGVPSRFSGSGSGTDFTLTISSLQPEDVATYYCQKYNSAPYTFGCGTKLEIKSGGGGSQLQLQESGPGLVKPSETLSLTCFVSGGSISNSDYFWGWIRQPPGKCLEWIGTIYYSGRTYYNPSLKSRVTISVDTSKNQFSLMLSSVTAVDTAVYYCARYQYGSFDYWGQGTLVTVSSGGGGSGGGGSGGGGSDIVMTQTPLSLPVTPGEPASISCRSSQSLLHSNGYNYLDWYLQKPGQSPQLLIYLGSNRASGVPDRFSGSGSGTDFTLKISRVEAEDVGVYYCMQALQTPYTFGCGTKVEIR

SEQ ID NO: 2395 - protein, 495 aa, Artificial Sequence
  Synthetic
EVQLVESGGGLVQPGGSLRLSCAASGFTFHDYPMHWVRQAPGKCLEWVSGISWNSDYIVYADSVKGRFTISRDNAKNSLYLQMNSLRPEDTALYYCAKDTAYGGKYYAFDYWGQGTPVTVSSGGGGQGGGGQGGGGQEIQMTQSPSSLSASVGDRVTITCRASQGISDYLAWYQQKPGKVPKLLIYAASTLQSGVPSRFSGSGSGTDFTLTISSLQPEDVATYYCQKYNSAPYTFGCGTKLEIKSGGGGQQLQLQESGPGLVKPSETLSLTCFVSGGSISNSDYFWGWIRQPPGKCLEWIGTIYYSGRTYYNPSLKSRVTISVDTSKNQFSLMLSSVTAVDTAVYYCARYQYGSFDYWGQGTLVTVSSGGGGQGGGGQGGGGQEIVMTQTPLSLPVTPGEPASISCRSSQSLLHSNGYNYLDWYLQKPGQSPQLLIYLGSNRASGVPDRFSGSGSGTDFTLKISRVEAEDVGVYYCMQALQTPYTFGCGTKVEIR

SEQ ID NO: 2396 - protein, 750 aa, Artificial Sequence
  Synthetic
EVQLVESGGGLVQPGGSLRLSCAASGFTFHDYPMHWVRQAPGKCLEWVSGISWNSDYIVYADSVKGRFTISRDNAKNSLYLQMNSLRPEDTALYYCAKDTAYGGKYYAFDYWGQGTPVTVSSGGGGSGGGGSGGGGSDIQMTQSPSSLSASVGDRVTITCRASQGISDYLAWYQQKPGKVPKLLIYAASTLQSGVPSRFSGSGSGTDFTLTISSLQPEDVATYYCQKYNSAPYTFGCGTKLEIKSGGGGSQLQLQESGPGLVKPSETLSLTCFVSGGSISNSDYFWGWIRQPPGKCLEWIGTIYYSGRTYYNPSLKSRVTISVDTSKNQFSLMLSSVTAVDTAVYYCARYQYGSFDYWGQGTLVTVSSGGGGSGGGGSGGGGSDIVMTQTPLSLPVTPGEPASISCRSSQSLLHSNGYNYLDWYLQKPGQSPQLLIYLGSNRASGVPDRFSGSGSGTDFTLKISRVEAEDVGVYYCMQALQTPYTFGCGTKVEIRSGGGGSEVQLVESGGGLVQPGGSLKLSCAASGFTFNKYAMNWVRQAPGKGLEWVARIRSKYNNYATYYADSVKDRFTISRDDSKNTAYLQMNNLKTEDTAVYYCVRHGNFGNSYISYWAYWGQGTLVTVSSGGGGSGGGGSGGGGSQTVVTQEPSLTVSPGGTVTLTCGSSTGAVTSGNYPNWVQQKPGQAPRGLIGGTKFLAPGTPARFSGSLLGGKAALTLSGVQPEDEAEYYCVLWYSNRWVFGGGTKLTVL

SEQ ID NO: 2397 - protein, 750 aa, Artificial Sequence
  Synthetic
EVQLVESGGGLVQPGGSLRLSCAASGFTFHDYPMHWVRQAPGKCLEWVSGISWNSDYIVYADSVKGRFTISRDNAKNSLYLQMNSLRPEDTALYYCAKDTAYGGKYYAFDYWGQGTPVTVSSGGGGQGGGGQGGGGQEIQMTQSPSSLSASVGDRVTITCRASQGISDYLAWYQQKPGKVPKLLIYAASTLQSGVPSRFSGSGSGTDFTLTISSLQPEDVATYYCQKYNSAPYTFGCGTKLEIKSGGGGQQLQLQESGPGLVKPSETLSLTCFVSGGSISNSDYFWGWIRQPPGKCLEWIGTIYYSGRTYYNPSLKSRVTISVDTSKNQFSLMLSSVTAVDTAVYYCARYQYGSFDYWGQGTLVTVSSGGGGQGGGGQGGGGQEIVMTQTPLSLPVTPGEPASISCRSSQSLLHSNGYNYLDWYLQKPGQSPQLLIYLGSNRASGVPDRFSGSGSGTDFTLKISRVEAEDVGVYYCMQALQTPYTFGCGTKVEIRSGGGGQEVQLVESGGGLVQPGGSLKLSCAASGFTFNKYAMNWVRQAPGKGLEWVARIRSKYNNYATYYADSVKDRFTISRDDSKNTAYLQMNNLKTEDTAVYYCVRHGNFGNSYISYWAYWGQGTLVTVSSGGGGQGGGGQGGGGQQTVVTQEPSLTVSPGGTVTLTCGSSTGAVTSGNYPNWVQQKPGQAPRGLIGGTKFLAPGTPARFSGSLLGGKAALTLSGVQPEDEAEYYCVLWYSNRWVFGGGTKLTVL

SEQ ID NO: 2398 - protein, 750 aa, Artificial Sequence
  Synthetic
EVQLVESGGGLVQPGGSLRLSCAASGFTFHDYPMHWVRQAPGKCLEWVSGISWNSDYIVYADSVKGRFTISRDNAKNSLYLQMNSLRPEDTALYYCAKDTAYGGKYYAFDYWGQGTPVTVSSGGGGSGGGGSGGGGSDIQMTQSPSSLSASVGDRVTITCRASQGISDYLAWYQQKPGKVPKLLIYAASTLQSGVPSRFSGSGSGTDFTLTISSLQPEDVATYYCQKYNSAPYTFGCGTKLEIKSGGGGSQLQLQESGPGLVKPSETLSLTCFVSGGSISNSDYFWGWIRQPPGKCLEWIGTIYYSGRTYYNPSLKSRVTISVDTSKNQFSLMLSSVTAVDTAVYYCARYQYGSFDYWGQGTLVTVSSGGGGSGGGGSGGGGSDIVMTQTPLSLPVTPGEPASISCRSSQSLLHSNGYNYLDWYLQKPGQSPQLLIYLGSNRASGVPDRFSGSGSGTDFTLKISRVEAEDVGVYYCMQALQTPYTFGCGTKVEIRSGGGGSEVQLVESGGGLVQPGGSLKLSCAASGFTFNKYAINWVRQAPGKGLEWVARIRSKYNNYATYYADAVKDRFTISRDDSKNTVYLQMNNLKTEDTAVYYCARAGNFGSSYISYWAYWGQGTLVTVSSGGGGSGGGGSGGGGSQTVVTQEPSLTVSPGGTVTITCGSSTGAVTSGNYPNWVQKKPGQAPRGLIGGTKFLAPGTPARFSGSLSGGKAALTLSGVQPEDEAEYYCVLWYSNRWVFGSGTKLTVL

SEQ ID NO: 2399 - protein, 750 aa, Artificial Sequence
  Synthetic
EVQLVESGGGLVQPGGSLRLSCAASGFTFHDYPMHWVRQAPGKCLEWVSGISWNSDYIVYADSVKGRFTISRDNAKNSLYLQMNSLRPEDTALYYCAKDTAYGGKYYAFDYWGQGTPVTVSSGGGGQGGGGQGGGGQEIQMTQSPSSLSASVGDRVTITCRASQGISDYLAWYQQKPGKVPKLLIYAASTLQSGVPSRFSGSGSGTDFTLTISSLQPEDVATYYCQKYNSAPYTFGCGTKLEIKSGGGGQQLQLQESGPGLVKPSETLSLTCFVSGGSISNSDYFWGWIRQPPGKCLEWIGTIYYSGRTYYNPSLKSRVTISVDTSKNQFSLMLSSVTAVDTAVYYCARYQYGSFDYWGQGTLVTVSSGGGGQGGGGQGGGGQEIVMTQTPLSLPVTPGEPASISCRSSQSLLHSNGYNYLDWYLQKPGQSPQLLIYLGSNRASGVPDRFSGSGSGTDFTLKISRVEAEDVGVYYCMQALQTPYTFGCGTKVEIRSGGGGQEVQLVESGGGLVQPGGSLKLSCAASGFTFNKYAINWVRQAPGKGLEWVARIRSKYNNYATYYADAVKDRFTISRDDSKNTVYLQMNNLKTEDTAVYYCARAGNFGSSYISYWAYWGQGTLVTVSSGGGGQGGGGQGGGGQQTVVTQEPSLTVSPGGTVTITCGSSTGAVTSGNYPNWVQKKPGQAPRGLIGGTKFLAPGTPARFSGSLSGGKAALTLSGVQPEDEAEYYCVLWYSNRWVFGSGTKLTVL

SEQ ID NO: 2400 - protein, 1238 aa, Artificial Sequence
  Synthetic
EVQLVESGGGLVQPGGSLRLSCAASGFTFHDYPMHWVRQAPGKCLEWVSGISWNSDYIVYADSVKGRFTISRDNAKNSLYLQMNSLRPEDTALYYCAKDTAYGGKYYAFDYWGQGTPVTVSSGGGGSGGGGSGGGGSDIQMTQSPSSLSASVGDRVTITCRASQGISDYLAWYQQKPGKVPKLLIYAASTLQSGVPSRFSGSGSGTDFTLTISSLQPEDVATYYCQKYNSAPYTFGCGTKLEIKSGGGGSQLQLQESGPGLVKPSETLSLTCFVSGGSISNSDYFWGWIRQPPGKCLEWIGTIYYSGRTYYNPSLKSRVTISVDTSKNQFSLMLSSVTAVDTAVYYCARYQYGSFDYWGQGTLVTVSSGGGGSGGGGSGGGGSDIVMTQTPLSLPVTPGEPASISCRSSQSLLHSNGYNYLDWYLQKPGQSPQLLIYLGSNRASGVPDRFSGSGSGTDFTLKISRVEAEDVGVYYCMQALQTPYTFGCGTKVEIRSGGGGSEVQLVESGGGLVQPGGSLKLSCAASGFTFNKYAMNWVRQAPGKGLEWVARIRSKYNNYATYYADSVKDRFTISRDDSKNTAYLQMNNLKTEDTAVYYCVRHGNFGNSYISYWAYWGQGTLVTVSSGGGGSGGGGSGGGGSQTVVTQEPSLTVSPGGTVTLTCGSSTGAVTSGNYPNWVQQKPGQAPRGLIGGTKFLAPGTPARFSGSLLGGKAALTLSGVQPEDEAEYYCVLWYSNRWVFGGGTKLTVLGGGGDKTHTCPPCPAPELLGGPSVFLFPPKPKDTLMISRTPEVTCVVVDVSHEDPEVKFNWYVDGVEVHNAKTKPCEEQYGSTYRCVSVLTVLHQDWLNGKEYKCKVSNKALPAPIEKTISKAKGQPREPQVYTLPPSREEMTKNQVSLTCLVKGFYPSDIAVEWESNGQPENNYKTTPPVLDSDGSFFLYSKLTVDKSRWQQGNVFSCSVMHEALHNHYTQKSLSLSPGKGGGGSGGGGSGGGGSGGGGSGGGGSGGGGSDKTHTCPPCPAPELLGGPSVFLFPPKPKDTLMISRTPEVTCVVVDVSHEDPEVKFNWYVDGVEVHNAKTKPCEEQYGSTYRCVSVLTVLHQDWLNGKEYKCKVSNKALPAPIEKTISKAKGQPREPQVYTLPPSREEMTKNQVSLTCLVKGFYPSDIAVEWESNGQPENNYKTTPPVLDSDGSFFLYSKLTVDKSRWQQGNVFSCSVMHEALHNHYTQKSLSLSPGK

SEQ ID NO: 2401 - protein, 1228 aa, Artificial Sequence
  Synthetic
EVQLVESGGGLVQPGGSLRLSCAASGFTFHDYPMHWVRQAPGKCLEWVSGISWNSDYIVYADSVKGRFTISRDNAKNSLYLQMNSLRPEDTALYYCAKDTAYGGKYYAFDYWGQGTPVTVSSGGGGQGGGGQGGGGQEIQMTQSPSSLSASVGDRVTITCRASQGISDYLAWYQQKPGKVPKLLIYAASTLQSGVPSRFSGSGSGTDFTLTISSLQPEDVATYYCQKYNSAPYTFGCGTKLEIKSGGGGQQLQLQESGPGLVKPSETLSLTCFVSGGSISNSDYFWGWIRQPPGKCLEWIGTIYYSGRTYYNPSLKSRVTISVDTSKNQFSLMLSSVTAVDTAVYYCARYQYGSFDYWGQGTLVTVSSGGGGQGGGGQGGGGQEIVMTQTPLSLPVTPGEPASISCRSSQSLLHSNGYNYLDWYLQKPGQSPQLLIYLGSNRASGVPDRFSGSGSGTDFTLKISRVEAEDVGVYYCMQALQTPYTFGCGTKVEIRSGGGGQEVQLVESGGGLVQPGGSLKLSCAASGFTFNKYAMNWVRQAPGKGLEWVARIRSKYNNYATYYADSVKDRFTISRDDSKNTAYLQMNNLKTEDTAVYYCVRHGNFGNSYISYWAYWGQGTLVTVSSGGGGQGGGGQGGGGQQTVVTQEPSLTVSPGGTVTLTCGSSTGAVTSGNYPNWVQQKPGQAPRGLIGGTKFLAPGTPARFSGSLLGGKAALTLSGVQPEDEAEYYCVLWYSNRWVFGGGTKLTVLGGGGCPPCPAPELLGGPSVFLFPPKPKDTLMISRTPEVTCVVVDVSHEEPEVKFNWYVDGVEVHNAKTKPCEEQYGSTYRCVSVLTVLHQDWLNGKEYKCKVSNKALPAPIEKTISKAKGQPREPQVYTLPPSREEMTKNQVSLTCLVKGFYPSDIAVEWESNGQPENNYKTTPPVLDSDGSFFLYSKLTVDKSRWQQGNVFSCSVMHEALHNHYTQKSLSLSPGKGGGGQGGGGQGGGGQGGGGQGGGGQGGGGQCPPCPAPELLGGPSVFLFPPKPKDTLMISRTPEVTCVVVDVSHEEPEVKFNWYVDGVEVHNAKTKPCEEQYGSTYRCVSVLTVLHQDWLNGKEYKCKVSNKALPAPIEKTISKAKGQPREPQVYTLPPSREEMTKNQVSLTCLVKGFYPSDIAVEWESNGQPENNYKTTPPVLDSDGSFFLYSKLTVDKSRWQQGNVFSCSVMHEALHNHYTQKSLSLSPGK

SEQ ID NO: 2402 - protein, 1238 aa, Artificial Sequence
  Synthetic
EVQLVESGGGLVQPGGSLRLSCAASGFTFHDYPMHWVRQAPGKCLEWVSGISWNSDYIVYADSVKGRFTISRDNAKNSLYLQMNSLRPEDTALYYCAKDTAYGGKYYAFDYWGQGTPVTVSSGGGGSGGGGSGGGGSDIQMTQSPSSLSASVGDRVTITCRASQGISDYLAWYQQKPGKVPKLLIYAASTLQSGVPSRFSGSGSGTDFTLTISSLQPEDVATYYCQKYNSAPYTFGCGTKLEIKSGGGGSQLQLQESGPGLVKPSETLSLTCFVSGGSISNSDYFWGWIRQPPGKCLEWIGTIYYSGRTYYNPSLKSRVTISVDTSKNQFSLMLSSVTAVDTAVYYCARYQYGSFDYWGQGTLVTVSSGGGGSGGGGSGGGGSDIVMTQTPLSLPVTPGEPASISCRSSQSLLHSNGYNYLDWYLQKPGQSPQLLIYLGSNRASGVPDRFSGSGSGTDFTLKISRVEAEDVGVYYCMQALQTPYTFGCGTKVEIRSGGGGSEVQLVESGGGLVQPGGSLKLSCAASGFTFNKYAINWVRQAPGKGLEWVARIRSKYNNYATYYADAVKDRFTISRDDSKNTVYLQMNNLKTEDTAVYYCARAGNFGSSYISYWAYWGQGTLVTVSSGGGGSGGGGSGGGGSQTVVTQEPSLTVSPGGTVTITCGSSTGAVTSGNYPNWVQKKPGQAPRGLIGGTKFLAPGTPARFSGSLSGGKAALTLSGVQPEDEAEYYCVLWYSNRWVFGSGTKLTVLGGGGDKTHTCPPCPAPELLGGPSVFLFPPKPKDTLMISRTPEVTCVVVDVSHEDPEVKFNWYVDGVEVHNAKTKPCEEQYGSTYRCVSVLTVLHQDWLNGKEYKCKVSNKALPAPIEKTISKAKGQPREPQVYTLPPSREEMTKNQVSLTCLVKGFYPSDIAVEWESNGQPENNYKTTPPVLDSDGSFFLYSKLTVDKSRWQQGNVFSCSVMHEALHNHYTQKSLSLSPGKGGGGSGGGGSGGGGSGGGGSGGGGSGGGGSDKTHTCPPCPAPELLGGPSVFLFPPKPKDTLMISRTPEVTCVVVDVSHEDPEVKFNWYVDGVEVHNAKTKPCEEQYGSTYRCVSVLTVLHQDWLNGKEYKCKVSNKALPAPIEKTISKAKGQPREPQVYTLPPSREEMTKNQVSLTCLVKGFYPSDIAVEWESNGQPENNYKTTPPVLDSDGSFFLYSKLTVDKSRWQQGNVFSCSVMHEALHNHYTQKSLSLSPGK

SEQ ID NO: 2403 - protein, 1228 aa, Artificial Sequence
  Synthetic
EVQLVESGGGLVQPGGSLRLSCAASGFTFHDYPMHWVRQAPGKCLEWVSGISWNSDYIVYADSVKGRFTISRDNAKNSLYLQMNSLRPEDTALYYCAKDTAYGGKYYAFDYWGQGTPVTVSSGGGGQGGGGQGGGGQEIQMTQSPSSLSASVGDRVTITCRASQGISDYLAWYQQKPGKVPKLLIYAASTLQSGVPSRFSGSGSGTDFTLTISSLQPEDVATYYCQKYNSAPYTFGCGTKLEIKSGGGGQQLQLQESGPGLVKPSETLSLTCFVSGGSISNSDYFWGWIRQPPGKCLEWIGTIYYSGRTYYNPSLKSRVTISVDTSKNQFSLMLSSVTAVDTAVYYCARYQYGSFDYWGQGTLVTVSSGGGGQGGGGQGGGGQEIVMTQTPLSLPVTPGEPASISCRSSQSLLHSNGYNYLDWYLQKPGQSPQLLIYLGSNRASGVPDRFSGSGSGTDFTLKISRVEAEDVGVYYCMQALQTPYTFGCGTKVEIRSGGGGQEVQLVESGGGLVQPGGSLKLSCAASGFTFNKYAINWVRQAPGKGLEWVARIRSKYNNYATYYADAVKDRFTISRDDSKNTVYLQMNNLKTEDTAVYYCARAGNFGSSYISYWAYWGQGTLVTVSSGGGGQGGGGQGGGGQQTVVTQEPSLTVSPGGTVTITCGSSTGAVTSGNYPNWVQKKPGQAPRGLIGGTKFLAPGTPARFSGSLSGGKAALTLSGVQPEDEAEYYCVLWYSNRWVFGSGTKLTVLGGGGCPPCPAPELLGGPSVFLFPPKPKDTLMISRTPEVTCVVVDVSHEEPEVKFNWYVDGVEVHNAKTKPCEEQYGSTYRCVSVLTVLHQDWLNGKEYKCKVSNKALPAPIEKTISKAKGQPREPQVYTLPPSREEMTKNQVSLTCLVKGFYPSDIAVEWESNGQPENNYKTTPPVLDSDGSFFLYSKLTVDKSRWQQGNVFSCSVMHEALHNHYTQKSLSLSPGKGGGGQGGGGQGGGGQGGGGQGGGGQGGGGQCPPCPAPELLGGPSVFLFPPKPKDTLMISRTPEVTCVVVDVSHEEPEVKFNWYVDGVEVHNAKTKPCEEQYGSTYRCVSVLTVLHQDWLNGKEYKCKVSNKALPAPIEKTISKAKGQPREPQVYTLPPSREEMTKNQVSLTCLVKGFYPSDIAVEWESNGQPENNYKTTPPVLDSDGSFFLYSKLTVDKSRWQQGNVFSCSVMHEALHNHYTQKSLSLSPGK

SEQ ID NO: 2404 - protein, 497 aa, Artificial Sequence
  Synthetic
EVQLVESGGGLVQPGGSLRLSCAASGFTFHDYPMHWVRQAPGKCLEWVSGISWNSDYIVYADSVKGRFTISRDNAKNSLYLQMNSLRPEDTALYYCAKDTAYGGKYYAFDYWGQGTPVTVSSGGGGSGGGGSGGGGSDIQMTQSPSSLSASVGDRVTITCRASQGISDYLAWYQQKPGKVPKLLIYAASTLQSGVPSRFSGSGSGTDFTLTISSLQPEDVATYYCQKYNSAPYTFGCGTKLEIKSGGGGSQVQLVESGGGVVQPGRSLRLSCAASGFTFSAYGMHWVRQAPGKCLEWVAVILYDGSNKYYADSVKGRFTISRDNSKNTLYLQMNSLRAEDTAVYYCARGSGWLQLGDYFDYWGQGTLVTVSSGGGGSGGGGSGGGGSQSALTQPPSVSGSPGQSITISCTGTSSDVGGYNYVSWYQQHPGKAPKLMIYEVSNRPSGVSNRFSGSKSGNTASLTISGLQAEDEADYYCSSYTSSSTLVFGCGTKLTVL

SEQ ID NO: 2405 - protein, 497 aa, Artificial Sequence
  Synthetic
EVQLVESGGGLVQPGGSLRLSCAASGFTFHDYPMHWVRQAPGKCLEWVSGISWNSDYIVYADSVKGRFTISRDNAKNSLYLQMNSLRPEDTALYYCAKDTAYGGKYYAFDYWGQGTPVTVSSGGGGQGGGGQGGGGQEIQMTQSPSSLSASVGDRVTITCRASQGISDYLAWYQQKPGKVPKLLIYAASTLQSGVPSRFSGSGSGTDFTLTISSLQPEDVATYYCQKYNSAPYTFGCGTKLEIKSGGGGQQVQLVESGGGVVQPGRSLRLSCAASGFTFSAYGMHWVRQAPGKCLEWVAVILYDGSNKYYADSVKGRFTISRDNSKNTLYLQMNSLRAEDTAVYYCARGSGWLQLGDYFDYWGQGTLVTVSSGGGGQGGGGQGGGGQQSALTQPPSVSGSPGQSITISCTGTSSDVGGYNYVSWYQQHPGKAPKLMIYEVSNRPSGVSNRFSGSKSGNTASLTISGLQAEDEADYYCSSYTSSSTLVFGCGTKLTVL

SEQ ID NO: 2406 - protein, 752 aa, Artificial Sequence
  Synthetic
EVQLVESGGGLVQPGGSLRLSCAASGFTFHDYPMHWVRQAPGKCLEWVSGISWNSDYIVYADSVKGRFTISRDNAKNSLYLQMNSLRPEDTALYYCAKDTAYGGKYYAFDYWGQGTPVTVSSGGGGSGGGGSGGGGSDIQMTQSPSSLSASVGDRVTITCRASQGISDYLAWYQQKPGKVPKLLIYAASTLQSGVPSRFSGSGSGTDFTLTISSLQPEDVATYYCQKYNSAPYTFGCGTKLEIKSGGGGSQVQLVESGGGVVQPGRSLRLSCAASGFTFSAYGMHWVRQAPGKCLEWVAVILYDGSNKYYADSVKGRFTISRDNSKNTLYLQMNSLRAEDTAVYYCARGSGWLQLGDYFDYWGQGTLVTVSSGGGGSGGGGSGGGGSQSALTQPPSVSGSPGQSITISCTGTSSDVGGYNYVSWYQQHPGKAPKLMIYEVSNRPSGVSNRFSGSKSGNTASLTISGLQAEDEADYYCSSYTSSSTLVFGCGTKLTVLSGGGGSEVQLVESGGGLVQPGGSLKLSCAASGFTFNKYAMNWVRQAPGKGLEWVARIRSKYNNYATYYADSVKDRFTISRDDSKNTAYLQMNNLKTEDTAVYYCVRHGNFGNSYISYWAYWGQGTLVTVSSGGGGSGGGGSGGGGSQTVVTQEPSLTVSPGGTVTLTCGSSTGAVTSGNYPNWVQQKPGQAPRGLIGGTKFLAPGTPARFSGSLLGGKAALTLSGVQPEDEAEYYCVLWYSNRWVFGGGTKLTVL

SEQ ID NO: 2407 - protein, 752 aa, Artificial Sequence
  Synthetic
EVQLVESGGGLVQPGGSLRLSCAASGFTFHDYPMHWVRQAPGKCLEWVSGISWNSDYIVYADSVKGRFTISRDNAKNSLYLQMNSLRPEDTALYYCAKDTAYGGKYYAFDYWGQGTPVTVSSGGGGQGGGGQGGGGQEIQMTQSPSSLSASVGDRVTITCRASQGISDYLAWYQQKPGKVPKLLIYAASTLQSGVPSRFSGSGSGTDFTLTISSLQPEDVATYYCQKYNSAPYTFGCGTKLEIKSGGGGQQVQLVESGGGVVQPGRSLRLSCAASGFTFSAYGMHWVRQAPGKCLEWVAVILYDGSNKYYADSVKGRFTISRDNSKNTLYLQMNSLRAEDTAVYYCARGSGWLQLGDYFDYWGQGTLVTVSSGGGGQGGGGQGGGGQQSALTQPPSVSGSPGQSITISCTGTSSDVGGYNYVSWYQQHPGKAPKLMIYEVSNRPSGVSNRFSGSKSGNTASLTISGLQAEDEADYYCSSYTSSSTLVFGCGTKLTVLSGGGGQEVQLVESGGGLVQPGGSLKLSCAASGFTFNKYAMNWVRQAPGKGLEWVARIRSKYNNYATYYADSVKDRFTISRDDSKNTAYLQMNNLKTEDTAVYYCVRHGNFGNSYISYWAYWGQGTLVTVSSGGGGQGGGGQGGGGQQTVVTQEPSLTVSPGGTVTLTCGSSTGAVTSGNYPNWVQQKPGQAPRGLIGGTKFLAPGTPARFSGSLLGGKAALTLSGVQPEDEAEYYCVLWYSNRWVFGGGTKLTVL

SEQ ID NO: 2408 - protein, 752 aa, Artificial Sequence
  Synthetic
EVQLVESGGGLVQPGGSLRLSCAASGFTFHDYPMHWVRQAPGKCLEWVSGISWNSDYIVYADSVKGRFTISRDNAKNSLYLQMNSLRPEDTALYYCAKDTAYGGKYYAFDYWGQGTPVTVSSGGGGSGGGGSGGGGSDIQMTQSPSSLSASVGDRVTITCRASQGISDYLAWYQQKPGKVPKLLIYAASTLQSGVPSRFSGSGSGTDFTLTISSLQPEDVATYYCQKYNSAPYTFGCGTKLEIKSGGGGSQVQLVESGGGVVQPGRSLRLSCAASGFTFSAYGMHWVRQAPGKCLEWVAVILYDGSNKYYADSVKGRFTISRDNSKNTLYLQMNSLRAEDTAVYYCARGSGWLQLGDYFDYWGQGTLVTVSSGGGGSGGGGSGGGGSQSALTQPPSVSGSPGQSITISCTGTSSDVGGYNYVSWYQQHPGKAPKLMIYEVSNRPSGVSNRFSGSKSGNTASLTISGLQAEDEADYYCSSYTSSSTLVFGCGTKLTVLSGGGGSEVQLVESGGGLVQPGGSLKLSCAASGFTFNKYAINWVRQAPGKGLEWVARIRSKYNNYATYYADAVKDRFTISRDDSKNTVYLQMNNLKTEDTAVYYCARAGNFGSSYISYWAYWGQGTLVTVSSGGGGSGGGGSGGGGSQTVVTQEPSLTVSPGGTVTITCGSSTGAVTSGNYPNWVQKKPGQAPRGLIGGTKFLAPGTPARFSGSLSGGKAALTLSGVQPEDEAEYYCVLWYSNRWVFGSGTKLTVL

SEQ ID NO: 2409 - protein, 752 aa, Artificial Sequence
  Synthetic
EVQLVESGGGLVQPGGSLRLSCAASGFTFHDYPMHWVRQAPGKCLEWVSGISWNSDYIVYADSVKGRFTISRDNAKNSLYLQMNSLRPEDTALYYCAKDTAYGGKYYAFDYWGQGTPVTVSSGGGGQGGGGQGGGGQEIQMTQSPSSLSASVGDRVTITCRASQGISDYLAWYQQKPGKVPKLLIYAASTLQSGVPSRFSGSGSGTDFTLTISSLQPEDVATYYCQKYNSAPYTFGCGTKLEIKSGGGGQQVQLVESGGGVVQPGRSLRLSCAASGFTFSAYGMHWVRQAPGKCLEWVAVILYDGSNKYYADSVKGRFTISRDNSKNTLYLQMNSLRAEDTAVYYCARGSGWLQLGDYFDYWGQGTLVTVSSGGGGQGGGGQGGGGQQSALTQPPSVSGSPGQSITISCTGTSSDVGGYNYVSWYQQHPGKAPKLMIYEVSNRPSGVSNRFSGSKSGNTASLTISGLQAEDEADYYCSSYTSSSTLVFGCGTKLTVLSGGGGQEVQLVESGGGLVQPGGSLKLSCAASGFTFNKYAINWVRQAPGKGLEWVARIRSKYNNYATYYADAVKDRFTISRDDSKNTVYLQMNNLKTEDTAVYYCARAGNFGSSYISYWAYWGQGTLVTVSSGGGGQGGGGQGGGGQQTVVTQEPSLTVSPGGTVTITCGSSTGAVTSGNYPNWVQKKPGQAPRGLIGGTKFLAPGTPARFSGSLSGGKAALTLSGVQPEDEAEYYCVLWYSNRWVFGSGTKLTVL

SEQ ID NO: 2410 - protein, 1240 aa, Artificial Sequence
  Synthetic
EVQLVESGGGLVQPGGSLRLSCAASGFTFHDYPMHWVRQAPGKCLEWVSGISWNSDYIVYADSVKGRFTISRDNAKNSLYLQMNSLRPEDTALYYCAKDTAYGGKYYAFDYWGQGTPVTVSSGGGGSGGGGSGGGGSDIQMTQSPSSLSASVGDRVTITCRASQGISDYLAWYQQKPGKVPKLLIYAASTLQSGVPSRFSGSGSGTDFTLTISSLQPEDVATYYCQKYNSAPYTFGCGTKLEIKSGGGGSQVQLVESGGGVVQPGRSLRLSCAASGFTFSAYGMHWVRQAPGKCLEWVAVILYDGSNKYYADSVKGRFTISRDNSKNTLYLQMNSLRAEDTAVYYCARGSGWLQLGDYFDYWGQGTLVTVSSGGGGSGGGGSGGGGSQSALTQPPSVSGSPGQSITISCTGTSSDVGGYNYVSWYQQHPGKAPKLMIYEVSNRPSGVSNRFSGSKSGNTASLTISGLQAEDEADYYCSSYTSSSTLVFGCGTKLTVLSGGGGSEVQLVESGGGLVQPGGSLKLSCAASGFTFNKYAMNWVRQAPGKGLEWVARIRSKYNNYATYYADSVKDRFTISRDDSKNTAYLQMNNLKTEDTAVYYCVRHGNFGNSYISYWAYWGQGTLVTVSSGGGGSGGGGSGGGGSQTVVTQEPSLTVSPGGTVTLTCGSSTGAVTSGNYPNWVQQKPGQAPRGLIGGTKFLAPGTPARFSGSLLGGKAALTLSGVQPEDEAEYYCVLWYSNRWVFGGGTKLTVLGGGGDKTHTCPPCPAPELLGGPSVFLFPPKPKDTLMISRTPEVTCVVVDVSHEDPEVKFNWYVDGVEVHNAKTKPCEEQYGSTYRCVSVLTVLHQDWLNGKEYKCKVSNKALPAPIEKTISKAKGQPREPQVYTLPPSREEMTKNQVSLTCLVKGFYPSDIAVEWESNGQPENNYKTTPPVLDSDGSFFLYSKLTVDKSRWQQGNVFSCSVMHEALHNHYTQKSLSLSPGKGGGGSGGGGSGGGGSGGGGSGGGGSGGGGSDKTHTCPPCPAPELLGGPSVFLFPPKPKDTLMISRTPEVTCVVVDVSHEDPEVKFNWYVDGVEVHNAKTKPCEEQYGSTYRCVSVLTVLHQDWLNGKEYKCKVSNKALPAPIEKTISKAKGQPREPQVYTLPPSREEMTKNQVSLTCLVKGFYPSDIAVEWESNGQPENNYKTTPPVLDSDGSFFLYSKLTVDKSRWQQGNVFSCSVMHEALHNHYTQKSLSLSPGK

SEQ ID NO: 2411 - protein, 1230 aa, Artificial Sequence
  Synthetic
EVQLVESGGGLVQPGGSLRLSCAASGFTFHDYPMHWVRQAPGKCLEWVSGISWNSDYIVYADSVKGRFTISRDNAKNSLYLQMNSLRPEDTALYYCAKDTAYGGKYYAFDYWGQGTPVTVSSGGGGQGGGGQGGGGQEIQMTQSPSSLSASVGDRVTITCRASQGISDYLAWYQQKPGKVPKLLIYAASTLQSGVPSRFSGSGSGTDFTLTISSLQPEDVATYYCQKYNSAPYTFGCGTKLEIKSGGGGQQVQLVESGGGVVQPGRSLRLSCAASGFTFSAYGMHWVRQAPGKCLEWVAVILYDGSNKYYADSVKGRFTISRDNSKNTLYLQMNSLRAEDTAVYYCARGSGWLQLGDYFDYWGQGTLVTVSSGGGGQGGGGQGGGGQQSALTQPPSVSGSPGQSITISCTGTSSDVGGYNYVSWYQQHPGKAPKLMIYEVSNRPSGVSNRFSGSKSGNTASLTISGLQAEDEADYYCSSYTSSSTLVFGCGTKLTVLSGGGGQEVQLVESGGGLVQPGGSLKLSCAASGFTFNKYAMNWVRQAPGKGLEWVARIRSKYNNYATYYADSVKDRFTISRDDSKNTAYLQMNNLKTEDTAVYYCVRHGNFGNSYISYWAYWGQGTLVTVSSGGGGQGGGGQGGGGQQTVVTQEPSLTVSPGGTVTLTCGSSTGAVTSGNYPNWVQQKPGQAPRGLIGGTKFLAPGTPARFSGSLLGGKAALTLSGVQPEDEAEYYCVLWYSNRWVFGGGTKLTVLGGGGCPPCPAPELLGGPSVFLFPPKPKDTLMISRTPEVTCVVVDVSHEEPEVKFNWYVDGVEVHNAKTKPCEEQYGSTYRCVSVLTVLHQDWLNGKEYKCKVSNKALPAPIEKTISKAKGQPREPQVYTLPPSREEMTKNQVSLTCLVKGFYPSDIAVEWESNGQPENNYKTTPPVLDSDGSFFLYSKLTVDKSRWQQGNVFSCSVMHEALHNHYTQKSLSLSPGKGGGGQGGGGQGGGGQGGGGQGGGGQGGGGQCPPCPAPELLGGPSVFLFPPKPKDTLMISRTPEVTCVVVDVSHEEPEVKFNWYVDGVEVHNAKTKPCEEQYGSTYRCVSVLTVLHQDWLNGKEYKCKVSNKALPAPIEKTISKAKGQPREPQVYTLPPSREEMTKNQVSLTCLVKGFYPSDIAVEWESNGQPENNYKTTPPVLDSDGSFFLYSKLTVDKSRWQQGNVFSCSVMHEALHNHYTQKSLSLSPGK

SEQ ID NO: 2412 - protein, 1240 aa, Artificial Sequence
  Synthetic
EVQLVESGGGLVQPGGSLRLSCAASGFTFHDYPMHWVRQAPGKCLEWVSGISWNSDYIVYADSVKGRFTISRDNAKNSLYLQMNSLRPEDTALYYCAKDTAYGGKYYAFDYWGQGTPVTVSSGGGGSGGGGSGGGGSDIQMTQSPSSLSASVGDRVTITCRASQGISDYLAWYQQKPGKVPKLLIYAASTLQSGVPSRFSGSGSGTDFTLTISSLQPEDVATYYCQKYNSAPYTFGCGTKLEIKSGGGGSQVQLVESGGGVVQPGRSLRLSCAASGFTFSAYGMHWVRQAPGKCLEWVAVILYDGSNKYYADSVKGRFTISRDNSKNTLYLQMNSLRAEDTAVYYCARGSGWLQLGDYFDYWGQGTLVTVSSGGGGSGGGGSGGGGSQSALTQPPSVSGSPGQSITISCTGTSSDVGGYNYVSWYQQHPGKAPKLMIYEVSNRPSGVSNRFSGSKSGNTASLTISGLQAEDEADYYCSSYTSSSTLVFGCGTKLTVLSGGGGSEVQLVESGGGLVQPGGSLKLSCAASGFTFNKYAINWVRQAPGKGLEWVARIRSKYNNYATYYADAVKDRFTISRDDSKNTVYLQMNNLKTEDTAVYYCARAGNFGSSYISYWAYWGQGTLVTVSSGGGGSGGGGSGGGGSQTVVTQEPSLTVSPGGTVTITCGSSTGAVTSGNYPNWVQKKPGQAPRGLIGGTKFLAPGTPARFSGSLSGGKAALTLSGVQPEDEAEYYCVLWYSNRWVFGSGTKLTVLGGGGDKTHTCPPCPAPELLGGPSVFLFPPKPKDTLMISRTPEVTCVVVDVSHEDPEVKFNWYVDGVEVHNAKTKPCEEQYGSTYRCVSVLTVLHQDWLNGKEYKCKVSNKALPAPIEKTISKAKGQPREPQVYTLPPSREEMTKNQVSLTCLVKGFYPSDIAVEWESNGQPENNYKTTPPVLDSDGSFFLYSKLTVDKSRWQQGNVFSCSVMHEALHNHYTQKSLSLSPGKGGGGSGGGGSGGGGSGGGGSGGGGSGGGGSDKTHTCPPCPAPELLGGPSVFLFPPKPKDTLMISRTPEVTCVVVDVSHEDPEVKFNWYVDGVEVHNAKTKPCEEQYGSTYRCVSVLTVLHQDWLNGKEYKCKVSNKALPAPIEKTISKAKGQPREPQVYTLPPSREEMTKNQVSLTCLVKGFYPSDIAVEWESNGQPENNYKTTPPVLDSDGSFFLYSKLTVDKSRWQQGNVFSCSVMHEALHNHYTQKSLSLSPGK

SEQ ID NO: 2413 - protein, 1230 aa, Artificial Sequence
  Synthetic
EVQLVESGGGLVQPGGSLRLSCAASGFTFHDYPMHWVRQAPGKCLEWVSGISWNSDYIVYADSVKGRFTISRDNAKNSLYLQMNSLRPEDTALYYCAKDTAYGGKYYAFDYWGQGTPVTVSSGGGGQGGGGQGGGGQEIQMTQSPSSLSASVGDRVTITCRASQGISDYLAWYQQKPGKVPKLLIYAASTLQSGVPSRFSGSGSGTDFTLTISSLQPEDVATYYCQKYNSAPYTFGCGTKLEIKSGGGGQQVQLVESGGGVVQPGRSLRLSCAASGFTFSAYGMHWVRQAPGKCLEWVAVILYDGSNKYYADSVKGRFTISRDNSKNTLYLQMNSLRAEDTAVYYCARGSGWLQLGDYFDYWGQGTLVTVSSGGGGQGGGGQGGGGQQSALTQPPSVSGSPGQSITISCTGTSSDVGGYNYVSWYQQHPGKAPKLMIYEVSNRPSGVSNRFSGSKSGNTASLTISGLQAEDEADYYCSSYTSSSTLVFGCGTKLTVLSGGGGQEVQLVESGGGLVQPGGSLKLSCAASGFTFNKYAINWVRQAPGKGLEWVARIRSKYNNYATYYADAVKDRFTISRDDSKNTVYLQMNNLKTEDTAVYYCARAGNFGSSYISYWAYWGQGTLVTVSSGGGGQGGGGQGGGGQQTVVTQEPSLTVSPGGTVTITCGSSTGAVTSGNYPNWVQKKPGQAPRGLIGGTKFLAPGTPARFSGSLSGGKAALTLSGVQPEDEAEYYCVLWYSNRWVFGSGTKLTVLGGGGCPPCPAPELLGGPSVFLFPPKPKDTLMISRTPEVTCVVVDVSHEEPEVKFNWYVDGVEVHNAKTKPCEEQYGSTYRCVSVLTVLHQDWLNGKEYKCKVSNKALPAPIEKTISKAKGQPREPQVYTLPPSREEMTKNQVSLTCLVKGFYPSDIAVEWESNGQPENNYKTTPPVLDSDGSFFLYSKLTVDKSRWQQGNVFSCSVMHEALHNHYTQKSLSLSPGKGGGGQGGGGQGGGGQGGGGQGGGGQGGGGQCPPCPAPELLGGPSVFLFPPKPKDTLMISRTPEVTCVVVDVSHEEPEVKFNWYVDGVEVHNAKTKPCEEQYGSTYRCVSVLTVLHQDWLNGKEYKCKVSNKALPAPIEKTISKAKGQPREPQVYTLPPSREEMTKNQVSLTCLVKGFYPSDIAVEWESNGQPENNYKTTPPVLDSDGSFFLYSKLTVDKSRWQQGNVFSCSVMHEALHNHYTQKSLSLSPGK

SEQ ID NO: 2414 - protein, 496 aa, Artificial Sequence
  Synthetic
EVQLVESGGGLVQPDRSLRLSCAASGFTFRDYAMHWVRQAPGKCLEWVSGIAWNSDSIGYADSVKGRFTISRDNAKNSLFLQMHSLRPEDTALYFCAKDTLYGSGSPRAFDIWGQGTMVTVSSGGGGSGGGGSGGGGSEIVLTQSPATLSVSPGERATLSCRASQSVNNNLAWYQQKPGQAPRLLIYGASTRATGIPARFSGSGSGTEFTLTISRLEPEDFAVYYCQQSNNWPITFGCGTRLEIKSGGGGSQVQLVQSGGEVKKPGASVKVSCKASGYTFTSYGISWVRQAPGQCLEWMGWMSPYNGNAIYAQKLQGRVTMTRDTSTSTAYMELRSLRSDDTAVYYCARDPDYYGSGSYSDYWGQGTLVTVSSGGGGSGGGGSGGGGSEIVLTQSPATLSVSPGERATLSCRASQSVSSNLAWYQQKPGQAPRLLIYGASSRATGIPARFSGSGSGTEFTLTISSLQSEDFAVYYCQQYHSWPLLTFGCGTKVEIK

SEQ ID NO: 2415 - protein, 496 aa, Artificial Sequence
  Synthetic
EVQLVESGGGLVQPDRSLRLSCAASGFTFRDYAMHWVRQAPGKCLEWVSGIAWNSDSIGYADSVKGRFTISRDNAKNSLFLQMHSLRPEDTALYFCAKDTLYGSGSPRAFDIWGQGTMVTVSSGGGGQGGGGQGGGGQEIVLTQSPATLSVSPGERATLSCRASQSVNNNLAWYQQKPGQAPRLLIYGASTRATGIPARFSGSGSGTEFTLTISRLEPEDFAVYYCQQSNNWPITFGCGTRLEIKSGGGGQQVQLVQSGGEVKKPGASVKVSCKASGYTFTSYGISWVRQAPGQCLEWMGWMSPYNGNAIYAQKLQGRVTMTRDTSTSTAYMELRSLRSDDTAVYYCARDPDYYGSGSYSDYWGQGTLVTVSSGGGGQGGGGQGGGGQEIVLTQSPATLSVSPGERATLSCRASQSVSSNLAWYQQKPGQAPRLLIYGASSRATGIPARFSGSGSGTEFTLTISSLQSEDFAVYYCQQYHSWPLLTFGCGTKVEIK

SEQ ID NO: 2416 - protein, 751 aa, Artificial Sequence
  Synthetic
EVQLVESGGGLVQPDRSLRLSCAASGFTFRDYAMHWVRQAPGKCLEWVSGIAWNSDSIGYADSVKGRFTISRDNAKNSLFLQMHSLRPEDTALYFCAKDTLYGSGSPRAFDIWGQGTMVTVSSGGGGSGGGGSGGGGSEIVLTQSPATLSVSPGERATLSCRASQSVNNNLAWYQQKPGQAPRLLIYGASTRATGIPARFSGSGSGTEFTLTISRLEPEDFAVYYCQQSNNWPITFGCGTRLEIKSGGGGSQVQLVQSGGEVKKPGASVKVSCKASGYTFTSYGISWVRQAPGQCLEWMGWMSPYNGNAIYAQKLQGRVTMTRDTSTSTAYMELRSLRSDDTAVYYCARDPDYYGSGSYSDYWGQGTLVTVSSGGGGSGGGGSGGGGSEIVLTQSPATLSVSPGERATLSCRASQSVSSNLAWYQQKPGQAPRLLIYGASSRATGIPARFSGSGSGTEFTLTISSLQSEDFAVYYCQQYHSWPLLTFGCGTKVEIKSGGGGSEVQLVESGGGLVQPGGSLKLSCAASGFTFNKYAMNWVRQAPGKGLEWVARIRSKYNNYATYYADSVKDRFTISRDDSKNTAYLQMNNLKTEDTAVYYCVRHGNFGNSYISYWAYWGQGTLVTVSSGGGGSGGGGSGGGGSQTVVTQEPSLTVSPGGTVTLTCGSSTGAVTSGNYPNWVQQKPGQAPRGLIGGTKFLAPGTPARFSGSLLGGKAALTLSGVQPEDEAEYYCVLWYSNRWVFGGGTKLTVL

SEQ ID NO: 2417 - protein, 751 aa, Artificial Sequence
  Synthetic
EVQLVESGGGLVQPDRSLRLSCAASGFTFRDYAMHWVRQAPGKCLEWVSGIAWNSDSIGYADSVKGRFTISRDNAKNSLFLQMHSLRPEDTALYFCAKDTLYGSGSPRAFDIWGQGTMVTVSSGGGGQGGGGQGGGGQEIVLTQSPATLSVSPGERATLSCRASQSVNNNLAWYQQKPGQAPRLLIYGASTRATGIPARFSGSGSGTEFTLTISRLEPEDFAVYYCQQSNNWPITFGCGTRLEIKSGGGGQQVQLVQSGGEVKKPGASVKVSCKASGYTFTSYGISWVRQAPGQCLEWMGWMSPYNGNAIYAQKLQGRVTMTRDTSTSTAYMELRSLRSDDTAVYYCARDPDYYGSGSYSDYWGQGTLVTVSSGGGGQGGGGQGGGGQEIVLTQSPATLSVSPGERATLSCRASQSVSSNLAWYQQKPGQAPRLLIYGASSRATGIPARFSGSGSGTEFTLTISSLQSEDFAVYYCQQYHSWPLLTFGCGTKVEIKSGGGGQEVQLVESGGGLVQPGGSLKLSCAASGFTFNKYAMNWVRQAPGKGLEWVARIRSKYNNYATYYADSVKDRFTISRDDSKNTAYLQMNNLKTEDTAVYYCVRHGNFGNSYISYWAYWGQGTLVTVSSGGGGQGGGGQGGGGQQTVVTQEPSLTVSPGGTVTLTCGSSTGAVTSGNYPNWVQQKPGQAPRGLIGGTKFLAPGTPARFSGSLLGGKAALTLSGVQPEDEAEYYCVLWYSNRWVFGGGTKLTVL

SEQ ID NO: 2418 - protein, 751 aa, Artificial Sequence
  Synthetic
EVQLVESGGGLVQPDRSLRLSCAASGFTFRDYAMHWVRQAPGKCLEWVSGIAWNSDSIGYADSVKGRFTISRDNAKNSLFLQMHSLRPEDTALYFCAKDTLYGSGSPRAFDIWGQGTMVTVSSGGGGSGGGGSGGGGSEIVLTQSPATLSVSPGERATLSCRASQSVNNNLAWYQQKPGQAPRLLIYGASTRATGIPARFSGSGSGTEFTLTISRLEPEDFAVYYCQQSNNWPITFGCGTRLEIKSGGGGSQVQLVQSGGEVKKPGASVKVSCKASGYTFTSYGISWVRQAPGQCLEWMGWMSPYNGNAIYAQKLQGRVTMTRDTSTSTAYMELRSLRSDDTAVYYCARDPDYYGSGSYSDYWGQGTLVTVSSGGGGSGGGGSGGGGSEIVLTQSPATLSVSPGERATLSCRASQSVSSNLAWYQQKPGQAPRLLIYGASSRATGIPARFSGSGSGTEFTLTISSLQSEDFAVYYCQQYHSWPLLTFGCGTKVEIKSGGGGSEVQLVESGGGLVQPGGSLKLSCAASGFTFNKYAINWVRQAPGKGLEWVARIRSKYNNYATYYADAVKDRFTISRDDSKNTVYLQMNNLKTEDTAVYYCARAGNFGSSYISYWAYWGQGTLVTVSSGGGGSGGGGSGGGGSQTVVTQEPSLTVSPGGTVTITCGSSTGAVTSGNYPNWVQKKPGQAPRGLIGGTKFLAPGTPARFSGSLSGGKAALTLSGVQPEDEAEYYCVLWYSNRWVFGSGTKLTVL

SEQ ID NO: 2419 - protein, 751 aa, Artificial Sequence
  Synthetic
EVQLVESGGGLVQPDRSLRLSCAASGFTFRDYAMHWVRQAPGKCLEWVSGIAWNSDSIGYADSVKGRFTISRDNAKNSLFLQMHSLRPEDTALYFCAKDTLYGSGSPRAFDIWGQGTMVTVSSGGGGQGGGGQGGGGQEIVLTQSPATLSVSPGERATLSCRASQSVNNNLAWYQQKPGQAPRLLIYGASTRATGIPARFSGSGSGTEFTLTISRLEPEDFAVYYCQQSNNWPITFGCGTRLEIKSGGGGQQVQLVQSGGEVKKPGASVKVSCKASGYTFTSYGISWVRQAPGQCLEWMGWMSPYNGNAIYAQKLQGRVTMTRDTSTSTAYMELRSLRSDDTAVYYCARDPDYYGSGSYSDYWGQGTLVTVSSGGGGQGGGGQGGGGQEIVLTQSPATLSVSPGERATLSCRASQSVSSNLAWYQQKPGQAPRLLIYGASSRATGIPARFSGSGSGTEFTLTISSLQSEDFAVYYCQQYHSWPLLTFGCGTKVEIKSGGGGQEVQLVESGGGLVQPGGSLKLSCAASGFTFNKYAINWVRQAPGKGLEWVARIRSKYNNYATYYADAVKDRFTISRDDSKNTVYLQMNNLKTEDTAVYYCARAGNFGSSYISYWAYWGQGTLVTVSSGGGGQGGGGQGGGGQQTVVTQEPSLTVSPGGTVTITCGSSTGAVTSGNYPNWVQKKPGQAPRGLIGGTKFLAPGTPARFSGSLSGGKAALTLSGVQPEDEAEYYCVLWYSNRWVFGSGTKLTVL

SEQ ID NO: 2420 - protein, 1239 aa, Artificial Sequence
  Synthetic
EVQLVESGGGLVQPDRSLRLSCAASGFTFRDYAMHWVRQAPGKCLEWVSGIAWNSDSIGYADSVKGRFTISRDNAKNSLFLQMHSLRPEDTALYFCAKDTLYGSGSPRAFDIWGQGTMVTVSSGGGGSGGGGSGGGGSEIVLTQSPATLSVSPGERATLSCRASQSVNNNLAWYQQKPGQAPRLLIYGASTRATGIPARFSGSGSGTEFTLTISRLEPEDFAVYYCQQSNNWPITFGCGTRLEIKSGGGGSQVQLVQSGGEVKKPGASVKVSCKASGYTFTSYGISWVRQAPGQCLEWMGWMSPYNGNAIYAQKLQGRVTMTRDTSTSTAYMELRSLRSDDTAVYYCARDPDYYGSGSYSDYWGQGTLVTVSSGGGGSGGGGSGGGGSEIVLTQSPATLSVSPGERATLSCRASQSVSSNLAWYQQKPGQAPRLLIYGASSRATGIPARFSGSGSGTEFTLTISSLQSEDFAVYYCQQYHSWPLLTFGCGTKVEIKSGGGGSEVQLVESGGGLVQPGGSLKLSCAASGFTFNKYAMNWVRQAPGKGLEWVARIRSKYNNYATYYADSVKDRFTISRDDSKNTAYLQMNNLKTEDTAVYYCVRHGNFGNSYISYWAYWGQGTLVTVSSGGGGSGGGGSGGGGSQTVVTQEPSLTVSPGGTVTLTCGSSTGAVTSGNYPNWVQQKPGQAPRGLIGGTKFLAPGTPARFSGSLLGGKAALTLSGVQPEDEAEYYCVLWYSNRWVFGGGTKLTVLGGGGDKTHTCPPCPAPELLGGPSVFLFPPKPKDTLMISRTPEVTCVVVDVSHEDPEVKFNWYVDGVEVHNAKTKPCEEQYGSTYRCVSVLTVLHQDWLNGKEYKCKVSNKALPAPIEKTISKAKGQPREPQVYTLPPSREEMTKNQVSLTCLVKGFYPSDIAVEWESNGQPENNYKTTPPVLDSDGSFFLYSKLTVDKSRWQQGNVFSCSVMHEALHNHYTQKSLSLSPGKGGGGSGGGGSGGGGSGGGGSGGGGSGGGGSDKTHTCPPCPAPELLGGPSVFLFPPKPKDTLMISRTPEVTCVVVDVSHEDPEVKFNWYVDGVEVHNAKTKPCEEQYGSTYRCVSVLTVLHQDWLNGKEYKCKVSNKALPAPIEKTISKAKGQPREPQVYTLPPSREEMTKNQVSLTCLVKGFYPSDIAVEWESNGQPENNYKTTPPVLDSDGSFFLYSKLTVDKSRWQQGNVFSCSVMHEALHNHYTQKSLSLSPGK

SEQ ID NO: 2421 - protein, 1229 aa, Artificial Sequence
  Synthetic
EVQLVESGGGLVQPDRSLRLSCAASGFTFRDYAMHWVRQAPGKCLEWVSGIAWNSDSIGYADSVKGRFTISRDNAKNSLFLQMHSLRPEDTALYFCAKDTLYGSGSPRAFDIWGQGTMVTVSSGGGGQGGGGQGGGGQEIVLTQSPATLSVSPGERATLSCRASQSVNNNLAWYQQKPGQAPRLLIYGASTRATGIPARFSGSGSGTEFTLTISRLEPEDFAVYYCQQSNNWPITFGCGTRLEIKSGGGGQQVQLVQSGGEVKKPGASVKVSCKASGYTFTSYGISWVRQAPGQCLEWMGWMSPYNGNAIYAQKLQGRVTMTRDTSTSTAYMELRSLRSDDTAVYYCARDPDYYGSGSYSDYWGQGTLVTVSSGGGGQGGGGQGGGGQEIVLTQSPATLSVSPGERATLSCRASQSVSSNLAWYQQKPGQAPRLLIYGASSRATGIPARFSGSGSGTEFTLTISSLQSEDFAVYYCQQYHSWPLLTFGCGTKVEIKSGGGGQEVQLVESGGGLVQPGGSLKLSCAASGFTFNKYAMNWVRQAPGKGLEWVARIRSKYNNYATYYADSVKDRFTISRDDSKNTAYLQMNNLKTEDTAVYYCVRHGNFGNSYISYWAYWGQGTLVTVSSGGGGQGGGGQGGGGQQTVVTQEPSLTVSPGGTVTLTCGSSTGAVTSGNYPNWVQQKPGQAPRGLIGGTKFLAPGTPARFSGSLLGGKAALTLSGVQPEDEAEYYCVLWYSNRWVFGGGTKLTVLGGGGCPPCPAPELLGGPSVFLFPPKPKDTLMISRTPEVTCVVVDVSHEEPEVKFNWYVDGVEVHNAKTKPCEEQYGSTYRCVSVLTVLHQDWLNGKEYKCKVSNKALPAPIEKTISKAKGQPREPQVYTLPPSREEMTKNQVSLTCLVKGFYPSDIAVEWESNGQPENNYKTTPPVLDSDGSFFLYSKLTVDKSRWQQGNVFSCSVMHEALHNHYTQKSLSLSPGKGGGGQGGGGQGGGGQGGGGQGGGGQGGGGQCPPCPAPELLGGPSVFLFPPKPKDTLMISRTPEVTCVVVDVSHEEPEVKFNWYVDGVEVHNAKTKPCEEQYGSTYRCVSVLTVLHQDWLNGKEYKCKVSNKALPAPIEKTISKAKGQPREPQVYTLPPSREEMTKNQVSLTCLVKGFYPSDIAVEWESNGQPENNYKTTPPVLDSDGSFFLYSKLTVDKSRWQQGNVFSCSVMHEALHNHYTQKSLSLSPGK

SEQ ID NO: 2422 - protein, 1239 aa, Artificial Sequence
  Synthetic
EVQLVESGGGLVQPDRSLRLSCAASGFTFRDYAMHWVRQAPGKCLEWVSGIAWNSDSIGYADSVKGRFTISRDNAKNSLFLQMHSLRPEDTALYFCAKDTLYGSGSPRAFDIWGQGTMVTVSSGGGGSGGGGSGGGGSEIVLTQSPATLSVSPGERATLSCRASQSVNNNLAWYQQKPGQAPRLLIYGASTRATGIPARFSGSGSGTEFTLTISRLEPEDFAVYYCQQSNNWPITFGCGTRLEIKSGGGGSQVQLVQSGGEVKKPGASVKVSCKASGYTFTSYGISWVRQAPGQCLEWMGWMSPYNGNAIYAQKLQGRVTMTRDTSTSTAYMELRSLRSDDTAVYYCARDPDYYGSGSYSDYWGQGTLVTVSSGGGGSGGGGSGGGGSEIVLTQSPATLSVSPGERATLSCRASQSVSSNLAWYQQKPGQAPRLLIYGASSRATGIPARFSGSGSGTEFTLTISSLQSEDFAVYYCQQYHSWPLLTFGCGTKVEIKSGGGGSEVQLVESGGGLVQPGGSLKLSCAASGFTFNKYAINWVRQAPGKGLEWVARIRSKYNNYATYYADAVKDRFTISRDDSKNTVYLQMNNLKTEDTAVYYCARAGNFGSSYISYWAYWGQGTLVTVSSGGGGSGGGGSGGGGSQTVVTQEPSLTVSPGGTVTITCGSSTGAVTSGNYPNWVQKKPGQAPRGLIGGTKFLAPGTPARFSGSLSGGKAALTLSGVQPEDEAEYYCVLWYSNRWVFGSGTKLTVLGGGGDKTHTCPPCPAPELLGGPSVFLFPPKPKDTLMISRTPEVTCVVVDVSHEDPEVKFNWYVDGVEVHNAKTKPCEEQYGSTYRCVSVLTVLHQDWLNGKEYKCKVSNKALPAPIEKTISKAKGQPREPQVYTLPPSREEMTKNQVSLTCLVKGFYPSDIAVEWESNGQPENNYKTTPPVLDSDGSFFLYSKLTVDKSRWQQGNVFSCSVMHEALHNHYTQKSLSLSPGKGGGGSGGGGSGGGGSGGGGSGGGGSGGGGSDKTHTCPPCPAPELLGGPSVFLFPPKPKDTLMISRTPEVTCVVVDVSHEDPEVKFNWYVDGVEVHNAKTKPCEEQYGSTYRCVSVLTVLHQDWLNGKEYKCKVSNKALPAPIEKTISKAKGQPREPQVYTLPPSREEMTKNQVSLTCLVKGFYPSDIAVEWESNGQPENNYKTTPPVLDSDGSFFLYSKLTVDKSRWQQGNVFSCSVMHEALHNHYTQKSLSLSPGK

SEQ ID NO: 2423 - protein, 1229 aa, Artificial Sequence
  Synthetic
EVQLVESGGGLVQPDRSLRLSCAASGFTFRDYAMHWVRQAPGKCLEWVSGIAWNSDSIGYADSVKGRFTISRDNAKNSLFLQMHSLRPEDTALYFCAKDTLYGSGSPRAFDIWGQGTMVTVSSGGGGQGGGGQGGGGQEIVLTQSPATLSVSPGERATLSCRASQSVNNNLAWYQQKPGQAPRLLIYGASTRATGIPARFSGSGSGTEFTLTISRLEPEDFAVYYCQQSNNWPITFGCGTRLEIKSGGGGQQVQLVQSGGEVKKPGASVKVSCKASGYTFTSYGISWVRQAPGQCLEWMGWMSPYNGNAIYAQKLQGRVTMTRDTSTSTAYMELRSLRSDDTAVYYCARDPDYYGSGSYSDYWGQGTLVTVSSGGGGQGGGGQGGGGQEIVLTQSPATLSVSPGERATLSCRASQSVSSNLAWYQQKPGQAPRLLIYGASSRATGIPARFSGSGSGTEFTLTISSLQSEDFAVYYCQQYHSWPLLTFGCGTKVEIKSGGGGQEVQLVESGGGLVQPGGSLKLSCAASGFTFNKYAINWVRQAPGKGLEWVARIRSKYNNYATYYADAVKDRFTISRDDSKNTVYLQMNNLKTEDTAVYYCARAGNFGSSYISYWAYWGQGTLVTVSSGGGGQGGGGQGGGGQQTVVTQEPSLTVSPGGTVTITCGSSTGAVTSGNYPNWVQKKPGQAPRGLIGGTKFLAPGTPARFSGSLSGGKAALTLSGVQPEDEAEYYCVLWYSNRWVFGSGTKLTVLGGGGCPPCPAPELLGGPSVFLFPPKPKDTLMISRTPEVTCVVVDVSHEEPEVKFNWYVDGVEVHNAKTKPCEEQYGSTYRCVSVLTVLHQDWLNGKEYKCKVSNKALPAPIEKTISKAKGQPREPQVYTLPPSREEMTKNQVSLTCLVKGFYPSDIAVEWESNGQPENNYKTTPPVLDSDGSFFLYSKLTVDKSRWQQGNVFSCSVMHEALHNHYTQKSLSLSPGKGGGGQGGGGQGGGGQGGGGQGGGGQGGGGQCPPCPAPELLGGPSVFLFPPKPKDTLMISRTPEVTCVVVDVSHEEPEVKFNWYVDGVEVHNAKTKPCEEQYGSTYRCVSVLTVLHQDWLNGKEYKCKVSNKALPAPIEKTISKAKGQPREPQVYTLPPSREEMTKNQVSLTCLVKGFYPSDIAVEWESNGQPENNYKTTPPVLDSDGSFFLYSKLTVDKSRWQQGNVFSCSVMHEALHNHYTQKSLSLSPGK

SEQ ID NO: 2424 - protein, 496 aa, Artificial Sequence
  Synthetic
EVQLVESGGGLVQPDRSLRLSCAASGFTFRDYAMHWVRQAPGKCLEWVSGIAWNSDSIGYADSVKGRFTISRDNAKNSLFLQMHSLRPEDTALYFCAKDTLYGSGSPRAFDIWGQGTMVTVSSGGGGSGGGGSGGGGSEIVLTQSPATLSVSPGERATLSCRASQSVNNNLAWYQQKPGQAPRLLIYGASTRATGIPARFSGSGSGTEFTLTISRLEPEDFAVYYCQQSNNWPITFGCGTRLEIKSGGGGSQVQLVQSGAEVKKPGASVKVSCKASGYTFTSYGISWVRQAPGQCLEWMGWISAYNGNTIYAQKFQGRVTLTRDTSTSTAYMELRSLRSDDTAMYYCARDPDYYGSGSYSDYWGQGTLVTVSSGGGGSGGGGSGGGGSEIVLTQSPATLSVSPGERATLSCRASQSVSSNLAWYQQKPGQAPRLLIYGASSRATGIPARFSGSGSGTEFTLTISSLQSEDFAVYYCQQYHSWPLLTFGCGTKVEIK

SEQ ID NO: 2425 - protein, 496 aa, Artificial Sequence
  Synthetic
EVQLVESGGGLVQPDRSLRLSCAASGFTFRDYAMHWVRQAPGKCLEWVSGIAWNSDSIGYADSVKGRFTISRDNAKNSLFLQMHSLRPEDTALYFCAKDTLYGSGSPRAFDIWGQGTMVTVSSGGGGQGGGGQGGGGQEIVLTQSPATLSVSPGERATLSCRASQSVNNNLAWYQQKPGQAPRLLIYGASTRATGIPARFSGSGSGTEFTLTISRLEPEDFAVYYCQQSNNWPITFGCGTRLEIKSGGGGQQVQLVQSGAEVKKPGASVKVSCKASGYTFTSYGISWVRQAPGQCLEWMGWISAYNGNTIYAQKFQGRVTLTRDTSTSTAYMELRSLRSDDTAMYYCARDPDYYGSGSYSDYWGQGTLVTVSSGGGGQGGGGQGGGGQEIVLTQSPATLSVSPGERATLSCRASQSVSSNLAWYQQKPGQAPRLLIYGASSRATGIPARFSGSGSGTEFTLTISSLQSEDFAVYYCQQYHSWPLLTFGCGTKVEIK

SEQ ID NO: 2426 - protein, 751 aa, Artificial Sequence
  Synthetic
EVQLVESGGGLVQPDRSLRLSCAASGFTFRDYAMHWVRQAPGKCLEWVSGIAWNSDSIGYADSVKGRFTISRDNAKNSLFLQMHSLRPEDTALYFCAKDTLYGSGSPRAFDIWGQGTMVTVSSGGGGSGGGGSGGGGSEIVLTQSPATLSVSPGERATLSCRASQSVNNNLAWYQQKPGQAPRLLIYGASTRATGIPARFSGSGSGTEFTLTISRLEPEDFAVYYCQQSNNWPITFGCGTRLEIKSGGGGSQVQLVQSGAEVKKPGASVKVSCKASGYTFTSYGISWVRQAPGQCLEWMGWISAYNGNTIYAQKFQGRVTLTRDTSTSTAYMELRSLRSDDTAMYYCARDPDYYGSGSYSDYWGQGTLVTVSSGGGGSGGGGSGGGGSEIVLTQSPATLSVSPGERATLSCRASQSVSSNLAWYQQKPGQAPRLLIYGASSRATGIPARFSGSGSGTEFTLTISSLQSEDFAVYYCQQYHSWPLLTFGCGTKVEIKSGGGGSEVQLVESGGGLVQPGGSLKLSCAASGFTFNKYAMNWVRQAPGKGLEWVARIRSKYNNYATYYADSVKDRFTISRDDSKNTAYLQMNNLKTEDTAVYYCVRHGNFGNSYISYWAYWGQGTLVTVSSGGGGSGGGGSGGGGSQTVVTQEPSLTVSPGGTVTLTCGSSTGAVTSGNYPNWVQQKPGQAPRGLIGGTKFLAPGTPARFSGSLLGGKAALTLSGVQPEDEAEYYCVLWYSNRWVFGGGTKLTVL

SEQ ID NO: 2427 - protein, 751 aa, Artificial Sequence
  Synthetic
EVQLVESGGGLVQPDRSLRLSCAASGFTFRDYAMHWVRQAPGKCLEWVSGIAWNSDSIGYADSVKGRFTISRDNAKNSLFLQMHSLRPEDTALYFCAKDTLYGSGSPRAFDIWGQGTMVTVSSGGGGQGGGGQGGGGQEIVLTQSPATLSVSPGERATLSCRASQSVNNNLAWYQQKPGQAPRLLIYGASTRATGIPARFSGSGSGTEFTLTISRLEPEDFAVYYCQQSNNWPITFGCGTRLEIKSGGGGQQVQLVQSGAEVKKPGASVKVSCKASGYTFTSYGISWVRQAPGQCLEWMGWISAYNGNTIYAQKFQGRVTLTRDTSTSTAYMELRSLRSDDTAMYYCARDPDYYGSGSYSDYWGQGTLVTVSSGGGGQGGGGQGGGGQEIVLTQSPATLSVSPGERATLSCRASQSVSSNLAWYQQKPGQAPRLLIYGASSRATGIPARFSGSGSGTEFTLTISSLQSEDFAVYYCQQYHSWPLLTFGCGTKVEIKSGGGGQEVQLVESGGGLVQPGGSLKLSCAASGFTFNKYAMNWVRQAPGKGLEWVARIRSKYNNYATYYADSVKDRFTISRDDSKNTAYLQMNNLKTEDTAVYYCVRHGNFGNSYISYWAYWGQGTLVTVSSGGGGQGGGGQGGGGQQTVVTQEPSLTVSPGGTVTLTCGSSTGAVTSGNYPNWVQQKPGQAPRGLIGGTKFLAPGTPARFSGSLLGGKAALTLSGVQPEDEAEYYCVLWYSNRWVFGGGTKLTVL

SEQ ID NO: 2428 - protein, 751 aa, Artificial Sequence
  Synthetic
EVQLVESGGGLVQPDRSLRLSCAASGFTFRDYAMHWVRQAPGKCLEWVSGIAWNSDSIGYADSVKGRFTISRDNAKNSLFLQMHSLRPEDTALYFCAKDTLYGSGSPRAFDIWGQGTMVTVSSGGGGSGGGGSGGGGSEIVLTQSPATLSVSPGERATLSCRASQSVNNNLAWYQQKPGQAPRLLIYGASTRATGIPARFSGSGSGTEFTLTISRLEPEDFAVYYCQQSNNWPITFGCGTRLEIKSGGGGSQVQLVQSGAEVKKPGASVKVSCKASGYTFTSYGISWVRQAPGQCLEWMGWISAYNGNTIYAQKFQGRVTLTRDTSTSTAYMELRSLRSDDTAMYYCARDPDYYGSGSYSDYWGQGTLVTVSSGGGGSGGGGSGGGGSEIVLTQSPATLSVSPGERATLSCRASQSVSSNLAWYQQKPGQAPRLLIYGASSRATGIPARFSGSGSGTEFTLTISSLQSEDFAVYYCQQYHSWPLLTFGCGTKVEIKSGGGGSEVQLVESGGGLVQPGGSLKLSCAASGFTFNKYAINWVRQAPGKGLEWVARIRSKYNNYATYYADAVKDRFTISRDDSKNTVYLQMNNLKTEDTAVYYCARAGNFGSSYISYWAYWGQGTLVTVSSGGGGSGGGGSGGGGSQTVVTQEPSLTVSPGGTVTITCGSSTGAVTSGNYPNWVQKKPGQAPRGLIGGTKFLAPGTPARFSGSLSGGKAALTLSGVQPEDEAEYYCVLWYSNRWVFGSGTKLTVL

SEQ ID NO: 2429 - protein, 751 aa, Artificial Sequence
  Synthetic
EVQLVESGGGLVQPDRSLRLSCAASGFTFRDYAMHWVRQAPGKCLEWVSGIAWNSDSIGYADSVKGRFTISRDNAKNSLFLQMHSLRPEDTALYFCAKDTLYGSGSPRAFDIWGQGTMVTVSSGGGGQGGGGQGGGGQEIVLTQSPATLSVSPGERATLSCRASQSVNNNLAWYQQKPGQAPRLLIYGASTRATGIPARFSGSGSGTEFTLTISRLEPEDFAVYYCQQSNNWPITFGCGTRLEIKSGGGGQQVQLVQSGAEVKKPGASVKVSCKASGYTFTSYGISWVRQAPGQCLEWMGWISAYNGNTIYAQKFQGRVTLTRDTSTSTAYMELRSLRSDDTAMYYCARDPDYYGSGSYSDYWGQGTLVTVSSGGGGQGGGGQGGGGQEIVLTQSPATLSVSPGERATLSCRASQSVSSNLAWYQQKPGQAPRLLIYGASSRATGIPARFSGSGSGTEFTLTISSLQSEDFAVYYCQQYHSWPLLTFGCGTKVEIKSGGGGQEVQLVESGGGLVQPGGSLKLSCAASGFTFNKYAINWVRQAPGKGLEWVARIRSKYNNYATYYADAVKDRFTISRDDSKNTVYLQMNNLKTEDTAVYYCARAGNFGSSYISYWAYWGQGTLVTVSSGGGGQGGGGQGGGGQQTVVTQEPSLTVSPGGTVTITCGSSTGAVTSGNYPNWVQKKPGQAPRGLIGGTKFLAPGTPARFSGSLSGGKAALTLSGVQPEDEAEYYCVLWYSNRWVFGSGTKLTVL

SEQ ID NO: 2430 - protein, 1239 aa, Artificial Sequence
  Synthetic
EVQLVESGGGLVQPDRSLRLSCAASGFTFRDYAMHWVRQAPGKCLEWVSGIAWNSDSIGYADSVKGRFTISRDNAKNSLFLQMHSLRPEDTALYFCAKDTLYGSGSPRAFDIWGQGTMVTVSSGGGGSGGGGSGGGGSEIVLTQSPATLSVSPGERATLSCRASQSVNNNLAWYQQKPGQAPRLLIYGASTRATGIPARFSGSGSGTEFTLTISRLEPEDFAVYYCQQSNNWPITFGCGTRLEIKSGGGGSQVQLVQSGAEVKKPGASVKVSCKASGYTFTSYGISWVRQAPGQCLEWMGWISAYNGNTIYAQKFQGRVTLTRDTSTSTAYMELRSLRSDDTAMYYCARDPDYYGSGSYSDYWGQGTLVTVSSGGGGSGGGGSGGGGSEIVLTQSPATLSVSPGERATLSCRASQSVSSNLAWYQQKPGQAPRLLIYGASSRATGIPARFSGSGSGTEFTLTISSLQSEDFAVYYCQQYHSWPLLTFGCGTKVEIKSGGGGSEVQLVESGGGLVQPGGSLKLSCAASGFTFNKYAMNWVRQAPGKGLEWVARIRSKYNNYATYYADSVKDRFTISRDDSKNTAYLQMNNLKTEDTAVYYCVRHGNFGNSYISYWAYWGQGTLVTVSSGGGGSGGGGSGGGGSQTVVTQEPSLTVSPGGTVTLTCGSSTGAVTSGNYPNWVQQKPGQAPRGLIGGTKFLAPGTPARFSGSLLGGKAALTLSGVQPEDEAEYYCVLWYSNRWVFGGGTKLTVLGGGGDKTHTCPPCPAPELLGGPSVFLFPPKPKDTLMISRTPEVTCVVVDVSHEDPEVKFNWYVDGVEVHNAKTKPCEEQYGSTYRCVSVLTVLHQDWLNGKEYKCKVSNKALPAPIEKTISKAKGQPREPQVYTLPPSREEMTKNQVSLTCLVKGFYPSDIAVEWESNGQPENNYKTTPPVLDSDGSFFLYSKLTVDKSRWQQGNVFSCSVMHEALHNHYTQKSLSLSPGKGGGGSGGGGSGGGGSGGGGSGGGGSGGGGSDKTHTCPPCPAPELLGGPSVFLFPPKPKDTLMISRTPEVTCVVVDVSHEDPEVKFNWYVDGVEVHNAKTKPCEEQYGSTYRCVSVLTVLHQDWLNGKEYKCKVSNKALPAPIEKTISKAKGQPREPQVYTLPPSREEMTKNQVSLTCLVKGFYPSDIAVEWESNGQPENNYKTTPPVLDSDGSFFLYSKLTVDKSRWQQGNVFSCSVMHEALHNHYTQKSLSLSPGK

SEQ ID NO: 2431 - protein, 1229 aa, Artificial Sequence
  Synthetic
EVQLVESGGGLVQPDRSLRLSCAASGFTFRDYAMHWVRQAPGKCLEWVSGIAWNSDSIGYADSVKGRFTISRDNAKNSLFLQMHSLRPEDTALYFCAKDTLYGSGSPRAFDIWGQGTMVTVSSGGGGQGGGGQGGGGQEIVLTQSPATLSVSPGERATLSCRASQSVNNNLAWYQQKPGQAPRLLIYGASTRATGIPARFSGSGSGTEFTLTISRLEPEDFAVYYCQQSNNWPITFGCGTRLEIKSGGGGQQVQLVQSGAEVKKPGASVKVSCKASGYTFTSYGISWVRQAPGQCLEWMGWISAYNGNTIYAQKFQGRVTLTRDTSTSTAYMELRSLRSDDTAMYYCARDPDYYGSGSYSDYWGQGTLVTVSSGGGGQGGGGQGGGGQEIVLTQSPATLSVSPGERATLSCRASQSVSSNLAWYQQKPGQAPRLLIYGASSRATGIPARFSGSGSGTEFTLTISSLQSEDFAVYYCQQYHSWPLLTFGCGTKVEIKSGGGGQEVQLVESGGGLVQPGGSLKLSCAASGFTFNKYAMNWVRQAPGKGLEWVARIRSKYNNYATYYADSVKDRFTISRDDSKNTAYLQMNNLKTEDTAVYYCVRHGNFGNSYISYWAYWGQGTLVTVSSGGGGQGGGGQGGGGQQTVVTQEPSLTVSPGGTVTLTCGSSTGAVTSGNYPNWVQQKPGQAPRGLIGGTKFLAPGTPARFSGSLLGGKAALTLSGVQPEDEAEYYCVLWYSNRWVFGGGTKLTVLGGGGCPPCPAPELLGGPSVFLFPPKPKDTLMISRTPEVTCVVVDVSHEEPEVKFNWYVDGVEVHNAKTKPCEEQYGSTYRCVSVLTVLHQDWLNGKEYKCKVSNKALPAPIEKTISKAKGQPREPQVYTLPPSREEMTKNQVSLTCLVKGFYPSDIAVEWESNGQPENNYKTTPPVLDSDGSFFLYSKLTVDKSRWQQGNVFSCSVMHEALHNHYTQKSLSLSPGKGGGGQGGGGQGGGGQGGGGQGGGGQGGGGQCPPCPAPELLGGPSVFLFPPKPKDTLMISRTPEVTCVVVDVSHEEPEVKFNWYVDGVEVHNAKTKPCEEQYGSTYRCVSVLTVLHQDWLNGKEYKCKVSNKALPAPIEKTISKAKGQPREPQVYTLPPSREEMTKNQVSLTCLVKGFYPSDIAVEWESNGQPENNYKTTPPVLDSDGSFFLYSKLTVDKSRWQQGNVFSCSVMHEALHNHYTQKSLSLSPGK

SEQ ID NO: 2432 - protein, 1239 aa, Artificial Sequence
  Synthetic
EVQLVESGGGLVQPDRSLRLSCAASGFTFRDYAMHWVRQAPGKCLEWVSGIAWNSDSIGYADSVKGRFTISRDNAKNSLFLQMHSLRPEDTALYFCAKDTLYGSGSPRAFDIWGQGTMVTVSSGGGGSGGGGSGGGGSEIVLTQSPATLSVSPGERATLSCRASQSVNNNLAWYQQKPGQAPRLLIYGASTRATGIPARFSGSGSGTEFTLTISRLEPEDFAVYYCQQSNNWPITFGCGTRLEIKSGGGGSQVQLVQSGAEVKKPGASVKVSCKASGYTFTSYGISWVRQAPGQCLEWMGWISAYNGNTIYAQKFQGRVTLTRDTSTSTAYMELRSLRSDDTAMYYCARDPDYYGSGSYSDYWGQGTLVTVSSGGGGSGGGGSGGGGSEIVLTQSPATLSVSPGERATLSCRASQSVSSNLAWYQQKPGQAPRLLIYGASSRATGIPARFSGSGSGTEFTLTISSLQSEDFAVYYCQQYHSWPLLTFGCGTKVEIKSGGGGSEVQLVESGGGLVQPGGSLKLSCAASGFTFNKYAINWVRQAPGKGLEWVARIRSKYNNYATYYADAVKDRFTISRDDSKNTVYLQMNNLKTEDTAVYYCARAGNFGSSYISYWAYWGQGTLVTVSSGGGGSGGGGSGGGGSQTVVTQEPSLTVSPGGTVTITCGSSTGAVTSGNYPNWVQKKPGQAPRGLIGGTKFLAPGTPARFSGSLSGGKAALTLSGVQPEDEAEYYCVLWYSNRWVFGSGTKLTVLGGGGDKTHTCPPCPAPELLGGPSVFLFPPKPKDTLMISRTPEVTCVVVDVSHEDPEVKFNWYVDGVEVHNAKTKPCEEQYGSTYRCVSVLTVLHQDWLNGKEYKCKVSNKALPAPIEKTISKAKGQPREPQVYTLPPSREEMTKNQVSLTCLVKGFYPSDIAVEWESNGQPENNYKTTPPVLDSDGSFFLYSKLTVDKSRWQQGNVFSCSVMHEALHNHYTQKSLSLSPGKGGGGSGGGGSGGGGSGGGGSGGGGSGGGGSDKTHTCPPCPAPELLGGPSVFLFPPKPKDTLMISRTPEVTCVVVDVSHEDPEVKFNWYVDGVEVHNAKTKPCEEQYGSTYRCVSVLTVLHQDWLNGKEYKCKVSNKALPAPIEKTISKAKGQPREPQVYTLPPSREEMTKNQVSLTCLVKGFYPSDIAVEWESNGQPENNYKTTPPVLDSDGSFFLYSKLTVDKSRWQQGNVFSCSVMHEALHNHYTQKSLSLSPGK

SEQ ID NO: 2433 - protein, 1229 aa, Artificial Sequence
  Synthetic
EVQLVESGGGLVQPDRSLRLSCAASGFTFRDYAMHWVRQAPGKCLEWVSGIAWNSDSIGYADSVKGRFTISRDNAKNSLFLQMHSLRPEDTALYFCAKDTLYGSGSPRAFDIWGQGTMVTVSSGGGGQGGGGQGGGGQEIVLTQSPATLSVSPGERATLSCRASQSVNNNLAWYQQKPGQAPRLLIYGASTRATGIPARFSGSGSGTEFTLTISRLEPEDFAVYYCQQSNNWPITFGCGTRLEIKSGGGGQQVQLVQSGAEVKKPGASVKVSCKASGYTFTSYGISWVRQAPGQCLEWMGWISAYNGNTIYAQKFQGRVTLTRDTSTSTAYMELRSLRSDDTAMYYCARDPDYYGSGSYSDYWGQGTLVTVSSGGGGQGGGGQGGGGQEIVLTQSPATLSVSPGERATLSCRASQSVSSNLAWYQQKPGQAPRLLIYGASSRATGIPARFSGSGSGTEFTLTISSLQSEDFAVYYCQQYHSWPLLTFGCGTKVEIKSGGGGQEVQLVESGGGLVQPGGSLKLSCAASGFTFNKYAINWVRQAPGKGLEWVARIRSKYNNYATYYADAVKDRFTISRDDSKNTVYLQMNNLKTEDTAVYYCARAGNFGSSYISYWAYWGQGTLVTVSSGGGGQGGGGQGGGGQQTVVTQEPSLTVSPGGTVTITCGSSTGAVTSGNYPNWVQKKPGQAPRGLIGGTKFLAPGTPARFSGSLSGGKAALTLSGVQPEDEAEYYCVLWYSNRWVFGSGTKLTVLGGGGCPPCPAPELLGGPSVFLFPPKPKDTLMISRTPEVTCVVVDVSHEEPEVKFNWYVDGVEVHNAKTKPCEEQYGSTYRCVSVLTVLHQDWLNGKEYKCKVSNKALPAPIEKTISKAKGQPREPQVYTLPPSREEMTKNQVSLTCLVKGFYPSDIAVEWESNGQPENNYKTTPPVLDSDGSFFLYSKLTVDKSRWQQGNVFSCSVMHEALHNHYTQKSLSLSPGKGGGGQGGGGQGGGGQGGGGQGGGGQGGGGQCPPCPAPELLGGPSVFLFPPKPKDTLMISRTPEVTCVVVDVSHEEPEVKFNWYVDGVEVHNAKTKPCEEQYGSTYRCVSVLTVLHQDWLNGKEYKCKVSNKALPAPIEKTISKAKGQPREPQVYTLPPSREEMTKNQVSLTCLVKGFYPSDIAVEWESNGQPENNYKTTPPVLDSDGSFFLYSKLTVDKSRWQQGNVFSCSVMHEALHNHYTQKSLSLSPGK

SEQ ID NO: 2434 - protein, 496 aa, Artificial Sequence
  Synthetic
EVQLVESGGGLVQPDRSLRLSCAASGFTFRDYAMHWVRQAPGKCLEWVSGIAWNSDSIGYADSVKGRFTISRDNAKNSLFLQMHSLRPEDTALYFCAKDTLYGSGSPRAFDIWGQGTMVTVSSGGGGSGGGGSGGGGSEIVLTQSPATLSVSPGERATLSCRASQSVNNNLAWYQQKPGQAPRLLIYGASTRATGIPARFSGSGSGTEFTLTISRLEPEDFAVYYCQQSNNWPITFGCGTRLEIKSGGGGSQVQLVQSGAEVKKPGASVKVSCKASGYTFTTYGISWVRQAPGQCLEWMGWISPKNGVTTYAQKFQGRVTITADESTSTAYMELSRLTSDDTAMYYCARDPDYYGSGSYSDYWGQGTLVTVSSGGGGSGGGGSGGGGSEIVLTQSPATLSVSPGERATLSCRASQSVSSNLAWYQQKPGQAPRLLIYGASSRATGIPARFSGSGSGTEFTLTISSLQSEDFAVYYCQQYHSWPLLTFGCGTKVEIK

SEQ ID NO: 2435 - protein, 496 aa, Artificial Sequence
  Synthetic
EVQLVESGGGLVQPDRSLRLSCAASGFTFRDYAMHWVRQAPGKCLEWVSGIAWNSDSIGYADSVKGRFTISRDNAKNSLFLQMHSLRPEDTALYFCAKDTLYGSGSPRAFDIWGQGTMVTVSSGGGGQGGGGQGGGGQEIVLTQSPATLSVSPGERATLSCRASQSVNNNLAWYQQKPGQAPRLLIYGASTRATGIPARFSGSGSGTEFTLTISRLEPEDFAVYYCQQSNNWPITFGCGTRLEIKSGGGGQQVQLVQSGAEVKKPGASVKVSCKASGYTFTTYGISWVRQAPGQCLEWMGWISPKNGVTTYAQKFQGRVTITADESTSTAYMELSRLTSDDTAMYYCARDPDYYGSGSYSDYWGQGTLVTVSSGGGGQGGGGQGGGGQEIVLTQSPATLSVSPGERATLSCRASQSVSSNLAWYQQKPGQAPRLLIYGASSRATGIPARFSGSGSGTEFTLTISSLQSEDFAVYYCQQYHSWPLLTFGCGTKVEIK

SEQ ID NO: 2436 - protein, 751 aa, Artificial Sequence
  Synthetic
EVQLVESGGGLVQPDRSLRLSCAASGFTFRDYAMHWVRQAPGKCLEWVSGIAWNSDSIGYADSVKGRFTISRDNAKNSLFLQMHSLRPEDTALYFCAKDTLYGSGSPRAFDIWGQGTMVTVSSGGGGSGGGGSGGGGSEIVLTQSPATLSVSPGERATLSCRASQSVNNNLAWYQQKPGQAPRLLIYGASTRATGIPARFSGSGSGTEFTLTISRLEPEDFAVYYCQQSNNWPITFGCGTRLEIKSGGGGSQVQLVQSGAEVKKPGASVKVSCKASGYTFTTYGISWVRQAPGQCLEWMGWISPKNGVTTYAQKFQGRVTITADESTSTAYMELSRLTSDDTAMYYCARDPDYYGSGSYSDYWGQGTLVTVSSGGGGSGGGGSGGGGSEIVLTQSPATLSVSPGERATLSCRASQSVSSNLAWYQQKPGQAPRLLIYGASSRATGIPARFSGSGSGTEFTLTISSLQSEDFAVYYCQQYHSWPLLTFGCGTKVEIKSGGGGSEVQLVESGGGLVQPGGSLKLSCAASGFTFNKYAMNWVRQAPGKGLEWVARIRSKYNNYATYYADSVKDRFTISRDDSKNTAYLQMNNLKTEDTAVYYCVRHGNFGNSYISYWAYWGQGTLVTVSSGGGGSGGGGSGGGGSQTVVTQEPSLTVSPGGTVTLTCGSSTGAVTSGNYPNWVQQKPGQAPRGLIGGTKFLAPGTPARFSGSLLGGKAALTLSGVQPEDEAEYYCVLWYSNRWVFGGGTKLTVL

SEQ ID NO: 2437 - protein, 751 aa, Artificial Sequence
  Synthetic
EVQLVESGGGLVQPDRSLRLSCAASGFTFRDYAMHWVRQAPGKCLEWVSGIAWNSDSIGYADSVKGRFTISRDNAKNSLFLQMHSLRPEDTALYFCAKDTLYGSGSPRAFDIWGQGTMVTVSSGGGGQGGGGQGGGGQEIVLTQSPATLSVSPGERATLSCRASQSVNNNLAWYQQKPGQAPRLLIYGASTRATGIPARFSGSGSGTEFTLTISRLEPEDFAVYYCQQSNNWPITFGCGTRLEIKSGGGGQQVQLVQSGAEVKKPGASVKVSCKASGYTFTTYGISWVRQAPGQCLEWMGWISPKNGVTTYAQKFQGRVTITADESTSTAYMELSRLTSDDTAMYYCARDPDYYGSGSYSDYWGQGTLVTVSSGGGGQGGGGQGGGGQEIVLTQSPATLSVSPGERATLSCRASQSVSSNLAWYQQKPGQAPRLLIYGASSRATGIPARFSGSGSGTEFTLTISSLQSEDFAVYYCQQYHSWPLLTFGCGTKVEIKSGGGGQEVQLVESGGGLVQPGGSLKLSCAASGFTFNKYAMNWVRQAPGKGLEWVARIRSKYNNYATYYADSVKDRFTISRDDSKNTAYLQMNNLKTEDTAVYYCVRHGNFGNSYISYWAYWGQGTLVTVSSGGGGQGGGGQGGGGQQTVVTQEPSLTVSPGGTVTLTCGSSTGAVTSGNYPNWVQQKPGQAPRGLIGGTKFLAPGTPARFSGSLLGGKAALTLSGVQPEDEAEYYCVLWYSNRWVFGGGTKLTVL

SEQ ID NO: 2438 - protein, 751 aa, Artificial Sequence
  Synthetic
EVQLVESGGGLVQPDRSLRLSCAASGFTFRDYAMHWVRQAPGKCLEWVSGIAWNSDSIGYADSVKGRFTISRDNAKNSLFLQMHSLRPEDTALYFCAKDTLYGSGSPRAFDIWGQGTMVTVSSGGGGSGGGGSGGGGSEIVLTQSPATLSVSPGERATLSCRASQSVNNNLAWYQQKPGQAPRLLIYGASTRATGIPARFSGSGSGTEFTLTISRLEPEDFAVYYCQQSNNWPITFGCGTRLEIKSGGGGSQVQLVQSGAEVKKPGASVKVSCKASGYTFTTYGISWVRQAPGQCLEWMGWISPKNGVTTYAQKFQGRVTITADESTSTAYMELSRLTSDDTAMYYCARDPDYYGSGSYSDYWGQGTLVTVSSGGGGSGGGGSGGGGSEIVLTQSPATLSVSPGERATLSCRASQSVSSNLAWYQQKPGQAPRLLIYGASSRATGIPARFSGSGSGTEFTLTISSLQSEDFAVYYCQQYHSWPLLTFGCGTKVEIKSGGGGSEVQLVESGGGLVQPGGSLKLSCAASGFTFNKYAINWVRQAPGKGLEWVARIRSKYNNYATYYADAVKDRFTISRDDSKNTVYLQMNNLKTEDTAVYYCARAGNFGSSYISYWAYWGQGTLVTVSSGGGGSGGGGSGGGGSQTVVTQEPSLTVSPGGTVTITCGSSTGAVTSGNYPNWVQKKPGQAPRGLIGGTKFLAPGTPARFSGSLSGGKAALTLSGVQPEDEAEYYCVLWYSNRWVFGSGTKLTVL

SEQ ID NO: 2439 - protein, 751 aa, Artificial Sequence
  Synthetic
EVQLVESGGGLVQPDRSLRLSCAASGFTFRDYAMHWVRQAPGKCLEWVSGIAWNSDSIGYADSVKGRFTISRDNAKNSLFLQMHSLRPEDTALYFCAKDTLYGSGSPRAFDIWGQGTMVTVSSGGGGQGGGGQGGGGQEIVLTQSPATLSVSPGERATLSCRASQSVNNNLAWYQQKPGQAPRLLIYGASTRATGIPARFSGSGSGTEFTLTISRLEPEDFAVYYCQQSNNWPITFGCGTRLEIKSGGGGQQVQLVQSGAEVKKPGASVKVSCKASGYTFTTYGISWVRQAPGQCLEWMGWISPKNGVTTYAQKFQGRVTITADESTSTAYMELSRLTSDDTAMYYCARDPDYYGSGSYSDYWGQGTLVTVSSGGGGQGGGGQGGGGQEIVLTQSPATLSVSPGERATLSCRASQSVSSNLAWYQQKPGQAPRLLIYGASSRATGIPARFSGSGSGTEFTLTISSLQSEDFAVYYCQQYHSWPLLTFGCGTKVEIKSGGGGQEVQLVESGGGLVQPGGSLKLSCAASGFTFNKYAINWVRQAPGKGLEWVARIRSKYNNYATYYADAVKDRFTISRDDSKNTVYLQMNNLKTEDTAVYYCARAGNFGSSYISYWAYWGQGTLVTVSSGGGGQGGGGQGGGGQQTVVTQEPSLTVSPGGTVTITCGSSTGAVTSGNYPNWVQKKPGQAPRGLIGGTKFLAPGTPARFSGSLSGGKAALTLSGVQPEDEAEYYCVLWYSNRWVFGSGTKLTVL

SEQ ID NO: 2440 - protein, 1239 aa, Artificial Sequence
  Synthetic
EVQLVESGGGLVQPDRSLRLSCAASGFTFRDYAMHWVRQAPGKCLEWVSGIAWNSDSIGYADSVKGRFTISRDNAKNSLFLQMHSLRPEDTALYFCAKDTLYGSGSPRAFDIWGQGTMVTVSSGGGGSGGGGSGGGGSEIVLTQSPATLSVSPGERATLSCRASQSVNNNLAWYQQKPGQAPRLLIYGASTRATGIPARFSGSGSGTEFTLTISRLEPEDFAVYYCQQSNNWPITFGCGTRLEIKSGGGGSQVQLVQSGAEVKKPGASVKVSCKASGYTFTTYGISWVRQAPGQCLEWMGWISPKNGVTTYAQKFQGRVTITADESTSTAYMELSRLTSDDTAMYYCARDPDYYGSGSYSDYWGQGTLVTVSSGGGGSGGGGSGGGGSEIVLTQSPATLSVSPGERATLSCRASQSVSSNLAWYQQKPGQAPRLLIYGASSRATGIPARFSGSGSGTEFTLTISSLQSEDFAVYYCQQYHSWPLLTFGCGTKVEIKSGGGGSEVQLVESGGGLVQPGGSLKLSCAASGFTFNKYAMNWVRQAPGKGLEWVARIRSKYNNYATYYADSVKDRFTISRDDSKNTAYLQMNNLKTEDTAVYYCVRHGNFGNSYISYWAYWGQGTLVTVSSGGGGSGGGGSGGGGSQTVVTQEPSLTVSPGGTVTLTCGSSTGAVTSGNYPNWVQQKPGQAPRGLIGGTKFLAPGTPARFSGSLLGGKAALTLSGVQPEDEAEYYCVLWYSNRWVFGGGTKLTVLGGGGDKTHTCPPCPAPELLGGPSVFLFPPKPKDTLMISRTPEVTCVVVDVSHEDPEVKFNWYVDGVEVHNAKTKPCEEQYGSTYRCVSVLTVLHQDWLNGKEYKCKVSNKALPAPIEKTISKAKGQPREPQVYTLPPSREEMTKNQVSLTCLVKGFYPSDIAVEWESNGQPENNYKTTPPVLDSDGSFFLYSKLTVDKSRWQQGNVFSCSVMHEALHNHYTQKSLSLSPGKGGGGSGGGGSGGGGSGGGGSGGGGSGGGGSDKTHTCPPCPAPELLGGPSVFLFPPKPKDTLMISRTPEVTCVVVDVSHEDPEVKFNWYVDGVEVHNAKTKPCEEQYGSTYRCVSVLTVLHQDWLNGKEYKCKVSNKALPAPIEKTISKAKGQPREPQVYTLPPSREEMTKNQVSLTCLVKGFYPSDIAVEWESNGQPENNYKTTPPVLDSDGSFFLYSKLTVDKSRWQQGNVFSCSVMHEALHNHYTQKSLSLSPGK

SEQ ID NO: 2441 - protein, 1229 aa, Artificial Sequence
  Synthetic
EVQLVESGGGLVQPDRSLRLSCAASGFTFRDYAMHWVRQAPGKCLEWVSGIAWNSDSIGYADSVKGRFTISRDNAKNSLFLQMHSLRPEDTALYFCAKDTLYGSGSPRAFDIWGQGTMVTVSSGGGGQGGGGQGGGGQEIVLTQSPATLSVSPGERATLSCRASQSVNNNLAWYQQKPGQAPRLLIYGASTRATGIPARFSGSGSGTEFTLTISRLEPEDFAVYYCQQSNNWPITFGCGTRLEIKSGGGGQQVQLVQSGAEVKKPGASVKVSCKASGYTFTTYGISWVRQAPGQCLEWMGWISPKNGVTTYAQKFQGRVTITADESTSTAYMELSRLTSDDTAMYYCARDPDYYGSGSYSDYWGQGTLVTVSSGGGGQGGGGQGGGGQEIVLTQSPATLSVSPGERATLSCRASQSVSSNLAWYQQKPGQAPRLLIYGASSRATGIPARFSGSGSGTEFTLTISSLQSEDFAVYYCQQYHSWPLLTFGCGTKVEIKSGGGGQEVQLVESGGGLVQPGGSLKLSCAASGFTFNKYAMNWVRQAPGKGLEWVARIRSKYNNYATYYADSVKDRFTISRDDSKNTAYLQMNNLKTEDTAVYYCVRHGNFGNSYISYWAYWGQGTLVTVSSGGGGQGGGGQGGGGQQTVVTQEPSLTVSPGGTVTLTCGSSTGAVTSGNYPNWVQQKPGQAPRGLIGGTKFLAPGTPARFSGSLLGGKAALTLSGVQPEDEAEYYCVLWYSNRWVFGGGTKLTVLGGGGCPPCPAPELLGGPSVFLFPPKPKDTLMISRTPEVTCVVVDVSHEEPEVKFNWYVDGVEVHNAKTKPCEEQYGSTYRCVSVLTVLHQDWLNGKEYKCKVSNKALPAPIEKTISKAKGQPREPQVYTLPPSREEMTKNQVSLTCLVKGFYPSDIAVEWESNGQPENNYKTTPPVLDSDGSFFLYSKLTVDKSRWQQGNVFSCSVMHEALHNHYTQKSLSLSPGKGGGGQGGGGQGGGGQGGGGQGGGGQGGGGQCPPCPAPELLGGPSVFLFPPKPKDTLMISRTPEVTCVVVDVSHEEPEVKFNWYVDGVEVHNAKTKPCEEQYGSTYRCVSVLTVLHQDWLNGKEYKCKVSNKALPAPIEKTISKAKGQPREPQVYTLPPSREEMTKNQVSLTCLVKGFYPSDIAVEWESNGQPENNYKTTPPVLDSDGSFFLYSKLTVDKSRWQQGNVFSCSVMHEALHNHYTQKSLSLSPGK

SEQ ID NO: 2442 - protein, 1239 aa, Artificial Sequence
  Synthetic
EVQLVESGGGLVQPDRSLRLSCAASGFTFRDYAMHWVRQAPGKCLEWVSGIAWNSDSIGYADSVKGRFTISRDNAKNSLFLQMHSLRPEDTALYFCAKDTLYGSGSPRAFDIWGQGTMVTVSSGGGGSGGGGSGGGGSEIVLTQSPATLSVSPGERATLSCRASQSVNNNLAWYQQKPGQAPRLLIYGASTRATGIPARFSGSGSGTEFTLTISRLEPEDFAVYYCQQSNNWPITFGCGTRLEIKSGGGGSQVQLVQSGAEVKKPGASVKVSCKASGYTFTTYGISWVRQAPGQCLEWMGWISPKNGVTTYAQKFQGRVTITADESTSTAYMELSRLTSDDTAMYYCARDPDYYGSGSYSDYWGQGTLVTVSSGGGGSGGGGSGGGGSEIVLTQSPATLSVSPGERATLSCRASQSVSSNLAWYQQKPGQAPRLLIYGASSRATGIPARFSGSGSGTEFTLTISSLQSEDFAVYYCQQYHSWPLLTFGCGTKVEIKSGGGGSEVQLVESGGGLVQPGGSLKLSCAASGFTFNKYAINWVRQAPGKGLEWVARIRSKYNNYATYYADAVKDRFTISRDDSKNTVYLQMNNLKTEDTAVYYCARAGNFGSSYISYWAYWGQGTLVTVSSGGGGSGGGGSGGGGSQTVVTQEPSLTVSPGGTVTITCGSSTGAVTSGNYPNWVQKKPGQAPRGLIGGTKFLAPGTPARFSGSLSGGKAALTLSGVQPEDEAEYYCVLWYSNRWVFGSGTKLTVLGGGGDKTHTCPPCPAPELLGGPSVFLFPPKPKDTLMISRTPEVTCVVVDVSHEDPEVKFNWYVDGVEVHNAKTKPCEEQYGSTYRCVSVLTVLHQDWLNGKEYKCKVSNKALPAPIEKTISKAKGQPREPQVYTLPPSREEMTKNQVSLTCLVKGFYPSDIAVEWESNGQPENNYKTTPPVLDSDGSFFLYSKLTVDKSRWQQGNVFSCSVMHEALHNHYTQKSLSLSPGKGGGGSGGGGSGGGGSGGGGSGGGGSGGGGSDKTHTCPPCPAPELLGGPSVFLFPPKPKDTLMISRTPEVTCVVVDVSHEDPEVKFNWYVDGVEVHNAKTKPCEEQYGSTYRCVSVLTVLHQDWLNGKEYKCKVSNKALPAPIEKTISKAKGQPREPQVYTLPPSREEMTKNQVSLTCLVKGFYPSDIAVEWESNGQPENNYKTTPPVLDSDGSFFLYSKLTVDKSRWQQGNVFSCSVMHEALHNHYTQKSLSLSPGK

SEQ ID NO: 2443 - protein, 1229 aa, Artificial Sequence
  Synthetic
EVQLVESGGGLVQPDRSLRLSCAASGFTFRDYAMHWVRQAPGKCLEWVSGIAWNSDSIGYADSVKGRFTISRDNAKNSLFLQMHSLRPEDTALYFCAKDTLYGSGSPRAFDIWGQGTMVTVSSGGGGQGGGGQGGGGQEIVLTQSPATLSVSPGERATLSCRASQSVNNNLAWYQQKPGQAPRLLIYGASTRATGIPARFSGSGSGTEFTLTISRLEPEDFAVYYCQQSNNWPITFGCGTRLEIKSGGGGQQVQLVQSGAEVKKPGASVKVSCKASGYTFTTYGISWVRQAPGQCLEWMGWISPKNGVTTYAQKFQGRVTITADESTSTAYMELSRLTSDDTAMYYCARDPDYYGSGSYSDYWGQGTLVTVSSGGGGQGGGGQGGGGQEIVLTQSPATLSVSPGERATLSCRASQSVSSNLAWYQQKPGQAPRLLIYGASSRATGIPARFSGSGSGTEFTLTISSLQSEDFAVYYCQQYHSWPLLTFGCGTKVEIKSGGGGQEVQLVESGGGLVQPGGSLKLSCAASGFTFNKYAINWVRQAPGKGLEWVARIRSKYNNYATYYADAVKDRFTISRDDSKNTVYLQMNNLKTEDTAVYYCARAGNFGSSYISYWAYWGQGTLVTVSSGGGGQGGGGQGGGGQQTVVTQEPSLTVSPGGTVTITCGSSTGAVTSGNYPNWVQKKPGQAPRGLIGGTKFLAPGTPARFSGSLSGGKAALTLSGVQPEDEAEYYCVLWYSNRWVFGSGTKLTVLGGGGCPPCPAPELLGGPSVFLFPPKPKDTLMISRTPEVTCVVVDVSHEEPEVKFNWYVDGVEVHNAKTKPCEEQYGSTYRCVSVLTVLHQDWLNGKEYKCKVSNKALPAPIEKTISKAKGQPREPQVYTLPPSREEMTKNQVSLTCLVKGFYPSDIAVEWESNGQPENNYKTTPPVLDSDGSFFLYSKLTVDKSRWQQGNVFSCSVMHEALHNHYTQKSLSLSPGKGGGGQGGGGQGGGGQGGGGQGGGGQGGGGQCPPCPAPELLGGPSVFLFPPKPKDTLMISRTPEVTCVVVDVSHEEPEVKFNWYVDGVEVHNAKTKPCEEQYGSTYRCVSVLTVLHQDWLNGKEYKCKVSNKALPAPIEKTISKAKGQPREPQVYTLPPSREEMTKNQVSLTCLVKGFYPSDIAVEWESNGQPENNYKTTPPVLDSDGSFFLYSKLTVDKSRWQQGNVFSCSVMHEALHNHYTQKSLSLSPGK

SEQ ID NO: 2444 - protein, 496 aa, Artificial Sequence
  Synthetic
EVQLVESGGGLVQPDRSLRLSCAASGFTFRDYAMHWVRQAPGKCLEWVSGIAWNSDSIGYADSVKGRFTISRDNAKNSLFLQMHSLRPEDTALYFCAKDTLYGSGSPRAFDIWGQGTMVTVSSGGGGSGGGGSGGGGSEIVLTQSPATLSVSPGERATLSCRASQSVNNNLAWYQQKPGQAPRLLIYGASTRATGIPARFSGSGSGTEFTLTISRLEPEDFAVYYCQQSNNWPITFGCGTRLEIKSGGGGSQVQLVQSGGEVKKPGASVKVSCKASGYTFTSYGISWVRQAPGQCLEWMGWISAYTGETLYAQKLQGRVTMTRDTSTSTAYMELRSLRSDDTAVYYCARDPDYYGSGSYSDYWGQGTLVTVSSGGGGSGGGGSGGGGSEIVLTQSPATLSVSPGERATLSCRASQSVSSNLAWYQQKPGQAPRLLIYGASSRATGIPARFSGSGSGTEFTLTISSLQSEDFAVYYCQQYHSWPLLTFGCGTKVEIK

SEQ ID NO: 2445 - protein, 496 aa, Artificial Sequence
  Synthetic
EVQLVESGGGLVQPDRSLRLSCAASGFTFRDYAMHWVRQAPGKCLEWVSGIAWNSDSIGYADSVKGRFTISRDNAKNSLFLQMHSLRPEDTALYFCAKDTLYGSGSPRAFDIWGQGTMVTVSSGGGGQGGGGQGGGGQEIVLTQSPATLSVSPGERATLSCRASQSVNNNLAWYQQKPGQAPRLLIYGASTRATGIPARFSGSGSGTEFTLTISRLEPEDFAVYYCQQSNNWPITFGCGTRLEIKSGGGGQQVQLVQSGGEVKKPGASVKVSCKASGYTFTSYGISWVRQAPGQCLEWMGWISAYTGETLYAQKLQGRVTMTRDTSTSTAYMELRSLRSDDTAVYYCARDPDYYGSGSYSDYWGQGTLVTVSSGGGGQGGGGQGGGGQEIVLTQSPATLSVSPGERATLSCRASQSVSSNLAWYQQKPGQAPRLLIYGASSRATGIPARFSGSGSGTEFTLTISSLQSEDFAVYYCQQYHSWPLLTFGCGTKVEIK

SEQ ID NO: 2446 - protein, 751 aa, Artificial Sequence
  Synthetic
EVQLVESGGGLVQPDRSLRLSCAASGFTFRDYAMHWVRQAPGKCLEWVSGIAWNSDSIGYADSVKGRFTISRDNAKNSLFLQMHSLRPEDTALYFCAKDTLYGSGSPRAFDIWGQGTMVTVSSGGGGSGGGGSGGGGSEIVLTQSPATLSVSPGERATLSCRASQSVNNNLAWYQQKPGQAPRLLIYGASTRATGIPARFSGSGSGTEFTLTISRLEPEDFAVYYCQQSNNWPITFGCGTRLEIKSGGGGSQVQLVQSGGEVKKPGASVKVSCKASGYTFTSYGISWVRQAPGQCLEWMGWISAYTGETLYAQKLQGRVTMTRDTSTSTAYMELRSLRSDDTAVYYCARDPDYYGSGSYSDYWGQGTLVTVSSGGGGSGGGGSGGGGSEIVLTQSPATLSVSPGERATLSCRASQSVSSNLAWYQQKPGQAPRLLIYGASSRATGIPARFSGSGSGTEFTLTISSLQSEDFAVYYCQQYHSWPLLTFGCGTKVEIKSGGGGSEVQLVESGGGLVQPGGSLKLSCAASGFTFNKYAMNWVRQAPGKGLEWVARIRSKYNNYATYYADSVKDRFTISRDDSKNTAYLQMNNLKTEDTAVYYCVRHGNFGNSYISYWAYWGQGTLVTVSSGGGGSGGGGSGGGGSQTVVTQEPSLTVSPGGTVTLTCGSSTGAVTSGNYPNWVQQKPGQAPRGLIGGTKFLAPGTPARFSGSLLGGKAALTLSGVQPEDEAEYYCVLWYSNRWVFGGGTKLTVL

SEQ ID NO: 2447 - protein, 751 aa, Artificial Sequence
  Synthetic
EVQLVESGGGLVQPDRSLRLSCAASGFTFRDYAMHWVRQAPGKCLEWVSGIAWNSDSIGYADSVKGRFTISRDNAKNSLFLQMHSLRPEDTALYFCAKDTLYGSGSPRAFDIWGQGTMVTVSSGGGGQGGGGQGGGGQEIVLTQSPATLSVSPGERATLSCRASQSVNNNLAWYQQKPGQAPRLLIYGASTRATGIPARFSGSGSGTEFTLTISRLEPEDFAVYYCQQSNNWPITFGCGTRLEIKSGGGGQQVQLVQSGGEVKKPGASVKVSCKASGYTFTSYGISWVRQAPGQCLEWMGWISAYTGETLYAQKLQGRVTMTRDTSTSTAYMELRSLRSDDTAVYYCARDPDYYGSGSYSDYWGQGTLVTVSSGGGGQGGGGQGGGGQEIVLTQSPATLSVSPGERATLSCRASQSVSSNLAWYQQKPGQAPRLLIYGASSRATGIPARFSGSGSGTEFTLTISSLQSEDFAVYYCQQYHSWPLLTFGCGTKVEIKSGGGGQEVQLVESGGGLVQPGGSLKLSCAASGFTFNKYAMNWVRQAPGKGLEWVARIRSKYNNYATYYADSVKDRFTISRDDSKNTAYLQMNNLKTEDTAVYYCVRHGNFGNSYISYWAYWGQGTLVTVSSGGGGQGGGGQGGGGQQTVVTQEPSLTVSPGGTVTLTCGSSTGAVTSGNYPNWVQQKPGQAPRGLIGGTKFLAPGTPARFSGSLLGGKAALTLSGVQPEDEAEYYCVLWYSNRWVFGGGTKLTVL

SEQ ID NO: 2448 - protein, 751 aa, Artificial Sequence
  Synthetic
EVQLVESGGGLVQPDRSLRLSCAASGFTFRDYAMHWVRQAPGKCLEWVSGIAWNSDSIGYADSVKGRFTISRDNAKNSLFLQMHSLRPEDTALYFCAKDTLYGSGSPRAFDIWGQGTMVTVSSGGGGSGGGGSGGGGSEIVLTQSPATLSVSPGERATLSCRASQSVNNNLAWYQQKPGQAPRLLIYGASTRATGIPARFSGSGSGTEFTLTISRLEPEDFAVYYCQQSNNWPITFGCGTRLEIKSGGGGSQVQLVQSGGEVKKPGASVKVSCKASGYTFTSYGISWVRQAPGQCLEWMGWISAYTGETLYAQKLQGRVTMTRDTSTSTAYMELRSLRSDDTAVYYCARDPDYYGSGSYSDYWGQGTLVTVSSGGGGSGGGGSGGGGSEIVLTQSPATLSVSPGERATLSCRASQSVSSNLAWYQQKPGQAPRLLIYGASSRATGIPARFSGSGSGTEFTLTISSLQSEDFAVYYCQQYHSWPLLTFGCGTKVEIKSGGGGSEVQLVESGGGLVQPGGSLKLSCAASGFTFNKYAINWVRQAPGKGLEWVARIRSKYNNYATYYADAVKDRFTISRDDSKNTVYLQMNNLKTEDTAVYYCARAGNFGSSYISYWAYWGQGTLVTVSSGGGGSGGGGSGGGGSQTVVTQEPSLTVSPGGTVTITCGSSTGAVTSGNYPNWVQKKPGQAPRGLIGGTKFLAPGTPARFSGSLSGGKAALTLSGVQPEDEAEYYCVLWYSNRWVFGSGTKLTVL

SEQ ID NO: 2449 - protein, 751 aa, Artificial Sequence
  Synthetic
EVQLVESGGGLVQPDRSLRLSCAASGFTFRDYAMHWVRQAPGKCLEWVSGIAWNSDSIGYADSVKGRFTISRDNAKNSLFLQMHSLRPEDTALYFCAKDTLYGSGSPRAFDIWGQGTMVTVSSGGGGQGGGGQGGGGQEIVLTQSPATLSVSPGERATLSCRASQSVNNNLAWYQQKPGQAPRLLIYGASTRATGIPARFSGSGSGTEFTLTISRLEPEDFAVYYCQQSNNWPITFGCGTRLEIKSGGGGQQVQLVQSGGEVKKPGASVKVSCKASGYTFTSYGISWVRQAPGQCLEWMGWISAYTGETLYAQKLQGRVTMTRDTSTSTAYMELRSLRSDDTAVYYCARDPDYYGSGSYSDYWGQGTLVTVSSGGGGQGGGGQGGGGQEIVLTQSPATLSVSPGERATLSCRASQSVSSNLAWYQQKPGQAPRLLIYGASSRATGIPARFSGSGSGTEFTLTISSLQSEDFAVYYCQQYHSWPLLTFGCGTKVEIKSGGGGQEVQLVESGGGLVQPGGSLKLSCAASGFTFNKYAINWVRQAPGKGLEWVARIRSKYNNYATYYADAVKDRFTISRDDSKNTVYLQMNNLKTEDTAVYYCARAGNFGSSYISYWAYWGQGTLVTVSSGGGGQGGGGQGGGGQQTVVTQEPSLTVSPGGTVTITCGSSTGAVTSGNYPNWVQKKPGQAPRGLIGGTKFLAPGTPARFSGSLSGGKAALTLSGVQPEDEAEYYCVLWYSNRWVFGSGTKLTVL

SEQ ID NO: 2450 - protein, 1239 aa, Artificial Sequence
  Synthetic
EVQLVESGGGLVQPDRSLRLSCAASGFTFRDYAMHWVRQAPGKCLEWVSGIAWNSDSIGYADSVKGRFTISRDNAKNSLFLQMHSLRPEDTALYFCAKDTLYGSGSPRAFDIWGQGTMVTVSSGGGGSGGGGSGGGGSEIVLTQSPATLSVSPGERATLSCRASQSVNNNLAWYQQKPGQAPRLLIYGASTRATGIPARFSGSGSGTEFTLTISRLEPEDFAVYYCQQSNNWPITFGCGTRLEIKSGGGGSQVQLVQSGGEVKKPGASVKVSCKASGYTFTSYGISWVRQAPGQCLEWMGWISAYTGETLYAQKLQGRVTMTRDTSTSTAYMELRSLRSDDTAVYYCARDPDYYGSGSYSDYWGQGTLVTVSSGGGGSGGGGSGGGGSEIVLTQSPATLSVSPGERATLSCRASQSVSSNLAWYQQKPGQAPRLLIYGASSRATGIPARFSGSGSGTEFTLTISSLQSEDFAVYYCQQYHSWPLLTFGCGTKVEIKSGGGGSEVQLVESGGGLVQPGGSLKLSCAASGFTFNKYAMNWVRQAPGKGLEWVARIRSKYNNYATYYADSVKDRFTISRDDSKNTAYLQMNNLKTEDTAVYYCVRHGNFGNSYISYWAYWGQGTLVTVSSGGGGSGGGGSGGGGSQTVVTQEPSLTVSPGGTVTLTCGSSTGAVTSGNYPNWVQQKPGQAPRGLIGGTKFLAPGTPARFSGSLLGGKAALTLSGVQPEDEAEYYCVLWYSNRWVFGGGTKLTVLGGGGDKTHTCPPCPAPELLGGPSVFLFPPKPKDTLMISRTPEVTCVVVDVSHEDPEVKFNWYVDGVEVHNAKTKPCEEQYGSTYRCVSVLTVLHQDWLNGKEYKCKVSNKALPAPIEKTISKAKGQPREPQVYTLPPSREEMTKNQVSLTCLVKGFYPSDIAVEWESNGQPENNYKTTPPVLDSDGSFFLYSKLTVDKSRWQQGNVFSCSVMHEALHNHYTQKSLSLSPGKGGGGSGGGGSGGGGSGGGGSGGGGSGGGGSDKTHTCPPCPAPELLGGPSVFLFPPKPKDTLMISRTPEVTCVVVDVSHEDPEVKFNWYVDGVEVHNAKTKPCEEQYGSTYRCVSVLTVLHQDWLNGKEYKCKVSNKALPAPIEKTISKAKGQPREPQVYTLPPSREEMTKNQVSLTCLVKGFYPSDIAVEWESNGQPENNYKTTPPVLDSDGSFFLYSKLTVDKSRWQQGNVFSCSVMHEALHNHYTQKSLSLSPGK

SEQ ID NO: 2451 - protein, 1229 aa, Artificial Sequence
  Synthetic
EVQLVESGGGLVQPDRSLRLSCAASGFTFRDYAMHWVRQAPGKCLEWVSGIAWNSDSIGYADSVKGRFTISRDNAKNSLFLQMHSLRPEDTALYFCAKDTLYGSGSPRAFDIWGQGTMVTVSSGGGGQGGGGQGGGGQEIVLTQSPATLSVSPGERATLSCRASQSVNNNLAWYQQKPGQAPRLLIYGASTRATGIPARFSGSGSGTEFTLTISRLEPEDFAVYYCQQSNNWPITFGCGTRLEIKSGGGGQQVQLVQSGGEVKKPGASVKVSCKASGYTFTSYGISWVRQAPGQCLEWMGWISAYTGETLYAQKLQGRVTMTRDTSTSTAYMELRSLRSDDTAVYYCARDPDYYGSGSYSDYWGQGTLVTVSSGGGGQGGGGQGGGGQEIVLTQSPATLSVSPGERATLSCRASQSVSSNLAWYQQKPGQAPRLLIYGASSRATGIPARFSGSGSGTEFTLTISSLQSEDFAVYYCQQYHSWPLLTFGCGTKVEIKSGGGGQEVQLVESGGGLVQPGGSLKLSCAASGFTFNKYAMNWVRQAPGKGLEWVARIRSKYNNYATYYADSVKDRFTISRDDSKNTAYLQMNNLKTEDTAVYYCVRHGNFGNSYISYWAYWGQGTLVTVSSGGGGQGGGGQGGGGQQTVVTQEPSLTVSPGGTVTLTCGSSTGAVTSGNYPNWVQQKPGQAPRGLIGGTKFLAPGTPARFSGSLLGGKAALTLSGVQPEDEAEYYCVLWYSNRWVFGGGTKLTVLGGGGCPPCPAPELLGGPSVFLFPPKPKDTLMISRTPEVTCVVVDVSHEEPEVKFNWYVDGVEVHNAKTKPCEEQYGSTYRCVSVLTVLHQDWLNGKEYKCKVSNKALPAPIEKTISKAKGQPREPQVYTLPPSREEMTKNQVSLTCLVKGFYPSDIAVEWESNGQPENNYKTTPPVLDSDGSFFLYSKLTVDKSRWQQGNVFSCSVMHEALHNHYTQKSLSLSPGKGGGGQGGGGQGGGGQGGGGQGGGGQGGGGQCPPCPAPELLGGPSVFLFPPKPKDTLMISRTPEVTCVVVDVSHEEPEVKFNWYVDGVEVHNAKTKPCEEQYGSTYRCVSVLTVLHQDWLNGKEYKCKVSNKALPAPIEKTISKAKGQPREPQVYTLPPSREEMTKNQVSLTCLVKGFYPSDIAVEWESNGQPENNYKTTPPVLDSDGSFFLYSKLTVDKSRWQQGNVFSCSVMHEALHNHYTQKSLSLSPGK

SEQ ID NO: 2452 - protein, 1239 aa, Artificial Sequence
  Synthetic
EVQLVESGGGLVQPDRSLRLSCAASGFTFRDYAMHWVRQAPGKCLEWVSGIAWNSDSIGYADSVKGRFTISRDNAKNSLFLQMHSLRPEDTALYFCAKDTLYGSGSPRAFDIWGQGTMVTVSSGGGGSGGGGSGGGGSEIVLTQSPATLSVSPGERATLSCRASQSVNNNLAWYQQKPGQAPRLLIYGASTRATGIPARFSGSGSGTEFTLTISRLEPEDFAVYYCQQSNNWPITFGCGTRLEIKSGGGGSQVQLVQSGGEVKKPGASVKVSCKASGYTFTSYGISWVRQAPGQCLEWMGWISAYTGETLYAQKLQGRVTMTRDTSTSTAYMELRSLRSDDTAVYYCARDPDYYGSGSYSDYWGQGTLVTVSSGGGGSGGGGSGGGGSEIVLTQSPATLSVSPGERATLSCRASQSVSSNLAWYQQKPGQAPRLLIYGASSRATGIPARFSGSGSGTEFTLTISSLQSEDFAVYYCQQYHSWPLLTFGCGTKVEIKSGGGGSEVQLVESGGGLVQPGGSLKLSCAASGFTFNKYAINWVRQAPGKGLEWVARIRSKYNNYATYYADAVKDRFTISRDDSKNTVYLQMNNLKTEDTAVYYCARAGNFGSSYISYWAYWGQGTLVTVSSGGGGSGGGGSGGGGSQTVVTQEPSLTVSPGGTVTITCGSSTGAVTSGNYPNWVQKKPGQAPRGLIGGTKFLAPGTPARFSGSLSGGKAALTLSGVQPEDEAEYYCVLWYSNRWVFGSGTKLTVLGGGGDKTHTCPPCPAPELLGGPSVFLFPPKPKDTLMISRTPEVTCVVVDVSHEDPEVKFNWYVDGVEVHNAKTKPCEEQYGSTYRCVSVLTVLHQDWLNGKEYKCKVSNKALPAPIEKTISKAKGQPREPQVYTLPPSREEMTKNQVSLTCLVKGFYPSDIAVEWESNGQPENNYKTTPPVLDSDGSFFLYSKLTVDKSRWQQGNVFSCSVMHEALHNHYTQKSLSLSPGKGGGGSGGGGSGGGGSGGGGSGGGGSGGGGSDKTHTCPPCPAPELLGGPSVFLFPPKPKDTLMISRTPEVTCVVVDVSHEDPEVKFNWYVDGVEVHNAKTKPCEEQYGSTYRCVSVLTVLHQDWLNGKEYKCKVSNKALPAPIEKTISKAKGQPREPQVYTLPPSREEMTKNQVSLTCLVKGFYPSDIAVEWESNGQPENNYKTTPPVLDSDGSFFLYSKLTVDKSRWQQGNVFSCSVMHEALHNHYTQKSLSLSPGK

SEQ ID NO: 2453 - protein, 1229 aa, Artificial Sequence
  Synthetic
EVQLVESGGGLVQPDRSLRLSCAASGFTFRDYAMHWVRQAPGKCLEWVSGIAWNSDSIGYADSVKGRFTISRDNAKNSLFLQMHSLRPEDTALYFCAKDTLYGSGSPRAFDIWGQGTMVTVSSGGGGQGGGGQGGGGQEIVLTQSPATLSVSPGERATLSCRASQSVNNNLAWYQQKPGQAPRLLIYGASTRATGIPARFSGSGSGTEFTLTISRLEPEDFAVYYCQQSNNWPITFGCGTRLEIKSGGGGQQVQLVQSGGEVKKPGASVKVSCKASGYTFTSYGISWVRQAPGQCLEWMGWISAYTGETLYAQKLQGRVTMTRDTSTSTAYMELRSLRSDDTAVYYCARDPDYYGSGSYSDYWGQGTLVTVSSGGGGQGGGGQGGGGQEIVLTQSPATLSVSPGERATLSCRASQSVSSNLAWYQQKPGQAPRLLIYGASSRATGIPARFSGSGSGTEFTLTISSLQSEDFAVYYCQQYHSWPLLTFGCGTKVEIKSGGGGQEVQLVESGGGLVQPGGSLKLSCAASGFTFNKYAINWVRQAPGKGLEWVARIRSKYNNYATYYADAVKDRFTISRDDSKNTVYLQMNNLKTEDTAVYYCARAGNFGSSYISYWAYWGQGTLVTVSSGGGGQGGGGQGGGGQQTVVTQEPSLTVSPGGTVTITCGSSTGAVTSGNYPNWVQKKPGQAPRGLIGGTKFLAPGTPARFSGSLSGGKAALTLSGVQPEDEAEYYCVLWYSNRWVFGSGTKLTVLGGGGCPPCPAPELLGGPSVFLFPPKPKDTLMISRTPEVTCVVVDVSHEEPEVKFNWYVDGVEVHNAKTKPCEEQYGSTYRCVSVLTVLHQDWLNGKEYKCKVSNKALPAPIEKTISKAKGQPREPQVYTLPPSREEMTKNQVSLTCLVKGFYPSDIAVEWESNGQPENNYKTTPPVLDSDGSFFLYSKLTVDKSRWQQGNVFSCSVMHEALHNHYTQKSLSLSPGKGGGGQGGGGQGGGGQGGGGQGGGGQGGGGQCPPCPAPELLGGPSVFLFPPKPKDTLMISRTPEVTCVVVDVSHEEPEVKFNWYVDGVEVHNAKTKPCEEQYGSTYRCVSVLTVLHQDWLNGKEYKCKVSNKALPAPIEKTISKAKGQPREPQVYTLPPSREEMTKNQVSLTCLVKGFYPSDIAVEWESNGQPENNYKTTPPVLDSDGSFFLYSKLTVDKSRWQQGNVFSCSVMHEALHNHYTQKSLSLSPGK

SEQ ID NO: 2454 - protein, 496 aa, Artificial Sequence
  Synthetic
EVQLVESGGGLVQPDRSLRLSCAASGFTFRDYAMHWVRQAPGKCLEWVSGIAWNSDSIGYADSVKGRFTISRDNAKNSLFLQMHSLRPEDTALYFCAKDTLYGSGSPRAFDIWGQGTMVTVSSGGGGSGGGGSGGGGSEIVLTQSPATLSVSPGERATLSCRASQSVNNNLAWYQQKPGQAPRLLIYGASTRATGIPARFSGSGSGTEFTLTISRLEPEDFAVYYCQQSNNWPITFGCGTRLEIKSGGGGSQVQLVQSGGEVKKPGASVKVSCKASGYTFTSYGISWVRQAPGQCLEWMGWISPQTGNAIYAQKLQGRVTMTRDTSTSTAYMELRSLRSDDTAVYYCARDPDYYGSGSYSDYWGQGTLVTVSSGGGGSGGGGSGGGGSEIVLTQSPATLSVSPGERATLSCRASQSVSSNLAWYQQKPGQAPRLLIYGASSRATGIPARFSGSGSGTEFTLTISSLQSEDFAVYYCQQYHSWPLLTFGCGTKVEIK

SEQ ID NO: 2455 - protein, 496 aa, Artificial Sequence
  Synthetic
EVQLVESGGGLVQPDRSLRLSCAASGFTFRDYAMHWVRQAPGKCLEWVSGIAWNSDSIGYADSVKGRFTISRDNAKNSLFLQMHSLRPEDTALYFCAKDTLYGSGSPRAFDIWGQGTMVTVSSGGGGQGGGGQGGGGQEIVLTQSPATLSVSPGERATLSCRASQSVNNNLAWYQQKPGQAPRLLIYGASTRATGIPARFSGSGSGTEFTLTISRLEPEDFAVYYCQQSNNWPITFGCGTRLEIKSGGGGQQVQLVQSGGEVKKPGASVKVSCKASGYTFTSYGISWVRQAPGQCLEWMGWISPQTGNAIYAQKLQGRVTMTRDTSTSTAYMELRSLRSDDTAVYYCARDPDYYGSGSYSDYWGQGTLVTVSSGGGGQGGGGQGGGGQEIVLTQSPATLSVSPGERATLSCRASQSVSSNLAWYQQKPGQAPRLLIYGASSRATGIPARFSGSGSGTEFTLTISSLQSEDFAVYYCQQYHSWPLLTFGCGTKVEIK

SEQ ID NO: 2456 - protein, 751 aa, Artificial Sequence
  Synthetic
EVQLVESGGGLVQPDRSLRLSCAASGFTFRDYAMHWVRQAPGKCLEWVSGIAWNSDSIGYADSVKGRFTISRDNAKNSLFLQMHSLRPEDTALYFCAKDTLYGSGSPRAFDIWGQGTMVTVSSGGGGSGGGGSGGGGSEIVLTQSPATLSVSPGERATLSCRASQSVNNNLAWYQQKPGQAPRLLIYGASTRATGIPARFSGSGSGTEFTLTISRLEPEDFAVYYCQQSNNWPITFGCGTRLEIKSGGGGSQVQLVQSGGEVKKPGASVKVSCKASGYTFTSYGISWVRQAPGQCLEWMGWISPQTGNAIYAQKLQGRVTMTRDTSTSTAYMELRSLRSDDTAVYYCARDPDYYGSGSYSDYWGQGTLVTVSSGGGGSGGGGSGGGGSEIVLTQSPATLSVSPGERATLSCRASQSVSSNLAWYQQKPGQAPRLLIYGASSRATGIPARFSGSGSGTEFTLTISSLQSEDFAVYYCQQYHSWPLLTFGCGTKVEIKSGGGGSEVQLVESGGGLVQPGGSLKLSCAASGFTFNKYAMNWVRQAPGKGLEWVARIRSKYNNYATYYADSVKDRFTISRDDSKNTAYLQMNNLKTEDTAVYYCVRHGNFGNSYISYWAYWGQGTLVTVSSGGGGSGGGGSGGGGSQTVVTQEPSLTVSPGGTVTLTCGSSTGAVTSGNYPNWVQQKPGQAPRGLIGGTKFLAPGTPARFSGSLLGGKAALTLSGVQPEDEAEYYCVLWYSNRWVFGGGTKLTVL

SEQ ID NO: 2457 - protein, 751 aa, Artificial Sequence
  Synthetic
EVQLVESGGGLVQPDRSLRLSCAASGFTFRDYAMHWVRQAPGKCLEWVSGIAWNSDSIGYADSVKGRFTISRDNAKNSLFLQMHSLRPEDTALYFCAKDTLYGSGSPRAFDIWGQGTMVTVSSGGGGQGGGGQGGGGQEIVLTQSPATLSVSPGERATLSCRASQSVNNNLAWYQQKPGQAPRLLIYGASTRATGIPARFSGSGSGTEFTLTISRLEPEDFAVYYCQQSNNWPITFGCGTRLEIKSGGGGQQVQLVQSGGEVKKPGASVKVSCKASGYTFTSYGISWVRQAPGQCLEWMGWISPQTGNAIYAQKLQGRVTMTRDTSTSTAYMELRSLRSDDTAVYYCARDPDYYGSGSYSDYWGQGTLVTVSSGGGGQGGGGQGGGGQEIVLTQSPATLSVSPGERATLSCRASQSVSSNLAWYQQKPGQAPRLLIYGASSRATGIPARFSGSGSGTEFTLTISSLQSEDFAVYYCQQYHSWPLLTFGCGTKVEIKSGGGGQEVQLVESGGGLVQPGGSLKLSCAASGFTFNKYAMNWVRQAPGKGLEWVARIRSKYNNYATYYADSVKDRFTISRDDSKNTAYLQMNNLKTEDTAVYYCVRHGNFGNSYISYWAYWGQGTLVTVSSGGGGQGGGGQGGGGQQTVVTQEPSLTVSPGGTVTLTCGSSTGAVTSGNYPNWVQQKPGQAPRGLIGGTKFLAPGTPARFSGSLLGGKAALTLSGVQPEDEAEYYCVLWYSNRWVFGGGTKLTVL

SEQ ID NO: 2458 - protein, 751 aa, Artificial Sequence
  Synthetic
EVQLVESGGGLVQPDRSLRLSCAASGFTFRDYAMHWVRQAPGKCLEWVSGIAWNSDSIGYADSVKGRFTISRDNAKNSLFLQMHSLRPEDTALYFCAKDTLYGSGSPRAFDIWGQGTMVTVSSGGGGSGGGGSGGGGSEIVLTQSPATLSVSPGERATLSCRASQSVNNNLAWYQQKPGQAPRLLIYGASTRATGIPARFSGSGSGTEFTLTISRLEPEDFAVYYCQQSNNWPITFGCGTRLEIKSGGGGSQVQLVQSGGEVKKPGASVKVSCKASGYTFTSYGISWVRQAPGQCLEWMGWISPQTGNAIYAQKLQGRVTMTRDTSTSTAYMELRSLRSDDTAVYYCARDPDYYGSGSYSDYWGQGTLVTVSSGGGGSGGGGSGGGGSEIVLTQSPATLSVSPGERATLSCRASQSVSSNLAWYQQKPGQAPRLLIYGASSRATGIPARFSGSGSGTEFTLTISSLQSEDFAVYYCQQYHSWPLLTFGCGTKVEIKSGGGGSEVQLVESGGGLVQPGGSLKLSCAASGFTFNKYAINWVRQAPGKGLEWVARIRSKYNNYATYYADAVKDRFTISRDDSKNTVYLQMNNLKTEDTAVYYCARAGNFGSSYISYWAYWGQGTLVTVSSGGGGSGGGGSGGGGSQTVVTQEPSLTVSPGGTVTITCGSSTGAVTSGNYPNWVQKKPGQAPRGLIGGTKFLAPGTPARFSGSLSGGKAALTLSGVQPEDEAEYYCVLWYSNRWVFGSGTKLTVL

SEQ ID NO: 2459 - protein, 751 aa, Artificial Sequence
  Synthetic
EVQLVESGGGLVQPDRSLRLSCAASGFTFRDYAMHWVRQAPGKCLEWVSGIAWNSDSIGYADSVKGRFTISRDNAKNSLFLQMHSLRPEDTALYFCAKDTLYGSGSPRAFDIWGQGTMVTVSSGGGGQGGGGQGGGGQEIVLTQSPATLSVSPGERATLSCRASQSVNNNLAWYQQKPGQAPRLLIYGASTRATGIPARFSGSGSGTEFTLTISRLEPEDFAVYYCQQSNNWPITFGCGTRLEIKSGGGGQQVQLVQSGGEVKKPGASVKVSCKASGYTFTSYGISWVRQAPGQCLEWMGWISPQTGNAIYAQKLQGRVTMTRDTSTSTAYMELRSLRSDDTAVYYCARDPDYYGSGSYSDYWGQGTLVTVSSGGGGQGGGGQGGGGQEIVLTQSPATLSVSPGERATLSCRASQSVSSNLAWYQQKPGQAPRLLIYGASSRATGIPARFSGSGSGTEFTLTISSLQSEDFAVYYCQQYHSWPLLTFGCGTKVEIKSGGGGQEVQLVESGGGLVQPGGSLKLSCAASGFTFNKYAINWVRQAPGKGLEWVARIRSKYNNYATYYADAVKDRFTISRDDSKNTVYLQMNNLKTEDTAVYYCARAGNFGSSYISYWAYWGQGTLVTVSSGGGGQGGGGQGGGGQQTVVTQEPSLTVSPGGTVTITCGSSTGAVTSGNYPNWVQKKPGQAPRGLIGGTKFLAPGTPARFSGSLSGGKAALTLSGVQPEDEAEYYCVLWYSNRWVFGSGTKLTVL

SEQ ID NO: 2460 - protein, 1239 aa, Artificial Sequence
  Synthetic
EVQLVESGGGLVQPDRSLRLSCAASGFTFRDYAMHWVRQAPGKCLEWVSGIAWNSDSIGYADSVKGRFTISRDNAKNSLFLQMHSLRPEDTALYFCAKDTLYGSGSPRAFDIWGQGTMVTVSSGGGGSGGGGSGGGGSEIVLTQSPATLSVSPGERATLSCRASQSVNNNLAWYQQKPGQAPRLLIYGASTRATGIPARFSGSGSGTEFTLTISRLEPEDFAVYYCQQSNNWPITFGCGTRLEIKSGGGGSQVQLVQSGGEVKKPGASVKVSCKASGYTFTSYGISWVRQAPGQCLEWMGWISPQTGNAIYAQKLQGRVTMTRDTSTSTAYMELRSLRSDDTAVYYCARDPDYYGSGSYSDYWGQGTLVTVSSGGGGSGGGGSGGGGSEIVLTQSPATLSVSPGERATLSCRASQSVSSNLAWYQQKPGQAPRLLIYGASSRATGIPARFSGSGSGTEFTLTISSLQSEDFAVYYCQQYHSWPLLTFGCGTKVEIKSGGGGSEVQLVESGGGLVQPGGSLKLSCAASGFTFNKYAMNWVRQAPGKGLEWVARIRSKYNNYATYYADSVKDRFTISRDDSKNTAYLQMNNLKTEDTAVYYCVRHGNFGNSYISYWAYWGQGTLVTVSSGGGGSGGGGSGGGGSQTVVTQEPSLTVSPGGTVTLTCGSSTGAVTSGNYPNWVQQKPGQAPRGLIGGTKFLAPGTPARFSGSLLGGKAALTLSGVQPEDEAEYYCVLWYSNRWVFGGGTKLTVLGGGGDKTHTCPPCPAPELLGGPSVFLFPPKPKDTLMISRTPEVTCVVVDVSHEDPEVKFNWYVDGVEVHNAKTKPCEEQYGSTYRCVSVLTVLHQDWLNGKEYKCKVSNKALPAPIEKTISKAKGQPREPQVYTLPPSREEMTKNQVSLTCLVKGFYPSDIAVEWESNGQPENNYKTTPPVLDSDGSFFLYSKLTVDKSRWQQGNVFSCSVMHEALHNHYTQKSLSLSPGKGGGGSGGGGSGGGGSGGGGSGGGGSGGGGSDKTHTCPPCPAPELLGGPSVFLFPPKPKDTLMISRTPEVTCVVVDVSHEDPEVKFNWYVDGVEVHNAKTKPCEEQYGSTYRCVSVLTVLHQDWLNGKEYKCKVSNKALPAPIEKTISKAKGQPREPQVYTLPPSREEMTKNQVSLTCLVKGFYPSDIAVEWESNGQPENNYKTTPPVLDSDGSFFLYSKLTVDKSRWQQGNVFSCSVMHEALHNHYTQKSLSLSPGK

SEQ ID NO: 2461 - protein, 1229 aa, Artificial Sequence
  Synthetic
EVQLVESGGGLVQPDRSLRLSCAASGFTFRDYAMHWVRQAPGKCLEWVSGIAWNSDSIGYADSVKGRFTISRDNAKNSLFLQMHSLRPEDTALYFCAKDTLYGSGSPRAFDIWGQGTMVTVSSGGGGQGGGGQGGGGQEIVLTQSPATLSVSPGERATLSCRASQSVNNNLAWYQQKPGQAPRLLIYGASTRATGIPARFSGSGSGTEFTLTISRLEPEDFAVYYCQQSNNWPITFGCGTRLEIKSGGGGQQVQLVQSGGEVKKPGASVKVSCKASGYTFTSYGISWVRQAPGQCLEWMGWISPQTGNAIYAQKLQGRVTMTRDTSTSTAYMELRSLRSDDTAVYYCARDPDYYGSGSYSDYWGQGTLVTVSSGGGGQGGGGQGGGGQEIVLTQSPATLSVSPGERATLSCRASQSVSSNLAWYQQKPGQAPRLLIYGASSRATGIPARFSGSGSGTEFTLTISSLQSEDFAVYYCQQYHSWPLLTFGCGTKVEIKSGGGGQEVQLVESGGGLVQPGGSLKLSCAASGFTFNKYAMNWVRQAPGKGLEWVARIRSKYNNYATYYADSVKDRFTISRDDSKNTAYLQMNNLKTEDTAVYYCVRHGNFGNSYISYWAYWGQGTLVTVSSGGGGQGGGGQGGGGQQTVVTQEPSLTVSPGGTVTLTCGSSTGAVTSGNYPNWVQQKPGQAPRGLIGGTKFLAPGTPARFSGSLLGGKAALTLSGVQPEDEAEYYCVLWYSNRWVFGGGTKLTVLGGGGCPPCPAPELLGGPSVFLFPPKPKDTLMISRTPEVTCVVVDVSHEEPEVKFNWYVDGVEVHNAKTKPCEEQYGSTYRCVSVLTVLHQDWLNGKEYKCKVSNKALPAPIEKTISKAKGQPREPQVYTLPPSREEMTKNQVSLTCLVKGFYPSDIAVEWESNGQPENNYKTTPPVLDSDGSFFLYSKLTVDKSRWQQGNVFSCSVMHEALHNHYTQKSLSLSPGKGGGGQGGGGQGGGGQGGGGQGGGGQGGGGQCPPCPAPELLGGPSVFLFPPKPKDTLMISRTPEVTCVVVDVSHEEPEVKFNWYVDGVEVHNAKTKPCEEQYGSTYRCVSVLTVLHQDWLNGKEYKCKVSNKALPAPIEKTISKAKGQPREPQVYTLPPSREEMTKNQVSLTCLVKGFYPSDIAVEWESNGQPENNYKTTPPVLDSDGSFFLYSKLTVDKSRWQQGNVFSCSVMHEALHNHYTQKSLSLSPGK

SEQ ID NO: 2462 - protein, 1239 aa, Artificial Sequence
  Synthetic
EVQLVESGGGLVQPDRSLRLSCAASGFTFRDYAMHWVRQAPGKCLEWVSGIAWNSDSIGYADSVKGRFTISRDNAKNSLFLQMHSLRPEDTALYFCAKDTLYGSGSPRAFDIWGQGTMVTVSSGGGGSGGGGSGGGGSEIVLTQSPATLSVSPGERATLSCRASQSVNNNLAWYQQKPGQAPRLLIYGASTRATGIPARFSGSGSGTEFTLTISRLEPEDFAVYYCQQSNNWPITFGCGTRLEIKSGGGGSQVQLVQSGGEVKKPGASVKVSCKASGYTFTSYGISWVRQAPGQCLEWMGWISPQTGNAIYAQKLQGRVTMTRDTSTSTAYMELRSLRSDDTAVYYCARDPDYYGSGSYSDYWGQGTLVTVSSGGGGSGGGGSGGGGSEIVLTQSPATLSVSPGERATLSCRASQSVSSNLAWYQQKPGQAPRLLIYGASSRATGIPARFSGSGSGTEFTLTISSLQSEDFAVYYCQQYHSWPLLTFGCGTKVEIKSGGGGSEVQLVESGGGLVQPGGSLKLSCAASGFTFNKYAINWVRQAPGKGLEWVARIRSKYNNYATYYADAVKDRFTISRDDSKNTVYLQMNNLKTEDTAVYYCARAGNFGSSYISYWAYWGQGTLVTVSSGGGGSGGGGSGGGGSQTVVTQEPSLTVSPGGTVTITCGSSTGAVTSGNYPNWVQKKPGQAPRGLIGGTKFLAPGTPARFSGSLSGGKAALTLSGVQPEDEAEYYCVLWYSNRWVFGSGTKLTVLGGGGDKTHTCPPCPAPELLGGPSVFLFPPKPKDTLMISRTPEVTCVVVDVSHEDPEVKFNWYVDGVEVHNAKTKPCEEQYGSTYRCVSVLTVLHQDWLNGKEYKCKVSNKALPAPIEKTISKAKGQPREPQVYTLPPSREEMTKNQVSLTCLVKGFYPSDIAVEWESNGQPENNYKTTPPVLDSDGSFFLYSKLTVDKSRWQQGNVFSCSVMHEALHNHYTQKSLSLSPGKGGGGSGGGGSGGGGSGGGGSGGGGSGGGGSDKTHTCPPCPAPELLGGPSVFLFPPKPKDTLMISRTPEVTCVVVDVSHEDPEVKFNWYVDGVEVHNAKTKPCEEQYGSTYRCVSVLTVLHQDWLNGKEYKCKVSNKALPAPIEKTISKAKGQPREPQVYTLPPSREEMTKNQVSLTCLVKGFYPSDIAVEWESNGQPENNYKTTPPVLDSDGSFFLYSKLTVDKSRWQQGNVFSCSVMHEALHNHYTQKSLSLSPGK

SEQ ID NO: 2463 - protein, 1229 aa, Artificial Sequence
  Synthetic
EVQLVESGGGLVQPDRSLRLSCAASGFTFRDYAMHWVRQAPGKCLEWVSGIAWNSDSIGYADSVKGRFTISRDNAKNSLFLQMHSLRPEDTALYFCAKDTLYGSGSPRAFDIWGQGTMVTVSSGGGGQGGGGQGGGGQEIVLTQSPATLSVSPGERATLSCRASQSVNNNLAWYQQKPGQAPRLLIYGASTRATGIPARFSGSGSGTEFTLTISRLEPEDFAVYYCQQSNNWPITFGCGTRLEIKSGGGGQQVQLVQSGGEVKKPGASVKVSCKASGYTFTSYGISWVRQAPGQCLEWMGWISPQTGNAIYAQKLQGRVTMTRDTSTSTAYMELRSLRSDDTAVYYCARDPDYYGSGSYSDYWGQGTLVTVSSGGGGQGGGGQGGGGQEIVLTQSPATLSVSPGERATLSCRASQSVSSNLAWYQQKPGQAPRLLIYGASSRATGIPARFSGSGSGTEFTLTISSLQSEDFAVYYCQQYHSWPLLTFGCGTKVEIKSGGGGQEVQLVESGGGLVQPGGSLKLSCAASGFTFNKYAINWVRQAPGKGLEWVARIRSKYNNYATYYADAVKDRFTISRDDSKNTVYLQMNNLKTEDTAVYYCARAGNFGSSYISYWAYWGQGTLVTVSSGGGGQGGGGQGGGGQQTVVTQEPSLTVSPGGTVTITCGSSTGAVTSGNYPNWVQKKPGQAPRGLIGGTKFLAPGTPARFSGSLSGGKAALTLSGVQPEDEAEYYCVLWYSNRWVFGSGTKLTVLGGGGCPPCPAPELLGGPSVFLFPPKPKDTLMISRTPEVTCVVVDVSHEEPEVKFNWYVDGVEVHNAKTKPCEEQYGSTYRCVSVLTVLHQDWLNGKEYKCKVSNKALPAPIEKTISKAKGQPREPQVYTLPPSREEMTKNQVSLTCLVKGFYPSDIAVEWESNGQPENNYKTTPPVLDSDGSFFLYSKLTVDKSRWQQGNVFSCSVMHEALHNHYTQKSLSLSPGKGGGGQGGGGQGGGGQGGGGQGGGGQGGGGQCPPCPAPELLGGPSVFLFPPKPKDTLMISRTPEVTCVVVDVSHEEPEVKFNWYVDGVEVHNAKTKPCEEQYGSTYRCVSVLTVLHQDWLNGKEYKCKVSNKALPAPIEKTISKAKGQPREPQVYTLPPSREEMTKNQVSLTCLVKGFYPSDIAVEWESNGQPENNYKTTPPVLDSDGSFFLYSKLTVDKSRWQQGNVFSCSVMHEALHNHYTQKSLSLSPGK

SEQ ID NO: 2464 - protein, 496 aa, Artificial Sequence
  Synthetic
EVQLVESGGGLVQPDRSLRLSCAASGFTFRDYAMHWVRQAPGKCLEWVSGIAWNSDSIGYADSVKGRFTISRDNAKNSLFLQMHSLRPEDTALYFCAKDTLYGSGSPRAFDIWGQGTMVTVSSGGGGSGGGGSGGGGSEIVLTQSPATLSVSPGERATLSCRASQSVNNNLAWYQQKPGQAPRLLIYGASTRATGIPARFSGSGSGTEFTLTISRLEPEDFAVYYCQQSNNWPITFGCGTRLEIKSGGGGSQVQLVQSGAEVKKPGASVKVSCKASGYTFTSYGISWVRQAPGQCLEWMGWISAYNGNAIYAQKLQGRVTMTRDTSTSTAYMELRSLRSDDTAVYYCARDPDYYGSGSYSDYWGQGTLVTVSSGGGGSGGGGSGGGGSEIVLTQSPATLSVSPGERATLSCRASQSVSSNLAWYQQKPGQAPRLLIYGASSRATGIPARFSGSGSGTEFTLTISSLQSEDFAVYYCQQYHSWPILHFGCGTKVEIK

SEQ ID NO: 2465 - protein, 496 aa, Artificial Sequence
  Synthetic
EVQLVESGGGLVQPDRSLRLSCAASGFTFRDYAMHWVRQAPGKCLEWVSGIAWNSDSIGYADSVKGRFTISRDNAKNSLFLQMHSLRPEDTALYFCAKDTLYGSGSPRAFDIWGQGTMVTVSSGGGGQGGGGQGGGGQEIVLTQSPATLSVSPGERATLSCRASQSVNNNLAWYQQKPGQAPRLLIYGASTRATGIPARFSGSGSGTEFTLTISRLEPEDFAVYYCQQSNNWPITFGCGTRLEIKSGGGGQQVQLVQSGAEVKKPGASVKVSCKASGYTFTSYGISWVRQAPGQCLEWMGWISAYNGNAIYAQKLQGRVTMTRDTSTSTAYMELRSLRSDDTAVYYCARDPDYYGSGSYSDYWGQGTLVTVSSGGGGQGGGGQGGGGQEIVLTQSPATLSVSPGERATLSCRASQSVSSNLAWYQQKPGQAPRLLIYGASSRATGIPARFSGSGSGTEFTLTISSLQSEDFAVYYCQQYHSWPILHFGCGTKVEIK

SEQ ID NO: 2466 - protein, 751 aa, Artificial Sequence
  Synthetic
EVQLVESGGGLVQPDRSLRLSCAASGFTFRDYAMHWVRQAPGKCLEWVSGIAWNSDSIGYADSVKGRFTISRDNAKNSLFLQMHSLRPEDTALYFCAKDTLYGSGSPRAFDIWGQGTMVTVSSGGGGSGGGGSGGGGSEIVLTQSPATLSVSPGERATLSCRASQSVNNNLAWYQQKPGQAPRLLIYGASTRATGIPARFSGSGSGTEFTLTISRLEPEDFAVYYCQQSNNWPITFGCGTRLEIKSGGGGSQVQLVQSGAEVKKPGASVKVSCKASGYTFTSYGISWVRQAPGQCLEWMGWISAYNGNAIYAQKLQGRVTMTRDTSTSTAYMELRSLRSDDTAVYYCARDPDYYGSGSYSDYWGQGTLVTVSSGGGGSGGGGSGGGGSEIVLTQSPATLSVSPGERATLSCRASQSVSSNLAWYQQKPGQAPRLLIYGASSRATGIPARFSGSGSGTEFTLTISSLQSEDFAVYYCQQYHSWPILHFGCGTKVEIKSGGGGSEVQLVESGGGLVQPGGSLKLSCAASGFTFNKYAMNWVRQAPGKGLEWVARIRSKYNNYATYYADSVKDRFTISRDDSKNTAYLQMNNLKTEDTAVYYCVRHGNFGNSYISYWAYWGQGTLVTVSSGGGGSGGGGSGGGGSQTVVTQEPSLTVSPGGTVTLTCGSSTGAVTSGNYPNWVQQKPGQAPRGLIGGTKFLAPGTPARFSGSLLGGKAALTLSGVQPEDEAEYYCVLWYSNRWVFGGGTKLTVL

SEQ ID NO: 2467 - protein, 751 aa, Artificial Sequence
  Synthetic
EVQLVESGGGLVQPDRSLRLSCAASGFTFRDYAMHWVRQAPGKCLEWVSGIAWNSDSIGYADSVKGRFTISRDNAKNSLFLQMHSLRPEDTALYFCAKDTLYGSGSPRAFDIWGQGTMVTVSSGGGGQGGGGQGGGGQEIVLTQSPATLSVSPGERATLSCRASQSVNNNLAWYQQKPGQAPRLLIYGASTRATGIPARFSGSGSGTEFTLTISRLEPEDFAVYYCQQSNNWPITFGCGTRLEIKSGGGGQQVQLVQSGAEVKKPGASVKVSCKASGYTFTSYGISWVRQAPGQCLEWMGWISAYNGNAIYAQKLQGRVTMTRDTSTSTAYMELRSLRSDDTAVYYCARDPDYYGSGSYSDYWGQGTLVTVSSGGGGQGGGGQGGGGQEIVLTQSPATLSVSPGERATLSCRASQSVSSNLAWYQQKPGQAPRLLIYGASSRATGIPARFSGSGSGTEFTLTISSLQSEDFAVYYCQQYHSWPILHFGCGTKVEIKSGGGGQEVQLVESGGGLVQPGGSLKLSCAASGFTFNKYAMNWVRQAPGKGLEWVARIRSKYNNYATYYADSVKDRFTISRDDSKNTAYLQMNNLKTEDTAVYYCVRHGNFGNSYISYWAYWGQGTLVTVSSGGGGQGGGGQGGGGQQTVVTQEPSLTVSPGGTVTLTCGSSTGAVTSGNYPNWVQQKPGQAPRGLIGGTKFLAPGTPARFSGSLLGGKAALTLSGVQPEDEAEYYCVLWYSNRWVFGGGTKLTVL

SEQ ID NO: 2468 - protein, 751 aa, Artificial Sequence
  Synthetic
EVQLVESGGGLVQPDRSLRLSCAASGFTFRDYAMHWVRQAPGKCLEWVSGIAWNSDSIGYADSVKGRFTISRDNAKNSLFLQMHSLRPEDTALYFCAKDTLYGSGSPRAFDIWGQGTMVTVSSGGGGSGGGGSGGGGSEIVLTQSPATLSVSPGERATLSCRASQSVNNNLAWYQQKPGQAPRLLIYGASTRATGIPARFSGSGSGTEFTLTISRLEPEDFAVYYCQQSNNWPITFGCGTRLEIKSGGGGSQVQLVQSGAEVKKPGASVKVSCKASGYTFTSYGISWVRQAPGQCLEWMGWISAYNGNAIYAQKLQGRVTMTRDTSTSTAYMELRSLRSDDTAVYYCARDPDYYGSGSYSDYWGQGTLVTVSSGGGGSGGGGSGGGGSEIVLTQSPATLSVSPGERATLSCRASQSVSSNLAWYQQKPGQAPRLLIYGASSRATGIPARFSGSGSGTEFTLTISSLQSEDFAVYYCQQYHSWPILHFGCGTKVEIKSGGGGSEVQLVESGGGLVQPGGSLKLSCAASGFTFNKYAINWVRQAPGKGLEWVARIRSKYNNYATYYADAVKDRFTISRDDSKNTVYLQMNNLKTEDTAVYYCARAGNFGSSYISYWAYWGQGTLVTVSSGGGGSGGGGSGGGGSQTVVTQEPSLTVSPGGTVTITCGSSTGAVTSGNYPNWVQKKPGQAPRGLIGGTKFLAPGTPARFSGSLSGGKAALTLSGVQPEDEAEYYCVLWYSNRWVFGSGTKLTVL

SEQ ID NO: 2469 - protein, 751 aa, Artificial Sequence
  Synthetic
EVQLVESGGGLVQPDRSLRLSCAASGFTFRDYAMHWVRQAPGKCLEWVSGIAWNSDSIGYADSVKGRFTISRDNAKNSLFLQMHSLRPEDTALYFCAKDTLYGSGSPRAFDIWGQGTMVTVSSGGGGQGGGGQGGGGQEIVLTQSPATLSVSPGERATLSCRASQSVNNNLAWYQQKPGQAPRLLIYGASTRATGIPARFSGSGSGTEFTLTISRLEPEDFAVYYCQQSNNWPITFGCGTRLEIKSGGGGQQVQLVQSGAEVKKPGASVKVSCKASGYTFTSYGISWVRQAPGQCLEWMGWISAYNGNAIYAQKLQGRVTMTRDTSTSTAYMELRSLRSDDTAVYYCARDPDYYGSGSYSDYWGQGTLVTVSSGGGGQGGGGQGGGGQEIVLTQSPATLSVSPGERATLSCRASQSVSSNLAWYQQKPGQAPRLLIYGASSRATGIPARFSGSGSGTEFTLTISSLQSEDFAVYYCQQYHSWPILHFGCGTKVEIKSGGGGQEVQLVESGGGLVQPGGSLKLSCAASGFTFNKYAINWVRQAPGKGLEWVARIRSKYNNYATYYADAVKDRFTISRDDSKNTVYLQMNNLKTEDTAVYYCARAGNFGSSYISYWAYWGQGTLVTVSSGGGGQGGGGQGGGGQQTVVTQEPSLTVSPGGTVTITCGSSTGAVTSGNYPNWVQKKPGQAPRGLIGGTKFLAPGTPARFSGSLSGGKAALTLSGVQPEDEAEYYCVLWYSNRWVFGSGTKLTVL

SEQ ID NO: 2470 - protein, 1239 aa, Artificial Sequence
  Synthetic
EVQLVESGGGLVQPDRSLRLSCAASGFTFRDYAMHWVRQAPGKCLEWVSGIAWNSDSIGYADSVKGRFTISRDNAKNSLFLQMHSLRPEDTALYFCAKDTLYGSGSPRAFDIWGQGTMVTVSSGGGGSGGGGSGGGGSEIVLTQSPATLSVSPGERATLSCRASQSVNNNLAWYQQKPGQAPRLLIYGASTRATGIPARFSGSGSGTEFTLTISRLEPEDFAVYYCQQSNNWPITFGCGTRLEIKSGGGGSQVQLVQSGAEVKKPGASVKVSCKASGYTFTSYGISWVRQAPGQCLEWMGWISAYNGNAIYAQKLQGRVTMTRDTSTSTAYMELRSLRSDDTAVYYCARDPDYYGSGSYSDYWGQGTLVTVSSGGGGSGGGGSGGGGSEIVLTQSPATLSVSPGERATLSCRASQSVSSNLAWYQQKPGQAPRLLIYGASSRATGIPARFSGSGSGTEFTLTISSLQSEDFAVYYCQQYHSWPILHFGCGTKVEIKSGGGGSEVQLVESGGGLVQPGGSLKLSCAASGFTFNKYAMNWVRQAPGKGLEWVARIRSKYNNYATYYADSVKDRFTISRDDSKNTAYLQMNNLKTEDTAVYYCVRHGNFGNSYISYWAYWGQGTLVTVSSGGGGSGGGGSGGGGSQTVVTQEPSLTVSPGGTVTLTCGSSTGAVTSGNYPNWVQQKPGQAPRGLIGGTKFLAPGTPARFSGSLLGGKAALTLSGVQPEDEAEYYCVLWYSNRWVFGGGTKLTVLGGGGDKTHTCPPCPAPELLGGPSVFLFPPKPKDTLMISRTPEVTCVVVDVSHEDPEVKFNWYVDGVEVHNAKTKPCEEQYGSTYRCVSVLTVLHQDWLNGKEYKCKVSNKALPAPIEKTISKAKGQPREPQVYTLPPSREEMTKNQVSLTCLVKGFYPSDIAVEWESNGQPENNYKTTPPVLDSDGSFFLYSKLTVDKSRWQQGNVFSCSVMHEALHNHYTQKSLSLSPGKGGGGSGGGGSGGGGSGGGGSGGGGSGGGGSDKTHTCPPCPAPELLGGPSVFLFPPKPKDTLMISRTPEVTCVVVDVSHEDPEVKFNWYVDGVEVHNAKTKPCEEQYGSTYRCVSVLTVLHQDWLNGKEYKCKVSNKALPAPIEKTISKAKGQPREPQVYTLPPSREEMTKNQVSLTCLVKGFYPSDIAVEWESNGQPENNYKTTPPVLDSDGSFFLYSKLTVDKSRWQQGNVFSCSVMHEALHNHYTQKSLSLSPGK

SEQ ID NO: 2471 - protein, 1229 aa, Artificial Sequence
  Synthetic
EVQLVESGGGLVQPDRSLRLSCAASGFTFRDYAMHWVRQAPGKCLEWVSGIAWNSDSIGYADSVKGRFTISRDNAKNSLFLQMHSLRPEDTALYFCAKDTLYGSGSPRAFDIWGQGTMVTVSSGGGGQGGGGQGGGGQEIVLTQSPATLSVSPGERATLSCRASQSVNNNLAWYQQKPGQAPRLLIYGASTRATGIPARFSGSGSGTEFTLTISRLEPEDFAVYYCQQSNNWPITFGCGTRLEIKSGGGGQQVQLVQSGAEVKKPGASVKVSCKASGYTFTSYGISWVRQAPGQCLEWMGWISAYNGNAIYAQKLQGRVTMTRDTSTSTAYMELRSLRSDDTAVYYCARDPDYYGSGSYSDYWGQGTLVTVSSGGGGQGGGGQGGGGQEIVLTQSPATLSVSPGERATLSCRASQSVSSNLAWYQQKPGQAPRLLIYGASSRATGIPARFSGSGSGTEFTLTISSLQSEDFAVYYCQQYHSWPILHFGCGTKVEIKSGGGGQEVQLVESGGGLVQPGGSLKLSCAASGFTFNKYAMNWVRQAPGKGLEWVARIRSKYNNYATYYADSVKDRFTISRDDSKNTAYLQMNNLKTEDTAVYYCVRHGNFGNSYISYWAYWGQGTLVTVSSGGGGQGGGGQGGGGQQTVVTQEPSLTVSPGGTVTLTCGSSTGAVTSGNYPNWVQQKPGQAPRGLIGGTKFLAPGTPARFSGSLLGGKAALTLSGVQPEDEAEYYCVLWYSNRWVFGGGTKLTVLGGGGCPPCPAPELLGGPSVFLFPPKPKDTLMISRTPEVTCVVVDVSHEEPEVKFNWYVDGVEVHNAKTKPCEEQYGSTYRCVSVLTVLHQDWLNGKEYKCKVSNKALPAPIEKTISKAKGQPREPQVYTLPPSREEMTKNQVSLTCLVKGFYPSDIAVEWESNGQPENNYKTTPPVLDSDGSFFLYSKLTVDKSRWQQGNVFSCSVMHEALHNHYTQKSLSLSPGKGGGGQGGGGQGGGGQGGGGQGGGGQGGGGQCPPCPAPELLGGPSVFLFPPKPKDTLMISRTPEVTCVVVDVSHEEPEVKFNWYVDGVEVHNAKTKPCEEQYGSTYRCVSVLTVLHQDWLNGKEYKCKVSNKALPAPIEKTISKAKGQPREPQVYTLPPSREEMTKNQVSLTCLVKGFYPSDIAVEWESNGQPENNYKTTPPVLDSDGSFFLYSKLTVDKSRWQQGNVFSCSVMHEALHNHYTQKSLSLSPGK

SEQ ID NO: 2472 - protein, 1239 aa, Artificial Sequence
  Synthetic
EVQLVESGGGLVQPDRSLRLSCAASGFTFRDYAMHWVRQAPGKCLEWVSGIAWNSDSIGYADSVKGRFTISRDNAKNSLFLQMHSLRPEDTALYFCAKDTLYGSGSPRAFDIWGQGTMVTVSSGGGGSGGGGSGGGGSEIVLTQSPATLSVSPGERATLSCRASQSVNNNLAWYQQKPGQAPRLLIYGASTRATGIPARFSGSGSGTEFTLTISRLEPEDFAVYYCQQSNNWPITFGCGTRLEIKSGGGGSQVQLVQSGAEVKKPGASVKVSCKASGYTFTSYGISWVRQAPGQCLEWMGWISAYNGNAIYAQKLQGRVTMTRDTSTSTAYMELRSLRSDDTAVYYCARDPDYYGSGSYSDYWGQGTLVTVSSGGGGSGGGGSGGGGSEIVLTQSPATLSVSPGERATLSCRASQSVSSNLAWYQQKPGQAPRLLIYGASSRATGIPARFSGSGSGTEFTLTISSLQSEDFAVYYCQQYHSWPILHFGCGTKVEIKSGGGGSEVQLVESGGGLVQPGGSLKLSCAASGFTFNKYAINWVRQAPGKGLEWVARIRSKYNNYATYYADAVKDRFTISRDDSKNTVYLQMNNLKTEDTAVYYCARAGNFGSSYISYWAYWGQGTLVTVSSGGGGSGGGGSGGGGSQTVVTQEPSLTVSPGGTVTITCGSSTGAVTSGNYPNWVQKKPGQAPRGLIGGTKFLAPGTPARFSGSLSGGKAALTLSGVQPEDEAEYYCVLWYSNRWVFGSGTKLTVLGGGGDKTHTCPPCPAPELLGGPSVFLFPPKPKDTLMISRTPEVTCVVVDVSHEDPEVKFNWYVDGVEVHNAKTKPCEEQYGSTYRCVSVLTVLHQDWLNGKEYKCKVSNKALPAPIEKTISKAKGQPREPQVYTLPPSREEMTKNQVSLTCLVKGFYPSDIAVEWESNGQPENNYKTTPPVLDSDGSFFLYSKLTVDKSRWQQGNVFSCSVMHEALHNHYTQKSLSLSPGKGGGGSGGGGSGGGGSGGGGSGGGGSGGGGSDKTHTCPPCPAPELLGGPSVFLFPPKPKDTLMISRTPEVTCVVVDVSHEDPEVKFNWYVDGVEVHNAKTKPCEEQYGSTYRCVSVLTVLHQDWLNGKEYKCKVSNKALPAPIEKTISKAKGQPREPQVYTLPPSREEMTKNQVSLTCLVKGFYPSDIAVEWESNGQPENNYKTTPPVLDSDGSFFLYSKLTVDKSRWQQGNVFSCSVMHEALHNHYTQKSLSLSPGK

SEQ ID NO: 2473 - protein, 1229 aa, Artificial Sequence
  Synthetic
EVQLVESGGGLVQPDRSLRLSCAASGFTFRDYAMHWVRQAPGKCLEWVSGIAWNSDSIGYADSVKGRFTISRDNAKNSLFLQMHSLRPEDTALYFCAKDTLYGSGSPRAFDIWGQGTMVTVSSGGGGQGGGGQGGGGQEIVLTQSPATLSVSPGERATLSCRASQSVNNNLAWYQQKPGQAPRLLIYGASTRATGIPARFSGSGSGTEFTLTISRLEPEDFAVYYCQQSNNWPITFGCGTRLEIKSGGGGQQVQLVQSGAEVKKPGASVKVSCKASGYTFTSYGISWVRQAPGQCLEWMGWISAYNGNAIYAQKLQGRVTMTRDTSTSTAYMELRSLRSDDTAVYYCARDPDYYGSGSYSDYWGQGTLVTVSSGGGGQGGGGQGGGGQEIVLTQSPATLSVSPGERATLSCRASQSVSSNLAWYQQKPGQAPRLLIYGASSRATGIPARFSGSGSGTEFTLTISSLQSEDFAVYYCQQYHSWPILHFGCGTKVEIKSGGGGQEVQLVESGGGLVQPGGSLKLSCAASGFTFNKYAINWVRQAPGKGLEWVARIRSKYNNYATYYADAVKDRFTISRDDSKNTVYLQMNNLKTEDTAVYYCARAGNFGSSYISYWAYWGQGTLVTVSSGGGGQGGGGQGGGGQQTVVTQEPSLTVSPGGTVTITCGSSTGAVTSGNYPNWVQKKPGQAPRGLIGGTKFLAPGTPARFSGSLSGGKAALTLSGVQPEDEAEYYCVLWYSNRWVFGSGTKLTVLGGGGCPPCPAPELLGGPSVFLFPPKPKDTLMISRTPEVTCVVVDVSHEEPEVKFNWYVDGVEVHNAKTKPCEEQYGSTYRCVSVLTVLHQDWLNGKEYKCKVSNKALPAPIEKTISKAKGQPREPQVYTLPPSREEMTKNQVSLTCLVKGFYPSDIAVEWESNGQPENNYKTTPPVLDSDGSFFLYSKLTVDKSRWQQGNVFSCSVMHEALHNHYTQKSLSLSPGKGGGGQGGGGQGGGGQGGGGQGGGGQGGGGQCPPCPAPELLGGPSVFLFPPKPKDTLMISRTPEVTCVVVDVSHEEPEVKFNWYVDGVEVHNAKTKPCEEQYGSTYRCVSVLTVLHQDWLNGKEYKCKVSNKALPAPIEKTISKAKGQPREPQVYTLPPSREEMTKNQVSLTCLVKGFYPSDIAVEWESNGQPENNYKTTPPVLDSDGSFFLYSKLTVDKSRWQQGNVFSCSVMHEALHNHYTQKSLSLSPGK

SEQ ID NO: 2474 - protein, 490 aa, Artificial Sequence
  Synthetic
EVQLVESGGGLVQPDRSLRLSCAASGFTFRDYAMHWVRQAPGKCLEWVSGIAWNSDSIGYADSVKGRFTISRDNAKNSLFLQMHSLRPEDTALYFCAKDTLYGSGSPRAFDIWGQGTMVTVSSGGGGSGGGGSGGGGSEIVLTQSPATLSVSPGERATLSCRASQSVNNNLAWYQQKPGQAPRLLIYGASTRATGIPARFSGSGSGTEFTLTISRLEPEDFAVYYCQQSNNWPITFGCGTRLEIKSGGGGSQVQLVQSGAEVKKPGASVKVSCKASGYTFTSYGISWVRQAPGQCLEWMGWISAYNGNTVYAQKLQDRVTMTTDTSTSTAYMELRSLRSDDTAVYFCVRDGDPLDYWGQGTLVTVSSGGGGSGGGGSGGGGSEIVLTQSPGTLSLSPGERATLSCRASQSVSSNLAWYQQKPGQAPRLLIYGASTRATGIPARFSGSGSGTEFTLTISSLQSEDFAVYYCQQYHTWPPVTFGCGTKVEIK

SEQ ID NO: 2475 - protein, 490 aa, Artificial Sequence
  Synthetic
EVQLVESGGGLVQPDRSLRLSCAASGFTFRDYAMHWVRQAPGKCLEWVSGIAWNSDSIGYADSVKGRFTISRDNAKNSLFLQMHSLRPEDTALYFCAKDTLYGSGSPRAFDIWGQGTMVTVSSGGGGQGGGGQGGGGQEIVLTQSPATLSVSPGERATLSCRASQSVNNNLAWYQQKPGQAPRLLIYGASTRATGIPARFSGSGSGTEFTLTISRLEPEDFAVYYCQQSNNWPITFGCGTRLEIKSGGGGQQVQLVQSGAEVKKPGASVKVSCKASGYTFTSYGISWVRQAPGQCLEWMGWISAYNGNTVYAQKLQDRVTMTTDTSTSTAYMELRSLRSDDTAVYFCVRDGDPLDYWGQGTLVTVSSGGGGQGGGGQGGGGQEIVLTQSPGTLSLSPGERATLSCRASQSVSSNLAWYQQKPGQAPRLLIYGASTRATGIPARFSGSGSGTEFTLTISSLQSEDFAVYYCQQYHTWPPVTFGCGTKVEIK

SEQ ID NO: 2476 - protein, 745 aa, Artificial Sequence
  Synthetic
EVQLVESGGGLVQPDRSLRLSCAASGFTFRDYAMHWVRQAPGKCLEWVSGIAWNSDSIGYADSVKGRFTISRDNAKNSLFLQMHSLRPEDTALYFCAKDTLYGSGSPRAFDIWGQGTMVTVSSGGGGSGGGGSGGGGSEIVLTQSPATLSVSPGERATLSCRASQSVNNNLAWYQQKPGQAPRLLIYGASTRATGIPARFSGSGSGTEFTLTISRLEPEDFAVYYCQQSNNWPITFGCGTRLEIKSGGGGSQVQLVQSGAEVKKPGASVKVSCKASGYTFTSYGISWVRQAPGQCLEWMGWISAYNGNTVYAQKLQDRVTMTTDTSTSTAYMELRSLRSDDTAVYFCVRDGDPLDYWGQGTLVTVSSGGGGSGGGGSGGGGSEIVLTQSPGTLSLSPGERATLSCRASQSVSSNLAWYQQKPGQAPRLLIYGASTRATGIPARFSGSGSGTEFTLTISSLQSEDFAVYYCQQYHTWPPVTFGCGTKVEIKSGGGGSEVQLVESGGGLVQPGGSLKLSCAASGFTFNKYAMNWVRQAPGKGLEWVARIRSKYNNYATYYADSVKDRFTISRDDSKNTAYLQMNNLKTEDTAVYYCVRHGNFGNSYISYWAYWGQGTLVTVSSGGGGSGGGGSGGGGSQTVVTQEPSLTVSPGGTVTLTCGSSTGAVTSGNYPNWVQQKPGQAPRGLIGGTKFLAPGTPARFSGSLLGGKAALTLSGVQPEDEAEYYCVLWYSNRWVFGGGTKLTVL

SEQ ID NO: 2477 - protein, 745 aa, Artificial Sequence
  Synthetic
EVQLVESGGGLVQPDRSLRLSCAASGFTFRDYAMHWVRQAPGKCLEWVSGIAWNSDSIGYADSVKGRFTISRDNAKNSLFLQMHSLRPEDTALYFCAKDTLYGSGSPRAFDIWGQGTMVTVSSGGGGQGGGGQGGGGQEIVLTQSPATLSVSPGERATLSCRASQSVNNNLAWYQQKPGQAPRLLIYGASTRATGIPARFSGSGSGTEFTLTISRLEPEDFAVYYCQQSNNWPITFGCGTRLEIKSGGGGQQVQLVQSGAEVKKPGASVKVSCKASGYTFTSYGISWVRQAPGQCLEWMGWISAYNGNTVYAQKLQDRVTMTTDTSTSTAYMELRSLRSDDTAVYFCVRDGDPLDYWGQGTLVTVSSGGGGQGGGGQGGGGQEIVLTQSPGTLSLSPGERATLSCRASQSVSSNLAWYQQKPGQAPRLLIYGASTRATGIPARFSGSGSGTEFTLTISSLQSEDFAVYYCQQYHTWPPVTFGCGTKVEIKSGGGGQEVQLVESGGGLVQPGGSLKLSCAASGFTFNKYAMNWVRQAPGKGLEWVARIRSKYNNYATYYADSVKDRFTISRDDSKNTAYLQMNNLKTEDTAVYYCVRHGNFGNSYISYWAYWGQGTLVTVSSGGGGQGGGGQGGGGQQTVVTQEPSLTVSPGGTVTLTCGSSTGAVTSGNYPNWVQQKPGQAPRGLIGGTKFLAPGTPARFSGSLLGGKAALTLSGVQPEDEAEYYCVLWYSNRWVFGGGTKLTVL

SEQ ID NO: 2478 - protein, 745 aa, Artificial Sequence
  Synthetic
EVQLVESGGGLVQPDRSLRLSCAASGFTFRDYAMHWVRQAPGKCLEWVSGIAWNSDSIGYADSVKGRFTISRDNAKNSLFLQMHSLRPEDTALYFCAKDTLYGSGSPRAFDIWGQGTMVTVSSGGGGSGGGGSGGGGSEIVLTQSPATLSVSPGERATLSCRASQSVNNNLAWYQQKPGQAPRLLIYGASTRATGIPARFSGSGSGTEFTLTISRLEPEDFAVYYCQQSNNWPITFGCGTRLEIKSGGGGSQVQLVQSGAEVKKPGASVKVSCKASGYTFTSYGISWVRQAPGQCLEWMGWISAYNGNTVYAQKLQDRVTMTTDTSTSTAYMELRSLRSDDTAVYFCVRDGDPLDYWGQGTLVTVSSGGGGSGGGGSGGGGSEIVLTQSPGTLSLSPGERATLSCRASQSVSSNLAWYQQKPGQAPRLLIYGASTRATGIPARFSGSGSGTEFTLTISSLQSEDFAVYYCQQYHTWPPVTFGCGTKVEIKSGGGGSEVQLVESGGGLVQPGGSLKLSCAASGFTFNKYAINWVRQAPGKGLEWVARIRSKYNNYATYYADAVKDRFTISRDDSKNTVYLQMNNLKTEDTAVYYCARAGNFGSSYISYWAYWGQGTLVTVSSGGGGSGGGGSGGGGSQTVVTQEPSLTVSPGGTVTITCGSSTGAVTSGNYPNWVQKKPGQAPRGLIGGTKFLAPGTPARFSGSLSGGKAALTLSGVQPEDEAEYYCVLWYSNRWVFGSGTKLTVL

SEQ ID NO: 2479 - protein, 745 aa, Artificial Sequence
  Synthetic
EVQLVESGGGLVQPDRSLRLSCAASGFTFRDYAMHWVRQAPGKCLEWVSGIAWNSDSIGYADSVKGRFTISRDNAKNSLFLQMHSLRPEDTALYFCAKDTLYGSGSPRAFDIWGQGTMVTVSSGGGGQGGGGQGGGGQEIVLTQSPATLSVSPGERATLSCRASQSVNNNLAWYQQKPGQAPRLLIYGASTRATGIPARFSGSGSGTEFTLTISRLEPEDFAVYYCQQSNNWPITFGCGTRLEIKSGGGGQQVQLVQSGAEVKKPGASVKVSCKASGYTFTSYGISWVRQAPGQCLEWMGWISAYNGNTVYAQKLQDRVTMTTDTSTSTAYMELRSLRSDDTAVYFCVRDGDPLDYWGQGTLVTVSSGGGGQGGGGQGGGGQEIVLTQSPGTLSLSPGERATLSCRASQSVSSNLAWYQQKPGQAPRLLIYGASTRATGIPARFSGSGSGTEFTLTISSLQSEDFAVYYCQQYHTWPPVTFGCGTKVEIKSGGGGQEVQLVESGGGLVQPGGSLKLSCAASGFTFNKYAINWVRQAPGKGLEWVARIRSKYNNYATYYADAVKDRFTISRDDSKNTVYLQMNNLKTEDTAVYYCARAGNFGSSYISYWAYWGQGTLVTVSSGGGGQGGGGQGGGGQQTVVTQEPSLTVSPGGTVTITCGSSTGAVTSGNYPNWVQKKPGQAPRGLIGGTKFLAPGTPARFSGSLSGGKAALTLSGVQPEDEAEYYCVLWYSNRWVFGSGTKLTVL

SEQ ID NO: 2480 - protein, 1233 aa, Artificial Sequence
  Synthetic
EVQLVESGGGLVQPDRSLRLSCAASGFTFRDYAMHWVRQAPGKCLEWVSGIAWNSDSIGYADSVKGRFTISRDNAKNSLFLQMHSLRPEDTALYFCAKDTLYGSGSPRAFDIWGQGTMVTVSSGGGGSGGGGSGGGGSEIVLTQSPATLSVSPGERATLSCRASQSVNNNLAWYQQKPGQAPRLLIYGASTRATGIPARFSGSGSGTEFTLTISRLEPEDFAVYYCQQSNNWPITFGCGTRLEIKSGGGGSQVQLVQSGAEVKKPGASVKVSCKASGYTFTSYGISWVRQAPGQCLEWMGWISAYNGNTVYAQKLQDRVTMTTDTSTSTAYMELRSLRSDDTAVYFCVRDGDPLDYWGQGTLVTVSSGGGGSGGGGSGGGGSEIVLTQSPGTLSLSPGERATLSCRASQSVSSNLAWYQQKPGQAPRLLIYGASTRATGIPARFSGSGSGTEFTLTISSLQSEDFAVYYCQQYHTWPPVTFGCGTKVEIKSGGGGSEVQLVESGGGLVQPGGSLKLSCAASGFTFNKYAMNWVRQAPGKGLEWVARIRSKYNNYATYYADSVKDRFTISRDDSKNTAYLQMNNLKTEDTAVYYCVRHGNFGNSYISYWAYWGQGTLVTVSSGGGGSGGGGSGGGGSQTVVTQEPSLTVSPGGTVTLTCGSSTGAVTSGNYPNWVQQKPGQAPRGLIGGTKFLAPGTPARFSGSLLGGKAALTLSGVQPEDEAEYYCVLWYSNRWVFGGGTKLTVLGGGGDKTHTCPPCPAPELLGGPSVFLFPPKPKDTLMISRTPEVTCVVVDVSHEDPEVKFNWYVDGVEVHNAKTKPCEEQYGSTYRCVSVLTVLHQDWLNGKEYKCKVSNKALPAPIEKTISKAKGQPREPQVYTLPPSREEMTKNQVSLTCLVKGFYPSDIAVEWESNGQPENNYKTTPPVLDSDGSFFLYSKLTVDKSRWQQGNVFSCSVMHEALHNHYTQKSLSLSPGKGGGGSGGGGSGGGGSGGGGSGGGGSGGGGSDKTHTCPPCPAPELLGGPSVFLFPPKPKDTLMISRTPEVTCVVVDVSHEDPEVKFNWYVDGVEVHNAKTKPCEEQYGSTYRCVSVLTVLHQDWLNGKEYKCKVSNKALPAPIEKTISKAKGQPREPQVYTLPPSREEMTKNQVSLTCLVKGFYPSDIAVEWESNGQPENNYKTTPPVLDSDGSFFLYSKLTVDKSRWQQGNVFSCSVMHEALHNHYTQKSLSLSPGK

SEQ ID NO: 2481 - protein, 1223 aa, Artificial Sequence
  Synthetic
EVQLVESGGGLVQPDRSLRLSCAASGFTFRDYAMHWVRQAPGKCLEWVSGIAWNSDSIGYADSVKGRFTISRDNAKNSLFLQMHSLRPEDTALYFCAKDTLYGSGSPRAFDIWGQGTMVTVSSGGGGQGGGGQGGGGQEIVLTQSPATLSVSPGERATLSCRASQSVNNNLAWYQQKPGQAPRLLIYGASTRATGIPARFSGSGSGTEFTLTISRLEPEDFAVYYCQQSNNWPITFGCGTRLEIKSGGGGQQVQLVQSGAEVKKPGASVKVSCKASGYTFTSYGISWVRQAPGQCLEWMGWISAYNGNTVYAQKLQDRVTMTTDTSTSTAYMELRSLRSDDTAVYFCVRDGDPLDYWGQGTLVTVSSGGGGQGGGGQGGGGQEIVLTQSPGTLSLSPGERATLSCRASQSVSSNLAWYQQKPGQAPRLLIYGASTRATGIPARFSGSGSGTEFTLTISSLQSEDFAVYYCQQYHTWPPVTFGCGTKVEIKSGGGGQEVQLVESGGGLVQPGGSLKLSCAASGFTFNKYAMNWVRQAPGKGLEWVARIRSKYNNYATYYADSVKDRFTISRDDSKNTAYLQMNNLKTEDTAVYYCVRHGNFGNSYISYWAYWGQGTLVTVSSGGGGQGGGGQGGGGQQTVVTQEPSLTVSPGGTVTLTCGSSTGAVTSGNYPNWVQQKPGQAPRGLIGGTKFLAPGTPARFSGSLLGGKAALTLSGVQPEDEAEYYCVLWYSNRWVFGGGTKLTVLGGGGCPPCPAPELLGGPSVFLFPPKPKDTLMISRTPEVTCVVVDVSHEEPEVKFNWYVDGVEVHNAKTKPCEEQYGSTYRCVSVLTVLHQDWLNGKEYKCKVSNKALPAPIEKTISKAKGQPREPQVYTLPPSREEMTKNQVSLTCLVKGFYPSDIAVEWESNGQPENNYKTTPPVLDSDGSFFLYSKLTVDKSRWQQGNVFSCSVMHEALHNHYTQKSLSLSPGKGGGGQGGGGQGGGGQGGGGQGGGGQGGGGQCPPCPAPELLGGPSVFLFPPKPKDTLMISRTPEVTCVVVDVSHEEPEVKFNWYVDGVEVHNAKTKPCEEQYGSTYRCVSVLTVLHQDWLNGKEYKCKVSNKALPAPIEKTISKAKGQPREPQVYTLPPSREEMTKNQVSLTCLVKGFYPSDIAVEWESNGQPENNYKTTPPVLDSDGSFFLYSKLTVDKSRWQQGNVFSCSVMHEALHNHYTQKSLSLSPGK

SEQ ID NO: 2482 - protein, 1233 aa, Artificial Sequence
  Synthetic
EVQLVESGGGLVQPDRSLRLSCAASGFTFRDYAMHWVRQAPGKCLEWVSGIAWNSDSIGYADSVKGRFTISRDNAKNSLFLQMHSLRPEDTALYFCAKDTLYGSGSPRAFDIWGQGTMVTVSSGGGGSGGGGSGGGGSEIVLTQSPATLSVSPGERATLSCRASQSVNNNLAWYQQKPGQAPRLLIYGASTRATGIPARFSGSGSGTEFTLTISRLEPEDFAVYYCQQSNNWPITFGCGTRLEIKSGGGGSQVQLVQSGAEVKKPGASVKVSCKASGYTFTSYGISWVRQAPGQCLEWMGWISAYNGNTVYAQKLQDRVTMTTDTSTSTAYMELRSLRSDDTAVYFCVRDGDPLDYWGQGTLVTVSSGGGGSGGGGSGGGGSEIVLTQSPGTLSLSPGERATLSCRASQSVSSNLAWYQQKPGQAPRLLIYGASTRATGIPARFSGSGSGTEFTLTISSLQSEDFAVYYCQQYHTWPPVTFGCGTKVEIKSGGGGSEVQLVESGGGLVQPGGSLKLSCAASGFTFNKYAINWVRQAPGKGLEWVARIRSKYNNYATYYADAVKDRFTISRDDSKNTVYLQMNNLKTEDTAVYYCARAGNFGSSYISYWAYWGQGTLVTVSSGGGGSGGGGSGGGGSQTVVTQEPSLTVSPGGTVTITCGSSTGAVTSGNYPNWVQKKPGQAPRGLIGGTKFLAPGTPARFSGSLSGGKAALTLSGVQPEDEAEYYCVLWYSNRWVFGSGTKLTVLGGGGDKTHTCPPCPAPELLGGPSVFLFPPKPKDTLMISRTPEVTCVVVDVSHEDPEVKFNWYVDGVEVHNAKTKPCEEQYGSTYRCVSVLTVLHQDWLNGKEYKCKVSNKALPAPIEKTISKAKGQPREPQVYTLPPSREEMTKNQVSLTCLVKGFYPSDIAVEWESNGQPENNYKTTPPVLDSDGSFFLYSKLTVDKSRWQQGNVFSCSVMHEALHNHYTQKSLSLSPGKGGGGSGGGGSGGGGSGGGGSGGGGSGGGGSDKTHTCPPCPAPELLGGPSVFLFPPKPKDTLMISRTPEVTCVVVDVSHEDPEVKFNWYVDGVEVHNAKTKPCEEQYGSTYRCVSVLTVLHQDWLNGKEYKCKVSNKALPAPIEKTISKAKGQPREPQVYTLPPSREEMTKNQVSLTCLVKGFYPSDIAVEWESNGQPENNYKTTPPVLDSDGSFFLYSKLTVDKSRWQQGNVFSCSVMHEALHNHYTQKSLSLSPGK

SEQ ID NO: 2483 - protein, 1223 aa, Artificial Sequence
  Synthetic
EVQLVESGGGLVQPDRSLRLSCAASGFTFRDYAMHWVRQAPGKCLEWVSGIAWNSDSIGYADSVKGRFTISRDNAKNSLFLQMHSLRPEDTALYFCAKDTLYGSGSPRAFDIWGQGTMVTVSSGGGGQGGGGQGGGGQEIVLTQSPATLSVSPGERATLSCRASQSVNNNLAWYQQKPGQAPRLLIYGASTRATGIPARFSGSGSGTEFTLTISRLEPEDFAVYYCQQSNNWPITFGCGTRLEIKSGGGGQQVQLVQSGAEVKKPGASVKVSCKASGYTFTSYGISWVRQAPGQCLEWMGWISAYNGNTVYAQKLQDRVTMTTDTSTSTAYMELRSLRSDDTAVYFCVRDGDPLDYWGQGTLVTVSSGGGGQGGGGQGGGGQEIVLTQSPGTLSLSPGERATLSCRASQSVSSNLAWYQQKPGQAPRLLIYGASTRATGIPARFSGSGSGTEFTLTISSLQSEDFAVYYCQQYHTWPPVTFGCGTKVEIKSGGGGQEVQLVESGGGLVQPGGSLKLSCAASGFTFNKYAINWVRQAPGKGLEWVARIRSKYNNYATYYADAVKDRFTISRDDSKNTVYLQMNNLKTEDTAVYYCARAGNFGSSYISYWAYWGQGTLVTVSSGGGGQGGGGQGGGGQQTVVTQEPSLTVSPGGTVTITCGSSTGAVTSGNYPNWVQKKPGQAPRGLIGGTKFLAPGTPARFSGSLSGGKAALTLSGVQPEDEAEYYCVLWYSNRWVFGSGTKLTVLGGGGCPPCPAPELLGGPSVFLFPPKPKDTLMISRTPEVTCVVVDVSHEEPEVKFNWYVDGVEVHNAKTKPCEEQYGSTYRCVSVLTVLHQDWLNGKEYKCKVSNKALPAPIEKTISKAKGQPREPQVYTLPPSREEMTKNQVSLTCLVKGFYPSDIAVEWESNGQPENNYKTTPPVLDSDGSFFLYSKLTVDKSRWQQGNVFSCSVMHEALHNHYTQKSLSLSPGKGGGGQGGGGQGGGGQGGGGQGGGGQGGGGQCPPCPAPELLGGPSVFLFPPKPKDTLMISRTPEVTCVVVDVSHEEPEVKFNWYVDGVEVHNAKTKPCEEQYGSTYRCVSVLTVLHQDWLNGKEYKCKVSNKALPAPIEKTISKAKGQPREPQVYTLPPSREEMTKNQVSLTCLVKGFYPSDIAVEWESNGQPENNYKTTPPVLDSDGSFFLYSKLTVDKSRWQQGNVFSCSVMHEALHNHYTQKSLSLSPGK

SEQ ID NO: 2484 - protein, 490 aa, Artificial Sequence
  Synthetic
EVQLVESGGGLVQPDRSLRLSCAASGFTFRDYAMHWVRQAPGKCLEWVSGIAWNSDSIGYADSVKGRFTISRDNAKNSLFLQMHSLRPEDTALYFCAKDTLYGSGSPRAFDIWGQGTMVTVSSGGGGSGGGGSGGGGSEIVLTQSPATLSVSPGERATLSCRASQSVNNNLAWYQQKPGQAPRLLIYGASTRATGIPARFSGSGSGTEFTLTISRLEPEDFAVYYCQQSNNWPITFGCGTRLEIKSGGGGSQVQLVQSGAEVKKPGASVKVSCKASGYSFTSYGITWVRQAPGQCLEWMGWISAYNGNTIYAQKLQGRVTMTTDTSTSTAYMELRSLRSDDTAVYYCVRDSNHEDFWGQGTLVTVSSGGGGSGGGGSGGGGSEIVLTQSPATLSVSPGERATLSCRASQSVSSNLAWYQQKPGQAPRLLIYGASTRATGIPARFSGSGSGTEFTLTISSLQSEDFAVYYCQQYHTWPPVTFGCGTKVEIK

SEQ ID NO: 2485 - protein, 490 aa, Artificial Sequence
  Synthetic
EVQLVESGGGLVQPDRSLRLSCAASGFTFRDYAMHWVRQAPGKCLEWVSGIAWNSDSIGYADSVKGRFTISRDNAKNSLFLQMHSLRPEDTALYFCAKDTLYGSGSPRAFDIWGQGTMVTVSSGGGGQGGGGQGGGGQEIVLTQSPATLSVSPGERATLSCRASQSVNNNLAWYQQKPGQAPRLLIYGASTRATGIPARFSGSGSGTEFTLTISRLEPEDFAVYYCQQSNNWPITFGCGTRLEIKSGGGGQQVQLVQSGAEVKKPGASVKVSCKASGYSFTSYGITWVRQAPGQCLEWMGWISAYNGNTIYAQKLQGRVTMTTDTSTSTAYMELRSLRSDDTAVYYCVRDSNHEDFWGQGTLVTVSSGGGGQGGGGQGGGGQEIVLTQSPATLSVSPGERATLSCRASQSVSSNLAWYQQKPGQAPRLLIYGASTRATGIPARFSGSGSGTEFTLTISSLQSEDFAVYYCQQYHTWPPVTFGCGTKVEIK

SEQ ID NO: 2486 - protein, 745 aa, Artificial Sequence
  Synthetic
EVQLVESGGGLVQPDRSLRLSCAASGFTFRDYAMHWVRQAPGKCLEWVSGIAWNSDSIGYADSVKGRFTISRDNAKNSLFLQMHSLRPEDTALYFCAKDTLYGSGSPRAFDIWGQGTMVTVSSGGGGSGGGGSGGGGSEIVLTQSPATLSVSPGERATLSCRASQSVNNNLAWYQQKPGQAPRLLIYGASTRATGIPARFSGSGSGTEFTLTISRLEPEDFAVYYCQQSNNWPITFGCGTRLEIKSGGGGSQVQLVQSGAEVKKPGASVKVSCKASGYSFTSYGITWVRQAPGQCLEWMGWISAYNGNTIYAQKLQGRVTMTTDTSTSTAYMELRSLRSDDTAVYYCVRDSNHEDFWGQGTLVTVSSGGGGSGGGGSGGGGSEIVLTQSPATLSVSPGERATLSCRASQSVSSNLAWYQQKPGQAPRLLIYGASTRATGIPARFSGSGSGTEFTLTISSLQSEDFAVYYCQQYHTWPPVTFGCGTKVEIKSGGGGSEVQLVESGGGLVQPGGSLKLSCAASGFTFNKYAMNWVRQAPGKGLEWVARIRSKYNNYATYYADSVKDRFTISRDDSKNTAYLQMNNLKTEDTAVYYCVRHGNFGNSYISYWAYWGQGTLVTVSSGGGGSGGGGSGGGGSQTVVTQEPSLTVSPGGTVTLTCGSSTGAVTSGNYPNWVQQKPGQAPRGLIGGTKFLAPGTPARFSGSLLGGKAALTLSGVQPEDEAEYYCVLWYSNRWVFGGGTKLTVL

SEQ ID NO: 2487 - protein, 745 aa, Artificial Sequence
  Synthetic
EVQLVESGGGLVQPDRSLRLSCAASGFTFRDYAMHWVRQAPGKCLEWVSGIAWNSDSIGYADSVKGRFTISRDNAKNSLFLQMHSLRPEDTALYFCAKDTLYGSGSPRAFDIWGQGTMVTVSSGGGGQGGGGQGGGGQEIVLTQSPATLSVSPGERATLSCRASQSVNNNLAWYQQKPGQAPRLLIYGASTRATGIPARFSGSGSGTEFTLTISRLEPEDFAVYYCQQSNNWPITFGCGTRLEIKSGGGGQQVQLVQSGAEVKKPGASVKVSCKASGYSFTSYGITWVRQAPGQCLEWMGWISAYNGNTIYAQKLQGRVTMTTDTSTSTAYMELRSLRSDDTAVYYCVRDSNHEDFWGQGTLVTVSSGGGGQGGGGQGGGGQEIVLTQSPATLSVSPGERATLSCRASQSVSSNLAWYQQKPGQAPRLLIYGASTRATGIPARFSGSGSGTEFTLTISSLQSEDFAVYYCQQYHTWPPVTFGCGTKVEIKSGGGGQEVQLVESGGGLVQPGGSLKLSCAASGFTFNKYAMNWVRQAPGKGLEWVARIRSKYNNYATYYADSVKDRFTISRDDSKNTAYLQMNNLKTEDTAVYYCVRHGNFGNSYISYWAYWGQGTLVTVSSGGGGQGGGGQGGGGQQTVVTQEPSLTVSPGGTVTLTCGSSTGAVTSGNYPNWVQQKPGQAPRGLIGGTKFLAPGTPARFSGSLLGGKAALTLSGVQPEDEAEYYCVLWYSNRWVFGGGTKLTVL

SEQ ID NO: 2488 - protein, 745 aa, Artificial Sequence
  Synthetic
EVQLVESGGGLVQPDRSLRLSCAASGFTFRDYAMHWVRQAPGKCLEWVSGIAWNSDSIGYADSVKGRFTISRDNAKNSLFLQMHSLRPEDTALYFCAKDTLYGSGSPRAFDIWGQGTMVTVSSGGGGSGGGGSGGGGSEIVLTQSPATLSVSPGERATLSCRASQSVNNNLAWYQQKPGQAPRLLIYGASTRATGIPARFSGSGSGTEFTLTISRLEPEDFAVYYCQQSNNWPITFGCGTRLEIKSGGGGSQVQLVQSGAEVKKPGASVKVSCKASGYSFTSYGITWVRQAPGQCLEWMGWISAYNGNTIYAQKLQGRVTMTTDTSTSTAYMELRSLRSDDTAVYYCVRDSNHEDFWGQGTLVTVSSGGGGSGGGGSGGGGSEIVLTQSPATLSVSPGERATLSCRASQSVSSNLAWYQQKPGQAPRLLIYGASTRATGIPARFSGSGSGTEFTLTISSLQSEDFAVYYCQQYHTWPPVTFGCGTKVEIKSGGGGSEVQLVESGGGLVQPGGSLKLSCAASGFTFNKYAINWVRQAPGKGLEWVARIRSKYNNYATYYADAVKDRFTISRDDSKNTVYLQMNNLKTEDTAVYYCARAGNFGSSYISYWAYWGQGTLVTVSSGGGGSGGGGSGGGGSQTVVTQEPSLTVSPGGTVTITCGSSTGAVTSGNYPNWVQKKPGQAPRGLIGGTKFLAPGTPARFSGSLSGGKAALTLSGVQPEDEAEYYCVLWYSNRWVFGSGTKLTVL

SEQ ID NO: 2489 - protein, 745 aa, Artificial Sequence
  Synthetic
EVQLVESGGGLVQPDRSLRLSCAASGFTFRDYAMHWVRQAPGKCLEWVSGIAWNSDSIGYADSVKGRFTISRDNAKNSLFLQMHSLRPEDTALYFCAKDTLYGSGSPRAFDIWGQGTMVTVSSGGGGQGGGGQGGGGQEIVLTQSPATLSVSPGERATLSCRASQSVNNNLAWYQQKPGQAPRLLIYGASTRATGIPARFSGSGSGTEFTLTISRLEPEDFAVYYCQQSNNWPITFGCGTRLEIKSGGGGQQVQLVQSGAEVKKPGASVKVSCKASGYSFTSYGITWVRQAPGQCLEWMGWISAYNGNTIYAQKLQGRVTMTTDTSTSTAYMELRSLRSDDTAVYYCVRDSNHEDFWGQGTLVTVSSGGGGQGGGGQGGGGQEIVLTQSPATLSVSPGERATLSCRASQSVSSNLAWYQQKPGQAPRLLIYGASTRATGIPARFSGSGSGTEFTLTISSLQSEDFAVYYCQQYHTWPPVTFGCGTKVEIKSGGGGQEVQLVESGGGLVQPGGSLKLSCAASGFTFNKYAINWVRQAPGKGLEWVARIRSKYNNYATYYADAVKDRFTISRDDSKNTVYLQMNNLKTEDTAVYYCARAGNFGSSYISYWAYWGQGTLVTVSSGGGGQGGGGQGGGGQQTVVTQEPSLTVSPGGTVTITCGSSTGAVTSGNYPNWVQKKPGQAPRGLIGGTKFLAPGTPARFSGSLSGGKAALTLSGVQPEDEAEYYCVLWYSNRWVFGSGTKLTVL

SEQ ID NO: 2490 - protein, 1233 aa, Artificial Sequence
  Synthetic
EVQLVESGGGLVQPDRSLRLSCAASGFTFRDYAMHWVRQAPGKCLEWVSGIAWNSDSIGYADSVKGRFTISRDNAKNSLFLQMHSLRPEDTALYFCAKDTLYGSGSPRAFDIWGQGTMVTVSSGGGGSGGGGSGGGGSEIVLTQSPATLSVSPGERATLSCRASQSVNNNLAWYQQKPGQAPRLLIYGASTRATGIPARFSGSGSGTEFTLTISRLEPEDFAVYYCQQSNNWPITFGCGTRLEIKSGGGGSQVQLVQSGAEVKKPGASVKVSCKASGYSFTSYGITWVRQAPGQCLEWMGWISAYNGNTIYAQKLQGRVTMTTDTSTSTAYMELRSLRSDDTAVYYCVRDSNHEDFWGQGTLVTVSSGGGGSGGGGSGGGGSEIVLTQSPATLSVSPGERATLSCRASQSVSSNLAWYQQKPGQAPRLLIYGASTRATGIPARFSGSGSGTEFTLTISSLQSEDFAVYYCQQYHTWPPVTFGCGTKVEIKSGGGGSEVQLVESGGGLVQPGGSLKLSCAASGFTFNKYAMNWVRQAPGKGLEWVARIRSKYNNYATYYADSVKDRFTISRDDSKNTAYLQMNNLKTEDTAVYYCVRHGNFGNSYISYWAYWGQGTLVTVSSGGGGSGGGGSGGGGSQTVVTQEPSLTVSPGGTVTLTCGSSTGAVTSGNYPNWVQQKPGQAPRGLIGGTKFLAPGTPARFSGSLLGGKAALTLSGVQPEDEAEYYCVLWYSNRWVFGGGTKLTVLGGGGDKTHTCPPCPAPELLGGPSVFLFPPKPKDTLMISRTPEVTCVVVDVSHEDPEVKFNWYVDGVEVHNAKTKPCEEQYGSTYRCVSVLTVLHQDWLNGKEYKCKVSNKALPAPIEKTISKAKGQPREPQVYTLPPSREEMTKNQVSLTCLVKGFYPSDIAVEWESNGQPENNYKTTPPVLDSDGSFFLYSKLTVDKSRWQQGNVFSCSVMHEALHNHYTQKSLSLSPGKGGGGSGGGGSGGGGSGGGGSGGGGSGGGGSDKTHTCPPCPAPELLGGPSVFLFPPKPKDTLMISRTPEVTCVVVDVSHEDPEVKFNWYVDGVEVHNAKTKPCEEQYGSTYRCVSVLTVLHQDWLNGKEYKCKVSNKALPAPIEKTISKAKGQPREPQVYTLPPSREEMTKNQVSLTCLVKGFYPSDIAVEWESNGQPENNYKTTPPVLDSDGSFFLYSKLTVDKSRWQQGNVFSCSVMHEALHNHYTQKSLSLSPGK

SEQ ID NO: 2491 - protein, 1223 aa, Artificial Sequence
  Synthetic
EVQLVESGGGLVQPDRSLRLSCAASGFTFRDYAMHWVRQAPGKCLEWVSGIAWNSDSIGYADSVKGRFTISRDNAKNSLFLQMHSLRPEDTALYFCAKDTLYGSGSPRAFDIWGQGTMVTVSSGGGGQGGGGQGGGGQEIVLTQSPATLSVSPGERATLSCRASQSVNNNLAWYQQKPGQAPRLLIYGASTRATGIPARFSGSGSGTEFTLTISRLEPEDFAVYYCQQSNNWPITFGCGTRLEIKSGGGGQQVQLVQSGAEVKKPGASVKVSCKASGYSFTSYGITWVRQAPGQCLEWMGWISAYNGNTIYAQKLQGRVTMTTDTSTSTAYMELRSLRSDDTAVYYCVRDSNHEDFWGQGTLVTVSSGGGGQGGGGQGGGGQEIVLTQSPATLSVSPGERATLSCRASQSVSSNLAWYQQKPGQAPRLLIYGASTRATGIPARFSGSGSGTEFTLTISSLQSEDFAVYYCQQYHTWPPVTFGCGTKVEIKSGGGGQEVQLVESGGGLVQPGGSLKLSCAASGFTFNKYAMNWVRQAPGKGLEWVARIRSKYNNYATYYADSVKDRFTISRDDSKNTAYLQMNNLKTEDTAVYYCVRHGNFGNSYISYWAYWGQGTLVTVSSGGGGQGGGGQGGGGQQTVVTQEPSLTVSPGGTVTLTCGSSTGAVTSGNYPNWVQQKPGQAPRGLIGGTKFLAPGTPARFSGSLLGGKAALTLSGVQPEDEAEYYCVLWYSNRWVFGGGTKLTVLGGGGCPPCPAPELLGGPSVFLFPPKPKDTLMISRTPEVTCVVVDVSHEEPEVKFNWYVDGVEVHNAKTKPCEEQYGSTYRCVSVLTVLHQDWLNGKEYKCKVSNKALPAPIEKTISKAKGQPREPQVYTLPPSREEMTKNQVSLTCLVKGFYPSDIAVEWESNGQPENNYKTTPPVLDSDGSFFLYSKLTVDKSRWQQGNVFSCSVMHEALHNHYTQKSLSLSPGKGGGGQGGGGQGGGGQGGGGQGGGGQGGGGQCPPCPAPELLGGPSVFLFPPKPKDTLMISRTPEVTCVVVDVSHEEPEVKFNWYVDGVEVHNAKTKPCEEQYGSTYRCVSVLTVLHQDWLNGKEYKCKVSNKALPAPIEKTISKAKGQPREPQVYTLPPSREEMTKNQVSLTCLVKGFYPSDIAVEWESNGQPENNYKTTPPVLDSDGSFFLYSKLTVDKSRWQQGNVFSCSVMHEALHNHYTQKSLSLSPGK

SEQ ID NO: 2492 - protein, 1233 aa, Artificial Sequence
  Synthetic
EVQLVESGGGLVQPDRSLRLSCAASGFTFRDYAMHWVRQAPGKCLEWVSGIAWNSDSIGYADSVKGRFTISRDNAKNSLFLQMHSLRPEDTALYFCAKDTLYGSGSPRAFDIWGQGTMVTVSSGGGGSGGGGSGGGGSEIVLTQSPATLSVSPGERATLSCRASQSVNNNLAWYQQKPGQAPRLLIYGASTRATGIPARFSGSGSGTEFTLTISRLEPEDFAVYYCQQSNNWPITFGCGTRLEIKSGGGGSQVQLVQSGAEVKKPGASVKVSCKASGYSFTSYGITWVRQAPGQCLEWMGWISAYNGNTIYAQKLQGRVTMTTDTSTSTAYMELRSLRSDDTAVYYCVRDSNHEDFWGQGTLVTVSSGGGGSGGGGSGGGGSEIVLTQSPATLSVSPGERATLSCRASQSVSSNLAWYQQKPGQAPRLLIYGASTRATGIPARFSGSGSGTEFTLTISSLQSEDFAVYYCQQYHTWPPVTFGCGTKVEIKSGGGGSEVQLVESGGGLVQPGGSLKLSCAASGFTFNKYAINWVRQAPGKGLEWVARIRSKYNNYATYYADAVKDRFTISRDDSKNTVYLQMNNLKTEDTAVYYCARAGNFGSSYISYWAYWGQGTLVTVSSGGGGSGGGGSGGGGSQTVVTQEPSLTVSPGGTVTITCGSSTGAVTSGNYPNWVQKKPGQAPRGLIGGTKFLAPGTPARFSGSLSGGKAALTLSGVQPEDEAEYYCVLWYSNRWVFGSGTKLTVLGGGGDKTHTCPPCPAPELLGGPSVFLFPPKPKDTLMISRTPEVTCVVVDVSHEDPEVKFNWYVDGVEVHNAKTKPCEEQYGSTYRCVSVLTVLHQDWLNGKEYKCKVSNKALPAPIEKTISKAKGQPREPQVYTLPPSREEMTKNQVSLTCLVKGFYPSDIAVEWESNGQPENNYKTTPPVLDSDGSFFLYSKLTVDKSRWQQGNVFSCSVMHEALHNHYTQKSLSLSPGKGGGGSGGGGSGGGGSGGGGSGGGGSGGGGSDKTHTCPPCPAPELLGGPSVFLFPPKPKDTLMISRTPEVTCVVVDVSHEDPEVKFNWYVDGVEVHNAKTKPCEEQYGSTYRCVSVLTVLHQDWLNGKEYKCKVSNKALPAPIEKTISKAKGQPREPQVYTLPPSREEMTKNQVSLTCLVKGFYPSDIAVEWESNGQPENNYKTTPPVLDSDGSFFLYSKLTVDKSRWQQGNVFSCSVMHEALHNHYTQKSLSLSPGK

SEQ ID NO: 2493 - protein, 1223 aa, Artificial Sequence
  Synthetic
EVQLVESGGGLVQPDRSLRLSCAASGFTFRDYAMHWVRQAPGKCLEWVSGIAWNSDSIGYADSVKGRFTISRDNAKNSLFLQMHSLRPEDTALYFCAKDTLYGSGSPRAFDIWGQGTMVTVSSGGGGQGGGGQGGGGQEIVLTQSPATLSVSPGERATLSCRASQSVNNNLAWYQQKPGQAPRLLIYGASTRATGIPARFSGSGSGTEFTLTISRLEPEDFAVYYCQQSNNWPITFGCGTRLEIKSGGGGQQVQLVQSGAEVKKPGASVKVSCKASGYSFTSYGITWVRQAPGQCLEWMGWISAYNGNTIYAQKLQGRVTMTTDTSTSTAYMELRSLRSDDTAVYYCVRDSNHEDFWGQGTLVTVSSGGGGQGGGGQGGGGQEIVLTQSPATLSVSPGERATLSCRASQSVSSNLAWYQQKPGQAPRLLIYGASTRATGIPARFSGSGSGTEFTLTISSLQSEDFAVYYCQQYHTWPPVTFGCGTKVEIKSGGGGQEVQLVESGGGLVQPGGSLKLSCAASGFTFNKYAINWVRQAPGKGLEWVARIRSKYNNYATYYADAVKDRFTISRDDSKNTVYLQMNNLKTEDTAVYYCARAGNFGSSYISYWAYWGQGTLVTVSSGGGGQGGGGQGGGGQQTVVTQEPSLTVSPGGTVTITCGSSTGAVTSGNYPNWVQKKPGQAPRGLIGGTKFLAPGTPARFSGSLSGGKAALTLSGVQPEDEAEYYCVLWYSNRWVFGSGTKLTVLGGGGCPPCPAPELLGGPSVFLFPPKPKDTLMISRTPEVTCVVVDVSHEEPEVKFNWYVDGVEVHNAKTKPCEEQYGSTYRCVSVLTVLHQDWLNGKEYKCKVSNKALPAPIEKTISKAKGQPREPQVYTLPPSREEMTKNQVSLTCLVKGFYPSDIAVEWESNGQPENNYKTTPPVLDSDGSFFLYSKLTVDKSRWQQGNVFSCSVMHEALHNHYTQKSLSLSPGKGGGGQGGGGQGGGGQGGGGQGGGGQGGGGQCPPCPAPELLGGPSVFLFPPKPKDTLMISRTPEVTCVVVDVSHEEPEVKFNWYVDGVEVHNAKTKPCEEQYGSTYRCVSVLTVLHQDWLNGKEYKCKVSNKALPAPIEKTISKAKGQPREPQVYTLPPSREEMTKNQVSLTCLVKGFYPSDIAVEWESNGQPENNYKTTPPVLDSDGSFFLYSKLTVDKSRWQQGNVFSCSVMHEALHNHYTQKSLSLSPGK

SEQ ID NO: 2494 - protein, 492 aa, Artificial Sequence
  Synthetic
EVQLVESGGGLVQPDRSLRLSCAASGFTFRDYAMHWVRQAPGKCLEWVSGIAWNSDSIGYADSVKGRFTISRDNAKNSLFLQMHSLRPEDTALYFCAKDTLYGSGSPRAFDIWGQGTMVTVSSGGGGSGGGGSGGGGSEIVLTQSPATLSVSPGERATLSCRASQSVNNNLAWYQQKPGQAPRLLIYGASTRATGIPARFSGSGSGTEFTLTISRLEPEDFAVYYCQQSNNWPITFGCGTRLEIKSGGGGSQVQLVQSGAEVKKPGESLKISCKGSGYSFTSYGISWVRQAPGQCLEWMGWISAYNGNTIYAQKLQGRVTMTTDTSTSTAYMELRRLRSDDTAVYYCARDPGVTGDDYWGQGTLVTVSSGGGGSGGGGSGGGGSEIVLTQSPATLSVSPGERATLSCRASLSVSSNLAWYQQKPGQAPRLLIYGASTRATGIPARFSGSGSGTEFTLTISSLQSEDFAVYFCQQYHSWPALTFGCGTKVEIK

SEQ ID NO: 2495 - protein, 492 aa, Artificial Sequence
  Synthetic
EVQLVESGGGLVQPDRSLRLSCAASGFTFRDYAMHWVRQAPGKCLEWVSGIAWNSDSIGYADSVKGRFTISRDNAKNSLFLQMHSLRPEDTALYFCAKDTLYGSGSPRAFDIWGQGTMVTVSSGGGGQGGGGQGGGGQEIVLTQSPATLSVSPGERATLSCRASQSVNNNLAWYQQKPGQAPRLLIYGASTRATGIPARFSGSGSGTEFTLTISRLEPEDFAVYYCQQSNNWPITFGCGTRLEIKSGGGGQQVQLVQSGAEVKKPGESLKISCKGSGYSFTSYGISWVRQAPGQCLEWMGWISAYNGNTIYAQKLQGRVTMTTDTSTSTAYMELRRLRSDDTAVYYCARDPGVTGDDYWGQGTLVTVSSGGGGQGGGGQGGGGQEIVLTQSPATLSVSPGERATLSCRASLSVSSNLAWYQQKPGQAPRLLIYGASTRATGIPARFSGSGSGTEFTLTISSLQSEDFAVYFCQQYHSWPALTFGCGTKVEIK

SEQ ID NO: 2496 - protein, 747 aa, Artificial Sequence
  Synthetic
EVQLVESGGGLVQPDRSLRLSCAASGFTFRDYAMHWVRQAPGKCLEWVSGIAWNSDSIGYADSVKGRFTISRDNAKNSLFLQMHSLRPEDTALYFCAKDTLYGSGSPRAFDIWGQGTMVTVSSGGGGSGGGGSGGGGSEIVLTQSPATLSVSPGERATLSCRASQSVNNNLAWYQQKPGQAPRLLIYGASTRATGIPARFSGSGSGTEFTLTISRLEPEDFAVYYCQQSNNWPITFGCGTRLEIKSGGGGSQVQLVQSGAEVKKPGESLKISCKGSGYSFTSYGISWVRQAPGQCLEWMGWISAYNGNTIYAQKLQGRVTMTTDTSTSTAYMELRRLRSDDTAVYYCARDPGVTGDDYWGQGTLVTVSSGGGGSGGGGSGGGGSEIVLTQSPATLSVSPGERATLSCRASLSVSSNLAWYQQKPGQAPRLLIYGASTRATGIPARFSGSGSGTEFTLTISSLQSEDFAVYFCQQYHSWPALTFGCGTKVEIKSGGGGSEVQLVESGGGLVQPGGSLKLSCAASGFTFNKYAMNWVRQAPGKGLEWVARIRSKYNNYATYYADSVKDRFTISRDDSKNTAYLQMNNLKTEDTAVYYCVRHGNFGNSYISYWAYWGQGTLVTVSSGGGGSGGGGSGGGGSQTVVTQEPSLTVSPGGTVTLTCGSSTGAVTSGNYPNWVQQKPGQAPRGLIGGTKFLAPGTPARFSGSLLGGKAALTLSGVQPEDEAEYYCVLWYSNRWVFGGGTKLTVL

SEQ ID NO: 2497 - protein, 747 aa, Artificial Sequence
  Synthetic
EVQLVESGGGLVQPDRSLRLSCAASGFTFRDYAMHWVRQAPGKCLEWVSGIAWNSDSIGYADSVKGRFTISRDNAKNSLFLQMHSLRPEDTALYFCAKDTLYGSGSPRAFDIWGQGTMVTVSSGGGGQGGGGQGGGGQEIVLTQSPATLSVSPGERATLSCRASQSVNNNLAWYQQKPGQAPRLLIYGASTRATGIPARFSGSGSGTEFTLTISRLEPEDFAVYYCQQSNNWPITFGCGTRLEIKSGGGGQQVQLVQSGAEVKKPGESLKISCKGSGYSFTSYGISWVRQAPGQCLEWMGWISAYNGNTIYAQKLQGRVTMTTDTSTSTAYMELRRLRSDDTAVYYCARDPGVTGDDYWGQGTLVTVSSGGGGQGGGGQGGGGQEIVLTQSPATLSVSPGERATLSCRASLSVSSNLAWYQQKPGQAPRLLIYGASTRATGIPARFSGSGSGTEFTLTISSLQSEDFAVYFCQQYHSWPALTFGCGTKVEIKSGGGGQEVQLVESGGGLVQPGGSLKLSCAASGFTFNKYAMNWVRQAPGKGLEWVARIRSKYNNYATYYADSVKDRFTISRDDSKNTAYLQMNNLKTEDTAVYYCVRHGNFGNSYISYWAYWGQGTLVTVSSGGGGQGGGGQGGGGQQTVVTQEPSLTVSPGGTVTLTCGSSTGAVTSGNYPNWVQQKPGQAPRGLIGGTKFLAPGTPARFSGSLLGGKAALTLSGVQPEDEAEYYCVLWYSNRWVFGGGTKLTVL

SEQ ID NO: 2498 - protein, 747 aa, Artificial Sequence
  Synthetic
EVQLVESGGGLVQPDRSLRLSCAASGFTFRDYAMHWVRQAPGKCLEWVSGIAWNSDSIGYADSVKGRFTISRDNAKNSLFLQMHSLRPEDTALYFCAKDTLYGSGSPRAFDIWGQGTMVTVSSGGGGSGGGGSGGGGSEIVLTQSPATLSVSPGERATLSCRASQSVNNNLAWYQQKPGQAPRLLIYGASTRATGIPARFSGSGSGTEFTLTISRLEPEDFAVYYCQQSNNWPITFGCGTRLEIKSGGGGSQVQLVQSGAEVKKPGESLKISCKGSGYSFTSYGISWVRQAPGQCLEWMGWISAYNGNTIYAQKLQGRVTMTTDTSTSTAYMELRRLRSDDTAVYYCARDPGVTGDDYWGQGTLVTVSSGGGGSGGGGSGGGGSEIVLTQSPATLSVSPGERATLSCRASLSVSSNLAWYQQKPGQAPRLLIYGASTRATGIPARFSGSGSGTEFTLTISSLQSEDFAVYFCQQYHSWPALTFGCGTKVEIKSGGGGSEVQLVESGGGLVQPGGSLKLSCAASGFTFNKYAINWVRQAPGKGLEWVARIRSKYNNYATYYADAVKDRFTISRDDSKNTVYLQMNNLKTEDTAVYYCARAGNFGSSYISYWAYWGQGTLVTVSSGGGGSGGGGSGGGGSQTVVTQEPSLTVSPGGTVTITCGSSTGAVTSGNYPNWVQKKPGQAPRGLIGGTKFLAPGTPARFSGSLSGGKAALTLSGVQPEDEAEYYCVLWYSNRWVFGSGTKLTVL

SEQ ID NO: 2499 - protein, 747 aa, Artificial Sequence
  Synthetic
EVQLVESGGGLVQPDRSLRLSCAASGFTFRDYAMHWVRQAPGKCLEWVSGIAWNSDSIGYADSVKGRFTISRDNAKNSLFLQMHSLRPEDTALYFCAKDTLYGSGSPRAFDIWGQGTMVTVSSGGGGQGGGGQGGGGQEIVLTQSPATLSVSPGERATLSCRASQSVNNNLAWYQQKPGQAPRLLIYGASTRATGIPARFSGSGSGTEFTLTISRLEPEDFAVYYCQQSNNWPITFGCGTRLEIKSGGGGQQVQLVQSGAEVKKPGESLKISCKGSGYSFTSYGISWVRQAPGQCLEWMGWISAYNGNTIYAQKLQGRVTMTTDTSTSTAYMELRRLRSDDTAVYYCARDPGVTGDDYWGQGTLVTVSSGGGGQGGGGQGGGGQEIVLTQSPATLSVSPGERATLSCRASLSVSSNLAWYQQKPGQAPRLLIYGASTRATGIPARFSGSGSGTEFTLTISSLQSEDFAVYFCQQYHSWPALTFGCGTKVEIKSGGGGQEVQLVESGGGLVQPGGSLKLSCAASGFTFNKYAINWVRQAPGKGLEWVARIRSKYNNYATYYADAVKDRFTISRDDSKNTVYLQMNNLKTEDTAVYYCARAGNFGSSYISYWAYWGQGTLVTVSSGGGGQGGGGQGGGGQQTVVTQEPSLTVSPGGTVTITCGSSTGAVTSGNYPNWVQKKPGQAPRGLIGGTKFLAPGTPARFSGSLSGGKAALTLSGVQPEDEAEYYCVLWYSNRWVFGSGTKLTVL

SEQ ID NO: 2500 - protein, 1235 aa, Artificial Sequence
  Synthetic
EVQLVESGGGLVQPDRSLRLSCAASGFTFRDYAMHWVRQAPGKCLEWVSGIAWNSDSIGYADSVKGRFTISRDNAKNSLFLQMHSLRPEDTALYFCAKDTLYGSGSPRAFDIWGQGTMVTVSSGGGGSGGGGSGGGGSEIVLTQSPATLSVSPGERATLSCRASQSVNNNLAWYQQKPGQAPRLLIYGASTRATGIPARFSGSGSGTEFTLTISRLEPEDFAVYYCQQSNNWPITFGCGTRLEIKSGGGGSQVQLVQSGAEVKKPGESLKISCKGSGYSFTSYGISWVRQAPGQCLEWMGWISAYNGNTIYAQKLQGRVTMTTDTSTSTAYMELRRLRSDDTAVYYCARDPGVTGDDYWGQGTLVTVSSGGGGSGGGGSGGGGSEIVLTQSPATLSVSPGERATLSCRASLSVSSNLAWYQQKPGQAPRLLIYGASTRATGIPARFSGSGSGTEFTLTISSLQSEDFAVYFCQQYHSWPALTFGCGTKVEIKSGGGGSEVQLVESGGGLVQPGGSLKLSCAASGFTFNKYAMNWVRQAPGKGLEWVARIRSKYNNYATYYADSVKDRFTISRDDSKNTAYLQMNNLKTEDTAVYYCVRHGNFGNSYISYWAYWGQGTLVTVSSGGGGSGGGGSGGGGSQTVVTQEPSLTVSPGGTVTLTCGSSTGAVTSGNYPNWVQQKPGQAPRGLIGGTKFLAPGTPARFSGSLLGGKAALTLSGVQPEDEAEYYCVLWYSNRWVFGGGTKLTVLGGGGDKTHTCPPCPAPELLGGPSVFLFPPKPKDTLMISRTPEVTCVVVDVSHEDPEVKFNWYVDGVEVHNAKTKPCEEQYGSTYRCVSVLTVLHQDWLNGKEYKCKVSNKALPAPIEKTISKAKGQPREPQVYTLPPSREEMTKNQVSLTCLVKGFYPSDIAVEWESNGQPENNYKTTPPVLDSDGSFFLYSKLTVDKSRWQQGNVFSCSVMHEALHNHYTQKSLSLSPGKGGGGSGGGGSGGGGSGGGGSGGGGSGGGGSDKTHTCPPCPAPELLGGPSVFLFPPKPKDTLMISRTPEVTCVVVDVSHEDPEVKFNWYVDGVEVHNAKTKPCEEQYGSTYRCVSVLTVLHQDWLNGKEYKCKVSNKALPAPIEKTISKAKGQPREPQVYTLPPSREEMTKNQVSLTCLVKGFYPSDIAVEWESNGQPENNYKTTPPVLDSDGSFFLYSKLTVDKSRWQQGNVFSCSVMHEALHNHYTQKSLSLSPGK

SEQ ID NO: 2501 - protein, 1225 aa, Artificial Sequence
  Synthetic
EVQLVESGGGLVQPDRSLRLSCAASGFTFRDYAMHWVRQAPGKCLEWVSGIAWNSDSIGYADSVKGRFTISRDNAKNSLFLQMHSLRPEDTALYFCAKDTLYGSGSPRAFDIWGQGTMVTVSSGGGGQGGGGQGGGGQEIVLTQSPATLSVSPGERATLSCRASQSVNNNLAWYQQKPGQAPRLLIYGASTRATGIPARFSGSGSGTEFTLTISRLEPEDFAVYYCQQSNNWPITFGCGTRLEIKSGGGGQQVQLVQSGAEVKKPGESLKISCKGSGYSFTSYGISWVRQAPGQCLEWMGWISAYNGNTIYAQKLQGRVTMTTDTSTSTAYMELRRLRSDDTAVYYCARDPGVTGDDYWGQGTLVTVSSGGGGQGGGGQGGGGQEIVLTQSPATLSVSPGERATLSCRASLSVSSNLAWYQQKPGQAPRLLIYGASTRATGIPARFSGSGSGTEFTLTISSLQSEDFAVYFCQQYHSWPALTFGCGTKVEIKSGGGGQEVQLVESGGGLVQPGGSLKLSCAASGFTFNKYAMNWVRQAPGKGLEWVARIRSKYNNYATYYADSVKDRFTISRDDSKNTAYLQMNNLKTEDTAVYYCVRHGNFGNSYISYWAYWGQGTLVTVSSGGGGQGGGGQGGGGQQTVVTQEPSLTVSPGGTVTLTCGSSTGAVTSGNYPNWVQQKPGQAPRGLIGGTKFLAPGTPARFSGSLLGGKAALTLSGVQPEDEAEYYCVLWYSNRWVFGGGTKLTVLGGGGCPPCPAPELLGGPSVFLFPPKPKDTLMISRTPEVTCVVVDVSHEEPEVKFNWYVDGVEVHNAKTKPCEEQYGSTYRCVSVLTVLHQDWLNGKEYKCKVSNKALPAPIEKTISKAKGQPREPQVYTLPPSREEMTKNQVSLTCLVKGFYPSDIAVEWESNGQPENNYKTTPPVLDSDGSFFLYSKLTVDKSRWQQGNVFSCSVMHEALHNHYTQKSLSLSPGKGGGGQGGGGQGGGGQGGGGQGGGGQGGGGQCPPCPAPELLGGPSVFLFPPKPKDTLMISRTPEVTCVVVDVSHEEPEVKFNWYVDGVEVHNAKTKPCEEQYGSTYRCVSVLTVLHQDWLNGKEYKCKVSNKALPAPIEKTISKAKGQPREPQVYTLPPSREEMTKNQVSLTCLVKGFYPSDIAVEWESNGQPENNYKTTPPVLDSDGSFFLYSKLTVDKSRWQQGNVFSCSVMHEALHNHYTQKSLSLSPGK

SEQ ID NO: 2502 - protein, 1235 aa, Artificial Sequence
  Synthetic
EVQLVESGGGLVQPDRSLRLSCAASGFTFRDYAMHWVRQAPGKCLEWVSGIAWNSDSIGYADSVKGRFTISRDNAKNSLFLQMHSLRPEDTALYFCAKDTLYGSGSPRAFDIWGQGTMVTVSSGGGGSGGGGSGGGGSEIVLTQSPATLSVSPGERATLSCRASQSVNNNLAWYQQKPGQAPRLLIYGASTRATGIPARFSGSGSGTEFTLTISRLEPEDFAVYYCQQSNNWPITFGCGTRLEIKSGGGGSQVQLVQSGAEVKKPGESLKISCKGSGYSFTSYGISWVRQAPGQCLEWMGWISAYNGNTIYAQKLQGRVTMTTDTSTSTAYMELRRLRSDDTAVYYCARDPGVTGDDYWGQGTLVTVSSGGGGSGGGGSGGGGSEIVLTQSPATLSVSPGERATLSCRASLSVSSNLAWYQQKPGQAPRLLIYGASTRATGIPARFSGSGSGTEFTLTISSLQSEDFAVYFCQQYHSWPALTFGCGTKVEIKSGGGGSEVQLVESGGGLVQPGGSLKLSCAASGFTFNKYAINWVRQAPGKGLEWVARIRSKYNNYATYYADAVKDRFTISRDDSKNTVYLQMNNLKTEDTAVYYCARAGNFGSSYISYWAYWGQGTLVTVSSGGGGSGGGGSGGGGSQTVVTQEPSLTVSPGGTVTITCGSSTGAVTSGNYPNWVQKKPGQAPRGLIGGTKFLAPGTPARFSGSLSGGKAALTLSGVQPEDEAEYYCVLWYSNRWVFGSGTKLTVLGGGGDKTHTCPPCPAPELLGGPSVFLFPPKPKDTLMISRTPEVTCVVVDVSHEDPEVKFNWYVDGVEVHNAKTKPCEEQYGSTYRCVSVLTVLHQDWLNGKEYKCKVSNKALPAPIEKTISKAKGQPREPQVYTLPPSREEMTKNQVSLTCLVKGFYPSDIAVEWESNGQPENNYKTTPPVLDSDGSFFLYSKLTVDKSRWQQGNVFSCSVMHEALHNHYTQKSLSLSPGKGGGGSGGGGSGGGGSGGGGSGGGGSGGGGSDKTHTCPPCPAPELLGGPSVFLFPPKPKDTLMISRTPEVTCVVVDVSHEDPEVKFNWYVDGVEVHNAKTKPCEEQYGSTYRCVSVLTVLHQDWLNGKEYKCKVSNKALPAPIEKTISKAKGQPREPQVYTLPPSREEMTKNQVSLTCLVKGFYPSDIAVEWESNGQPENNYKTTPPVLDSDGSFFLYSKLTVDKSRWQQGNVFSCSVMHEALHNHYTQKSLSLSPGK

SEQ ID NO: 2503 - protein, 1225 aa, Artificial Sequence
  Synthetic
EVQLVESGGGLVQPDRSLRLSCAASGFTFRDYAMHWVRQAPGKCLEWVSGIAWNSDSIGYADSVKGRFTISRDNAKNSLFLQMHSLRPEDTALYFCAKDTLYGSGSPRAFDIWGQGTMVTVSSGGGGQGGGGQGGGGQEIVLTQSPATLSVSPGERATLSCRASQSVNNNLAWYQQKPGQAPRLLIYGASTRATGIPARFSGSGSGTEFTLTISRLEPEDFAVYYCQQSNNWPITFGCGTRLEIKSGGGGQQVQLVQSGAEVKKPGESLKISCKGSGYSFTSYGISWVRQAPGQCLEWMGWISAYNGNTIYAQKLQGRVTMTTDTSTSTAYMELRRLRSDDTAVYYCARDPGVTGDDYWGQGTLVTVSSGGGGQGGGGQGGGGQEIVLTQSPATLSVSPGERATLSCRASLSVSSNLAWYQQKPGQAPRLLIYGASTRATGIPARFSGSGSGTEFTLTISSLQSEDFAVYFCQQYHSWPALTFGCGTKVEIKSGGGGQEVQLVESGGGLVQPGGSLKLSCAASGFTFNKYAINWVRQAPGKGLEWVARIRSKYNNYATYYADAVKDRFTISRDDSKNTVYLQMNNLKTEDTAVYYCARAGNFGSSYISYWAYWGQGTLVTVSSGGGGQGGGGQGGGGQQTVVTQEPSLTVSPGGTVTITCGSSTGAVTSGNYPNWVQKKPGQAPRGLIGGTKFLAPGTPARFSGSLSGGKAALTLSGVQPEDEAEYYCVLWYSNRWVFGSGTKLTVLGGGGCPPCPAPELLGGPSVFLFPPKPKDTLMISRTPEVTCVVVDVSHEEPEVKFNWYVDGVEVHNAKTKPCEEQYGSTYRCVSVLTVLHQDWLNGKEYKCKVSNKALPAPIEKTISKAKGQPREPQVYTLPPSREEMTKNQVSLTCLVKGFYPSDIAVEWESNGQPENNYKTTPPVLDSDGSFFLYSKLTVDKSRWQQGNVFSCSVMHEALHNHYTQKSLSLSPGKGGGGQGGGGQGGGGQGGGGQGGGGQGGGGQCPPCPAPELLGGPSVFLFPPKPKDTLMISRTPEVTCVVVDVSHEEPEVKFNWYVDGVEVHNAKTKPCEEQYGSTYRCVSVLTVLHQDWLNGKEYKCKVSNKALPAPIEKTISKAKGQPREPQVYTLPPSREEMTKNQVSLTCLVKGFYPSDIAVEWESNGQPENNYKTTPPVLDSDGSFFLYSKLTVDKSRWQQGNVFSCSVMHEALHNHYTQKSLSLSPGK

SEQ ID NO: 2504 - protein, 490 aa, Artificial Sequence
  Synthetic
EVQLVESGGGLVQPDRSLRLSCAASGFTFRDYAMHWVRQAPGKCLEWVSGIAWNSDSIGYADSVKGRFTISRDNAKNSLFLQMHSLRPEDTALYFCAKDTLYGSGSPRAFDIWGQGTMVTVSSGGGGSGGGGSGGGGSEIVLTQSPATLSVSPGERATLSCRASQSVNNNLAWYQQKPGQAPRLLIYGASTRATGIPARFSGSGSGTEFTLTISRLEPEDFAVYYCQQSNNWPITFGCGTRLEIKSGGGGSQVQLVQSGAEVKKPGASVKVSCKTSGYPFTSYGISWVRQAPGQCLEWMGWISPYSGAPTYAQKVQGRVTMTTDTSTTTAYMELRSLRSDDTAVYYCVRDGLEEDYWGQGTLVTVSSGGGGSGGGGSGGGGSEIVLTQSPATLSVSPGEGATLSCRASQSVSSNLAWYQQSPGQAPRLLIYGASTRATGIPARFSGSGSGTEFTLTISSLQSEDFAVYYCQQYHSWPALTFGCGTKVDIK

SEQ ID NO: 2505 - protein, 490 aa, Artificial Sequence
  Synthetic
EVQLVESGGGLVQPDRSLRLSCAASGFTFRDYAMHWVRQAPGKCLEWVSGIAWNSDSIGYADSVKGRFTISRDNAKNSLFLQMHSLRPEDTALYFCAKDTLYGSGSPRAFDIWGQGTMVTVSSGGGGQGGGGQGGGGQEIVLTQSPATLSVSPGERATLSCRASQSVNNNLAWYQQKPGQAPRLLIYGASTRATGIPARFSGSGSGTEFTLTISRLEPEDFAVYYCQQSNNWPITFGCGTRLEIKSGGGGQQVQLVQSGAEVKKPGASVKVSCKTSGYPFTSYGISWVRQAPGQCLEWMGWISPYSGAPTYAQKVQGRVTMTTDTSTTTAYMELRSLRSDDTAVYYCVRDGLEEDYWGQGTLVTVSSGGGGQGGGGQGGGGQEIVLTQSPATLSVSPGEGATLSCRASQSVSSNLAWYQQSPGQAPRLLIYGASTRATGIPARFSGSGSGTEFTLTISSLQSEDFAVYYCQQYHSWPALTFGCGTKVDIK

SEQ ID NO: 2506 - protein, 745 aa, Artificial Sequence
  Synthetic
EVQLVESGGGLVQPDRSLRLSCAASGFTFRDYAMHWVRQAPGKCLEWVSGIAWNSDSIGYADSVKGRFTISRDNAKNSLFLQMHSLRPEDTALYFCAKDTLYGSGSPRAFDIWGQGTMVTVSSGGGGSGGGGSGGGGSEIVLTQSPATLSVSPGERATLSCRASQSVNNNLAWYQQKPGQAPRLLIYGASTRATGIPARFSGSGSGTEFTLTISRLEPEDFAVYYCQQSNNWPITFGCGTRLEIKSGGGGSQVQLVQSGAEVKKPGASVKVSCKTSGYPFTSYGISWVRQAPGQCLEWMGWISPYSGAPTYAQKVQGRVTMTTDTSTTTAYMELRSLRSDDTAVYYCVRDGLEEDYWGQGTLVTVSSGGGGSGGGGSGGGGSEIVLTQSPATLSVSPGEGATLSCRASQSVSSNLAWYQQSPGQAPRLLIYGASTRATGIPARFSGSGSGTEFTLTISSLQSEDFAVYYCQQYHSWPALTFGCGTKVDIKSGGGGSEVQLVESGGGLVQPGGSLKLSCAASGFTFNKYAMNWVRQAPGKGLEWVARIRSKYNNYATYYADSVKDRFTISRDDSKNTAYLQMNNLKTEDTAVYYCVRHGNFGNSYISYWAYWGQGTLVTVSSGGGGSGGGGSGGGGSQTVVTQEPSLTVSPGGTVTLTCGSSTGAVTSGNYPNWVQQKPGQAPRGLIGGTKFLAPGTPARFSGSLLGGKAALTLSGVQPEDEAEYYCVLWYSNRWVFGGGTKLTVL

SEQ ID NO: 2507 - protein, 745 aa, Artificial Sequence
  Synthetic
EVQLVESGGGLVQPDRSLRLSCAASGFTFRDYAMHWVRQAPGKCLEWVSGIAWNSDSIGYADSVKGRFTISRDNAKNSLFLQMHSLRPEDTALYFCAKDTLYGSGSPRAFDIWGQGTMVTVSSGGGGQGGGGQGGGGQEIVLTQSPATLSVSPGERATLSCRASQSVNNNLAWYQQKPGQAPRLLIYGASTRATGIPARFSGSGSGTEFTLTISRLEPEDFAVYYCQQSNNWPITFGCGTRLEIKSGGGGQQVQLVQSGAEVKKPGASVKVSCKTSGYPFTSYGISWVRQAPGQCLEWMGWISPYSGAPTYAQKVQGRVTMTTDTSTTTAYMELRSLRSDDTAVYYCVRDGLEEDYWGQGTLVTVSSGGGGQGGGGQGGGGQEIVLTQSPATLSVSPGEGATLSCRASQSVSSNLAWYQQSPGQAPRLLIYGASTRATGIPARFSGSGSGTEFTLTISSLQSEDFAVYYCQQYHSWPALTFGCGTKVDIKSGGGGQEVQLVESGGGLVQPGGSLKLSCAASGFTFNKYAMNWVRQAPGKGLEWVARIRSKYNNYATYYADSVKDRFTISRDDSKNTAYLQMNNLKTEDTAVYYCVRHGNFGNSYISYWAYWGQGTLVTVSSGGGGQGGGGQGGGGQQTVVTQEPSLTVSPGGTVTLTCGSSTGAVTSGNYPNWVQQKPGQAPRGLIGGTKFLAPGTPARFSGSLLGGKAALTLSGVQPEDEAEYYCVLWYSNRWVFGGGTKLTVL

SEQ ID NO: 2508 - protein, 745 aa, Artificial Sequence
  Synthetic
EVQLVESGGGLVQPDRSLRLSCAASGFTFRDYAMHWVRQAPGKCLEWVSGIAWNSDSIGYADSVKGRFTISRDNAKNSLFLQMHSLRPEDTALYFCAKDTLYGSGSPRAFDIWGQGTMVTVSSGGGGSGGGGSGGGGSEIVLTQSPATLSVSPGERATLSCRASQSVNNNLAWYQQKPGQAPRLLIYGASTRATGIPARFSGSGSGTEFTLTISRLEPEDFAVYYCQQSNNWPITFGCGTRLEIKSGGGGSQVQLVQSGAEVKKPGASVKVSCKTSGYPFTSYGISWVRQAPGQCLEWMGWISPYSGAPTYAQKVQGRVTMTTDTSTTTAYMELRSLRSDDTAVYYCVRDGLEEDYWGQGTLVTVSSGGGGSGGGGSGGGGSEIVLTQSPATLSVSPGEGATLSCRASQSVSSNLAWYQQSPGQAPRLLIYGASTRATGIPARFSGSGSGTEFTLTISSLQSEDFAVYYCQQYHSWPALTFGCGTKVDIKSGGGGSEVQLVESGGGLVQPGGSLKLSCAASGFTFNKYAINWVRQAPGKGLEWVARIRSKYNNYATYYADAVKDRFTISRDDSKNTVYLQMNNLKTEDTAVYYCARAGNFGSSYISYWAYWGQGTLVTVSSGGGGSGGGGSGGGGSQTVVTQEPSLTVSPGGTVTITCGSSTGAVTSGNYPNWVQKKPGQAPRGLIGGTKFLAPGTPARFSGSLSGGKAALTLSGVQPEDEAEYYCVLWYSNRWVFGSGTKLTVL

SEQ ID NO: 2509 - protein, 745 aa, Artificial Sequence
  Synthetic
EVQLVESGGGLVQPDRSLRLSCAASGFTFRDYAMHWVRQAPGKCLEWVSGIAWNSDSIGYADSVKGRFTISRDNAKNSLFLQMHSLRPEDTALYFCAKDTLYGSGSPRAFDIWGQGTMVTVSSGGGGQGGGGQGGGGQEIVLTQSPATLSVSPGERATLSCRASQSVNNNLAWYQQKPGQAPRLLIYGASTRATGIPARFSGSGSGTEFTLTISRLEPEDFAVYYCQQSNNWPITFGCGTRLEIKSGGGGQQVQLVQSGAEVKKPGASVKVSCKTSGYPFTSYGISWVRQAPGQCLEWMGWISPYSGAPTYAQKVQGRVTMTTDTSTTTAYMELRSLRSDDTAVYYCVRDGLEEDYWGQGTLVTVSSGGGGQGGGGQGGGGQEIVLTQSPATLSVSPGEGATLSCRASQSVSSNLAWYQQSPGQAPRLLIYGASTRATGIPARFSGSGSGTEFTLTISSLQSEDFAVYYCQQYHSWPALTFGCGTKVDIKSGGGGQEVQLVESGGGLVQPGGSLKLSCAASGFTFNKYAINWVRQAPGKGLEWVARIRSKYNNYATYYADAVKDRFTISRDDSKNTVYLQMNNLKTEDTAVYYCARAGNFGSSYISYWAYWGQGTLVTVSSGGGGQGGGGQGGGGQQTVVTQEPSLTVSPGGTVTITCGSSTGAVTSGNYPNWVQKKPGQAPRGLIGGTKFLAPGTPARFSGSLSGGKAALTLSGVQPEDEAEYYCVLWYSNRWVFGSGTKLTVL

SEQ ID NO: 2510 - protein, 1233 aa, Artificial Sequence
  Synthetic
EVQLVESGGGLVQPDRSLRLSCAASGFTFRDYAMHWVRQAPGKCLEWVSGIAWNSDSIGYADSVKGRFTISRDNAKNSLFLQMHSLRPEDTALYFCAKDTLYGSGSPRAFDIWGQGTMVTVSSGGGGSGGGGSGGGGSEIVLTQSPATLSVSPGERATLSCRASQSVNNNLAWYQQKPGQAPRLLIYGASTRATGIPARFSGSGSGTEFTLTISRLEPEDFAVYYCQQSNNWPITFGCGTRLEIKSGGGGSQVQLVQSGAEVKKPGASVKVSCKTSGYPFTSYGISWVRQAPGQCLEWMGWISPYSGAPTYAQKVQGRVTMTTDTSTTTAYMELRSLRSDDTAVYYCVRDGLEEDYWGQGTLVTVSSGGGGSGGGGSGGGGSEIVLTQSPATLSVSPGEGATLSCRASQSVSSNLAWYQQSPGQAPRLLIYGASTRATGIPARFSGSGSGTEFTLTISSLQSEDFAVYYCQQYHSWPALTFGCGTKVDIKSGGGGSEVQLVESGGGLVQPGGSLKLSCAASGFTFNKYAMNWVRQAPGKGLEWVARIRSKYNNYATYYADSVKDRFTISRDDSKNTAYLQMNNLKTEDTAVYYCVRHGNFGNSYISYWAYWGQGTLVTVSSGGGGSGGGGSGGGGSQTVVTQEPSLTVSPGGTVTLTCGSSTGAVTSGNYPNWVQQKPGQAPRGLIGGTKFLAPGTPARFSGSLLGGKAALTLSGVQPEDEAEYYCVLWYSNRWVFGGGTKLTVLGGGGDKTHTCPPCPAPELLGGPSVFLFPPKPKDTLMISRTPEVTCVVVDVSHEDPEVKFNWYVDGVEVHNAKTKPCEEQYGSTYRCVSVLTVLHQDWLNGKEYKCKVSNKALPAPIEKTISKAKGQPREPQVYTLPPSREEMTKNQVSLTCLVKGFYPSDIAVEWESNGQPENNYKTTPPVLDSDGSFFLYSKLTVDKSRWQQGNVFSCSVMHEALHNHYTQKSLSLSPGKGGGGSGGGGSGGGGSGGGGSGGGGSGGGGSDKTHTCPPCPAPELLGGPSVFLFPPKPKDTLMISRTPEVTCVVVDVSHEDPEVKFNWYVDGVEVHNAKTKPCEEQYGSTYRCVSVLTVLHQDWLNGKEYKCKVSNKALPAPIEKTISKAKGQPREPQVYTLPPSREEMTKNQVSLTCLVKGFYPSDIAVEWESNGQPENNYKTTPPVLDSDGSFFLYSKLTVDKSRWQQGNVFSCSVMHEALHNHYTQKSLSLSPGK

SEQ ID NO: 2511 - protein, 1223 aa, Artificial Sequence
  Synthetic
EVQLVESGGGLVQPDRSLRLSCAASGFTFRDYAMHWVRQAPGKCLEWVSGIAWNSDSIGYADSVKGRFTISRDNAKNSLFLQMHSLRPEDTALYFCAKDTLYGSGSPRAFDIWGQGTMVTVSSGGGGQGGGGQGGGGQEIVLTQSPATLSVSPGERATLSCRASQSVNNNLAWYQQKPGQAPRLLIYGASTRATGIPARFSGSGSGTEFTLTISRLEPEDFAVYYCQQSNNWPITFGCGTRLEIKSGGGGQQVQLVQSGAEVKKPGASVKVSCKTSGYPFTSYGISWVRQAPGQCLEWMGWISPYSGAPTYAQKVQGRVTMTTDTSTTTAYMELRSLRSDDTAVYYCVRDGLEEDYWGQGTLVTVSSGGGGQGGGGQGGGGQEIVLTQSPATLSVSPGEGATLSCRASQSVSSNLAWYQQSPGQAPRLLIYGASTRATGIPARFSGSGSGTEFTLTISSLQSEDFAVYYCQQYHSWPALTFGCGTKVDIKSGGGGQEVQLVESGGGLVQPGGSLKLSCAASGFTFNKYAMNWVRQAPGKGLEWVARIRSKYNNYATYYADSVKDRFTISRDDSKNTAYLQMNNLKTEDTAVYYCVRHGNFGNSYISYWAYWGQGTLVTVSSGGGGQGGGGQGGGGQQTVVTQEPSLTVSPGGTVTLTCGSSTGAVTSGNYPNWVQQKPGQAPRGLIGGTKFLAPGTPARFSGSLLGGKAALTLSGVQPEDEAEYYCVLWYSNRWVFGGGTKLTVLGGGGCPPCPAPELLGGPSVFLFPPKPKDTLMISRTPEVTCVVVDVSHEEPEVKFNWYVDGVEVHNAKTKPCEEQYGSTYRCVSVLTVLHQDWLNGKEYKCKVSNKALPAPIEKTISKAKGQPREPQVYTLPPSREEMTKNQVSLTCLVKGFYPSDIAVEWESNGQPENNYKTTPPVLDSDGSFFLYSKLTVDKSRWQQGNVFSCSVMHEALHNHYTQKSLSLSPGKGGGGQGGGGQGGGGQGGGGQGGGGQGGGGQCPPCPAPELLGGPSVFLFPPKPKDTLMISRTPEVTCVVVDVSHEEPEVKFNWYVDGVEVHNAKTKPCEEQYGSTYRCVSVLTVLHQDWLNGKEYKCKVSNKALPAPIEKTISKAKGQPREPQVYTLPPSREEMTKNQVSLTCLVKGFYPSDIAVEWESNGQPENNYKTTPPVLDSDGSFFLYSKLTVDKSRWQQGNVFSCSVMHEALHNHYTQKSLSLSPGK

SEQ ID NO: 2512 - protein, 1233 aa, Artificial Sequence
  Synthetic
EVQLVESGGGLVQPDRSLRLSCAASGFTFRDYAMHWVRQAPGKCLEWVSGIAWNSDSIGYADSVKGRFTISRDNAKNSLFLQMHSLRPEDTALYFCAKDTLYGSGSPRAFDIWGQGTMVTVSSGGGGSGGGGSGGGGSEIVLTQSPATLSVSPGERATLSCRASQSVNNNLAWYQQKPGQAPRLLIYGASTRATGIPARFSGSGSGTEFTLTISRLEPEDFAVYYCQQSNNWPITFGCGTRLEIKSGGGGSQVQLVQSGAEVKKPGASVKVSCKTSGYPFTSYGISWVRQAPGQCLEWMGWISPYSGAPTYAQKVQGRVTMTTDTSTTTAYMELRSLRSDDTAVYYCVRDGLEEDYWGQGTLVTVSSGGGGSGGGGSGGGGSEIVLTQSPATLSVSPGEGATLSCRASQSVSSNLAWYQQSPGQAPRLLIYGASTRATGIPARFSGSGSGTEFTLTISSLQSEDFAVYYCQQYHSWPALTFGCGTKVDIKSGGGGSEVQLVESGGGLVQPGGSLKLSCAASGFTFNKYAINWVRQAPGKGLEWVARIRSKYNNYATYYADAVKDRFTISRDDSKNTVYLQMNNLKTEDTAVYYCARAGNFGSSYISYWAYWGQGTLVTVSSGGGGSGGGGSGGGGSQTVVTQEPSLTVSPGGTVTITCGSSTGAVTSGNYPNWVQKKPGQAPRGLIGGTKFLAPGTPARFSGSLSGGKAALTLSGVQPEDEAEYYCVLWYSNRWVFGSGTKLTVLGGGGDKTHTCPPCPAPELLGGPSVFLFPPKPKDTLMISRTPEVTCVVVDVSHEDPEVKFNWYVDGVEVHNAKTKPCEEQYGSTYRCVSVLTVLHQDWLNGKEYKCKVSNKALPAPIEKTISKAKGQPREPQVYTLPPSREEMTKNQVSLTCLVKGFYPSDIAVEWESNGQPENNYKTTPPVLDSDGSFFLYSKLTVDKSRWQQGNVFSCSVMHEALHNHYTQKSLSLSPGKGGGGSGGGGSGGGGSGGGGSGGGGSGGGGSDKTHTCPPCPAPELLGGPSVFLFPPKPKDTLMISRTPEVTCVVVDVSHEDPEVKFNWYVDGVEVHNAKTKPCEEQYGSTYRCVSVLTVLHQDWLNGKEYKCKVSNKALPAPIEKTISKAKGQPREPQVYTLPPSREEMTKNQVSLTCLVKGFYPSDIAVEWESNGQPENNYKTTPPVLDSDGSFFLYSKLTVDKSRWQQGNVFSCSVMHEALHNHYTQKSLSLSPGK

SEQ ID NO: 2513 - protein, 1223 aa, Artificial Sequence
  Synthetic
EVQLVESGGGLVQPDRSLRLSCAASGFTFRDYAMHWVRQAPGKCLEWVSGIAWNSDSIGYADSVKGRFTISRDNAKNSLFLQMHSLRPEDTALYFCAKDTLYGSGSPRAFDIWGQGTMVTVSSGGGGQGGGGQGGGGQEIVLTQSPATLSVSPGERATLSCRASQSVNNNLAWYQQKPGQAPRLLIYGASTRATGIPARFSGSGSGTEFTLTISRLEPEDFAVYYCQQSNNWPITFGCGTRLEIKSGGGGQQVQLVQSGAEVKKPGASVKVSCKTSGYPFTSYGISWVRQAPGQCLEWMGWISPYSGAPTYAQKVQGRVTMTTDTSTTTAYMELRSLRSDDTAVYYCVRDGLEEDYWGQGTLVTVSSGGGGQGGGGQGGGGQEIVLTQSPATLSVSPGEGATLSCRASQSVSSNLAWYQQSPGQAPRLLIYGASTRATGIPARFSGSGSGTEFTLTISSLQSEDFAVYYCQQYHSWPALTFGCGTKVDIKSGGGGQEVQLVESGGGLVQPGGSLKLSCAASGFTFNKYAINWVRQAPGKGLEWVARIRSKYNNYATYYADAVKDRFTISRDDSKNTVYLQMNNLKTEDTAVYYCARAGNFGSSYISYWAYWGQGTLVTVSSGGGGQGGGGQGGGGQQTVVTQEPSLTVSPGGTVTITCGSSTGAVTSGNYPNWVQKKPGQAPRGLIGGTKFLAPGTPARFSGSLSGGKAALTLSGVQPEDEAEYYCVLWYSNRWVFGSGTKLTVLGGGGCPPCPAPELLGGPSVFLFPPKPKDTLMISRTPEVTCVVVDVSHEEPEVKFNWYVDGVEVHNAKTKPCEEQYGSTYRCVSVLTVLHQDWLNGKEYKCKVSNKALPAPIEKTISKAKGQPREPQVYTLPPSREEMTKNQVSLTCLVKGFYPSDIAVEWESNGQPENNYKTTPPVLDSDGSFFLYSKLTVDKSRWQQGNVFSCSVMHEALHNHYTQKSLSLSPGKGGGGQGGGGQGGGGQGGGGQGGGGQGGGGQCPPCPAPELLGGPSVFLFPPKPKDTLMISRTPEVTCVVVDVSHEEPEVKFNWYVDGVEVHNAKTKPCEEQYGSTYRCVSVLTVLHQDWLNGKEYKCKVSNKALPAPIEKTISKAKGQPREPQVYTLPPSREEMTKNQVSLTCLVKGFYPSDIAVEWESNGQPENNYKTTPPVLDSDGSFFLYSKLTVDKSRWQQGNVFSCSVMHEALHNHYTQKSLSLSPGK

SEQ ID NO: 2514 - protein, 490 aa, Artificial Sequence
  Synthetic
EVQLVESGGGLVQPDRSLRLSCAASGFTFRDYAMHWVRQAPGKCLEWVSGIAWNSDSIGYADSVKGRFTISRDNAKNSLFLQMHSLRPEDTALYFCAKDTLYGSGSPRAFDIWGQGTMVTVSSGGGGSGGGGSGGGGSEIVLTQSPATLSVSPGERATLSCRASQSVNNNLAWYQQKPGQAPRLLIYGASTRATGIPARFSGSGSGTEFTLTISRLEPEDFAVYYCQQSNNWPITFGCGTRLEIKSGGGGSQVQLVQSGAEVKKPGASVKVSCKASGYTFNNYGISWVRQAPGQCLEWMGWISAYNGKTSYAQKFQGRVTMTTDTSTGTAYMELRSLRSDDTAVYYCARSTGDGEYWGQGTLVTVSSGGGGSGGGGSGGGGSEIVMTQSPATLSVSPGERATLSCRASQSVSSNLAWYQQKPGQAPRLLIYGASTRATGIPARFSGGGSGTEFTLTISSLQSEDFAVYYCQQYHTWPVLTFGCGTKVEIK

SEQ ID NO: 2515 - protein, 490 aa, Artificial Sequence
  Synthetic
EVQLVESGGGLVQPDRSLRLSCAASGFTFRDYAMHWVRQAPGKCLEWVSGIAWNSDSIGYADSVKGRFTISRDNAKNSLFLQMHSLRPEDTALYFCAKDTLYGSGSPRAFDIWGQGTMVTVSSGGGGQGGGGQGGGGQEIVLTQSPATLSVSPGERATLSCRASQSVNNNLAWYQQKPGQAPRLLIYGASTRATGIPARFSGSGSGTEFTLTISRLEPEDFAVYYCQQSNNWPITFGCGTRLEIKSGGGGQQVQLVQSGAEVKKPGASVKVSCKASGYTFNNYGISWVRQAPGQCLEWMGWISAYNGKTSYAQKFQGRVTMTTDTSTGTAYMELRSLRSDDTAVYYCARSTGDGEYWGQGTLVTVSSGGGGQGGGGQGGGGQEIVMTQSPATLSVSPGERATLSCRASQSVSSNLAWYQQKPGQAPRLLIYGASTRATGIPARFSGGGSGTEFTLTISSLQSEDFAVYYCQQYHTWPVLTFGCGTKVEIK

SEQ ID NO: 2516 - protein, 745 aa, Artificial Sequence
  Synthetic
EVQLVESGGGLVQPDRSLRLSCAASGFTFRDYAMHWVRQAPGKCLEWVSGIAWNSDSIGYADSVKGRFTISRDNAKNSLFLQMHSLRPEDTALYFCAKDTLYGSGSPRAFDIWGQGTMVTVSSGGGGSGGGGSGGGGSEIVLTQSPATLSVSPGERATLSCRASQSVNNNLAWYQQKPGQAPRLLIYGASTRATGIPARFSGSGSGTEFTLTISRLEPEDFAVYYCQQSNNWPITFGCGTRLEIKSGGGGSQVQLVQSGAEVKKPGASVKVSCKASGYTFNNYGISWVRQAPGQCLEWMGWISAYNGKTSYAQKFQGRVTMTTDTSTGTAYMELRSLRSDDTAVYYCARSTGDGEYWGQGTLVTVSSGGGGSGGGGSGGGGSEIVMTQSPATLSVSPGERATLSCRASQSVSSNLAWYQQKPGQAPRLLIYGASTRATGIPARFSGGGSGTEFTLTISSLQSEDFAVYYCQQYHTWPVLTFGCGTKVEIKSGGGGSEVQLVESGGGLVQPGGSLKLSCAASGFTFNKYAMNWVRQAPGKGLEWVARIRSKYNNYATYYADSVKDRFTISRDDSKNTAYLQMNNLKTEDTAVYYCVRHGNFGNSYISYWAYWGQGTLVTVSSGGGGSGGGGSGGGGSQTVVTQEPSLTVSPGGTVTLTCGSSTGAVTSGNYPNWVQQKPGQAPRGLIGGTKFLAPGTPARFSGSLLGGKAALTLSGVQPEDEAEYYCVLWYSNRWVFGGGTKLTVL

SEQ ID NO: 2517 - protein, 745 aa, Artificial Sequence
  Synthetic
EVQLVESGGGLVQPDRSLRLSCAASGFTFRDYAMHWVRQAPGKCLEWVSGIAWNSDSIGYADSVKGRFTISRDNAKNSLFLQMHSLRPEDTALYFCAKDTLYGSGSPRAFDIWGQGTMVTVSSGGGGQGGGGQGGGGQEIVLTQSPATLSVSPGERATLSCRASQSVNNNLAWYQQKPGQAPRLLIYGASTRATGIPARFSGSGSGTEFTLTISRLEPEDFAVYYCQQSNNWPITFGCGTRLEIKSGGGGQQVQLVQSGAEVKKPGASVKVSCKASGYTFNNYGISWVRQAPGQCLEWMGWISAYNGKTSYAQKFQGRVTMTTDTSTGTAYMELRSLRSDDTAVYYCARSTGDGEYWGQGTLVTVSSGGGGQGGGGQGGGGQEIVMTQSPATLSVSPGERATLSCRASQSVSSNLAWYQQKPGQAPRLLIYGASTRATGIPARFSGGGSGTEFTLTISSLQSEDFAVYYCQQYHTWPVLTFGCGTKVEIKSGGGGQEVQLVESGGGLVQPGGSLKLSCAASGFTFNKYAMNWVRQAPGKGLEWVARIRSKYNNYATYYADSVKDRFTISRDDSKNTAYLQMNNLKTEDTAVYYCVRHGNFGNSYISYWAYWGQGTLVTVSSGGGGQGGGGQGGGGQQTVVTQEPSLTVSPGGTVTLTCGSSTGAVTSGNYPNWVQQKPGQAPRGLIGGTKFLAPGTPARFSGSLLGGKAALTLSGVQPEDEAEYYCVLWYSNRWVFGGGTKLTVL

SEQ ID NO: 2518 - protein, 745 aa, Artificial Sequence
  Synthetic
EVQLVESGGGLVQPDRSLRLSCAASGFTFRDYAMHWVRQAPGKCLEWVSGIAWNSDSIGYADSVKGRFTISRDNAKNSLFLQMHSLRPEDTALYFCAKDTLYGSGSPRAFDIWGQGTMVTVSSGGGGSGGGGSGGGGSEIVLTQSPATLSVSPGERATLSCRASQSVNNNLAWYQQKPGQAPRLLIYGASTRATGIPARFSGSGSGTEFTLTISRLEPEDFAVYYCQQSNNWPITFGCGTRLEIKSGGGGSQVQLVQSGAEVKKPGASVKVSCKASGYTFNNYGISWVRQAPGQCLEWMGWISAYNGKTSYAQKFQGRVTMTTDTSTGTAYMELRSLRSDDTAVYYCARSTGDGEYWGQGTLVTVSSGGGGSGGGGSGGGGSEIVMTQSPATLSVSPGERATLSCRASQSVSSNLAWYQQKPGQAPRLLIYGASTRATGIPARFSGGGSGTEFTLTISSLQSEDFAVYYCQQYHTWPVLTFGCGTKVEIKSGGGGSEVQLVESGGGLVQPGGSLKLSCAASGFTFNKYAINWVRQAPGKGLEWVARIRSKYNNYATYYADAVKDRFTISRDDSKNTVYLQMNNLKTEDTAVYYCARAGNFGSSYISYWAYWGQGTLVTVSSGGGGSGGGGSGGGGSQTVVTQEPSLTVSPGGTVTITCGSSTGAVTSGNYPNWVQKKPGQAPRGLIGGTKFLAPGTPARFSGSLSGGKAALTLSGVQPEDEAEYYCVLWYSNRWVFGSGTKLTVL

SEQ ID NO: 2519 - protein, 745 aa, Artificial Sequence
  Synthetic
EVQLVESGGGLVQPDRSLRLSCAASGFTFRDYAMHWVRQAPGKCLEWVSGIAWNSDSIGYADSVKGRFTISRDNAKNSLFLQMHSLRPEDTALYFCAKDTLYGSGSPRAFDIWGQGTMVTVSSGGGGQGGGGQGGGGQEIVLTQSPATLSVSPGERATLSCRASQSVNNNLAWYQQKPGQAPRLLIYGASTRATGIPARFSGSGSGTEFTLTISRLEPEDFAVYYCQQSNNWPITFGCGTRLEIKSGGGGQQVQLVQSGAEVKKPGASVKVSCKASGYTFNNYGISWVRQAPGQCLEWMGWISAYNGKTSYAQKFQGRVTMTTDTSTGTAYMELRSLRSDDTAVYYCARSTGDGEYWGQGTLVTVSSGGGGQGGGGQGGGGQEIVMTQSPATLSVSPGERATLSCRASQSVSSNLAWYQQKPGQAPRLLIYGASTRATGIPARFSGGGSGTEFTLTISSLQSEDFAVYYCQQYHTWPVLTFGCGTKVEIKSGGGGQEVQLVESGGGLVQPGGSLKLSCAASGFTFNKYAINWVRQAPGKGLEWVARIRSKYNNYATYYADAVKDRFTISRDDSKNTVYLQMNNLKTEDTAVYYCARAGNFGSSYISYWAYWGQGTLVTVSSGGGGQGGGGQGGGGQQTVVTQEPSLTVSPGGTVTITCGSSTGAVTSGNYPNWVQKKPGQAPRGLIGGTKFLAPGTPARFSGSLSGGKAALTLSGVQPEDEAEYYCVLWYSNRWVFGSGTKLTVL

SEQ ID NO: 2520 - protein, 1233 aa, Artificial Sequence
  Synthetic
EVQLVESGGGLVQPDRSLRLSCAASGFTFRDYAMHWVRQAPGKCLEWVSGIAWNSDSIGYADSVKGRFTISRDNAKNSLFLQMHSLRPEDTALYFCAKDTLYGSGSPRAFDIWGQGTMVTVSSGGGGSGGGGSGGGGSEIVLTQSPATLSVSPGERATLSCRASQSVNNNLAWYQQKPGQAPRLLIYGASTRATGIPARFSGSGSGTEFTLTISRLEPEDFAVYYCQQSNNWPITFGCGTRLEIKSGGGGSQVQLVQSGAEVKKPGASVKVSCKASGYTFNNYGISWVRQAPGQCLEWMGWISAYNGKTSYAQKFQGRVTMTTDTSTGTAYMELRSLRSDDTAVYYCARSTGDGEYWGQGTLVTVSSGGGGSGGGGSGGGGSEIVMTQSPATLSVSPGERATLSCRASQSVSSNLAWYQQKPGQAPRLLIYGASTRATGIPARFSGGGSGTEFTLTISSLQSEDFAVYYCQQYHTWPVLTFGCGTKVEIKSGGGGSEVQLVESGGGLVQPGGSLKLSCAASGFTFNKYAMNWVRQAPGKGLEWVARIRSKYNNYATYYADSVKDRFTISRDDSKNTAYLQMNNLKTEDTAVYYCVRHGNFGNSYISYWAYWGQGTLVTVSSGGGGSGGGGSGGGGSQTVVTQEPSLTVSPGGTVTLTCGSSTGAVTSGNYPNWVQQKPGQAPRGLIGGTKFLAPGTPARFSGSLLGGKAALTLSGVQPEDEAEYYCVLWYSNRWVFGGGTKLTVLGGGGDKTHTCPPCPAPELLGGPSVFLFPPKPKDTLMISRTPEVTCVVVDVSHEDPEVKFNWYVDGVEVHNAKTKPCEEQYGSTYRCVSVLTVLHQDWLNGKEYKCKVSNKALPAPIEKTISKAKGQPREPQVYTLPPSREEMTKNQVSLTCLVKGFYPSDIAVEWESNGQPENNYKTTPPVLDSDGSFFLYSKLTVDKSRWQQGNVFSCSVMHEALHNHYTQKSLSLSPGKGGGGSGGGGSGGGGSGGGGSGGGGSGGGGSDKTHTCPPCPAPELLGGPSVFLFPPKPKDTLMISRTPEVTCVVVDVSHEDPEVKFNWYVDGVEVHNAKTKPCEEQYGSTYRCVSVLTVLHQDWLNGKEYKCKVSNKALPAPIEKTISKAKGQPREPQVYTLPPSREEMTKNQVSLTCLVKGFYPSDIAVEWESNGQPENNYKTTPPVLDSDGSFFLYSKLTVDKSRWQQGNVFSCSVMHEALHNHYTQKSLSLSPGK

SEQ ID NO: 2521 - protein, 1223 aa, Artificial Sequence
  Synthetic
EVQLVESGGGLVQPDRSLRLSCAASGFTFRDYAMHWVRQAPGKCLEWVSGIAWNSDSIGYADSVKGRFTISRDNAKNSLFLQMHSLRPEDTALYFCAKDTLYGSGSPRAFDIWGQGTMVTVSSGGGGQGGGGQGGGGQEIVLTQSPATLSVSPGERATLSCRASQSVNNNLAWYQQKPGQAPRLLIYGASTRATGIPARFSGSGSGTEFTLTISRLEPEDFAVYYCQQSNNWPITFGCGTRLEIKSGGGGQQVQLVQSGAEVKKPGASVKVSCKASGYTFNNYGISWVRQAPGQCLEWMGWISAYNGKTSYAQKFQGRVTMTTDTSTGTAYMELRSLRSDDTAVYYCARSTGDGEYWGQGTLVTVSSGGGGQGGGGQGGGGQEIVMTQSPATLSVSPGERATLSCRASQSVSSNLAWYQQKPGQAPRLLIYGASTRATGIPARFSGGGSGTEFTLTISSLQSEDFAVYYCQQYHTWPVLTFGCGTKVEIKSGGGGQEVQLVESGGGLVQPGGSLKLSCAASGFTFNKYAMNWVRQAPGKGLEWVARIRSKYNNYATYYADSVKDRFTISRDDSKNTAYLQMNNLKTEDTAVYYCVRHGNFGNSYISYWAYWGQGTLVTVSSGGGGQGGGGQGGGGQQTVVTQEPSLTVSPGGTVTLTCGSSTGAVTSGNYPNWVQQKPGQAPRGLIGGTKFLAPGTPARFSGSLLGGKAALTLSGVQPEDEAEYYCVLWYSNRWVFGGGTKLTVLGGGGCPPCPAPELLGGPSVFLFPPKPKDTLMISRTPEVTCVVVDVSHEEPEVKFNWYVDGVEVHNAKTKPCEEQYGSTYRCVSVLTVLHQDWLNGKEYKCKVSNKALPAPIEKTISKAKGQPREPQVYTLPPSREEMTKNQVSLTCLVKGFYPSDIAVEWESNGQPENNYKTTPPVLDSDGSFFLYSKLTVDKSRWQQGNVFSCSVMHEALHNHYTQKSLSLSPGKGGGGQGGGGQGGGGQGGGGQGGGGQGGGGQCPPCPAPELLGGPSVFLFPPKPKDTLMISRTPEVTCVVVDVSHEEPEVKFNWYVDGVEVHNAKTKPCEEQYGSTYRCVSVLTVLHQDWLNGKEYKCKVSNKALPAPIEKTISKAKGQPREPQVYTLPPSREEMTKNQVSLTCLVKGFYPSDIAVEWESNGQPENNYKTTPPVLDSDGSFFLYSKLTVDKSRWQQGNVFSCSVMHEALHNHYTQKSLSLSPGK

SEQ ID NO: 2522 - protein, 1233 aa, Artificial Sequence
  Synthetic
EVQLVESGGGLVQPDRSLRLSCAASGFTFRDYAMHWVRQAPGKCLEWVSGIAWNSDSIGYADSVKGRFTISRDNAKNSLFLQMHSLRPEDTALYFCAKDTLYGSGSPRAFDIWGQGTMVTVSSGGGGSGGGGSGGGGSEIVLTQSPATLSVSPGERATLSCRASQSVNNNLAWYQQKPGQAPRLLIYGASTRATGIPARFSGSGSGTEFTLTISRLEPEDFAVYYCQQSNNWPITFGCGTRLEIKSGGGGSQVQLVQSGAEVKKPGASVKVSCKASGYTFNNYGISWVRQAPGQCLEWMGWISAYNGKTSYAQKFQGRVTMTTDTSTGTAYMELRSLRSDDTAVYYCARSTGDGEYWGQGTLVTVSSGGGGSGGGGSGGGGSEIVMTQSPATLSVSPGERATLSCRASQSVSSNLAWYQQKPGQAPRLLIYGASTRATGIPARFSGGGSGTEFTLTISSLQSEDFAVYYCQQYHTWPVLTFGCGTKVEIKSGGGGSEVQLVESGGGLVQPGGSLKLSCAASGFTFNKYAINWVRQAPGKGLEWVARIRSKYNNYATYYADAVKDRFTISRDDSKNTVYLQMNNLKTEDTAVYYCARAGNFGSSYISYWAYWGQGTLVTVSSGGGGSGGGGSGGGGSQTVVTQEPSLTVSPGGTVTITCGSSTGAVTSGNYPNWVQKKPGQAPRGLIGGTKFLAPGTPARFSGSLSGGKAALTLSGVQPEDEAEYYCVLWYSNRWVFGSGTKLTVLGGGGDKTHTCPPCPAPELLGGPSVFLFPPKPKDTLMISRTPEVTCVVVDVSHEDPEVKFNWYVDGVEVHNAKTKPCEEQYGSTYRCVSVLTVLHQDWLNGKEYKCKVSNKALPAPIEKTISKAKGQPREPQVYTLPPSREEMTKNQVSLTCLVKGFYPSDIAVEWESNGQPENNYKTTPPVLDSDGSFFLYSKLTVDKSRWQQGNVFSCSVMHEALHNHYTQKSLSLSPGKGGGGSGGGGSGGGGSGGGGSGGGGSGGGGSDKTHTCPPCPAPELLGGPSVFLFPPKPKDTLMISRTPEVTCVVVDVSHEDPEVKFNWYVDGVEVHNAKTKPCEEQYGSTYRCVSVLTVLHQDWLNGKEYKCKVSNKALPAPIEKTISKAKGQPREPQVYTLPPSREEMTKNQVSLTCLVKGFYPSDIAVEWESNGQPENNYKTTPPVLDSDGSFFLYSKLTVDKSRWQQGNVFSCSVMHEALHNHYTQKSLSLSPGK

SEQ ID NO: 2523 - protein, 1223 aa, Artificial Sequence
  Synthetic
EVQLVESGGGLVQPDRSLRLSCAASGFTFRDYAMHWVRQAPGKCLEWVSGIAWNSDSIGYADSVKGRFTISRDNAKNSLFLQMHSLRPEDTALYFCAKDTLYGSGSPRAFDIWGQGTMVTVSSGGGGQGGGGQGGGGQEIVLTQSPATLSVSPGERATLSCRASQSVNNNLAWYQQKPGQAPRLLIYGASTRATGIPARFSGSGSGTEFTLTISRLEPEDFAVYYCQQSNNWPITFGCGTRLEIKSGGGGQQVQLVQSGAEVKKPGASVKVSCKASGYTFNNYGISWVRQAPGQCLEWMGWISAYNGKTSYAQKFQGRVTMTTDTSTGTAYMELRSLRSDDTAVYYCARSTGDGEYWGQGTLVTVSSGGGGQGGGGQGGGGQEIVMTQSPATLSVSPGERATLSCRASQSVSSNLAWYQQKPGQAPRLLIYGASTRATGIPARFSGGGSGTEFTLTISSLQSEDFAVYYCQQYHTWPVLTFGCGTKVEIKSGGGGQEVQLVESGGGLVQPGGSLKLSCAASGFTFNKYAINWVRQAPGKGLEWVARIRSKYNNYATYYADAVKDRFTISRDDSKNTVYLQMNNLKTEDTAVYYCARAGNFGSSYISYWAYWGQGTLVTVSSGGGGQGGGGQGGGGQQTVVTQEPSLTVSPGGTVTITCGSSTGAVTSGNYPNWVQKKPGQAPRGLIGGTKFLAPGTPARFSGSLSGGKAALTLSGVQPEDEAEYYCVLWYSNRWVFGSGTKLTVLGGGGCPPCPAPELLGGPSVFLFPPKPKDTLMISRTPEVTCVVVDVSHEEPEVKFNWYVDGVEVHNAKTKPCEEQYGSTYRCVSVLTVLHQDWLNGKEYKCKVSNKALPAPIEKTISKAKGQPREPQVYTLPPSREEMTKNQVSLTCLVKGFYPSDIAVEWESNGQPENNYKTTPPVLDSDGSFFLYSKLTVDKSRWQQGNVFSCSVMHEALHNHYTQKSLSLSPGKGGGGQGGGGQGGGGQGGGGQGGGGQGGGGQCPPCPAPELLGGPSVFLFPPKPKDTLMISRTPEVTCVVVDVSHEEPEVKFNWYVDGVEVHNAKTKPCEEQYGSTYRCVSVLTVLHQDWLNGKEYKCKVSNKALPAPIEKTISKAKGQPREPQVYTLPPSREEMTKNQVSLTCLVKGFYPSDIAVEWESNGQPENNYKTTPPVLDSDGSFFLYSKLTVDKSRWQQGNVFSCSVMHEALHNHYTQKSLSLSPGK

SEQ ID NO: 2524 - protein, 499 aa, Artificial Sequence
  Synthetic
EVQLVESGGGLVQPDRSLRLSCAASGFTFRDYAMHWVRQAPGKCLEWVSGIAWNSDSIGYADSVKGRFTISRDNAKNSLFLQMHSLRPEDTALYFCAKDTLYGSGSPRAFDIWGQGTMVTVSSGGGGSGGGGSGGGGSEIVLTQSPATLSVSPGERATLSCRASQSVNNNLAWYQQKPGQAPRLLIYGASTRATGIPARFSGSGSGTEFTLTISRLEPEDFAVYYCQQSNNWPITFGCGTRLEIKSGGGGSQVQLQQSGPGLVKPSQTLSLTCAISGDSVSSKSAAWNWIRQSPSGCLEWLGRTFYRSTWYNDYAVSVKSRITINPDTSKNQFSLQLNSVIPEDTAVYYCAREGQWLVYGMDVWGQGTTVTVSSGGGGSGGGGSGGGGSQSVLTQPPSASGTPGQRITISCSGSSSNIGSNTVNWYQQLPGTAPKLLIYRNNQRPSGVPDRFSGSKSGTSASLAISGLQSEDEADYYCAAWDDSLNGRVFGCGTKLTVL

SEQ ID NO: 2525 - protein, 499 aa, Artificial Sequence
  Synthetic
EVQLVESGGGLVQPDRSLRLSCAASGFTFRDYAMHWVRQAPGKCLEWVSGIAWNSDSIGYADSVKGRFTISRDNAKNSLFLQMHSLRPEDTALYFCAKDTLYGSGSPRAFDIWGQGTMVTVSSGGGGQGGGGQGGGGQEIVLTQSPATLSVSPGERATLSCRASQSVNNNLAWYQQKPGQAPRLLIYGASTRATGIPARFSGSGSGTEFTLTISRLEPEDFAVYYCQQSNNWPITFGCGTRLEIKSGGGGQQVQLQQSGPGLVKPSQTLSLTCAISGDSVSSKSAAWNWIRQSPSGCLEWLGRTFYRSTWYNDYAVSVKSRITINPDTSKNQFSLQLNSVIPEDTAVYYCAREGQWLVYGMDVWGQGTTVTVSSGGGGQGGGGQGGGGQQSVLTQPPSASGTPGQRITISCSGSSSNIGSNTVNWYQQLPGTAPKLLIYRNNQRPSGVPDRFSGSKSGTSASLAISGLQSEDEADYYCAAWDDSLNGRVFGCGTKLTVL

SEQ ID NO: 2526 - protein, 754 aa, Artificial Sequence
  Synthetic
EVQLVESGGGLVQPDRSLRLSCAASGFTFRDYAMHWVRQAPGKCLEWVSGIAWNSDSIGYADSVKGRFTISRDNAKNSLFLQMHSLRPEDTALYFCAKDTLYGSGSPRAFDIWGQGTMVTVSSGGGGSGGGGSGGGGSEIVLTQSPATLSVSPGERATLSCRASQSVNNNLAWYQQKPGQAPRLLIYGASTRATGIPARFSGSGSGTEFTLTISRLEPEDFAVYYCQQSNNWPITFGCGTRLEIKSGGGGSQVQLQQSGPGLVKPSQTLSLTCAISGDSVSSKSAAWNWIRQSPSGCLEWLGRTFYRSTWYNDYAVSVKSRITINPDTSKNQFSLQLNSVIPEDTAVYYCAREGQWLVYGMDVWGQGTTVTVSSGGGGSGGGGSGGGGSQSVLTQPPSASGTPGQRITISCSGSSSNIGSNTVNWYQQLPGTAPKLLIYRNNQRPSGVPDRFSGSKSGTSASLAISGLQSEDEADYYCAAWDDSLNGRVFGCGTKLTVLSGGGGSEVQLVESGGGLVQPGGSLKLSCAASGFTFNKYAMNWVRQAPGKGLEWVARIRSKYNNYATYYADSVKDRFTISRDDSKNTAYLQMNNLKTEDTAVYYCVRHGNFGNSYISYWAYWGQGTLVTVSSGGGGSGGGGSGGGGSQTVVTQEPSLTVSPGGTVTLTCGSSTGAVTSGNYPNWVQQKPGQAPRGLIGGTKFLAPGTPARFSGSLLGGKAALTLSGVQPEDEAEYYCVLWYSNRWVFGGGTKLTVL

SEQ ID NO: 2527 - protein, 754 aa, Artificial Sequence
  Synthetic
EVQLVESGGGLVQPDRSLRLSCAASGFTFRDYAMHWVRQAPGKCLEWVSGIAWNSDSIGYADSVKGRFTISRDNAKNSLFLQMHSLRPEDTALYFCAKDTLYGSGSPRAFDIWGQGTMVTVSSGGGGQGGGGQGGGGQEIVLTQSPATLSVSPGERATLSCRASQSVNNNLAWYQQKPGQAPRLLIYGASTRATGIPARFSGSGSGTEFTLTISRLEPEDFAVYYCQQSNNWPITFGCGTRLEIKSGGGGQQVQLQQSGPGLVKPSQTLSLTCAISGDSVSSKSAAWNWIRQSPSGCLEWLGRTFYRSTWYNDYAVSVKSRITINPDTSKNQFSLQLNSVIPEDTAVYYCAREGQWLVYGMDVWGQGTTVTVSSGGGGQGGGGQGGGGQQSVLTQPPSASGTPGQRITISCSGSSSNIGSNTVNWYQQLPGTAPKLLIYRNNQRPSGVPDRFSGSKSGTSASLAISGLQSEDEADYYCAAWDDSLNGRVFGCGTKLTVLSGGGGQEVQLVESGGGLVQPGGSLKLSCAASGFTFNKYAMNWVRQAPGKGLEWVARIRSKYNNYATYYADSVKDRFTISRDDSKNTAYLQMNNLKTEDTAVYYCVRHGNFGNSYISYWAYWGQGTLVTVSSGGGGQGGGGQGGGGQQTVVTQEPSLTVSPGGTVTLTCGSSTGAVTSGNYPNWVQQKPGQAPRGLIGGTKFLAPGTPARFSGSLLGGKAALTLSGVQPEDEAEYYCVLWYSNRWVFGGGTKLTVL

SEQ ID NO: 2528 - protein, 754 aa, Artificial Sequence
  Synthetic
EVQLVESGGGLVQPDRSLRLSCAASGFTFRDYAMHWVRQAPGKCLEWVSGIAWNSDSIGYADSVKGRFTISRDNAKNSLFLQMHSLRPEDTALYFCAKDTLYGSGSPRAFDIWGQGTMVTVSSGGGGSGGGGSGGGGSEIVLTQSPATLSVSPGERATLSCRASQSVNNNLAWYQQKPGQAPRLLIYGASTRATGIPARFSGSGSGTEFTLTISRLEPEDFAVYYCQQSNNWPITFGCGTRLEIKSGGGGSQVQLQQSGPGLVKPSQTLSLTCAISGDSVSSKSAAWNWIRQSPSGCLEWLGRTFYRSTWYNDYAVSVKSRITINPDTSKNQFSLQLNSVIPEDTAVYYCAREGQWLVYGMDVWGQGTTVTVSSGGGGSGGGGSGGGGSQSVLTQPPSASGTPGQRITISCSGSSSNIGSNTVNWYQQLPGTAPKLLIYRNNQRPSGVPDRFSGSKSGTSASLAISGLQSEDEADYYCAAWDDSLNGRVFGCGTKLTVLSGGGGSEVQLVESGGGLVQPGGSLKLSCAASGFTFNKYAINWVRQAPGKGLEWVARIRSKYNNYATYYADAVKDRFTISRDDSKNTVYLQMNNLKTEDTAVYYCARAGNFGSSYISYWAYWGQGTLVTVSSGGGGSGGGGSGGGGSQTVVTQEPSLTVSPGGTVTITCGSSTGAVTSGNYPNWVQKKPGQAPRGLIGGTKFLAPGTPARFSGSLSGGKAALTLSGVQPEDEAEYYCVLWYSNRWVFGSGTKLTVL

SEQ ID NO: 2529 - protein, 754 aa, Artificial Sequence
  Synthetic
EVQLVESGGGLVQPDRSLRLSCAASGFTFRDYAMHWVRQAPGKCLEWVSGIAWNSDSIGYADSVKGRFTISRDNAKNSLFLQMHSLRPEDTALYFCAKDTLYGSGSPRAFDIWGQGTMVTVSSGGGGQGGGGQGGGGQEIVLTQSPATLSVSPGERATLSCRASQSVNNNLAWYQQKPGQAPRLLIYGASTRATGIPARFSGSGSGTEFTLTISRLEPEDFAVYYCQQSNNWPITFGCGTRLEIKSGGGGQQVQLQQSGPGLVKPSQTLSLTCAISGDSVSSKSAAWNWIRQSPSGCLEWLGRTFYRSTWYNDYAVSVKSRITINPDTSKNQFSLQLNSVIPEDTAVYYCAREGQWLVYGMDVWGQGTTVTVSSGGGGQGGGGQGGGGQQSVLTQPPSASGTPGQRITISCSGSSSNIGSNTVNWYQQLPGTAPKLLIYRNNQRPSGVPDRFSGSKSGTSASLAISGLQSEDEADYYCAAWDDSLNGRVFGCGTKLTVLSGGGGQEVQLVESGGGLVQPGGSLKLSCAASGFTFNKYAINWVRQAPGKGLEWVARIRSKYNNYATYYADAVKDRFTISRDDSKNTVYLQMNNLKTEDTAVYYCARAGNFGSSYISYWAYWGQGTLVTVSSGGGGQGGGGQGGGGQQTVVTQEPSLTVSPGGTVTITCGSSTGAVTSGNYPNWVQKKPGQAPRGLIGGTKFLAPGTPARFSGSLSGGKAALTLSGVQPEDEAEYYCVLWYSNRWVFGSGTKLTVL

SEQ ID NO: 2530 - protein, 1242 aa, Artificial Sequence
  Synthetic
EVQLVESGGGLVQPDRSLRLSCAASGFTFRDYAMHWVRQAPGKCLEWVSGIAWNSDSIGYADSVKGRFTISRDNAKNSLFLQMHSLRPEDTALYFCAKDTLYGSGSPRAFDIWGQGTMVTVSSGGGGSGGGGSGGGGSEIVLTQSPATLSVSPGERATLSCRASQSVNNNLAWYQQKPGQAPRLLIYGASTRATGIPARFSGSGSGTEFTLTISRLEPEDFAVYYCQQSNNWPITFGCGTRLEIKSGGGGSQVQLQQSGPGLVKPSQTLSLTCAISGDSVSSKSAAWNWIRQSPSGCLEWLGRTFYRSTWYNDYAVSVKSRITINPDTSKNQFSLQLNSVIPEDTAVYYCAREGQWLVYGMDVWGQGTTVTVSSGGGGSGGGGSGGGGSQSVLTQPPSASGTPGQRITISCSGSSSNIGSNTVNWYQQLPGTAPKLLIYRNNQRPSGVPDRFSGSKSGTSASLAISGLQSEDEADYYCAAWDDSLNGRVFGCGTKLTVLSGGGGSEVQLVESGGGLVQPGGSLKLSCAASGFTFNKYAMNWVRQAPGKGLEWVARIRSKYNNYATYYADSVKDRFTISRDDSKNTAYLQMNNLKTEDTAVYYCVRHGNFGNSYISYWAYWGQGTLVTVSSGGGGSGGGGSGGGGSQTVVTQEPSLTVSPGGTVTLTCGSSTGAVTSGNYPNWVQQKPGQAPRGLIGGTKFLAPGTPARFSGSLLGGKAALTLSGVQPEDEAEYYCVLWYSNRWVFGGGTKLTVLGGGGDKTHTCPPCPAPELLGGPSVFLFPPKPKDTLMISRTPEVTCVVVDVSHEDPEVKFNWYVDGVEVHNAKTKPCEEQYGSTYRCVSVLTVLHQDWLNGKEYKCKVSNKALPAPIEKTISKAKGQPREPQVYTLPPSREEMTKNQVSLTCLVKGFYPSDIAVEWESNGQPENNYKTTPPVLDSDGSFFLYSKLTVDKSRWQQGNVFSCSVMHEALHNHYTQKSLSLSPGKGGGGSGGGGSGGGGSGGGGSGGGGSGGGGSDKTHTCPPCPAPELLGGPSVFLFPPKPKDTLMISRTPEVTCVVVDVSHEDPEVKFNWYVDGVEVHNAKTKPCEEQYGSTYRCVSVLTVLHQDWLNGKEYKCKVSNKALPAPIEKTISKAKGQPREPQVYTLPPSREEMTKNQVSLTCLVKGFYPSDIAVEWESNGQPENNYKTTPPVLDSDGSFFLYSKLTVDKSRWQQGNVFSCSVMHEALHNHYTQKSLSLSPGK

SEQ ID NO: 2531 - protein, 1232 aa, Artificial Sequence
  Synthetic
EVQLVESGGGLVQPDRSLRLSCAASGFTFRDYAMHWVRQAPGKCLEWVSGIAWNSDSIGYADSVKGRFTISRDNAKNSLFLQMHSLRPEDTALYFCAKDTLYGSGSPRAFDIWGQGTMVTVSSGGGGQGGGGQGGGGQEIVLTQSPATLSVSPGERATLSCRASQSVNNNLAWYQQKPGQAPRLLIYGASTRATGIPARFSGSGSGTEFTLTISRLEPEDFAVYYCQQSNNWPITFGCGTRLEIKSGGGGQQVQLQQSGPGLVKPSQTLSLTCAISGDSVSSKSAAWNWIRQSPSGCLEWLGRTFYRSTWYNDYAVSVKSRITINPDTSKNQFSLQLNSVIPEDTAVYYCAREGQWLVYGMDVWGQGTTVTVSSGGGGQGGGGQGGGGQQSVLTQPPSASGTPGQRITISCSGSSSNIGSNTVNWYQQLPGTAPKLLIYRNNQRPSGVPDRFSGSKSGTSASLAISGLQSEDEADYYCAAWDDSLNGRVFGCGTKLTVLSGGGGQEVQLVESGGGLVQPGGSLKLSCAASGFTFNKYAMNWVRQAPGKGLEWVARIRSKYNNYATYYADSVKDRFTISRDDSKNTAYLQMNNLKTEDTAVYYCVRHGNFGNSYISYWAYWGQGTLVTVSSGGGGQGGGGQGGGGQQTVVTQEPSLTVSPGGTVTLTCGSSTGAVTSGNYPNWVQQKPGQAPRGLIGGTKFLAPGTPARFSGSLLGGKAALTLSGVQPEDEAEYYCVLWYSNRWVFGGGTKLTVLGGGGCPPCPAPELLGGPSVFLFPPKPKDTLMISRTPEVTCVVVDVSHEEPEVKFNWYVDGVEVHNAKTKPCEEQYGSTYRCVSVLTVLHQDWLNGKEYKCKVSNKALPAPIEKTISKAKGQPREPQVYTLPPSREEMTKNQVSLTCLVKGFYPSDIAVEWESNGQPENNYKTTPPVLDSDGSFFLYSKLTVDKSRWQQGNVFSCSVMHEALHNHYTQKSLSLSPGKGGGGQGGGGQGGGGQGGGGQGGGGQGGGGQCPPCPAPELLGGPSVFLFPPKPKDTLMISRTPEVTCVVVDVSHEEPEVKFNWYVDGVEVHNAKTKPCEEQYGSTYRCVSVLTVLHQDWLNGKEYKCKVSNKALPAPIEKTISKAKGQPREPQVYTLPPSREEMTKNQVSLTCLVKGFYPSDIAVEWESNGQPENNYKTTPPVLDSDGSFFLYSKLTVDKSRWQQGNVFSCSVMHEALHNHYTQKSLSLSPGK

SEQ ID NO: 2532 - protein, 1242 aa, Artificial Sequence
  Synthetic
EVQLVESGGGLVQPDRSLRLSCAASGFTFRDYAMHWVRQAPGKCLEWVSGIAWNSDSIGYADSVKGRFTISRDNAKNSLFLQMHSLRPEDTALYFCAKDTLYGSGSPRAFDIWGQGTMVTVSSGGGGSGGGGSGGGGSEIVLTQSPATLSVSPGERATLSCRASQSVNNNLAWYQQKPGQAPRLLIYGASTRATGIPARFSGSGSGTEFTLTISRLEPEDFAVYYCQQSNNWPITFGCGTRLEIKSGGGGSQVQLQQSGPGLVKPSQTLSLTCAISGDSVSSKSAAWNWIRQSPSGCLEWLGRTFYRSTWYNDYAVSVKSRITINPDTSKNQFSLQLNSVIPEDTAVYYCAREGQWLVYGMDVWGQGTTVTVSSGGGGSGGGGSGGGGSQSVLTQPPSASGTPGQRITISCSGSSSNIGSNTVNWYQQLPGTAPKLLIYRNNQRPSGVPDRFSGSKSGTSASLAISGLQSEDEADYYCAAWDDSLNGRVFGCGTKLTVLSGGGGSEVQLVESGGGLVQPGGSLKLSCAASGFTFNKYAINWVRQAPGKGLEWVARIRSKYNNYATYYADAVKDRFTISRDDSKNTVYLQMNNLKTEDTAVYYCARAGNFGSSYISYWAYWGQGTLVTVSSGGGGSGGGGSGGGGSQTVVTQEPSLTVSPGGTVTITCGSSTGAVTSGNYPNWVQKKPGQAPRGLIGGTKFLAPGTPARFSGSLSGGKAALTLSGVQPEDEAEYYCVLWYSNRWVFGSGTKLTVLGGGGDKTHTCPPCPAPELLGGPSVFLFPPKPKDTLMISRTPEVTCVVVDVSHEDPEVKFNWYVDGVEVHNAKTKPCEEQYGSTYRCVSVLTVLHQDWLNGKEYKCKVSNKALPAPIEKTISKAKGQPREPQVYTLPPSREEMTKNQVSLTCLVKGFYPSDIAVEWESNGQPENNYKTTPPVLDSDGSFFLYSKLTVDKSRWQQGNVFSCSVMHEALHNHYTQKSLSLSPGKGGGGSGGGGSGGGGSGGGGSGGGGSGGGGSDKTHTCPPCPAPELLGGPSVFLFPPKPKDTLMISRTPEVTCVVVDVSHEDPEVKFNWYVDGVEVHNAKTKPCEEQYGSTYRCVSVLTVLHQDWLNGKEYKCKVSNKALPAPIEKTISKAKGQPREPQVYTLPPSREEMTKNQVSLTCLVKGFYPSDIAVEWESNGQPENNYKTTPPVLDSDGSFFLYSKLTVDKSRWQQGNVFSCSVMHEALHNHYTQKSLSLSPGK

SEQ ID NO: 2533 - protein, 1232 aa, Artificial Sequence
  Synthetic
EVQLVESGGGLVQPDRSLRLSCAASGFTFRDYAMHWVRQAPGKCLEWVSGIAWNSDSIGYADSVKGRFTISRDNAKNSLFLQMHSLRPEDTALYFCAKDTLYGSGSPRAFDIWGQGTMVTVSSGGGGQGGGGQGGGGQEIVLTQSPATLSVSPGERATLSCRASQSVNNNLAWYQQKPGQAPRLLIYGASTRATGIPARFSGSGSGTEFTLTISRLEPEDFAVYYCQQSNNWPITFGCGTRLEIKSGGGGQQVQLQQSGPGLVKPSQTLSLTCAISGDSVSSKSAAWNWIRQSPSGCLEWLGRTFYRSTWYNDYAVSVKSRITINPDTSKNQFSLQLNSVIPEDTAVYYCAREGQWLVYGMDVWGQGTTVTVSSGGGGQGGGGQGGGGQQSVLTQPPSASGTPGQRITISCSGSSSNIGSNTVNWYQQLPGTAPKLLIYRNNQRPSGVPDRFSGSKSGTSASLAISGLQSEDEADYYCAAWDDSLNGRVFGCGTKLTVLSGGGGQEVQLVESGGGLVQPGGSLKLSCAASGFTFNKYAINWVRQAPGKGLEWVARIRSKYNNYATYYADAVKDRFTISRDDSKNTVYLQMNNLKTEDTAVYYCARAGNFGSSYISYWAYWGQGTLVTVSSGGGGQGGGGQGGGGQQTVVTQEPSLTVSPGGTVTITCGSSTGAVTSGNYPNWVQKKPGQAPRGLIGGTKFLAPGTPARFSGSLSGGKAALTLSGVQPEDEAEYYCVLWYSNRWVFGSGTKLTVLGGGGCPPCPAPELLGGPSVFLFPPKPKDTLMISRTPEVTCVVVDVSHEEPEVKFNWYVDGVEVHNAKTKPCEEQYGSTYRCVSVLTVLHQDWLNGKEYKCKVSNKALPAPIEKTISKAKGQPREPQVYTLPPSREEMTKNQVSLTCLVKGFYPSDIAVEWESNGQPENNYKTTPPVLDSDGSFFLYSKLTVDKSRWQQGNVFSCSVMHEALHNHYTQKSLSLSPGKGGGGQGGGGQGGGGQGGGGQGGGGQGGGGQCPPCPAPELLGGPSVFLFPPKPKDTLMISRTPEVTCVVVDVSHEEPEVKFNWYVDGVEVHNAKTKPCEEQYGSTYRCVSVLTVLHQDWLNGKEYKCKVSNKALPAPIEKTISKAKGQPREPQVYTLPPSREEMTKNQVSLTCLVKGFYPSDIAVEWESNGQPENNYKTTPPVLDSDGSFFLYSKLTVDKSRWQQGNVFSCSVMHEALHNHYTQKSLSLSPGK

SEQ ID NO: 2534 - protein, 493 aa, Artificial Sequence
  Synthetic
EVQLVESGGGLVQPDRSLRLSCAASGFTFRDYAMHWVRQAPGKCLEWVSGIAWNSDSIGYADSVKGRFTISRDNAKNSLFLQMHSLRPEDTALYFCAKDTLYGSGSPRAFDIWGQGTMVTVSSGGGGSGGGGSGGGGSEIVLTQSPATLSVSPGERATLSCRASQSVNNNLAWYQQKPGQAPRLLIYGASTRATGIPARFSGSGSGTEFTLTISRLEPEDFAVYYCQQSNNWPITFGCGTRLEIKSGGGGSQVQLVQSGAEVKKPGASVKVSCKASGYTFNNYGISWVRQAPGQCLEWMGWISAYNGKTSYAQKFQGRVTMTTDTSTGTAYMELRSLRSDDTAVYYCARDLDFLTGWEYWGQGTLVTVSSGGGGSGGGGSGGGGSEIVLTQSPATLSVSPGERATLSCRASQSVNSNLAWYQQKPGQAPRLLIYGASTRATGIPARFSGSGSGTEFTLTISSLQSEDFAVYYCQQYHTWPVLTFGCGTKVEIK

SEQ ID NO: 2535 - protein, 493 aa, Artificial Sequence
  Synthetic
EVQLVESGGGLVQPDRSLRLSCAASGFTFRDYAMHWVRQAPGKCLEWVSGIAWNSDSIGYADSVKGRFTISRDNAKNSLFLQMHSLRPEDTALYFCAKDTLYGSGSPRAFDIWGQGTMVTVSSGGGGQGGGGQGGGGQEIVLTQSPATLSVSPGERATLSCRASQSVNNNLAWYQQKPGQAPRLLIYGASTRATGIPARFSGSGSGTEFTLTISRLEPEDFAVYYCQQSNNWPITFGCGTRLEIKSGGGGQQVQLVQSGAEVKKPGASVKVSCKASGYTFNNYGISWVRQAPGQCLEWMGWISAYNGKTSYAQKFQGRVTMTTDTSTGTAYMELRSLRSDDTAVYYCARDLDFLTGWEYWGQGTLVTVSSGGGGQGGGGQGGGGQEIVLTQSPATLSVSPGERATLSCRASQSVNSNLAWYQQKPGQAPRLLIYGASTRATGIPARFSGSGSGTEFTLTISSLQSEDFAVYYCQQYHTWPVLTFGCGTKVEIK

SEQ ID NO: 2536 - protein, 748 aa, Artificial Sequence
  Synthetic
EVQLVESGGGLVQPDRSLRLSCAASGFTFRDYAMHWVRQAPGKCLEWVSGIAWNSDSIGYADSVKGRFTISRDNAKNSLFLQMHSLRPEDTALYFCAKDTLYGSGSPRAFDIWGQGTMVTVSSGGGGSGGGGSGGGGSEIVLTQSPATLSVSPGERATLSCRASQSVNNNLAWYQQKPGQAPRLLIYGASTRATGIPARFSGSGSGTEFTLTISRLEPEDFAVYYCQQSNNWPITFGCGTRLEIKSGGGGSQVQLVQSGAEVKKPGASVKVSCKASGYTFNNYGISWVRQAPGQCLEWMGWISAYNGKTSYAQKFQGRVTMTTDTSTGTAYMELRSLRSDDTAVYYCARDLDFLTGWEYWGQGTLVTVSSGGGGSGGGGSGGGGSEIVLTQSPATLSVSPGERATLSCRASQSVNSNLAWYQQKPGQAPRLLIYGASTRATGIPARFSGSGSGTEFTLTISSLQSEDFAVYYCQQYHTWPVLTFGCGTKVEIKSGGGGSEVQLVESGGGLVQPGGSLKLSCAASGFTFNKYAMNWVRQAPGKGLEWVARIRSKYNNYATYYADSVKDRFTISRDDSKNTAYLQMNNLKTEDTAVYYCVRHGNFGNSYISYWAYWGQGTLVTVSSGGGGSGGGGSGGGGSQTVVTQEPSLTVSPGGTVTLTCGSSTGAVTSGNYPNWVQQKPGQAPRGLIGGTKFLAPGTPARFSGSLLGGKAALTLSGVQPEDEAEYYCVLWYSNRWVFGGGTKLTVL

SEQ ID NO: 2537 - protein, 748 aa, Artificial Sequence
  Synthetic
EVQLVESGGGLVQPDRSLRLSCAASGFTFRDYAMHWVRQAPGKCLEWVSGIAWNSDSIGYADSVKGRFTISRDNAKNSLFLQMHSLRPEDTALYFCAKDTLYGSGSPRAFDIWGQGTMVTVSSGGGGQGGGGQGGGGQEIVLTQSPATLSVSPGERATLSCRASQSVNNNLAWYQQKPGQAPRLLIYGASTRATGIPARFSGSGSGTEFTLTISRLEPEDFAVYYCQQSNNWPITFGCGTRLEIKSGGGGQQVQLVQSGAEVKKPGASVKVSCKASGYTFNNYGISWVRQAPGQCLEWMGWISAYNGKTSYAQKFQGRVTMTTDTSTGTAYMELRSLRSDDTAVYYCARDLDFLTGWEYWGQGTLVTVSSGGGGQGGGGQGGGGQEIVLTQSPATLSVSPGERATLSCRASQSVNSNLAWYQQKPGQAPRLLIYGASTRATGIPARFSGSGSGTEFTLTISSLQSEDFAVYYCQQYHTWPVLTFGCGTKVEIKSGGGGQEVQLVESGGGLVQPGGSLKLSCAASGFTFNKYAMNWVRQAPGKGLEWVARIRSKYNNYATYYADSVKDRFTISRDDSKNTAYLQMNNLKTEDTAVYYCVRHGNFGNSYISYWAYWGQGTLVTVSSGGGGQGGGGQGGGGQQTVVTQEPSLTVSPGGTVTLTCGSSTGAVTSGNYPNWVQQKPGQAPRGLIGGTKFLAPGTPARFSGSLLGGKAALTLSGVQPEDEAEYYCVLWYSNRWVFGGGTKLTVL

SEQ ID NO: 2538 - protein, 748 aa, Artificial Sequence
  Synthetic
EVQLVESGGGLVQPDRSLRLSCAASGFTFRDYAMHWVRQAPGKCLEWVSGIAWNSDSIGYADSVKGRFTISRDNAKNSLFLQMHSLRPEDTALYFCAKDTLYGSGSPRAFDIWGQGTMVTVSSGGGGSGGGGSGGGGSEIVLTQSPATLSVSPGERATLSCRASQSVNNNLAWYQQKPGQAPRLLIYGASTRATGIPARFSGSGSGTEFTLTISRLEPEDFAVYYCQQSNNWPITFGCGTRLEIKSGGGGSQVQLVQSGAEVKKPGASVKVSCKASGYTFNNYGISWVRQAPGQCLEWMGWISAYNGKTSYAQKFQGRVTMTTDTSTGTAYMELRSLRSDDTAVYYCARDLDFLTGWEYWGQGTLVTVSSGGGGSGGGGSGGGGSEIVLTQSPATLSVSPGERATLSCRASQSVNSNLAWYQQKPGQAPRLLIYGASTRATGIPARFSGSGSGTEFTLTISSLQSEDFAVYYCQQYHTWPVLTFGCGTKVEIKSGGGGSEVQLVESGGGLVQPGGSLKLSCAASGFTFNKYAINWVRQAPGKGLEWVARIRSKYNNYATYYADAVKDRFTISRDDSKNTVYLQMNNLKTEDTAVYYCARAGNFGSSYISYWAYWGQGTLVTVSSGGGGSGGGGSGGGGSQTVVTQEPSLTVSPGGTVTITCGSSTGAVTSGNYPNWVQKKPGQAPRGLIGGTKFLAPGTPARFSGSLSGGKAALTLSGVQPEDEAEYYCVLWYSNRWVFGSGTKLTVL

SEQ ID NO: 2539 - protein, 748 aa, Artificial Sequence
  Synthetic
EVQLVESGGGLVQPDRSLRLSCAASGFTFRDYAMHWVRQAPGKCLEWVSGIAWNSDSIGYADSVKGRFTISRDNAKNSLFLQMHSLRPEDTALYFCAKDTLYGSGSPRAFDIWGQGTMVTVSSGGGGQGGGGQGGGGQEIVLTQSPATLSVSPGERATLSCRASQSVNNNLAWYQQKPGQAPRLLIYGASTRATGIPARFSGSGSGTEFTLTISRLEPEDFAVYYCQQSNNWPITFGCGTRLEIKSGGGGQQVQLVQSGAEVKKPGASVKVSCKASGYTFNNYGISWVRQAPGQCLEWMGWISAYNGKTSYAQKFQGRVTMTTDTSTGTAYMELRSLRSDDTAVYYCARDLDFLTGWEYWGQGTLVTVSSGGGGQGGGGQGGGGQEIVLTQSPATLSVSPGERATLSCRASQSVNSNLAWYQQKPGQAPRLLIYGASTRATGIPARFSGSGSGTEFTLTISSLQSEDFAVYYCQQYHTWPVLTFGCGTKVEIKSGGGGQEVQLVESGGGLVQPGGSLKLSCAASGFTFNKYAINWVRQAPGKGLEWVARIRSKYNNYATYYADAVKDRFTISRDDSKNTVYLQMNNLKTEDTAVYYCARAGNFGSSYISYWAYWGQGTLVTVSSGGGGQGGGGQGGGGQQTVVTQEPSLTVSPGGTVTITCGSSTGAVTSGNYPNWVQKKPGQAPRGLIGGTKFLAPGTPARFSGSLSGGKAALTLSGVQPEDEAEYYCVLWYSNRWVFGSGTKLTVL

SEQ ID NO: 2540 - protein, 1236 aa, Artificial Sequence
  Synthetic
EVQLVESGGGLVQPDRSLRLSCAASGFTFRDYAMHWVRQAPGKCLEWVSGIAWNSDSIGYADSVKGRFTISRDNAKNSLFLQMHSLRPEDTALYFCAKDTLYGSGSPRAFDIWGQGTMVTVSSGGGGSGGGGSGGGGSEIVLTQSPATLSVSPGERATLSCRASQSVNNNLAWYQQKPGQAPRLLIYGASTRATGIPARFSGSGSGTEFTLTISRLEPEDFAVYYCQQSNNWPITFGCGTRLEIKSGGGGSQVQLVQSGAEVKKPGASVKVSCKASGYTFNNYGISWVRQAPGQCLEWMGWISAYNGKTSYAQKFQGRVTMTTDTSTGTAYMELRSLRSDDTAVYYCARDLDFLTGWEYWGQGTLVTVSSGGGGSGGGGSGGGGSEIVLTQSPATLSVSPGERATLSCRASQSVNSNLAWYQQKPGQAPRLLIYGASTRATGIPARFSGSGSGTEFTLTISSLQSEDFAVYYCQQYHTWPVLTFGCGTKVEIKSGGGGSEVQLVESGGGLVQPGGSLKLSCAASGFTFNKYAMNWVRQAPGKGLEWVARIRSKYNNYATYYADSVKDRFTISRDDSKNTAYLQMNNLKTEDTAVYYCVRHGNFGNSYISYWAYWGQGTLVTVSSGGGGSGGGGSGGGGSQTVVTQEPSLTVSPGGTVTLTCGSSTGAVTSGNYPNWVQQKPGQAPRGLIGGTKFLAPGTPARFSGSLLGGKAALTLSGVQPEDEAEYYCVLWYSNRWVFGGGTKLTVLGGGGDKTHTCPPCPAPELLGGPSVFLFPPKPKDTLMISRTPEVTCVVVDVSHEDPEVKFNWYVDGVEVHNAKTKPCEEQYGSTYRCVSVLTVLHQDWLNGKEYKCKVSNKALPAPIEKTISKAKGQPREPQVYTLPPSREEMTKNQVSLTCLVKGFYPSDIAVEWESNGQPENNYKTTPPVLDSDGSFFLYSKLTVDKSRWQQGNVFSCSVMHEALHNHYTQKSLSLSPGKGGGGSGGGGSGGGGSGGGGSGGGGSGGGGSDKTHTCPPCPAPELLGGPSVFLFPPKPKDTLMISRTPEVTCVVVDVSHEDPEVKFNWYVDGVEVHNAKTKPCEEQYGSTYRCVSVLTVLHQDWLNGKEYKCKVSNKALPAPIEKTISKAKGQPREPQVYTLPPSREEMTKNQVSLTCLVKGFYPSDIAVEWESNGQPENNYKTTPPVLDSDGSFFLYSKLTVDKSRWQQGNVFSCSVMHEALHNHYTQKSLSLSPGK

SEQ ID NO: 2541 - protein, 1226 aa, Artificial Sequence
  Synthetic
EVQLVESGGGLVQPDRSLRLSCAASGFTFRDYAMHWVRQAPGKCLEWVSGIAWNSDSIGYADSVKGRFTISRDNAKNSLFLQMHSLRPEDTALYFCAKDTLYGSGSPRAFDIWGQGTMVTVSSGGGGQGGGGQGGGGQEIVLTQSPATLSVSPGERATLSCRASQSVNNNLAWYQQKPGQAPRLLIYGASTRATGIPARFSGSGSGTEFTLTISRLEPEDFAVYYCQQSNNWPITFGCGTRLEIKSGGGGQQVQLVQSGAEVKKPGASVKVSCKASGYTFNNYGISWVRQAPGQCLEWMGWISAYNGKTSYAQKFQGRVTMTTDTSTGTAYMELRSLRSDDTAVYYCARDLDFLTGWEYWGQGTLVTVSSGGGGQGGGGQGGGGQEIVLTQSPATLSVSPGERATLSCRASQSVNSNLAWYQQKPGQAPRLLIYGASTRATGIPARFSGSGSGTEFTLTISSLQSEDFAVYYCQQYHTWPVLTFGCGTKVEIKSGGGGQEVQLVESGGGLVQPGGSLKLSCAASGFTFNKYAMNWVRQAPGKGLEWVARIRSKYNNYATYYADSVKDRFTISRDDSKNTAYLQMNNLKTEDTAVYYCVRHGNFGNSYISYWAYWGQGTLVTVSSGGGGQGGGGQGGGGQQTVVTQEPSLTVSPGGTVTLTCGSSTGAVTSGNYPNWVQQKPGQAPRGLIGGTKFLAPGTPARFSGSLLGGKAALTLSGVQPEDEAEYYCVLWYSNRWVFGGGTKLTVLGGGGCPPCPAPELLGGPSVFLFPPKPKDTLMISRTPEVTCVVVDVSHEEPEVKFNWYVDGVEVHNAKTKPCEEQYGSTYRCVSVLTVLHQDWLNGKEYKCKVSNKALPAPIEKTISKAKGQPREPQVYTLPPSREEMTKNQVSLTCLVKGFYPSDIAVEWESNGQPENNYKTTPPVLDSDGSFFLYSKLTVDKSRWQQGNVFSCSVMHEALHNHYTQKSLSLSPGKGGGGQGGGGQGGGGQGGGGQGGGGQGGGGQCPPCPAPELLGGPSVFLFPPKPKDTLMISRTPEVTCVVVDVSHEEPEVKFNWYVDGVEVHNAKTKPCEEQYGSTYRCVSVLTVLHQDWLNGKEYKCKVSNKALPAPIEKTISKAKGQPREPQVYTLPPSREEMTKNQVSLTCLVKGFYPSDIAVEWESNGQPENNYKTTPPVLDSDGSFFLYSKLTVDKSRWQQGNVFSCSVMHEALHNHYTQKSLSLSPGK

SEQ ID NO: 2542 - protein, 1236 aa, Artificial Sequence
  Synthetic
EVQLVESGGGLVQPDRSLRLSCAASGFTFRDYAMHWVRQAPGKCLEWVSGIAWNSDSIGYADSVKGRFTISRDNAKNSLFLQMHSLRPEDTALYFCAKDTLYGSGSPRAFDIWGQGTMVTVSSGGGGSGGGGSGGGGSEIVLTQSPATLSVSPGERATLSCRASQSVNNNLAWYQQKPGQAPRLLIYGASTRATGIPARFSGSGSGTEFTLTISRLEPEDFAVYYCQQSNNWPITFGCGTRLEIKSGGGGSQVQLVQSGAEVKKPGASVKVSCKASGYTFNNYGISWVRQAPGQCLEWMGWISAYNGKTSYAQKFQGRVTMTTDTSTGTAYMELRSLRSDDTAVYYCARDLDFLTGWEYWGQGTLVTVSSGGGGSGGGGSGGGGSEIVLTQSPATLSVSPGERATLSCRASQSVNSNLAWYQQKPGQAPRLLIYGASTRATGIPARFSGSGSGTEFTLTISSLQSEDFAVYYCQQYHTWPVLTFGCGTKVEIKSGGGGSEVQLVESGGGLVQPGGSLKLSCAASGFTFNKYAINWVRQAPGKGLEWVARIRSKYNNYATYYADAVKDRFTISRDDSKNTVYLQMNNLKTEDTAVYYCARAGNFGSSYISYWAYWGQGTLVTVSSGGGGSGGGGSGGGGSQTVVTQEPSLTVSPGGTVTITCGSSTGAVTSGNYPNWVQKKPGQAPRGLIGGTKFLAPGTPARFSGSLSGGKAALTLSGVQPEDEAEYYCVLWYSNRWVFGSGTKLTVLGGGGDKTHTCPPCPAPELLGGPSVFLFPPKPKDTLMISRTPEVTCVVVDVSHEDPEVKFNWYVDGVEVHNAKTKPCEEQYGSTYRCVSVLTVLHQDWLNGKEYKCKVSNKALPAPIEKTISKAKGQPREPQVYTLPPSREEMTKNQVSLTCLVKGFYPSDIAVEWESNGQPENNYKTTPPVLDSDGSFFLYSKLTVDKSRWQQGNVFSCSVMHEALHNHYTQKSLSLSPGKGGGGSGGGGSGGGGSGGGGSGGGGSGGGGSDKTHTCPPCPAPELLGGPSVFLFPPKPKDTLMISRTPEVTCVVVDVSHEDPEVKFNWYVDGVEVHNAKTKPCEEQYGSTYRCVSVLTVLHQDWLNGKEYKCKVSNKALPAPIEKTISKAKGQPREPQVYTLPPSREEMTKNQVSLTCLVKGFYPSDIAVEWESNGQPENNYKTTPPVLDSDGSFFLYSKLTVDKSRWQQGNVFSCSVMHEALHNHYTQKSLSLSPGK

SEQ ID NO: 2543 - protein, 1226 aa, Artificial Sequence
  Synthetic
EVQLVESGGGLVQPDRSLRLSCAASGFTFRDYAMHWVRQAPGKCLEWVSGIAWNSDSIGYADSVKGRFTISRDNAKNSLFLQMHSLRPEDTALYFCAKDTLYGSGSPRAFDIWGQGTMVTVSSGGGGQGGGGQGGGGQEIVLTQSPATLSVSPGERATLSCRASQSVNNNLAWYQQKPGQAPRLLIYGASTRATGIPARFSGSGSGTEFTLTISRLEPEDFAVYYCQQSNNWPITFGCGTRLEIKSGGGGQQVQLVQSGAEVKKPGASVKVSCKASGYTFNNYGISWVRQAPGQCLEWMGWISAYNGKTSYAQKFQGRVTMTTDTSTGTAYMELRSLRSDDTAVYYCARDLDFLTGWEYWGQGTLVTVSSGGGGQGGGGQGGGGQEIVLTQSPATLSVSPGERATLSCRASQSVNSNLAWYQQKPGQAPRLLIYGASTRATGIPARFSGSGSGTEFTLTISSLQSEDFAVYYCQQYHTWPVLTFGCGTKVEIKSGGGGQEVQLVESGGGLVQPGGSLKLSCAASGFTFNKYAINWVRQAPGKGLEWVARIRSKYNNYATYYADAVKDRFTISRDDSKNTVYLQMNNLKTEDTAVYYCARAGNFGSSYISYWAYWGQGTLVTVSSGGGGQGGGGQGGGGQQTVVTQEPSLTVSPGGTVTITCGSSTGAVTSGNYPNWVQKKPGQAPRGLIGGTKFLAPGTPARFSGSLSGGKAALTLSGVQPEDEAEYYCVLWYSNRWVFGSGTKLTVLGGGGCPPCPAPELLGGPSVFLFPPKPKDTLMISRTPEVTCVVVDVSHEEPEVKFNWYVDGVEVHNAKTKPCEEQYGSTYRCVSVLTVLHQDWLNGKEYKCKVSNKALPAPIEKTISKAKGQPREPQVYTLPPSREEMTKNQVSLTCLVKGFYPSDIAVEWESNGQPENNYKTTPPVLDSDGSFFLYSKLTVDKSRWQQGNVFSCSVMHEALHNHYTQKSLSLSPGKGGGGQGGGGQGGGGQGGGGQGGGGQGGGGQCPPCPAPELLGGPSVFLFPPKPKDTLMISRTPEVTCVVVDVSHEEPEVKFNWYVDGVEVHNAKTKPCEEQYGSTYRCVSVLTVLHQDWLNGKEYKCKVSNKALPAPIEKTISKAKGQPREPQVYTLPPSREEMTKNQVSLTCLVKGFYPSDIAVEWESNGQPENNYKTTPPVLDSDGSFFLYSKLTVDKSRWQQGNVFSCSVMHEALHNHYTQKSLSLSPGK

SEQ ID NO: 2544 - protein, 496 aa, Artificial Sequence
  Synthetic
EVQLVESGGGLVQPDRSLRLSCAASGFTFRDYAMHWVRQAPGKCLEWVSGIAWNSDSIGYADSVKGRFTISRDNAKNSLFLQMHSLRPEDTALYFCAKDTLYGSGSPRAFDIWGQGTMVTVSSGGGGSGGGGSGGGGSEIVLTQSPATLSVSPGERATLSCRASQSVNNNLAWYQQKPGQAPRLLIYGASTRATGIPARFSGSGSGTEFTLTISRLEPEDFAVYYCQQSNNWPITFGCGTRLEIKSGGGGSQLQLQESGPGLVKPSETLSLTCFVSGGSISNSDYFWGWIRQPPGKCLEWIGTIYYSGRTYYNPSLKSRVTISVDTSKNQFSLMLSSVTAVDTAVYYCARYQYGSFDYWGQGTLVTVSSGGGGSGGGGSGGGGSDIVMTQTPLSLPVTPGEPASISCRSSQSLLHSNGYNYLDWYLQKPGQSPQLLIYLGSNRASGVPDRFSGSGSGTDFTLKISRVEAEDVGVYYCMQALQTPYTFGCGTKVEIR

SEQ ID NO: 2545 - protein, 496 aa, Artificial Sequence
  Synthetic
EVQLVESGGGLVQPDRSLRLSCAASGFTFRDYAMHWVRQAPGKCLEWVSGIAWNSDSIGYADSVKGRFTISRDNAKNSLFLQMHSLRPEDTALYFCAKDTLYGSGSPRAFDIWGQGTMVTVSSGGGGQGGGGQGGGGQEIVLTQSPATLSVSPGERATLSCRASQSVNNNLAWYQQKPGQAPRLLIYGASTRATGIPARFSGSGSGTEFTLTISRLEPEDFAVYYCQQSNNWPITFGCGTRLEIKSGGGGQQLQLQESGPGLVKPSETLSLTCFVSGGSISNSDYFWGWIRQPPGKCLEWIGTIYYSGRTYYNPSLKSRVTISVDTSKNQFSLMLSSVTAVDTAVYYCARYQYGSFDYWGQGTLVTVSSGGGGQGGGGQGGGGQEIVMTQTPLSLPVTPGEPASISCRSSQSLLHSNGYNYLDWYLQKPGQSPQLLIYLGSNRASGVPDRFSGSGSGTDFTLKISRVEAEDVGVYYCMQALQTPYTFGCGTKVEIR

SEQ ID NO: 2546 - protein, 751 aa, Artificial Sequence
  Synthetic
EVQLVESGGGLVQPDRSLRLSCAASGFTFRDYAMHWVRQAPGKCLEWVSGIAWNSDSIGYADSVKGRFTISRDNAKNSLFLQMHSLRPEDTALYFCAKDTLYGSGSPRAFDIWGQGTMVTVSSGGGGSGGGGSGGGGSEIVLTQSPATLSVSPGERATLSCRASQSVNNNLAWYQQKPGQAPRLLIYGASTRATGIPARFSGSGSGTEFTLTISRLEPEDFAVYYCQQSNNWPITFGCGTRLEIKSGGGGSQLQLQESGPGLVKPSETLSLTCFVSGGSISNSDYFWGWIRQPPGKCLEWIGTIYYSGRTYYNPSLKSRVTISVDTSKNQFSLMLSSVTAVDTAVYYCARYQYGSFDYWGQGTLVTVSSGGGGSGGGGSGGGGSDIVMTQTPLSLPVTPGEPASISCRSSQSLLHSNGYNYLDWYLQKPGQSPQLLIYLGSNRASGVPDRFSGSGSGTDFTLKISRVEAEDVGVYYCMQALQTPYTFGCGTKVEIRSGGGGSEVQLVESGGGLVQPGGSLKLSCAASGFTFNKYAMNWVRQAPGKGLEWVARIRSKYNNYATYYADSVKDRFTISRDDSKNTAYLQMNNLKTEDTAVYYCVRHGNFGNSYISYWAYWGQGTLVTVSSGGGGSGGGGSGGGGSQTVVTQEPSLTVSPGGTVTLTCGSSTGAVTSGNYPNWVQQKPGQAPRGLIGGTKFLAPGTPARFSGSLLGGKAALTLSGVQPEDEAEYYCVLWYSNRWVFGGGTKLTVL

SEQ ID NO: 2547 - protein, 751 aa, Artificial Sequence
  Synthetic
EVQLVESGGGLVQPDRSLRLSCAASGFTFRDYAMHWVRQAPGKCLEWVSGIAWNSDSIGYADSVKGRFTISRDNAKNSLFLQMHSLRPEDTALYFCAKDTLYGSGSPRAFDIWGQGTMVTVSSGGGGQGGGGQGGGGQEIVLTQSPATLSVSPGERATLSCRASQSVNNNLAWYQQKPGQAPRLLIYGASTRATGIPARFSGSGSGTEFTLTISRLEPEDFAVYYCQQSNNWPITFGCGTRLEIKSGGGGQQLQLQESGPGLVKPSETLSLTCFVSGGSISNSDYFWGWIRQPPGKCLEWIGTIYYSGRTYYNPSLKSRVTISVDTSKNQFSLMLSSVTAVDTAVYYCARYQYGSFDYWGQGTLVTVSSGGGGQGGGGQGGGGQEIVMTQTPLSLPVTPGEPASISCRSSQSLLHSNGYNYLDWYLQKPGQSPQLLIYLGSNRASGVPDRFSGSGSGTDFTLKISRVEAEDVGVYYCMQALQTPYTFGCGTKVEIRSGGGGQEVQLVESGGGLVQPGGSLKLSCAASGFTFNKYAMNWVRQAPGKGLEWVARIRSKYNNYATYYADSVKDRFTISRDDSKNTAYLQMNNLKTEDTAVYYCVRHGNFGNSYISYWAYWGQGTLVTVSSGGGGQGGGGQGGGGQQTVVTQEPSLTVSPGGTVTLTCGSSTGAVTSGNYPNWVQQKPGQAPRGLIGGTKFLAPGTPARFSGSLLGGKAALTLSGVQPEDEAEYYCVLWYSNRWVFGGGTKLTVL

SEQ ID NO: 2548 - protein, 751 aa, Artificial Sequence
  Synthetic
EVQLVESGGGLVQPDRSLRLSCAASGFTFRDYAMHWVRQAPGKCLEWVSGIAWNSDSIGYADSVKGRFTISRDNAKNSLFLQMHSLRPEDTALYFCAKDTLYGSGSPRAFDIWGQGTMVTVSSGGGGSGGGGSGGGGSEIVLTQSPATLSVSPGERATLSCRASQSVNNNLAWYQQKPGQAPRLLIYGASTRATGIPARFSGSGSGTEFTLTISRLEPEDFAVYYCQQSNNWPITFGCGTRLEIKSGGGGSQLQLQESGPGLVKPSETLSLTCFVSGGSISNSDYFWGWIRQPPGKCLEWIGTIYYSGRTYYNPSLKSRVTISVDTSKNQFSLMLSSVTAVDTAVYYCARYQYGSFDYWGQGTLVTVSSGGGGSGGGGSGGGGSDIVMTQTPLSLPVTPGEPASISCRSSQSLLHSNGYNYLDWYLQKPGQSPQLLIYLGSNRASGVPDRFSGSGSGTDFTLKISRVEAEDVGVYYCMQALQTPYTFGCGTKVEIRSGGGGSEVQLVESGGGLVQPGGSLKLSCAASGFTFNKYAINWVRQAPGKGLEWVARIRSKYNNYATYYADAVKDRFTISRDDSKNTVYLQMNNLKTEDTAVYYCARAGNFGSSYISYWAYWGQGTLVTVSSGGGGSGGGGSGGGGSQTVVTQEPSLTVSPGGTVTITCGSSTGAVTSGNYPNWVQKKPGQAPRGLIGGTKFLAPGTPARFSGSLSGGKAALTLSGVQPEDEAEYYCVLWYSNRWVFGSGTKLTVL

SEQ ID NO: 2549 - protein, 751 aa, Artificial Sequence
  Synthetic
EVQLVESGGGLVQPDRSLRLSCAASGFTFRDYAMHWVRQAPGKCLEWVSGIAWNSDSIGYADSVKGRFTISRDNAKNSLFLQMHSLRPEDTALYFCAKDTLYGSGSPRAFDIWGQGTMVTVSSGGGGQGGGGQGGGGQEIVLTQSPATLSVSPGERATLSCRASQSVNNNLAWYQQKPGQAPRLLIYGASTRATGIPARFSGSGSGTEFTLTISRLEPEDFAVYYCQQSNNWPITFGCGTRLEIKSGGGGQQLQLQESGPGLVKPSETLSLTCFVSGGSISNSDYFWGWIRQPPGKCLEWIGTIYYSGRTYYNPSLKSRVTISVDTSKNQFSLMLSSVTAVDTAVYYCARYQYGSFDYWGQGTLVTVSSGGGGQGGGGQGGGGQEIVMTQTPLSLPVTPGEPASISCRSSQSLLHSNGYNYLDWYLQKPGQSPQLLIYLGSNRASGVPDRFSGSGSGTDFTLKISRVEAEDVGVYYCMQALQTPYTFGCGTKVEIRSGGGGQEVQLVESGGGLVQPGGSLKLSCAASGFTFNKYAINWVRQAPGKGLEWVARIRSKYNNYATYYADAVKDRFTISRDDSKNTVYLQMNNLKTEDTAVYYCARAGNFGSSYISYWAYWGQGTLVTVSSGGGGQGGGGQGGGGQQTVVTQEPSLTVSPGGTVTITCGSSTGAVTSGNYPNWVQKKPGQAPRGLIGGTKFLAPGTPARFSGSLSGGKAALTLSGVQPEDEAEYYCVLWYSNRWVFGSGTKLTVL

SEQ ID NO: 2550 - protein, 1239 aa, Artificial Sequence
  Synthetic
EVQLVESGGGLVQPDRSLRLSCAASGFTFRDYAMHWVRQAPGKCLEWVSGIAWNSDSIGYADSVKGRFTISRDNAKNSLFLQMHSLRPEDTALYFCAKDTLYGSGSPRAFDIWGQGTMVTVSSGGGGSGGGGSGGGGSEIVLTQSPATLSVSPGERATLSCRASQSVNNNLAWYQQKPGQAPRLLIYGASTRATGIPARFSGSGSGTEFTLTISRLEPEDFAVYYCQQSNNWPITFGCGTRLEIKSGGGGSQLQLQESGPGLVKPSETLSLTCFVSGGSISNSDYFWGWIRQPPGKCLEWIGTIYYSGRTYYNPSLKSRVTISVDTSKNQFSLMLSSVTAVDTAVYYCARYQYGSFDYWGQGTLVTVSSGGGGSGGGGSGGGGSDIVMTQTPLSLPVTPGEPASISCRSSQSLLHSNGYNYLDWYLQKPGQSPQLLIYLGSNRASGVPDRFSGSGSGTDFTLKISRVEAEDVGVYYCMQALQTPYTFGCGTKVEIRSGGGGSEVQLVESGGGLVQPGGSLKLSCAASGFTFNKYAMNWVRQAPGKGLEWVARIRSKYNNYATYYADSVKDRFTISRDDSKNTAYLQMNNLKTEDTAVYYCVRHGNFGNSYISYWAYWGQGTLVTVSSGGGGSGGGGSGGGGSQTVVTQEPSLTVSPGGTVTLTCGSSTGAVTSGNYPNWVQQKPGQAPRGLIGGTKFLAPGTPARFSGSLLGGKAALTLSGVQPEDEAEYYCVLWYSNRWVFGGGTKLTVLGGGGDKTHTCPPCPAPELLGGPSVFLFPPKPKDTLMISRTPEVTCVVVDVSHEDPEVKFNWYVDGVEVHNAKTKPCEEQYGSTYRCVSVLTVLHQDWLNGKEYKCKVSNKALPAPIEKTISKAKGQPREPQVYTLPPSREEMTKNQVSLTCLVKGFYPSDIAVEWESNGQPENNYKTTPPVLDSDGSFFLYSKLTVDKSRWQQGNVFSCSVMHEALHNHYTQKSLSLSPGKGGGGSGGGGSGGGGSGGGGSGGGGSGGGGSDKTHTCPPCPAPELLGGPSVFLFPPKPKDTLMISRTPEVTCVVVDVSHEDPEVKFNWYVDGVEVHNAKTKPCEEQYGSTYRCVSVLTVLHQDWLNGKEYKCKVSNKALPAPIEKTISKAKGQPREPQVYTLPPSREEMTKNQVSLTCLVKGFYPSDIAVEWESNGQPENNYKTTPPVLDSDGSFFLYSKLTVDKSRWQQGNVFSCSVMHEALHNHYTQKSLSLSPGK

SEQ ID NO: 2551 - protein, 1229 aa, Artificial Sequence
  Synthetic
EVQLVESGGGLVQPDRSLRLSCAASGFTFRDYAMHWVRQAPGKCLEWVSGIAWNSDSIGYADSVKGRFTISRDNAKNSLFLQMHSLRPEDTALYFCAKDTLYGSGSPRAFDIWGQGTMVTVSSGGGGQGGGGQGGGGQEIVLTQSPATLSVSPGERATLSCRASQSVNNNLAWYQQKPGQAPRLLIYGASTRATGIPARFSGSGSGTEFTLTISRLEPEDFAVYYCQQSNNWPITFGCGTRLEIKSGGGGQQLQLQESGPGLVKPSETLSLTCFVSGGSISNSDYFWGWIRQPPGKCLEWIGTIYYSGRTYYNPSLKSRVTISVDTSKNQFSLMLSSVTAVDTAVYYCARYQYGSFDYWGQGTLVTVSSGGGGQGGGGQGGGGQEIVMTQTPLSLPVTPGEPASISCRSSQSLLHSNGYNYLDWYLQKPGQSPQLLIYLGSNRASGVPDRFSGSGSGTDFTLKISRVEAEDVGVYYCMQALQTPYTFGCGTKVEIRSGGGGQEVQLVESGGGLVQPGGSLKLSCAASGFTFNKYAMNWVRQAPGKGLEWVARIRSKYNNYATYYADSVKDRFTISRDDSKNTAYLQMNNLKTEDTAVYYCVRHGNFGNSYISYWAYWGQGTLVTVSSGGGGQGGGGQGGGGQQTVVTQEPSLTVSPGGTVTLTCGSSTGAVTSGNYPNWVQQKPGQAPRGLIGGTKFLAPGTPARFSGSLLGGKAALTLSGVQPEDEAEYYCVLWYSNRWVFGGGTKLTVLGGGGCPPCPAPELLGGPSVFLFPPKPKDTLMISRTPEVTCVVVDVSHEEPEVKFNWYVDGVEVHNAKTKPCEEQYGSTYRCVSVLTVLHQDWLNGKEYKCKVSNKALPAPIEKTISKAKGQPREPQVYTLPPSREEMTKNQVSLTCLVKGFYPSDIAVEWESNGQPENNYKTTPPVLDSDGSFFLYSKLTVDKSRWQQGNVFSCSVMHEALHNHYTQKSLSLSPGKGGGGQGGGGQGGGGQGGGGQGGGGQGGGGQCPPCPAPELLGGPSVFLFPPKPKDTLMISRTPEVTCVVVDVSHEEPEVKFNWYVDGVEVHNAKTKPCEEQYGSTYRCVSVLTVLHQDWLNGKEYKCKVSNKALPAPIEKTISKAKGQPREPQVYTLPPSREEMTKNQVSLTCLVKGFYPSDIAVEWESNGQPENNYKTTPPVLDSDGSFFLYSKLTVDKSRWQQGNVFSCSVMHEALHNHYTQKSLSLSPGK

SEQ ID NO: 2552 - protein, 1239 aa, Artificial Sequence
  Synthetic
EVQLVESGGGLVQPDRSLRLSCAASGFTFRDYAMHWVRQAPGKCLEWVSGIAWNSDSIGYADSVKGRFTISRDNAKNSLFLQMHSLRPEDTALYFCAKDTLYGSGSPRAFDIWGQGTMVTVSSGGGGSGGGGSGGGGSEIVLTQSPATLSVSPGERATLSCRASQSVNNNLAWYQQKPGQAPRLLIYGASTRATGIPARFSGSGSGTEFTLTISRLEPEDFAVYYCQQSNNWPITFGCGTRLEIKSGGGGSQLQLQESGPGLVKPSETLSLTCFVSGGSISNSDYFWGWIRQPPGKCLEWIGTIYYSGRTYYNPSLKSRVTISVDTSKNQFSLMLSSVTAVDTAVYYCARYQYGSFDYWGQGTLVTVSSGGGGSGGGGSGGGGSDIVMTQTPLSLPVTPGEPASISCRSSQSLLHSNGYNYLDWYLQKPGQSPQLLIYLGSNRASGVPDRFSGSGSGTDFTLKISRVEAEDVGVYYCMQALQTPYTFGCGTKVEIRSGGGGSEVQLVESGGGLVQPGGSLKLSCAASGFTFNKYAINWVRQAPGKGLEWVARIRSKYNNYATYYADAVKDRFTISRDDSKNTVYLQMNNLKTEDTAVYYCARAGNFGSSYISYWAYWGQGTLVTVSSGGGGSGGGGSGGGGSQTVVTQEPSLTVSPGGTVTITCGSSTGAVTSGNYPNWVQKKPGQAPRGLIGGTKFLAPGTPARFSGSLSGGKAALTLSGVQPEDEAEYYCVLWYSNRWVFGSGTKLTVLGGGGDKTHTCPPCPAPELLGGPSVFLFPPKPKDTLMISRTPEVTCVVVDVSHEDPEVKFNWYVDGVEVHNAKTKPCEEQYGSTYRCVSVLTVLHQDWLNGKEYKCKVSNKALPAPIEKTISKAKGQPREPQVYTLPPSREEMTKNQVSLTCLVKGFYPSDIAVEWESNGQPENNYKTTPPVLDSDGSFFLYSKLTVDKSRWQQGNVFSCSVMHEALHNHYTQKSLSLSPGKGGGGSGGGGSGGGGSGGGGSGGGGSGGGGSDKTHTCPPCPAPELLGGPSVFLFPPKPKDTLMISRTPEVTCVVVDVSHEDPEVKFNWYVDGVEVHNAKTKPCEEQYGSTYRCVSVLTVLHQDWLNGKEYKCKVSNKALPAPIEKTISKAKGQPREPQVYTLPPSREEMTKNQVSLTCLVKGFYPSDIAVEWESNGQPENNYKTTPPVLDSDGSFFLYSKLTVDKSRWQQGNVFSCSVMHEALHNHYTQKSLSLSPGK

SEQ ID NO: 2553 - protein, 1229 aa, Artificial Sequence
  Synthetic
EVQLVESGGGLVQPDRSLRLSCAASGFTFRDYAMHWVRQAPGKCLEWVSGIAWNSDSIGYADSVKGRFTISRDNAKNSLFLQMHSLRPEDTALYFCAKDTLYGSGSPRAFDIWGQGTMVTVSSGGGGQGGGGQGGGGQEIVLTQSPATLSVSPGERATLSCRASQSVNNNLAWYQQKPGQAPRLLIYGASTRATGIPARFSGSGSGTEFTLTISRLEPEDFAVYYCQQSNNWPITFGCGTRLEIKSGGGGQQLQLQESGPGLVKPSETLSLTCFVSGGSISNSDYFWGWIRQPPGKCLEWIGTIYYSGRTYYNPSLKSRVTISVDTSKNQFSLMLSSVTAVDTAVYYCARYQYGSFDYWGQGTLVTVSSGGGGQGGGGQGGGGQEIVMTQTPLSLPVTPGEPASISCRSSQSLLHSNGYNYLDWYLQKPGQSPQLLIYLGSNRASGVPDRFSGSGSGTDFTLKISRVEAEDVGVYYCMQALQTPYTFGCGTKVEIRSGGGGQEVQLVESGGGLVQPGGSLKLSCAASGFTFNKYAINWVRQAPGKGLEWVARIRSKYNNYATYYADAVKDRFTISRDDSKNTVYLQMNNLKTEDTAVYYCARAGNFGSSYISYWAYWGQGTLVTVSSGGGGQGGGGQGGGGQQTVVTQEPSLTVSPGGTVTITCGSSTGAVTSGNYPNWVQKKPGQAPRGLIGGTKFLAPGTPARFSGSLSGGKAALTLSGVQPEDEAEYYCVLWYSNRWVFGSGTKLTVLGGGGCPPCPAPELLGGPSVFLFPPKPKDTLMISRTPEVTCVVVDVSHEEPEVKFNWYVDGVEVHNAKTKPCEEQYGSTYRCVSVLTVLHQDWLNGKEYKCKVSNKALPAPIEKTISKAKGQPREPQVYTLPPSREEMTKNQVSLTCLVKGFYPSDIAVEWESNGQPENNYKTTPPVLDSDGSFFLYSKLTVDKSRWQQGNVFSCSVMHEALHNHYTQKSLSLSPGKGGGGQGGGGQGGGGQGGGGQGGGGQGGGGQCPPCPAPELLGGPSVFLFPPKPKDTLMISRTPEVTCVVVDVSHEEPEVKFNWYVDGVEVHNAKTKPCEEQYGSTYRCVSVLTVLHQDWLNGKEYKCKVSNKALPAPIEKTISKAKGQPREPQVYTLPPSREEMTKNQVSLTCLVKGFYPSDIAVEWESNGQPENNYKTTPPVLDSDGSFFLYSKLTVDKSRWQQGNVFSCSVMHEALHNHYTQKSLSLSPGK

SEQ ID NO: 2554 - protein, 498 aa, Artificial Sequence
  Synthetic
EVQLVESGGGLVQPDRSLRLSCAASGFTFRDYAMHWVRQAPGKCLEWVSGIAWNSDSIGYADSVKGRFTISRDNAKNSLFLQMHSLRPEDTALYFCAKDTLYGSGSPRAFDIWGQGTMVTVSSGGGGSGGGGSGGGGSEIVLTQSPATLSVSPGERATLSCRASQSVNNNLAWYQQKPGQAPRLLIYGASTRATGIPARFSGSGSGTEFTLTISRLEPEDFAVYYCQQSNNWPITFGCGTRLEIKSGGGGSQVQLVESGGGVVQPGRSLRLSCAASGFTFSAYGMHWVRQAPGKCLEWVAVILYDGSNKYYADSVKGRFTISRDNSKNTLYLQMNSLRAEDTAVYYCARGSGWLQLGDYFDYWGQGTLVTVSSGGGGSGGGGSGGGGSQSALTQPPSVSGSPGQSITISCTGTSSDVGGYNYVSWYQQHPGKAPKLMIYEVSNRPSGVSNRFSGSKSGNTASLTISGLQAEDEADYYCSSYTSSSTLVFGCGTKLTVL

SEQ ID NO: 2555 - protein, 498 aa, Artificial Sequence
  Synthetic
EVQLVESGGGLVQPDRSLRLSCAASGFTFRDYAMHWVRQAPGKCLEWVSGIAWNSDSIGYADSVKGRFTISRDNAKNSLFLQMHSLRPEDTALYFCAKDTLYGSGSPRAFDIWGQGTMVTVSSGGGGQGGGGQGGGGQEIVLTQSPATLSVSPGERATLSCRASQSVNNNLAWYQQKPGQAPRLLIYGASTRATGIPARFSGSGSGTEFTLTISRLEPEDFAVYYCQQSNNWPITFGCGTRLEIKSGGGGQQVQLVESGGGVVQPGRSLRLSCAASGFTFSAYGMHWVRQAPGKCLEWVAVILYDGSNKYYADSVKGRFTISRDNSKNTLYLQMNSLRAEDTAVYYCARGSGWLQLGDYFDYWGQGTLVTVSSGGGGQGGGGQGGGGQQSALTQPPSVSGSPGQSITISCTGTSSDVGGYNYVSWYQQHPGKAPKLMIYEVSNRPSGVSNRFSGSKSGNTASLTISGLQAEDEADYYCSSYTSSSTLVFGCGTKLTVL

SEQ ID NO: 2556 - protein, 753 aa, Artificial Sequence
  Synthetic
EVQLVESGGGLVQPDRSLRLSCAASGFTFRDYAMHWVRQAPGKCLEWVSGIAWNSDSIGYADSVKGRFTISRDNAKNSLFLQMHSLRPEDTALYFCAKDTLYGSGSPRAFDIWGQGTMVTVSSGGGGSGGGGSGGGGSEIVLTQSPATLSVSPGERATLSCRASQSVNNNLAWYQQKPGQAPRLLIYGASTRATGIPARFSGSGSGTEFTLTISRLEPEDFAVYYCQQSNNWPITFGCGTRLEIKSGGGGSQVQLVESGGGVVQPGRSLRLSCAASGFTFSAYGMHWVRQAPGKCLEWVAVILYDGSNKYYADSVKGRFTISRDNSKNTLYLQMNSLRAEDTAVYYCARGSGWLQLGDYFDYWGQGTLVTVSSGGGGSGGGGSGGGGSQSALTQPPSVSGSPGQSITISCTGTSSDVGGYNYVSWYQQHPGKAPKLMIYEVSNRPSGVSNRFSGSKSGNTASLTISGLQAEDEADYYCSSYTSSSTLVFGCGTKLTVLSGGGGSEVQLVESGGGLVQPGGSLKLSCAASGFTFNKYAMNWVRQAPGKGLEWVARIRSKYNNYATYYADSVKDRFTISRDDSKNTAYLQMNNLKTEDTAVYYCVRHGNFGNSYISYWAYWGQGTLVTVSSGGGGSGGGGSGGGGSQTVVTQEPSLTVSPGGTVTLTCGSSTGAVTSGNYPNWVQQKPGQAPRGLIGGTKFLAPGTPARFSGSLLGGKAALTLSGVQPEDEAEYYCVLWYSNRWVFGGGTKLTVL

SEQ ID NO: 2557 - protein, 753 aa, Artificial Sequence
  Synthetic
EVQLVESGGGLVQPDRSLRLSCAASGFTFRDYAMHWVRQAPGKCLEWVSGIAWNSDSIGYADSVKGRFTISRDNAKNSLFLQMHSLRPEDTALYFCAKDTLYGSGSPRAFDIWGQGTMVTVSSGGGGQGGGGQGGGGQEIVLTQSPATLSVSPGERATLSCRASQSVNNNLAWYQQKPGQAPRLLIYGASTRATGIPARFSGSGSGTEFTLTISRLEPEDFAVYYCQQSNNWPITFGCGTRLEIKSGGGGQQVQLVESGGGVVQPGRSLRLSCAASGFTFSAYGMHWVRQAPGKCLEWVAVILYDGSNKYYADSVKGRFTISRDNSKNTLYLQMNSLRAEDTAVYYCARGSGWLQLGDYFDYWGQGTLVTVSSGGGGQGGGGQGGGGQQSALTQPPSVSGSPGQSITISCTGTSSDVGGYNYVSWYQQHPGKAPKLMIYEVSNRPSGVSNRFSGSKSGNTASLTISGLQAEDEADYYCSSYTSSSTLVFGCGTKLTVLSGGGGQEVQLVESGGGLVQPGGSLKLSCAASGFTFNKYAMNWVRQAPGKGLEWVARIRSKYNNYATYYADSVKDRFTISRDDSKNTAYLQMNNLKTEDTAVYYCVRHGNFGNSYISYWAYWGQGTLVTVSSGGGGQGGGGQGGGGQQTVVTQEPSLTVSPGGTVTLTCGSSTGAVTSGNYPNWVQQKPGQAPRGLIGGTKFLAPGTPARFSGSLLGGKAALTLSGVQPEDEAEYYCVLWYSNRWVFGGGTKLTVL

SEQ ID NO: 2558 - protein, 753 aa, Artificial Sequence
  Synthetic
EVQLVESGGGLVQPDRSLRLSCAASGFTFRDYAMHWVRQAPGKCLEWVSGIAWNSDSIGYADSVKGRFTISRDNAKNSLFLQMHSLRPEDTALYFCAKDTLYGSGSPRAFDIWGQGTMVTVSSGGGGSGGGGSGGGGSEIVLTQSPATLSVSPGERATLSCRASQSVNNNLAWYQQKPGQAPRLLIYGASTRATGIPARFSGSGSGTEFTLTISRLEPEDFAVYYCQQSNNWPITFGCGTRLEIKSGGGGSQVQLVESGGGVVQPGRSLRLSCAASGFTFSAYGMHWVRQAPGKCLEWVAVILYDGSNKYYADSVKGRFTISRDNSKNTLYLQMNSLRAEDTAVYYCARGSGWLQLGDYFDYWGQGTLVTVSSGGGGSGGGGSGGGGSQSALTQPPSVSGSPGQSITISCTGTSSDVGGYNYVSWYQQHPGKAPKLMIYEVSNRPSGVSNRFSGSKSGNTASLTISGLQAEDEADYYCSSYTSSSTLVFGCGTKLTVLSGGGGSEVQLVESGGGLVQPGGSLKLSCAASGFTFNKYAINWVRQAPGKGLEWVARIRSKYNNYATYYADAVKDRFTISRDDSKNTVYLQMNNLKTEDTAVYYCARAGNFGSSYISYWAYWGQGTLVTVSSGGGGSGGGGSGGGGSQTVVTQEPSLTVSPGGTVTITCGSSTGAVTSGNYPNWVQKKPGQAPRGLIGGTKFLAPGTPARFSGSLSGGKAALTLSGVQPEDEAEYYCVLWYSNRWVFGSGTKLTVL

SEQ ID NO: 2559 - protein, 753 aa, Artificial Sequence
  Synthetic
EVQLVESGGGLVQPDRSLRLSCAASGFTFRDYAMHWVRQAPGKCLEWVSGIAWNSDSIGYADSVKGRFTISRDNAKNSLFLQMHSLRPEDTALYFCAKDTLYGSGSPRAFDIWGQGTMVTVSSGGGGQGGGGQGGGGQEIVLTQSPATLSVSPGERATLSCRASQSVNNNLAWYQQKPGQAPRLLIYGASTRATGIPARFSGSGSGTEFTLTISRLEPEDFAVYYCQQSNNWPITFGCGTRLEIKSGGGGQQVQLVESGGGVVQPGRSLRLSCAASGFTFSAYGMHWVRQAPGKCLEWVAVILYDGSNKYYADSVKGRFTISRDNSKNTLYLQMNSLRAEDTAVYYCARGSGWLQLGDYFDYWGQGTLVTVSSGGGGQGGGGQGGGGQQSALTQPPSVSGSPGQSITISCTGTSSDVGGYNYVSWYQQHPGKAPKLMIYEVSNRPSGVSNRFSGSKSGNTASLTISGLQAEDEADYYCSSYTSSSTLVFGCGTKLTVLSGGGGQEVQLVESGGGLVQPGGSLKLSCAASGFTFNKYAINWVRQAPGKGLEWVARIRSKYNNYATYYADAVKDRFTISRDDSKNTVYLQMNNLKTEDTAVYYCARAGNFGSSYISYWAYWGQGTLVTVSSGGGGQGGGGQGGGGQQTVVTQEPSLTVSPGGTVTITCGSSTGAVTSGNYPNWVQKKPGQAPRGLIGGTKFLAPGTPARFSGSLSGGKAALTLSGVQPEDEAEYYCVLWYSNRWVFGSGTKLTVL

SEQ ID NO: 2560 - protein, 1241 aa, Artificial Sequence
  Synthetic
EVQLVESGGGLVQPDRSLRLSCAASGFTFRDYAMHWVRQAPGKCLEWVSGIAWNSDSIGYADSVKGRFTISRDNAKNSLFLQMHSLRPEDTALYFCAKDTLYGSGSPRAFDIWGQGTMVTVSSGGGGSGGGGSGGGGSEIVLTQSPATLSVSPGERATLSCRASQSVNNNLAWYQQKPGQAPRLLIYGASTRATGIPARFSGSGSGTEFTLTISRLEPEDFAVYYCQQSNNWPITFGCGTRLEIKSGGGGSQVQLVESGGGVVQPGRSLRLSCAASGFTFSAYGMHWVRQAPGKCLEWVAVILYDGSNKYYADSVKGRFTISRDNSKNTLYLQMNSLRAEDTAVYYCARGSGWLQLGDYFDYWGQGTLVTVSSGGGGSGGGGSGGGGSQSALTQPPSVSGSPGQSITISCTGTSSDVGGYNYVSWYQQHPGKAPKLMIYEVSNRPSGVSNRFSGSKSGNTASLTISGLQAEDEADYYCSSYTSSSTLVFGCGTKLTVLSGGGGSEVQLVESGGGLVQPGGSLKLSCAASGFTFNKYAMNWVRQAPGKGLEWVARIRSKYNNYATYYADSVKDRFTISRDDSKNTAYLQMNNLKTEDTAVYYCVRHGNFGNSYISYWAYWGQGTLVTVSSGGGGSGGGGSGGGGSQTVVTQEPSLTVSPGGTVTLTCGSSTGAVTSGNYPNWVQQKPGQAPRGLIGGTKFLAPGTPARFSGSLLGGKAALTLSGVQPEDEAEYYCVLWYSNRWVFGGGTKLTVLGGGGDKTHTCPPCPAPELLGGPSVFLFPPKPKDTLMISRTPEVTCVVVDVSHEDPEVKFNWYVDGVEVHNAKTKPCEEQYGSTYRCVSVLTVLHQDWLNGKEYKCKVSNKALPAPIEKTISKAKGQPREPQVYTLPPSREEMTKNQVSLTCLVKGFYPSDIAVEWESNGQPENNYKTTPPVLDSDGSFFLYSKLTVDKSRWQQGNVFSCSVMHEALHNHYTQKSLSLSPGKGGGGSGGGGSGGGGSGGGGSGGGGSGGGGSDKTHTCPPCPAPELLGGPSVFLFPPKPKDTLMISRTPEVTCVVVDVSHEDPEVKFNWYVDGVEVHNAKTKPCEEQYGSTYRCVSVLTVLHQDWLNGKEYKCKVSNKALPAPIEKTISKAKGQPREPQVYTLPPSREEMTKNQVSLTCLVKGFYPSDIAVEWESNGQPENNYKTTPPVLDSDGSFFLYSKLTVDKSRWQQGNVFSCSVMHEALHNHYTQKSLSLSPGK

SEQ ID NO: 2561 - protein, 1231 aa, Artificial Sequence
  Synthetic
EVQLVESGGGLVQPDRSLRLSCAASGFTFRDYAMHWVRQAPGKCLEWVSGIAWNSDSIGYADSVKGRFTISRDNAKNSLFLQMHSLRPEDTALYFCAKDTLYGSGSPRAFDIWGQGTMVTVSSGGGGQGGGGQGGGGQEIVLTQSPATLSVSPGERATLSCRASQSVNNNLAWYQQKPGQAPRLLIYGASTRATGIPARFSGSGSGTEFTLTISRLEPEDFAVYYCQQSNNWPITFGCGTRLEIKSGGGGQQVQLVESGGGVVQPGRSLRLSCAASGFTFSAYGMHWVRQAPGKCLEWVAVILYDGSNKYYADSVKGRFTISRDNSKNTLYLQMNSLRAEDTAVYYCARGSGWLQLGDYFDYWGQGTLVTVSSGGGGQGGGGQGGGGQQSALTQPPSVSGSPGQSITISCTGTSSDVGGYNYVSWYQQHPGKAPKLMIYEVSNRPSGVSNRFSGSKSGNTASLTISGLQAEDEADYYCSSYTSSSTLVFGCGTKLTVLSGGGGQEVQLVESGGGLVQPGGSLKLSCAASGFTFNKYAMNWVRQAPGKGLEWVARIRSKYNNYATYYADSVKDRFTISRDDSKNTAYLQMNNLKTEDTAVYYCVRHGNFGNSYISYWAYWGQGTLVTVSSGGGGQGGGGQGGGGQQTVVTQEPSLTVSPGGTVTLTCGSSTGAVTSGNYPNWVQQKPGQAPRGLIGGTKFLAPGTPARFSGSLLGGKAALTLSGVQPEDEAEYYCVLWYSNRWVFGGGTKLTVLGGGGCPPCPAPELLGGPSVFLFPPKPKDTLMISRTPEVTCVVVDVSHEEPEVKFNWYVDGVEVHNAKTKPCEEQYGSTYRCVSVLTVLHQDWLNGKEYKCKVSNKALPAPIEKTISKAKGQPREPQVYTLPPSREEMTKNQVSLTCLVKGFYPSDIAVEWESNGQPENNYKTTPPVLDSDGSFFLYSKLTVDKSRWQQGNVFSCSVMHEALHNHYTQKSLSLSPGKGGGGQGGGGQGGGGQGGGGQGGGGQGGGGQCPPCPAPELLGGPSVFLFPPKPKDTLMISRTPEVTCVVVDVSHEEPEVKFNWYVDGVEVHNAKTKPCEEQYGSTYRCVSVLTVLHQDWLNGKEYKCKVSNKALPAPIEKTISKAKGQPREPQVYTLPPSREEMTKNQVSLTCLVKGFYPSDIAVEWESNGQPENNYKTTPPVLDSDGSFFLYSKLTVDKSRWQQGNVFSCSVMHEALHNHYTQKSLSLSPGK

SEQ ID NO: 2562 - protein, 1241 aa, Artificial Sequence
  Synthetic
EVQLVESGGGLVQPDRSLRLSCAASGFTFRDYAMHWVRQAPGKCLEWVSGIAWNSDSIGYADSVKGRFTISRDNAKNSLFLQMHSLRPEDTALYFCAKDTLYGSGSPRAFDIWGQGTMVTVSSGGGGSGGGGSGGGGSEIVLTQSPATLSVSPGERATLSCRASQSVNNNLAWYQQKPGQAPRLLIYGASTRATGIPARFSGSGSGTEFTLTISRLEPEDFAVYYCQQSNNWPITFGCGTRLEIKSGGGGSQVQLVESGGGVVQPGRSLRLSCAASGFTFSAYGMHWVRQAPGKCLEWVAVILYDGSNKYYADSVKGRFTISRDNSKNTLYLQMNSLRAEDTAVYYCARGSGWLQLGDYFDYWGQGTLVTVSSGGGGSGGGGSGGGGSQSALTQPPSVSGSPGQSITISCTGTSSDVGGYNYVSWYQQHPGKAPKLMIYEVSNRPSGVSNRFSGSKSGNTASLTISGLQAEDEADYYCSSYTSSSTLVFGCGTKLTVLSGGGGSEVQLVESGGGLVQPGGSLKLSCAASGFTFNKYAINWVRQAPGKGLEWVARIRSKYNNYATYYADAVKDRFTISRDDSKNTVYLQMNNLKTEDTAVYYCARAGNFGSSYISYWAYWGQGTLVTVSSGGGGSGGGGSGGGGSQTVVTQEPSLTVSPGGTVTITCGSSTGAVTSGNYPNWVQKKPGQAPRGLIGGTKFLAPGTPARFSGSLSGGKAALTLSGVQPEDEAEYYCVLWYSNRWVFGSGTKLTVLGGGGDKTHTCPPCPAPELLGGPSVFLFPPKPKDTLMISRTPEVTCVVVDVSHEDPEVKFNWYVDGVEVHNAKTKPCEEQYGSTYRCVSVLTVLHQDWLNGKEYKCKVSNKALPAPIEKTISKAKGQPREPQVYTLPPSREEMTKNQVSLTCLVKGFYPSDIAVEWESNGQPENNYKTTPPVLDSDGSFFLYSKLTVDKSRWQQGNVFSCSVMHEALHNHYTQKSLSLSPGKGGGGSGGGGSGGGGSGGGGSGGGGSGGGGSDKTHTCPPCPAPELLGGPSVFLFPPKPKDTLMISRTPEVTCVVVDVSHEDPEVKFNWYVDGVEVHNAKTKPCEEQYGSTYRCVSVLTVLHQDWLNGKEYKCKVSNKALPAPIEKTISKAKGQPREPQVYTLPPSREEMTKNQVSLTCLVKGFYPSDIAVEWESNGQPENNYKTTPPVLDSDGSFFLYSKLTVDKSRWQQGNVFSCSVMHEALHNHYTQKSLSLSPGK

SEQ ID NO: 2563 - protein, 1231 aa, Artificial Sequence
  Synthetic
EVQLVESGGGLVQPDRSLRLSCAASGFTFRDYAMHWVRQAPGKCLEWVSGIAWNSDSIGYADSVKGRFTISRDNAKNSLFLQMHSLRPEDTALYFCAKDTLYGSGSPRAFDIWGQGTMVTVSSGGGGQGGGGQGGGGQEIVLTQSPATLSVSPGERATLSCRASQSVNNNLAWYQQKPGQAPRLLIYGASTRATGIPARFSGSGSGTEFTLTISRLEPEDFAVYYCQQSNNWPITFGCGTRLEIKSGGGGQQVQLVESGGGVVQPGRSLRLSCAASGFTFSAYGMHWVRQAPGKCLEWVAVILYDGSNKYYADSVKGRFTISRDNSKNTLYLQMNSLRAEDTAVYYCARGSGWLQLGDYFDYWGQGTLVTVSSGGGGQGGGGQGGGGQQSALTQPPSVSGSPGQSITISCTGTSSDVGGYNYVSWYQQHPGKAPKLMIYEVSNRPSGVSNRFSGSKSGNTASLTISGLQAEDEADYYCSSYTSSSTLVFGCGTKLTVLSGGGGQEVQLVESGGGLVQPGGSLKLSCAASGFTFNKYAINWVRQAPGKGLEWVARIRSKYNNYATYYADAVKDRFTISRDDSKNTVYLQMNNLKTEDTAVYYCARAGNFGSSYISYWAYWGQGTLVTVSSGGGGQGGGGQGGGGQQTVVTQEPSLTVSPGGTVTITCGSSTGAVTSGNYPNWVQKKPGQAPRGLIGGTKFLAPGTPARFSGSLSGGKAALTLSGVQPEDEAEYYCVLWYSNRWVFGSGTKLTVLGGGGCPPCPAPELLGGPSVFLFPPKPKDTLMISRTPEVTCVVVDVSHEEPEVKFNWYVDGVEVHNAKTKPCEEQYGSTYRCVSVLTVLHQDWLNGKEYKCKVSNKALPAPIEKTISKAKGQPREPQVYTLPPSREEMTKNQVSLTCLVKGFYPSDIAVEWESNGQPENNYKTTPPVLDSDGSFFLYSKLTVDKSRWQQGNVFSCSVMHEALHNHYTQKSLSLSPGKGGGGQGGGGQGGGGQGGGGQGGGGQGGGGQCPPCPAPELLGGPSVFLFPPKPKDTLMISRTPEVTCVVVDVSHEEPEVKFNWYVDGVEVHNAKTKPCEEQYGSTYRCVSVLTVLHQDWLNGKEYKCKVSNKALPAPIEKTISKAKGQPREPQVYTLPPSREEMTKNQVSLTCLVKGFYPSDIAVEWESNGQPENNYKTTPPVLDSDGSFFLYSKLTVDKSRWQQGNVFSCSVMHEALHNHYTQKSLSLSPGK

SEQ ID NO: 2564 - protein, 491 aa, Artificial Sequence
  Synthetic
EVQLLESGGGLVQPGGSLRLSCAASGFTFSGHAMTWVRQAPGKCLEWLSTIYGSGGYTYYAGSVKGRFTISRDNSKNTLYLQMNSLRAEDTAVYYCAKVGGYDWYFDLWGRGTLVTVSSGGGGSGGGGSGGGGSSYELTQPPSVSVALGQTARITCGGHNIGSKNVHWYQQKPGQAPVLVIYRDTNRPSGIPERFSGSNSGNTATLTISRAQAGDEADYYCQLWDSTTVVFGCGTKLTVLSGGGGSQVQLVQSGGEVKKPGASVKVSCKASGYTFTSYGISWVRQAPGQCLEWMGWMSPYNGNAIYAQKLQGRVTMTRDTSTSTAYMELRSLRSDDTAVYYCARDPDYYGSGSYSDYWGQGTLVTVSSGGGGSGGGGSGGGGSEIVLTQSPATLSVSPGERATLSCRASQSVSSNLAWYQQKPGQAPRLLIYGASSRATGIPARFSGSGSGTEFTLTISSLQSEDFAVYYCQQYHSWPLLTFGCGTKVEIK

SEQ ID NO: 2565 - protein, 491 aa, Artificial Sequence
  Synthetic
EVQLLESGGGLVQPGGSLRLSCAASGFTFSGHAMTWVRQAPGKCLEWLSTIYGSGGYTYYAGSVKGRFTISRDNSKNTLYLQMNSLRAEDTAVYYCAKVGGYDWYFDLWGRGTLVTVSSGGGGQGGGGQGGGGQSYELTQPPSVSVALGQTARITCGGHNIGSKNVHWYQQKPGQAPVLVIYRDTNRPSGIPERFSGSNSGNTATLTISRAQAGDEADYYCQLWDSTTVVFGCGTKLTVLSGGGGQQVQLVQSGGEVKKPGASVKVSCKASGYTFTSYGISWVRQAPGQCLEWMGWMSPYNGNAIYAQKLQGRVTMTRDTSTSTAYMELRSLRSDDTAVYYCARDPDYYGSGSYSDYWGQGTLVTVSSGGGGQGGGGQGGGGQEIVLTQSPATLSVSPGERATLSCRASQSVSSNLAWYQQKPGQAPRLLIYGASSRATGIPARFSGSGSGTEFTLTISSLQSEDFAVYYCQQYHSWPLLTFGCGTKVEIK

SEQ ID NO: 2566 - protein, 746 aa, Artificial Sequence
  Synthetic
EVQLLESGGGLVQPGGSLRLSCAASGFTFSGHAMTWVRQAPGKCLEWLSTIYGSGGYTYYAGSVKGRFTISRDNSKNTLYLQMNSLRAEDTAVYYCAKVGGYDWYFDLWGRGTLVTVSSGGGGSGGGGSGGGGSSYELTQPPSVSVALGQTARITCGGHNIGSKNVHWYQQKPGQAPVLVIYRDTNRPSGIPERFSGSNSGNTATLTISRAQAGDEADYYCQLWDSTTVVFGCGTKLTVLSGGGGSQVQLVQSGGEVKKPGASVKVSCKASGYTFTSYGISWVRQAPGQCLEWMGWMSPYNGNAIYAQKLQGRVTMTRDTSTSTAYMELRSLRSDDTAVYYCARDPDYYGSGSYSDYWGQGTLVTVSSGGGGSGGGGSGGGGSEIVLTQSPATLSVSPGERATLSCRASQSVSSNLAWYQQKPGQAPRLLIYGASSRATGIPARFSGSGSGTEFTLTISSLQSEDFAVYYCQQYHSWPLLTFGCGTKVEIKSGGGGSEVQLVESGGGLVQPGGSLKLSCAASGFTFNKYAMNWVRQAPGKGLEWVARIRSKYNNYATYYADSVKDRFTISRDDSKNTAYLQMNNLKTEDTAVYYCVRHGNFGNSYISYWAYWGQGTLVTVSSGGGGSGGGGSGGGGSQTVVTQEPSLTVSPGGTVTLTCGSSTGAVTSGNYPNWVQQKPGQAPRGLIGGTKFLAPGTPARFSGSLLGGKAALTLSGVQPEDEAEYYCVLWYSNRWVFGGGTKLTVL

SEQ ID NO: 2567 - protein, 746 aa, Artificial Sequence
  Synthetic
EVQLLESGGGLVQPGGSLRLSCAASGFTFSGHAMTWVRQAPGKCLEWLSTIYGSGGYTYYAGSVKGRFTISRDNSKNTLYLQMNSLRAEDTAVYYCAKVGGYDWYFDLWGRGTLVTVSSGGGGQGGGGQGGGGQSYELTQPPSVSVALGQTARITCGGHNIGSKNVHWYQQKPGQAPVLVIYRDTNRPSGIPERFSGSNSGNTATLTISRAQAGDEADYYCQLWDSTTVVFGCGTKLTVLSGGGGQQVQLVQSGGEVKKPGASVKVSCKASGYTFTSYGISWVRQAPGQCLEWMGWMSPYNGNAIYAQKLQGRVTMTRDTSTSTAYMELRSLRSDDTAVYYCARDPDYYGSGSYSDYWGQGTLVTVSSGGGGQGGGGQGGGGQEIVLTQSPATLSVSPGERATLSCRASQSVSSNLAWYQQKPGQAPRLLIYGASSRATGIPARFSGSGSGTEFTLTISSLQSEDFAVYYCQQYHSWPLLTFGCGTKVEIKSGGGGQEVQLVESGGGLVQPGGSLKLSCAASGFTFNKYAMNWVRQAPGKGLEWVARIRSKYNNYATYYADSVKDRFTISRDDSKNTAYLQMNNLKTEDTAVYYCVRHGNFGNSYISYWAYWGQGTLVTVSSGGGGQGGGGQGGGGQQTVVTQEPSLTVSPGGTVTLTCGSSTGAVTSGNYPNWVQQKPGQAPRGLIGGTKFLAPGTPARFSGSLLGGKAALTLSGVQPEDEAEYYCVLWYSNRWVFGGGTKLTVL

SEQ ID NO: 2568 - protein, 746 aa, Artificial Sequence
  Synthetic
EVQLLESGGGLVQPGGSLRLSCAASGFTFSGHAMTWVRQAPGKCLEWLSTIYGSGGYTYYAGSVKGRFTISRDNSKNTLYLQMNSLRAEDTAVYYCAKVGGYDWYFDLWGRGTLVTVSSGGGGSGGGGSGGGGSSYELTQPPSVSVALGQTARITCGGHNIGSKNVHWYQQKPGQAPVLVIYRDTNRPSGIPERFSGSNSGNTATLTISRAQAGDEADYYCQLWDSTTVVFGCGTKLTVLSGGGGSQVQLVQSGGEVKKPGASVKVSCKASGYTFTSYGISWVRQAPGQCLEWMGWMSPYNGNAIYAQKLQGRVTMTRDTSTSTAYMELRSLRSDDTAVYYCARDPDYYGSGSYSDYWGQGTLVTVSSGGGGSGGGGSGGGGSEIVLTQSPATLSVSPGERATLSCRASQSVSSNLAWYQQKPGQAPRLLIYGASSRATGIPARFSGSGSGTEFTLTISSLQSEDFAVYYCQQYHSWPLLTFGCGTKVEIKSGGGGSEVQLVESGGGLVQPGGSLKLSCAASGFTFNKYAINWVRQAPGKGLEWVARIRSKYNNYATYYADAVKDRFTISRDDSKNTVYLQMNNLKTEDTAVYYCARAGNFGSSYISYWAYWGQGTLVTVSSGGGGSGGGGSGGGGSQTVVTQEPSLTVSPGGTVTITCGSSTGAVTSGNYPNWVQKKPGQAPRGLIGGTKFLAPGTPARFSGSLSGGKAALTLSGVQPEDEAEYYCVLWYSNRWVFGSGTKLTVL

SEQ ID NO: 2569 - protein, 746 aa, Artificial Sequence
  Synthetic
EVQLLESGGGLVQPGGSLRLSCAASGFTFSGHAMTWVRQAPGKCLEWLSTIYGSGGYTYYAGSVKGRFTISRDNSKNTLYLQMNSLRAEDTAVYYCAKVGGYDWYFDLWGRGTLVTVSSGGGGQGGGGQGGGGQSYELTQPPSVSVALGQTARITCGGHNIGSKNVHWYQQKPGQAPVLVIYRDTNRPSGIPERFSGSNSGNTATLTISRAQAGDEADYYCQLWDSTTVVFGCGTKLTVLSGGGGQQVQLVQSGGEVKKPGASVKVSCKASGYTFTSYGISWVRQAPGQCLEWMGWMSPYNGNAIYAQKLQGRVTMTRDTSTSTAYMELRSLRSDDTAVYYCARDPDYYGSGSYSDYWGQGTLVTVSSGGGGQGGGGQGGGGQEIVLTQSPATLSVSPGERATLSCRASQSVSSNLAWYQQKPGQAPRLLIYGASSRATGIPARFSGSGSGTEFTLTISSLQSEDFAVYYCQQYHSWPLLTFGCGTKVEIKSGGGGQEVQLVESGGGLVQPGGSLKLSCAASGFTFNKYAINWVRQAPGKGLEWVARIRSKYNNYATYYADAVKDRFTISRDDSKNTVYLQMNNLKTEDTAVYYCARAGNFGSSYISYWAYWGQGTLVTVSSGGGGQGGGGQGGGGQQTVVTQEPSLTVSPGGTVTITCGSSTGAVTSGNYPNWVQKKPGQAPRGLIGGTKFLAPGTPARFSGSLSGGKAALTLSGVQPEDEAEYYCVLWYSNRWVFGSGTKLTVL

SEQ ID NO: 2570 - protein, 1234 aa, Artificial Sequence
  Synthetic
EVQLLESGGGLVQPGGSLRLSCAASGFTFSGHAMTWVRQAPGKCLEWLSTIYGSGGYTYYAGSVKGRFTISRDNSKNTLYLQMNSLRAEDTAVYYCAKVGGYDWYFDLWGRGTLVTVSSGGGGSGGGGSGGGGSSYELTQPPSVSVALGQTARITCGGHNIGSKNVHWYQQKPGQAPVLVIYRDTNRPSGIPERFSGSNSGNTATLTISRAQAGDEADYYCQLWDSTTVVFGCGTKLTVLSGGGGSQVQLVQSGGEVKKPGASVKVSCKASGYTFTSYGISWVRQAPGQCLEWMGWMSPYNGNAIYAQKLQGRVTMTRDTSTSTAYMELRSLRSDDTAVYYCARDPDYYGSGSYSDYWGQGTLVTVSSGGGGSGGGGSGGGGSEIVLTQSPATLSVSPGERATLSCRASQSVSSNLAWYQQKPGQAPRLLIYGASSRATGIPARFSGSGSGTEFTLTISSLQSEDFAVYYCQQYHSWPLLTFGCGTKVEIKSGGGGSEVQLVESGGGLVQPGGSLKLSCAASGFTFNKYAMNWVRQAPGKGLEWVARIRSKYNNYATYYADSVKDRFTISRDDSKNTAYLQMNNLKTEDTAVYYCVRHGNFGNSYISYWAYWGQGTLVTVSSGGGGSGGGGSGGGGSQTVVTQEPSLTVSPGGTVTLTCGSSTGAVTSGNYPNWVQQKPGQAPRGLIGGTKFLAPGTPARFSGSLLGGKAALTLSGVQPEDEAEYYCVLWYSNRWVFGGGTKLTVLGGGGDKTHTCPPCPAPELLGGPSVFLFPPKPKDTLMISRTPEVTCVVVDVSHEDPEVKFNWYVDGVEVHNAKTKPCEEQYGSTYRCVSVLTVLHQDWLNGKEYKCKVSNKALPAPIEKTISKAKGQPREPQVYTLPPSREEMTKNQVSLTCLVKGFYPSDIAVEWESNGQPENNYKTTPPVLDSDGSFFLYSKLTVDKSRWQQGNVFSCSVMHEALHNHYTQKSLSLSPGKGGGGSGGGGSGGGGSGGGGSGGGGSGGGGSDKTHTCPPCPAPELLGGPSVFLFPPKPKDTLMISRTPEVTCVVVDVSHEDPEVKFNWYVDGVEVHNAKTKPCEEQYGSTYRCVSVLTVLHQDWLNGKEYKCKVSNKALPAPIEKTISKAKGQPREPQVYTLPPSREEMTKNQVSLTCLVKGFYPSDIAVEWESNGQPENNYKTTPPVLDSDGSFFLYSKLTVDKSRWQQGNVFSCSVMHEALHNHYTQKSLSLSPGK

SEQ ID NO: 2571 - protein, 1224 aa, Artificial Sequence
  Synthetic
EVQLLESGGGLVQPGGSLRLSCAASGFTFSGHAMTWVRQAPGKCLEWLSTIYGSGGYTYYAGSVKGRFTISRDNSKNTLYLQMNSLRAEDTAVYYCAKVGGYDWYFDLWGRGTLVTVSSGGGGQGGGGQGGGGQSYELTQPPSVSVALGQTARITCGGHNIGSKNVHWYQQKPGQAPVLVIYRDTNRPSGIPERFSGSNSGNTATLTISRAQAGDEADYYCQLWDSTTVVFGCGTKLTVLSGGGGQQVQLVQSGGEVKKPGASVKVSCKASGYTFTSYGISWVRQAPGQCLEWMGWMSPYNGNAIYAQKLQGRVTMTRDTSTSTAYMELRSLRSDDTAVYYCARDPDYYGSGSYSDYWGQGTLVTVSSGGGGQGGGGQGGGGQEIVLTQSPATLSVSPGERATLSCRASQSVSSNLAWYQQKPGQAPRLLIYGASSRATGIPARFSGSGSGTEFTLTISSLQSEDFAVYYCQQYHSWPLLTFGCGTKVEIKSGGGGQEVQLVESGGGLVQPGGSLKLSCAASGFTFNKYAMNWVRQAPGKGLEWVARIRSKYNNYATYYADSVKDRFTISRDDSKNTAYLQMNNLKTEDTAVYYCVRHGNFGNSYISYWAYWGQGTLVTVSSGGGGQGGGGQGGGGQQTVVTQEPSLTVSPGGTVTLTCGSSTGAVTSGNYPNWVQQKPGQAPRGLIGGTKFLAPGTPARFSGSLLGGKAALTLSGVQPEDEAEYYCVLWYSNRWVFGGGTKLTVLGGGGCPPCPAPELLGGPSVFLFPPKPKDTLMISRTPEVTCVVVDVSHEEPEVKFNWYVDGVEVHNAKTKPCEEQYGSTYRCVSVLTVLHQDWLNGKEYKCKVSNKALPAPIEKTISKAKGQPREPQVYTLPPSREEMTKNQVSLTCLVKGFYPSDIAVEWESNGQPENNYKTTPPVLDSDGSFFLYSKLTVDKSRWQQGNVFSCSVMHEALHNHYTQKSLSLSPGKGGGGQGGGGQGGGGQGGGGQGGGGQGGGGQCPPCPAPELLGGPSVFLFPPKPKDTLMISRTPEVTCVVVDVSHEEPEVKFNWYVDGVEVHNAKTKPCEEQYGSTYRCVSVLTVLHQDWLNGKEYKCKVSNKALPAPIEKTISKAKGQPREPQVYTLPPSREEMTKNQVSLTCLVKGFYPSDIAVEWESNGQPENNYKTTPPVLDSDGSFFLYSKLTVDKSRWQQGNVFSCSVMHEALHNHYTQKSLSLSPGK

SEQ ID NO: 2572 - protein, 1234 aa, Artificial Sequence
  Synthetic
EVQLLESGGGLVQPGGSLRLSCAASGFTFSGHAMTWVRQAPGKCLEWLSTIYGSGGYTYYAGSVKGRFTISRDNSKNTLYLQMNSLRAEDTAVYYCAKVGGYDWYFDLWGRGTLVTVSSGGGGSGGGGSGGGGSSYELTQPPSVSVALGQTARITCGGHNIGSKNVHWYQQKPGQAPVLVIYRDTNRPSGIPERFSGSNSGNTATLTISRAQAGDEADYYCQLWDSTTVVFGCGTKLTVLSGGGGSQVQLVQSGGEVKKPGASVKVSCKASGYTFTSYGISWVRQAPGQCLEWMGWMSPYNGNAIYAQKLQGRVTMTRDTSTSTAYMELRSLRSDDTAVYYCARDPDYYGSGSYSDYWGQGTLVTVSSGGGGSGGGGSGGGGSEIVLTQSPATLSVSPGERATLSCRASQSVSSNLAWYQQKPGQAPRLLIYGASSRATGIPARFSGSGSGTEFTLTISSLQSEDFAVYYCQQYHSWPLLTFGCGTKVEIKSGGGGSEVQLVESGGGLVQPGGSLKLSCAASGFTFNKYAINWVRQAPGKGLEWVARIRSKYNNYATYYADAVKDRFTISRDDSKNTVYLQMNNLKTEDTAVYYCARAGNFGSSYISYWAYWGQGTLVTVSSGGGGSGGGGSGGGGSQTVVTQEPSLTVSPGGTVTITCGSSTGAVTSGNYPNWVQKKPGQAPRGLIGGTKFLAPGTPARFSGSLSGGKAALTLSGVQPEDEAEYYCVLWYSNRWVFGSGTKLTVLGGGGDKTHTCPPCPAPELLGGPSVFLFPPKPKDTLMISRTPEVTCVVVDVSHEDPEVKFNWYVDGVEVHNAKTKPCEEQYGSTYRCVSVLTVLHQDWLNGKEYKCKVSNKALPAPIEKTISKAKGQPREPQVYTLPPSREEMTKNQVSLTCLVKGFYPSDIAVEWESNGQPENNYKTTPPVLDSDGSFFLYSKLTVDKSRWQQGNVFSCSVMHEALHNHYTQKSLSLSPGKGGGGSGGGGSGGGGSGGGGSGGGGSGGGGSDKTHTCPPCPAPELLGGPSVFLFPPKPKDTLMISRTPEVTCVVVDVSHEDPEVKFNWYVDGVEVHNAKTKPCEEQYGSTYRCVSVLTVLHQDWLNGKEYKCKVSNKALPAPIEKTISKAKGQPREPQVYTLPPSREEMTKNQVSLTCLVKGFYPSDIAVEWESNGQPENNYKTTPPVLDSDGSFFLYSKLTVDKSRWQQGNVFSCSVMHEALHNHYTQKSLSLSPGK

SEQ ID NO: 2573 - protein, 1224 aa, Artificial Sequence
  Synthetic
EVQLLESGGGLVQPGGSLRLSCAASGFTFSGHAMTWVRQAPGKCLEWLSTIYGSGGYTYYAGSVKGRFTISRDNSKNTLYLQMNSLRAEDTAVYYCAKVGGYDWYFDLWGRGTLVTVSSGGGGQGGGGQGGGGQSYELTQPPSVSVALGQTARITCGGHNIGSKNVHWYQQKPGQAPVLVIYRDTNRPSGIPERFSGSNSGNTATLTISRAQAGDEADYYCQLWDSTTVVFGCGTKLTVLSGGGGQQVQLVQSGGEVKKPGASVKVSCKASGYTFTSYGISWVRQAPGQCLEWMGWMSPYNGNAIYAQKLQGRVTMTRDTSTSTAYMELRSLRSDDTAVYYCARDPDYYGSGSYSDYWGQGTLVTVSSGGGGQGGGGQGGGGQEIVLTQSPATLSVSPGERATLSCRASQSVSSNLAWYQQKPGQAPRLLIYGASSRATGIPARFSGSGSGTEFTLTISSLQSEDFAVYYCQQYHSWPLLTFGCGTKVEIKSGGGGQEVQLVESGGGLVQPGGSLKLSCAASGFTFNKYAINWVRQAPGKGLEWVARIRSKYNNYATYYADAVKDRFTISRDDSKNTVYLQMNNLKTEDTAVYYCARAGNFGSSYISYWAYWGQGTLVTVSSGGGGQGGGGQGGGGQQTVVTQEPSLTVSPGGTVTITCGSSTGAVTSGNYPNWVQKKPGQAPRGLIGGTKFLAPGTPARFSGSLSGGKAALTLSGVQPEDEAEYYCVLWYSNRWVFGSGTKLTVLGGGGCPPCPAPELLGGPSVFLFPPKPKDTLMISRTPEVTCVVVDVSHEEPEVKFNWYVDGVEVHNAKTKPCEEQYGSTYRCVSVLTVLHQDWLNGKEYKCKVSNKALPAPIEKTISKAKGQPREPQVYTLPPSREEMTKNQVSLTCLVKGFYPSDIAVEWESNGQPENNYKTTPPVLDSDGSFFLYSKLTVDKSRWQQGNVFSCSVMHEALHNHYTQKSLSLSPGKGGGGQGGGGQGGGGQGGGGQGGGGQGGGGQCPPCPAPELLGGPSVFLFPPKPKDTLMISRTPEVTCVVVDVSHEEPEVKFNWYVDGVEVHNAKTKPCEEQYGSTYRCVSVLTVLHQDWLNGKEYKCKVSNKALPAPIEKTISKAKGQPREPQVYTLPPSREEMTKNQVSLTCLVKGFYPSDIAVEWESNGQPENNYKTTPPVLDSDGSFFLYSKLTVDKSRWQQGNVFSCSVMHEALHNHYTQKSLSLSPGK

SEQ ID NO: 2574 - protein, 491 aa, Artificial Sequence
  Synthetic
EVQLLESGGGLVQPGGSLRLSCAASGFTFSGHAMTWVRQAPGKCLEWLSTIYGSGGYTYYAGSVKGRFTISRDNSKNTLYLQMNSLRAEDTAVYYCAKVGGYDWYFDLWGRGTLVTVSSGGGGSGGGGSGGGGSSYELTQPPSVSVALGQTARITCGGHNIGSKNVHWYQQKPGQAPVLVIYRDTNRPSGIPERFSGSNSGNTATLTISRAQAGDEADYYCQLWDSTTVVFGCGTKLTVLSGGGGSQVQLVQSGAEVKKPGASVKVSCKASGYTFTSYGISWVRQAPGQCLEWMGWISAYNGNTIYAQKFQGRVTLTRDTSTSTAYMELRSLRSDDTAMYYCARDPDYYGSGSYSDYWGQGTLVTVSSGGGGSGGGGSGGGGSEIVLTQSPATLSVSPGERATLSCRASQSVSSNLAWYQQKPGQAPRLLIYGASSRATGIPARFSGSGSGTEFTLTISSLQSEDFAVYYCQQYHSWPLLTFGCGTKVEIK

SEQ ID NO: 2575 - protein, 491 aa, Artificial Sequence
  Synthetic
EVQLLESGGGLVQPGGSLRLSCAASGFTFSGHAMTWVRQAPGKCLEWLSTIYGSGGYTYYAGSVKGRFTISRDNSKNTLYLQMNSLRAEDTAVYYCAKVGGYDWYFDLWGRGTLVTVSSGGGGQGGGGQGGGGQSYELTQPPSVSVALGQTARITCGGHNIGSKNVHWYQQKPGQAPVLVIYRDTNRPSGIPERFSGSNSGNTATLTISRAQAGDEADYYCQLWDSTTVVFGCGTKLTVLSGGGGQQVQLVQSGAEVKKPGASVKVSCKASGYTFTSYGISWVRQAPGQCLEWMGWISAYNGNTIYAQKFQGRVTLTRDTSTSTAYMELRSLRSDDTAMYYCARDPDYYGSGSYSDYWGQGTLVTVSSGGGGQGGGGQGGGGQEIVLTQSPATLSVSPGERATLSCRASQSVSSNLAWYQQKPGQAPRLLIYGASSRATGIPARFSGSGSGTEFTLTISSLQSEDFAVYYCQQYHSWPLLTFGCGTKVEIK

SEQ ID NO: 2576 - protein, 746 aa, Artificial Sequence
  Synthetic
EVQLLESGGGLVQPGGSLRLSCAASGFTFSGHAMTWVRQAPGKCLEWLSTIYGSGGYTYYAGSVKGRFTISRDNSKNTLYLQMNSLRAEDTAVYYCAKVGGYDWYFDLWGRGTLVTVSSGGGGSGGGGSGGGGSSYELTQPPSVSVALGQTARITCGGHNIGSKNVHWYQQKPGQAPVLVIYRDTNRPSGIPERFSGSNSGNTATLTISRAQAGDEADYYCQLWDSTTVVFGCGTKLTVLSGGGGSQVQLVQSGAEVKKPGASVKVSCKASGYTFTSYGISWVRQAPGQCLEWMGWISAYNGNTIYAQKFQGRVTLTRDTSTSTAYMELRSLRSDDTAMYYCARDPDYYGSGSYSDYWGQGTLVTVSSGGGGSGGGGSGGGGSEIVLTQSPATLSVSPGERATLSCRASQSVSSNLAWYQQKPGQAPRLLIYGASSRATGIPARFSGSGSGTEFTLTISSLQSEDFAVYYCQQYHSWPLLTFGCGTKVEIKSGGGGSEVQLVESGGGLVQPGGSLKLSCAASGFTFNKYAMNWVRQAPGKGLEWVARIRSKYNNYATYYADSVKDRFTISRDDSKNTAYLQMNNLKTEDTAVYYCVRHGNFGNSYISYWAYWGQGTLVTVSSGGGGSGGGGSGGGGSQTVVTQEPSLTVSPGGTVTLTCGSSTGAVTSGNYPNWVQQKPGQAPRGLIGGTKFLAPGTPARFSGSLLGGKAALTLSGVQPEDEAEYYCVLWYSNRWVFGGGTKLTVL

SEQ ID NO: 2577 - protein, 746 aa, Artificial Sequence
  Synthetic
EVQLLESGGGLVQPGGSLRLSCAASGFTFSGHAMTWVRQAPGKCLEWLSTIYGSGGYTYYAGSVKGRFTISRDNSKNTLYLQMNSLRAEDTAVYYCAKVGGYDWYFDLWGRGTLVTVSSGGGGQGGGGQGGGGQSYELTQPPSVSVALGQTARITCGGHNIGSKNVHWYQQKPGQAPVLVIYRDTNRPSGIPERFSGSNSGNTATLTISRAQAGDEADYYCQLWDSTTVVFGCGTKLTVLSGGGGQQVQLVQSGAEVKKPGASVKVSCKASGYTFTSYGISWVRQAPGQCLEWMGWISAYNGNTIYAQKFQGRVTLTRDTSTSTAYMELRSLRSDDTAMYYCARDPDYYGSGSYSDYWGQGTLVTVSSGGGGQGGGGQGGGGQEIVLTQSPATLSVSPGERATLSCRASQSVSSNLAWYQQKPGQAPRLLIYGASSRATGIPARFSGSGSGTEFTLTISSLQSEDFAVYYCQQYHSWPLLTFGCGTKVEIKSGGGGQEVQLVESGGGLVQPGGSLKLSCAASGFTFNKYAMNWVRQAPGKGLEWVARIRSKYNNYATYYADSVKDRFTISRDDSKNTAYLQMNNLKTEDTAVYYCVRHGNFGNSYISYWAYWGQGTLVTVSSGGGGQGGGGQGGGGQQTVVTQEPSLTVSPGGTVTLTCGSSTGAVTSGNYPNWVQQKPGQAPRGLIGGTKFLAPGTPARFSGSLLGGKAALTLSGVQPEDEAEYYCVLWYSNRWVFGGGTKLTVL

SEQ ID NO: 2578 - protein, 746 aa, Artificial Sequence
  Synthetic
EVQLLESGGGLVQPGGSLRLSCAASGFTFSGHAMTWVRQAPGKCLEWLSTIYGSGGYTYYAGSVKGRFTISRDNSKNTLYLQMNSLRAEDTAVYYCAKVGGYDWYFDLWGRGTLVTVSSGGGGSGGGGSGGGGSSYELTQPPSVSVALGQTARITCGGHNIGSKNVHWYQQKPGQAPVLVIYRDTNRPSGIPERFSGSNSGNTATLTISRAQAGDEADYYCQLWDSTTVVFGCGTKLTVLSGGGGSQVQLVQSGAEVKKPGASVKVSCKASGYTFTSYGISWVRQAPGQCLEWMGWISAYNGNTIYAQKFQGRVTLTRDTSTSTAYMELRSLRSDDTAMYYCARDPDYYGSGSYSDYWGQGTLVTVSSGGGGSGGGGSGGGGSEIVLTQSPATLSVSPGERATLSCRASQSVSSNLAWYQQKPGQAPRLLIYGASSRATGIPARFSGSGSGTEFTLTISSLQSEDFAVYYCQQYHSWPLLTFGCGTKVEIKSGGGGSEVQLVESGGGLVQPGGSLKLSCAASGFTFNKYAINWVRQAPGKGLEWVARIRSKYNNYATYYADAVKDRFTISRDDSKNTVYLQMNNLKTEDTAVYYCARAGNFGSSYISYWAYWGQGTLVTVSSGGGGSGGGGSGGGGSQTVVTQEPSLTVSPGGTVTITCGSSTGAVTSGNYPNWVQKKPGQAPRGLIGGTKFLAPGTPARFSGSLSGGKAALTLSGVQPEDEAEYYCVLWYSNRWVFGSGTKLTVL

SEQ ID NO: 2579 - protein, 746 aa, Artificial Sequence
  Synthetic
EVQLLESGGGLVQPGGSLRLSCAASGFTFSGHAMTWVRQAPGKCLEWLSTIYGSGGYTYYAGSVKGRFTISRDNSKNTLYLQMNSLRAEDTAVYYCAKVGGYDWYFDLWGRGTLVTVSSGGGGQGGGGQGGGGQSYELTQPPSVSVALGQTARITCGGHNIGSKNVHWYQQKPGQAPVLVIYRDTNRPSGIPERFSGSNSGNTATLTISRAQAGDEADYYCQLWDSTTVVFGCGTKLTVLSGGGGQQVQLVQSGAEVKKPGASVKVSCKASGYTFTSYGISWVRQAPGQCLEWMGWISAYNGNTIYAQKFQGRVTLTRDTSTSTAYMELRSLRSDDTAMYYCARDPDYYGSGSYSDYWGQGTLVTVSSGGGGQGGGGQGGGGQEIVLTQSPATLSVSPGERATLSCRASQSVSSNLAWYQQKPGQAPRLLIYGASSRATGIPARFSGSGSGTEFTLTISSLQSEDFAVYYCQQYHSWPLLTFGCGTKVEIKSGGGGQEVQLVESGGGLVQPGGSLKLSCAASGFTFNKYAINWVRQAPGKGLEWVARIRSKYNNYATYYADAVKDRFTISRDDSKNTVYLQMNNLKTEDTAVYYCARAGNFGSSYISYWAYWGQGTLVTVSSGGGGQGGGGQGGGGQQTVVTQEPSLTVSPGGTVTITCGSSTGAVTSGNYPNWVQKKPGQAPRGLIGGTKFLAPGTPARFSGSLSGGKAALTLSGVQPEDEAEYYCVLWYSNRWVFGSGTKLTVL

SEQ ID NO: 2580 - protein, 1234 aa, Artificial Sequence
  Synthetic
EVQLLESGGGLVQPGGSLRLSCAASGFTFSGHAMTWVRQAPGKCLEWLSTIYGSGGYTYYAGSVKGRFTISRDNSKNTLYLQMNSLRAEDTAVYYCAKVGGYDWYFDLWGRGTLVTVSSGGGGSGGGGSGGGGSSYELTQPPSVSVALGQTARITCGGHNIGSKNVHWYQQKPGQAPVLVIYRDTNRPSGIPERFSGSNSGNTATLTISRAQAGDEADYYCQLWDSTTVVFGCGTKLTVLSGGGGSQVQLVQSGAEVKKPGASVKVSCKASGYTFTSYGISWVRQAPGQCLEWMGWISAYNGNTIYAQKFQGRVTLTRDTSTSTAYMELRSLRSDDTAMYYCARDPDYYGSGSYSDYWGQGTLVTVSSGGGGSGGGGSGGGGSEIVLTQSPATLSVSPGERATLSCRASQSVSSNLAWYQQKPGQAPRLLIYGASSRATGIPARFSGSGSGTEFTLTISSLQSEDFAVYYCQQYHSWPLLTFGCGTKVEIKSGGGGSEVQLVESGGGLVQPGGSLKLSCAASGFTFNKYAMNWVRQAPGKGLEWVARIRSKYNNYATYYADSVKDRFTISRDDSKNTAYLQMNNLKTEDTAVYYCVRHGNFGNSYISYWAYWGQGTLVTVSSGGGGSGGGGSGGGGSQTVVTQEPSLTVSPGGTVTLTCGSSTGAVTSGNYPNWVQQKPGQAPRGLIGGTKFLAPGTPARFSGSLLGGKAALTLSGVQPEDEAEYYCVLWYSNRWVFGGGTKLTVLGGGGDKTHTCPPCPAPELLGGPSVFLFPPKPKDTLMISRTPEVTCVVVDVSHEDPEVKFNWYVDGVEVHNAKTKPCEEQYGSTYRCVSVLTVLHQDWLNGKEYKCKVSNKALPAPIEKTISKAKGQPREPQVYTLPPSREEMTKNQVSLTCLVKGFYPSDIAVEWESNGQPENNYKTTPPVLDSDGSFFLYSKLTVDKSRWQQGNVFSCSVMHEALHNHYTQKSLSLSPGKGGGGSGGGGSGGGGSGGGGSGGGGSGGGGSDKTHTCPPCPAPELLGGPSVFLFPPKPKDTLMISRTPEVTCVVVDVSHEDPEVKFNWYVDGVEVHNAKTKPCEEQYGSTYRCVSVLTVLHQDWLNGKEYKCKVSNKALPAPIEKTISKAKGQPREPQVYTLPPSREEMTKNQVSLTCLVKGFYPSDIAVEWESNGQPENNYKTTPPVLDSDGSFFLYSKLTVDKSRWQQGNVFSCSVMHEALHNHYTQKSLSLSPGK

SEQ ID NO: 2581 - protein, 1224 aa, Artificial Sequence
  Synthetic
EVQLLESGGGLVQPGGSLRLSCAASGFTFSGHAMTWVRQAPGKCLEWLSTIYGSGGYTYYAGSVKGRFTISRDNSKNTLYLQMNSLRAEDTAVYYCAKVGGYDWYFDLWGRGTLVTVSSGGGGQGGGGQGGGGQSYELTQPPSVSVALGQTARITCGGHNIGSKNVHWYQQKPGQAPVLVIYRDTNRPSGIPERFSGSNSGNTATLTISRAQAGDEADYYCQLWDSTTVVFGCGTKLTVLSGGGGQQVQLVQSGAEVKKPGASVKVSCKASGYTFTSYGISWVRQAPGQCLEWMGWISAYNGNTIYAQKFQGRVTLTRDTSTSTAYMELRSLRSDDTAMYYCARDPDYYGSGSYSDYWGQGTLVTVSSGGGGQGGGGQGGGGQEIVLTQSPATLSVSPGERATLSCRASQSVSSNLAWYQQKPGQAPRLLIYGASSRATGIPARFSGSGSGTEFTLTISSLQSEDFAVYYCQQYHSWPLLTFGCGTKVEIKSGGGGQEVQLVESGGGLVQPGGSLKLSCAASGFTFNKYAMNWVRQAPGKGLEWVARIRSKYNNYATYYADSVKDRFTISRDDSKNTAYLQMNNLKTEDTAVYYCVRHGNFGNSYISYWAYWGQGTLVTVSSGGGGQGGGGQGGGGQQTVVTQEPSLTVSPGGTVTLTCGSSTGAVTSGNYPNWVQQKPGQAPRGLIGGTKFLAPGTPARFSGSLLGGKAALTLSGVQPEDEAEYYCVLWYSNRWVFGGGTKLTVLGGGGCPPCPAPELLGGPSVFLFPPKPKDTLMISRTPEVTCVVVDVSHEEPEVKFNWYVDGVEVHNAKTKPCEEQYGSTYRCVSVLTVLHQDWLNGKEYKCKVSNKALPAPIEKTISKAKGQPREPQVYTLPPSREEMTKNQVSLTCLVKGFYPSDIAVEWESNGQPENNYKTTPPVLDSDGSFFLYSKLTVDKSRWQQGNVFSCSVMHEALHNHYTQKSLSLSPGKGGGGQGGGGQGGGGQGGGGQGGGGQGGGGQCPPCPAPELLGGPSVFLFPPKPKDTLMISRTPEVTCVVVDVSHEEPEVKFNWYVDGVEVHNAKTKPCEEQYGSTYRCVSVLTVLHQDWLNGKEYKCKVSNKALPAPIEKTISKAKGQPREPQVYTLPPSREEMTKNQVSLTCLVKGFYPSDIAVEWESNGQPENNYKTTPPVLDSDGSFFLYSKLTVDKSRWQQGNVFSCSVMHEALHNHYTQKSLSLSPGK

SEQ ID NO: 2582 - protein, 1234 aa, Artificial Sequence
  Synthetic
EVQLLESGGGLVQPGGSLRLSCAASGFTFSGHAMTWVRQAPGKCLEWLSTIYGSGGYTYYAGSVKGRFTISRDNSKNTLYLQMNSLRAEDTAVYYCAKVGGYDWYFDLWGRGTLVTVSSGGGGSGGGGSGGGGSSYELTQPPSVSVALGQTARITCGGHNIGSKNVHWYQQKPGQAPVLVIYRDTNRPSGIPERFSGSNSGNTATLTISRAQAGDEADYYCQLWDSTTVVFGCGTKLTVLSGGGGSQVQLVQSGAEVKKPGASVKVSCKASGYTFTSYGISWVRQAPGQCLEWMGWISAYNGNTIYAQKFQGRVTLTRDTSTSTAYMELRSLRSDDTAMYYCARDPDYYGSGSYSDYWGQGTLVTVSSGGGGSGGGGSGGGGSEIVLTQSPATLSVSPGERATLSCRASQSVSSNLAWYQQKPGQAPRLLIYGASSRATGIPARFSGSGSGTEFTLTISSLQSEDFAVYYCQQYHSWPLLTFGCGTKVEIKSGGGGSEVQLVESGGGLVQPGGSLKLSCAASGFTFNKYAINWVRQAPGKGLEWVARIRSKYNNYATYYADAVKDRFTISRDDSKNTVYLQMNNLKTEDTAVYYCARAGNFGSSYISYWAYWGQGTLVTVSSGGGGSGGGGSGGGGSQTVVTQEPSLTVSPGGTVTITCGSSTGAVTSGNYPNWVQKKPGQAPRGLIGGTKFLAPGTPARFSGSLSGGKAALTLSGVQPEDEAEYYCVLWYSNRWVFGSGTKLTVLGGGGDKTHTCPPCPAPELLGGPSVFLFPPKPKDTLMISRTPEVTCVVVDVSHEDPEVKFNWYVDGVEVHNAKTKPCEEQYGSTYRCVSVLTVLHQDWLNGKEYKCKVSNKALPAPIEKTISKAKGQPREPQVYTLPPSREEMTKNQVSLTCLVKGFYPSDIAVEWESNGQPENNYKTTPPVLDSDGSFFLYSKLTVDKSRWQQGNVFSCSVMHEALHNHYTQKSLSLSPGKGGGGSGGGGSGGGGSGGGGSGGGGSGGGGSDKTHTCPPCPAPELLGGPSVFLFPPKPKDTLMISRTPEVTCVVVDVSHEDPEVKFNWYVDGVEVHNAKTKPCEEQYGSTYRCVSVLTVLHQDWLNGKEYKCKVSNKALPAPIEKTISKAKGQPREPQVYTLPPSREEMTKNQVSLTCLVKGFYPSDIAVEWESNGQPENNYKTTPPVLDSDGSFFLYSKLTVDKSRWQQGNVFSCSVMHEALHNHYTQKSLSLSPGK

SEQ ID NO: 2583 - protein, 1224 aa, Artificial Sequence
  Synthetic
EVQLLESGGGLVQPGGSLRLSCAASGFTFSGHAMTWVRQAPGKCLEWLSTIYGSGGYTYYAGSVKGRFTISRDNSKNTLYLQMNSLRAEDTAVYYCAKVGGYDWYFDLWGRGTLVTVSSGGGGQGGGGQGGGGQSYELTQPPSVSVALGQTARITCGGHNIGSKNVHWYQQKPGQAPVLVIYRDTNRPSGIPERFSGSNSGNTATLTISRAQAGDEADYYCQLWDSTTVVFGCGTKLTVLSGGGGQQVQLVQSGAEVKKPGASVKVSCKASGYTFTSYGISWVRQAPGQCLEWMGWISAYNGNTIYAQKFQGRVTLTRDTSTSTAYMELRSLRSDDTAMYYCARDPDYYGSGSYSDYWGQGTLVTVSSGGGGQGGGGQGGGGQEIVLTQSPATLSVSPGERATLSCRASQSVSSNLAWYQQKPGQAPRLLIYGASSRATGIPARFSGSGSGTEFTLTISSLQSEDFAVYYCQQYHSWPLLTFGCGTKVEIKSGGGGQEVQLVESGGGLVQPGGSLKLSCAASGFTFNKYAINWVRQAPGKGLEWVARIRSKYNNYATYYADAVKDRFTISRDDSKNTVYLQMNNLKTEDTAVYYCARAGNFGSSYISYWAYWGQGTLVTVSSGGGGQGGGGQGGGGQQTVVTQEPSLTVSPGGTVTITCGSSTGAVTSGNYPNWVQKKPGQAPRGLIGGTKFLAPGTPARFSGSLSGGKAALTLSGVQPEDEAEYYCVLWYSNRWVFGSGTKLTVLGGGGCPPCPAPELLGGPSVFLFPPKPKDTLMISRTPEVTCVVVDVSHEEPEVKFNWYVDGVEVHNAKTKPCEEQYGSTYRCVSVLTVLHQDWLNGKEYKCKVSNKALPAPIEKTISKAKGQPREPQVYTLPPSREEMTKNQVSLTCLVKGFYPSDIAVEWESNGQPENNYKTTPPVLDSDGSFFLYSKLTVDKSRWQQGNVFSCSVMHEALHNHYTQKSLSLSPGKGGGGQGGGGQGGGGQGGGGQGGGGQGGGGQCPPCPAPELLGGPSVFLFPPKPKDTLMISRTPEVTCVVVDVSHEEPEVKFNWYVDGVEVHNAKTKPCEEQYGSTYRCVSVLTVLHQDWLNGKEYKCKVSNKALPAPIEKTISKAKGQPREPQVYTLPPSREEMTKNQVSLTCLVKGFYPSDIAVEWESNGQPENNYKTTPPVLDSDGSFFLYSKLTVDKSRWQQGNVFSCSVMHEALHNHYTQKSLSLSPGK

SEQ ID NO: 2584 - protein, 491 aa, Artificial Sequence
  Synthetic
EVQLLESGGGLVQPGGSLRLSCAASGFTFSGHAMTWVRQAPGKCLEWLSTIYGSGGYTYYAGSVKGRFTISRDNSKNTLYLQMNSLRAEDTAVYYCAKVGGYDWYFDLWGRGTLVTVSSGGGGSGGGGSGGGGSSYELTQPPSVSVALGQTARITCGGHNIGSKNVHWYQQKPGQAPVLVIYRDTNRPSGIPERFSGSNSGNTATLTISRAQAGDEADYYCQLWDSTTVVFGCGTKLTVLSGGGGSQVQLVQSGAEVKKPGASVKVSCKASGYTFTTYGISWVRQAPGQCLEWMGWISPKNGVTTYAQKFQGRVTITADESTSTAYMELSRLTSDDTAMYYCARDPDYYGSGSYSDYWGQGTLVTVSSGGGGSGGGGSGGGGSEIVLTQSPATLSVSPGERATLSCRASQSVSSNLAWYQQKPGQAPRLLIYGASSRATGIPARFSGSGSGTEFTLTISSLQSEDFAVYYCQQYHSWPLLTFGCGTKVEIK

SEQ ID NO: 2585 - protein, 491 aa, Artificial Sequence
  Synthetic
EVQLLESGGGLVQPGGSLRLSCAASGFTFSGHAMTWVRQAPGKCLEWLSTIYGSGGYTYYAGSVKGRFTISRDNSKNTLYLQMNSLRAEDTAVYYCAKVGGYDWYFDLWGRGTLVTVSSGGGGQGGGGQGGGGQSYELTQPPSVSVALGQTARITCGGHNIGSKNVHWYQQKPGQAPVLVIYRDTNRPSGIPERFSGSNSGNTATLTISRAQAGDEADYYCQLWDSTTVVFGCGTKLTVLSGGGGQQVQLVQSGAEVKKPGASVKVSCKASGYTFTTYGISWVRQAPGQCLEWMGWISPKNGVTTYAQKFQGRVTITADESTSTAYMELSRLTSDDTAMYYCARDPDYYGSGSYSDYWGQGTLVTVSSGGGGQGGGGQGGGGQEIVLTQSPATLSVSPGERATLSCRASQSVSSNLAWYQQKPGQAPRLLIYGASSRATGIPARFSGSGSGTEFTLTISSLQSEDFAVYYCQQYHSWPLLTFGCGTKVEIK

SEQ ID NO: 2586 - protein, 746 aa, Artificial Sequence
  Synthetic
EVQLLESGGGLVQPGGSLRLSCAASGFTFSGHAMTWVRQAPGKCLEWLSTIYGSGGYTYYAGSVKGRFTISRDNSKNTLYLQMNSLRAEDTAVYYCAKVGGYDWYFDLWGRGTLVTVSSGGGGSGGGGSGGGGSSYELTQPPSVSVALGQTARITCGGHNIGSKNVHWYQQKPGQAPVLVIYRDTNRPSGIPERFSGSNSGNTATLTISRAQAGDEADYYCQLWDSTTVVFGCGTKLTVLSGGGGSQVQLVQSGAEVKKPGASVKVSCKASGYTFTTYGISWVRQAPGQCLEWMGWISPKNGVTTYAQKFQGRVTITADESTSTAYMELSRLTSDDTAMYYCARDPDYYGSGSYSDYWGQGTLVTVSSGGGGSGGGGSGGGGSEIVLTQSPATLSVSPGERATLSCRASQSVSSNLAWYQQKPGQAPRLLIYGASSRATGIPARFSGSGSGTEFTLTISSLQSEDFAVYYCQQYHSWPLLTFGCGTKVEIKSGGGGSEVQLVESGGGLVQPGGSLKLSCAASGFTFNKYAMNWVRQAPGKGLEWVARIRSKYNNYATYYADSVKDRFTISRDDSKNTAYLQMNNLKTEDTAVYYCVRHGNFGNSYISYWAYWGQGTLVTVSSGGGGSGGGGSGGGGSQTVVTQEPSLTVSPGGTVTLTCGSSTGAVTSGNYPNWVQQKPGQAPRGLIGGTKFLAPGTPARFSGSLLGGKAALTLSGVQPEDEAEYYCVLWYSNRWVFGGGTKLTVL

SEQ ID NO: 2587 - protein, 746 aa, Artificial Sequence
  Synthetic
EVQLLESGGGLVQPGGSLRLSCAASGFTFSGHAMTWVRQAPGKCLEWLSTIYGSGGYTYYAGSVKGRFTISRDNSKNTLYLQMNSLRAEDTAVYYCAKVGGYDWYFDLWGRGTLVTVSSGGGGQGGGGQGGGGQSYELTQPPSVSVALGQTARITCGGHNIGSKNVHWYQQKPGQAPVLVIYRDTNRPSGIPERFSGSNSGNTATLTISRAQAGDEADYYCQLWDSTTVVFGCGTKLTVLSGGGGQQVQLVQSGAEVKKPGASVKVSCKASGYTFTTYGISWVRQAPGQCLEWMGWISPKNGVTTYAQKFQGRVTITADESTSTAYMELSRLTSDDTAMYYCARDPDYYGSGSYSDYWGQGTLVTVSSGGGGQGGGGQGGGGQEIVLTQSPATLSVSPGERATLSCRASQSVSSNLAWYQQKPGQAPRLLIYGASSRATGIPARFSGSGSGTEFTLTISSLQSEDFAVYYCQQYHSWPLLTFGCGTKVEIKSGGGGQEVQLVESGGGLVQPGGSLKLSCAASGFTFNKYAMNWVRQAPGKGLEWVARIRSKYNNYATYYADSVKDRFTISRDDSKNTAYLQMNNLKTEDTAVYYCVRHGNFGNSYISYWAYWGQGTLVTVSSGGGGQGGGGQGGGGQQTVVTQEPSLTVSPGGTVTLTCGSSTGAVTSGNYPNWVQQKPGQAPRGLIGGTKFLAPGTPARFSGSLLGGKAALTLSGVQPEDEAEYYCVLWYSNRWVFGGGTKLTVL

SEQ ID NO: 2588 - protein, 746 aa, Artificial Sequence
  Synthetic
EVQLLESGGGLVQPGGSLRLSCAASGFTFSGHAMTWVRQAPGKCLEWLSTIYGSGGYTYYAGSVKGRFTISRDNSKNTLYLQMNSLRAEDTAVYYCAKVGGYDWYFDLWGRGTLVTVSSGGGGSGGGGSGGGGSSYELTQPPSVSVALGQTARITCGGHNIGSKNVHWYQQKPGQAPVLVIYRDTNRPSGIPERFSGSNSGNTATLTISRAQAGDEADYYCQLWDSTTVVFGCGTKLTVLSGGGGSQVQLVQSGAEVKKPGASVKVSCKASGYTFTTYGISWVRQAPGQCLEWMGWISPKNGVTTYAQKFQGRVTITADESTSTAYMELSRLTSDDTAMYYCARDPDYYGSGSYSDYWGQGTLVTVSSGGGGSGGGGSGGGGSEIVLTQSPATLSVSPGERATLSCRASQSVSSNLAWYQQKPGQAPRLLIYGASSRATGIPARFSGSGSGTEFTLTISSLQSEDFAVYYCQQYHSWPLLTFGCGTKVEIKSGGGGSEVQLVESGGGLVQPGGSLKLSCAASGFTFNKYAINWVRQAPGKGLEWVARIRSKYNNYATYYADAVKDRFTISRDDSKNTVYLQMNNLKTEDTAVYYCARAGNFGSSYISYWAYWGQGTLVTVSSGGGGSGGGGSGGGGSQTVVTQEPSLTVSPGGTVTITCGSSTGAVTSGNYPNWVQKKPGQAPRGLIGGTKFLAPGTPARFSGSLSGGKAALTLSGVQPEDEAEYYCVLWYSNRWVFGSGTKLTVL

SEQ ID NO: 2589 - protein, 746 aa, Artificial Sequence
  Synthetic
EVQLLESGGGLVQPGGSLRLSCAASGFTFSGHAMTWVRQAPGKCLEWLSTIYGSGGYTYYAGSVKGRFTISRDNSKNTLYLQMNSLRAEDTAVYYCAKVGGYDWYFDLWGRGTLVTVSSGGGGQGGGGQGGGGQSYELTQPPSVSVALGQTARITCGGHNIGSKNVHWYQQKPGQAPVLVIYRDTNRPSGIPERFSGSNSGNTATLTISRAQAGDEADYYCQLWDSTTVVFGCGTKLTVLSGGGGQQVQLVQSGAEVKKPGASVKVSCKASGYTFTTYGISWVRQAPGQCLEWMGWISPKNGVTTYAQKFQGRVTITADESTSTAYMELSRLTSDDTAMYYCARDPDYYGSGSYSDYWGQGTLVTVSSGGGGQGGGGQGGGGQEIVLTQSPATLSVSPGERATLSCRASQSVSSNLAWYQQKPGQAPRLLIYGASSRATGIPARFSGSGSGTEFTLTISSLQSEDFAVYYCQQYHSWPLLTFGCGTKVEIKSGGGGQEVQLVESGGGLVQPGGSLKLSCAASGFTFNKYAINWVRQAPGKGLEWVARIRSKYNNYATYYADAVKDRFTISRDDSKNTVYLQMNNLKTEDTAVYYCARAGNFGSSYISYWAYWGQGTLVTVSSGGGGQGGGGQGGGGQQTVVTQEPSLTVSPGGTVTITCGSSTGAVTSGNYPNWVQKKPGQAPRGLIGGTKFLAPGTPARFSGSLSGGKAALTLSGVQPEDEAEYYCVLWYSNRWVFGSGTKLTVL

SEQ ID NO: 2590 - protein, 1234 aa, Artificial Sequence
  Synthetic
EVQLLESGGGLVQPGGSLRLSCAASGFTFSGHAMTWVRQAPGKCLEWLSTIYGSGGYTYYAGSVKGRFTISRDNSKNTLYLQMNSLRAEDTAVYYCAKVGGYDWYFDLWGRGTLVTVSSGGGGSGGGGSGGGGSSYELTQPPSVSVALGQTARITCGGHNIGSKNVHWYQQKPGQAPVLVIYRDTNRPSGIPERFSGSNSGNTATLTISRAQAGDEADYYCQLWDSTTVVFGCGTKLTVLSGGGGSQVQLVQSGAEVKKPGASVKVSCKASGYTFTTYGISWVRQAPGQCLEWMGWISPKNGVTTYAQKFQGRVTITADESTSTAYMELSRLTSDDTAMYYCARDPDYYGSGSYSDYWGQGTLVTVSSGGGGSGGGGSGGGGSEIVLTQSPATLSVSPGERATLSCRASQSVSSNLAWYQQKPGQAPRLLIYGASSRATGIPARFSGSGSGTEFTLTISSLQSEDFAVYYCQQYHSWPLLTFGCGTKVEIKSGGGGSEVQLVESGGGLVQPGGSLKLSCAASGFTFNKYAMNWVRQAPGKGLEWVARIRSKYNNYATYYADSVKDRFTISRDDSKNTAYLQMNNLKTEDTAVYYCVRHGNFGNSYISYWAYWGQGTLVTVSSGGGGSGGGGSGGGGSQTVVTQEPSLTVSPGGTVTLTCGSSTGAVTSGNYPNWVQQKPGQAPRGLIGGTKFLAPGTPARFSGSLLGGKAALTLSGVQPEDEAEYYCVLWYSNRWVFGGGTKLTVLGGGGDKTHTCPPCPAPELLGGPSVFLFPPKPKDTLMISRTPEVTCVVVDVSHEDPEVKFNWYVDGVEVHNAKTKPCEEQYGSTYRCVSVLTVLHQDWLNGKEYKCKVSNKALPAPIEKTISKAKGQPREPQVYTLPPSREEMTKNQVSLTCLVKGFYPSDIAVEWESNGQPENNYKTTPPVLDSDGSFFLYSKLTVDKSRWQQGNVFSCSVMHEALHNHYTQKSLSLSPGKGGGGSGGGGSGGGGSGGGGSGGGGSGGGGSDKTHTCPPCPAPELLGGPSVFLFPPKPKDTLMISRTPEVTCVVVDVSHEDPEVKFNWYVDGVEVHNAKTKPCEEQYGSTYRCVSVLTVLHQDWLNGKEYKCKVSNKALPAPIEKTISKAKGQPREPQVYTLPPSREEMTKNQVSLTCLVKGFYPSDIAVEWESNGQPENNYKTTPPVLDSDGSFFLYSKLTVDKSRWQQGNVFSCSVMHEALHNHYTQKSLSLSPGK

SEQ ID NO: 2591 - protein, 1224 aa, Artificial Sequence
  Synthetic
EVQLLESGGGLVQPGGSLRLSCAASGFTFSGHAMTWVRQAPGKCLEWLSTIYGSGGYTYYAGSVKGRFTISRDNSKNTLYLQMNSLRAEDTAVYYCAKVGGYDWYFDLWGRGTLVTVSSGGGGQGGGGQGGGGQSYELTQPPSVSVALGQTARITCGGHNIGSKNVHWYQQKPGQAPVLVIYRDTNRPSGIPERFSGSNSGNTATLTISRAQAGDEADYYCQLWDSTTVVFGCGTKLTVLSGGGGQQVQLVQSGAEVKKPGASVKVSCKASGYTFTTYGISWVRQAPGQCLEWMGWISPKNGVTTYAQKFQGRVTITADESTSTAYMELSRLTSDDTAMYYCARDPDYYGSGSYSDYWGQGTLVTVSSGGGGQGGGGQGGGGQEIVLTQSPATLSVSPGERATLSCRASQSVSSNLAWYQQKPGQAPRLLIYGASSRATGIPARFSGSGSGTEFTLTISSLQSEDFAVYYCQQYHSWPLLTFGCGTKVEIKSGGGGQEVQLVESGGGLVQPGGSLKLSCAASGFTFNKYAMNWVRQAPGKGLEWVARIRSKYNNYATYYADSVKDRFTISRDDSKNTAYLQMNNLKTEDTAVYYCVRHGNFGNSYISYWAYWGQGTLVTVSSGGGGQGGGGQGGGGQQTVVTQEPSLTVSPGGTVTLTCGSSTGAVTSGNYPNWVQQKPGQAPRGLIGGTKFLAPGTPARFSGSLLGGKAALTLSGVQPEDEAEYYCVLWYSNRWVFGGGTKLTVLGGGGCPPCPAPELLGGPSVFLFPPKPKDTLMISRTPEVTCVVVDVSHEEPEVKFNWYVDGVEVHNAKTKPCEEQYGSTYRCVSVLTVLHQDWLNGKEYKCKVSNKALPAPIEKTISKAKGQPREPQVYTLPPSREEMTKNQVSLTCLVKGFYPSDIAVEWESNGQPENNYKTTPPVLDSDGSFFLYSKLTVDKSRWQQGNVFSCSVMHEALHNHYTQKSLSLSPGKGGGGQGGGGQGGGGQGGGGQGGGGQGGGGQCPPCPAPELLGGPSVFLFPPKPKDTLMISRTPEVTCVVVDVSHEEPEVKFNWYVDGVEVHNAKTKPCEEQYGSTYRCVSVLTVLHQDWLNGKEYKCKVSNKALPAPIEKTISKAKGQPREPQVYTLPPSREEMTKNQVSLTCLVKGFYPSDIAVEWESNGQPENNYKTTPPVLDSDGSFFLYSKLTVDKSRWQQGNVFSCSVMHEALHNHYTQKSLSLSPGK

SEQ ID NO: 2592 - protein, 1234 aa, Artificial Sequence
  Synthetic
EVQLLESGGGLVQPGGSLRLSCAASGFTFSGHAMTWVRQAPGKCLEWLSTIYGSGGYTYYAGSVKGRFTISRDNSKNTLYLQMNSLRAEDTAVYYCAKVGGYDWYFDLWGRGTLVTVSSGGGGSGGGGSGGGGSSYELTQPPSVSVALGQTARITCGGHNIGSKNVHWYQQKPGQAPVLVIYRDTNRPSGIPERFSGSNSGNTATLTISRAQAGDEADYYCQLWDSTTVVFGCGTKLTVLSGGGGSQVQLVQSGAEVKKPGASVKVSCKASGYTFTTYGISWVRQAPGQCLEWMGWISPKNGVTTYAQKFQGRVTITADESTSTAYMELSRLTSDDTAMYYCARDPDYYGSGSYSDYWGQGTLVTVSSGGGGSGGGGSGGGGSEIVLTQSPATLSVSPGERATLSCRASQSVSSNLAWYQQKPGQAPRLLIYGASSRATGIPARFSGSGSGTEFTLTISSLQSEDFAVYYCQQYHSWPLLTFGCGTKVEIKSGGGGSEVQLVESGGGLVQPGGSLKLSCAASGFTFNKYAINWVRQAPGKGLEWVARIRSKYNNYATYYADAVKDRFTISRDDSKNTVYLQMNNLKTEDTAVYYCARAGNFGSSYISYWAYWGQGTLVTVSSGGGGSGGGGSGGGGSQTVVTQEPSLTVSPGGTVTITCGSSTGAVTSGNYPNWVQKKPGQAPRGLIGGTKFLAPGTPARFSGSLSGGKAALTLSGVQPEDEAEYYCVLWYSNRWVFGSGTKLTVLGGGGDKTHTCPPCPAPELLGGPSVFLFPPKPKDTLMISRTPEVTCVVVDVSHEDPEVKFNWYVDGVEVHNAKTKPCEEQYGSTYRCVSVLTVLHQDWLNGKEYKCKVSNKALPAPIEKTISKAKGQPREPQVYTLPPSREEMTKNQVSLTCLVKGFYPSDIAVEWESNGQPENNYKTTPPVLDSDGSFFLYSKLTVDKSRWQQGNVFSCSVMHEALHNHYTQKSLSLSPGKGGGGSGGGGSGGGGSGGGGSGGGGSGGGGSDKTHTCPPCPAPELLGGPSVFLFPPKPKDTLMISRTPEVTCVVVDVSHEDPEVKFNWYVDGVEVHNAKTKPCEEQYGSTYRCVSVLTVLHQDWLNGKEYKCKVSNKALPAPIEKTISKAKGQPREPQVYTLPPSREEMTKNQVSLTCLVKGFYPSDIAVEWESNGQPENNYKTTPPVLDSDGSFFLYSKLTVDKSRWQQGNVFSCSVMHEALHNHYTQKSLSLSPGK

SEQ ID NO: 2593 - protein, 1224 aa, Artificial Sequence
  Synthetic
EVQLLESGGGLVQPGGSLRLSCAASGFTFSGHAMTWVRQAPGKCLEWLSTIYGSGGYTYYAGSVKGRFTISRDNSKNTLYLQMNSLRAEDTAVYYCAKVGGYDWYFDLWGRGTLVTVSSGGGGQGGGGQGGGGQSYELTQPPSVSVALGQTARITCGGHNIGSKNVHWYQQKPGQAPVLVIYRDTNRPSGIPERFSGSNSGNTATLTISRAQAGDEADYYCQLWDSTTVVFGCGTKLTVLSGGGGQQVQLVQSGAEVKKPGASVKVSCKASGYTFTTYGISWVRQAPGQCLEWMGWISPKNGVTTYAQKFQGRVTITADESTSTAYMELSRLTSDDTAMYYCARDPDYYGSGSYSDYWGQGTLVTVSSGGGGQGGGGQGGGGQEIVLTQSPATLSVSPGERATLSCRASQSVSSNLAWYQQKPGQAPRLLIYGASSRATGIPARFSGSGSGTEFTLTISSLQSEDFAVYYCQQYHSWPLLTFGCGTKVEIKSGGGGQEVQLVESGGGLVQPGGSLKLSCAASGFTFNKYAINWVRQAPGKGLEWVARIRSKYNNYATYYADAVKDRFTISRDDSKNTVYLQMNNLKTEDTAVYYCARAGNFGSSYISYWAYWGQGTLVTVSSGGGGQGGGGQGGGGQQTVVTQEPSLTVSPGGTVTITCGSSTGAVTSGNYPNWVQKKPGQAPRGLIGGTKFLAPGTPARFSGSLSGGKAALTLSGVQPEDEAEYYCVLWYSNRWVFGSGTKLTVLGGGGCPPCPAPELLGGPSVFLFPPKPKDTLMISRTPEVTCVVVDVSHEEPEVKFNWYVDGVEVHNAKTKPCEEQYGSTYRCVSVLTVLHQDWLNGKEYKCKVSNKALPAPIEKTISKAKGQPREPQVYTLPPSREEMTKNQVSLTCLVKGFYPSDIAVEWESNGQPENNYKTTPPVLDSDGSFFLYSKLTVDKSRWQQGNVFSCSVMHEALHNHYTQKSLSLSPGKGGGGQGGGGQGGGGQGGGGQGGGGQGGGGQCPPCPAPELLGGPSVFLFPPKPKDTLMISRTPEVTCVVVDVSHEEPEVKFNWYVDGVEVHNAKTKPCEEQYGSTYRCVSVLTVLHQDWLNGKEYKCKVSNKALPAPIEKTISKAKGQPREPQVYTLPPSREEMTKNQVSLTCLVKGFYPSDIAVEWESNGQPENNYKTTPPVLDSDGSFFLYSKLTVDKSRWQQGNVFSCSVMHEALHNHYTQKSLSLSPGK

SEQ ID NO: 2594 - protein, 491 aa, Artificial Sequence
  Synthetic
EVQLLESGGGLVQPGGSLRLSCAASGFTFSGHAMTWVRQAPGKCLEWLSTIYGSGGYTYYAGSVKGRFTISRDNSKNTLYLQMNSLRAEDTAVYYCAKVGGYDWYFDLWGRGTLVTVSSGGGGSGGGGSGGGGSSYELTQPPSVSVALGQTARITCGGHNIGSKNVHWYQQKPGQAPVLVIYRDTNRPSGIPERFSGSNSGNTATLTISRAQAGDEADYYCQLWDSTTVVFGCGTKLTVLSGGGGSQVQLVQSGGEVKKPGASVKVSCKASGYTFTSYGISWVRQAPGQCLEWMGWISAYTGETLYAQKLQGRVTMTRDTSTSTAYMELRSLRSDDTAVYYCARDPDYYGSGSYSDYWGQGTLVTVSSGGGGSGGGGSGGGGSEIVLTQSPATLSVSPGERATLSCRASQSVSSNLAWYQQKPGQAPRLLIYGASSRATGIPARFSGSGSGTEFTLTISSLQSEDFAVYYCQQYHSWPLLTFGCGTKVEIK

SEQ ID NO: 2595 - protein, 491 aa, Artificial Sequence
  Synthetic
EVQLLESGGGLVQPGGSLRLSCAASGFTFSGHAMTWVRQAPGKCLEWLSTIYGSGGYTYYAGSVKGRFTISRDNSKNTLYLQMNSLRAEDTAVYYCAKVGGYDWYFDLWGRGTLVTVSSGGGGQGGGGQGGGGQSYELTQPPSVSVALGQTARITCGGHNIGSKNVHWYQQKPGQAPVLVIYRDTNRPSGIPERFSGSNSGNTATLTISRAQAGDEADYYCQLWDSTTVVFGCGTKLTVLSGGGGQQVQLVQSGGEVKKPGASVKVSCKASGYTFTSYGISWVRQAPGQCLEWMGWISAYTGETLYAQKLQGRVTMTRDTSTSTAYMELRSLRSDDTAVYYCARDPDYYGSGSYSDYWGQGTLVTVSSGGGGQGGGGQGGGGQEIVLTQSPATLSVSPGERATLSCRASQSVSSNLAWYQQKPGQAPRLLIYGASSRATGIPARFSGSGSGTEFTLTISSLQSEDFAVYYCQQYHSWPLLTFGCGTKVEIK

SEQ ID NO: 2596 - protein, 746 aa, Artificial Sequence
  Synthetic
EVQLLESGGGLVQPGGSLRLSCAASGFTFSGHAMTWVRQAPGKCLEWLSTIYGSGGYTYYAGSVKGRFTISRDNSKNTLYLQMNSLRAEDTAVYYCAKVGGYDWYFDLWGRGTLVTVSSGGGGSGGGGSGGGGSSYELTQPPSVSVALGQTARITCGGHNIGSKNVHWYQQKPGQAPVLVIYRDTNRPSGIPERFSGSNSGNTATLTISRAQAGDEADYYCQLWDSTTVVFGCGTKLTVLSGGGGSQVQLVQSGGEVKKPGASVKVSCKASGYTFTSYGISWVRQAPGQCLEWMGWISAYTGETLYAQKLQGRVTMTRDTSTSTAYMELRSLRSDDTAVYYCARDPDYYGSGSYSDYWGQGTLVTVSSGGGGSGGGGSGGGGSEIVLTQSPATLSVSPGERATLSCRASQSVSSNLAWYQQKPGQAPRLLIYGASSRATGIPARFSGSGSGTEFTLTISSLQSEDFAVYYCQQYHSWPLLTFGCGTKVEIKSGGGGSEVQLVESGGGLVQPGGSLKLSCAASGFTFNKYAMNWVRQAPGKGLEWVARIRSKYNNYATYYADSVKDRFTISRDDSKNTAYLQMNNLKTEDTAVYYCVRHGNFGNSYISYWAYWGQGTLVTVSSGGGGSGGGGSGGGGSQTVVTQEPSLTVSPGGTVTLTCGSSTGAVTSGNYPNWVQQKPGQAPRGLIGGTKFLAPGTPARFSGSLLGGKAALTLSGVQPEDEAEYYCVLWYSNRWVFGGGTKLTVL

SEQ ID NO: 2597 - protein, 746 aa, Artificial Sequence
  Synthetic
EVQLLESGGGLVQPGGSLRLSCAASGFTFSGHAMTWVRQAPGKCLEWLSTIYGSGGYTYYAGSVKGRFTISRDNSKNTLYLQMNSLRAEDTAVYYCAKVGGYDWYFDLWGRGTLVTVSSGGGGQGGGGQGGGGQSYELTQPPSVSVALGQTARITCGGHNIGSKNVHWYQQKPGQAPVLVIYRDTNRPSGIPERFSGSNSGNTATLTISRAQAGDEADYYCQLWDSTTVVFGCGTKLTVLSGGGGQQVQLVQSGGEVKKPGASVKVSCKASGYTFTSYGISWVRQAPGQCLEWMGWISAYTGETLYAQKLQGRVTMTRDTSTSTAYMELRSLRSDDTAVYYCARDPDYYGSGSYSDYWGQGTLVTVSSGGGGQGGGGQGGGGQEIVLTQSPATLSVSPGERATLSCRASQSVSSNLAWYQQKPGQAPRLLIYGASSRATGIPARFSGSGSGTEFTLTISSLQSEDFAVYYCQQYHSWPLLTFGCGTKVEIKSGGGGQEVQLVESGGGLVQPGGSLKLSCAASGFTFNKYAMNWVRQAPGKGLEWVARIRSKYNNYATYYADSVKDRFTISRDDSKNTAYLQMNNLKTEDTAVYYCVRHGNFGNSYISYWAYWGQGTLVTVSSGGGGQGGGGQGGGGQQTVVTQEPSLTVSPGGTVTLTCGSSTGAVTSGNYPNWVQQKPGQAPRGLIGGTKFLAPGTPARFSGSLLGGKAALTLSGVQPEDEAEYYCVLWYSNRWVFGGGTKLTVL

SEQ ID NO: 2598 - protein, 746 aa, Artificial Sequence
  Synthetic
EVQLLESGGGLVQPGGSLRLSCAASGFTFSGHAMTWVRQAPGKCLEWLSTIYGSGGYTYYAGSVKGRFTISRDNSKNTLYLQMNSLRAEDTAVYYCAKVGGYDWYFDLWGRGTLVTVSSGGGGSGGGGSGGGGSSYELTQPPSVSVALGQTARITCGGHNIGSKNVHWYQQKPGQAPVLVIYRDTNRPSGIPERFSGSNSGNTATLTISRAQAGDEADYYCQLWDSTTVVFGCGTKLTVLSGGGGSQVQLVQSGGEVKKPGASVKVSCKASGYTFTSYGISWVRQAPGQCLEWMGWISAYTGETLYAQKLQGRVTMTRDTSTSTAYMELRSLRSDDTAVYYCARDPDYYGSGSYSDYWGQGTLVTVSSGGGGSGGGGSGGGGSEIVLTQSPATLSVSPGERATLSCRASQSVSSNLAWYQQKPGQAPRLLIYGASSRATGIPARFSGSGSGTEFTLTISSLQSEDFAVYYCQQYHSWPLLTFGCGTKVEIKSGGGGSEVQLVESGGGLVQPGGSLKLSCAASGFTFNKYAINWVRQAPGKGLEWVARIRSKYNNYATYYADAVKDRFTISRDDSKNTVYLQMNNLKTEDTAVYYCARAGNFGSSYISYWAYWGQGTLVTVSSGGGGSGGGGSGGGGSQTVVTQEPSLTVSPGGTVTITCGSSTGAVTSGNYPNWVQKKPGQAPRGLIGGTKFLAPGTPARFSGSLSGGKAALTLSGVQPEDEAEYYCVLWYSNRWVFGSGTKLTVL

SEQ ID NO: 2599 - protein, 746 aa, Artificial Sequence
  Synthetic
EVQLLESGGGLVQPGGSLRLSCAASGFTFSGHAMTWVRQAPGKCLEWLSTIYGSGGYTYYAGSVKGRFTISRDNSKNTLYLQMNSLRAEDTAVYYCAKVGGYDWYFDLWGRGTLVTVSSGGGGQGGGGQGGGGQSYELTQPPSVSVALGQTARITCGGHNIGSKNVHWYQQKPGQAPVLVIYRDTNRPSGIPERFSGSNSGNTATLTISRAQAGDEADYYCQLWDSTTVVFGCGTKLTVLSGGGGQQVQLVQSGGEVKKPGASVKVSCKASGYTFTSYGISWVRQAPGQCLEWMGWISAYTGETLYAQKLQGRVTMTRDTSTSTAYMELRSLRSDDTAVYYCARDPDYYGSGSYSDYWGQGTLVTVSSGGGGQGGGGQGGGGQEIVLTQSPATLSVSPGERATLSCRASQSVSSNLAWYQQKPGQAPRLLIYGASSRATGIPARFSGSGSGTEFTLTISSLQSEDFAVYYCQQYHSWPLLTFGCGTKVEIKSGGGGQEVQLVESGGGLVQPGGSLKLSCAASGFTFNKYAINWVRQAPGKGLEWVARIRSKYNNYATYYADAVKDRFTISRDDSKNTVYLQMNNLKTEDTAVYYCARAGNFGSSYISYWAYWGQGTLVTVSSGGGGQGGGGQGGGGQQTVVTQEPSLTVSPGGTVTITCGSSTGAVTSGNYPNWVQKKPGQAPRGLIGGTKFLAPGTPARFSGSLSGGKAALTLSGVQPEDEAEYYCVLWYSNRWVFGSGTKLTVL

SEQ ID NO: 2600 - protein, 1234 aa, Artificial Sequence
  Synthetic
EVQLLESGGGLVQPGGSLRLSCAASGFTFSGHAMTWVRQAPGKCLEWLSTIYGSGGYTYYAGSVKGRFTISRDNSKNTLYLQMNSLRAEDTAVYYCAKVGGYDWYFDLWGRGTLVTVSSGGGGSGGGGSGGGGSSYELTQPPSVSVALGQTARITCGGHNIGSKNVHWYQQKPGQAPVLVIYRDTNRPSGIPERFSGSNSGNTATLTISRAQAGDEADYYCQLWDSTTVVFGCGTKLTVLSGGGGSQVQLVQSGGEVKKPGASVKVSCKASGYTFTSYGISWVRQAPGQCLEWMGWISAYTGETLYAQKLQGRVTMTRDTSTSTAYMELRSLRSDDTAVYYCARDPDYYGSGSYSDYWGQGTLVTVSSGGGGSGGGGSGGGGSEIVLTQSPATLSVSPGERATLSCRASQSVSSNLAWYQQKPGQAPRLLIYGASSRATGIPARFSGSGSGTEFTLTISSLQSEDFAVYYCQQYHSWPLLTFGCGTKVEIKSGGGGSEVQLVESGGGLVQPGGSLKLSCAASGFTFNKYAMNWVRQAPGKGLEWVARIRSKYNNYATYYADSVKDRFTISRDDSKNTAYLQMNNLKTEDTAVYYCVRHGNFGNSYISYWAYWGQGTLVTVSSGGGGSGGGGSGGGGSQTVVTQEPSLTVSPGGTVTLTCGSSTGAVTSGNYPNWVQQKPGQAPRGLIGGTKFLAPGTPARFSGSLLGGKAALTLSGVQPEDEAEYYCVLWYSNRWVFGGGTKLTVLGGGGDKTHTCPPCPAPELLGGPSVFLFPPKPKDTLMISRTPEVTCVVVDVSHEDPEVKFNWYVDGVEVHNAKTKPCEEQYGSTYRCVSVLTVLHQDWLNGKEYKCKVSNKALPAPIEKTISKAKGQPREPQVYTLPPSREEMTKNQVSLTCLVKGFYPSDIAVEWESNGQPENNYKTTPPVLDSDGSFFLYSKLTVDKSRWQQGNVFSCSVMHEALHNHYTQKSLSLSPGKGGGGSGGGGSGGGGSGGGGSGGGGSGGGGSDKTHTCPPCPAPELLGGPSVFLFPPKPKDTLMISRTPEVTCVVVDVSHEDPEVKFNWYVDGVEVHNAKTKPCEEQYGSTYRCVSVLTVLHQDWLNGKEYKCKVSNKALPAPIEKTISKAKGQPREPQVYTLPPSREEMTKNQVSLTCLVKGFYPSDIAVEWESNGQPENNYKTTPPVLDSDGSFFLYSKLTVDKSRWQQGNVFSCSVMHEALHNHYTQKSLSLSPGK

SEQ ID NO: 2601 - protein, 1224 aa, Artificial Sequence
  Synthetic
EVQLLESGGGLVQPGGSLRLSCAASGFTFSGHAMTWVRQAPGKCLEWLSTIYGSGGYTYYAGSVKGRFTISRDNSKNTLYLQMNSLRAEDTAVYYCAKVGGYDWYFDLWGRGTLVTVSSGGGGQGGGGQGGGGQSYELTQPPSVSVALGQTARITCGGHNIGSKNVHWYQQKPGQAPVLVIYRDTNRPSGIPERFSGSNSGNTATLTISRAQAGDEADYYCQLWDSTTVVFGCGTKLTVLSGGGGQQVQLVQSGGEVKKPGASVKVSCKASGYTFTSYGISWVRQAPGQCLEWMGWISAYTGETLYAQKLQGRVTMTRDTSTSTAYMELRSLRSDDTAVYYCARDPDYYGSGSYSDYWGQGTLVTVSSGGGGQGGGGQGGGGQEIVLTQSPATLSVSPGERATLSCRASQSVSSNLAWYQQKPGQAPRLLIYGASSRATGIPARFSGSGSGTEFTLTISSLQSEDFAVYYCQQYHSWPLLTFGCGTKVEIKSGGGGQEVQLVESGGGLVQPGGSLKLSCAASGFTFNKYAMNWVRQAPGKGLEWVARIRSKYNNYATYYADSVKDRFTISRDDSKNTAYLQMNNLKTEDTAVYYCVRHGNFGNSYISYWAYWGQGTLVTVSSGGGGQGGGGQGGGGQQTVVTQEPSLTVSPGGTVTLTCGSSTGAVTSGNYPNWVQQKPGQAPRGLIGGTKFLAPGTPARFSGSLLGGKAALTLSGVQPEDEAEYYCVLWYSNRWVFGGGTKLTVLGGGGCPPCPAPELLGGPSVFLFPPKPKDTLMISRTPEVTCVVVDVSHEEPEVKFNWYVDGVEVHNAKTKPCEEQYGSTYRCVSVLTVLHQDWLNGKEYKCKVSNKALPAPIEKTISKAKGQPREPQVYTLPPSREEMTKNQVSLTCLVKGFYPSDIAVEWESNGQPENNYKTTPPVLDSDGSFFLYSKLTVDKSRWQQGNVFSCSVMHEALHNHYTQKSLSLSPGKGGGGQGGGGQGGGGQGGGGQGGGGQGGGGQCPPCPAPELLGGPSVFLFPPKPKDTLMISRTPEVTCVVVDVSHEEPEVKFNWYVDGVEVHNAKTKPCEEQYGSTYRCVSVLTVLHQDWLNGKEYKCKVSNKALPAPIEKTISKAKGQPREPQVYTLPPSREEMTKNQVSLTCLVKGFYPSDIAVEWESNGQPENNYKTTPPVLDSDGSFFLYSKLTVDKSRWQQGNVFSCSVMHEALHNHYTQKSLSLSPGK

SEQ ID NO: 2602 - protein, 1234 aa, Artificial Sequence
  Synthetic
EVQLLESGGGLVQPGGSLRLSCAASGFTFSGHAMTWVRQAPGKCLEWLSTIYGSGGYTYYAGSVKGRFTISRDNSKNTLYLQMNSLRAEDTAVYYCAKVGGYDWYFDLWGRGTLVTVSSGGGGSGGGGSGGGGSSYELTQPPSVSVALGQTARITCGGHNIGSKNVHWYQQKPGQAPVLVIYRDTNRPSGIPERFSGSNSGNTATLTISRAQAGDEADYYCQLWDSTTVVFGCGTKLTVLSGGGGSQVQLVQSGGEVKKPGASVKVSCKASGYTFTSYGISWVRQAPGQCLEWMGWISAYTGETLYAQKLQGRVTMTRDTSTSTAYMELRSLRSDDTAVYYCARDPDYYGSGSYSDYWGQGTLVTVSSGGGGSGGGGSGGGGSEIVLTQSPATLSVSPGERATLSCRASQSVSSNLAWYQQKPGQAPRLLIYGASSRATGIPARFSGSGSGTEFTLTISSLQSEDFAVYYCQQYHSWPLLTFGCGTKVEIKSGGGGSEVQLVESGGGLVQPGGSLKLSCAASGFTFNKYAINWVRQAPGKGLEWVARIRSKYNNYATYYADAVKDRFTISRDDSKNTVYLQMNNLKTEDTAVYYCARAGNFGSSYISYWAYWGQGTLVTVSSGGGGSGGGGSGGGGSQTVVTQEPSLTVSPGGTVTITCGSSTGAVTSGNYPNWVQKKPGQAPRGLIGGTKFLAPGTPARFSGSLSGGKAALTLSGVQPEDEAEYYCVLWYSNRWVFGSGTKLTVLGGGGDKTHTCPPCPAPELLGGPSVFLFPPKPKDTLMISRTPEVTCVVVDVSHEDPEVKFNWYVDGVEVHNAKTKPCEEQYGSTYRCVSVLTVLHQDWLNGKEYKCKVSNKALPAPIEKTISKAKGQPREPQVYTLPPSREEMTKNQVSLTCLVKGFYPSDIAVEWESNGQPENNYKTTPPVLDSDGSFFLYSKLTVDKSRWQQGNVFSCSVMHEALHNHYTQKSLSLSPGKGGGGSGGGGSGGGGSGGGGSGGGGSGGGGSDKTHTCPPCPAPELLGGPSVFLFPPKPKDTLMISRTPEVTCVVVDVSHEDPEVKFNWYVDGVEVHNAKTKPCEEQYGSTYRCVSVLTVLHQDWLNGKEYKCKVSNKALPAPIEKTISKAKGQPREPQVYTLPPSREEMTKNQVSLTCLVKGFYPSDIAVEWESNGQPENNYKTTPPVLDSDGSFFLYSKLTVDKSRWQQGNVFSCSVMHEALHNHYTQKSLSLSPGK

SEQ ID NO: 2603 - protein, 1224 aa, Artificial Sequence
  Synthetic
EVQLLESGGGLVQPGGSLRLSCAASGFTFSGHAMTWVRQAPGKCLEWLSTIYGSGGYTYYAGSVKGRFTISRDNSKNTLYLQMNSLRAEDTAVYYCAKVGGYDWYFDLWGRGTLVTVSSGGGGQGGGGQGGGGQSYELTQPPSVSVALGQTARITCGGHNIGSKNVHWYQQKPGQAPVLVIYRDTNRPSGIPERFSGSNSGNTATLTISRAQAGDEADYYCQLWDSTTVVFGCGTKLTVLSGGGGQQVQLVQSGGEVKKPGASVKVSCKASGYTFTSYGISWVRQAPGQCLEWMGWISAYTGETLYAQKLQGRVTMTRDTSTSTAYMELRSLRSDDTAVYYCARDPDYYGSGSYSDYWGQGTLVTVSSGGGGQGGGGQGGGGQEIVLTQSPATLSVSPGERATLSCRASQSVSSNLAWYQQKPGQAPRLLIYGASSRATGIPARFSGSGSGTEFTLTISSLQSEDFAVYYCQQYHSWPLLTFGCGTKVEIKSGGGGQEVQLVESGGGLVQPGGSLKLSCAASGFTFNKYAINWVRQAPGKGLEWVARIRSKYNNYATYYADAVKDRFTISRDDSKNTVYLQMNNLKTEDTAVYYCARAGNFGSSYISYWAYWGQGTLVTVSSGGGGQGGGGQGGGGQQTVVTQEPSLTVSPGGTVTITCGSSTGAVTSGNYPNWVQKKPGQAPRGLIGGTKFLAPGTPARFSGSLSGGKAALTLSGVQPEDEAEYYCVLWYSNRWVFGSGTKLTVLGGGGCPPCPAPELLGGPSVFLFPPKPKDTLMISRTPEVTCVVVDVSHEEPEVKFNWYVDGVEVHNAKTKPCEEQYGSTYRCVSVLTVLHQDWLNGKEYKCKVSNKALPAPIEKTISKAKGQPREPQVYTLPPSREEMTKNQVSLTCLVKGFYPSDIAVEWESNGQPENNYKTTPPVLDSDGSFFLYSKLTVDKSRWQQGNVFSCSVMHEALHNHYTQKSLSLSPGKGGGGQGGGGQGGGGQGGGGQGGGGQGGGGQCPPCPAPELLGGPSVFLFPPKPKDTLMISRTPEVTCVVVDVSHEEPEVKFNWYVDGVEVHNAKTKPCEEQYGSTYRCVSVLTVLHQDWLNGKEYKCKVSNKALPAPIEKTISKAKGQPREPQVYTLPPSREEMTKNQVSLTCLVKGFYPSDIAVEWESNGQPENNYKTTPPVLDSDGSFFLYSKLTVDKSRWQQGNVFSCSVMHEALHNHYTQKSLSLSPGK

SEQ ID NO: 2604 - protein, 491 aa, Artificial Sequence
  Synthetic
EVQLLESGGGLVQPGGSLRLSCAASGFTFSGHAMTWVRQAPGKCLEWLSTIYGSGGYTYYAGSVKGRFTISRDNSKNTLYLQMNSLRAEDTAVYYCAKVGGYDWYFDLWGRGTLVTVSSGGGGSGGGGSGGGGSSYELTQPPSVSVALGQTARITCGGHNIGSKNVHWYQQKPGQAPVLVIYRDTNRPSGIPERFSGSNSGNTATLTISRAQAGDEADYYCQLWDSTTVVFGCGTKLTVLSGGGGSQVQLVQSGGEVKKPGASVKVSCKASGYTFTSYGISWVRQAPGQCLEWMGWISPQTGNAIYAQKLQGRVTMTRDTSTSTAYMELRSLRSDDTAVYYCARDPDYYGSGSYSDYWGQGTLVTVSSGGGGSGGGGSGGGGSEIVLTQSPATLSVSPGERATLSCRASQSVSSNLAWYQQKPGQAPRLLIYGASSRATGIPARFSGSGSGTEFTLTISSLQSEDFAVYYCQQYHSWPLLTFGCGTKVEIK

SEQ ID NO: 2605 - protein, 491 aa, Artificial Sequence
  Synthetic
EVQLLESGGGLVQPGGSLRLSCAASGFTFSGHAMTWVRQAPGKCLEWLSTIYGSGGYTYYAGSVKGRFTISRDNSKNTLYLQMNSLRAEDTAVYYCAKVGGYDWYFDLWGRGTLVTVSSGGGGQGGGGQGGGGQSYELTQPPSVSVALGQTARITCGGHNIGSKNVHWYQQKPGQAPVLVIYRDTNRPSGIPERFSGSNSGNTATLTISRAQAGDEADYYCQLWDSTTVVFGCGTKLTVLSGGGGQQVQLVQSGGEVKKPGASVKVSCKASGYTFTSYGISWVRQAPGQCLEWMGWISPQTGNAIYAQKLQGRVTMTRDTSTSTAYMELRSLRSDDTAVYYCARDPDYYGSGSYSDYWGQGTLVTVSSGGGGQGGGGQGGGGQEIVLTQSPATLSVSPGERATLSCRASQSVSSNLAWYQQKPGQAPRLLIYGASSRATGIPARFSGSGSGTEFTLTISSLQSEDFAVYYCQQYHSWPLLTFGCGTKVEIK

SEQ ID NO: 2606 - protein, 746 aa, Artificial Sequence
  Synthetic
EVQLLESGGGLVQPGGSLRLSCAASGFTFSGHAMTWVRQAPGKCLEWLSTIYGSGGYTYYAGSVKGRFTISRDNSKNTLYLQMNSLRAEDTAVYYCAKVGGYDWYFDLWGRGTLVTVSSGGGGSGGGGSGGGGSSYELTQPPSVSVALGQTARITCGGHNIGSKNVHWYQQKPGQAPVLVIYRDTNRPSGIPERFSGSNSGNTATLTISRAQAGDEADYYCQLWDSTTVVFGCGTKLTVLSGGGGSQVQLVQSGGEVKKPGASVKVSCKASGYTFTSYGISWVRQAPGQCLEWMGWISPQTGNAIYAQKLQGRVTMTRDTSTSTAYMELRSLRSDDTAVYYCARDPDYYGSGSYSDYWGQGTLVTVSSGGGGSGGGGSGGGGSEIVLTQSPATLSVSPGERATLSCRASQSVSSNLAWYQQKPGQAPRLLIYGASSRATGIPARFSGSGSGTEFTLTISSLQSEDFAVYYCQQYHSWPLLTFGCGTKVEIKSGGGGSEVQLVESGGGLVQPGGSLKLSCAASGFTFNKYAMNWVRQAPGKGLEWVARIRSKYNNYATYYADSVKDRFTISRDDSKNTAYLQMNNLKTEDTAVYYCVRHGNFGNSYISYWAYWGQGTLVTVSSGGGGSGGGGSGGGGSQTVVTQEPSLTVSPGGTVTLTCGSSTGAVTSGNYPNWVQQKPGQAPRGLIGGTKFLAPGTPARFSGSLLGGKAALTLSGVQPEDEAEYYCVLWYSNRWVFGGGTKLTVL

SEQ ID NO: 2607 - protein, 746 aa, Artificial Sequence
  Synthetic
EVQLLESGGGLVQPGGSLRLSCAASGFTFSGHAMTWVRQAPGKCLEWLSTIYGSGGYTYYAGSVKGRFTISRDNSKNTLYLQMNSLRAEDTAVYYCAKVGGYDWYFDLWGRGTLVTVSSGGGGQGGGGQGGGGQSYELTQPPSVSVALGQTARITCGGHNIGSKNVHWYQQKPGQAPVLVIYRDTNRPSGIPERFSGSNSGNTATLTISRAQAGDEADYYCQLWDSTTVVFGCGTKLTVLSGGGGQQVQLVQSGGEVKKPGASVKVSCKASGYTFTSYGISWVRQAPGQCLEWMGWISPQTGNAIYAQKLQGRVTMTRDTSTSTAYMELRSLRSDDTAVYYCARDPDYYGSGSYSDYWGQGTLVTVSSGGGGQGGGGQGGGGQEIVLTQSPATLSVSPGERATLSCRASQSVSSNLAWYQQKPGQAPRLLIYGASSRATGIPARFSGSGSGTEFTLTISSLQSEDFAVYYCQQYHSWPLLTFGCGTKVEIKSGGGGQEVQLVESGGGLVQPGGSLKLSCAASGFTFNKYAMNWVRQAPGKGLEWVARIRSKYNNYATYYADSVKDRFTISRDDSKNTAYLQMNNLKTEDTAVYYCVRHGNFGNSYISYWAYWGQGTLVTVSSGGGGQGGGGQGGGGQQTVVTQEPSLTVSPGGTVTLTCGSSTGAVTSGNYPNWVQQKPGQAPRGLIGGTKFLAPGTPARFSGSLLGGKAALTLSGVQPEDEAEYYCVLWYSNRWVFGGGTKLTVL

SEQ ID NO: 2608 - protein, 746 aa, Artificial Sequence
  Synthetic
EVQLLESGGGLVQPGGSLRLSCAASGFTFSGHAMTWVRQAPGKCLEWLSTIYGSGGYTYYAGSVKGRFTISRDNSKNTLYLQMNSLRAEDTAVYYCAKVGGYDWYFDLWGRGTLVTVSSGGGGSGGGGSGGGGSSYELTQPPSVSVALGQTARITCGGHNIGSKNVHWYQQKPGQAPVLVIYRDTNRPSGIPERFSGSNSGNTATLTISRAQAGDEADYYCQLWDSTTVVFGCGTKLTVLSGGGGSQVQLVQSGGEVKKPGASVKVSCKASGYTFTSYGISWVRQAPGQCLEWMGWISPQTGNAIYAQKLQGRVTMTRDTSTSTAYMELRSLRSDDTAVYYCARDPDYYGSGSYSDYWGQGTLVTVSSGGGGSGGGGSGGGGSEIVLTQSPATLSVSPGERATLSCRASQSVSSNLAWYQQKPGQAPRLLIYGASSRATGIPARFSGSGSGTEFTLTISSLQSEDFAVYYCQQYHSWPLLTFGCGTKVEIKSGGGGSEVQLVESGGGLVQPGGSLKLSCAASGFTFNKYAINWVRQAPGKGLEWVARIRSKYNNYATYYADAVKDRFTISRDDSKNTVYLQMNNLKTEDTAVYYCARAGNFGSSYISYWAYWGQGTLVTVSSGGGGSGGGGSGGGGSQTVVTQEPSLTVSPGGTVTITCGSSTGAVTSGNYPNWVQKKPGQAPRGLIGGTKFLAPGTPARFSGSLSGGKAALTLSGVQPEDEAEYYCVLWYSNRWVFGSGTKLTVL

SEQ ID NO: 2609 - protein, 746 aa, Artificial Sequence
  Synthetic
EVQLLESGGGLVQPGGSLRLSCAASGFTFSGHAMTWVRQAPGKCLEWLSTIYGSGGYTYYAGSVKGRFTISRDNSKNTLYLQMNSLRAEDTAVYYCAKVGGYDWYFDLWGRGTLVTVSSGGGGQGGGGQGGGGQSYELTQPPSVSVALGQTARITCGGHNIGSKNVHWYQQKPGQAPVLVIYRDTNRPSGIPERFSGSNSGNTATLTISRAQAGDEADYYCQLWDSTTVVFGCGTKLTVLSGGGGQQVQLVQSGGEVKKPGASVKVSCKASGYTFTSYGISWVRQAPGQCLEWMGWISPQTGNAIYAQKLQGRVTMTRDTSTSTAYMELRSLRSDDTAVYYCARDPDYYGSGSYSDYWGQGTLVTVSSGGGGQGGGGQGGGGQEIVLTQSPATLSVSPGERATLSCRASQSVSSNLAWYQQKPGQAPRLLIYGASSRATGIPARFSGSGSGTEFTLTISSLQSEDFAVYYCQQYHSWPLLTFGCGTKVEIKSGGGGQEVQLVESGGGLVQPGGSLKLSCAASGFTFNKYAINWVRQAPGKGLEWVARIRSKYNNYATYYADAVKDRFTISRDDSKNTVYLQMNNLKTEDTAVYYCARAGNFGSSYISYWAYWGQGTLVTVSSGGGGQGGGGQGGGGQQTVVTQEPSLTVSPGGTVTITCGSSTGAVTSGNYPNWVQKKPGQAPRGLIGGTKFLAPGTPARFSGSLSGGKAALTLSGVQPEDEAEYYCVLWYSNRWVFGSGTKLTVL

SEQ ID NO: 2610 - protein, 1234 aa, Artificial Sequence
  Synthetic
EVQLLESGGGLVQPGGSLRLSCAASGFTFSGHAMTWVRQAPGKCLEWLSTIYGSGGYTYYAGSVKGRFTISRDNSKNTLYLQMNSLRAEDTAVYYCAKVGGYDWYFDLWGRGTLVTVSSGGGGSGGGGSGGGGSSYELTQPPSVSVALGQTARITCGGHNIGSKNVHWYQQKPGQAPVLVIYRDTNRPSGIPERFSGSNSGNTATLTISRAQAGDEADYYCQLWDSTTVVFGCGTKLTVLSGGGGSQVQLVQSGGEVKKPGASVKVSCKASGYTFTSYGISWVRQAPGQCLEWMGWISPQTGNAIYAQKLQGRVTMTRDTSTSTAYMELRSLRSDDTAVYYCARDPDYYGSGSYSDYWGQGTLVTVSSGGGGSGGGGSGGGGSEIVLTQSPATLSVSPGERATLSCRASQSVSSNLAWYQQKPGQAPRLLIYGASSRATGIPARFSGSGSGTEFTLTISSLQSEDFAVYYCQQYHSWPLLTFGCGTKVEIKSGGGGSEVQLVESGGGLVQPGGSLKLSCAASGFTFNKYAMNWVRQAPGKGLEWVARIRSKYNNYATYYADSVKDRFTISRDDSKNTAYLQMNNLKTEDTAVYYCVRHGNFGNSYISYWAYWGQGTLVTVSSGGGGSGGGGSGGGGSQTVVTQEPSLTVSPGGTVTLTCGSSTGAVTSGNYPNWVQQKPGQAPRGLIGGTKFLAPGTPARFSGSLLGGKAALTLSGVQPEDEAEYYCVLWYSNRWVFGGGTKLTVLGGGGDKTHTCPPCPAPELLGGPSVFLFPPKPKDTLMISRTPEVTCVVVDVSHEDPEVKFNWYVDGVEVHNAKTKPCEEQYGSTYRCVSVLTVLHQDWLNGKEYKCKVSNKALPAPIEKTISKAKGQPREPQVYTLPPSREEMTKNQVSLTCLVKGFYPSDIAVEWESNGQPENNYKTTPPVLDSDGSFFLYSKLTVDKSRWQQGNVFSCSVMHEALHNHYTQKSLSLSPGKGGGGSGGGGSGGGGSGGGGSGGGGSGGGGSDKTHTCPPCPAPELLGGPSVFLFPPKPKDTLMISRTPEVTCVVVDVSHEDPEVKFNWYVDGVEVHNAKTKPCEEQYGSTYRCVSVLTVLHQDWLNGKEYKCKVSNKALPAPIEKTISKAKGQPREPQVYTLPPSREEMTKNQVSLTCLVKGFYPSDIAVEWESNGQPENNYKTTPPVLDSDGSFFLYSKLTVDKSRWQQGNVFSCSVMHEALHNHYTQKSLSLSPGK

SEQ ID NO: 2611 - protein, 1224 aa, Artificial Sequence
  Synthetic
EVQLLESGGGLVQPGGSLRLSCAASGFTFSGHAMTWVRQAPGKCLEWLSTIYGSGGYTYYAGSVKGRFTISRDNSKNTLYLQMNSLRAEDTAVYYCAKVGGYDWYFDLWGRGTLVTVSSGGGGQGGGGQGGGGQSYELTQPPSVSVALGQTARITCGGHNIGSKNVHWYQQKPGQAPVLVIYRDTNRPSGIPERFSGSNSGNTATLTISRAQAGDEADYYCQLWDSTTVVFGCGTKLTVLSGGGGQQVQLVQSGGEVKKPGASVKVSCKASGYTFTSYGISWVRQAPGQCLEWMGWISPQTGNAIYAQKLQGRVTMTRDTSTSTAYMELRSLRSDDTAVYYCARDPDYYGSGSYSDYWGQGTLVTVSSGGGGQGGGGQGGGGQEIVLTQSPATLSVSPGERATLSCRASQSVSSNLAWYQQKPGQAPRLLIYGASSRATGIPARFSGSGSGTEFTLTISSLQSEDFAVYYCQQYHSWPLLTFGCGTKVEIKSGGGGQEVQLVESGGGLVQPGGSLKLSCAASGFTFNKYAMNWVRQAPGKGLEWVARIRSKYNNYATYYADSVKDRFTISRDDSKNTAYLQMNNLKTEDTAVYYCVRHGNFGNSYISYWAYWGQGTLVTVSSGGGGQGGGGQGGGGQQTVVTQEPSLTVSPGGTVTLTCGSSTGAVTSGNYPNWVQQKPGQAPRGLIGGTKFLAPGTPARFSGSLLGGKAALTLSGVQPEDEAEYYCVLWYSNRWVFGGGTKLTVLGGGGCPPCPAPELLGGPSVFLFPPKPKDTLMISRTPEVTCVVVDVSHEEPEVKFNWYVDGVEVHNAKTKPCEEQYGSTYRCVSVLTVLHQDWLNGKEYKCKVSNKALPAPIEKTISKAKGQPREPQVYTLPPSREEMTKNQVSLTCLVKGFYPSDIAVEWESNGQPENNYKTTPPVLDSDGSFFLYSKLTVDKSRWQQGNVFSCSVMHEALHNHYTQKSLSLSPGKGGGGQGGGGQGGGGQGGGGQGGGGQGGGGQCPPCPAPELLGGPSVFLFPPKPKDTLMISRTPEVTCVVVDVSHEEPEVKFNWYVDGVEVHNAKTKPCEEQYGSTYRCVSVLTVLHQDWLNGKEYKCKVSNKALPAPIEKTISKAKGQPREPQVYTLPPSREEMTKNQVSLTCLVKGFYPSDIAVEWESNGQPENNYKTTPPVLDSDGSFFLYSKLTVDKSRWQQGNVFSCSVMHEALHNHYTQKSLSLSPGK

SEQ ID NO: 2612 - protein, 1234 aa, Artificial Sequence
  Synthetic
EVQLLESGGGLVQPGGSLRLSCAASGFTFSGHAMTWVRQAPGKCLEWLSTIYGSGGYTYYAGSVKGRFTISRDNSKNTLYLQMNSLRAEDTAVYYCAKVGGYDWYFDLWGRGTLVTVSSGGGGSGGGGSGGGGSSYELTQPPSVSVALGQTARITCGGHNIGSKNVHWYQQKPGQAPVLVIYRDTNRPSGIPERFSGSNSGNTATLTISRAQAGDEADYYCQLWDSTTVVFGCGTKLTVLSGGGGSQVQLVQSGGEVKKPGASVKVSCKASGYTFTSYGISWVRQAPGQCLEWMGWISPQTGNAIYAQKLQGRVTMTRDTSTSTAYMELRSLRSDDTAVYYCARDPDYYGSGSYSDYWGQGTLVTVSSGGGGSGGGGSGGGGSEIVLTQSPATLSVSPGERATLSCRASQSVSSNLAWYQQKPGQAPRLLIYGASSRATGIPARFSGSGSGTEFTLTISSLQSEDFAVYYCQQYHSWPLLTFGCGTKVEIKSGGGGSEVQLVESGGGLVQPGGSLKLSCAASGFTFNKYAINWVRQAPGKGLEWVARIRSKYNNYATYYADAVKDRFTISRDDSKNTVYLQMNNLKTEDTAVYYCARAGNFGSSYISYWAYWGQGTLVTVSSGGGGSGGGGSGGGGSQTVVTQEPSLTVSPGGTVTITCGSSTGAVTSGNYPNWVQKKPGQAPRGLIGGTKFLAPGTPARFSGSLSGGKAALTLSGVQPEDEAEYYCVLWYSNRWVFGSGTKLTVLGGGGDKTHTCPPCPAPELLGGPSVFLFPPKPKDTLMISRTPEVTCVVVDVSHEDPEVKFNWYVDGVEVHNAKTKPCEEQYGSTYRCVSVLTVLHQDWLNGKEYKCKVSNKALPAPIEKTISKAKGQPREPQVYTLPPSREEMTKNQVSLTCLVKGFYPSDIAVEWESNGQPENNYKTTPPVLDSDGSFFLYSKLTVDKSRWQQGNVFSCSVMHEALHNHYTQKSLSLSPGKGGGGSGGGGSGGGGSGGGGSGGGGSGGGGSDKTHTCPPCPAPELLGGPSVFLFPPKPKDTLMISRTPEVTCVVVDVSHEDPEVKFNWYVDGVEVHNAKTKPCEEQYGSTYRCVSVLTVLHQDWLNGKEYKCKVSNKALPAPIEKTISKAKGQPREPQVYTLPPSREEMTKNQVSLTCLVKGFYPSDIAVEWESNGQPENNYKTTPPVLDSDGSFFLYSKLTVDKSRWQQGNVFSCSVMHEALHNHYTQKSLSLSPGK

SEQ ID NO: 2613 - protein, 1224 aa, Artificial Sequence
  Synthetic
EVQLLESGGGLVQPGGSLRLSCAASGFTFSGHAMTWVRQAPGKCLEWLSTIYGSGGYTYYAGSVKGRFTISRDNSKNTLYLQMNSLRAEDTAVYYCAKVGGYDWYFDLWGRGTLVTVSSGGGGQGGGGQGGGGQSYELTQPPSVSVALGQTARITCGGHNIGSKNVHWYQQKPGQAPVLVIYRDTNRPSGIPERFSGSNSGNTATLTISRAQAGDEADYYCQLWDSTTVVFGCGTKLTVLSGGGGQQVQLVQSGGEVKKPGASVKVSCKASGYTFTSYGISWVRQAPGQCLEWMGWISPQTGNAIYAQKLQGRVTMTRDTSTSTAYMELRSLRSDDTAVYYCARDPDYYGSGSYSDYWGQGTLVTVSSGGGGQGGGGQGGGGQEIVLTQSPATLSVSPGERATLSCRASQSVSSNLAWYQQKPGQAPRLLIYGASSRATGIPARFSGSGSGTEFTLTISSLQSEDFAVYYCQQYHSWPLLTFGCGTKVEIKSGGGGQEVQLVESGGGLVQPGGSLKLSCAASGFTFNKYAINWVRQAPGKGLEWVARIRSKYNNYATYYADAVKDRFTISRDDSKNTVYLQMNNLKTEDTAVYYCARAGNFGSSYISYWAYWGQGTLVTVSSGGGGQGGGGQGGGGQQTVVTQEPSLTVSPGGTVTITCGSSTGAVTSGNYPNWVQKKPGQAPRGLIGGTKFLAPGTPARFSGSLSGGKAALTLSGVQPEDEAEYYCVLWYSNRWVFGSGTKLTVLGGGGCPPCPAPELLGGPSVFLFPPKPKDTLMISRTPEVTCVVVDVSHEEPEVKFNWYVDGVEVHNAKTKPCEEQYGSTYRCVSVLTVLHQDWLNGKEYKCKVSNKALPAPIEKTISKAKGQPREPQVYTLPPSREEMTKNQVSLTCLVKGFYPSDIAVEWESNGQPENNYKTTPPVLDSDGSFFLYSKLTVDKSRWQQGNVFSCSVMHEALHNHYTQKSLSLSPGKGGGGQGGGGQGGGGQGGGGQGGGGQGGGGQCPPCPAPELLGGPSVFLFPPKPKDTLMISRTPEVTCVVVDVSHEEPEVKFNWYVDGVEVHNAKTKPCEEQYGSTYRCVSVLTVLHQDWLNGKEYKCKVSNKALPAPIEKTISKAKGQPREPQVYTLPPSREEMTKNQVSLTCLVKGFYPSDIAVEWESNGQPENNYKTTPPVLDSDGSFFLYSKLTVDKSRWQQGNVFSCSVMHEALHNHYTQKSLSLSPGK

SEQ ID NO: 2614 - protein, 491 aa, Artificial Sequence
  Synthetic
EVQLLESGGGLVQPGGSLRLSCAASGFTFSGHAMTWVRQAPGKCLEWLSTIYGSGGYTYYAGSVKGRFTISRDNSKNTLYLQMNSLRAEDTAVYYCAKVGGYDWYFDLWGRGTLVTVSSGGGGSGGGGSGGGGSSYELTQPPSVSVALGQTARITCGGHNIGSKNVHWYQQKPGQAPVLVIYRDTNRPSGIPERFSGSNSGNTATLTISRAQAGDEADYYCQLWDSTTVVFGCGTKLTVLSGGGGSQVQLVQSGAEVKKPGASVKVSCKASGYTFTSYGISWVRQAPGQCLEWMGWISAYNGNAIYAQKLQGRVTMTRDTSTSTAYMELRSLRSDDTAVYYCARDPDYYGSGSYSDYWGQGTLVTVSSGGGGSGGGGSGGGGSEIVLTQSPATLSVSPGERATLSCRASQSVSSNLAWYQQKPGQAPRLLIYGASSRATGIPARFSGSGSGTEFTLTISSLQSEDFAVYYCQQYHSWPILHFGCGTKVEIK

SEQ ID NO: 2615 - protein, 491 aa, Artificial Sequence
  Synthetic
EVQLLESGGGLVQPGGSLRLSCAASGFTFSGHAMTWVRQAPGKCLEWLSTIYGSGGYTYYAGSVKGRFTISRDNSKNTLYLQMNSLRAEDTAVYYCAKVGGYDWYFDLWGRGTLVTVSSGGGGQGGGGQGGGGQSYELTQPPSVSVALGQTARITCGGHNIGSKNVHWYQQKPGQAPVLVIYRDTNRPSGIPERFSGSNSGNTATLTISRAQAGDEADYYCQLWDSTTVVFGCGTKLTVLSGGGGQQVQLVQSGAEVKKPGASVKVSCKASGYTFTSYGISWVRQAPGQCLEWMGWISAYNGNAIYAQKLQGRVTMTRDTSTSTAYMELRSLRSDDTAVYYCARDPDYYGSGSYSDYWGQGTLVTVSSGGGGQGGGGQGGGGQEIVLTQSPATLSVSPGERATLSCRASQSVSSNLAWYQQKPGQAPRLLIYGASSRATGIPARFSGSGSGTEFTLTISSLQSEDFAVYYCQQYHSWPILHFGCGTKVEIK

SEQ ID NO: 2616 - protein, 746 aa, Artificial Sequence
  Synthetic
EVQLLESGGGLVQPGGSLRLSCAASGFTFSGHAMTWVRQAPGKCLEWLSTIYGSGGYTYYAGSVKGRFTISRDNSKNTLYLQMNSLRAEDTAVYYCAKVGGYDWYFDLWGRGTLVTVSSGGGGSGGGGSGGGGSSYELTQPPSVSVALGQTARITCGGHNIGSKNVHWYQQKPGQAPVLVIYRDTNRPSGIPERFSGSNSGNTATLTISRAQAGDEADYYCQLWDSTTVVFGCGTKLTVLSGGGGSQVQLVQSGAEVKKPGASVKVSCKASGYTFTSYGISWVRQAPGQCLEWMGWISAYNGNAIYAQKLQGRVTMTRDTSTSTAYMELRSLRSDDTAVYYCARDPDYYGSGSYSDYWGQGTLVTVSSGGGGSGGGGSGGGGSEIVLTQSPATLSVSPGERATLSCRASQSVSSNLAWYQQKPGQAPRLLIYGASSRATGIPARFSGSGSGTEFTLTISSLQSEDFAVYYCQQYHSWPILHFGCGTKVEIKSGGGGSEVQLVESGGGLVQPGGSLKLSCAASGFTFNKYAMNWVRQAPGKGLEWVARIRSKYNNYATYYADSVKDRFTISRDDSKNTAYLQMNNLKTEDTAVYYCVRHGNFGNSYISYWAYWGQGTLVTVSSGGGGSGGGGSGGGGSQTVVTQEPSLTVSPGGTVTLTCGSSTGAVTSGNYPNWVQQKPGQAPRGLIGGTKFLAPGTPARFSGSLLGGKAALTLSGVQPEDEAEYYCVLWYSNRWVFGGGTKLTVL

SEQ ID NO: 2617 - protein, 746 aa, Artificial Sequence
  Synthetic
EVQLLESGGGLVQPGGSLRLSCAASGFTFSGHAMTWVRQAPGKCLEWLSTIYGSGGYTYYAGSVKGRFTISRDNSKNTLYLQMNSLRAEDTAVYYCAKVGGYDWYFDLWGRGTLVTVSSGGGGQGGGGQGGGGQSYELTQPPSVSVALGQTARITCGGHNIGSKNVHWYQQKPGQAPVLVIYRDTNRPSGIPERFSGSNSGNTATLTISRAQAGDEADYYCQLWDSTTVVFGCGTKLTVLSGGGGQQVQLVQSGAEVKKPGASVKVSCKASGYTFTSYGISWVRQAPGQCLEWMGWISAYNGNAIYAQKLQGRVTMTRDTSTSTAYMELRSLRSDDTAVYYCARDPDYYGSGSYSDYWGQGTLVTVSSGGGGQGGGGQGGGGQEIVLTQSPATLSVSPGERATLSCRASQSVSSNLAWYQQKPGQAPRLLIYGASSRATGIPARFSGSGSGTEFTLTISSLQSEDFAVYYCQQYHSWPILHFGCGTKVEIKSGGGGQEVQLVESGGGLVQPGGSLKLSCAASGFTFNKYAMNWVRQAPGKGLEWVARIRSKYNNYATYYADSVKDRFTISRDDSKNTAYLQMNNLKTEDTAVYYCVRHGNFGNSYISYWAYWGQGTLVTVSSGGGGQGGGGQGGGGQQTVVTQEPSLTVSPGGTVTLTCGSSTGAVTSGNYPNWVQQKPGQAPRGLIGGTKFLAPGTPARFSGSLLGGKAALTLSGVQPEDEAEYYCVLWYSNRWVFGGGTKLTVL

SEQ ID NO: 2618 - protein, 746 aa, Artificial Sequence
  Synthetic
EVQLLESGGGLVQPGGSLRLSCAASGFTFSGHAMTWVRQAPGKCLEWLSTIYGSGGYTYYAGSVKGRFTISRDNSKNTLYLQMNSLRAEDTAVYYCAKVGGYDWYFDLWGRGTLVTVSSGGGGSGGGGSGGGGSSYELTQPPSVSVALGQTARITCGGHNIGSKNVHWYQQKPGQAPVLVIYRDTNRPSGIPERFSGSNSGNTATLTISRAQAGDEADYYCQLWDSTTVVFGCGTKLTVLSGGGGSQVQLVQSGAEVKKPGASVKVSCKASGYTFTSYGISWVRQAPGQCLEWMGWISAYNGNAIYAQKLQGRVTMTRDTSTSTAYMELRSLRSDDTAVYYCARDPDYYGSGSYSDYWGQGTLVTVSSGGGGSGGGGSGGGGSEIVLTQSPATLSVSPGERATLSCRASQSVSSNLAWYQQKPGQAPRLLIYGASSRATGIPARFSGSGSGTEFTLTISSLQSEDFAVYYCQQYHSWPILHFGCGTKVEIKSGGGGSEVQLVESGGGLVQPGGSLKLSCAASGFTFNKYAINWVRQAPGKGLEWVARIRSKYNNYATYYADAVKDRFTISRDDSKNTVYLQMNNLKTEDTAVYYCARAGNFGSSYISYWAYWGQGTLVTVSSGGGGSGGGGSGGGGSQTVVTQEPSLTVSPGGTVTITCGSSTGAVTSGNYPNWVQKKPGQAPRGLIGGTKFLAPGTPARFSGSLSGGKAALTLSGVQPEDEAEYYCVLWYSNRWVFGSGTKLTVL

SEQ ID NO: 2619 - protein, 746 aa, Artificial Sequence
  Synthetic
EVQLLESGGGLVQPGGSLRLSCAASGFTFSGHAMTWVRQAPGKCLEWLSTIYGSGGYTYYAGSVKGRFTISRDNSKNTLYLQMNSLRAEDTAVYYCAKVGGYDWYFDLWGRGTLVTVSSGGGGQGGGGQGGGGQSYELTQPPSVSVALGQTARITCGGHNIGSKNVHWYQQKPGQAPVLVIYRDTNRPSGIPERFSGSNSGNTATLTISRAQAGDEADYYCQLWDSTTVVFGCGTKLTVLSGGGGQQVQLVQSGAEVKKPGASVKVSCKASGYTFTSYGISWVRQAPGQCLEWMGWISAYNGNAIYAQKLQGRVTMTRDTSTSTAYMELRSLRSDDTAVYYCARDPDYYGSGSYSDYWGQGTLVTVSSGGGGQGGGGQGGGGQEIVLTQSPATLSVSPGERATLSCRASQSVSSNLAWYQQKPGQAPRLLIYGASSRATGIPARFSGSGSGTEFTLTISSLQSEDFAVYYCQQYHSWPILHFGCGTKVEIKSGGGGQEVQLVESGGGLVQPGGSLKLSCAASGFTFNKYAINWVRQAPGKGLEWVARIRSKYNNYATYYADAVKDRFTISRDDSKNTVYLQMNNLKTEDTAVYYCARAGNFGSSYISYWAYWGQGTLVTVSSGGGGQGGGGQGGGGQQTVVTQEPSLTVSPGGTVTITCGSSTGAVTSGNYPNWVQKKPGQAPRGLIGGTKFLAPGTPARFSGSLSGGKAALTLSGVQPEDEAEYYCVLWYSNRWVFGSGTKLTVL

SEQ ID NO: 2620 - protein, 1234 aa, Artificial Sequence
  Synthetic
EVQLLESGGGLVQPGGSLRLSCAASGFTFSGHAMTWVRQAPGKCLEWLSTIYGSGGYTYYAGSVKGRFTISRDNSKNTLYLQMNSLRAEDTAVYYCAKVGGYDWYFDLWGRGTLVTVSSGGGGSGGGGSGGGGSSYELTQPPSVSVALGQTARITCGGHNIGSKNVHWYQQKPGQAPVLVIYRDTNRPSGIPERFSGSNSGNTATLTISRAQAGDEADYYCQLWDSTTVVFGCGTKLTVLSGGGGSQVQLVQSGAEVKKPGASVKVSCKASGYTFTSYGISWVRQAPGQCLEWMGWISAYNGNAIYAQKLQGRVTMTRDTSTSTAYMELRSLRSDDTAVYYCARDPDYYGSGSYSDYWGQGTLVTVSSGGGGSGGGGSGGGGSEIVLTQSPATLSVSPGERATLSCRASQSVSSNLAWYQQKPGQAPRLLIYGASSRATGIPARFSGSGSGTEFTLTISSLQSEDFAVYYCQQYHSWPILHFGCGTKVEIKSGGGGSEVQLVESGGGLVQPGGSLKLSCAASGFTFNKYAMNWVRQAPGKGLEWVARIRSKYNNYATYYADSVKDRFTISRDDSKNTAYLQMNNLKTEDTAVYYCVRHGNFGNSYISYWAYWGQGTLVTVSSGGGGSGGGGSGGGGSQTVVTQEPSLTVSPGGTVTLTCGSSTGAVTSGNYPNWVQQKPGQAPRGLIGGTKFLAPGTPARFSGSLLGGKAALTLSGVQPEDEAEYYCVLWYSNRWVFGGGTKLTVLGGGGDKTHTCPPCPAPELLGGPSVFLFPPKPKDTLMISRTPEVTCVVVDVSHEDPEVKFNWYVDGVEVHNAKTKPCEEQYGSTYRCVSVLTVLHQDWLNGKEYKCKVSNKALPAPIEKTISKAKGQPREPQVYTLPPSREEMTKNQVSLTCLVKGFYPSDIAVEWESNGQPENNYKTTPPVLDSDGSFFLYSKLTVDKSRWQQGNVFSCSVMHEALHNHYTQKSLSLSPGKGGGGSGGGGSGGGGSGGGGSGGGGSGGGGSDKTHTCPPCPAPELLGGPSVFLFPPKPKDTLMISRTPEVTCVVVDVSHEDPEVKFNWYVDGVEVHNAKTKPCEEQYGSTYRCVSVLTVLHQDWLNGKEYKCKVSNKALPAPIEKTISKAKGQPREPQVYTLPPSREEMTKNQVSLTCLVKGFYPSDIAVEWESNGQPENNYKTTPPVLDSDGSFFLYSKLTVDKSRWQQGNVFSCSVMHEALHNHYTQKSLSLSPGK

SEQ ID NO: 2621 - protein, 1224 aa, Artificial Sequence
  Synthetic
EVQLLESGGGLVQPGGSLRLSCAASGFTFSGHAMTWVRQAPGKCLEWLSTIYGSGGYTYYAGSVKGRFTISRDNSKNTLYLQMNSLRAEDTAVYYCAKVGGYDWYFDLWGRGTLVTVSSGGGGQGGGGQGGGGQSYELTQPPSVSVALGQTARITCGGHNIGSKNVHWYQQKPGQAPVLVIYRDTNRPSGIPERFSGSNSGNTATLTISRAQAGDEADYYCQLWDSTTVVFGCGTKLTVLSGGGGQQVQLVQSGAEVKKPGASVKVSCKASGYTFTSYGISWVRQAPGQCLEWMGWISAYNGNAIYAQKLQGRVTMTRDTSTSTAYMELRSLRSDDTAVYYCARDPDYYGSGSYSDYWGQGTLVTVSSGGGGQGGGGQGGGGQEIVLTQSPATLSVSPGERATLSCRASQSVSSNLAWYQQKPGQAPRLLIYGASSRATGIPARFSGSGSGTEFTLTISSLQSEDFAVYYCQQYHSWPILHFGCGTKVEIKSGGGGQEVQLVESGGGLVQPGGSLKLSCAASGFTFNKYAMNWVRQAPGKGLEWVARIRSKYNNYATYYADSVKDRFTISRDDSKNTAYLQMNNLKTEDTAVYYCVRHGNFGNSYISYWAYWGQGTLVTVSSGGGGQGGGGQGGGGQQTVVTQEPSLTVSPGGTVTLTCGSSTGAVTSGNYPNWVQQKPGQAPRGLIGGTKFLAPGTPARFSGSLLGGKAALTLSGVQPEDEAEYYCVLWYSNRWVFGGGTKLTVLGGGGCPPCPAPELLGGPSVFLFPPKPKDTLMISRTPEVTCVVVDVSHEEPEVKFNWYVDGVEVHNAKTKPCEEQYGSTYRCVSVLTVLHQDWLNGKEYKCKVSNKALPAPIEKTISKAKGQPREPQVYTLPPSREEMTKNQVSLTCLVKGFYPSDIAVEWESNGQPENNYKTTPPVLDSDGSFFLYSKLTVDKSRWQQGNVFSCSVMHEALHNHYTQKSLSLSPGKGGGGQGGGGQGGGGQGGGGQGGGGQGGGGQCPPCPAPELLGGPSVFLFPPKPKDTLMISRTPEVTCVVVDVSHEEPEVKFNWYVDGVEVHNAKTKPCEEQYGSTYRCVSVLTVLHQDWLNGKEYKCKVSNKALPAPIEKTISKAKGQPREPQVYTLPPSREEMTKNQVSLTCLVKGFYPSDIAVEWESNGQPENNYKTTPPVLDSDGSFFLYSKLTVDKSRWQQGNVFSCSVMHEALHNHYTQKSLSLSPGK

SEQ ID NO: 2622 - protein, 1234 aa, Artificial Sequence
  Synthetic
EVQLLESGGGLVQPGGSLRLSCAASGFTFSGHAMTWVRQAPGKCLEWLSTIYGSGGYTYYAGSVKGRFTISRDNSKNTLYLQMNSLRAEDTAVYYCAKVGGYDWYFDLWGRGTLVTVSSGGGGSGGGGSGGGGSSYELTQPPSVSVALGQTARITCGGHNIGSKNVHWYQQKPGQAPVLVIYRDTNRPSGIPERFSGSNSGNTATLTISRAQAGDEADYYCQLWDSTTVVFGCGTKLTVLSGGGGSQVQLVQSGAEVKKPGASVKVSCKASGYTFTSYGISWVRQAPGQCLEWMGWISAYNGNAIYAQKLQGRVTMTRDTSTSTAYMELRSLRSDDTAVYYCARDPDYYGSGSYSDYWGQGTLVTVSSGGGGSGGGGSGGGGSEIVLTQSPATLSVSPGERATLSCRASQSVSSNLAWYQQKPGQAPRLLIYGASSRATGIPARFSGSGSGTEFTLTISSLQSEDFAVYYCQQYHSWPILHFGCGTKVEIKSGGGGSEVQLVESGGGLVQPGGSLKLSCAASGFTFNKYAINWVRQAPGKGLEWVARIRSKYNNYATYYADAVKDRFTISRDDSKNTVYLQMNNLKTEDTAVYYCARAGNFGSSYISYWAYWGQGTLVTVSSGGGGSGGGGSGGGGSQTVVTQEPSLTVSPGGTVTITCGSSTGAVTSGNYPNWVQKKPGQAPRGLIGGTKFLAPGTPARFSGSLSGGKAALTLSGVQPEDEAEYYCVLWYSNRWVFGSGTKLTVLGGGGDKTHTCPPCPAPELLGGPSVFLFPPKPKDTLMISRTPEVTCVVVDVSHEDPEVKFNWYVDGVEVHNAKTKPCEEQYGSTYRCVSVLTVLHQDWLNGKEYKCKVSNKALPAPIEKTISKAKGQPREPQVYTLPPSREEMTKNQVSLTCLVKGFYPSDIAVEWESNGQPENNYKTTPPVLDSDGSFFLYSKLTVDKSRWQQGNVFSCSVMHEALHNHYTQKSLSLSPGKGGGGSGGGGSGGGGSGGGGSGGGGSGGGGSDKTHTCPPCPAPELLGGPSVFLFPPKPKDTLMISRTPEVTCVVVDVSHEDPEVKFNWYVDGVEVHNAKTKPCEEQYGSTYRCVSVLTVLHQDWLNGKEYKCKVSNKALPAPIEKTISKAKGQPREPQVYTLPPSREEMTKNQVSLTCLVKGFYPSDIAVEWESNGQPENNYKTTPPVLDSDGSFFLYSKLTVDKSRWQQGNVFSCSVMHEALHNHYTQKSLSLSPGK

SEQ ID NO: 2623 - protein, 1224 aa, Artificial Sequence
  Synthetic
EVQLLESGGGLVQPGGSLRLSCAASGFTFSGHAMTWVRQAPGKCLEWLSTIYGSGGYTYYAGSVKGRFTISRDNSKNTLYLQMNSLRAEDTAVYYCAKVGGYDWYFDLWGRGTLVTVSSGGGGQGGGGQGGGGQSYELTQPPSVSVALGQTARITCGGHNIGSKNVHWYQQKPGQAPVLVIYRDTNRPSGIPERFSGSNSGNTATLTISRAQAGDEADYYCQLWDSTTVVFGCGTKLTVLSGGGGQQVQLVQSGAEVKKPGASVKVSCKASGYTFTSYGISWVRQAPGQCLEWMGWISAYNGNAIYAQKLQGRVTMTRDTSTSTAYMELRSLRSDDTAVYYCARDPDYYGSGSYSDYWGQGTLVTVSSGGGGQGGGGQGGGGQEIVLTQSPATLSVSPGERATLSCRASQSVSSNLAWYQQKPGQAPRLLIYGASSRATGIPARFSGSGSGTEFTLTISSLQSEDFAVYYCQQYHSWPILHFGCGTKVEIKSGGGGQEVQLVESGGGLVQPGGSLKLSCAASGFTFNKYAINWVRQAPGKGLEWVARIRSKYNNYATYYADAVKDRFTISRDDSKNTVYLQMNNLKTEDTAVYYCARAGNFGSSYISYWAYWGQGTLVTVSSGGGGQGGGGQGGGGQQTVVTQEPSLTVSPGGTVTITCGSSTGAVTSGNYPNWVQKKPGQAPRGLIGGTKFLAPGTPARFSGSLSGGKAALTLSGVQPEDEAEYYCVLWYSNRWVFGSGTKLTVLGGGGCPPCPAPELLGGPSVFLFPPKPKDTLMISRTPEVTCVVVDVSHEEPEVKFNWYVDGVEVHNAKTKPCEEQYGSTYRCVSVLTVLHQDWLNGKEYKCKVSNKALPAPIEKTISKAKGQPREPQVYTLPPSREEMTKNQVSLTCLVKGFYPSDIAVEWESNGQPENNYKTTPPVLDSDGSFFLYSKLTVDKSRWQQGNVFSCSVMHEALHNHYTQKSLSLSPGKGGGGQGGGGQGGGGQGGGGQGGGGQGGGGQCPPCPAPELLGGPSVFLFPPKPKDTLMISRTPEVTCVVVDVSHEEPEVKFNWYVDGVEVHNAKTKPCEEQYGSTYRCVSVLTVLHQDWLNGKEYKCKVSNKALPAPIEKTISKAKGQPREPQVYTLPPSREEMTKNQVSLTCLVKGFYPSDIAVEWESNGQPENNYKTTPPVLDSDGSFFLYSKLTVDKSRWQQGNVFSCSVMHEALHNHYTQKSLSLSPGK

SEQ ID NO: 2624 - protein, 485 aa, Artificial Sequence
  Synthetic
EVQLLESGGGLVQPGGSLRLSCAASGFTFSGHAMTWVRQAPGKCLEWLSTIYGSGGYTYYAGSVKGRFTISRDNSKNTLYLQMNSLRAEDTAVYYCAKVGGYDWYFDLWGRGTLVTVSSGGGGSGGGGSGGGGSSYELTQPPSVSVALGQTARITCGGHNIGSKNVHWYQQKPGQAPVLVIYRDTNRPSGIPERFSGSNSGNTATLTISRAQAGDEADYYCQLWDSTTVVFGCGTKLTVLSGGGGSQVQLVQSGAEVKKPGASVKVSCKASGYTFTSYGISWVRQAPGQCLEWMGWISAYNGNTVYAQKLQDRVTMTTDTSTSTAYMELRSLRSDDTAVYFCVRDGDPLDYWGQGTLVTVSSGGGGSGGGGSGGGGSEIVLTQSPGTLSLSPGERATLSCRASQSVSSNLAWYQQKPGQAPRLLIYGASTRATGIPARFSGSGSGTEFTLTISSLQSEDFAVYYCQQYHTWPPVTFGCGTKVEIK

SEQ ID NO: 2625 - protein, 485 aa, Artificial Sequence
  Synthetic
EVQLLESGGGLVQPGGSLRLSCAASGFTFSGHAMTWVRQAPGKCLEWLSTIYGSGGYTYYAGSVKGRFTISRDNSKNTLYLQMNSLRAEDTAVYYCAKVGGYDWYFDLWGRGTLVTVSSGGGGQGGGGQGGGGQSYELTQPPSVSVALGQTARITCGGHNIGSKNVHWYQQKPGQAPVLVIYRDTNRPSGIPERFSGSNSGNTATLTISRAQAGDEADYYCQLWDSTTVVFGCGTKLTVLSGGGGQQVQLVQSGAEVKKPGASVKVSCKASGYTFTSYGISWVRQAPGQCLEWMGWISAYNGNTVYAQKLQDRVTMTTDTSTSTAYMELRSLRSDDTAVYFCVRDGDPLDYWGQGTLVTVSSGGGGQGGGGQGGGGQEIVLTQSPGTLSLSPGERATLSCRASQSVSSNLAWYQQKPGQAPRLLIYGASTRATGIPARFSGSGSGTEFTLTISSLQSEDFAVYYCQQYHTWPPVTFGCGTKVEIK

SEQ ID NO: 2626 - protein, 740 aa, Artificial Sequence
  Synthetic
EVQLLESGGGLVQPGGSLRLSCAASGFTFSGHAMTWVRQAPGKCLEWLSTIYGSGGYTYYAGSVKGRFTISRDNSKNTLYLQMNSLRAEDTAVYYCAKVGGYDWYFDLWGRGTLVTVSSGGGGSGGGGSGGGGSSYELTQPPSVSVALGQTARITCGGHNIGSKNVHWYQQKPGQAPVLVIYRDTNRPSGIPERFSGSNSGNTATLTISRAQAGDEADYYCQLWDSTTVVFGCGTKLTVLSGGGGSQVQLVQSGAEVKKPGASVKVSCKASGYTFTSYGISWVRQAPGQCLEWMGWISAYNGNTVYAQKLQDRVTMTTDTSTSTAYMELRSLRSDDTAVYFCVRDGDPLDYWGQGTLVTVSSGGGGSGGGGSGGGGSEIVLTQSPGTLSLSPGERATLSCRASQSVSSNLAWYQQKPGQAPRLLIYGASTRATGIPARFSGSGSGTEFTLTISSLQSEDFAVYYCQQYHTWPPVTFGCGTKVEIKSGGGGSEVQLVESGGGLVQPGGSLKLSCAASGFTFNKYAMNWVRQAPGKGLEWVARIRSKYNNYATYYADSVKDRFTISRDDSKNTAYLQMNNLKTEDTAVYYCVRHGNFGNSYISYWAYWGQGTLVTVSSGGGGSGGGGSGGGGSQTVVTQEPSLTVSPGGTVTLTCGSSTGAVTSGNYPNWVQQKPGQAPRGLIGGTKFLAPGTPARFSGSLLGGKAALTLSGVQPEDEAEYYCVLWYSNRWVFGGGTKLTVL

SEQ ID NO: 2627 - protein, 740 aa, Artificial Sequence
  Synthetic
EVQLLESGGGLVQPGGSLRLSCAASGFTFSGHAMTWVRQAPGKCLEWLSTIYGSGGYTYYAGSVKGRFTISRDNSKNTLYLQMNSLRAEDTAVYYCAKVGGYDWYFDLWGRGTLVTVSSGGGGQGGGGQGGGGQSYELTQPPSVSVALGQTARITCGGHNIGSKNVHWYQQKPGQAPVLVIYRDTNRPSGIPERFSGSNSGNTATLTISRAQAGDEADYYCQLWDSTTVVFGCGTKLTVLSGGGGQQVQLVQSGAEVKKPGASVKVSCKASGYTFTSYGISWVRQAPGQCLEWMGWISAYNGNTVYAQKLQDRVTMTTDTSTSTAYMELRSLRSDDTAVYFCVRDGDPLDYWGQGTLVTVSSGGGGQGGGGQGGGGQEIVLTQSPGTLSLSPGERATLSCRASQSVSSNLAWYQQKPGQAPRLLIYGASTRATGIPARFSGSGSGTEFTLTISSLQSEDFAVYYCQQYHTWPPVTFGCGTKVEIKSGGGGQEVQLVESGGGLVQPGGSLKLSCAASGFTFNKYAMNWVRQAPGKGLEWVARIRSKYNNYATYYADSVKDRFTISRDDSKNTAYLQMNNLKTEDTAVYYCVRHGNFGNSYISYWAYWGQGTLVTVSSGGGGQGGGGQGGGGQQTVVTQEPSLTVSPGGTVTLTCGSSTGAVTSGNYPNWVQQKPGQAPRGLIGGTKFLAPGTPARFSGSLLGGKAALTLSGVQPEDEAEYYCVLWYSNRWVFGGGTKLTVL

SEQ ID NO: 2628 - protein, 740 aa, Artificial Sequence
  Synthetic
EVQLLESGGGLVQPGGSLRLSCAASGFTFSGHAMTWVRQAPGKCLEWLSTIYGSGGYTYYAGSVKGRFTISRDNSKNTLYLQMNSLRAEDTAVYYCAKVGGYDWYFDLWGRGTLVTVSSGGGGSGGGGSGGGGSSYELTQPPSVSVALGQTARITCGGHNIGSKNVHWYQQKPGQAPVLVIYRDTNRPSGIPERFSGSNSGNTATLTISRAQAGDEADYYCQLWDSTTVVFGCGTKLTVLSGGGGSQVQLVQSGAEVKKPGASVKVSCKASGYTFTSYGISWVRQAPGQCLEWMGWISAYNGNTVYAQKLQDRVTMTTDTSTSTAYMELRSLRSDDTAVYFCVRDGDPLDYWGQGTLVTVSSGGGGSGGGGSGGGGSEIVLTQSPGTLSLSPGERATLSCRASQSVSSNLAWYQQKPGQAPRLLIYGASTRATGIPARFSGSGSGTEFTLTISSLQSEDFAVYYCQQYHTWPPVTFGCGTKVEIKSGGGGSEVQLVESGGGLVQPGGSLKLSCAASGFTFNKYAINWVRQAPGKGLEWVARIRSKYNNYATYYADAVKDRFTISRDDSKNTVYLQMNNLKTEDTAVYYCARAGNFGSSYISYWAYWGQGTLVTVSSGGGGSGGGGSGGGGSQTVVTQEPSLTVSPGGTVTITCGSSTGAVTSGNYPNWVQKKPGQAPRGLIGGTKFLAPGTPARFSGSLSGGKAALTLSGVQPEDEAEYYCVLWYSNRWVFGSGTKLTVL

SEQ ID NO: 2629 - protein, 740 aa, Artificial Sequence
  Synthetic
EVQLLESGGGLVQPGGSLRLSCAASGFTFSGHAMTWVRQAPGKCLEWLSTIYGSGGYTYYAGSVKGRFTISRDNSKNTLYLQMNSLRAEDTAVYYCAKVGGYDWYFDLWGRGTLVTVSSGGGGQGGGGQGGGGQSYELTQPPSVSVALGQTARITCGGHNIGSKNVHWYQQKPGQAPVLVIYRDTNRPSGIPERFSGSNSGNTATLTISRAQAGDEADYYCQLWDSTTVVFGCGTKLTVLSGGGGQQVQLVQSGAEVKKPGASVKVSCKASGYTFTSYGISWVRQAPGQCLEWMGWISAYNGNTVYAQKLQDRVTMTTDTSTSTAYMELRSLRSDDTAVYFCVRDGDPLDYWGQGTLVTVSSGGGGQGGGGQGGGGQEIVLTQSPGTLSLSPGERATLSCRASQSVSSNLAWYQQKPGQAPRLLIYGASTRATGIPARFSGSGSGTEFTLTISSLQSEDFAVYYCQQYHTWPPVTFGCGTKVEIKSGGGGQEVQLVESGGGLVQPGGSLKLSCAASGFTFNKYAINWVRQAPGKGLEWVARIRSKYNNYATYYADAVKDRFTISRDDSKNTVYLQMNNLKTEDTAVYYCARAGNFGSSYISYWAYWGQGTLVTVSSGGGGQGGGGQGGGGQQTVVTQEPSLTVSPGGTVTITCGSSTGAVTSGNYPNWVQKKPGQAPRGLIGGTKFLAPGTPARFSGSLSGGKAALTLSGVQPEDEAEYYCVLWYSNRWVFGSGTKLTVL

SEQ ID NO: 2630 - protein, 1228 aa, Artificial Sequence
  Synthetic
EVQLLESGGGLVQPGGSLRLSCAASGFTFSGHAMTWVRQAPGKCLEWLSTIYGSGGYTYYAGSVKGRFTISRDNSKNTLYLQMNSLRAEDTAVYYCAKVGGYDWYFDLWGRGTLVTVSSGGGGSGGGGSGGGGSSYELTQPPSVSVALGQTARITCGGHNIGSKNVHWYQQKPGQAPVLVIYRDTNRPSGIPERFSGSNSGNTATLTISRAQAGDEADYYCQLWDSTTVVFGCGTKLTVLSGGGGSQVQLVQSGAEVKKPGASVKVSCKASGYTFTSYGISWVRQAPGQCLEWMGWISAYNGNTVYAQKLQDRVTMTTDTSTSTAYMELRSLRSDDTAVYFCVRDGDPLDYWGQGTLVTVSSGGGGSGGGGSGGGGSEIVLTQSPGTLSLSPGERATLSCRASQSVSSNLAWYQQKPGQAPRLLIYGASTRATGIPARFSGSGSGTEFTLTISSLQSEDFAVYYCQQYHTWPPVTFGCGTKVEIKSGGGGSEVQLVESGGGLVQPGGSLKLSCAASGFTFNKYAMNWVRQAPGKGLEWVARIRSKYNNYATYYADSVKDRFTISRDDSKNTAYLQMNNLKTEDTAVYYCVRHGNFGNSYISYWAYWGQGTLVTVSSGGGGSGGGGSGGGGSQTVVTQEPSLTVSPGGTVTLTCGSSTGAVTSGNYPNWVQQKPGQAPRGLIGGTKFLAPGTPARFSGSLLGGKAALTLSGVQPEDEAEYYCVLWYSNRWVFGGGTKLTVLGGGGDKTHTCPPCPAPELLGGPSVFLFPPKPKDTLMISRTPEVTCVVVDVSHEDPEVKFNWYVDGVEVHNAKTKPCEEQYGSTYRCVSVLTVLHQDWLNGKEYKCKVSNKALPAPIEKTISKAKGQPREPQVYTLPPSREEMTKNQVSLTCLVKGFYPSDIAVEWESNGQPENNYKTTPPVLDSDGSFFLYSKLTVDKSRWQQGNVFSCSVMHEALHNHYTQKSLSLSPGKGGGGSGGGGSGGGGSGGGGSGGGGSGGGGSDKTHTCPPCPAPELLGGPSVFLFPPKPKDTLMISRTPEVTCVVVDVSHEDPEVKFNWYVDGVEVHNAKTKPCEEQYGSTYRCVSVLTVLHQDWLNGKEYKCKVSNKALPAPIEKTISKAKGQPREPQVYTLPPSREEMTKNQVSLTCLVKGFYPSDIAVEWESNGQPENNYKTTPPVLDSDGSFFLYSKLTVDKSRWQQGNVFSCSVMHEALHNHYTQKSLSLSPGK

SEQ ID NO: 2631 - protein, 1218 aa, Artificial Sequence
  Synthetic
EVQLLESGGGLVQPGGSLRLSCAASGFTFSGHAMTWVRQAPGKCLEWLSTIYGSGGYTYYAGSVKGRFTISRDNSKNTLYLQMNSLRAEDTAVYYCAKVGGYDWYFDLWGRGTLVTVSSGGGGQGGGGQGGGGQSYELTQPPSVSVALGQTARITCGGHNIGSKNVHWYQQKPGQAPVLVIYRDTNRPSGIPERFSGSNSGNTATLTISRAQAGDEADYYCQLWDSTTVVFGCGTKLTVLSGGGGQQVQLVQSGAEVKKPGASVKVSCKASGYTFTSYGISWVRQAPGQCLEWMGWISAYNGNTVYAQKLQDRVTMTTDTSTSTAYMELRSLRSDDTAVYFCVRDGDPLDYWGQGTLVTVSSGGGGQGGGGQGGGGQEIVLTQSPGTLSLSPGERATLSCRASQSVSSNLAWYQQKPGQAPRLLIYGASTRATGIPARFSGSGSGTEFTLTISSLQSEDFAVYYCQQYHTWPPVTFGCGTKVEIKSGGGGQEVQLVESGGGLVQPGGSLKLSCAASGFTFNKYAMNWVRQAPGKGLEWVARIRSKYNNYATYYADSVKDRFTISRDDSKNTAYLQMNNLKTEDTAVYYCVRHGNFGNSYISYWAYWGQGTLVTVSSGGGGQGGGGQGGGGQQTVVTQEPSLTVSPGGTVTLTCGSSTGAVTSGNYPNWVQQKPGQAPRGLIGGTKFLAPGTPARFSGSLLGGKAALTLSGVQPEDEAEYYCVLWYSNRWVFGGGTKLTVLGGGGCPPCPAPELLGGPSVFLFPPKPKDTLMISRTPEVTCVVVDVSHEEPEVKFNWYVDGVEVHNAKTKPCEEQYGSTYRCVSVLTVLHQDWLNGKEYKCKVSNKALPAPIEKTISKAKGQPREPQVYTLPPSREEMTKNQVSLTCLVKGFYPSDIAVEWESNGQPENNYKTTPPVLDSDGSFFLYSKLTVDKSRWQQGNVFSCSVMHEALHNHYTQKSLSLSPGKGGGGQGGGGQGGGGQGGGGQGGGGQGGGGQCPPCPAPELLGGPSVFLFPPKPKDTLMISRTPEVTCVVVDVSHEEPEVKFNWYVDGVEVHNAKTKPCEEQYGSTYRCVSVLTVLHQDWLNGKEYKCKVSNKALPAPIEKTISKAKGQPREPQVYTLPPSREEMTKNQVSLTCLVKGFYPSDIAVEWESNGQPENNYKTTPPVLDSDGSFFLYSKLTVDKSRWQQGNVFSCSVMHEALHNHYTQKSLSLSPGK

SEQ ID NO: 2632 - protein, 1228 aa, Artificial Sequence
  Synthetic
EVQLLESGGGLVQPGGSLRLSCAASGFTFSGHAMTWVRQAPGKCLEWLSTIYGSGGYTYYAGSVKGRFTISRDNSKNTLYLQMNSLRAEDTAVYYCAKVGGYDWYFDLWGRGTLVTVSSGGGGSGGGGSGGGGSSYELTQPPSVSVALGQTARITCGGHNIGSKNVHWYQQKPGQAPVLVIYRDTNRPSGIPERFSGSNSGNTATLTISRAQAGDEADYYCQLWDSTTVVFGCGTKLTVLSGGGGSQVQLVQSGAEVKKPGASVKVSCKASGYTFTSYGISWVRQAPGQCLEWMGWISAYNGNTVYAQKLQDRVTMTTDTSTSTAYMELRSLRSDDTAVYFCVRDGDPLDYWGQGTLVTVSSGGGGSGGGGSGGGGSEIVLTQSPGTLSLSPGERATLSCRASQSVSSNLAWYQQKPGQAPRLLIYGASTRATGIPARFSGSGSGTEFTLTISSLQSEDFAVYYCQQYHTWPPVTFGCGTKVEIKSGGGGSEVQLVESGGGLVQPGGSLKLSCAASGFTFNKYAINWVRQAPGKGLEWVARIRSKYNNYATYYADAVKDRFTISRDDSKNTVYLQMNNLKTEDTAVYYCARAGNFGSSYISYWAYWGQGTLVTVSSGGGGSGGGGSGGGGSQTVVTQEPSLTVSPGGTVTITCGSSTGAVTSGNYPNWVQKKPGQAPRGLIGGTKFLAPGTPARFSGSLSGGKAALTLSGVQPEDEAEYYCVLWYSNRWVFGSGTKLTVLGGGGDKTHTCPPCPAPELLGGPSVFLFPPKPKDTLMISRTPEVTCVVVDVSHEDPEVKFNWYVDGVEVHNAKTKPCEEQYGSTYRCVSVLTVLHQDWLNGKEYKCKVSNKALPAPIEKTISKAKGQPREPQVYTLPPSREEMTKNQVSLTCLVKGFYPSDIAVEWESNGQPENNYKTTPPVLDSDGSFFLYSKLTVDKSRWQQGNVFSCSVMHEALHNHYTQKSLSLSPGKGGGGSGGGGSGGGGSGGGGSGGGGSGGGGSDKTHTCPPCPAPELLGGPSVFLFPPKPKDTLMISRTPEVTCVVVDVSHEDPEVKFNWYVDGVEVHNAKTKPCEEQYGSTYRCVSVLTVLHQDWLNGKEYKCKVSNKALPAPIEKTISKAKGQPREPQVYTLPPSREEMTKNQVSLTCLVKGFYPSDIAVEWESNGQPENNYKTTPPVLDSDGSFFLYSKLTVDKSRWQQGNVFSCSVMHEALHNHYTQKSLSLSPGK

SEQ ID NO: 2633 - protein, 1218 aa, Artificial Sequence
  Synthetic
EVQLLESGGGLVQPGGSLRLSCAASGFTFSGHAMTWVRQAPGKCLEWLSTIYGSGGYTYYAGSVKGRFTISRDNSKNTLYLQMNSLRAEDTAVYYCAKVGGYDWYFDLWGRGTLVTVSSGGGGQGGGGQGGGGQSYELTQPPSVSVALGQTARITCGGHNIGSKNVHWYQQKPGQAPVLVIYRDTNRPSGIPERFSGSNSGNTATLTISRAQAGDEADYYCQLWDSTTVVFGCGTKLTVLSGGGGQQVQLVQSGAEVKKPGASVKVSCKASGYTFTSYGISWVRQAPGQCLEWMGWISAYNGNTVYAQKLQDRVTMTTDTSTSTAYMELRSLRSDDTAVYFCVRDGDPLDYWGQGTLVTVSSGGGGQGGGGQGGGGQEIVLTQSPGTLSLSPGERATLSCRASQSVSSNLAWYQQKPGQAPRLLIYGASTRATGIPARFSGSGSGTEFTLTISSLQSEDFAVYYCQQYHTWPPVTFGCGTKVEIKSGGGGQEVQLVESGGGLVQPGGSLKLSCAASGFTFNKYAINWVRQAPGKGLEWVARIRSKYNNYATYYADAVKDRFTISRDDSKNTVYLQMNNLKTEDTAVYYCARAGNFGSSYISYWAYWGQGTLVTVSSGGGGQGGGGQGGGGQQTVVTQEPSLTVSPGGTVTITCGSSTGAVTSGNYPNWVQKKPGQAPRGLIGGTKFLAPGTPARFSGSLSGGKAALTLSGVQPEDEAEYYCVLWYSNRWVFGSGTKLTVLGGGGCPPCPAPELLGGPSVFLFPPKPKDTLMISRTPEVTCVVVDVSHEEPEVKFNWYVDGVEVHNAKTKPCEEQYGSTYRCVSVLTVLHQDWLNGKEYKCKVSNKALPAPIEKTISKAKGQPREPQVYTLPPSREEMTKNQVSLTCLVKGFYPSDIAVEWESNGQPENNYKTTPPVLDSDGSFFLYSKLTVDKSRWQQGNVFSCSVMHEALHNHYTQKSLSLSPGKGGGGQGGGGQGGGGQGGGGQGGGGQGGGGQCPPCPAPELLGGPSVFLFPPKPKDTLMISRTPEVTCVVVDVSHEEPEVKFNWYVDGVEVHNAKTKPCEEQYGSTYRCVSVLTVLHQDWLNGKEYKCKVSNKALPAPIEKTISKAKGQPREPQVYTLPPSREEMTKNQVSLTCLVKGFYPSDIAVEWESNGQPENNYKTTPPVLDSDGSFFLYSKLTVDKSRWQQGNVFSCSVMHEALHNHYTQKSLSLSPGK

SEQ ID NO: 2634 - protein, 485 aa, Artificial Sequence
  Synthetic
EVQLLESGGGLVQPGGSLRLSCAASGFTFSGHAMTWVRQAPGKCLEWLSTIYGSGGYTYYAGSVKGRFTISRDNSKNTLYLQMNSLRAEDTAVYYCAKVGGYDWYFDLWGRGTLVTVSSGGGGSGGGGSGGGGSSYELTQPPSVSVALGQTARITCGGHNIGSKNVHWYQQKPGQAPVLVIYRDTNRPSGIPERFSGSNSGNTATLTISRAQAGDEADYYCQLWDSTTVVFGCGTKLTVLSGGGGSQVQLVQSGAEVKKPGASVKVSCKASGYSFTSYGITWVRQAPGQCLEWMGWISAYNGNTIYAQKLQGRVTMTTDTSTSTAYMELRSLRSDDTAVYYCVRDSNHEDFWGQGTLVTVSSGGGGSGGGGSGGGGSEIVLTQSPATLSVSPGERATLSCRASQSVSSNLAWYQQKPGQAPRLLIYGASTRATGIPARFSGSGSGTEFTLTISSLQSEDFAVYYCQQYHTWPPVTFGCGTKVEIK

SEQ ID NO: 2635 - protein, 485 aa, Artificial Sequence
  Synthetic
EVQLLESGGGLVQPGGSLRLSCAASGFTFSGHAMTWVRQAPGKCLEWLSTIYGSGGYTYYAGSVKGRFTISRDNSKNTLYLQMNSLRAEDTAVYYCAKVGGYDWYFDLWGRGTLVTVSSGGGGQGGGGQGGGGQSYELTQPPSVSVALGQTARITCGGHNIGSKNVHWYQQKPGQAPVLVIYRDTNRPSGIPERFSGSNSGNTATLTISRAQAGDEADYYCQLWDSTTVVFGCGTKLTVLSGGGGQQVQLVQSGAEVKKPGASVKVSCKASGYSFTSYGITWVRQAPGQCLEWMGWISAYNGNTIYAQKLQGRVTMTTDTSTSTAYMELRSLRSDDTAVYYCVRDSNHEDFWGQGTLVTVSSGGGGQGGGGQGGGGQEIVLTQSPATLSVSPGERATLSCRASQSVSSNLAWYQQKPGQAPRLLIYGASTRATGIPARFSGSGSGTEFTLTISSLQSEDFAVYYCQQYHTWPPVTFGCGTKVEIK

SEQ ID NO: 2636 - protein, 740 aa, Artificial Sequence
  Synthetic
EVQLLESGGGLVQPGGSLRLSCAASGFTFSGHAMTWVRQAPGKCLEWLSTIYGSGGYTYYAGSVKGRFTISRDNSKNTLYLQMNSLRAEDTAVYYCAKVGGYDWYFDLWGRGTLVTVSSGGGGSGGGGSGGGGSSYELTQPPSVSVALGQTARITCGGHNIGSKNVHWYQQKPGQAPVLVIYRDTNRPSGIPERFSGSNSGNTATLTISRAQAGDEADYYCQLWDSTTVVFGCGTKLTVLSGGGGSQVQLVQSGAEVKKPGASVKVSCKASGYSFTSYGITWVRQAPGQCLEWMGWISAYNGNTIYAQKLQGRVTMTTDTSTSTAYMELRSLRSDDTAVYYCVRDSNHEDFWGQGTLVTVSSGGGGSGGGGSGGGGSEIVLTQSPATLSVSPGERATLSCRASQSVSSNLAWYQQKPGQAPRLLIYGASTRATGIPARFSGSGSGTEFTLTISSLQSEDFAVYYCQQYHTWPPVTFGCGTKVEIKSGGGGSEVQLVESGGGLVQPGGSLKLSCAASGFTFNKYAMNWVRQAPGKGLEWVARIRSKYNNYATYYADSVKDRFTISRDDSKNTAYLQMNNLKTEDTAVYYCVRHGNFGNSYISYWAYWGQGTLVTVSSGGGGSGGGGSGGGGSQTVVTQEPSLTVSPGGTVTLTCGSSTGAVTSGNYPNWVQQKPGQAPRGLIGGTKFLAPGTPARFSGSLLGGKAALTLSGVQPEDEAEYYCVLWYSNRWVFGGGTKLTVL

SEQ ID NO: 2637 - protein, 740 aa, Artificial Sequence
  Synthetic
EVQLLESGGGLVQPGGSLRLSCAASGFTFSGHAMTWVRQAPGKCLEWLSTIYGSGGYTYYAGSVKGRFTISRDNSKNTLYLQMNSLRAEDTAVYYCAKVGGYDWYFDLWGRGTLVTVSSGGGGQGGGGQGGGGQSYELTQPPSVSVALGQTARITCGGHNIGSKNVHWYQQKPGQAPVLVIYRDTNRPSGIPERFSGSNSGNTATLTISRAQAGDEADYYCQLWDSTTVVFGCGTKLTVLSGGGGQQVQLVQSGAEVKKPGASVKVSCKASGYSFTSYGITWVRQAPGQCLEWMGWISAYNGNTIYAQKLQGRVTMTTDTSTSTAYMELRSLRSDDTAVYYCVRDSNHEDFWGQGTLVTVSSGGGGQGGGGQGGGGQEIVLTQSPATLSVSPGERATLSCRASQSVSSNLAWYQQKPGQAPRLLIYGASTRATGIPARFSGSGSGTEFTLTISSLQSEDFAVYYCQQYHTWPPVTFGCGTKVEIKSGGGGQEVQLVESGGGLVQPGGSLKLSCAASGFTFNKYAMNWVRQAPGKGLEWVARIRSKYNNYATYYADSVKDRFTISRDDSKNTAYLQMNNLKTEDTAVYYCVRHGNFGNSYISYWAYWGQGTLVTVSSGGGGQGGGGQGGGGQQTVVTQEPSLTVSPGGTVTLTCGSSTGAVTSGNYPNWVQQKPGQAPRGLIGGTKFLAPGTPARFSGSLLGGKAALTLSGVQPEDEAEYYCVLWYSNRWVFGGGTKLTVL

SEQ ID NO: 2638 - protein, 740 aa, Artificial Sequence
  Synthetic
EVQLLESGGGLVQPGGSLRLSCAASGFTFSGHAMTWVRQAPGKCLEWLSTIYGSGGYTYYAGSVKGRFTISRDNSKNTLYLQMNSLRAEDTAVYYCAKVGGYDWYFDLWGRGTLVTVSSGGGGSGGGGSGGGGSSYELTQPPSVSVALGQTARITCGGHNIGSKNVHWYQQKPGQAPVLVIYRDTNRPSGIPERFSGSNSGNTATLTISRAQAGDEADYYCQLWDSTTVVFGCGTKLTVLSGGGGSQVQLVQSGAEVKKPGASVKVSCKASGYSFTSYGITWVRQAPGQCLEWMGWISAYNGNTIYAQKLQGRVTMTTDTSTSTAYMELRSLRSDDTAVYYCVRDSNHEDFWGQGTLVTVSSGGGGSGGGGSGGGGSEIVLTQSPATLSVSPGERATLSCRASQSVSSNLAWYQQKPGQAPRLLIYGASTRATGIPARFSGSGSGTEFTLTISSLQSEDFAVYYCQQYHTWPPVTFGCGTKVEIKSGGGGSEVQLVESGGGLVQPGGSLKLSCAASGFTFNKYAINWVRQAPGKGLEWVARIRSKYNNYATYYADAVKDRFTISRDDSKNTVYLQMNNLKTEDTAVYYCARAGNFGSSYISYWAYWGQGTLVTVSSGGGGSGGGGSGGGGSQTVVTQEPSLTVSPGGTVTITCGSSTGAVTSGNYPNWVQKKPGQAPRGLIGGTKFLAPGTPARFSGSLSGGKAALTLSGVQPEDEAEYYCVLWYSNRWVFGSGTKLTVL

SEQ ID NO: 2639 - protein, 740 aa, Artificial Sequence
  Synthetic
EVQLLESGGGLVQPGGSLRLSCAASGFTFSGHAMTWVRQAPGKCLEWLSTIYGSGGYTYYAGSVKGRFTISRDNSKNTLYLQMNSLRAEDTAVYYCAKVGGYDWYFDLWGRGTLVTVSSGGGGQGGGGQGGGGQSYELTQPPSVSVALGQTARITCGGHNIGSKNVHWYQQKPGQAPVLVIYRDTNRPSGIPERFSGSNSGNTATLTISRAQAGDEADYYCQLWDSTTVVFGCGTKLTVLSGGGGQQVQLVQSGAEVKKPGASVKVSCKASGYSFTSYGITWVRQAPGQCLEWMGWISAYNGNTIYAQKLQGRVTMTTDTSTSTAYMELRSLRSDDTAVYYCVRDSNHEDFWGQGTLVTVSSGGGGQGGGGQGGGGQEIVLTQSPATLSVSPGERATLSCRASQSVSSNLAWYQQKPGQAPRLLIYGASTRATGIPARFSGSGSGTEFTLTISSLQSEDFAVYYCQQYHTWPPVTFGCGTKVEIKSGGGGQEVQLVESGGGLVQPGGSLKLSCAASGFTFNKYAINWVRQAPGKGLEWVARIRSKYNNYATYYADAVKDRFTISRDDSKNTVYLQMNNLKTEDTAVYYCARAGNFGSSYISYWAYWGQGTLVTVSSGGGGQGGGGQGGGGQQTVVTQEPSLTVSPGGTVTITCGSSTGAVTSGNYPNWVQKKPGQAPRGLIGGTKFLAPGTPARFSGSLSGGKAALTLSGVQPEDEAEYYCVLWYSNRWVFGSGTKLTVL

SEQ ID NO: 2640 - protein, 1228 aa, Artificial Sequence
  Synthetic
EVQLLESGGGLVQPGGSLRLSCAASGFTFSGHAMTWVRQAPGKCLEWLSTIYGSGGYTYYAGSVKGRFTISRDNSKNTLYLQMNSLRAEDTAVYYCAKVGGYDWYFDLWGRGTLVTVSSGGGGSGGGGSGGGGSSYELTQPPSVSVALGQTARITCGGHNIGSKNVHWYQQKPGQAPVLVIYRDTNRPSGIPERFSGSNSGNTATLTISRAQAGDEADYYCQLWDSTTVVFGCGTKLTVLSGGGGSQVQLVQSGAEVKKPGASVKVSCKASGYSFTSYGITWVRQAPGQCLEWMGWISAYNGNTIYAQKLQGRVTMTTDTSTSTAYMELRSLRSDDTAVYYCVRDSNHEDFWGQGTLVTVSSGGGGSGGGGSGGGGSEIVLTQSPATLSVSPGERATLSCRASQSVSSNLAWYQQKPGQAPRLLIYGASTRATGIPARFSGSGSGTEFTLTISSLQSEDFAVYYCQQYHTWPPVTFGCGTKVEIKSGGGGSEVQLVESGGGLVQPGGSLKLSCAASGFTFNKYAMNWVRQAPGKGLEWVARIRSKYNNYATYYADSVKDRFTISRDDSKNTAYLQMNNLKTEDTAVYYCVRHGNFGNSYISYWAYWGQGTLVTVSSGGGGSGGGGSGGGGSQTVVTQEPSLTVSPGGTVTLTCGSSTGAVTSGNYPNWVQQKPGQAPRGLIGGTKFLAPGTPARFSGSLLGGKAALTLSGVQPEDEAEYYCVLWYSNRWVFGGGTKLTVLGGGGDKTHTCPPCPAPELLGGPSVFLFPPKPKDTLMISRTPEVTCVVVDVSHEDPEVKFNWYVDGVEVHNAKTKPCEEQYGSTYRCVSVLTVLHQDWLNGKEYKCKVSNKALPAPIEKTISKAKGQPREPQVYTLPPSREEMTKNQVSLTCLVKGFYPSDIAVEWESNGQPENNYKTTPPVLDSDGSFFLYSKLTVDKSRWQQGNVFSCSVMHEALHNHYTQKSLSLSPGKGGGGSGGGGSGGGGSGGGGSGGGGSGGGGSDKTHTCPPCPAPELLGGPSVFLFPPKPKDTLMISRTPEVTCVVVDVSHEDPEVKFNWYVDGVEVHNAKTKPCEEQYGSTYRCVSVLTVLHQDWLNGKEYKCKVSNKALPAPIEKTISKAKGQPREPQVYTLPPSREEMTKNQVSLTCLVKGFYPSDIAVEWESNGQPENNYKTTPPVLDSDGSFFLYSKLTVDKSRWQQGNVFSCSVMHEALHNHYTQKSLSLSPGK

SEQ ID NO: 2641 - protein, 1218 aa, Artificial Sequence
  Synthetic
EVQLLESGGGLVQPGGSLRLSCAASGFTFSGHAMTWVRQAPGKCLEWLSTIYGSGGYTYYAGSVKGRFTISRDNSKNTLYLQMNSLRAEDTAVYYCAKVGGYDWYFDLWGRGTLVTVSSGGGGQGGGGQGGGGQSYELTQPPSVSVALGQTARITCGGHNIGSKNVHWYQQKPGQAPVLVIYRDTNRPSGIPERFSGSNSGNTATLTISRAQAGDEADYYCQLWDSTTVVFGCGTKLTVLSGGGGQQVQLVQSGAEVKKPGASVKVSCKASGYSFTSYGITWVRQAPGQCLEWMGWISAYNGNTIYAQKLQGRVTMTTDTSTSTAYMELRSLRSDDTAVYYCVRDSNHEDFWGQGTLVTVSSGGGGQGGGGQGGGGQEIVLTQSPATLSVSPGERATLSCRASQSVSSNLAWYQQKPGQAPRLLIYGASTRATGIPARFSGSGSGTEFTLTISSLQSEDFAVYYCQQYHTWPPVTFGCGTKVEIKSGGGGQEVQLVESGGGLVQPGGSLKLSCAASGFTFNKYAMNWVRQAPGKGLEWVARIRSKYNNYATYYADSVKDRFTISRDDSKNTAYLQMNNLKTEDTAVYYCVRHGNFGNSYISYWAYWGQGTLVTVSSGGGGQGGGGQGGGGQQTVVTQEPSLTVSPGGTVTLTCGSSTGAVTSGNYPNWVQQKPGQAPRGLIGGTKFLAPGTPARFSGSLLGGKAALTLSGVQPEDEAEYYCVLWYSNRWVFGGGTKLTVLGGGGCPPCPAPELLGGPSVFLFPPKPKDTLMISRTPEVTCVVVDVSHEEPEVKFNWYVDGVEVHNAKTKPCEEQYGSTYRCVSVLTVLHQDWLNGKEYKCKVSNKALPAPIEKTISKAKGQPREPQVYTLPPSREEMTKNQVSLTCLVKGFYPSDIAVEWESNGQPENNYKTTPPVLDSDGSFFLYSKLTVDKSRWQQGNVFSCSVMHEALHNHYTQKSLSLSPGKGGGGQGGGGQGGGGQGGGGQGGGGQGGGGQCPPCPAPELLGGPSVFLFPPKPKDTLMISRTPEVTCVVVDVSHEEPEVKFNWYVDGVEVHNAKTKPCEEQYGSTYRCVSVLTVLHQDWLNGKEYKCKVSNKALPAPIEKTISKAKGQPREPQVYTLPPSREEMTKNQVSLTCLVKGFYPSDIAVEWESNGQPENNYKTTPPVLDSDGSFFLYSKLTVDKSRWQQGNVFSCSVMHEALHNHYTQKSLSLSPGK

SEQ ID NO: 2642 - protein, 1228 aa, Artificial Sequence
  Synthetic
EVQLLESGGGLVQPGGSLRLSCAASGFTFSGHAMTWVRQAPGKCLEWLSTIYGSGGYTYYAGSVKGRFTISRDNSKNTLYLQMNSLRAEDTAVYYCAKVGGYDWYFDLWGRGTLVTVSSGGGGSGGGGSGGGGSSYELTQPPSVSVALGQTARITCGGHNIGSKNVHWYQQKPGQAPVLVIYRDTNRPSGIPERFSGSNSGNTATLTISRAQAGDEADYYCQLWDSTTVVFGCGTKLTVLSGGGGSQVQLVQSGAEVKKPGASVKVSCKASGYSFTSYGITWVRQAPGQCLEWMGWISAYNGNTIYAQKLQGRVTMTTDTSTSTAYMELRSLRSDDTAVYYCVRDSNHEDFWGQGTLVTVSSGGGGSGGGGSGGGGSEIVLTQSPATLSVSPGERATLSCRASQSVSSNLAWYQQKPGQAPRLLIYGASTRATGIPARFSGSGSGTEFTLTISSLQSEDFAVYYCQQYHTWPPVTFGCGTKVEIKSGGGGSEVQLVESGGGLVQPGGSLKLSCAASGFTFNKYAINWVRQAPGKGLEWVARIRSKYNNYATYYADAVKDRFTISRDDSKNTVYLQMNNLKTEDTAVYYCARAGNFGSSYISYWAYWGQGTLVTVSSGGGGSGGGGSGGGGSQTVVTQEPSLTVSPGGTVTITCGSSTGAVTSGNYPNWVQKKPGQAPRGLIGGTKFLAPGTPARFSGSLSGGKAALTLSGVQPEDEAEYYCVLWYSNRWVFGSGTKLTVLGGGGDKTHTCPPCPAPELLGGPSVFLFPPKPKDTLMISRTPEVTCVVVDVSHEDPEVKFNWYVDGVEVHNAKTKPCEEQYGSTYRCVSVLTVLHQDWLNGKEYKCKVSNKALPAPIEKTISKAKGQPREPQVYTLPPSREEMTKNQVSLTCLVKGFYPSDIAVEWESNGQPENNYKTTPPVLDSDGSFFLYSKLTVDKSRWQQGNVFSCSVMHEALHNHYTQKSLSLSPGKGGGGSGGGGSGGGGSGGGGSGGGGSGGGGSDKTHTCPPCPAPELLGGPSVFLFPPKPKDTLMISRTPEVTCVVVDVSHEDPEVKFNWYVDGVEVHNAKTKPCEEQYGSTYRCVSVLTVLHQDWLNGKEYKCKVSNKALPAPIEKTISKAKGQPREPQVYTLPPSREEMTKNQVSLTCLVKGFYPSDIAVEWESNGQPENNYKTTPPVLDSDGSFFLYSKLTVDKSRWQQGNVFSCSVMHEALHNHYTQKSLSLSPGK

SEQ ID NO: 2643 - protein, 1218 aa, Artificial Sequence
  Synthetic
EVQLLESGGGLVQPGGSLRLSCAASGFTFSGHAMTWVRQAPGKCLEWLSTIYGSGGYTYYAGSVKGRFTISRDNSKNTLYLQMNSLRAEDTAVYYCAKVGGYDWYFDLWGRGTLVTVSSGGGGQGGGGQGGGGQSYELTQPPSVSVALGQTARITCGGHNIGSKNVHWYQQKPGQAPVLVIYRDTNRPSGIPERFSGSNSGNTATLTISRAQAGDEADYYCQLWDSTTVVFGCGTKLTVLSGGGGQQVQLVQSGAEVKKPGASVKVSCKASGYSFTSYGITWVRQAPGQCLEWMGWISAYNGNTIYAQKLQGRVTMTTDTSTSTAYMELRSLRSDDTAVYYCVRDSNHEDFWGQGTLVTVSSGGGGQGGGGQGGGGQEIVLTQSPATLSVSPGERATLSCRASQSVSSNLAWYQQKPGQAPRLLIYGASTRATGIPARFSGSGSGTEFTLTISSLQSEDFAVYYCQQYHTWPPVTFGCGTKVEIKSGGGGQEVQLVESGGGLVQPGGSLKLSCAASGFTFNKYAINWVRQAPGKGLEWVARIRSKYNNYATYYADAVKDRFTISRDDSKNTVYLQMNNLKTEDTAVYYCARAGNFGSSYISYWAYWGQGTLVTVSSGGGGQGGGGQGGGGQQTVVTQEPSLTVSPGGTVTITCGSSTGAVTSGNYPNWVQKKPGQAPRGLIGGTKFLAPGTPARFSGSLSGGKAALTLSGVQPEDEAEYYCVLWYSNRWVFGSGTKLTVLGGGGCPPCPAPELLGGPSVFLFPPKPKDTLMISRTPEVTCVVVDVSHEEPEVKFNWYVDGVEVHNAKTKPCEEQYGSTYRCVSVLTVLHQDWLNGKEYKCKVSNKALPAPIEKTISKAKGQPREPQVYTLPPSREEMTKNQVSLTCLVKGFYPSDIAVEWESNGQPENNYKTTPPVLDSDGSFFLYSKLTVDKSRWQQGNVFSCSVMHEALHNHYTQKSLSLSPGKGGGGQGGGGQGGGGQGGGGQGGGGQGGGGQCPPCPAPELLGGPSVFLFPPKPKDTLMISRTPEVTCVVVDVSHEEPEVKFNWYVDGVEVHNAKTKPCEEQYGSTYRCVSVLTVLHQDWLNGKEYKCKVSNKALPAPIEKTISKAKGQPREPQVYTLPPSREEMTKNQVSLTCLVKGFYPSDIAVEWESNGQPENNYKTTPPVLDSDGSFFLYSKLTVDKSRWQQGNVFSCSVMHEALHNHYTQKSLSLSPGK

SEQ ID NO: 2644 - protein, 487 aa, Artificial Sequence
  Synthetic
EVQLLESGGGLVQPGGSLRLSCAASGFTFSGHAMTWVRQAPGKCLEWLSTIYGSGGYTYYAGSVKGRFTISRDNSKNTLYLQMNSLRAEDTAVYYCAKVGGYDWYFDLWGRGTLVTVSSGGGGSGGGGSGGGGSSYELTQPPSVSVALGQTARITCGGHNIGSKNVHWYQQKPGQAPVLVIYRDTNRPSGIPERFSGSNSGNTATLTISRAQAGDEADYYCQLWDSTTVVFGCGTKLTVLSGGGGSQVQLVQSGAEVKKPGESLKISCKGSGYSFTSYGISWVRQAPGQCLEWMGWISAYNGNTIYAQKLQGRVTMTTDTSTSTAYMELRRLRSDDTAVYYCARDPGVTGDDYWGQGTLVTVSSGGGGSGGGGSGGGGSEIVLTQSPATLSVSPGERATLSCRASLSVSSNLAWYQQKPGQAPRLLIYGASTRATGIPARFSGSGSGTEFTLTISSLQSEDFAVYFCQQYHSWPALTFGCGTKVEIK

SEQ ID NO: 2645 - protein, 487 aa, Artificial Sequence
  Synthetic
EVQLLESGGGLVQPGGSLRLSCAASGFTFSGHAMTWVRQAPGKCLEWLSTIYGSGGYTYYAGSVKGRFTISRDNSKNTLYLQMNSLRAEDTAVYYCAKVGGYDWYFDLWGRGTLVTVSSGGGGQGGGGQGGGGQSYELTQPPSVSVALGQTARITCGGHNIGSKNVHWYQQKPGQAPVLVIYRDTNRPSGIPERFSGSNSGNTATLTISRAQAGDEADYYCQLWDSTTVVFGCGTKLTVLSGGGGQQVQLVQSGAEVKKPGESLKISCKGSGYSFTSYGISWVRQAPGQCLEWMGWISAYNGNTIYAQKLQGRVTMTTDTSTSTAYMELRRLRSDDTAVYYCARDPGVTGDDYWGQGTLVTVSSGGGGQGGGGQGGGGQEIVLTQSPATLSVSPGERATLSCRASLSVSSNLAWYQQKPGQAPRLLIYGASTRATGIPARFSGSGSGTEFTLTISSLQSEDFAVYFCQQYHSWPALTFGCGTKVEIK

SEQ ID NO: 2646 - protein, 742 aa, Artificial Sequence
  Synthetic
EVQLLESGGGLVQPGGSLRLSCAASGFTFSGHAMTWVRQAPGKCLEWLSTIYGSGGYTYYAGSVKGRFTISRDNSKNTLYLQMNSLRAEDTAVYYCAKVGGYDWYFDLWGRGTLVTVSSGGGGSGGGGSGGGGSSYELTQPPSVSVALGQTARITCGGHNIGSKNVHWYQQKPGQAPVLVIYRDTNRPSGIPERFSGSNSGNTATLTISRAQAGDEADYYCQLWDSTTVVFGCGTKLTVLSGGGGSQVQLVQSGAEVKKPGESLKISCKGSGYSFTSYGISWVRQAPGQCLEWMGWISAYNGNTIYAQKLQGRVTMTTDTSTSTAYMELRRLRSDDTAVYYCARDPGVTGDDYWGQGTLVTVSSGGGGSGGGGSGGGGSEIVLTQSPATLSVSPGERATLSCRASLSVSSNLAWYQQKPGQAPRLLIYGASTRATGIPARFSGSGSGTEFTLTISSLQSEDFAVYFCQQYHSWPALTFGCGTKVEIKSGGGGSEVQLVESGGGLVQPGGSLKLSCAASGFTFNKYAMNWVRQAPGKGLEWVARIRSKYNNYATYYADSVKDRFTISRDDSKNTAYLQMNNLKTEDTAVYYCVRHGNFGNSYISYWAYWGQGTLVTVSSGGGGSGGGGSGGGGSQTVVTQEPSLTVSPGGTVTLTCGSSTGAVTSGNYPNWVQQKPGQAPRGLIGGTKFLAPGTPARFSGSLLGGKAALTLSGVQPEDEAEYYCVLWYSNRWVFGGGTKLTVL

SEQ ID NO: 2647 - protein, 742 aa, Artificial Sequence
  Synthetic
EVQLLESGGGLVQPGGSLRLSCAASGFTFSGHAMTWVRQAPGKCLEWLSTIYGSGGYTYYAGSVKGRFTISRDNSKNTLYLQMNSLRAEDTAVYYCAKVGGYDWYFDLWGRGTLVTVSSGGGGQGGGGQGGGGQSYELTQPPSVSVALGQTARITCGGHNIGSKNVHWYQQKPGQAPVLVIYRDTNRPSGIPERFSGSNSGNTATLTISRAQAGDEADYYCQLWDSTTVVFGCGTKLTVLSGGGGQQVQLVQSGAEVKKPGESLKISCKGSGYSFTSYGISWVRQAPGQCLEWMGWISAYNGNTIYAQKLQGRVTMTTDTSTSTAYMELRRLRSDDTAVYYCARDPGVTGDDYWGQGTLVTVSSGGGGQGGGGQGGGGQEIVLTQSPATLSVSPGERATLSCRASLSVSSNLAWYQQKPGQAPRLLIYGASTRATGIPARFSGSGSGTEFTLTISSLQSEDFAVYFCQQYHSWPALTFGCGTKVEIKSGGGGQEVQLVESGGGLVQPGGSLKLSCAASGFTFNKYAMNWVRQAPGKGLEWVARIRSKYNNYATYYADSVKDRFTISRDDSKNTAYLQMNNLKTEDTAVYYCVRHGNFGNSYISYWAYWGQGTLVTVSSGGGGQGGGGQGGGGQQTVVTQEPSLTVSPGGTVTLTCGSSTGAVTSGNYPNWVQQKPGQAPRGLIGGTKFLAPGTPARFSGSLLGGKAALTLSGVQPEDEAEYYCVLWYSNRWVFGGGTKLTVL

SEQ ID NO: 2648 - protein, 742 aa, Artificial Sequence
  Synthetic
EVQLLESGGGLVQPGGSLRLSCAASGFTFSGHAMTWVRQAPGKCLEWLSTIYGSGGYTYYAGSVKGRFTISRDNSKNTLYLQMNSLRAEDTAVYYCAKVGGYDWYFDLWGRGTLVTVSSGGGGSGGGGSGGGGSSYELTQPPSVSVALGQTARITCGGHNIGSKNVHWYQQKPGQAPVLVIYRDTNRPSGIPERFSGSNSGNTATLTISRAQAGDEADYYCQLWDSTTVVFGCGTKLTVLSGGGGSQVQLVQSGAEVKKPGESLKISCKGSGYSFTSYGISWVRQAPGQCLEWMGWISAYNGNTIYAQKLQGRVTMTTDTSTSTAYMELRRLRSDDTAVYYCARDPGVTGDDYWGQGTLVTVSSGGGGSGGGGSGGGGSEIVLTQSPATLSVSPGERATLSCRASLSVSSNLAWYQQKPGQAPRLLIYGASTRATGIPARFSGSGSGTEFTLTISSLQSEDFAVYFCQQYHSWPALTFGCGTKVEIKSGGGGSEVQLVESGGGLVQPGGSLKLSCAASGFTFNKYAINWVRQAPGKGLEWVARIRSKYNNYATYYADAVKDRFTISRDDSKNTVYLQMNNLKTEDTAVYYCARAGNFGSSYISYWAYWGQGTLVTVSSGGGGSGGGGSGGGGSQTVVTQEPSLTVSPGGTVTITCGSSTGAVTSGNYPNWVQKKPGQAPRGLIGGTKFLAPGTPARFSGSLSGGKAALTLSGVQPEDEAEYYCVLWYSNRWVFGSGTKLTVL

SEQ ID NO: 2649 - protein, 742 aa, Artificial Sequence
  Synthetic
EVQLLESGGGLVQPGGSLRLSCAASGFTFSGHAMTWVRQAPGKCLEWLSTIYGSGGYTYYAGSVKGRFTISRDNSKNTLYLQMNSLRAEDTAVYYCAKVGGYDWYFDLWGRGTLVTVSSGGGGQGGGGQGGGGQSYELTQPPSVSVALGQTARITCGGHNIGSKNVHWYQQKPGQAPVLVIYRDTNRPSGIPERFSGSNSGNTATLTISRAQAGDEADYYCQLWDSTTVVFGCGTKLTVLSGGGGQQVQLVQSGAEVKKPGESLKISCKGSGYSFTSYGISWVRQAPGQCLEWMGWISAYNGNTIYAQKLQGRVTMTTDTSTSTAYMELRRLRSDDTAVYYCARDPGVTGDDYWGQGTLVTVSSGGGGQGGGGQGGGGQEIVLTQSPATLSVSPGERATLSCRASLSVSSNLAWYQQKPGQAPRLLIYGASTRATGIPARFSGSGSGTEFTLTISSLQSEDFAVYFCQQYHSWPALTFGCGTKVEIKSGGGGQEVQLVESGGGLVQPGGSLKLSCAASGFTFNKYAINWVRQAPGKGLEWVARIRSKYNNYATYYADAVKDRFTISRDDSKNTVYLQMNNLKTEDTAVYYCARAGNFGSSYISYWAYWGQGTLVTVSSGGGGQGGGGQGGGGQQTVVTQEPSLTVSPGGTVTITCGSSTGAVTSGNYPNWVQKKPGQAPRGLIGGTKFLAPGTPARFSGSLSGGKAALTLSGVQPEDEAEYYCVLWYSNRWVFGSGTKLTVL

SEQ ID NO: 2650 - protein, 1230 aa, Artificial Sequence
  Synthetic
EVQLLESGGGLVQPGGSLRLSCAASGFTFSGHAMTWVRQAPGKCLEWLSTIYGSGGYTYYAGSVKGRFTISRDNSKNTLYLQMNSLRAEDTAVYYCAKVGGYDWYFDLWGRGTLVTVSSGGGGSGGGGSGGGGSSYELTQPPSVSVALGQTARITCGGHNIGSKNVHWYQQKPGQAPVLVIYRDTNRPSGIPERFSGSNSGNTATLTISRAQAGDEADYYCQLWDSTTVVFGCGTKLTVLSGGGGSQVQLVQSGAEVKKPGESLKISCKGSGYSFTSYGISWVRQAPGQCLEWMGWISAYNGNTIYAQKLQGRVTMTTDTSTSTAYMELRRLRSDDTAVYYCARDPGVTGDDYWGQGTLVTVSSGGGGSGGGGSGGGGSEIVLTQSPATLSVSPGERATLSCRASLSVSSNLAWYQQKPGQAPRLLIYGASTRATGIPARFSGSGSGTEFTLTISSLQSEDFAVYFCQQYHSWPALTFGCGTKVEIKSGGGGSEVQLVESGGGLVQPGGSLKLSCAASGFTFNKYAMNWVRQAPGKGLEWVARIRSKYNNYATYYADSVKDRFTISRDDSKNTAYLQMNNLKTEDTAVYYCVRHGNFGNSYISYWAYWGQGTLVTVSSGGGGSGGGGSGGGGSQTVVTQEPSLTVSPGGTVTLTCGSSTGAVTSGNYPNWVQQKPGQAPRGLIGGTKFLAPGTPARFSGSLLGGKAALTLSGVQPEDEAEYYCVLWYSNRWVFGGGTKLTVLGGGGDKTHTCPPCPAPELLGGPSVFLFPPKPKDTLMISRTPEVTCVVVDVSHEDPEVKFNWYVDGVEVHNAKTKPCEEQYGSTYRCVSVLTVLHQDWLNGKEYKCKVSNKALPAPIEKTISKAKGQPREPQVYTLPPSREEMTKNQVSLTCLVKGFYPSDIAVEWESNGQPENNYKTTPPVLDSDGSFFLYSKLTVDKSRWQQGNVFSCSVMHEALHNHYTQKSLSLSPGKGGGGSGGGGSGGGGSGGGGSGGGGSGGGGSDKTHTCPPCPAPELLGGPSVFLFPPKPKDTLMISRTPEVTCVVVDVSHEDPEVKFNWYVDGVEVHNAKTKPCEEQYGSTYRCVSVLTVLHQDWLNGKEYKCKVSNKALPAPIEKTISKAKGQPREPQVYTLPPSREEMTKNQVSLTCLVKGFYPSDIAVEWESNGQPENNYKTTPPVLDSDGSFFLYSKLTVDKSRWQQGNVFSCSVMHEALHNHYTQKSLSLSPGK

SEQ ID NO: 2651 - protein, 1220 aa, Artificial Sequence
  Synthetic
EVQLLESGGGLVQPGGSLRLSCAASGFTFSGHAMTWVRQAPGKCLEWLSTIYGSGGYTYYAGSVKGRFTISRDNSKNTLYLQMNSLRAEDTAVYYCAKVGGYDWYFDLWGRGTLVTVSSGGGGQGGGGQGGGGQSYELTQPPSVSVALGQTARITCGGHNIGSKNVHWYQQKPGQAPVLVIYRDTNRPSGIPERFSGSNSGNTATLTISRAQAGDEADYYCQLWDSTTVVFGCGTKLTVLSGGGGQQVQLVQSGAEVKKPGESLKISCKGSGYSFTSYGISWVRQAPGQCLEWMGWISAYNGNTIYAQKLQGRVTMTTDTSTSTAYMELRRLRSDDTAVYYCARDPGVTGDDYWGQGTLVTVSSGGGGQGGGGQGGGGQEIVLTQSPATLSVSPGERATLSCRASLSVSSNLAWYQQKPGQAPRLLIYGASTRATGIPARFSGSGSGTEFTLTISSLQSEDFAVYFCQQYHSWPALTFGCGTKVEIKSGGGGQEVQLVESGGGLVQPGGSLKLSCAASGFTFNKYAMNWVRQAPGKGLEWVARIRSKYNNYATYYADSVKDRFTISRDDSKNTAYLQMNNLKTEDTAVYYCVRHGNFGNSYISYWAYWGQGTLVTVSSGGGGQGGGGQGGGGQQTVVTQEPSLTVSPGGTVTLTCGSSTGAVTSGNYPNWVQQKPGQAPRGLIGGTKFLAPGTPARFSGSLLGGKAALTLSGVQPEDEAEYYCVLWYSNRWVFGGGTKLTVLGGGGCPPCPAPELLGGPSVFLFPPKPKDTLMISRTPEVTCVVVDVSHEEPEVKFNWYVDGVEVHNAKTKPCEEQYGSTYRCVSVLTVLHQDWLNGKEYKCKVSNKALPAPIEKTISKAKGQPREPQVYTLPPSREEMTKNQVSLTCLVKGFYPSDIAVEWESNGQPENNYKTTPPVLDSDGSFFLYSKLTVDKSRWQQGNVFSCSVMHEALHNHYTQKSLSLSPGKGGGGQGGGGQGGGGQGGGGQGGGGQGGGGQCPPCPAPELLGGPSVFLFPPKPKDTLMISRTPEVTCVVVDVSHEEPEVKFNWYVDGVEVHNAKTKPCEEQYGSTYRCVSVLTVLHQDWLNGKEYKCKVSNKALPAPIEKTISKAKGQPREPQVYTLPPSREEMTKNQVSLTCLVKGFYPSDIAVEWESNGQPENNYKTTPPVLDSDGSFFLYSKLTVDKSRWQQGNVFSCSVMHEALHNHYTQKSLSLSPGK

SEQ ID NO: 2652 - protein, 1230 aa, Artificial Sequence
  Synthetic
EVQLLESGGGLVQPGGSLRLSCAASGFTFSGHAMTWVRQAPGKCLEWLSTIYGSGGYTYYAGSVKGRFTISRDNSKNTLYLQMNSLRAEDTAVYYCAKVGGYDWYFDLWGRGTLVTVSSGGGGSGGGGSGGGGSSYELTQPPSVSVALGQTARITCGGHNIGSKNVHWYQQKPGQAPVLVIYRDTNRPSGIPERFSGSNSGNTATLTISRAQAGDEADYYCQLWDSTTVVFGCGTKLTVLSGGGGSQVQLVQSGAEVKKPGESLKISCKGSGYSFTSYGISWVRQAPGQCLEWMGWISAYNGNTIYAQKLQGRVTMTTDTSTSTAYMELRRLRSDDTAVYYCARDPGVTGDDYWGQGTLVTVSSGGGGSGGGGSGGGGSEIVLTQSPATLSVSPGERATLSCRASLSVSSNLAWYQQKPGQAPRLLIYGASTRATGIPARFSGSGSGTEFTLTISSLQSEDFAVYFCQQYHSWPALTFGCGTKVEIKSGGGGSEVQLVESGGGLVQPGGSLKLSCAASGFTFNKYAINWVRQAPGKGLEWVARIRSKYNNYATYYADAVKDRFTISRDDSKNTVYLQMNNLKTEDTAVYYCARAGNFGSSYISYWAYWGQGTLVTVSSGGGGSGGGGSGGGGSQTVVTQEPSLTVSPGGTVTITCGSSTGAVTSGNYPNWVQKKPGQAPRGLIGGTKFLAPGTPARFSGSLSGGKAALTLSGVQPEDEAEYYCVLWYSNRWVFGSGTKLTVLGGGGDKTHTCPPCPAPELLGGPSVFLFPPKPKDTLMISRTPEVTCVVVDVSHEDPEVKFNWYVDGVEVHNAKTKPCEEQYGSTYRCVSVLTVLHQDWLNGKEYKCKVSNKALPAPIEKTISKAKGQPREPQVYTLPPSREEMTKNQVSLTCLVKGFYPSDIAVEWESNGQPENNYKTTPPVLDSDGSFFLYSKLTVDKSRWQQGNVFSCSVMHEALHNHYTQKSLSLSPGKGGGGSGGGGSGGGGSGGGGSGGGGSGGGGSDKTHTCPPCPAPELLGGPSVFLFPPKPKDTLMISRTPEVTCVVVDVSHEDPEVKFNWYVDGVEVHNAKTKPCEEQYGSTYRCVSVLTVLHQDWLNGKEYKCKVSNKALPAPIEKTISKAKGQPREPQVYTLPPSREEMTKNQVSLTCLVKGFYPSDIAVEWESNGQPENNYKTTPPVLDSDGSFFLYSKLTVDKSRWQQGNVFSCSVMHEALHNHYTQKSLSLSPGK

SEQ ID NO: 2653 - protein, 1220 aa, Artificial Sequence
  Synthetic
EVQLLESGGGLVQPGGSLRLSCAASGFTFSGHAMTWVRQAPGKCLEWLSTIYGSGGYTYYAGSVKGRFTISRDNSKNTLYLQMNSLRAEDTAVYYCAKVGGYDWYFDLWGRGTLVTVSSGGGGQGGGGQGGGGQSYELTQPPSVSVALGQTARITCGGHNIGSKNVHWYQQKPGQAPVLVIYRDTNRPSGIPERFSGSNSGNTATLTISRAQAGDEADYYCQLWDSTTVVFGCGTKLTVLSGGGGQQVQLVQSGAEVKKPGESLKISCKGSGYSFTSYGISWVRQAPGQCLEWMGWISAYNGNTIYAQKLQGRVTMTTDTSTSTAYMELRRLRSDDTAVYYCARDPGVTGDDYWGQGTLVTVSSGGGGQGGGGQGGGGQEIVLTQSPATLSVSPGERATLSCRASLSVSSNLAWYQQKPGQAPRLLIYGASTRATGIPARFSGSGSGTEFTLTISSLQSEDFAVYFCQQYHSWPALTFGCGTKVEIKSGGGGQEVQLVESGGGLVQPGGSLKLSCAASGFTFNKYAINWVRQAPGKGLEWVARIRSKYNNYATYYADAVKDRFTISRDDSKNTVYLQMNNLKTEDTAVYYCARAGNFGSSYISYWAYWGQGTLVTVSSGGGGQGGGGQGGGGQQTVVTQEPSLTVSPGGTVTITCGSSTGAVTSGNYPNWVQKKPGQAPRGLIGGTKFLAPGTPARFSGSLSGGKAALTLSGVQPEDEAEYYCVLWYSNRWVFGSGTKLTVLGGGGCPPCPAPELLGGPSVFLFPPKPKDTLMISRTPEVTCVVVDVSHEEPEVKFNWYVDGVEVHNAKTKPCEEQYGSTYRCVSVLTVLHQDWLNGKEYKCKVSNKALPAPIEKTISKAKGQPREPQVYTLPPSREEMTKNQVSLTCLVKGFYPSDIAVEWESNGQPENNYKTTPPVLDSDGSFFLYSKLTVDKSRWQQGNVFSCSVMHEALHNHYTQKSLSLSPGKGGGGQGGGGQGGGGQGGGGQGGGGQGGGGQCPPCPAPELLGGPSVFLFPPKPKDTLMISRTPEVTCVVVDVSHEEPEVKFNWYVDGVEVHNAKTKPCEEQYGSTYRCVSVLTVLHQDWLNGKEYKCKVSNKALPAPIEKTISKAKGQPREPQVYTLPPSREEMTKNQVSLTCLVKGFYPSDIAVEWESNGQPENNYKTTPPVLDSDGSFFLYSKLTVDKSRWQQGNVFSCSVMHEALHNHYTQKSLSLSPGK

SEQ ID NO: 2654 - protein, 485 aa, Artificial Sequence
  Synthetic
EVQLLESGGGLVQPGGSLRLSCAASGFTFSGHAMTWVRQAPGKCLEWLSTIYGSGGYTYYAGSVKGRFTISRDNSKNTLYLQMNSLRAEDTAVYYCAKVGGYDWYFDLWGRGTLVTVSSGGGGSGGGGSGGGGSSYELTQPPSVSVALGQTARITCGGHNIGSKNVHWYQQKPGQAPVLVIYRDTNRPSGIPERFSGSNSGNTATLTISRAQAGDEADYYCQLWDSTTVVFGCGTKLTVLSGGGGSQVQLVQSGAEVKKPGASVKVSCKTSGYPFTSYGISWVRQAPGQCLEWMGWISPYSGAPTYAQKVQGRVTMTTDTSTTTAYMELRSLRSDDTAVYYCVRDGLEEDYWGQGTLVTVSSGGGGSGGGGSGGGGSEIVLTQSPATLSVSPGEGATLSCRASQSVSSNLAWYQQSPGQAPRLLIYGASTRATGIPARFSGSGSGTEFTLTISSLQSEDFAVYYCQQYHSWPALTFGCGTKVDIK

SEQ ID NO: 2655 - protein, 485 aa, Artificial Sequence
  Synthetic
EVQLLESGGGLVQPGGSLRLSCAASGFTFSGHAMTWVRQAPGKCLEWLSTIYGSGGYTYYAGSVKGRFTISRDNSKNTLYLQMNSLRAEDTAVYYCAKVGGYDWYFDLWGRGTLVTVSSGGGGQGGGGQGGGGQSYELTQPPSVSVALGQTARITCGGHNIGSKNVHWYQQKPGQAPVLVIYRDTNRPSGIPERFSGSNSGNTATLTISRAQAGDEADYYCQLWDSTTVVFGCGTKLTVLSGGGGQQVQLVQSGAEVKKPGASVKVSCKTSGYPFTSYGISWVRQAPGQCLEWMGWISPYSGAPTYAQKVQGRVTMTTDTSTTTAYMELRSLRSDDTAVYYCVRDGLEEDYWGQGTLVTVSSGGGGQGGGGQGGGGQEIVLTQSPATLSVSPGEGATLSCRASQSVSSNLAWYQQSPGQAPRLLIYGASTRATGIPARFSGSGSGTEFTLTISSLQSEDFAVYYCQQYHSWPALTFGCGTKVDIK

SEQ ID NO: 2656 - protein, 740 aa, Artificial Sequence
  Synthetic
EVQLLESGGGLVQPGGSLRLSCAASGFTFSGHAMTWVRQAPGKCLEWLSTIYGSGGYTYYAGSVKGRFTISRDNSKNTLYLQMNSLRAEDTAVYYCAKVGGYDWYFDLWGRGTLVTVSSGGGGSGGGGSGGGGSSYELTQPPSVSVALGQTARITCGGHNIGSKNVHWYQQKPGQAPVLVIYRDTNRPSGIPERFSGSNSGNTATLTISRAQAGDEADYYCQLWDSTTVVFGCGTKLTVLSGGGGSQVQLVQSGAEVKKPGASVKVSCKTSGYPFTSYGISWVRQAPGQCLEWMGWISPYSGAPTYAQKVQGRVTMTTDTSTTTAYMELRSLRSDDTAVYYCVRDGLEEDYWGQGTLVTVSSGGGGSGGGGSGGGGSEIVLTQSPATLSVSPGEGATLSCRASQSVSSNLAWYQQSPGQAPRLLIYGASTRATGIPARFSGSGSGTEFTLTISSLQSEDFAVYYCQQYHSWPALTFGCGTKVDIKSGGGGSEVQLVESGGGLVQPGGSLKLSCAASGFTFNKYAMNWVRQAPGKGLEWVARIRSKYNNYATYYADSVKDRFTISRDDSKNTAYLQMNNLKTEDTAVYYCVRHGNFGNSYISYWAYWGQGTLVTVSSGGGGSGGGGSGGGGSQTVVTQEPSLTVSPGGTVTLTCGSSTGAVTSGNYPNWVQQKPGQAPRGLIGGTKFLAPGTPARFSGSLLGGKAALTLSGVQPEDEAEYYCVLWYSNRWVFGGGTKLTVL

SEQ ID NO: 2657 - protein, 740 aa, Artificial Sequence
  Synthetic
EVQLLESGGGLVQPGGSLRLSCAASGFTFSGHAMTWVRQAPGKCLEWLSTIYGSGGYTYYAGSVKGRFTISRDNSKNTLYLQMNSLRAEDTAVYYCAKVGGYDWYFDLWGRGTLVTVSSGGGGQGGGGQGGGGQSYELTQPPSVSVALGQTARITCGGHNIGSKNVHWYQQKPGQAPVLVIYRDTNRPSGIPERFSGSNSGNTATLTISRAQAGDEADYYCQLWDSTTVVFGCGTKLTVLSGGGGQQVQLVQSGAEVKKPGASVKVSCKTSGYPFTSYGISWVRQAPGQCLEWMGWISPYSGAPTYAQKVQGRVTMTTDTSTTTAYMELRSLRSDDTAVYYCVRDGLEEDYWGQGTLVTVSSGGGGQGGGGQGGGGQEIVLTQSPATLSVSPGEGATLSCRASQSVSSNLAWYQQSPGQAPRLLIYGASTRATGIPARFSGSGSGTEFTLTISSLQSEDFAVYYCQQYHSWPALTFGCGTKVDIKSGGGGQEVQLVESGGGLVQPGGSLKLSCAASGFTFNKYAMNWVRQAPGKGLEWVARIRSKYNNYATYYADSVKDRFTISRDDSKNTAYLQMNNLKTEDTAVYYCVRHGNFGNSYISYWAYWGQGTLVTVSSGGGGQGGGGQGGGGQQTVVTQEPSLTVSPGGTVTLTCGSSTGAVTSGNYPNWVQQKPGQAPRGLIGGTKFLAPGTPARFSGSLLGGKAALTLSGVQPEDEAEYYCVLWYSNRWVFGGGTKLTVL

SEQ ID NO: 2658 - protein, 740 aa, Artificial Sequence
  Synthetic
EVQLLESGGGLVQPGGSLRLSCAASGFTFSGHAMTWVRQAPGKCLEWLSTIYGSGGYTYYAGSVKGRFTISRDNSKNTLYLQMNSLRAEDTAVYYCAKVGGYDWYFDLWGRGTLVTVSSGGGGSGGGGSGGGGSSYELTQPPSVSVALGQTARITCGGHNIGSKNVHWYQQKPGQAPVLVIYRDTNRPSGIPERFSGSNSGNTATLTISRAQAGDEADYYCQLWDSTTVVFGCGTKLTVLSGGGGSQVQLVQSGAEVKKPGASVKVSCKTSGYPFTSYGISWVRQAPGQCLEWMGWISPYSGAPTYAQKVQGRVTMTTDTSTTTAYMELRSLRSDDTAVYYCVRDGLEEDYWGQGTLVTVSSGGGGSGGGGSGGGGSEIVLTQSPATLSVSPGEGATLSCRASQSVSSNLAWYQQSPGQAPRLLIYGASTRATGIPARFSGSGSGTEFTLTISSLQSEDFAVYYCQQYHSWPALTFGCGTKVDIKSGGGGSEVQLVESGGGLVQPGGSLKLSCAASGFTFNKYAINWVRQAPGKGLEWVARIRSKYNNYATYYADAVKDRFTISRDDSKNTVYLQMNNLKTEDTAVYYCARAGNFGSSYISYWAYWGQGTLVTVSSGGGGSGGGGSGGGGSQTVVTQEPSLTVSPGGTVTITCGSSTGAVTSGNYPNWVQKKPGQAPRGLIGGTKFLAPGTPARFSGSLSGGKAALTLSGVQPEDEAEYYCVLWYSNRWVFGSGTKLTVL

SEQ ID NO: 2659 - protein, 740 aa, Artificial Sequence
  Synthetic
EVQLLESGGGLVQPGGSLRLSCAASGFTFSGHAMTWVRQAPGKCLEWLSTIYGSGGYTYYAGSVKGRFTISRDNSKNTLYLQMNSLRAEDTAVYYCAKVGGYDWYFDLWGRGTLVTVSSGGGGQGGGGQGGGGQSYELTQPPSVSVALGQTARITCGGHNIGSKNVHWYQQKPGQAPVLVIYRDTNRPSGIPERFSGSNSGNTATLTISRAQAGDEADYYCQLWDSTTVVFGCGTKLTVLSGGGGQQVQLVQSGAEVKKPGASVKVSCKTSGYPFTSYGISWVRQAPGQCLEWMGWISPYSGAPTYAQKVQGRVTMTTDTSTTTAYMELRSLRSDDTAVYYCVRDGLEEDYWGQGTLVTVSSGGGGQGGGGQGGGGQEIVLTQSPATLSVSPGEGATLSCRASQSVSSNLAWYQQSPGQAPRLLIYGASTRATGIPARFSGSGSGTEFTLTISSLQSEDFAVYYCQQYHSWPALTFGCGTKVDIKSGGGGQEVQLVESGGGLVQPGGSLKLSCAASGFTFNKYAINWVRQAPGKGLEWVARIRSKYNNYATYYADAVKDRFTISRDDSKNTVYLQMNNLKTEDTAVYYCARAGNFGSSYISYWAYWGQGTLVTVSSGGGGQGGGGQGGGGQQTVVTQEPSLTVSPGGTVTITCGSSTGAVTSGNYPNWVQKKPGQAPRGLIGGTKFLAPGTPARFSGSLSGGKAALTLSGVQPEDEAEYYCVLWYSNRWVFGSGTKLTVL

SEQ ID NO: 2660 - protein, 1228 aa, Artificial Sequence
  Synthetic
EVQLLESGGGLVQPGGSLRLSCAASGFTFSGHAMTWVRQAPGKCLEWLSTIYGSGGYTYYAGSVKGRFTISRDNSKNTLYLQMNSLRAEDTAVYYCAKVGGYDWYFDLWGRGTLVTVSSGGGGSGGGGSGGGGSSYELTQPPSVSVALGQTARITCGGHNIGSKNVHWYQQKPGQAPVLVIYRDTNRPSGIPERFSGSNSGNTATLTISRAQAGDEADYYCQLWDSTTVVFGCGTKLTVLSGGGGSQVQLVQSGAEVKKPGASVKVSCKTSGYPFTSYGISWVRQAPGQCLEWMGWISPYSGAPTYAQKVQGRVTMTTDTSTTTAYMELRSLRSDDTAVYYCVRDGLEEDYWGQGTLVTVSSGGGGSGGGGSGGGGSEIVLTQSPATLSVSPGEGATLSCRASQSVSSNLAWYQQSPGQAPRLLIYGASTRATGIPARFSGSGSGTEFTLTISSLQSEDFAVYYCQQYHSWPALTFGCGTKVDIKSGGGGSEVQLVESGGGLVQPGGSLKLSCAASGFTFNKYAMNWVRQAPGKGLEWVARIRSKYNNYATYYADSVKDRFTISRDDSKNTAYLQMNNLKTEDTAVYYCVRHGNFGNSYISYWAYWGQGTLVTVSSGGGGSGGGGSGGGGSQTVVTQEPSLTVSPGGTVTLTCGSSTGAVTSGNYPNWVQQKPGQAPRGLIGGTKFLAPGTPARFSGSLLGGKAALTLSGVQPEDEAEYYCVLWYSNRWVFGGGTKLTVLGGGGDKTHTCPPCPAPELLGGPSVFLFPPKPKDTLMISRTPEVTCVVVDVSHEDPEVKFNWYVDGVEVHNAKTKPCEEQYGSTYRCVSVLTVLHQDWLNGKEYKCKVSNKALPAPIEKTISKAKGQPREPQVYTLPPSREEMTKNQVSLTCLVKGFYPSDIAVEWESNGQPENNYKTTPPVLDSDGSFFLYSKLTVDKSRWQQGNVFSCSVMHEALHNHYTQKSLSLSPGKGGGGSGGGGSGGGGSGGGGSGGGGSGGGGSDKTHTCPPCPAPELLGGPSVFLFPPKPKDTLMISRTPEVTCVVVDVSHEDPEVKFNWYVDGVEVHNAKTKPCEEQYGSTYRCVSVLTVLHQDWLNGKEYKCKVSNKALPAPIEKTISKAKGQPREPQVYTLPPSREEMTKNQVSLTCLVKGFYPSDIAVEWESNGQPENNYKTTPPVLDSDGSFFLYSKLTVDKSRWQQGNVFSCSVMHEALHNHYTQKSLSLSPGK

SEQ ID NO: 2661 - protein, 1218 aa, Artificial Sequence
  Synthetic
EVQLLESGGGLVQPGGSLRLSCAASGFTFSGHAMTWVRQAPGKCLEWLSTIYGSGGYTYYAGSVKGRFTISRDNSKNTLYLQMNSLRAEDTAVYYCAKVGGYDWYFDLWGRGTLVTVSSGGGGQGGGGQGGGGQSYELTQPPSVSVALGQTARITCGGHNIGSKNVHWYQQKPGQAPVLVIYRDTNRPSGIPERFSGSNSGNTATLTISRAQAGDEADYYCQLWDSTTVVFGCGTKLTVLSGGGGQQVQLVQSGAEVKKPGASVKVSCKTSGYPFTSYGISWVRQAPGQCLEWMGWISPYSGAPTYAQKVQGRVTMTTDTSTTTAYMELRSLRSDDTAVYYCVRDGLEEDYWGQGTLVTVSSGGGGQGGGGQGGGGQEIVLTQSPATLSVSPGEGATLSCRASQSVSSNLAWYQQSPGQAPRLLIYGASTRATGIPARFSGSGSGTEFTLTISSLQSEDFAVYYCQQYHSWPALTFGCGTKVDIKSGGGGQEVQLVESGGGLVQPGGSLKLSCAASGFTFNKYAMNWVRQAPGKGLEWVARIRSKYNNYATYYADSVKDRFTISRDDSKNTAYLQMNNLKTEDTAVYYCVRHGNFGNSYISYWAYWGQGTLVTVSSGGGGQGGGGQGGGGQQTVVTQEPSLTVSPGGTVTLTCGSSTGAVTSGNYPNWVQQKPGQAPRGLIGGTKFLAPGTPARFSGSLLGGKAALTLSGVQPEDEAEYYCVLWYSNRWVFGGGTKLTVLGGGGCPPCPAPELLGGPSVFLFPPKPKDTLMISRTPEVTCVVVDVSHEEPEVKFNWYVDGVEVHNAKTKPCEEQYGSTYRCVSVLTVLHQDWLNGKEYKCKVSNKALPAPIEKTISKAKGQPREPQVYTLPPSREEMTKNQVSLTCLVKGFYPSDIAVEWESNGQPENNYKTTPPVLDSDGSFFLYSKLTVDKSRWQQGNVFSCSVMHEALHNHYTQKSLSLSPGKGGGGQGGGGQGGGGQGGGGQGGGGQGGGGQCPPCPAPELLGGPSVFLFPPKPKDTLMISRTPEVTCVVVDVSHEEPEVKFNWYVDGVEVHNAKTKPCEEQYGSTYRCVSVLTVLHQDWLNGKEYKCKVSNKALPAPIEKTISKAKGQPREPQVYTLPPSREEMTKNQVSLTCLVKGFYPSDIAVEWESNGQPENNYKTTPPVLDSDGSFFLYSKLTVDKSRWQQGNVFSCSVMHEALHNHYTQKSLSLSPGK

SEQ ID NO: 2662 - protein, 1228 aa, Artificial Sequence
  Synthetic
EVQLLESGGGLVQPGGSLRLSCAASGFTFSGHAMTWVRQAPGKCLEWLSTIYGSGGYTYYAGSVKGRFTISRDNSKNTLYLQMNSLRAEDTAVYYCAKVGGYDWYFDLWGRGTLVTVSSGGGGSGGGGSGGGGSSYELTQPPSVSVALGQTARITCGGHNIGSKNVHWYQQKPGQAPVLVIYRDTNRPSGIPERFSGSNSGNTATLTISRAQAGDEADYYCQLWDSTTVVFGCGTKLTVLSGGGGSQVQLVQSGAEVKKPGASVKVSCKTSGYPFTSYGISWVRQAPGQCLEWMGWISPYSGAPTYAQKVQGRVTMTTDTSTTTAYMELRSLRSDDTAVYYCVRDGLEEDYWGQGTLVTVSSGGGGSGGGGSGGGGSEIVLTQSPATLSVSPGEGATLSCRASQSVSSNLAWYQQSPGQAPRLLIYGASTRATGIPARFSGSGSGTEFTLTISSLQSEDFAVYYCQQYHSWPALTFGCGTKVDIKSGGGGSEVQLVESGGGLVQPGGSLKLSCAASGFTFNKYAINWVRQAPGKGLEWVARIRSKYNNYATYYADAVKDRFTISRDDSKNTVYLQMNNLKTEDTAVYYCARAGNFGSSYISYWAYWGQGTLVTVSSGGGGSGGGGSGGGGSQTVVTQEPSLTVSPGGTVTITCGSSTGAVTSGNYPNWVQKKPGQAPRGLIGGTKFLAPGTPARFSGSLSGGKAALTLSGVQPEDEAEYYCVLWYSNRWVFGSGTKLTVLGGGGDKTHTCPPCPAPELLGGPSVFLFPPKPKDTLMISRTPEVTCVVVDVSHEDPEVKFNWYVDGVEVHNAKTKPCEEQYGSTYRCVSVLTVLHQDWLNGKEYKCKVSNKALPAPIEKTISKAKGQPREPQVYTLPPSREEMTKNQVSLTCLVKGFYPSDIAVEWESNGQPENNYKTTPPVLDSDGSFFLYSKLTVDKSRWQQGNVFSCSVMHEALHNHYTQKSLSLSPGKGGGGSGGGGSGGGGSGGGGSGGGGSGGGGSDKTHTCPPCPAPELLGGPSVFLFPPKPKDTLMISRTPEVTCVVVDVSHEDPEVKFNWYVDGVEVHNAKTKPCEEQYGSTYRCVSVLTVLHQDWLNGKEYKCKVSNKALPAPIEKTISKAKGQPREPQVYTLPPSREEMTKNQVSLTCLVKGFYPSDIAVEWESNGQPENNYKTTPPVLDSDGSFFLYSKLTVDKSRWQQGNVFSCSVMHEALHNHYTQKSLSLSPGK

SEQ ID NO: 2663 - protein, 1218 aa, Artificial Sequence
  Synthetic
EVQLLESGGGLVQPGGSLRLSCAASGFTFSGHAMTWVRQAPGKCLEWLSTIYGSGGYTYYAGSVKGRFTISRDNSKNTLYLQMNSLRAEDTAVYYCAKVGGYDWYFDLWGRGTLVTVSSGGGGQGGGGQGGGGQSYELTQPPSVSVALGQTARITCGGHNIGSKNVHWYQQKPGQAPVLVIYRDTNRPSGIPERFSGSNSGNTATLTISRAQAGDEADYYCQLWDSTTVVFGCGTKLTVLSGGGGQQVQLVQSGAEVKKPGASVKVSCKTSGYPFTSYGISWVRQAPGQCLEWMGWISPYSGAPTYAQKVQGRVTMTTDTSTTTAYMELRSLRSDDTAVYYCVRDGLEEDYWGQGTLVTVSSGGGGQGGGGQGGGGQEIVLTQSPATLSVSPGEGATLSCRASQSVSSNLAWYQQSPGQAPRLLIYGASTRATGIPARFSGSGSGTEFTLTISSLQSEDFAVYYCQQYHSWPALTFGCGTKVDIKSGGGGQEVQLVESGGGLVQPGGSLKLSCAASGFTFNKYAINWVRQAPGKGLEWVARIRSKYNNYATYYADAVKDRFTISRDDSKNTVYLQMNNLKTEDTAVYYCARAGNFGSSYISYWAYWGQGTLVTVSSGGGGQGGGGQGGGGQQTVVTQEPSLTVSPGGTVTITCGSSTGAVTSGNYPNWVQKKPGQAPRGLIGGTKFLAPGTPARFSGSLSGGKAALTLSGVQPEDEAEYYCVLWYSNRWVFGSGTKLTVLGGGGCPPCPAPELLGGPSVFLFPPKPKDTLMISRTPEVTCVVVDVSHEEPEVKFNWYVDGVEVHNAKTKPCEEQYGSTYRCVSVLTVLHQDWLNGKEYKCKVSNKALPAPIEKTISKAKGQPREPQVYTLPPSREEMTKNQVSLTCLVKGFYPSDIAVEWESNGQPENNYKTTPPVLDSDGSFFLYSKLTVDKSRWQQGNVFSCSVMHEALHNHYTQKSLSLSPGKGGGGQGGGGQGGGGQGGGGQGGGGQGGGGQCPPCPAPELLGGPSVFLFPPKPKDTLMISRTPEVTCVVVDVSHEEPEVKFNWYVDGVEVHNAKTKPCEEQYGSTYRCVSVLTVLHQDWLNGKEYKCKVSNKALPAPIEKTISKAKGQPREPQVYTLPPSREEMTKNQVSLTCLVKGFYPSDIAVEWESNGQPENNYKTTPPVLDSDGSFFLYSKLTVDKSRWQQGNVFSCSVMHEALHNHYTQKSLSLSPGK

SEQ ID NO: 2664 - protein, 485 aa, Artificial Sequence
  Synthetic
EVQLLESGGGLVQPGGSLRLSCAASGFTFSGHAMTWVRQAPGKCLEWLSTIYGSGGYTYYAGSVKGRFTISRDNSKNTLYLQMNSLRAEDTAVYYCAKVGGYDWYFDLWGRGTLVTVSSGGGGSGGGGSGGGGSSYELTQPPSVSVALGQTARITCGGHNIGSKNVHWYQQKPGQAPVLVIYRDTNRPSGIPERFSGSNSGNTATLTISRAQAGDEADYYCQLWDSTTVVFGCGTKLTVLSGGGGSQVQLVQSGAEVKKPGASVKVSCKASGYTFNNYGISWVRQAPGQCLEWMGWISAYNGKTSYAQKFQGRVTMTTDTSTGTAYMELRSLRSDDTAVYYCARSTGDGEYWGQGTLVTVSSGGGGSGGGGSGGGGSEIVMTQSPATLSVSPGERATLSCRASQSVSSNLAWYQQKPGQAPRLLIYGASTRATGIPARFSGGGSGTEFTLTISSLQSEDFAVYYCQQYHTWPVLTFGCGTKVEIK

SEQ ID NO: 2665 - protein, 485 aa, Artificial Sequence
  Synthetic
EVQLLESGGGLVQPGGSLRLSCAASGFTFSGHAMTWVRQAPGKCLEWLSTIYGSGGYTYYAGSVKGRFTISRDNSKNTLYLQMNSLRAEDTAVYYCAKVGGYDWYFDLWGRGTLVTVSSGGGGQGGGGQGGGGQSYELTQPPSVSVALGQTARITCGGHNIGSKNVHWYQQKPGQAPVLVIYRDTNRPSGIPERFSGSNSGNTATLTISRAQAGDEADYYCQLWDSTTVVFGCGTKLTVLSGGGGQQVQLVQSGAEVKKPGASVKVSCKASGYTFNNYGISWVRQAPGQCLEWMGWISAYNGKTSYAQKFQGRVTMTTDTSTGTAYMELRSLRSDDTAVYYCARSTGDGEYWGQGTLVTVSSGGGGQGGGGQGGGGQEIVMTQSPATLSVSPGERATLSCRASQSVSSNLAWYQQKPGQAPRLLIYGASTRATGIPARFSGGGSGTEFTLTISSLQSEDFAVYYCQQYHTWPVLTFGCGTKVEIK

SEQ ID NO: 2666 - protein, 740 aa, Artificial Sequence
  Synthetic
EVQLLESGGGLVQPGGSLRLSCAASGFTFSGHAMTWVRQAPGKCLEWLSTIYGSGGYTYYAGSVKGRFTISRDNSKNTLYLQMNSLRAEDTAVYYCAKVGGYDWYFDLWGRGTLVTVSSGGGGSGGGGSGGGGSSYELTQPPSVSVALGQTARITCGGHNIGSKNVHWYQQKPGQAPVLVIYRDTNRPSGIPERFSGSNSGNTATLTISRAQAGDEADYYCQLWDSTTVVFGCGTKLTVLSGGGGSQVQLVQSGAEVKKPGASVKVSCKASGYTFNNYGISWVRQAPGQCLEWMGWISAYNGKTSYAQKFQGRVTMTTDTSTGTAYMELRSLRSDDTAVYYCARSTGDGEYWGQGTLVTVSSGGGGSGGGGSGGGGSEIVMTQSPATLSVSPGERATLSCRASQSVSSNLAWYQQKPGQAPRLLIYGASTRATGIPARFSGGGSGTEFTLTISSLQSEDFAVYYCQQYHTWPVLTFGCGTKVEIKSGGGGSEVQLVESGGGLVQPGGSLKLSCAASGFTFNKYAMNWVRQAPGKGLEWVARIRSKYNNYATYYADSVKDRFTISRDDSKNTAYLQMNNLKTEDTAVYYCVRHGNFGNSYISYWAYWGQGTLVTVSSGGGGSGGGGSGGGGSQTVVTQEPSLTVSPGGTVTLTCGSSTGAVTSGNYPNWVQQKPGQAPRGLIGGTKFLAPGTPARFSGSLLGGKAALTLSGVQPEDEAEYYCVLWYSNRWVFGGGTKLTVL

SEQ ID NO: 2667 - protein, 740 aa, Artificial Sequence
  Synthetic
EVQLLESGGGLVQPGGSLRLSCAASGFTFSGHAMTWVRQAPGKCLEWLSTIYGSGGYTYYAGSVKGRFTISRDNSKNTLYLQMNSLRAEDTAVYYCAKVGGYDWYFDLWGRGTLVTVSSGGGGQGGGGQGGGGQSYELTQPPSVSVALGQTARITCGGHNIGSKNVHWYQQKPGQAPVLVIYRDTNRPSGIPERFSGSNSGNTATLTISRAQAGDEADYYCQLWDSTTVVFGCGTKLTVLSGGGGQQVQLVQSGAEVKKPGASVKVSCKASGYTFNNYGISWVRQAPGQCLEWMGWISAYNGKTSYAQKFQGRVTMTTDTSTGTAYMELRSLRSDDTAVYYCARSTGDGEYWGQGTLVTVSSGGGGQGGGGQGGGGQEIVMTQSPATLSVSPGERATLSCRASQSVSSNLAWYQQKPGQAPRLLIYGASTRATGIPARFSGGGSGTEFTLTISSLQSEDFAVYYCQQYHTWPVLTFGCGTKVEIKSGGGGQEVQLVESGGGLVQPGGSLKLSCAASGFTFNKYAMNWVRQAPGKGLEWVARIRSKYNNYATYYADSVKDRFTISRDDSKNTAYLQMNNLKTEDTAVYYCVRHGNFGNSYISYWAYWGQGTLVTVSSGGGGQGGGGQGGGGQQTVVTQEPSLTVSPGGTVTLTCGSSTGAVTSGNYPNWVQQKPGQAPRGLIGGTKFLAPGTPARFSGSLLGGKAALTLSGVQPEDEAEYYCVLWYSNRWVFGGGTKLTVL

SEQ ID NO: 2668 - protein, 740 aa, Artificial Sequence
  Synthetic
EVQLLESGGGLVQPGGSLRLSCAASGFTFSGHAMTWVRQAPGKCLEWLSTIYGSGGYTYYAGSVKGRFTISRDNSKNTLYLQMNSLRAEDTAVYYCAKVGGYDWYFDLWGRGTLVTVSSGGGGSGGGGSGGGGSSYELTQPPSVSVALGQTARITCGGHNIGSKNVHWYQQKPGQAPVLVIYRDTNRPSGIPERFSGSNSGNTATLTISRAQAGDEADYYCQLWDSTTVVFGCGTKLTVLSGGGGSQVQLVQSGAEVKKPGASVKVSCKASGYTFNNYGISWVRQAPGQCLEWMGWISAYNGKTSYAQKFQGRVTMTTDTSTGTAYMELRSLRSDDTAVYYCARSTGDGEYWGQGTLVTVSSGGGGSGGGGSGGGGSEIVMTQSPATLSVSPGERATLSCRASQSVSSNLAWYQQKPGQAPRLLIYGASTRATGIPARFSGGGSGTEFTLTISSLQSEDFAVYYCQQYHTWPVLTFGCGTKVEIKSGGGGSEVQLVESGGGLVQPGGSLKLSCAASGFTFNKYAINWVRQAPGKGLEWVARIRSKYNNYATYYADAVKDRFTISRDDSKNTVYLQMNNLKTEDTAVYYCARAGNFGSSYISYWAYWGQGTLVTVSSGGGGSGGGGSGGGGSQTVVTQEPSLTVSPGGTVTITCGSSTGAVTSGNYPNWVQKKPGQAPRGLIGGTKFLAPGTPARFSGSLSGGKAALTLSGVQPEDEAEYYCVLWYSNRWVFGSGTKLTVL

SEQ ID NO: 2669 - protein, 740 aa, Artificial Sequence
  Synthetic
EVQLLESGGGLVQPGGSLRLSCAASGFTFSGHAMTWVRQAPGKCLEWLSTIYGSGGYTYYAGSVKGRFTISRDNSKNTLYLQMNSLRAEDTAVYYCAKVGGYDWYFDLWGRGTLVTVSSGGGGQGGGGQGGGGQSYELTQPPSVSVALGQTARITCGGHNIGSKNVHWYQQKPGQAPVLVIYRDTNRPSGIPERFSGSNSGNTATLTISRAQAGDEADYYCQLWDSTTVVFGCGTKLTVLSGGGGQQVQLVQSGAEVKKPGASVKVSCKASGYTFNNYGISWVRQAPGQCLEWMGWISAYNGKTSYAQKFQGRVTMTTDTSTGTAYMELRSLRSDDTAVYYCARSTGDGEYWGQGTLVTVSSGGGGQGGGGQGGGGQEIVMTQSPATLSVSPGERATLSCRASQSVSSNLAWYQQKPGQAPRLLIYGASTRATGIPARFSGGGSGTEFTLTISSLQSEDFAVYYCQQYHTWPVLTFGCGTKVEIKSGGGGQEVQLVESGGGLVQPGGSLKLSCAASGFTFNKYAINWVRQAPGKGLEWVARIRSKYNNYATYYADAVKDRFTISRDDSKNTVYLQMNNLKTEDTAVYYCARAGNFGSSYISYWAYWGQGTLVTVSSGGGGQGGGGQGGGGQQTVVTQEPSLTVSPGGTVTITCGSSTGAVTSGNYPNWVQKKPGQAPRGLIGGTKFLAPGTPARFSGSLSGGKAALTLSGVQPEDEAEYYCVLWYSNRWVFGSGTKLTVL

SEQ ID NO: 2670 - protein, 1228 aa, Artificial Sequence
  Synthetic
EVQLLESGGGLVQPGGSLRLSCAASGFTFSGHAMTWVRQAPGKCLEWLSTIYGSGGYTYYAGSVKGRFTISRDNSKNTLYLQMNSLRAEDTAVYYCAKVGGYDWYFDLWGRGTLVTVSSGGGGSGGGGSGGGGSSYELTQPPSVSVALGQTARITCGGHNIGSKNVHWYQQKPGQAPVLVIYRDTNRPSGIPERFSGSNSGNTATLTISRAQAGDEADYYCQLWDSTTVVFGCGTKLTVLSGGGGSQVQLVQSGAEVKKPGASVKVSCKASGYTFNNYGISWVRQAPGQCLEWMGWISAYNGKTSYAQKFQGRVTMTTDTSTGTAYMELRSLRSDDTAVYYCARSTGDGEYWGQGTLVTVSSGGGGSGGGGSGGGGSEIVMTQSPATLSVSPGERATLSCRASQSVSSNLAWYQQKPGQAPRLLIYGASTRATGIPARFSGGGSGTEFTLTISSLQSEDFAVYYCQQYHTWPVLTFGCGTKVEIKSGGGGSEVQLVESGGGLVQPGGSLKLSCAASGFTFNKYAMNWVRQAPGKGLEWVARIRSKYNNYATYYADSVKDRFTISRDDSKNTAYLQMNNLKTEDTAVYYCVRHGNFGNSYISYWAYWGQGTLVTVSSGGGGSGGGGSGGGGSQTVVTQEPSLTVSPGGTVTLTCGSSTGAVTSGNYPNWVQQKPGQAPRGLIGGTKFLAPGTPARFSGSLLGGKAALTLSGVQPEDEAEYYCVLWYSNRWVFGGGTKLTVLGGGGDKTHTCPPCPAPELLGGPSVFLFPPKPKDTLMISRTPEVTCVVVDVSHEDPEVKFNWYVDGVEVHNAKTKPCEEQYGSTYRCVSVLTVLHQDWLNGKEYKCKVSNKALPAPIEKTISKAKGQPREPQVYTLPPSREEMTKNQVSLTCLVKGFYPSDIAVEWESNGQPENNYKTTPPVLDSDGSFFLYSKLTVDKSRWQQGNVFSCSVMHEALHNHYTQKSLSLSPGKGGGGSGGGGSGGGGSGGGGSGGGGSGGGGSDKTHTCPPCPAPELLGGPSVFLFPPKPKDTLMISRTPEVTCVVVDVSHEDPEVKFNWYVDGVEVHNAKTKPCEEQYGSTYRCVSVLTVLHQDWLNGKEYKCKVSNKALPAPIEKTISKAKGQPREPQVYTLPPSREEMTKNQVSLTCLVKGFYPSDIAVEWESNGQPENNYKTTPPVLDSDGSFFLYSKLTVDKSRWQQGNVFSCSVMHEALHNHYTQKSLSLSPGK

SEQ ID NO: 2671 - protein, 1218 aa, Artificial Sequence
  Synthetic
EVQLLESGGGLVQPGGSLRLSCAASGFTFSGHAMTWVRQAPGKCLEWLSTIYGSGGYTYYAGSVKGRFTISRDNSKNTLYLQMNSLRAEDTAVYYCAKVGGYDWYFDLWGRGTLVTVSSGGGGQGGGGQGGGGQSYELTQPPSVSVALGQTARITCGGHNIGSKNVHWYQQKPGQAPVLVIYRDTNRPSGIPERFSGSNSGNTATLTISRAQAGDEADYYCQLWDSTTVVFGCGTKLTVLSGGGGQQVQLVQSGAEVKKPGASVKVSCKASGYTFNNYGISWVRQAPGQCLEWMGWISAYNGKTSYAQKFQGRVTMTTDTSTGTAYMELRSLRSDDTAVYYCARSTGDGEYWGQGTLVTVSSGGGGQGGGGQGGGGQEIVMTQSPATLSVSPGERATLSCRASQSVSSNLAWYQQKPGQAPRLLIYGASTRATGIPARFSGGGSGTEFTLTISSLQSEDFAVYYCQQYHTWPVLTFGCGTKVEIKSGGGGQEVQLVESGGGLVQPGGSLKLSCAASGFTFNKYAMNWVRQAPGKGLEWVARIRSKYNNYATYYADSVKDRFTISRDDSKNTAYLQMNNLKTEDTAVYYCVRHGNFGNSYISYWAYWGQGTLVTVSSGGGGQGGGGQGGGGQQTVVTQEPSLTVSPGGTVTLTCGSSTGAVTSGNYPNWVQQKPGQAPRGLIGGTKFLAPGTPARFSGSLLGGKAALTLSGVQPEDEAEYYCVLWYSNRWVFGGGTKLTVLGGGGCPPCPAPELLGGPSVFLFPPKPKDTLMISRTPEVTCVVVDVSHEEPEVKFNWYVDGVEVHNAKTKPCEEQYGSTYRCVSVLTVLHQDWLNGKEYKCKVSNKALPAPIEKTISKAKGQPREPQVYTLPPSREEMTKNQVSLTCLVKGFYPSDIAVEWESNGQPENNYKTTPPVLDSDGSFFLYSKLTVDKSRWQQGNVFSCSVMHEALHNHYTQKSLSLSPGKGGGGQGGGGQGGGGQGGGGQGGGGQGGGGQCPPCPAPELLGGPSVFLFPPKPKDTLMISRTPEVTCVVVDVSHEEPEVKFNWYVDGVEVHNAKTKPCEEQYGSTYRCVSVLTVLHQDWLNGKEYKCKVSNKALPAPIEKTISKAKGQPREPQVYTLPPSREEMTKNQVSLTCLVKGFYPSDIAVEWESNGQPENNYKTTPPVLDSDGSFFLYSKLTVDKSRWQQGNVFSCSVMHEALHNHYTQKSLSLSPGK

SEQ ID NO: 2672 - protein, 1228 aa, Artificial Sequence
  Synthetic
EVQLLESGGGLVQPGGSLRLSCAASGFTFSGHAMTWVRQAPGKCLEWLSTIYGSGGYTYYAGSVKGRFTISRDNSKNTLYLQMNSLRAEDTAVYYCAKVGGYDWYFDLWGRGTLVTVSSGGGGSGGGGSGGGGSSYELTQPPSVSVALGQTARITCGGHNIGSKNVHWYQQKPGQAPVLVIYRDTNRPSGIPERFSGSNSGNTATLTISRAQAGDEADYYCQLWDSTTVVFGCGTKLTVLSGGGGSQVQLVQSGAEVKKPGASVKVSCKASGYTFNNYGISWVRQAPGQCLEWMGWISAYNGKTSYAQKFQGRVTMTTDTSTGTAYMELRSLRSDDTAVYYCARSTGDGEYWGQGTLVTVSSGGGGSGGGGSGGGGSEIVMTQSPATLSVSPGERATLSCRASQSVSSNLAWYQQKPGQAPRLLIYGASTRATGIPARFSGGGSGTEFTLTISSLQSEDFAVYYCQQYHTWPVLTFGCGTKVEIKSGGGGSEVQLVESGGGLVQPGGSLKLSCAASGFTFNKYAINWVRQAPGKGLEWVARIRSKYNNYATYYADAVKDRFTISRDDSKNTVYLQMNNLKTEDTAVYYCARAGNFGSSYISYWAYWGQGTLVTVSSGGGGSGGGGSGGGGSQTVVTQEPSLTVSPGGTVTITCGSSTGAVTSGNYPNWVQKKPGQAPRGLIGGTKFLAPGTPARFSGSLSGGKAALTLSGVQPEDEAEYYCVLWYSNRWVFGSGTKLTVLGGGGDKTHTCPPCPAPELLGGPSVFLFPPKPKDTLMISRTPEVTCVVVDVSHEDPEVKFNWYVDGVEVHNAKTKPCEEQYGSTYRCVSVLTVLHQDWLNGKEYKCKVSNKALPAPIEKTISKAKGQPREPQVYTLPPSREEMTKNQVSLTCLVKGFYPSDIAVEWESNGQPENNYKTTPPVLDSDGSFFLYSKLTVDKSRWQQGNVFSCSVMHEALHNHYTQKSLSLSPGKGGGGSGGGGSGGGGSGGGGSGGGGSGGGGSDKTHTCPPCPAPELLGGPSVFLFPPKPKDTLMISRTPEVTCVVVDVSHEDPEVKFNWYVDGVEVHNAKTKPCEEQYGSTYRCVSVLTVLHQDWLNGKEYKCKVSNKALPAPIEKTISKAKGQPREPQVYTLPPSREEMTKNQVSLTCLVKGFYPSDIAVEWESNGQPENNYKTTPPVLDSDGSFFLYSKLTVDKSRWQQGNVFSCSVMHEALHNHYTQKSLSLSPGK

SEQ ID NO: 2673 - protein, 1218 aa, Artificial Sequence
  Synthetic
EVQLLESGGGLVQPGGSLRLSCAASGFTFSGHAMTWVRQAPGKCLEWLSTIYGSGGYTYYAGSVKGRFTISRDNSKNTLYLQMNSLRAEDTAVYYCAKVGGYDWYFDLWGRGTLVTVSSGGGGQGGGGQGGGGQSYELTQPPSVSVALGQTARITCGGHNIGSKNVHWYQQKPGQAPVLVIYRDTNRPSGIPERFSGSNSGNTATLTISRAQAGDEADYYCQLWDSTTVVFGCGTKLTVLSGGGGQQVQLVQSGAEVKKPGASVKVSCKASGYTFNNYGISWVRQAPGQCLEWMGWISAYNGKTSYAQKFQGRVTMTTDTSTGTAYMELRSLRSDDTAVYYCARSTGDGEYWGQGTLVTVSSGGGGQGGGGQGGGGQEIVMTQSPATLSVSPGERATLSCRASQSVSSNLAWYQQKPGQAPRLLIYGASTRATGIPARFSGGGSGTEFTLTISSLQSEDFAVYYCQQYHTWPVLTFGCGTKVEIKSGGGGQEVQLVESGGGLVQPGGSLKLSCAASGFTFNKYAINWVRQAPGKGLEWVARIRSKYNNYATYYADAVKDRFTISRDDSKNTVYLQMNNLKTEDTAVYYCARAGNFGSSYISYWAYWGQGTLVTVSSGGGGQGGGGQGGGGQQTVVTQEPSLTVSPGGTVTITCGSSTGAVTSGNYPNWVQKKPGQAPRGLIGGTKFLAPGTPARFSGSLSGGKAALTLSGVQPEDEAEYYCVLWYSNRWVFGSGTKLTVLGGGGCPPCPAPELLGGPSVFLFPPKPKDTLMISRTPEVTCVVVDVSHEEPEVKFNWYVDGVEVHNAKTKPCEEQYGSTYRCVSVLTVLHQDWLNGKEYKCKVSNKALPAPIEKTISKAKGQPREPQVYTLPPSREEMTKNQVSLTCLVKGFYPSDIAVEWESNGQPENNYKTTPPVLDSDGSFFLYSKLTVDKSRWQQGNVFSCSVMHEALHNHYTQKSLSLSPGKGGGGQGGGGQGGGGQGGGGQGGGGQGGGGQCPPCPAPELLGGPSVFLFPPKPKDTLMISRTPEVTCVVVDVSHEEPEVKFNWYVDGVEVHNAKTKPCEEQYGSTYRCVSVLTVLHQDWLNGKEYKCKVSNKALPAPIEKTISKAKGQPREPQVYTLPPSREEMTKNQVSLTCLVKGFYPSDIAVEWESNGQPENNYKTTPPVLDSDGSFFLYSKLTVDKSRWQQGNVFSCSVMHEALHNHYTQKSLSLSPGK

SEQ ID NO: 2674 - protein, 494 aa, Artificial Sequence
  Synthetic
EVQLLESGGGLVQPGGSLRLSCAASGFTFSGHAMTWVRQAPGKCLEWLSTIYGSGGYTYYAGSVKGRFTISRDNSKNTLYLQMNSLRAEDTAVYYCAKVGGYDWYFDLWGRGTLVTVSSGGGGSGGGGSGGGGSSYELTQPPSVSVALGQTARITCGGHNIGSKNVHWYQQKPGQAPVLVIYRDTNRPSGIPERFSGSNSGNTATLTISRAQAGDEADYYCQLWDSTTVVFGCGTKLTVLSGGGGSQVQLQQSGPGLVKPSQTLSLTCAISGDSVSSKSAAWNWIRQSPSGCLEWLGRTFYRSTWYNDYAVSVKSRITINPDTSKNQFSLQLNSVIPEDTAVYYCAREGQWLVYGMDVWGQGTTVTVSSGGGGSGGGGSGGGGSQSVLTQPPSASGTPGQRITISCSGSSSNIGSNTVNWYQQLPGTAPKLLIYRNNQRPSGVPDRFSGSKSGTSASLAISGLQSEDEADYYCAAWDDSLNGRVFGCGTKLTVL

SEQ ID NO: 2675 - protein, 494 aa, Artificial Sequence
  Synthetic
EVQLLESGGGLVQPGGSLRLSCAASGFTFSGHAMTWVRQAPGKCLEWLSTIYGSGGYTYYAGSVKGRFTISRDNSKNTLYLQMNSLRAEDTAVYYCAKVGGYDWYFDLWGRGTLVTVSSGGGGQGGGGQGGGGQSYELTQPPSVSVALGQTARITCGGHNIGSKNVHWYQQKPGQAPVLVIYRDTNRPSGIPERFSGSNSGNTATLTISRAQAGDEADYYCQLWDSTTVVFGCGTKLTVLSGGGGQQVQLQQSGPGLVKPSQTLSLTCAISGDSVSSKSAAWNWIRQSPSGCLEWLGRTFYRSTWYNDYAVSVKSRITINPDTSKNQFSLQLNSVIPEDTAVYYCAREGQWLVYGMDVWGQGTTVTVSSGGGGQGGGGQGGGGQQSVLTQPPSASGTPGQRITISCSGSSSNIGSNTVNWYQQLPGTAPKLLIYRNNQRPSGVPDRFSGSKSGTSASLAISGLQSEDEADYYCAAWDDSLNGRVFGCGTKLTVL

SEQ ID NO: 2676 - protein, 749 aa, Artificial Sequence
  Synthetic
EVQLLESGGGLVQPGGSLRLSCAASGFTFSGHAMTWVRQAPGKCLEWLSTIYGSGGYTYYAGSVKGRFTISRDNSKNTLYLQMNSLRAEDTAVYYCAKVGGYDWYFDLWGRGTLVTVSSGGGGSGGGGSGGGGSSYELTQPPSVSVALGQTARITCGGHNIGSKNVHWYQQKPGQAPVLVIYRDTNRPSGIPERFSGSNSGNTATLTISRAQAGDEADYYCQLWDSTTVVFGCGTKLTVLSGGGGSQVQLQQSGPGLVKPSQTLSLTCAISGDSVSSKSAAWNWIRQSPSGCLEWLGRTFYRSTWYNDYAVSVKSRITINPDTSKNQFSLQLNSVIPEDTAVYYCAREGQWLVYGMDVWGQGTTVTVSSGGGGSGGGGSGGGGSQSVLTQPPSASGTPGQRITISCSGSSSNIGSNTVNWYQQLPGTAPKLLIYRNNQRPSGVPDRFSGSKSGTSASLAISGLQSEDEADYYCAAWDDSLNGRVFGCGTKLTVLSGGGGSEVQLVESGGGLVQPGGSLKLSCAASGFTFNKYAMNWVRQAPGKGLEWVARIRSKYNNYATYYADSVKDRFTISRDDSKNTAYLQMNNLKTEDTAVYYCVRHGNFGNSYISYWAYWGQGTLVTVSSGGGGSGGGGSGGGGSQTVVTQEPSLTVSPGGTVTLTCGSSTGAVTSGNYPNWVQQKPGQAPRGLIGGTKFLAPGTPARFSGSLLGGKAALTLSGVQPEDEAEYYCVLWYSNRWVFGGGTKLTVL

SEQ ID NO: 2677 - protein, 749 aa, Artificial Sequence
  Synthetic
EVQLLESGGGLVQPGGSLRLSCAASGFTFSGHAMTWVRQAPGKCLEWLSTIYGSGGYTYYAGSVKGRFTISRDNSKNTLYLQMNSLRAEDTAVYYCAKVGGYDWYFDLWGRGTLVTVSSGGGGQGGGGQGGGGQSYELTQPPSVSVALGQTARITCGGHNIGSKNVHWYQQKPGQAPVLVIYRDTNRPSGIPERFSGSNSGNTATLTISRAQAGDEADYYCQLWDSTTVVFGCGTKLTVLSGGGGQQVQLQQSGPGLVKPSQTLSLTCAISGDSVSSKSAAWNWIRQSPSGCLEWLGRTFYRSTWYNDYAVSVKSRITINPDTSKNQFSLQLNSVIPEDTAVYYCAREGQWLVYGMDVWGQGTTVTVSSGGGGQGGGGQGGGGQQSVLTQPPSASGTPGQRITISCSGSSSNIGSNTVNWYQQLPGTAPKLLIYRNNQRPSGVPDRFSGSKSGTSASLAISGLQSEDEADYYCAAWDDSLNGRVFGCGTKLTVLSGGGGQEVQLVESGGGLVQPGGSLKLSCAASGFTFNKYAMNWVRQAPGKGLEWVARIRSKYNNYATYYADSVKDRFTISRDDSKNTAYLQMNNLKTEDTAVYYCVRHGNFGNSYISYWAYWGQGTLVTVSSGGGGQGGGGQGGGGQQTVVTQEPSLTVSPGGTVTLTCGSSTGAVTSGNYPNWVQQKPGQAPRGLIGGTKFLAPGTPARFSGSLLGGKAALTLSGVQPEDEAEYYCVLWYSNRWVFGGGTKLTVL

SEQ ID NO: 2678 - protein, 749 aa, Artificial Sequence
  Synthetic
EVQLLESGGGLVQPGGSLRLSCAASGFTFSGHAMTWVRQAPGKCLEWLSTIYGSGGYTYYAGSVKGRFTISRDNSKNTLYLQMNSLRAEDTAVYYCAKVGGYDWYFDLWGRGTLVTVSSGGGGSGGGGSGGGGSSYELTQPPSVSVALGQTARITCGGHNIGSKNVHWYQQKPGQAPVLVIYRDTNRPSGIPERFSGSNSGNTATLTISRAQAGDEADYYCQLWDSTTVVFGCGTKLTVLSGGGGSQVQLQQSGPGLVKPSQTLSLTCAISGDSVSSKSAAWNWIRQSPSGCLEWLGRTFYRSTWYNDYAVSVKSRITINPDTSKNQFSLQLNSVIPEDTAVYYCAREGQWLVYGMDVWGQGTTVTVSSGGGGSGGGGSGGGGSQSVLTQPPSASGTPGQRITISCSGSSSNIGSNTVNWYQQLPGTAPKLLIYRNNQRPSGVPDRFSGSKSGTSASLAISGLQSEDEADYYCAAWDDSLNGRVFGCGTKLTVLSGGGGSEVQLVESGGGLVQPGGSLKLSCAASGFTFNKYAINWVRQAPGKGLEWVARIRSKYNNYATYYADAVKDRFTISRDDSKNTVYLQMNNLKTEDTAVYYCARAGNFGSSYISYWAYWGQGTLVTVSSGGGGSGGGGSGGGGSQTVVTQEPSLTVSPGGTVTITCGSSTGAVTSGNYPNWVQKKPGQAPRGLIGGTKFLAPGTPARFSGSLSGGKAALTLSGVQPEDEAEYYCVLWYSNRWVFGSGTKLTVL

SEQ ID NO: 2679 - protein, 749 aa, Artificial Sequence
  Synthetic
EVQLLESGGGLVQPGGSLRLSCAASGFTFSGHAMTWVRQAPGKCLEWLSTIYGSGGYTYYAGSVKGRFTISRDNSKNTLYLQMNSLRAEDTAVYYCAKVGGYDWYFDLWGRGTLVTVSSGGGGQGGGGQGGGGQSYELTQPPSVSVALGQTARITCGGHNIGSKNVHWYQQKPGQAPVLVIYRDTNRPSGIPERFSGSNSGNTATLTISRAQAGDEADYYCQLWDSTTVVFGCGTKLTVLSGGGGQQVQLQQSGPGLVKPSQTLSLTCAISGDSVSSKSAAWNWIRQSPSGCLEWLGRTFYRSTWYNDYAVSVKSRITINPDTSKNQFSLQLNSVIPEDTAVYYCAREGQWLVYGMDVWGQGTTVTVSSGGGGQGGGGQGGGGQQSVLTQPPSASGTPGQRITISCSGSSSNIGSNTVNWYQQLPGTAPKLLIYRNNQRPSGVPDRFSGSKSGTSASLAISGLQSEDEADYYCAAWDDSLNGRVFGCGTKLTVLSGGGGQEVQLVESGGGLVQPGGSLKLSCAASGFTFNKYAINWVRQAPGKGLEWVARIRSKYNNYATYYADAVKDRFTISRDDSKNTVYLQMNNLKTEDTAVYYCARAGNFGSSYISYWAYWGQGTLVTVSSGGGGQGGGGQGGGGQQTVVTQEPSLTVSPGGTVTITCGSSTGAVTSGNYPNWVQKKPGQAPRGLIGGTKFLAPGTPARFSGSLSGGKAALTLSGVQPEDEAEYYCVLWYSNRWVFGSGTKLTVL

SEQ ID NO: 2680 - protein, 1237 aa, Artificial Sequence
  Synthetic
EVQLLESGGGLVQPGGSLRLSCAASGFTFSGHAMTWVRQAPGKCLEWLSTIYGSGGYTYYAGSVKGRFTISRDNSKNTLYLQMNSLRAEDTAVYYCAKVGGYDWYFDLWGRGTLVTVSSGGGGSGGGGSGGGGSSYELTQPPSVSVALGQTARITCGGHNIGSKNVHWYQQKPGQAPVLVIYRDTNRPSGIPERFSGSNSGNTATLTISRAQAGDEADYYCQLWDSTTVVFGCGTKLTVLSGGGGSQVQLQQSGPGLVKPSQTLSLTCAISGDSVSSKSAAWNWIRQSPSGCLEWLGRTFYRSTWYNDYAVSVKSRITINPDTSKNQFSLQLNSVIPEDTAVYYCAREGQWLVYGMDVWGQGTTVTVSSGGGGSGGGGSGGGGSQSVLTQPPSASGTPGQRITISCSGSSSNIGSNTVNWYQQLPGTAPKLLIYRNNQRPSGVPDRFSGSKSGTSASLAISGLQSEDEADYYCAAWDDSLNGRVFGCGTKLTVLSGGGGSEVQLVESGGGLVQPGGSLKLSCAASGFTFNKYAMNWVRQAPGKGLEWVARIRSKYNNYATYYADSVKDRFTISRDDSKNTAYLQMNNLKTEDTAVYYCVRHGNFGNSYISYWAYWGQGTLVTVSSGGGGSGGGGSGGGGSQTVVTQEPSLTVSPGGTVTLTCGSSTGAVTSGNYPNWVQQKPGQAPRGLIGGTKFLAPGTPARFSGSLLGGKAALTLSGVQPEDEAEYYCVLWYSNRWVFGGGTKLTVLGGGGDKTHTCPPCPAPELLGGPSVFLFPPKPKDTLMISRTPEVTCVVVDVSHEDPEVKFNWYVDGVEVHNAKTKPCEEQYGSTYRCVSVLTVLHQDWLNGKEYKCKVSNKALPAPIEKTISKAKGQPREPQVYTLPPSREEMTKNQVSLTCLVKGFYPSDIAVEWESNGQPENNYKTTPPVLDSDGSFFLYSKLTVDKSRWQQGNVFSCSVMHEALHNHYTQKSLSLSPGKGGGGSGGGGSGGGGSGGGGSGGGGSGGGGSDKTHTCPPCPAPELLGGPSVFLFPPKPKDTLMISRTPEVTCVVVDVSHEDPEVKFNWYVDGVEVHNAKTKPCEEQYGSTYRCVSVLTVLHQDWLNGKEYKCKVSNKALPAPIEKTISKAKGQPREPQVYTLPPSREEMTKNQVSLTCLVKGFYPSDIAVEWESNGQPENNYKTTPPVLDSDGSFFLYSKLTVDKSRWQQGNVFSCSVMHEALHNHYTQKSLSLSPGK

SEQ ID NO: 2681 - protein, 1227 aa, Artificial Sequence
  Synthetic
EVQLLESGGGLVQPGGSLRLSCAASGFTFSGHAMTWVRQAPGKCLEWLSTIYGSGGYTYYAGSVKGRFTISRDNSKNTLYLQMNSLRAEDTAVYYCAKVGGYDWYFDLWGRGTLVTVSSGGGGQGGGGQGGGGQSYELTQPPSVSVALGQTARITCGGHNIGSKNVHWYQQKPGQAPVLVIYRDTNRPSGIPERFSGSNSGNTATLTISRAQAGDEADYYCQLWDSTTVVFGCGTKLTVLSGGGGQQVQLQQSGPGLVKPSQTLSLTCAISGDSVSSKSAAWNWIRQSPSGCLEWLGRTFYRSTWYNDYAVSVKSRITINPDTSKNQFSLQLNSVIPEDTAVYYCAREGQWLVYGMDVWGQGTTVTVSSGGGGQGGGGQGGGGQQSVLTQPPSASGTPGQRITISCSGSSSNIGSNTVNWYQQLPGTAPKLLIYRNNQRPSGVPDRFSGSKSGTSASLAISGLQSEDEADYYCAAWDDSLNGRVFGCGTKLTVLSGGGGQEVQLVESGGGLVQPGGSLKLSCAASGFTFNKYAMNWVRQAPGKGLEWVARIRSKYNNYATYYADSVKDRFTISRDDSKNTAYLQMNNLKTEDTAVYYCVRHGNFGNSYISYWAYWGQGTLVTVSSGGGGQGGGGQGGGGQQTVVTQEPSLTVSPGGTVTLTCGSSTGAVTSGNYPNWVQQKPGQAPRGLIGGTKFLAPGTPARFSGSLLGGKAALTLSGVQPEDEAEYYCVLWYSNRWVFGGGTKLTVLGGGGCPPCPAPELLGGPSVFLFPPKPKDTLMISRTPEVTCVVVDVSHEEPEVKFNWYVDGVEVHNAKTKPCEEQYGSTYRCVSVLTVLHQDWLNGKEYKCKVSNKALPAPIEKTISKAKGQPREPQVYTLPPSREEMTKNQVSLTCLVKGFYPSDIAVEWESNGQPENNYKTTPPVLDSDGSFFLYSKLTVDKSRWQQGNVFSCSVMHEALHNHYTQKSLSLSPGKGGGGQGGGGQGGGGQGGGGQGGGGQGGGGQCPPCPAPELLGGPSVFLFPPKPKDTLMISRTPEVTCVVVDVSHEEPEVKFNWYVDGVEVHNAKTKPCEEQYGSTYRCVSVLTVLHQDWLNGKEYKCKVSNKALPAPIEKTISKAKGQPREPQVYTLPPSREEMTKNQVSLTCLVKGFYPSDIAVEWESNGQPENNYKTTPPVLDSDGSFFLYSKLTVDKSRWQQGNVFSCSVMHEALHNHYTQKSLSLSPGK

SEQ ID NO: 2682 - protein, 1237 aa, Artificial Sequence
  Synthetic
EVQLLESGGGLVQPGGSLRLSCAASGFTFSGHAMTWVRQAPGKCLEWLSTIYGSGGYTYYAGSVKGRFTISRDNSKNTLYLQMNSLRAEDTAVYYCAKVGGYDWYFDLWGRGTLVTVSSGGGGSGGGGSGGGGSSYELTQPPSVSVALGQTARITCGGHNIGSKNVHWYQQKPGQAPVLVIYRDTNRPSGIPERFSGSNSGNTATLTISRAQAGDEADYYCQLWDSTTVVFGCGTKLTVLSGGGGSQVQLQQSGPGLVKPSQTLSLTCAISGDSVSSKSAAWNWIRQSPSGCLEWLGRTFYRSTWYNDYAVSVKSRITINPDTSKNQFSLQLNSVIPEDTAVYYCAREGQWLVYGMDVWGQGTTVTVSSGGGGSGGGGSGGGGSQSVLTQPPSASGTPGQRITISCSGSSSNIGSNTVNWYQQLPGTAPKLLIYRNNQRPSGVPDRFSGSKSGTSASLAISGLQSEDEADYYCAAWDDSLNGRVFGCGTKLTVLSGGGGSEVQLVESGGGLVQPGGSLKLSCAASGFTFNKYAINWVRQAPGKGLEWVARIRSKYNNYATYYADAVKDRFTISRDDSKNTVYLQMNNLKTEDTAVYYCARAGNFGSSYISYWAYWGQGTLVTVSSGGGGSGGGGSGGGGSQTVVTQEPSLTVSPGGTVTITCGSSTGAVTSGNYPNWVQKKPGQAPRGLIGGTKFLAPGTPARFSGSLSGGKAALTLSGVQPEDEAEYYCVLWYSNRWVFGSGTKLTVLGGGGDKTHTCPPCPAPELLGGPSVFLFPPKPKDTLMISRTPEVTCVVVDVSHEDPEVKFNWYVDGVEVHNAKTKPCEEQYGSTYRCVSVLTVLHQDWLNGKEYKCKVSNKALPAPIEKTISKAKGQPREPQVYTLPPSREEMTKNQVSLTCLVKGFYPSDIAVEWESNGQPENNYKTTPPVLDSDGSFFLYSKLTVDKSRWQQGNVFSCSVMHEALHNHYTQKSLSLSPGKGGGGSGGGGSGGGGSGGGGSGGGGSGGGGSDKTHTCPPCPAPELLGGPSVFLFPPKPKDTLMISRTPEVTCVVVDVSHEDPEVKFNWYVDGVEVHNAKTKPCEEQYGSTYRCVSVLTVLHQDWLNGKEYKCKVSNKALPAPIEKTISKAKGQPREPQVYTLPPSREEMTKNQVSLTCLVKGFYPSDIAVEWESNGQPENNYKTTPPVLDSDGSFFLYSKLTVDKSRWQQGNVFSCSVMHEALHNHYTQKSLSLSPGK

SEQ ID NO: 2683 - protein, 1227 aa, Artificial Sequence
  Synthetic
EVQLLESGGGLVQPGGSLRLSCAASGFTFSGHAMTWVRQAPGKCLEWLSTIYGSGGYTYYAGSVKGRFTISRDNSKNTLYLQMNSLRAEDTAVYYCAKVGGYDWYFDLWGRGTLVTVSSGGGGQGGGGQGGGGQSYELTQPPSVSVALGQTARITCGGHNIGSKNVHWYQQKPGQAPVLVIYRDTNRPSGIPERFSGSNSGNTATLTISRAQAGDEADYYCQLWDSTTVVFGCGTKLTVLSGGGGQQVQLQQSGPGLVKPSQTLSLTCAISGDSVSSKSAAWNWIRQSPSGCLEWLGRTFYRSTWYNDYAVSVKSRITINPDTSKNQFSLQLNSVIPEDTAVYYCAREGQWLVYGMDVWGQGTTVTVSSGGGGQGGGGQGGGGQQSVLTQPPSASGTPGQRITISCSGSSSNIGSNTVNWYQQLPGTAPKLLIYRNNQRPSGVPDRFSGSKSGTSASLAISGLQSEDEADYYCAAWDDSLNGRVFGCGTKLTVLSGGGGQEVQLVESGGGLVQPGGSLKLSCAASGFTFNKYAINWVRQAPGKGLEWVARIRSKYNNYATYYADAVKDRFTISRDDSKNTVYLQMNNLKTEDTAVYYCARAGNFGSSYISYWAYWGQGTLVTVSSGGGGQGGGGQGGGGQQTVVTQEPSLTVSPGGTVTITCGSSTGAVTSGNYPNWVQKKPGQAPRGLIGGTKFLAPGTPARFSGSLSGGKAALTLSGVQPEDEAEYYCVLWYSNRWVFGSGTKLTVLGGGGCPPCPAPELLGGPSVFLFPPKPKDTLMISRTPEVTCVVVDVSHEEPEVKFNWYVDGVEVHNAKTKPCEEQYGSTYRCVSVLTVLHQDWLNGKEYKCKVSNKALPAPIEKTISKAKGQPREPQVYTLPPSREEMTKNQVSLTCLVKGFYPSDIAVEWESNGQPENNYKTTPPVLDSDGSFFLYSKLTVDKSRWQQGNVFSCSVMHEALHNHYTQKSLSLSPGKGGGGQGGGGQGGGGQGGGGQGGGGQGGGGQCPPCPAPELLGGPSVFLFPPKPKDTLMISRTPEVTCVVVDVSHEEPEVKFNWYVDGVEVHNAKTKPCEEQYGSTYRCVSVLTVLHQDWLNGKEYKCKVSNKALPAPIEKTISKAKGQPREPQVYTLPPSREEMTKNQVSLTCLVKGFYPSDIAVEWESNGQPENNYKTTPPVLDSDGSFFLYSKLTVDKSRWQQGNVFSCSVMHEALHNHYTQKSLSLSPGK

SEQ ID NO: 2684 - protein, 488 aa, Artificial Sequence
  Synthetic
EVQLLESGGGLVQPGGSLRLSCAASGFTFSGHAMTWVRQAPGKCLEWLSTIYGSGGYTYYAGSVKGRFTISRDNSKNTLYLQMNSLRAEDTAVYYCAKVGGYDWYFDLWGRGTLVTVSSGGGGSGGGGSGGGGSSYELTQPPSVSVALGQTARITCGGHNIGSKNVHWYQQKPGQAPVLVIYRDTNRPSGIPERFSGSNSGNTATLTISRAQAGDEADYYCQLWDSTTVVFGCGTKLTVLSGGGGSQVQLVQSGAEVKKPGASVKVSCKASGYTFNNYGISWVRQAPGQCLEWMGWISAYNGKTSYAQKFQGRVTMTTDTSTGTAYMELRSLRSDDTAVYYCARDLDFLTGWEYWGQGTLVTVSSGGGGSGGGGSGGGGSEIVLTQSPATLSVSPGERATLSCRASQSVNSNLAWYQQKPGQAPRLLIYGASTRATGIPARFSGSGSGTEFTLTISSLQSEDFAVYYCQQYHTWPVLTFGCGTKVEIK

SEQ ID NO: 2685 - protein, 488 aa, Artificial Sequence
  Synthetic
EVQLLESGGGLVQPGGSLRLSCAASGFTFSGHAMTWVRQAPGKCLEWLSTIYGSGGYTYYAGSVKGRFTISRDNSKNTLYLQMNSLRAEDTAVYYCAKVGGYDWYFDLWGRGTLVTVSSGGGGQGGGGQGGGGQSYELTQPPSVSVALGQTARITCGGHNIGSKNVHWYQQKPGQAPVLVIYRDTNRPSGIPERFSGSNSGNTATLTISRAQAGDEADYYCQLWDSTTVVFGCGTKLTVLSGGGGQQVQLVQSGAEVKKPGASVKVSCKASGYTFNNYGISWVRQAPGQCLEWMGWISAYNGKTSYAQKFQGRVTMTTDTSTGTAYMELRSLRSDDTAVYYCARDLDFLTGWEYWGQGTLVTVSSGGGGQGGGGQGGGGQEIVLTQSPATLSVSPGERATLSCRASQSVNSNLAWYQQKPGQAPRLLIYGASTRATGIPARFSGSGSGTEFTLTISSLQSEDFAVYYCQQYHTWPVLTFGCGTKVEIK

SEQ ID NO: 2686 - protein, 743 aa, Artificial Sequence
  Synthetic
EVQLLESGGGLVQPGGSLRLSCAASGFTFSGHAMTWVRQAPGKCLEWLSTIYGSGGYTYYAGSVKGRFTISRDNSKNTLYLQMNSLRAEDTAVYYCAKVGGYDWYFDLWGRGTLVTVSSGGGGSGGGGSGGGGSSYELTQPPSVSVALGQTARITCGGHNIGSKNVHWYQQKPGQAPVLVIYRDTNRPSGIPERFSGSNSGNTATLTISRAQAGDEADYYCQLWDSTTVVFGCGTKLTVLSGGGGSQVQLVQSGAEVKKPGASVKVSCKASGYTFNNYGISWVRQAPGQCLEWMGWISAYNGKTSYAQKFQGRVTMTTDTSTGTAYMELRSLRSDDTAVYYCARDLDFLTGWEYWGQGTLVTVSSGGGGSGGGGSGGGGSEIVLTQSPATLSVSPGERATLSCRASQSVNSNLAWYQQKPGQAPRLLIYGASTRATGIPARFSGSGSGTEFTLTISSLQSEDFAVYYCQQYHTWPVLTFGCGTKVEIKSGGGGSEVQLVESGGGLVQPGGSLKLSCAASGFTFNKYAMNWVRQAPGKGLEWVARIRSKYNNYATYYADSVKDRFTISRDDSKNTAYLQMNNLKTEDTAVYYCVRHGNFGNSYISYWAYWGQGTLVTVSSGGGGSGGGGSGGGGSQTVVTQEPSLTVSPGGTVTLTCGSSTGAVTSGNYPNWVQQKPGQAPRGLIGGTKFLAPGTPARFSGSLLGGKAALTLSGVQPEDEAEYYCVLWYSNRWVFGGGTKLTVL

SEQ ID NO: 2687 - protein, 743 aa, Artificial Sequence
  Synthetic
EVQLLESGGGLVQPGGSLRLSCAASGFTFSGHAMTWVRQAPGKCLEWLSTIYGSGGYTYYAGSVKGRFTISRDNSKNTLYLQMNSLRAEDTAVYYCAKVGGYDWYFDLWGRGTLVTVSSGGGGQGGGGQGGGGQSYELTQPPSVSVALGQTARITCGGHNIGSKNVHWYQQKPGQAPVLVIYRDTNRPSGIPERFSGSNSGNTATLTISRAQAGDEADYYCQLWDSTTVVFGCGTKLTVLSGGGGQQVQLVQSGAEVKKPGASVKVSCKASGYTFNNYGISWVRQAPGQCLEWMGWISAYNGKTSYAQKFQGRVTMTTDTSTGTAYMELRSLRSDDTAVYYCARDLDFLTGWEYWGQGTLVTVSSGGGGQGGGGQGGGGQEIVLTQSPATLSVSPGERATLSCRASQSVNSNLAWYQQKPGQAPRLLIYGASTRATGIPARFSGSGSGTEFTLTISSLQSEDFAVYYCQQYHTWPVLTFGCGTKVEIKSGGGGQEVQLVESGGGLVQPGGSLKLSCAASGFTFNKYAMNWVRQAPGKGLEWVARIRSKYNNYATYYADSVKDRFTISRDDSKNTAYLQMNNLKTEDTAVYYCVRHGNFGNSYISYWAYWGQGTLVTVSSGGGGQGGGGQGGGGQQTVVTQEPSLTVSPGGTVTLTCGSSTGAVTSGNYPNWVQQKPGQAPRGLIGGTKFLAPGTPARFSGSLLGGKAALTLSGVQPEDEAEYYCVLWYSNRWVFGGGTKLTVL

SEQ ID NO: 2688 - protein, 743 aa, Artificial Sequence
  Synthetic
EVQLLESGGGLVQPGGSLRLSCAASGFTFSGHAMTWVRQAPGKCLEWLSTIYGSGGYTYYAGSVKGRFTISRDNSKNTLYLQMNSLRAEDTAVYYCAKVGGYDWYFDLWGRGTLVTVSSGGGGSGGGGSGGGGSSYELTQPPSVSVALGQTARITCGGHNIGSKNVHWYQQKPGQAPVLVIYRDTNRPSGIPERFSGSNSGNTATLTISRAQAGDEADYYCQLWDSTTVVFGCGTKLTVLSGGGGSQVQLVQSGAEVKKPGASVKVSCKASGYTFNNYGISWVRQAPGQCLEWMGWISAYNGKTSYAQKFQGRVTMTTDTSTGTAYMELRSLRSDDTAVYYCARDLDFLTGWEYWGQGTLVTVSSGGGGSGGGGSGGGGSEIVLTQSPATLSVSPGERATLSCRASQSVNSNLAWYQQKPGQAPRLLIYGASTRATGIPARFSGSGSGTEFTLTISSLQSEDFAVYYCQQYHTWPVLTFGCGTKVEIKSGGGGSEVQLVESGGGLVQPGGSLKLSCAASGFTFNKYAINWVRQAPGKGLEWVARIRSKYNNYATYYADAVKDRFTISRDDSKNTVYLQMNNLKTEDTAVYYCARAGNFGSSYISYWAYWGQGTLVTVSSGGGGSGGGGSGGGGSQTVVTQEPSLTVSPGGTVTITCGSSTGAVTSGNYPNWVQKKPGQAPRGLIGGTKFLAPGTPARFSGSLSGGKAALTLSGVQPEDEAEYYCVLWYSNRWVFGSGTKLTVL

SEQ ID NO: 2689 - protein, 743 aa, Artificial Sequence
  Synthetic
EVQLLESGGGLVQPGGSLRLSCAASGFTFSGHAMTWVRQAPGKCLEWLSTIYGSGGYTYYAGSVKGRFTISRDNSKNTLYLQMNSLRAEDTAVYYCAKVGGYDWYFDLWGRGTLVTVSSGGGGQGGGGQGGGGQSYELTQPPSVSVALGQTARITCGGHNIGSKNVHWYQQKPGQAPVLVIYRDTNRPSGIPERFSGSNSGNTATLTISRAQAGDEADYYCQLWDSTTVVFGCGTKLTVLSGGGGQQVQLVQSGAEVKKPGASVKVSCKASGYTFNNYGISWVRQAPGQCLEWMGWISAYNGKTSYAQKFQGRVTMTTDTSTGTAYMELRSLRSDDTAVYYCARDLDFLTGWEYWGQGTLVTVSSGGGGQGGGGQGGGGQEIVLTQSPATLSVSPGERATLSCRASQSVNSNLAWYQQKPGQAPRLLIYGASTRATGIPARFSGSGSGTEFTLTISSLQSEDFAVYYCQQYHTWPVLTFGCGTKVEIKSGGGGQEVQLVESGGGLVQPGGSLKLSCAASGFTFNKYAINWVRQAPGKGLEWVARIRSKYNNYATYYADAVKDRFTISRDDSKNTVYLQMNNLKTEDTAVYYCARAGNFGSSYISYWAYWGQGTLVTVSSGGGGQGGGGQGGGGQQTVVTQEPSLTVSPGGTVTITCGSSTGAVTSGNYPNWVQKKPGQAPRGLIGGTKFLAPGTPARFSGSLSGGKAALTLSGVQPEDEAEYYCVLWYSNRWVFGSGTKLTVL

SEQ ID NO: 2690 - protein, 1231 aa, Artificial Sequence
  Synthetic
EVQLLESGGGLVQPGGSLRLSCAASGFTFSGHAMTWVRQAPGKCLEWLSTIYGSGGYTYYAGSVKGRFTISRDNSKNTLYLQMNSLRAEDTAVYYCAKVGGYDWYFDLWGRGTLVTVSSGGGGSGGGGSGGGGSSYELTQPPSVSVALGQTARITCGGHNIGSKNVHWYQQKPGQAPVLVIYRDTNRPSGIPERFSGSNSGNTATLTISRAQAGDEADYYCQLWDSTTVVFGCGTKLTVLSGGGGSQVQLVQSGAEVKKPGASVKVSCKASGYTFNNYGISWVRQAPGQCLEWMGWISAYNGKTSYAQKFQGRVTMTTDTSTGTAYMELRSLRSDDTAVYYCARDLDFLTGWEYWGQGTLVTVSSGGGGSGGGGSGGGGSEIVLTQSPATLSVSPGERATLSCRASQSVNSNLAWYQQKPGQAPRLLIYGASTRATGIPARFSGSGSGTEFTLTISSLQSEDFAVYYCQQYHTWPVLTFGCGTKVEIKSGGGGSEVQLVESGGGLVQPGGSLKLSCAASGFTFNKYAMNWVRQAPGKGLEWVARIRSKYNNYATYYADSVKDRFTISRDDSKNTAYLQMNNLKTEDTAVYYCVRHGNFGNSYISYWAYWGQGTLVTVSSGGGGSGGGGSGGGGSQTVVTQEPSLTVSPGGTVTLTCGSSTGAVTSGNYPNWVQQKPGQAPRGLIGGTKFLAPGTPARFSGSLLGGKAALTLSGVQPEDEAEYYCVLWYSNRWVFGGGTKLTVLGGGGDKTHTCPPCPAPELLGGPSVFLFPPKPKDTLMISRTPEVTCVVVDVSHEDPEVKFNWYVDGVEVHNAKTKPCEEQYGSTYRCVSVLTVLHQDWLNGKEYKCKVSNKALPAPIEKTISKAKGQPREPQVYTLPPSREEMTKNQVSLTCLVKGFYPSDIAVEWESNGQPENNYKTTPPVLDSDGSFFLYSKLTVDKSRWQQGNVFSCSVMHEALHNHYTQKSLSLSPGKGGGGSGGGGSGGGGSGGGGSGGGGSGGGGSDKTHTCPPCPAPELLGGPSVFLFPPKPKDTLMISRTPEVTCVVVDVSHEDPEVKFNWYVDGVEVHNAKTKPCEEQYGSTYRCVSVLTVLHQDWLNGKEYKCKVSNKALPAPIEKTISKAKGQPREPQVYTLPPSREEMTKNQVSLTCLVKGFYPSDIAVEWESNGQPENNYKTTPPVLDSDGSFFLYSKLTVDKSRWQQGNVFSCSVMHEALHNHYTQKSLSLSPGK

SEQ ID NO: 2691 - protein, 1221 aa, Artificial Sequence
  Synthetic
EVQLLESGGGLVQPGGSLRLSCAASGFTFSGHAMTWVRQAPGKCLEWLSTIYGSGGYTYYAGSVKGRFTISRDNSKNTLYLQMNSLRAEDTAVYYCAKVGGYDWYFDLWGRGTLVTVSSGGGGQGGGGQGGGGQSYELTQPPSVSVALGQTARITCGGHNIGSKNVHWYQQKPGQAPVLVIYRDTNRPSGIPERFSGSNSGNTATLTISRAQAGDEADYYCQLWDSTTVVFGCGTKLTVLSGGGGQQVQLVQSGAEVKKPGASVKVSCKASGYTFNNYGISWVRQAPGQCLEWMGWISAYNGKTSYAQKFQGRVTMTTDTSTGTAYMELRSLRSDDTAVYYCARDLDFLTGWEYWGQGTLVTVSSGGGGQGGGGQGGGGQEIVLTQSPATLSVSPGERATLSCRASQSVNSNLAWYQQKPGQAPRLLIYGASTRATGIPARFSGSGSGTEFTLTISSLQSEDFAVYYCQQYHTWPVLTFGCGTKVEIKSGGGGQEVQLVESGGGLVQPGGSLKLSCAASGFTFNKYAMNWVRQAPGKGLEWVARIRSKYNNYATYYADSVKDRFTISRDDSKNTAYLQMNNLKTEDTAVYYCVRHGNFGNSYISYWAYWGQGTLVTVSSGGGGQGGGGQGGGGQQTVVTQEPSLTVSPGGTVTLTCGSSTGAVTSGNYPNWVQQKPGQAPRGLIGGTKFLAPGTPARFSGSLLGGKAALTLSGVQPEDEAEYYCVLWYSNRWVFGGGTKLTVLGGGGCPPCPAPELLGGPSVFLFPPKPKDTLMISRTPEVTCVVVDVSHEEPEVKFNWYVDGVEVHNAKTKPCEEQYGSTYRCVSVLTVLHQDWLNGKEYKCKVSNKALPAPIEKTISKAKGQPREPQVYTLPPSREEMTKNQVSLTCLVKGFYPSDIAVEWESNGQPENNYKTTPPVLDSDGSFFLYSKLTVDKSRWQQGNVFSCSVMHEALHNHYTQKSLSLSPGKGGGGQGGGGQGGGGQGGGGQGGGGQGGGGQCPPCPAPELLGGPSVFLFPPKPKDTLMISRTPEVTCVVVDVSHEEPEVKFNWYVDGVEVHNAKTKPCEEQYGSTYRCVSVLTVLHQDWLNGKEYKCKVSNKALPAPIEKTISKAKGQPREPQVYTLPPSREEMTKNQVSLTCLVKGFYPSDIAVEWESNGQPENNYKTTPPVLDSDGSFFLYSKLTVDKSRWQQGNVFSCSVMHEALHNHYTQKSLSLSPGK

SEQ ID NO: 2692 - protein, 1231 aa, Artificial Sequence
  Synthetic
EVQLLESGGGLVQPGGSLRLSCAASGFTFSGHAMTWVRQAPGKCLEWLSTIYGSGGYTYYAGSVKGRFTISRDNSKNTLYLQMNSLRAEDTAVYYCAKVGGYDWYFDLWGRGTLVTVSSGGGGSGGGGSGGGGSSYELTQPPSVSVALGQTARITCGGHNIGSKNVHWYQQKPGQAPVLVIYRDTNRPSGIPERFSGSNSGNTATLTISRAQAGDEADYYCQLWDSTTVVFGCGTKLTVLSGGGGSQVQLVQSGAEVKKPGASVKVSCKASGYTFNNYGISWVRQAPGQCLEWMGWISAYNGKTSYAQKFQGRVTMTTDTSTGTAYMELRSLRSDDTAVYYCARDLDFLTGWEYWGQGTLVTVSSGGGGSGGGGSGGGGSEIVLTQSPATLSVSPGERATLSCRASQSVNSNLAWYQQKPGQAPRLLIYGASTRATGIPARFSGSGSGTEFTLTISSLQSEDFAVYYCQQYHTWPVLTFGCGTKVEIKSGGGGSEVQLVESGGGLVQPGGSLKLSCAASGFTFNKYAINWVRQAPGKGLEWVARIRSKYNNYATYYADAVKDRFTISRDDSKNTVYLQMNNLKTEDTAVYYCARAGNFGSSYISYWAYWGQGTLVTVSSGGGGSGGGGSGGGGSQTVVTQEPSLTVSPGGTVTITCGSSTGAVTSGNYPNWVQKKPGQAPRGLIGGTKFLAPGTPARFSGSLSGGKAALTLSGVQPEDEAEYYCVLWYSNRWVFGSGTKLTVLGGGGDKTHTCPPCPAPELLGGPSVFLFPPKPKDTLMISRTPEVTCVVVDVSHEDPEVKFNWYVDGVEVHNAKTKPCEEQYGSTYRCVSVLTVLHQDWLNGKEYKCKVSNKALPAPIEKTISKAKGQPREPQVYTLPPSREEMTKNQVSLTCLVKGFYPSDIAVEWESNGQPENNYKTTPPVLDSDGSFFLYSKLTVDKSRWQQGNVFSCSVMHEALHNHYTQKSLSLSPGKGGGGSGGGGSGGGGSGGGGSGGGGSGGGGSDKTHTCPPCPAPELLGGPSVFLFPPKPKDTLMISRTPEVTCVVVDVSHEDPEVKFNWYVDGVEVHNAKTKPCEEQYGSTYRCVSVLTVLHQDWLNGKEYKCKVSNKALPAPIEKTISKAKGQPREPQVYTLPPSREEMTKNQVSLTCLVKGFYPSDIAVEWESNGQPENNYKTTPPVLDSDGSFFLYSKLTVDKSRWQQGNVFSCSVMHEALHNHYTQKSLSLSPGK

SEQ ID NO: 2693 - protein, 1221 aa, Artificial Sequence
  Synthetic
EVQLLESGGGLVQPGGSLRLSCAASGFTFSGHAMTWVRQAPGKCLEWLSTIYGSGGYTYYAGSVKGRFTISRDNSKNTLYLQMNSLRAEDTAVYYCAKVGGYDWYFDLWGRGTLVTVSSGGGGQGGGGQGGGGQSYELTQPPSVSVALGQTARITCGGHNIGSKNVHWYQQKPGQAPVLVIYRDTNRPSGIPERFSGSNSGNTATLTISRAQAGDEADYYCQLWDSTTVVFGCGTKLTVLSGGGGQQVQLVQSGAEVKKPGASVKVSCKASGYTFNNYGISWVRQAPGQCLEWMGWISAYNGKTSYAQKFQGRVTMTTDTSTGTAYMELRSLRSDDTAVYYCARDLDFLTGWEYWGQGTLVTVSSGGGGQGGGGQGGGGQEIVLTQSPATLSVSPGERATLSCRASQSVNSNLAWYQQKPGQAPRLLIYGASTRATGIPARFSGSGSGTEFTLTISSLQSEDFAVYYCQQYHTWPVLTFGCGTKVEIKSGGGGQEVQLVESGGGLVQPGGSLKLSCAASGFTFNKYAINWVRQAPGKGLEWVARIRSKYNNYATYYADAVKDRFTISRDDSKNTVYLQMNNLKTEDTAVYYCARAGNFGSSYISYWAYWGQGTLVTVSSGGGGQGGGGQGGGGQQTVVTQEPSLTVSPGGTVTITCGSSTGAVTSGNYPNWVQKKPGQAPRGLIGGTKFLAPGTPARFSGSLSGGKAALTLSGVQPEDEAEYYCVLWYSNRWVFGSGTKLTVLGGGGCPPCPAPELLGGPSVFLFPPKPKDTLMISRTPEVTCVVVDVSHEEPEVKFNWYVDGVEVHNAKTKPCEEQYGSTYRCVSVLTVLHQDWLNGKEYKCKVSNKALPAPIEKTISKAKGQPREPQVYTLPPSREEMTKNQVSLTCLVKGFYPSDIAVEWESNGQPENNYKTTPPVLDSDGSFFLYSKLTVDKSRWQQGNVFSCSVMHEALHNHYTQKSLSLSPGKGGGGQGGGGQGGGGQGGGGQGGGGQGGGGQCPPCPAPELLGGPSVFLFPPKPKDTLMISRTPEVTCVVVDVSHEEPEVKFNWYVDGVEVHNAKTKPCEEQYGSTYRCVSVLTVLHQDWLNGKEYKCKVSNKALPAPIEKTISKAKGQPREPQVYTLPPSREEMTKNQVSLTCLVKGFYPSDIAVEWESNGQPENNYKTTPPVLDSDGSFFLYSKLTVDKSRWQQGNVFSCSVMHEALHNHYTQKSLSLSPGK

SEQ ID NO: 2694 - protein, 491 aa, Artificial Sequence
  Synthetic
EVQLLESGGGLVQPGGSLRLSCAASGFTFSGHAMTWVRQAPGKCLEWLSTIYGSGGYTYYAGSVKGRFTISRDNSKNTLYLQMNSLRAEDTAVYYCAKVGGYDWYFDLWGRGTLVTVSSGGGGSGGGGSGGGGSSYELTQPPSVSVALGQTARITCGGHNIGSKNVHWYQQKPGQAPVLVIYRDTNRPSGIPERFSGSNSGNTATLTISRAQAGDEADYYCQLWDSTTVVFGCGTKLTVLSGGGGSQLQLQESGPGLVKPSETLSLTCFVSGGSISNSDYFWGWIRQPPGKCLEWIGTIYYSGRTYYNPSLKSRVTISVDTSKNQFSLMLSSVTAVDTAVYYCARYQYGSFDYWGQGTLVTVSSGGGGSGGGGSGGGGSDIVMTQTPLSLPVTPGEPASISCRSSQSLLHSNGYNYLDWYLQKPGQSPQLLIYLGSNRASGVPDRFSGSGSGTDFTLKISRVEAEDVGVYYCMQALQTPYTFGCGTKVEIR

SEQ ID NO: 2695 - protein, 491 aa, Artificial Sequence
  Synthetic
EVQLLESGGGLVQPGGSLRLSCAASGFTFSGHAMTWVRQAPGKCLEWLSTIYGSGGYTYYAGSVKGRFTISRDNSKNTLYLQMNSLRAEDTAVYYCAKVGGYDWYFDLWGRGTLVTVSSGGGGQGGGGQGGGGQSYELTQPPSVSVALGQTARITCGGHNIGSKNVHWYQQKPGQAPVLVIYRDTNRPSGIPERFSGSNSGNTATLTISRAQAGDEADYYCQLWDSTTVVFGCGTKLTVLSGGGGQQLQLQESGPGLVKPSETLSLTCFVSGGSISNSDYFWGWIRQPPGKCLEWIGTIYYSGRTYYNPSLKSRVTISVDTSKNQFSLMLSSVTAVDTAVYYCARYQYGSFDYWGQGTLVTVSSGGGGQGGGGQGGGGQEIVMTQTPLSLPVTPGEPASISCRSSQSLLHSNGYNYLDWYLQKPGQSPQLLIYLGSNRASGVPDRFSGSGSGTDFTLKISRVEAEDVGVYYCMQALQTPYTFGCGTKVEIR

SEQ ID NO: 2696 - protein, 746 aa, Artificial Sequence
  Synthetic
EVQLLESGGGLVQPGGSLRLSCAASGFTFSGHAMTWVRQAPGKCLEWLSTIYGSGGYTYYAGSVKGRFTISRDNSKNTLYLQMNSLRAEDTAVYYCAKVGGYDWYFDLWGRGTLVTVSSGGGGSGGGGSGGGGSSYELTQPPSVSVALGQTARITCGGHNIGSKNVHWYQQKPGQAPVLVIYRDTNRPSGIPERFSGSNSGNTATLTISRAQAGDEADYYCQLWDSTTVVFGCGTKLTVLSGGGGSQLQLQESGPGLVKPSETLSLTCFVSGGSISNSDYFWGWIRQPPGKCLEWIGTIYYSGRTYYNPSLKSRVTISVDTSKNQFSLMLSSVTAVDTAVYYCARYQYGSFDYWGQGTLVTVSSGGGGSGGGGSGGGGSDIVMTQTPLSLPVTPGEPASISCRSSQSLLHSNGYNYLDWYLQKPGQSPQLLIYLGSNRASGVPDRFSGSGSGTDFTLKISRVEAEDVGVYYCMQALQTPYTFGCGTKVEIRSGGGGSEVQLVESGGGLVQPGGSLKLSCAASGFTFNKYAMNWVRQAPGKGLEWVARIRSKYNNYATYYADSVKDRFTISRDDSKNTAYLQMNNLKTEDTAVYYCVRHGNFGNSYISYWAYWGQGTLVTVSSGGGGSGGGGSGGGGSQTVVTQEPSLTVSPGGTVTLTCGSSTGAVTSGNYPNWVQQKPGQAPRGLIGGTKFLAPGTPARFSGSLLGGKAALTLSGVQPEDEAEYYCVLWYSNRWVFGGGTKLTVL

SEQ ID NO: 2697 - protein, 746 aa, Artificial Sequence
  Synthetic
EVQLLESGGGLVQPGGSLRLSCAASGFTFSGHAMTWVRQAPGKCLEWLSTIYGSGGYTYYAGSVKGRFTISRDNSKNTLYLQMNSLRAEDTAVYYCAKVGGYDWYFDLWGRGTLVTVSSGGGGQGGGGQGGGGQSYELTQPPSVSVALGQTARITCGGHNIGSKNVHWYQQKPGQAPVLVIYRDTNRPSGIPERFSGSNSGNTATLTISRAQAGDEADYYCQLWDSTTVVFGCGTKLTVLSGGGGQQLQLQESGPGLVKPSETLSLTCFVSGGSISNSDYFWGWIRQPPGKCLEWIGTIYYSGRTYYNPSLKSRVTISVDTSKNQFSLMLSSVTAVDTAVYYCARYQYGSFDYWGQGTLVTVSSGGGGQGGGGQGGGGQEIVMTQTPLSLPVTPGEPASISCRSSQSLLHSNGYNYLDWYLQKPGQSPQLLIYLGSNRASGVPDRFSGSGSGTDFTLKISRVEAEDVGVYYCMQALQTPYTFGCGTKVEIRSGGGGQEVQLVESGGGLVQPGGSLKLSCAASGFTFNKYAMNWVRQAPGKGLEWVARIRSKYNNYATYYADSVKDRFTISRDDSKNTAYLQMNNLKTEDTAVYYCVRHGNFGNSYISYWAYWGQGTLVTVSSGGGGQGGGGQGGGGQQTVVTQEPSLTVSPGGTVTLTCGSSTGAVTSGNYPNWVQQKPGQAPRGLIGGTKFLAPGTPARFSGSLLGGKAALTLSGVQPEDEAEYYCVLWYSNRWVFGGGTKLTVL

SEQ ID NO: 2698 - protein, 746 aa, Artificial Sequence
  Synthetic
EVQLLESGGGLVQPGGSLRLSCAASGFTFSGHAMTWVRQAPGKCLEWLSTIYGSGGYTYYAGSVKGRFTISRDNSKNTLYLQMNSLRAEDTAVYYCAKVGGYDWYFDLWGRGTLVTVSSGGGGSGGGGSGGGGSSYELTQPPSVSVALGQTARITCGGHNIGSKNVHWYQQKPGQAPVLVIYRDTNRPSGIPERFSGSNSGNTATLTISRAQAGDEADYYCQLWDSTTVVFGCGTKLTVLSGGGGSQLQLQESGPGLVKPSETLSLTCFVSGGSISNSDYFWGWIRQPPGKCLEWIGTIYYSGRTYYNPSLKSRVTISVDTSKNQFSLMLSSVTAVDTAVYYCARYQYGSFDYWGQGTLVTVSSGGGGSGGGGSGGGGSDIVMTQTPLSLPVTPGEPASISCRSSQSLLHSNGYNYLDWYLQKPGQSPQLLIYLGSNRASGVPDRFSGSGSGTDFTLKISRVEAEDVGVYYCMQALQTPYTFGCGTKVEIRSGGGGSEVQLVESGGGLVQPGGSLKLSCAASGFTFNKYAINWVRQAPGKGLEWVARIRSKYNNYATYYADAVKDRFTISRDDSKNTVYLQMNNLKTEDTAVYYCARAGNFGSSYISYWAYWGQGTLVTVSSGGGGSGGGGSGGGGSQTVVTQEPSLTVSPGGTVTITCGSSTGAVTSGNYPNWVQKKPGQAPRGLIGGTKFLAPGTPARFSGSLSGGKAALTLSGVQPEDEAEYYCVLWYSNRWVFGSGTKLTVL

SEQ ID NO: 2699 - protein, 746 aa, Artificial Sequence
  Synthetic
EVQLLESGGGLVQPGGSLRLSCAASGFTFSGHAMTWVRQAPGKCLEWLSTIYGSGGYTYYAGSVKGRFTISRDNSKNTLYLQMNSLRAEDTAVYYCAKVGGYDWYFDLWGRGTLVTVSSGGGGQGGGGQGGGGQSYELTQPPSVSVALGQTARITCGGHNIGSKNVHWYQQKPGQAPVLVIYRDTNRPSGIPERFSGSNSGNTATLTISRAQAGDEADYYCQLWDSTTVVFGCGTKLTVLSGGGGQQLQLQESGPGLVKPSETLSLTCFVSGGSISNSDYFWGWIRQPPGKCLEWIGTIYYSGRTYYNPSLKSRVTISVDTSKNQFSLMLSSVTAVDTAVYYCARYQYGSFDYWGQGTLVTVSSGGGGQGGGGQGGGGQEIVMTQTPLSLPVTPGEPASISCRSSQSLLHSNGYNYLDWYLQKPGQSPQLLIYLGSNRASGVPDRFSGSGSGTDFTLKISRVEAEDVGVYYCMQALQTPYTFGCGTKVEIRSGGGGQEVQLVESGGGLVQPGGSLKLSCAASGFTFNKYAINWVRQAPGKGLEWVARIRSKYNNYATYYADAVKDRFTISRDDSKNTVYLQMNNLKTEDTAVYYCARAGNFGSSYISYWAYWGQGTLVTVSSGGGGQGGGGQGGGGQQTVVTQEPSLTVSPGGTVTITCGSSTGAVTSGNYPNWVQKKPGQAPRGLIGGTKFLAPGTPARFSGSLSGGKAALTLSGVQPEDEAEYYCVLWYSNRWVFGSGTKLTVL

SEQ ID NO: 2700 - protein, 1234 aa, Artificial Sequence
  Synthetic
EVQLLESGGGLVQPGGSLRLSCAASGFTFSGHAMTWVRQAPGKCLEWLSTIYGSGGYTYYAGSVKGRFTISRDNSKNTLYLQMNSLRAEDTAVYYCAKVGGYDWYFDLWGRGTLVTVSSGGGGSGGGGSGGGGSSYELTQPPSVSVALGQTARITCGGHNIGSKNVHWYQQKPGQAPVLVIYRDTNRPSGIPERFSGSNSGNTATLTISRAQAGDEADYYCQLWDSTTVVFGCGTKLTVLSGGGGSQLQLQESGPGLVKPSETLSLTCFVSGGSISNSDYFWGWIRQPPGKCLEWIGTIYYSGRTYYNPSLKSRVTISVDTSKNQFSLMLSSVTAVDTAVYYCARYQYGSFDYWGQGTLVTVSSGGGGSGGGGSGGGGSDIVMTQTPLSLPVTPGEPASISCRSSQSLLHSNGYNYLDWYLQKPGQSPQLLIYLGSNRASGVPDRFSGSGSGTDFTLKISRVEAEDVGVYYCMQALQTPYTFGCGTKVEIRSGGGGSEVQLVESGGGLVQPGGSLKLSCAASGFTFNKYAMNWVRQAPGKGLEWVARIRSKYNNYATYYADSVKDRFTISRDDSKNTAYLQMNNLKTEDTAVYYCVRHGNFGNSYISYWAYWGQGTLVTVSSGGGGSGGGGSGGGGSQTVVTQEPSLTVSPGGTVTLTCGSSTGAVTSGNYPNWVQQKPGQAPRGLIGGTKFLAPGTPARFSGSLLGGKAALTLSGVQPEDEAEYYCVLWYSNRWVFGGGTKLTVLGGGGDKTHTCPPCPAPELLGGPSVFLFPPKPKDTLMISRTPEVTCVVVDVSHEDPEVKFNWYVDGVEVHNAKTKPCEEQYGSTYRCVSVLTVLHQDWLNGKEYKCKVSNKALPAPIEKTISKAKGQPREPQVYTLPPSREEMTKNQVSLTCLVKGFYPSDIAVEWESNGQPENNYKTTPPVLDSDGSFFLYSKLTVDKSRWQQGNVFSCSVMHEALHNHYTQKSLSLSPGKGGGGSGGGGSGGGGSGGGGSGGGGSGGGGSDKTHTCPPCPAPELLGGPSVFLFPPKPKDTLMISRTPEVTCVVVDVSHEDPEVKFNWYVDGVEVHNAKTKPCEEQYGSTYRCVSVLTVLHQDWLNGKEYKCKVSNKALPAPIEKTISKAKGQPREPQVYTLPPSREEMTKNQVSLTCLVKGFYPSDIAVEWESNGQPENNYKTTPPVLDSDGSFFLYSKLTVDKSRWQQGNVFSCSVMHEALHNHYTQKSLSLSPGK

SEQ ID NO: 2701 - protein, 1224 aa, Artificial Sequence
  Synthetic
EVQLLESGGGLVQPGGSLRLSCAASGFTFSGHAMTWVRQAPGKCLEWLSTIYGSGGYTYYAGSVKGRFTISRDNSKNTLYLQMNSLRAEDTAVYYCAKVGGYDWYFDLWGRGTLVTVSSGGGGQGGGGQGGGGQSYELTQPPSVSVALGQTARITCGGHNIGSKNVHWYQQKPGQAPVLVIYRDTNRPSGIPERFSGSNSGNTATLTISRAQAGDEADYYCQLWDSTTVVFGCGTKLTVLSGGGGQQLQLQESGPGLVKPSETLSLTCFVSGGSISNSDYFWGWIRQPPGKCLEWIGTIYYSGRTYYNPSLKSRVTISVDTSKNQFSLMLSSVTAVDTAVYYCARYQYGSFDYWGQGTLVTVSSGGGGQGGGGQGGGGQEIVMTQTPLSLPVTPGEPASISCRSSQSLLHSNGYNYLDWYLQKPGQSPQLLIYLGSNRASGVPDRFSGSGSGTDFTLKISRVEAEDVGVYYCMQALQTPYTFGCGTKVEIRSGGGGQEVQLVESGGGLVQPGGSLKLSCAASGFTFNKYAMNWVRQAPGKGLEWVARIRSKYNNYATYYADSVKDRFTISRDDSKNTAYLQMNNLKTEDTAVYYCVRHGNFGNSYISYWAYWGQGTLVTVSSGGGGQGGGGQGGGGQQTVVTQEPSLTVSPGGTVTLTCGSSTGAVTSGNYPNWVQQKPGQAPRGLIGGTKFLAPGTPARFSGSLLGGKAALTLSGVQPEDEAEYYCVLWYSNRWVFGGGTKLTVLGGGGCPPCPAPELLGGPSVFLFPPKPKDTLMISRTPEVTCVVVDVSHEEPEVKFNWYVDGVEVHNAKTKPCEEQYGSTYRCVSVLTVLHQDWLNGKEYKCKVSNKALPAPIEKTISKAKGQPREPQVYTLPPSREEMTKNQVSLTCLVKGFYPSDIAVEWESNGQPENNYKTTPPVLDSDGSFFLYSKLTVDKSRWQQGNVFSCSVMHEALHNHYTQKSLSLSPGKGGGGQGGGGQGGGGQGGGGQGGGGQGGGGQCPPCPAPELLGGPSVFLFPPKPKDTLMISRTPEVTCVVVDVSHEEPEVKFNWYVDGVEVHNAKTKPCEEQYGSTYRCVSVLTVLHQDWLNGKEYKCKVSNKALPAPIEKTISKAKGQPREPQVYTLPPSREEMTKNQVSLTCLVKGFYPSDIAVEWESNGQPENNYKTTPPVLDSDGSFFLYSKLTVDKSRWQQGNVFSCSVMHEALHNHYTQKSLSLSPGK

SEQ ID NO: 2702 - protein, 1234 aa, Artificial Sequence
  Synthetic
EVQLLESGGGLVQPGGSLRLSCAASGFTFSGHAMTWVRQAPGKCLEWLSTIYGSGGYTYYAGSVKGRFTISRDNSKNTLYLQMNSLRAEDTAVYYCAKVGGYDWYFDLWGRGTLVTVSSGGGGSGGGGSGGGGSSYELTQPPSVSVALGQTARITCGGHNIGSKNVHWYQQKPGQAPVLVIYRDTNRPSGIPERFSGSNSGNTATLTISRAQAGDEADYYCQLWDSTTVVFGCGTKLTVLSGGGGSQLQLQESGPGLVKPSETLSLTCFVSGGSISNSDYFWGWIRQPPGKCLEWIGTIYYSGRTYYNPSLKSRVTISVDTSKNQFSLMLSSVTAVDTAVYYCARYQYGSFDYWGQGTLVTVSSGGGGSGGGGSGGGGSDIVMTQTPLSLPVTPGEPASISCRSSQSLLHSNGYNYLDWYLQKPGQSPQLLIYLGSNRASGVPDRFSGSGSGTDFTLKISRVEAEDVGVYYCMQALQTPYTFGCGTKVEIRSGGGGSEVQLVESGGGLVQPGGSLKLSCAASGFTFNKYAINWVRQAPGKGLEWVARIRSKYNNYATYYADAVKDRFTISRDDSKNTVYLQMNNLKTEDTAVYYCARAGNFGSSYISYWAYWGQGTLVTVSSGGGGSGGGGSGGGGSQTVVTQEPSLTVSPGGTVTITCGSSTGAVTSGNYPNWVQKKPGQAPRGLIGGTKFLAPGTPARFSGSLSGGKAALTLSGVQPEDEAEYYCVLWYSNRWVFGSGTKLTVLGGGGDKTHTCPPCPAPELLGGPSVFLFPPKPKDTLMISRTPEVTCVVVDVSHEDPEVKFNWYVDGVEVHNAKTKPCEEQYGSTYRCVSVLTVLHQDWLNGKEYKCKVSNKALPAPIEKTISKAKGQPREPQVYTLPPSREEMTKNQVSLTCLVKGFYPSDIAVEWESNGQPENNYKTTPPVLDSDGSFFLYSKLTVDKSRWQQGNVFSCSVMHEALHNHYTQKSLSLSPGKGGGGSGGGGSGGGGSGGGGSGGGGSGGGGSDKTHTCPPCPAPELLGGPSVFLFPPKPKDTLMISRTPEVTCVVVDVSHEDPEVKFNWYVDGVEVHNAKTKPCEEQYGSTYRCVSVLTVLHQDWLNGKEYKCKVSNKALPAPIEKTISKAKGQPREPQVYTLPPSREEMTKNQVSLTCLVKGFYPSDIAVEWESNGQPENNYKTTPPVLDSDGSFFLYSKLTVDKSRWQQGNVFSCSVMHEALHNHYTQKSLSLSPGK

SEQ ID NO: 2703 - protein, 1224 aa, Artificial Sequence
  Synthetic
EVQLLESGGGLVQPGGSLRLSCAASGFTFSGHAMTWVRQAPGKCLEWLSTIYGSGGYTYYAGSVKGRFTISRDNSKNTLYLQMNSLRAEDTAVYYCAKVGGYDWYFDLWGRGTLVTVSSGGGGQGGGGQGGGGQSYELTQPPSVSVALGQTARITCGGHNIGSKNVHWYQQKPGQAPVLVIYRDTNRPSGIPERFSGSNSGNTATLTISRAQAGDEADYYCQLWDSTTVVFGCGTKLTVLSGGGGQQLQLQESGPGLVKPSETLSLTCFVSGGSISNSDYFWGWIRQPPGKCLEWIGTIYYSGRTYYNPSLKSRVTISVDTSKNQFSLMLSSVTAVDTAVYYCARYQYGSFDYWGQGTLVTVSSGGGGQGGGGQGGGGQEIVMTQTPLSLPVTPGEPASISCRSSQSLLHSNGYNYLDWYLQKPGQSPQLLIYLGSNRASGVPDRFSGSGSGTDFTLKISRVEAEDVGVYYCMQALQTPYTFGCGTKVEIRSGGGGQEVQLVESGGGLVQPGGSLKLSCAASGFTFNKYAINWVRQAPGKGLEWVARIRSKYNNYATYYADAVKDRFTISRDDSKNTVYLQMNNLKTEDTAVYYCARAGNFGSSYISYWAYWGQGTLVTVSSGGGGQGGGGQGGGGQQTVVTQEPSLTVSPGGTVTITCGSSTGAVTSGNYPNWVQKKPGQAPRGLIGGTKFLAPGTPARFSGSLSGGKAALTLSGVQPEDEAEYYCVLWYSNRWVFGSGTKLTVLGGGGCPPCPAPELLGGPSVFLFPPKPKDTLMISRTPEVTCVVVDVSHEEPEVKFNWYVDGVEVHNAKTKPCEEQYGSTYRCVSVLTVLHQDWLNGKEYKCKVSNKALPAPIEKTISKAKGQPREPQVYTLPPSREEMTKNQVSLTCLVKGFYPSDIAVEWESNGQPENNYKTTPPVLDSDGSFFLYSKLTVDKSRWQQGNVFSCSVMHEALHNHYTQKSLSLSPGKGGGGQGGGGQGGGGQGGGGQGGGGQGGGGQCPPCPAPELLGGPSVFLFPPKPKDTLMISRTPEVTCVVVDVSHEEPEVKFNWYVDGVEVHNAKTKPCEEQYGSTYRCVSVLTVLHQDWLNGKEYKCKVSNKALPAPIEKTISKAKGQPREPQVYTLPPSREEMTKNQVSLTCLVKGFYPSDIAVEWESNGQPENNYKTTPPVLDSDGSFFLYSKLTVDKSRWQQGNVFSCSVMHEALHNHYTQKSLSLSPGK

SEQ ID NO: 2704 - protein, 493 aa, Artificial Sequence
  Synthetic
EVQLLESGGGLVQPGGSLRLSCAASGFTFSGHAMTWVRQAPGKCLEWLSTIYGSGGYTYYAGSVKGRFTISRDNSKNTLYLQMNSLRAEDTAVYYCAKVGGYDWYFDLWGRGTLVTVSSGGGGSGGGGSGGGGSSYELTQPPSVSVALGQTARITCGGHNIGSKNVHWYQQKPGQAPVLVIYRDTNRPSGIPERFSGSNSGNTATLTISRAQAGDEADYYCQLWDSTTVVFGCGTKLTVLSGGGGSQVQLVESGGGVVQPGRSLRLSCAASGFTFSAYGMHWVRQAPGKCLEWVAVILYDGSNKYYADSVKGRFTISRDNSKNTLYLQMNSLRAEDTAVYYCARGSGWLQLGDYFDYWGQGTLVTVSSGGGGSGGGGSGGGGSQSALTQPPSVSGSPGQSITISCTGTSSDVGGYNYVSWYQQHPGKAPKLMIYEVSNRPSGVSNRFSGSKSGNTASLTISGLQAEDEADYYCSSYTSSSTLVFGCGTKLTVL

SEQ ID NO: 2705 - protein, 493 aa, Artificial Sequence
  Synthetic
EVQLLESGGGLVQPGGSLRLSCAASGFTFSGHAMTWVRQAPGKCLEWLSTIYGSGGYTYYAGSVKGRFTISRDNSKNTLYLQMNSLRAEDTAVYYCAKVGGYDWYFDLWGRGTLVTVSSGGGGQGGGGQGGGGQSYELTQPPSVSVALGQTARITCGGHNIGSKNVHWYQQKPGQAPVLVIYRDTNRPSGIPERFSGSNSGNTATLTISRAQAGDEADYYCQLWDSTTVVFGCGTKLTVLSGGGGQQVQLVESGGGVVQPGRSLRLSCAASGFTFSAYGMHWVRQAPGKCLEWVAVILYDGSNKYYADSVKGRFTISRDNSKNTLYLQMNSLRAEDTAVYYCARGSGWLQLGDYFDYWGQGTLVTVSSGGGGQGGGGQGGGGQQSALTQPPSVSGSPGQSITISCTGTSSDVGGYNYVSWYQQHPGKAPKLMIYEVSNRPSGVSNRFSGSKSGNTASLTISGLQAEDEADYYCSSYTSSSTLVFGCGTKLTVL

SEQ ID NO: 2706 - protein, 748 aa, Artificial Sequence
  Synthetic
EVQLLESGGGLVQPGGSLRLSCAASGFTFSGHAMTWVRQAPGKCLEWLSTIYGSGGYTYYAGSVKGRFTISRDNSKNTLYLQMNSLRAEDTAVYYCAKVGGYDWYFDLWGRGTLVTVSSGGGGSGGGGSGGGGSSYELTQPPSVSVALGQTARITCGGHNIGSKNVHWYQQKPGQAPVLVIYRDTNRPSGIPERFSGSNSGNTATLTISRAQAGDEADYYCQLWDSTTVVFGCGTKLTVLSGGGGSQVQLVESGGGVVQPGRSLRLSCAASGFTFSAYGMHWVRQAPGKCLEWVAVILYDGSNKYYADSVKGRFTISRDNSKNTLYLQMNSLRAEDTAVYYCARGSGWLQLGDYFDYWGQGTLVTVSSGGGGSGGGGSGGGGSQSALTQPPSVSGSPGQSITISCTGTSSDVGGYNYVSWYQQHPGKAPKLMIYEVSNRPSGVSNRFSGSKSGNTASLTISGLQAEDEADYYCSSYTSSSTLVFGCGTKLTVLSGGGGSEVQLVESGGGLVQPGGSLKLSCAASGFTFNKYAMNWVRQAPGKGLEWVARIRSKYNNYATYYADSVKDRFTISRDDSKNTAYLQMNNLKTEDTAVYYCVRHGNFGNSYISYWAYWGQGTLVTVSSGGGGSGGGGSGGGGSQTVVTQEPSLTVSPGGTVTLTCGSSTGAVTSGNYPNWVQQKPGQAPRGLIGGTKFLAPGTPARFSGSLLGGKAALTLSGVQPEDEAEYYCVLWYSNRWVFGGGTKLTVL

SEQ ID NO: 2707 - protein, 748 aa, Artificial Sequence
  Synthetic
EVQLLESGGGLVQPGGSLRLSCAASGFTFSGHAMTWVRQAPGKCLEWLSTIYGSGGYTYYAGSVKGRFTISRDNSKNTLYLQMNSLRAEDTAVYYCAKVGGYDWYFDLWGRGTLVTVSSGGGGQGGGGQGGGGQSYELTQPPSVSVALGQTARITCGGHNIGSKNVHWYQQKPGQAPVLVIYRDTNRPSGIPERFSGSNSGNTATLTISRAQAGDEADYYCQLWDSTTVVFGCGTKLTVLSGGGGQQVQLVESGGGVVQPGRSLRLSCAASGFTFSAYGMHWVRQAPGKCLEWVAVILYDGSNKYYADSVKGRFTISRDNSKNTLYLQMNSLRAEDTAVYYCARGSGWLQLGDYFDYWGQGTLVTVSSGGGGQGGGGQGGGGQQSALTQPPSVSGSPGQSITISCTGTSSDVGGYNYVSWYQQHPGKAPKLMIYEVSNRPSGVSNRFSGSKSGNTASLTISGLQAEDEADYYCSSYTSSSTLVFGCGTKLTVLSGGGGQEVQLVESGGGLVQPGGSLKLSCAASGFTFNKYAMNWVRQAPGKGLEWVARIRSKYNNYATYYADSVKDRFTISRDDSKNTAYLQMNNLKTEDTAVYYCVRHGNFGNSYISYWAYWGQGTLVTVSSGGGGQGGGGQGGGGQQTVVTQEPSLTVSPGGTVTLTCGSSTGAVTSGNYPNWVQQKPGQAPRGLIGGTKFLAPGTPARFSGSLLGGKAALTLSGVQPEDEAEYYCVLWYSNRWVFGGGTKLTVL

SEQ ID NO: 2708 - protein, 748 aa, Artificial Sequence
  Synthetic
EVQLLESGGGLVQPGGSLRLSCAASGFTFSGHAMTWVRQAPGKCLEWLSTIYGSGGYTYYAGSVKGRFTISRDNSKNTLYLQMNSLRAEDTAVYYCAKVGGYDWYFDLWGRGTLVTVSSGGGGSGGGGSGGGGSSYELTQPPSVSVALGQTARITCGGHNIGSKNVHWYQQKPGQAPVLVIYRDTNRPSGIPERFSGSNSGNTATLTISRAQAGDEADYYCQLWDSTTVVFGCGTKLTVLSGGGGSQVQLVESGGGVVQPGRSLRLSCAASGFTFSAYGMHWVRQAPGKCLEWVAVILYDGSNKYYADSVKGRFTISRDNSKNTLYLQMNSLRAEDTAVYYCARGSGWLQLGDYFDYWGQGTLVTVSSGGGGSGGGGSGGGGSQSALTQPPSVSGSPGQSITISCTGTSSDVGGYNYVSWYQQHPGKAPKLMIYEVSNRPSGVSNRFSGSKSGNTASLTISGLQAEDEADYYCSSYTSSSTLVFGCGTKLTVLSGGGGSEVQLVESGGGLVQPGGSLKLSCAASGFTFNKYAINWVRQAPGKGLEWVARIRSKYNNYATYYADAVKDRFTISRDDSKNTVYLQMNNLKTEDTAVYYCARAGNFGSSYISYWAYWGQGTLVTVSSGGGGSGGGGSGGGGSQTVVTQEPSLTVSPGGTVTITCGSSTGAVTSGNYPNWVQKKPGQAPRGLIGGTKFLAPGTPARFSGSLSGGKAALTLSGVQPEDEAEYYCVLWYSNRWVFGSGTKLTVL

SEQ ID NO: 2709 - protein, 748 aa, Artificial Sequence
  Synthetic
EVQLLESGGGLVQPGGSLRLSCAASGFTFSGHAMTWVRQAPGKCLEWLSTIYGSGGYTYYAGSVKGRFTISRDNSKNTLYLQMNSLRAEDTAVYYCAKVGGYDWYFDLWGRGTLVTVSSGGGGQGGGGQGGGGQSYELTQPPSVSVALGQTARITCGGHNIGSKNVHWYQQKPGQAPVLVIYRDTNRPSGIPERFSGSNSGNTATLTISRAQAGDEADYYCQLWDSTTVVFGCGTKLTVLSGGGGQQVQLVESGGGVVQPGRSLRLSCAASGFTFSAYGMHWVRQAPGKCLEWVAVILYDGSNKYYADSVKGRFTISRDNSKNTLYLQMNSLRAEDTAVYYCARGSGWLQLGDYFDYWGQGTLVTVSSGGGGQGGGGQGGGGQQSALTQPPSVSGSPGQSITISCTGTSSDVGGYNYVSWYQQHPGKAPKLMIYEVSNRPSGVSNRFSGSKSGNTASLTISGLQAEDEADYYCSSYTSSSTLVFGCGTKLTVLSGGGGQEVQLVESGGGLVQPGGSLKLSCAASGFTFNKYAINWVRQAPGKGLEWVARIRSKYNNYATYYADAVKDRFTISRDDSKNTVYLQMNNLKTEDTAVYYCARAGNFGSSYISYWAYWGQGTLVTVSSGGGGQGGGGQGGGGQQTVVTQEPSLTVSPGGTVTITCGSSTGAVTSGNYPNWVQKKPGQAPRGLIGGTKFLAPGTPARFSGSLSGGKAALTLSGVQPEDEAEYYCVLWYSNRWVFGSGTKLTVL

SEQ ID NO: 2710 - protein, 1236 aa, Artificial Sequence
  Synthetic
EVQLLESGGGLVQPGGSLRLSCAASGFTFSGHAMTWVRQAPGKCLEWLSTIYGSGGYTYYAGSVKGRFTISRDNSKNTLYLQMNSLRAEDTAVYYCAKVGGYDWYFDLWGRGTLVTVSSGGGGSGGGGSGGGGSSYELTQPPSVSVALGQTARITCGGHNIGSKNVHWYQQKPGQAPVLVIYRDTNRPSGIPERFSGSNSGNTATLTISRAQAGDEADYYCQLWDSTTVVFGCGTKLTVLSGGGGSQVQLVESGGGVVQPGRSLRLSCAASGFTFSAYGMHWVRQAPGKCLEWVAVILYDGSNKYYADSVKGRFTISRDNSKNTLYLQMNSLRAEDTAVYYCARGSGWLQLGDYFDYWGQGTLVTVSSGGGGSGGGGSGGGGSQSALTQPPSVSGSPGQSITISCTGTSSDVGGYNYVSWYQQHPGKAPKLMIYEVSNRPSGVSNRFSGSKSGNTASLTISGLQAEDEADYYCSSYTSSSTLVFGCGTKLTVLSGGGGSEVQLVESGGGLVQPGGSLKLSCAASGFTFNKYAMNWVRQAPGKGLEWVARIRSKYNNYATYYADSVKDRFTISRDDSKNTAYLQMNNLKTEDTAVYYCVRHGNFGNSYISYWAYWGQGTLVTVSSGGGGSGGGGSGGGGSQTVVTQEPSLTVSPGGTVTLTCGSSTGAVTSGNYPNWVQQKPGQAPRGLIGGTKFLAPGTPARFSGSLLGGKAALTLSGVQPEDEAEYYCVLWYSNRWVFGGGTKLTVLGGGGDKTHTCPPCPAPELLGGPSVFLFPPKPKDTLMISRTPEVTCVVVDVSHEDPEVKFNWYVDGVEVHNAKTKPCEEQYGSTYRCVSVLTVLHQDWLNGKEYKCKVSNKALPAPIEKTISKAKGQPREPQVYTLPPSREEMTKNQVSLTCLVKGFYPSDIAVEWESNGQPENNYKTTPPVLDSDGSFFLYSKLTVDKSRWQQGNVFSCSVMHEALHNHYTQKSLSLSPGKGGGGSGGGGSGGGGSGGGGSGGGGSGGGGSDKTHTCPPCPAPELLGGPSVFLFPPKPKDTLMISRTPEVTCVVVDVSHEDPEVKFNWYVDGVEVHNAKTKPCEEQYGSTYRCVSVLTVLHQDWLNGKEYKCKVSNKALPAPIEKTISKAKGQPREPQVYTLPPSREEMTKNQVSLTCLVKGFYPSDIAVEWESNGQPENNYKTTPPVLDSDGSFFLYSKLTVDKSRWQQGNVFSCSVMHEALHNHYTQKSLSLSPGK

SEQ ID NO: 2711 - protein, 1226 aa, Artificial Sequence
  Synthetic
EVQLLESGGGLVQPGGSLRLSCAASGFTFSGHAMTWVRQAPGKCLEWLSTIYGSGGYTYYAGSVKGRFTISRDNSKNTLYLQMNSLRAEDTAVYYCAKVGGYDWYFDLWGRGTLVTVSSGGGGQGGGGQGGGGQSYELTQPPSVSVALGQTARITCGGHNIGSKNVHWYQQKPGQAPVLVIYRDTNRPSGIPERFSGSNSGNTATLTISRAQAGDEADYYCQLWDSTTVVFGCGTKLTVLSGGGGQQVQLVESGGGVVQPGRSLRLSCAASGFTFSAYGMHWVRQAPGKCLEWVAVILYDGSNKYYADSVKGRFTISRDNSKNTLYLQMNSLRAEDTAVYYCARGSGWLQLGDYFDYWGQGTLVTVSSGGGGQGGGGQGGGGQQSALTQPPSVSGSPGQSITISCTGTSSDVGGYNYVSWYQQHPGKAPKLMIYEVSNRPSGVSNRFSGSKSGNTASLTISGLQAEDEADYYCSSYTSSSTLVFGCGTKLTVLSGGGGQEVQLVESGGGLVQPGGSLKLSCAASGFTFNKYAMNWVRQAPGKGLEWVARIRSKYNNYATYYADSVKDRFTISRDDSKNTAYLQMNNLKTEDTAVYYCVRHGNFGNSYISYWAYWGQGTLVTVSSGGGGQGGGGQGGGGQQTVVTQEPSLTVSPGGTVTLTCGSSTGAVTSGNYPNWVQQKPGQAPRGLIGGTKFLAPGTPARFSGSLLGGKAALTLSGVQPEDEAEYYCVLWYSNRWVFGGGTKLTVLGGGGCPPCPAPELLGGPSVFLFPPKPKDTLMISRTPEVTCVVVDVSHEEPEVKFNWYVDGVEVHNAKTKPCEEQYGSTYRCVSVLTVLHQDWLNGKEYKCKVSNKALPAPIEKTISKAKGQPREPQVYTLPPSREEMTKNQVSLTCLVKGFYPSDIAVEWESNGQPENNYKTTPPVLDSDGSFFLYSKLTVDKSRWQQGNVFSCSVMHEALHNHYTQKSLSLSPGKGGGGQGGGGQGGGGQGGGGQGGGGQGGGGQCPPCPAPELLGGPSVFLFPPKPKDTLMISRTPEVTCVVVDVSHEEPEVKFNWYVDGVEVHNAKTKPCEEQYGSTYRCVSVLTVLHQDWLNGKEYKCKVSNKALPAPIEKTISKAKGQPREPQVYTLPPSREEMTKNQVSLTCLVKGFYPSDIAVEWESNGQPENNYKTTPPVLDSDGSFFLYSKLTVDKSRWQQGNVFSCSVMHEALHNHYTQKSLSLSPGK

SEQ ID NO: 2712 - protein, 1236 aa, Artificial Sequence
  Synthetic
EVQLLESGGGLVQPGGSLRLSCAASGFTFSGHAMTWVRQAPGKCLEWLSTIYGSGGYTYYAGSVKGRFTISRDNSKNTLYLQMNSLRAEDTAVYYCAKVGGYDWYFDLWGRGTLVTVSSGGGGSGGGGSGGGGSSYELTQPPSVSVALGQTARITCGGHNIGSKNVHWYQQKPGQAPVLVIYRDTNRPSGIPERFSGSNSGNTATLTISRAQAGDEADYYCQLWDSTTVVFGCGTKLTVLSGGGGSQVQLVESGGGVVQPGRSLRLSCAASGFTFSAYGMHWVRQAPGKCLEWVAVILYDGSNKYYADSVKGRFTISRDNSKNTLYLQMNSLRAEDTAVYYCARGSGWLQLGDYFDYWGQGTLVTVSSGGGGSGGGGSGGGGSQSALTQPPSVSGSPGQSITISCTGTSSDVGGYNYVSWYQQHPGKAPKLMIYEVSNRPSGVSNRFSGSKSGNTASLTISGLQAEDEADYYCSSYTSSSTLVFGCGTKLTVLSGGGGSEVQLVESGGGLVQPGGSLKLSCAASGFTFNKYAINWVRQAPGKGLEWVARIRSKYNNYATYYADAVKDRFTISRDDSKNTVYLQMNNLKTEDTAVYYCARAGNFGSSYISYWAYWGQGTLVTVSSGGGGSGGGGSGGGGSQTVVTQEPSLTVSPGGTVTITCGSSTGAVTSGNYPNWVQKKPGQAPRGLIGGTKFLAPGTPARFSGSLSGGKAALTLSGVQPEDEAEYYCVLWYSNRWVFGSGTKLTVLGGGGDKTHTCPPCPAPELLGGPSVFLFPPKPKDTLMISRTPEVTCVVVDVSHEDPEVKFNWYVDGVEVHNAKTKPCEEQYGSTYRCVSVLTVLHQDWLNGKEYKCKVSNKALPAPIEKTISKAKGQPREPQVYTLPPSREEMTKNQVSLTCLVKGFYPSDIAVEWESNGQPENNYKTTPPVLDSDGSFFLYSKLTVDKSRWQQGNVFSCSVMHEALHNHYTQKSLSLSPGKGGGGSGGGGSGGGGSGGGGSGGGGSGGGGSDKTHTCPPCPAPELLGGPSVFLFPPKPKDTLMISRTPEVTCVVVDVSHEDPEVKFNWYVDGVEVHNAKTKPCEEQYGSTYRCVSVLTVLHQDWLNGKEYKCKVSNKALPAPIEKTISKAKGQPREPQVYTLPPSREEMTKNQVSLTCLVKGFYPSDIAVEWESNGQPENNYKTTPPVLDSDGSFFLYSKLTVDKSRWQQGNVFSCSVMHEALHNHYTQKSLSLSPGK

SEQ ID NO: 2713 - protein, 1226 aa, Artificial Sequence
  Synthetic
EVQLLESGGGLVQPGGSLRLSCAASGFTFSGHAMTWVRQAPGKCLEWLSTIYGSGGYTYYAGSVKGRFTISRDNSKNTLYLQMNSLRAEDTAVYYCAKVGGYDWYFDLWGRGTLVTVSSGGGGQGGGGQGGGGQSYELTQPPSVSVALGQTARITCGGHNIGSKNVHWYQQKPGQAPVLVIYRDTNRPSGIPERFSGSNSGNTATLTISRAQAGDEADYYCQLWDSTTVVFGCGTKLTVLSGGGGQQVQLVESGGGVVQPGRSLRLSCAASGFTFSAYGMHWVRQAPGKCLEWVAVILYDGSNKYYADSVKGRFTISRDNSKNTLYLQMNSLRAEDTAVYYCARGSGWLQLGDYFDYWGQGTLVTVSSGGGGQGGGGQGGGGQQSALTQPPSVSGSPGQSITISCTGTSSDVGGYNYVSWYQQHPGKAPKLMIYEVSNRPSGVSNRFSGSKSGNTASLTISGLQAEDEADYYCSSYTSSSTLVFGCGTKLTVLSGGGGQEVQLVESGGGLVQPGGSLKLSCAASGFTFNKYAINWVRQAPGKGLEWVARIRSKYNNYATYYADAVKDRFTISRDDSKNTVYLQMNNLKTEDTAVYYCARAGNFGSSYISYWAYWGQGTLVTVSSGGGGQGGGGQGGGGQQTVVTQEPSLTVSPGGTVTITCGSSTGAVTSGNYPNWVQKKPGQAPRGLIGGTKFLAPGTPARFSGSLSGGKAALTLSGVQPEDEAEYYCVLWYSNRWVFGSGTKLTVLGGGGCPPCPAPELLGGPSVFLFPPKPKDTLMISRTPEVTCVVVDVSHEEPEVKFNWYVDGVEVHNAKTKPCEEQYGSTYRCVSVLTVLHQDWLNGKEYKCKVSNKALPAPIEKTISKAKGQPREPQVYTLPPSREEMTKNQVSLTCLVKGFYPSDIAVEWESNGQPENNYKTTPPVLDSDGSFFLYSKLTVDKSRWQQGNVFSCSVMHEALHNHYTQKSLSLSPGKGGGGQGGGGQGGGGQGGGGQGGGGQGGGGQCPPCPAPELLGGPSVFLFPPKPKDTLMISRTPEVTCVVVDVSHEEPEVKFNWYVDGVEVHNAKTKPCEEQYGSTYRCVSVLTVLHQDWLNGKEYKCKVSNKALPAPIEKTISKAKGQPREPQVYTLPPSREEMTKNQVSLTCLVKGFYPSDIAVEWESNGQPENNYKTTPPVLDSDGSFFLYSKLTVDKSRWQQGNVFSCSVMHEALHNHYTQKSLSLSPGK

SEQ ID NO: 2714 - protein, 499 aa, Artificial Sequence
  Synthetic
EVQLVESGGGLVQPGGSLTLSCAASGFTFHDYTMHWVRQTPGKCLEWLSGIGWNGYSKGYADSVKGRFTISRDNAKNSLFLQMNSLTSDDTALYYCVKDYHYGSGILDNYYGLDVWGQGTTVTVSSGGGGSGGGGSGGGGSEIVLTQSPATLSVSPGERATLSCRASQSISNNLAWYQQKPGQAPRLLIYGASSRATGIPDRFSGSGSGTEFTLTISSLQSEDFAVYYCQQYKNWPLTFGCGTKVDIKSGGGGSQVQLVQSGGEVKKPGASVKVSCKASGYTFTSYGISWVRQAPGQCLEWMGWMSPYNGNAIYAQKLQGRVTMTRDTSTSTAYMELRSLRSDDTAVYYCARDPDYYGSGSYSDYWGQGTLVTVSSGGGGSGGGGSGGGGSEIVLTQSPATLSVSPGERATLSCRASQSVSSNLAWYQQKPGQAPRLLIYGASSRATGIPARFSGSGSGTEFTLTISSLQSEDFAVYYCQQYHSWPLLTFGCGTKVEIK

SEQ ID NO: 2715 - protein, 499 aa, Artificial Sequence
  Synthetic
EVQLVESGGGLVQPGGSLTLSCAASGFTFHDYTMHWVRQTPGKCLEWLSGIGWNGYSKGYADSVKGRFTISRDNAKNSLFLQMNSLTSDDTALYYCVKDYHYGSGILDNYYGLDVWGQGTTVTVSSGGGGQGGGGQGGGGQEIVLTQSPATLSVSPGERATLSCRASQSISNNLAWYQQKPGQAPRLLIYGASSRATGIPDRFSGSGSGTEFTLTISSLQSEDFAVYYCQQYKNWPLTFGCGTKVDIKSGGGGQQVQLVQSGGEVKKPGASVKVSCKASGYTFTSYGISWVRQAPGQCLEWMGWMSPYNGNAIYAQKLQGRVTMTRDTSTSTAYMELRSLRSDDTAVYYCARDPDYYGSGSYSDYWGQGTLVTVSSGGGGQGGGGQGGGGQEIVLTQSPATLSVSPGERATLSCRASQSVSSNLAWYQQKPGQAPRLLIYGASSRATGIPARFSGSGSGTEFTLTISSLQSEDFAVYYCQQYHSWPLLTFGCGTKVEIK

SEQ ID NO: 2716 - protein, 754 aa, Artificial Sequence
  Synthetic
EVQLVESGGGLVQPGGSLTLSCAASGFTFHDYTMHWVRQTPGKCLEWLSGIGWNGYSKGYADSVKGRFTISRDNAKNSLFLQMNSLTSDDTALYYCVKDYHYGSGILDNYYGLDVWGQGTTVTVSSGGGGSGGGGSGGGGSEIVLTQSPATLSVSPGERATLSCRASQSISNNLAWYQQKPGQAPRLLIYGASSRATGIPDRFSGSGSGTEFTLTISSLQSEDFAVYYCQQYKNWPLTFGCGTKVDIKSGGGGSQVQLVQSGGEVKKPGASVKVSCKASGYTFTSYGISWVRQAPGQCLEWMGWMSPYNGNAIYAQKLQGRVTMTRDTSTSTAYMELRSLRSDDTAVYYCARDPDYYGSGSYSDYWGQGTLVTVSSGGGGSGGGGSGGGGSEIVLTQSPATLSVSPGERATLSCRASQSVSSNLAWYQQKPGQAPRLLIYGASSRATGIPARFSGSGSGTEFTLTISSLQSEDFAVYYCQQYHSWPLLTFGCGTKVEIKSGGGGSEVQLVESGGGLVQPGGSLKLSCAASGFTFNKYAMNWVRQAPGKGLEWVARIRSKYNNYATYYADSVKDRFTISRDDSKNTAYLQMNNLKTEDTAVYYCVRHGNFGNSYISYWAYWGQGTLVTVSSGGGGSGGGGSGGGGSQTVVTQEPSLTVSPGGTVTLTCGSSTGAVTSGNYPNWVQQKPGQAPRGLIGGTKFLAPGTPARFSGSLLGGKAALTLSGVQPEDEAEYYCVLWYSNRWVFGGGTKLTVL

SEQ ID NO: 2717 - protein, 754 aa, Artificial Sequence
  Synthetic
EVQLVESGGGLVQPGGSLTLSCAASGFTFHDYTMHWVRQTPGKCLEWLSGIGWNGYSKGYADSVKGRFTISRDNAKNSLFLQMNSLTSDDTALYYCVKDYHYGSGILDNYYGLDVWGQGTTVTVSSGGGGQGGGGQGGGGQEIVLTQSPATLSVSPGERATLSCRASQSISNNLAWYQQKPGQAPRLLIYGASSRATGIPDRFSGSGSGTEFTLTISSLQSEDFAVYYCQQYKNWPLTFGCGTKVDIKSGGGGQQVQLVQSGGEVKKPGASVKVSCKASGYTFTSYGISWVRQAPGQCLEWMGWMSPYNGNAIYAQKLQGRVTMTRDTSTSTAYMELRSLRSDDTAVYYCARDPDYYGSGSYSDYWGQGTLVTVSSGGGGQGGGGQGGGGQEIVLTQSPATLSVSPGERATLSCRASQSVSSNLAWYQQKPGQAPRLLIYGASSRATGIPARFSGSGSGTEFTLTISSLQSEDFAVYYCQQYHSWPLLTFGCGTKVEIKSGGGGQEVQLVESGGGLVQPGGSLKLSCAASGFTFNKYAMNWVRQAPGKGLEWVARIRSKYNNYATYYADSVKDRFTISRDDSKNTAYLQMNNLKTEDTAVYYCVRHGNFGNSYISYWAYWGQGTLVTVSSGGGGQGGGGQGGGGQQTVVTQEPSLTVSPGGTVTLTCGSSTGAVTSGNYPNWVQQKPGQAPRGLIGGTKFLAPGTPARFSGSLLGGKAALTLSGVQPEDEAEYYCVLWYSNRWVFGGGTKLTVL

SEQ ID NO: 2718 - protein, 754 aa, Artificial Sequence
  Synthetic
EVQLVESGGGLVQPGGSLTLSCAASGFTFHDYTMHWVRQTPGKCLEWLSGIGWNGYSKGYADSVKGRFTISRDNAKNSLFLQMNSLTSDDTALYYCVKDYHYGSGILDNYYGLDVWGQGTTVTVSSGGGGSGGGGSGGGGSEIVLTQSPATLSVSPGERATLSCRASQSISNNLAWYQQKPGQAPRLLIYGASSRATGIPDRFSGSGSGTEFTLTISSLQSEDFAVYYCQQYKNWPLTFGCGTKVDIKSGGGGSQVQLVQSGGEVKKPGASVKVSCKASGYTFTSYGISWVRQAPGQCLEWMGWMSPYNGNAIYAQKLQGRVTMTRDTSTSTAYMELRSLRSDDTAVYYCARDPDYYGSGSYSDYWGQGTLVTVSSGGGGSGGGGSGGGGSEIVLTQSPATLSVSPGERATLSCRASQSVSSNLAWYQQKPGQAPRLLIYGASSRATGIPARFSGSGSGTEFTLTISSLQSEDFAVYYCQQYHSWPLLTFGCGTKVEIKSGGGGSEVQLVESGGGLVQPGGSLKLSCAASGFTFNKYAINWVRQAPGKGLEWVARIRSKYNNYATYYADAVKDRFTISRDDSKNTVYLQMNNLKTEDTAVYYCARAGNFGSSYISYWAYWGQGTLVTVSSGGGGSGGGGSGGGGSQTVVTQEPSLTVSPGGTVTITCGSSTGAVTSGNYPNWVQKKPGQAPRGLIGGTKFLAPGTPARFSGSLSGGKAALTLSGVQPEDEAEYYCVLWYSNRWVFGSGTKLTVL

SEQ ID NO: 2719 - protein, 754 aa, Artificial Sequence
  Synthetic
EVQLVESGGGLVQPGGSLTLSCAASGFTFHDYTMHWVRQTPGKCLEWLSGIGWNGYSKGYADSVKGRFTISRDNAKNSLFLQMNSLTSDDTALYYCVKDYHYGSGILDNYYGLDVWGQGTTVTVSSGGGGQGGGGQGGGGQEIVLTQSPATLSVSPGERATLSCRASQSISNNLAWYQQKPGQAPRLLIYGASSRATGIPDRFSGSGSGTEFTLTISSLQSEDFAVYYCQQYKNWPLTFGCGTKVDIKSGGGGQQVQLVQSGGEVKKPGASVKVSCKASGYTFTSYGISWVRQAPGQCLEWMGWMSPYNGNAIYAQKLQGRVTMTRDTSTSTAYMELRSLRSDDTAVYYCARDPDYYGSGSYSDYWGQGTLVTVSSGGGGQGGGGQGGGGQEIVLTQSPATLSVSPGERATLSCRASQSVSSNLAWYQQKPGQAPRLLIYGASSRATGIPARFSGSGSGTEFTLTISSLQSEDFAVYYCQQYHSWPLLTFGCGTKVEIKSGGGGQEVQLVESGGGLVQPGGSLKLSCAASGFTFNKYAINWVRQAPGKGLEWVARIRSKYNNYATYYADAVKDRFTISRDDSKNTVYLQMNNLKTEDTAVYYCARAGNFGSSYISYWAYWGQGTLVTVSSGGGGQGGGGQGGGGQQTVVTQEPSLTVSPGGTVTITCGSSTGAVTSGNYPNWVQKKPGQAPRGLIGGTKFLAPGTPARFSGSLSGGKAALTLSGVQPEDEAEYYCVLWYSNRWVFGSGTKLTVL

SEQ ID NO: 2720 - protein, 1242 aa, Artificial Sequence
  Synthetic
EVQLVESGGGLVQPGGSLTLSCAASGFTFHDYTMHWVRQTPGKCLEWLSGIGWNGYSKGYADSVKGRFTISRDNAKNSLFLQMNSLTSDDTALYYCVKDYHYGSGILDNYYGLDVWGQGTTVTVSSGGGGSGGGGSGGGGSEIVLTQSPATLSVSPGERATLSCRASQSISNNLAWYQQKPGQAPRLLIYGASSRATGIPDRFSGSGSGTEFTLTISSLQSEDFAVYYCQQYKNWPLTFGCGTKVDIKSGGGGSQVQLVQSGGEVKKPGASVKVSCKASGYTFTSYGISWVRQAPGQCLEWMGWMSPYNGNAIYAQKLQGRVTMTRDTSTSTAYMELRSLRSDDTAVYYCARDPDYYGSGSYSDYWGQGTLVTVSSGGGGSGGGGSGGGGSEIVLTQSPATLSVSPGERATLSCRASQSVSSNLAWYQQKPGQAPRLLIYGASSRATGIPARFSGSGSGTEFTLTISSLQSEDFAVYYCQQYHSWPLLTFGCGTKVEIKSGGGGSEVQLVESGGGLVQPGGSLKLSCAASGFTFNKYAMNWVRQAPGKGLEWVARIRSKYNNYATYYADSVKDRFTISRDDSKNTAYLQMNNLKTEDTAVYYCVRHGNFGNSYISYWAYWGQGTLVTVSSGGGGSGGGGSGGGGSQTVVTQEPSLTVSPGGTVTLTCGSSTGAVTSGNYPNWVQQKPGQAPRGLIGGTKFLAPGTPARFSGSLLGGKAALTLSGVQPEDEAEYYCVLWYSNRWVFGGGTKLTVLGGGGDKTHTCPPCPAPELLGGPSVFLFPPKPKDTLMISRTPEVTCVVVDVSHEDPEVKFNWYVDGVEVHNAKTKPCEEQYGSTYRCVSVLTVLHQDWLNGKEYKCKVSNKALPAPIEKTISKAKGQPREPQVYTLPPSREEMTKNQVSLTCLVKGFYPSDIAVEWESNGQPENNYKTTPPVLDSDGSFFLYSKLTVDKSRWQQGNVFSCSVMHEALHNHYTQKSLSLSPGKGGGGSGGGGSGGGGSGGGGSGGGGSGGGGSDKTHTCPPCPAPELLGGPSVFLFPPKPKDTLMISRTPEVTCVVVDVSHEDPEVKFNWYVDGVEVHNAKTKPCEEQYGSTYRCVSVLTVLHQDWLNGKEYKCKVSNKALPAPIEKTISKAKGQPREPQVYTLPPSREEMTKNQVSLTCLVKGFYPSDIAVEWESNGQPENNYKTTPPVLDSDGSFFLYSKLTVDKSRWQQGNVFSCSVMHEALHNHYTQKSLSLSPGK

SEQ ID NO: 2721 - protein, 1232 aa, Artificial Sequence
  Synthetic
EVQLVESGGGLVQPGGSLTLSCAASGFTFHDYTMHWVRQTPGKCLEWLSGIGWNGYSKGYADSVKGRFTISRDNAKNSLFLQMNSLTSDDTALYYCVKDYHYGSGILDNYYGLDVWGQGTTVTVSSGGGGQGGGGQGGGGQEIVLTQSPATLSVSPGERATLSCRASQSISNNLAWYQQKPGQAPRLLIYGASSRATGIPDRFSGSGSGTEFTLTISSLQSEDFAVYYCQQYKNWPLTFGCGTKVDIKSGGGGQQVQLVQSGGEVKKPGASVKVSCKASGYTFTSYGISWVRQAPGQCLEWMGWMSPYNGNAIYAQKLQGRVTMTRDTSTSTAYMELRSLRSDDTAVYYCARDPDYYGSGSYSDYWGQGTLVTVSSGGGGQGGGGQGGGGQEIVLTQSPATLSVSPGERATLSCRASQSVSSNLAWYQQKPGQAPRLLIYGASSRATGIPARFSGSGSGTEFTLTISSLQSEDFAVYYCQQYHSWPLLTFGCGTKVEIKSGGGGQEVQLVESGGGLVQPGGSLKLSCAASGFTFNKYAMNWVRQAPGKGLEWVARIRSKYNNYATYYADSVKDRFTISRDDSKNTAYLQMNNLKTEDTAVYYCVRHGNFGNSYISYWAYWGQGTLVTVSSGGGGQGGGGQGGGGQQTVVTQEPSLTVSPGGTVTLTCGSSTGAVTSGNYPNWVQQKPGQAPRGLIGGTKFLAPGTPARFSGSLLGGKAALTLSGVQPEDEAEYYCVLWYSNRWVFGGGTKLTVLGGGGCPPCPAPELLGGPSVFLFPPKPKDTLMISRTPEVTCVVVDVSHEEPEVKFNWYVDGVEVHNAKTKPCEEQYGSTYRCVSVLTVLHQDWLNGKEYKCKVSNKALPAPIEKTISKAKGQPREPQVYTLPPSREEMTKNQVSLTCLVKGFYPSDIAVEWESNGQPENNYKTTPPVLDSDGSFFLYSKLTVDKSRWQQGNVFSCSVMHEALHNHYTQKSLSLSPGKGGGGQGGGGQGGGGQGGGGQGGGGQGGGGQCPPCPAPELLGGPSVFLFPPKPKDTLMISRTPEVTCVVVDVSHEEPEVKFNWYVDGVEVHNAKTKPCEEQYGSTYRCVSVLTVLHQDWLNGKEYKCKVSNKALPAPIEKTISKAKGQPREPQVYTLPPSREEMTKNQVSLTCLVKGFYPSDIAVEWESNGQPENNYKTTPPVLDSDGSFFLYSKLTVDKSRWQQGNVFSCSVMHEALHNHYTQKSLSLSPGK

SEQ ID NO: 2722 - protein, 1242 aa, Artificial Sequence
  Synthetic
EVQLVESGGGLVQPGGSLTLSCAASGFTFHDYTMHWVRQTPGKCLEWLSGIGWNGYSKGYADSVKGRFTISRDNAKNSLFLQMNSLTSDDTALYYCVKDYHYGSGILDNYYGLDVWGQGTTVTVSSGGGGSGGGGSGGGGSEIVLTQSPATLSVSPGERATLSCRASQSISNNLAWYQQKPGQAPRLLIYGASSRATGIPDRFSGSGSGTEFTLTISSLQSEDFAVYYCQQYKNWPLTFGCGTKVDIKSGGGGSQVQLVQSGGEVKKPGASVKVSCKASGYTFTSYGISWVRQAPGQCLEWMGWMSPYNGNAIYAQKLQGRVTMTRDTSTSTAYMELRSLRSDDTAVYYCARDPDYYGSGSYSDYWGQGTLVTVSSGGGGSGGGGSGGGGSEIVLTQSPATLSVSPGERATLSCRASQSVSSNLAWYQQKPGQAPRLLIYGASSRATGIPARFSGSGSGTEFTLTISSLQSEDFAVYYCQQYHSWPLLTFGCGTKVEIKSGGGGSEVQLVESGGGLVQPGGSLKLSCAASGFTFNKYAINWVRQAPGKGLEWVARIRSKYNNYATYYADAVKDRFTISRDDSKNTVYLQMNNLKTEDTAVYYCARAGNFGSSYISYWAYWGQGTLVTVSSGGGGSGGGGSGGGGSQTVVTQEPSLTVSPGGTVTITCGSSTGAVTSGNYPNWVQKKPGQAPRGLIGGTKFLAPGTPARFSGSLSGGKAALTLSGVQPEDEAEYYCVLWYSNRWVFGSGTKLTVLGGGGDKTHTCPPCPAPELLGGPSVFLFPPKPKDTLMISRTPEVTCVVVDVSHEDPEVKFNWYVDGVEVHNAKTKPCEEQYGSTYRCVSVLTVLHQDWLNGKEYKCKVSNKALPAPIEKTISKAKGQPREPQVYTLPPSREEMTKNQVSLTCLVKGFYPSDIAVEWESNGQPENNYKTTPPVLDSDGSFFLYSKLTVDKSRWQQGNVFSCSVMHEALHNHYTQKSLSLSPGKGGGGSGGGGSGGGGSGGGGSGGGGSGGGGSDKTHTCPPCPAPELLGGPSVFLFPPKPKDTLMISRTPEVTCVVVDVSHEDPEVKFNWYVDGVEVHNAKTKPCEEQYGSTYRCVSVLTVLHQDWLNGKEYKCKVSNKALPAPIEKTISKAKGQPREPQVYTLPPSREEMTKNQVSLTCLVKGFYPSDIAVEWESNGQPENNYKTTPPVLDSDGSFFLYSKLTVDKSRWQQGNVFSCSVMHEALHNHYTQKSLSLSPGK

SEQ ID NO: 2723 - protein, 1232 aa, Artificial Sequence
  Synthetic
EVQLVESGGGLVQPGGSLTLSCAASGFTFHDYTMHWVRQTPGKCLEWLSGIGWNGYSKGYADSVKGRFTISRDNAKNSLFLQMNSLTSDDTALYYCVKDYHYGSGILDNYYGLDVWGQGTTVTVSSGGGGQGGGGQGGGGQEIVLTQSPATLSVSPGERATLSCRASQSISNNLAWYQQKPGQAPRLLIYGASSRATGIPDRFSGSGSGTEFTLTISSLQSEDFAVYYCQQYKNWPLTFGCGTKVDIKSGGGGQQVQLVQSGGEVKKPGASVKVSCKASGYTFTSYGISWVRQAPGQCLEWMGWMSPYNGNAIYAQKLQGRVTMTRDTSTSTAYMELRSLRSDDTAVYYCARDPDYYGSGSYSDYWGQGTLVTVSSGGGGQGGGGQGGGGQEIVLTQSPATLSVSPGERATLSCRASQSVSSNLAWYQQKPGQAPRLLIYGASSRATGIPARFSGSGSGTEFTLTISSLQSEDFAVYYCQQYHSWPLLTFGCGTKVEIKSGGGGQEVQLVESGGGLVQPGGSLKLSCAASGFTFNKYAINWVRQAPGKGLEWVARIRSKYNNYATYYADAVKDRFTISRDDSKNTVYLQMNNLKTEDTAVYYCARAGNFGSSYISYWAYWGQGTLVTVSSGGGGQGGGGQGGGGQQTVVTQEPSLTVSPGGTVTITCGSSTGAVTSGNYPNWVQKKPGQAPRGLIGGTKFLAPGTPARFSGSLSGGKAALTLSGVQPEDEAEYYCVLWYSNRWVFGSGTKLTVLGGGGCPPCPAPELLGGPSVFLFPPKPKDTLMISRTPEVTCVVVDVSHEEPEVKFNWYVDGVEVHNAKTKPCEEQYGSTYRCVSVLTVLHQDWLNGKEYKCKVSNKALPAPIEKTISKAKGQPREPQVYTLPPSREEMTKNQVSLTCLVKGFYPSDIAVEWESNGQPENNYKTTPPVLDSDGSFFLYSKLTVDKSRWQQGNVFSCSVMHEALHNHYTQKSLSLSPGKGGGGQGGGGQGGGGQGGGGQGGGGQGGGGQCPPCPAPELLGGPSVFLFPPKPKDTLMISRTPEVTCVVVDVSHEEPEVKFNWYVDGVEVHNAKTKPCEEQYGSTYRCVSVLTVLHQDWLNGKEYKCKVSNKALPAPIEKTISKAKGQPREPQVYTLPPSREEMTKNQVSLTCLVKGFYPSDIAVEWESNGQPENNYKTTPPVLDSDGSFFLYSKLTVDKSRWQQGNVFSCSVMHEALHNHYTQKSLSLSPGK

SEQ ID NO: 2724 - protein, 499 aa, Artificial Sequence
  Synthetic
EVQLVESGGGLVQPGGSLTLSCAASGFTFHDYTMHWVRQTPGKCLEWLSGIGWNGYSKGYADSVKGRFTISRDNAKNSLFLQMNSLTSDDTALYYCVKDYHYGSGILDNYYGLDVWGQGTTVTVSSGGGGSGGGGSGGGGSEIVLTQSPATLSVSPGERATLSCRASQSISNNLAWYQQKPGQAPRLLIYGASSRATGIPDRFSGSGSGTEFTLTISSLQSEDFAVYYCQQYKNWPLTFGCGTKVDIKSGGGGSQVQLVQSGAEVKKPGASVKVSCKASGYTFTSYGISWVRQAPGQCLEWMGWISAYNGNTIYAQKFQGRVTLTRDTSTSTAYMELRSLRSDDTAMYYCARDPDYYGSGSYSDYWGQGTLVTVSSGGGGSGGGGSGGGGSEIVLTQSPATLSVSPGERATLSCRASQSVSSNLAWYQQKPGQAPRLLIYGASSRATGIPARFSGSGSGTEFTLTISSLQSEDFAVYYCQQYHSWPLLTFGCGTKVEIK

SEQ ID NO: 2725 - protein, 499 aa, Artificial Sequence
  Synthetic
EVQLVESGGGLVQPGGSLTLSCAASGFTFHDYTMHWVRQTPGKCLEWLSGIGWNGYSKGYADSVKGRFTISRDNAKNSLFLQMNSLTSDDTALYYCVKDYHYGSGILDNYYGLDVWGQGTTVTVSSGGGGQGGGGQGGGGQEIVLTQSPATLSVSPGERATLSCRASQSISNNLAWYQQKPGQAPRLLIYGASSRATGIPDRFSGSGSGTEFTLTISSLQSEDFAVYYCQQYKNWPLTFGCGTKVDIKSGGGGQQVQLVQSGAEVKKPGASVKVSCKASGYTFTSYGISWVRQAPGQCLEWMGWISAYNGNTIYAQKFQGRVTLTRDTSTSTAYMELRSLRSDDTAMYYCARDPDYYGSGSYSDYWGQGTLVTVSSGGGGQGGGGQGGGGQEIVLTQSPATLSVSPGERATLSCRASQSVSSNLAWYQQKPGQAPRLLIYGASSRATGIPARFSGSGSGTEFTLTISSLQSEDFAVYYCQQYHSWPLLTFGCGTKVEIK

SEQ ID NO: 2726 - protein, 754 aa, Artificial Sequence
  Synthetic
EVQLVESGGGLVQPGGSLTLSCAASGFTFHDYTMHWVRQTPGKCLEWLSGIGWNGYSKGYADSVKGRFTISRDNAKNSLFLQMNSLTSDDTALYYCVKDYHYGSGILDNYYGLDVWGQGTTVTVSSGGGGSGGGGSGGGGSEIVLTQSPATLSVSPGERATLSCRASQSISNNLAWYQQKPGQAPRLLIYGASSRATGIPDRFSGSGSGTEFTLTISSLQSEDFAVYYCQQYKNWPLTFGCGTKVDIKSGGGGSQVQLVQSGAEVKKPGASVKVSCKASGYTFTSYGISWVRQAPGQCLEWMGWISAYNGNTIYAQKFQGRVTLTRDTSTSTAYMELRSLRSDDTAMYYCARDPDYYGSGSYSDYWGQGTLVTVSSGGGGSGGGGSGGGGSEIVLTQSPATLSVSPGERATLSCRASQSVSSNLAWYQQKPGQAPRLLIYGASSRATGIPARFSGSGSGTEFTLTISSLQSEDFAVYYCQQYHSWPLLTFGCGTKVEIKSGGGGSEVQLVESGGGLVQPGGSLKLSCAASGFTFNKYAMNWVRQAPGKGLEWVARIRSKYNNYATYYADSVKDRFTISRDDSKNTAYLQMNNLKTEDTAVYYCVRHGNFGNSYISYWAYWGQGTLVTVSSGGGGSGGGGSGGGGSQTVVTQEPSLTVSPGGTVTLTCGSSTGAVTSGNYPNWVQQKPGQAPRGLIGGTKFLAPGTPARFSGSLLGGKAALTLSGVQPEDEAEYYCVLWYSNRWVFGGGTKLTVL

SEQ ID NO: 2727 - protein, 754 aa, Artificial Sequence
  Synthetic
EVQLVESGGGLVQPGGSLTLSCAASGFTFHDYTMHWVRQTPGKCLEWLSGIGWNGYSKGYADSVKGRFTISRDNAKNSLFLQMNSLTSDDTALYYCVKDYHYGSGILDNYYGLDVWGQGTTVTVSSGGGGQGGGGQGGGGQEIVLTQSPATLSVSPGERATLSCRASQSISNNLAWYQQKPGQAPRLLIYGASSRATGIPDRFSGSGSGTEFTLTISSLQSEDFAVYYCQQYKNWPLTFGCGTKVDIKSGGGGQQVQLVQSGAEVKKPGASVKVSCKASGYTFTSYGISWVRQAPGQCLEWMGWISAYNGNTIYAQKFQGRVTLTRDTSTSTAYMELRSLRSDDTAMYYCARDPDYYGSGSYSDYWGQGTLVTVSSGGGGQGGGGQGGGGQEIVLTQSPATLSVSPGERATLSCRASQSVSSNLAWYQQKPGQAPRLLIYGASSRATGIPARFSGSGSGTEFTLTISSLQSEDFAVYYCQQYHSWPLLTFGCGTKVEIKSGGGGQEVQLVESGGGLVQPGGSLKLSCAASGFTFNKYAMNWVRQAPGKGLEWVARIRSKYNNYATYYADSVKDRFTISRDDSKNTAYLQMNNLKTEDTAVYYCVRHGNFGNSYISYWAYWGQGTLVTVSSGGGGQGGGGQGGGGQQTVVTQEPSLTVSPGGTVTLTCGSSTGAVTSGNYPNWVQQKPGQAPRGLIGGTKFLAPGTPARFSGSLLGGKAALTLSGVQPEDEAEYYCVLWYSNRWVFGGGTKLTVL

SEQ ID NO: 2728 - protein, 754 aa, Artificial Sequence
  Synthetic
EVQLVESGGGLVQPGGSLTLSCAASGFTFHDYTMHWVRQTPGKCLEWLSGIGWNGYSKGYADSVKGRFTISRDNAKNSLFLQMNSLTSDDTALYYCVKDYHYGSGILDNYYGLDVWGQGTTVTVSSGGGGSGGGGSGGGGSEIVLTQSPATLSVSPGERATLSCRASQSISNNLAWYQQKPGQAPRLLIYGASSRATGIPDRFSGSGSGTEFTLTISSLQSEDFAVYYCQQYKNWPLTFGCGTKVDIKSGGGGSQVQLVQSGAEVKKPGASVKVSCKASGYTFTSYGISWVRQAPGQCLEWMGWISAYNGNTIYAQKFQGRVTLTRDTSTSTAYMELRSLRSDDTAMYYCARDPDYYGSGSYSDYWGQGTLVTVSSGGGGSGGGGSGGGGSEIVLTQSPATLSVSPGERATLSCRASQSVSSNLAWYQQKPGQAPRLLIYGASSRATGIPARFSGSGSGTEFTLTISSLQSEDFAVYYCQQYHSWPLLTFGCGTKVEIKSGGGGSEVQLVESGGGLVQPGGSLKLSCAASGFTFNKYAINWVRQAPGKGLEWVARIRSKYNNYATYYADAVKDRFTISRDDSKNTVYLQMNNLKTEDTAVYYCARAGNFGSSYISYWAYWGQGTLVTVSSGGGGSGGGGSGGGGSQTVVTQEPSLTVSPGGTVTITCGSSTGAVTSGNYPNWVQKKPGQAPRGLIGGTKFLAPGTPARFSGSLSGGKAALTLSGVQPEDEAEYYCVLWYSNRWVFGSGTKLTVL

SEQ ID NO: 2729 - protein, 754 aa, Artificial Sequence
  Synthetic
EVQLVESGGGLVQPGGSLTLSCAASGFTFHDYTMHWVRQTPGKCLEWLSGIGWNGYSKGYADSVKGRFTISRDNAKNSLFLQMNSLTSDDTALYYCVKDYHYGSGILDNYYGLDVWGQGTTVTVSSGGGGQGGGGQGGGGQEIVLTQSPATLSVSPGERATLSCRASQSISNNLAWYQQKPGQAPRLLIYGASSRATGIPDRFSGSGSGTEFTLTISSLQSEDFAVYYCQQYKNWPLTFGCGTKVDIKSGGGGQQVQLVQSGAEVKKPGASVKVSCKASGYTFTSYGISWVRQAPGQCLEWMGWISAYNGNTIYAQKFQGRVTLTRDTSTSTAYMELRSLRSDDTAMYYCARDPDYYGSGSYSDYWGQGTLVTVSSGGGGQGGGGQGGGGQEIVLTQSPATLSVSPGERATLSCRASQSVSSNLAWYQQKPGQAPRLLIYGASSRATGIPARFSGSGSGTEFTLTISSLQSEDFAVYYCQQYHSWPLLTFGCGTKVEIKSGGGGQEVQLVESGGGLVQPGGSLKLSCAASGFTFNKYAINWVRQAPGKGLEWVARIRSKYNNYATYYADAVKDRFTISRDDSKNTVYLQMNNLKTEDTAVYYCARAGNFGSSYISYWAYWGQGTLVTVSSGGGGQGGGGQGGGGQQTVVTQEPSLTVSPGGTVTITCGSSTGAVTSGNYPNWVQKKPGQAPRGLIGGTKFLAPGTPARFSGSLSGGKAALTLSGVQPEDEAEYYCVLWYSNRWVFGSGTKLTVL

SEQ ID NO: 2730 - protein, 1242 aa, Artificial Sequence
  Synthetic
EVQLVESGGGLVQPGGSLTLSCAASGFTFHDYTMHWVRQTPGKCLEWLSGIGWNGYSKGYADSVKGRFTISRDNAKNSLFLQMNSLTSDDTALYYCVKDYHYGSGILDNYYGLDVWGQGTTVTVSSGGGGSGGGGSGGGGSEIVLTQSPATLSVSPGERATLSCRASQSISNNLAWYQQKPGQAPRLLIYGASSRATGIPDRFSGSGSGTEFTLTISSLQSEDFAVYYCQQYKNWPLTFGCGTKVDIKSGGGGSQVQLVQSGAEVKKPGASVKVSCKASGYTFTSYGISWVRQAPGQCLEWMGWISAYNGNTIYAQKFQGRVTLTRDTSTSTAYMELRSLRSDDTAMYYCARDPDYYGSGSYSDYWGQGTLVTVSSGGGGSGGGGSGGGGSEIVLTQSPATLSVSPGERATLSCRASQSVSSNLAWYQQKPGQAPRLLIYGASSRATGIPARFSGSGSGTEFTLTISSLQSEDFAVYYCQQYHSWPLLTFGCGTKVEIKSGGGGSEVQLVESGGGLVQPGGSLKLSCAASGFTFNKYAMNWVRQAPGKGLEWVARIRSKYNNYATYYADSVKDRFTISRDDSKNTAYLQMNNLKTEDTAVYYCVRHGNFGNSYISYWAYWGQGTLVTVSSGGGGSGGGGSGGGGSQTVVTQEPSLTVSPGGTVTLTCGSSTGAVTSGNYPNWVQQKPGQAPRGLIGGTKFLAPGTPARFSGSLLGGKAALTLSGVQPEDEAEYYCVLWYSNRWVFGGGTKLTVLGGGGDKTHTCPPCPAPELLGGPSVFLFPPKPKDTLMISRTPEVTCVVVDVSHEDPEVKFNWYVDGVEVHNAKTKPCEEQYGSTYRCVSVLTVLHQDWLNGKEYKCKVSNKALPAPIEKTISKAKGQPREPQVYTLPPSREEMTKNQVSLTCLVKGFYPSDIAVEWESNGQPENNYKTTPPVLDSDGSFFLYSKLTVDKSRWQQGNVFSCSVMHEALHNHYTQKSLSLSPGKGGGGSGGGGSGGGGSGGGGSGGGGSGGGGSDKTHTCPPCPAPELLGGPSVFLFPPKPKDTLMISRTPEVTCVVVDVSHEDPEVKFNWYVDGVEVHNAKTKPCEEQYGSTYRCVSVLTVLHQDWLNGKEYKCKVSNKALPAPIEKTISKAKGQPREPQVYTLPPSREEMTKNQVSLTCLVKGFYPSDIAVEWESNGQPENNYKTTPPVLDSDGSFFLYSKLTVDKSRWQQGNVFSCSVMHEALHNHYTQKSLSLSPGK

SEQ ID NO: 2731 - protein, 1232 aa, Artificial Sequence
  Synthetic
EVQLVESGGGLVQPGGSLTLSCAASGFTFHDYTMHWVRQTPGKCLEWLSGIGWNGYSKGYADSVKGRFTISRDNAKNSLFLQMNSLTSDDTALYYCVKDYHYGSGILDNYYGLDVWGQGTTVTVSSGGGGQGGGGQGGGGQEIVLTQSPATLSVSPGERATLSCRASQSISNNLAWYQQKPGQAPRLLIYGASSRATGIPDRFSGSGSGTEFTLTISSLQSEDFAVYYCQQYKNWPLTFGCGTKVDIKSGGGGQQVQLVQSGAEVKKPGASVKVSCKASGYTFTSYGISWVRQAPGQCLEWMGWISAYNGNTIYAQKFQGRVTLTRDTSTSTAYMELRSLRSDDTAMYYCARDPDYYGSGSYSDYWGQGTLVTVSSGGGGQGGGGQGGGGQEIVLTQSPATLSVSPGERATLSCRASQSVSSNLAWYQQKPGQAPRLLIYGASSRATGIPARFSGSGSGTEFTLTISSLQSEDFAVYYCQQYHSWPLLTFGCGTKVEIKSGGGGQEVQLVESGGGLVQPGGSLKLSCAASGFTFNKYAMNWVRQAPGKGLEWVARIRSKYNNYATYYADSVKDRFTISRDDSKNTAYLQMNNLKTEDTAVYYCVRHGNFGNSYISYWAYWGQGTLVTVSSGGGGQGGGGQGGGGQQTVVTQEPSLTVSPGGTVTLTCGSSTGAVTSGNYPNWVQQKPGQAPRGLIGGTKFLAPGTPARFSGSLLGGKAALTLSGVQPEDEAEYYCVLWYSNRWVFGGGTKLTVLGGGGCPPCPAPELLGGPSVFLFPPKPKDTLMISRTPEVTCVVVDVSHEEPEVKFNWYVDGVEVHNAKTKPCEEQYGSTYRCVSVLTVLHQDWLNGKEYKCKVSNKALPAPIEKTISKAKGQPREPQVYTLPPSREEMTKNQVSLTCLVKGFYPSDIAVEWESNGQPENNYKTTPPVLDSDGSFFLYSKLTVDKSRWQQGNVFSCSVMHEALHNHYTQKSLSLSPGKGGGGQGGGGQGGGGQGGGGQGGGGQGGGGQCPPCPAPELLGGPSVFLFPPKPKDTLMISRTPEVTCVVVDVSHEEPEVKFNWYVDGVEVHNAKTKPCEEQYGSTYRCVSVLTVLHQDWLNGKEYKCKVSNKALPAPIEKTISKAKGQPREPQVYTLPPSREEMTKNQVSLTCLVKGFYPSDIAVEWESNGQPENNYKTTPPVLDSDGSFFLYSKLTVDKSRWQQGNVFSCSVMHEALHNHYTQKSLSLSPGK

SEQ ID NO: 2732 - protein, 1242 aa, Artificial Sequence
  Synthetic
EVQLVESGGGLVQPGGSLTLSCAASGFTFHDYTMHWVRQTPGKCLEWLSGIGWNGYSKGYADSVKGRFTISRDNAKNSLFLQMNSLTSDDTALYYCVKDYHYGSGILDNYYGLDVWGQGTTVTVSSGGGGSGGGGSGGGGSEIVLTQSPATLSVSPGERATLSCRASQSISNNLAWYQQKPGQAPRLLIYGASSRATGIPDRFSGSGSGTEFTLTISSLQSEDFAVYYCQQYKNWPLTFGCGTKVDIKSGGGGSQVQLVQSGAEVKKPGASVKVSCKASGYTFTSYGISWVRQAPGQCLEWMGWISAYNGNTIYAQKFQGRVTLTRDTSTSTAYMELRSLRSDDTAMYYCARDPDYYGSGSYSDYWGQGTLVTVSSGGGGSGGGGSGGGGSEIVLTQSPATLSVSPGERATLSCRASQSVSSNLAWYQQKPGQAPRLLIYGASSRATGIPARFSGSGSGTEFTLTISSLQSEDFAVYYCQQYHSWPLLTFGCGTKVEIKSGGGGSEVQLVESGGGLVQPGGSLKLSCAASGFTFNKYAINWVRQAPGKGLEWVARIRSKYNNYATYYADAVKDRFTISRDDSKNTVYLQMNNLKTEDTAVYYCARAGNFGSSYISYWAYWGQGTLVTVSSGGGGSGGGGSGGGGSQTVVTQEPSLTVSPGGTVTITCGSSTGAVTSGNYPNWVQKKPGQAPRGLIGGTKFLAPGTPARFSGSLSGGKAALTLSGVQPEDEAEYYCVLWYSNRWVFGSGTKLTVLGGGGDKTHTCPPCPAPELLGGPSVFLFPPKPKDTLMISRTPEVTCVVVDVSHEDPEVKFNWYVDGVEVHNAKTKPCEEQYGSTYRCVSVLTVLHQDWLNGKEYKCKVSNKALPAPIEKTISKAKGQPREPQVYTLPPSREEMTKNQVSLTCLVKGFYPSDIAVEWESNGQPENNYKTTPPVLDSDGSFFLYSKLTVDKSRWQQGNVFSCSVMHEALHNHYTQKSLSLSPGKGGGGSGGGGSGGGGSGGGGSGGGGSGGGGSDKTHTCPPCPAPELLGGPSVFLFPPKPKDTLMISRTPEVTCVVVDVSHEDPEVKFNWYVDGVEVHNAKTKPCEEQYGSTYRCVSVLTVLHQDWLNGKEYKCKVSNKALPAPIEKTISKAKGQPREPQVYTLPPSREEMTKNQVSLTCLVKGFYPSDIAVEWESNGQPENNYKTTPPVLDSDGSFFLYSKLTVDKSRWQQGNVFSCSVMHEALHNHYTQKSLSLSPGK

SEQ ID NO: 2733 - protein, 1232 aa, Artificial Sequence
  Synthetic
EVQLVESGGGLVQPGGSLTLSCAASGFTFHDYTMHWVRQTPGKCLEWLSGIGWNGYSKGYADSVKGRFTISRDNAKNSLFLQMNSLTSDDTALYYCVKDYHYGSGILDNYYGLDVWGQGTTVTVSSGGGGQGGGGQGGGGQEIVLTQSPATLSVSPGERATLSCRASQSISNNLAWYQQKPGQAPRLLIYGASSRATGIPDRFSGSGSGTEFTLTISSLQSEDFAVYYCQQYKNWPLTFGCGTKVDIKSGGGGQQVQLVQSGAEVKKPGASVKVSCKASGYTFTSYGISWVRQAPGQCLEWMGWISAYNGNTIYAQKFQGRVTLTRDTSTSTAYMELRSLRSDDTAMYYCARDPDYYGSGSYSDYWGQGTLVTVSSGGGGQGGGGQGGGGQEIVLTQSPATLSVSPGERATLSCRASQSVSSNLAWYQQKPGQAPRLLIYGASSRATGIPARFSGSGSGTEFTLTISSLQSEDFAVYYCQQYHSWPLLTFGCGTKVEIKSGGGGQEVQLVESGGGLVQPGGSLKLSCAASGFTFNKYAINWVRQAPGKGLEWVARIRSKYNNYATYYADAVKDRFTISRDDSKNTVYLQMNNLKTEDTAVYYCARAGNFGSSYISYWAYWGQGTLVTVSSGGGGQGGGGQGGGGQQTVVTQEPSLTVSPGGTVTITCGSSTGAVTSGNYPNWVQKKPGQAPRGLIGGTKFLAPGTPARFSGSLSGGKAALTLSGVQPEDEAEYYCVLWYSNRWVFGSGTKLTVLGGGGCPPCPAPELLGGPSVFLFPPKPKDTLMISRTPEVTCVVVDVSHEEPEVKFNWYVDGVEVHNAKTKPCEEQYGSTYRCVSVLTVLHQDWLNGKEYKCKVSNKALPAPIEKTISKAKGQPREPQVYTLPPSREEMTKNQVSLTCLVKGFYPSDIAVEWESNGQPENNYKTTPPVLDSDGSFFLYSKLTVDKSRWQQGNVFSCSVMHEALHNHYTQKSLSLSPGKGGGGQGGGGQGGGGQGGGGQGGGGQGGGGQCPPCPAPELLGGPSVFLFPPKPKDTLMISRTPEVTCVVVDVSHEEPEVKFNWYVDGVEVHNAKTKPCEEQYGSTYRCVSVLTVLHQDWLNGKEYKCKVSNKALPAPIEKTISKAKGQPREPQVYTLPPSREEMTKNQVSLTCLVKGFYPSDIAVEWESNGQPENNYKTTPPVLDSDGSFFLYSKLTVDKSRWQQGNVFSCSVMHEALHNHYTQKSLSLSPGK

SEQ ID NO: 2734 - protein, 499 aa, Artificial Sequence
  Synthetic
EVQLVESGGGLVQPGGSLTLSCAASGFTFHDYTMHWVRQTPGKCLEWLSGIGWNGYSKGYADSVKGRFTISRDNAKNSLFLQMNSLTSDDTALYYCVKDYHYGSGILDNYYGLDVWGQGTTVTVSSGGGGSGGGGSGGGGSEIVLTQSPATLSVSPGERATLSCRASQSISNNLAWYQQKPGQAPRLLIYGASSRATGIPDRFSGSGSGTEFTLTISSLQSEDFAVYYCQQYKNWPLTFGCGTKVDIKSGGGGSQVQLVQSGAEVKKPGASVKVSCKASGYTFTTYGISWVRQAPGQCLEWMGWISPKNGVTTYAQKFQGRVTITADESTSTAYMELSRLTSDDTAMYYCARDPDYYGSGSYSDYWGQGTLVTVSSGGGGSGGGGSGGGGSEIVLTQSPATLSVSPGERATLSCRASQSVSSNLAWYQQKPGQAPRLLIYGASSRATGIPARFSGSGSGTEFTLTISSLQSEDFAVYYCQQYHSWPLLTFGCGTKVEIK

SEQ ID NO: 2735 - protein, 499 aa, Artificial Sequence
  Synthetic
EVQLVESGGGLVQPGGSLTLSCAASGFTFHDYTMHWVRQTPGKCLEWLSGIGWNGYSKGYADSVKGRFTISRDNAKNSLFLQMNSLTSDDTALYYCVKDYHYGSGILDNYYGLDVWGQGTTVTVSSGGGGQGGGGQGGGGQEIVLTQSPATLSVSPGERATLSCRASQSISNNLAWYQQKPGQAPRLLIYGASSRATGIPDRFSGSGSGTEFTLTISSLQSEDFAVYYCQQYKNWPLTFGCGTKVDIKSGGGGQQVQLVQSGAEVKKPGASVKVSCKASGYTFTTYGISWVRQAPGQCLEWMGWISPKNGVTTYAQKFQGRVTITADESTSTAYMELSRLTSDDTAMYYCARDPDYYGSGSYSDYWGQGTLVTVSSGGGGQGGGGQGGGGQEIVLTQSPATLSVSPGERATLSCRASQSVSSNLAWYQQKPGQAPRLLIYGASSRATGIPARFSGSGSGTEFTLTISSLQSEDFAVYYCQQYHSWPLLTFGCGTKVEIK

SEQ ID NO: 2736 - protein, 754 aa, Artificial Sequence
  Synthetic
EVQLVESGGGLVQPGGSLTLSCAASGFTFHDYTMHWVRQTPGKCLEWLSGIGWNGYSKGYADSVKGRFTISRDNAKNSLFLQMNSLTSDDTALYYCVKDYHYGSGILDNYYGLDVWGQGTTVTVSSGGGGSGGGGSGGGGSEIVLTQSPATLSVSPGERATLSCRASQSISNNLAWYQQKPGQAPRLLIYGASSRATGIPDRFSGSGSGTEFTLTISSLQSEDFAVYYCQQYKNWPLTFGCGTKVDIKSGGGGSQVQLVQSGAEVKKPGASVKVSCKASGYTFTTYGISWVRQAPGQCLEWMGWISPKNGVTTYAQKFQGRVTITADESTSTAYMELSRLTSDDTAMYYCARDPDYYGSGSYSDYWGQGTLVTVSSGGGGSGGGGSGGGGSEIVLTQSPATLSVSPGERATLSCRASQSVSSNLAWYQQKPGQAPRLLIYGASSRATGIPARFSGSGSGTEFTLTISSLQSEDFAVYYCQQYHSWPLLTFGCGTKVEIKSGGGGSEVQLVESGGGLVQPGGSLKLSCAASGFTFNKYAMNWVRQAPGKGLEWVARIRSKYNNYATYYADSVKDRFTISRDDSKNTAYLQMNNLKTEDTAVYYCVRHGNFGNSYISYWAYWGQGTLVTVSSGGGGSGGGGSGGGGSQTVVTQEPSLTVSPGGTVTLTCGSSTGAVTSGNYPNWVQQKPGQAPRGLIGGTKFLAPGTPARFSGSLLGGKAALTLSGVQPEDEAEYYCVLWYSNRWVFGGGTKLTVL

SEQ ID NO: 2737 - protein, 754 aa, Artificial Sequence
  Synthetic
EVQLVESGGGLVQPGGSLTLSCAASGFTFHDYTMHWVRQTPGKCLEWLSGIGWNGYSKGYADSVKGRFTISRDNAKNSLFLQMNSLTSDDTALYYCVKDYHYGSGILDNYYGLDVWGQGTTVTVSSGGGGQGGGGQGGGGQEIVLTQSPATLSVSPGERATLSCRASQSISNNLAWYQQKPGQAPRLLIYGASSRATGIPDRFSGSGSGTEFTLTISSLQSEDFAVYYCQQYKNWPLTFGCGTKVDIKSGGGGQQVQLVQSGAEVKKPGASVKVSCKASGYTFTTYGISWVRQAPGQCLEWMGWISPKNGVTTYAQKFQGRVTITADESTSTAYMELSRLTSDDTAMYYCARDPDYYGSGSYSDYWGQGTLVTVSSGGGGQGGGGQGGGGQEIVLTQSPATLSVSPGERATLSCRASQSVSSNLAWYQQKPGQAPRLLIYGASSRATGIPARFSGSGSGTEFTLTISSLQSEDFAVYYCQQYHSWPLLTFGCGTKVEIKSGGGGQEVQLVESGGGLVQPGGSLKLSCAASGFTFNKYAMNWVRQAPGKGLEWVARIRSKYNNYATYYADSVKDRFTISRDDSKNTAYLQMNNLKTEDTAVYYCVRHGNFGNSYISYWAYWGQGTLVTVSSGGGGQGGGGQGGGGQQTVVTQEPSLTVSPGGTVTLTCGSSTGAVTSGNYPNWVQQKPGQAPRGLIGGTKFLAPGTPARFSGSLLGGKAALTLSGVQPEDEAEYYCVLWYSNRWVFGGGTKLTVL

SEQ ID NO: 2738 - protein, 754 aa, Artificial Sequence
  Synthetic
EVQLVESGGGLVQPGGSLTLSCAASGFTFHDYTMHWVRQTPGKCLEWLSGIGWNGYSKGYADSVKGRFTISRDNAKNSLFLQMNSLTSDDTALYYCVKDYHYGSGILDNYYGLDVWGQGTTVTVSSGGGGSGGGGSGGGGSEIVLTQSPATLSVSPGERATLSCRASQSISNNLAWYQQKPGQAPRLLIYGASSRATGIPDRFSGSGSGTEFTLTISSLQSEDFAVYYCQQYKNWPLTFGCGTKVDIKSGGGGSQVQLVQSGAEVKKPGASVKVSCKASGYTFTTYGISWVRQAPGQCLEWMGWISPKNGVTTYAQKFQGRVTITADESTSTAYMELSRLTSDDTAMYYCARDPDYYGSGSYSDYWGQGTLVTVSSGGGGSGGGGSGGGGSEIVLTQSPATLSVSPGERATLSCRASQSVSSNLAWYQQKPGQAPRLLIYGASSRATGIPARFSGSGSGTEFTLTISSLQSEDFAVYYCQQYHSWPLLTFGCGTKVEIKSGGGGSEVQLVESGGGLVQPGGSLKLSCAASGFTFNKYAINWVRQAPGKGLEWVARIRSKYNNYATYYADAVKDRFTISRDDSKNTVYLQMNNLKTEDTAVYYCARAGNFGSSYISYWAYWGQGTLVTVSSGGGGSGGGGSGGGGSQTVVTQEPSLTVSPGGTVTITCGSSTGAVTSGNYPNWVQKKPGQAPRGLIGGTKFLAPGTPARFSGSLSGGKAALTLSGVQPEDEAEYYCVLWYSNRWVFGSGTKLTVL

SEQ ID NO: 2739 - protein, 754 aa, Artificial Sequence
  Synthetic
EVQLVESGGGLVQPGGSLTLSCAASGFTFHDYTMHWVRQTPGKCLEWLSGIGWNGYSKGYADSVKGRFTISRDNAKNSLFLQMNSLTSDDTALYYCVKDYHYGSGILDNYYGLDVWGQGTTVTVSSGGGGQGGGGQGGGGQEIVLTQSPATLSVSPGERATLSCRASQSISNNLAWYQQKPGQAPRLLIYGASSRATGIPDRFSGSGSGTEFTLTISSLQSEDFAVYYCQQYKNWPLTFGCGTKVDIKSGGGGQQVQLVQSGAEVKKPGASVKVSCKASGYTFTTYGISWVRQAPGQCLEWMGWISPKNGVTTYAQKFQGRVTITADESTSTAYMELSRLTSDDTAMYYCARDPDYYGSGSYSDYWGQGTLVTVSSGGGGQGGGGQGGGGQEIVLTQSPATLSVSPGERATLSCRASQSVSSNLAWYQQKPGQAPRLLIYGASSRATGIPARFSGSGSGTEFTLTISSLQSEDFAVYYCQQYHSWPLLTFGCGTKVEIKSGGGGQEVQLVESGGGLVQPGGSLKLSCAASGFTFNKYAINWVRQAPGKGLEWVARIRSKYNNYATYYADAVKDRFTISRDDSKNTVYLQMNNLKTEDTAVYYCARAGNFGSSYISYWAYWGQGTLVTVSSGGGGQGGGGQGGGGQQTVVTQEPSLTVSPGGTVTITCGSSTGAVTSGNYPNWVQKKPGQAPRGLIGGTKFLAPGTPARFSGSLSGGKAALTLSGVQPEDEAEYYCVLWYSNRWVFGSGTKLTVL

SEQ ID NO: 2740 - protein, 1242 aa, Artificial Sequence
  Synthetic
EVQLVESGGGLVQPGGSLTLSCAASGFTFHDYTMHWVRQTPGKCLEWLSGIGWNGYSKGYADSVKGRFTISRDNAKNSLFLQMNSLTSDDTALYYCVKDYHYGSGILDNYYGLDVWGQGTTVTVSSGGGGSGGGGSGGGGSEIVLTQSPATLSVSPGERATLSCRASQSISNNLAWYQQKPGQAPRLLIYGASSRATGIPDRFSGSGSGTEFTLTISSLQSEDFAVYYCQQYKNWPLTFGCGTKVDIKSGGGGSQVQLVQSGAEVKKPGASVKVSCKASGYTFTTYGISWVRQAPGQCLEWMGWISPKNGVTTYAQKFQGRVTITADESTSTAYMELSRLTSDDTAMYYCARDPDYYGSGSYSDYWGQGTLVTVSSGGGGSGGGGSGGGGSEIVLTQSPATLSVSPGERATLSCRASQSVSSNLAWYQQKPGQAPRLLIYGASSRATGIPARFSGSGSGTEFTLTISSLQSEDFAVYYCQQYHSWPLLTFGCGTKVEIKSGGGGSEVQLVESGGGLVQPGGSLKLSCAASGFTFNKYAMNWVRQAPGKGLEWVARIRSKYNNYATYYADSVKDRFTISRDDSKNTAYLQMNNLKTEDTAVYYCVRHGNFGNSYISYWAYWGQGTLVTVSSGGGGSGGGGSGGGGSQTVVTQEPSLTVSPGGTVTLTCGSSTGAVTSGNYPNWVQQKPGQAPRGLIGGTKFLAPGTPARFSGSLLGGKAALTLSGVQPEDEAEYYCVLWYSNRWVFGGGTKLTVLGGGGDKTHTCPPCPAPELLGGPSVFLFPPKPKDTLMISRTPEVTCVVVDVSHEDPEVKFNWYVDGVEVHNAKTKPCEEQYGSTYRCVSVLTVLHQDWLNGKEYKCKVSNKALPAPIEKTISKAKGQPREPQVYTLPPSREEMTKNQVSLTCLVKGFYPSDIAVEWESNGQPENNYKTTPPVLDSDGSFFLYSKLTVDKSRWQQGNVFSCSVMHEALHNHYTQKSLSLSPGKGGGGSGGGGSGGGGSGGGGSGGGGSGGGGSDKTHTCPPCPAPELLGGPSVFLFPPKPKDTLMISRTPEVTCVVVDVSHEDPEVKFNWYVDGVEVHNAKTKPCEEQYGSTYRCVSVLTVLHQDWLNGKEYKCKVSNKALPAPIEKTISKAKGQPREPQVYTLPPSREEMTKNQVSLTCLVKGFYPSDIAVEWESNGQPENNYKTTPPVLDSDGSFFLYSKLTVDKSRWQQGNVFSCSVMHEALHNHYTQKSLSLSPGK

SEQ ID NO: 2741 - protein, 1232 aa, Artificial Sequence
  Synthetic
EVQLVESGGGLVQPGGSLTLSCAASGFTFHDYTMHWVRQTPGKCLEWLSGIGWNGYSKGYADSVKGRFTISRDNAKNSLFLQMNSLTSDDTALYYCVKDYHYGSGILDNYYGLDVWGQGTTVTVSSGGGGQGGGGQGGGGQEIVLTQSPATLSVSPGERATLSCRASQSISNNLAWYQQKPGQAPRLLIYGASSRATGIPDRFSGSGSGTEFTLTISSLQSEDFAVYYCQQYKNWPLTFGCGTKVDIKSGGGGQQVQLVQSGAEVKKPGASVKVSCKASGYTFTTYGISWVRQAPGQCLEWMGWISPKNGVTTYAQKFQGRVTITADESTSTAYMELSRLTSDDTAMYYCARDPDYYGSGSYSDYWGQGTLVTVSSGGGGQGGGGQGGGGQEIVLTQSPATLSVSPGERATLSCRASQSVSSNLAWYQQKPGQAPRLLIYGASSRATGIPARFSGSGSGTEFTLTISSLQSEDFAVYYCQQYHSWPLLTFGCGTKVEIKSGGGGQEVQLVESGGGLVQPGGSLKLSCAASGFTFNKYAMNWVRQAPGKGLEWVARIRSKYNNYATYYADSVKDRFTISRDDSKNTAYLQMNNLKTEDTAVYYCVRHGNFGNSYISYWAYWGQGTLVTVSSGGGGQGGGGQGGGGQQTVVTQEPSLTVSPGGTVTLTCGSSTGAVTSGNYPNWVQQKPGQAPRGLIGGTKFLAPGTPARFSGSLLGGKAALTLSGVQPEDEAEYYCVLWYSNRWVFGGGTKLTVLGGGGCPPCPAPELLGGPSVFLFPPKPKDTLMISRTPEVTCVVVDVSHEEPEVKFNWYVDGVEVHNAKTKPCEEQYGSTYRCVSVLTVLHQDWLNGKEYKCKVSNKALPAPIEKTISKAKGQPREPQVYTLPPSREEMTKNQVSLTCLVKGFYPSDIAVEWESNGQPENNYKTTPPVLDSDGSFFLYSKLTVDKSRWQQGNVFSCSVMHEALHNHYTQKSLSLSPGKGGGGQGGGGQGGGGQGGGGQGGGGQGGGGQCPPCPAPELLGGPSVFLFPPKPKDTLMISRTPEVTCVVVDVSHEEPEVKFNWYVDGVEVHNAKTKPCEEQYGSTYRCVSVLTVLHQDWLNGKEYKCKVSNKALPAPIEKTISKAKGQPREPQVYTLPPSREEMTKNQVSLTCLVKGFYPSDIAVEWESNGQPENNYKTTPPVLDSDGSFFLYSKLTVDKSRWQQGNVFSCSVMHEALHNHYTQKSLSLSPGK

SEQ ID NO: 2742 - protein, 1242 aa, Artificial Sequence
  Synthetic
EVQLVESGGGLVQPGGSLTLSCAASGFTFHDYTMHWVRQTPGKCLEWLSGIGWNGYSKGYADSVKGRFTISRDNAKNSLFLQMNSLTSDDTALYYCVKDYHYGSGILDNYYGLDVWGQGTTVTVSSGGGGSGGGGSGGGGSEIVLTQSPATLSVSPGERATLSCRASQSISNNLAWYQQKPGQAPRLLIYGASSRATGIPDRFSGSGSGTEFTLTISSLQSEDFAVYYCQQYKNWPLTFGCGTKVDIKSGGGGSQVQLVQSGAEVKKPGASVKVSCKASGYTFTTYGISWVRQAPGQCLEWMGWISPKNGVTTYAQKFQGRVTITADESTSTAYMELSRLTSDDTAMYYCARDPDYYGSGSYSDYWGQGTLVTVSSGGGGSGGGGSGGGGSEIVLTQSPATLSVSPGERATLSCRASQSVSSNLAWYQQKPGQAPRLLIYGASSRATGIPARFSGSGSGTEFTLTISSLQSEDFAVYYCQQYHSWPLLTFGCGTKVEIKSGGGGSEVQLVESGGGLVQPGGSLKLSCAASGFTFNKYAINWVRQAPGKGLEWVARIRSKYNNYATYYADAVKDRFTISRDDSKNTVYLQMNNLKTEDTAVYYCARAGNFGSSYISYWAYWGQGTLVTVSSGGGGSGGGGSGGGGSQTVVTQEPSLTVSPGGTVTITCGSSTGAVTSGNYPNWVQKKPGQAPRGLIGGTKFLAPGTPARFSGSLSGGKAALTLSGVQPEDEAEYYCVLWYSNRWVFGSGTKLTVLGGGGDKTHTCPPCPAPELLGGPSVFLFPPKPKDTLMISRTPEVTCVVVDVSHEDPEVKFNWYVDGVEVHNAKTKPCEEQYGSTYRCVSVLTVLHQDWLNGKEYKCKVSNKALPAPIEKTISKAKGQPREPQVYTLPPSREEMTKNQVSLTCLVKGFYPSDIAVEWESNGQPENNYKTTPPVLDSDGSFFLYSKLTVDKSRWQQGNVFSCSVMHEALHNHYTQKSLSLSPGKGGGGSGGGGSGGGGSGGGGSGGGGSGGGGSDKTHTCPPCPAPELLGGPSVFLFPPKPKDTLMISRTPEVTCVVVDVSHEDPEVKFNWYVDGVEVHNAKTKPCEEQYGSTYRCVSVLTVLHQDWLNGKEYKCKVSNKALPAPIEKTISKAKGQPREPQVYTLPPSREEMTKNQVSLTCLVKGFYPSDIAVEWESNGQPENNYKTTPPVLDSDGSFFLYSKLTVDKSRWQQGNVFSCSVMHEALHNHYTQKSLSLSPGK

SEQ ID NO: 2743 - protein, 1232 aa, Artificial Sequence
  Synthetic
EVQLVESGGGLVQPGGSLTLSCAASGFTFHDYTMHWVRQTPGKCLEWLSGIGWNGYSKGYADSVKGRFTISRDNAKNSLFLQMNSLTSDDTALYYCVKDYHYGSGILDNYYGLDVWGQGTTVTVSSGGGGQGGGGQGGGGQEIVLTQSPATLSVSPGERATLSCRASQSISNNLAWYQQKPGQAPRLLIYGASSRATGIPDRFSGSGSGTEFTLTISSLQSEDFAVYYCQQYKNWPLTFGCGTKVDIKSGGGGQQVQLVQSGAEVKKPGASVKVSCKASGYTFTTYGISWVRQAPGQCLEWMGWISPKNGVTTYAQKFQGRVTITADESTSTAYMELSRLTSDDTAMYYCARDPDYYGSGSYSDYWGQGTLVTVSSGGGGQGGGGQGGGGQEIVLTQSPATLSVSPGERATLSCRASQSVSSNLAWYQQKPGQAPRLLIYGASSRATGIPARFSGSGSGTEFTLTISSLQSEDFAVYYCQQYHSWPLLTFGCGTKVEIKSGGGGQEVQLVESGGGLVQPGGSLKLSCAASGFTFNKYAINWVRQAPGKGLEWVARIRSKYNNYATYYADAVKDRFTISRDDSKNTVYLQMNNLKTEDTAVYYCARAGNFGSSYISYWAYWGQGTLVTVSSGGGGQGGGGQGGGGQQTVVTQEPSLTVSPGGTVTITCGSSTGAVTSGNYPNWVQKKPGQAPRGLIGGTKFLAPGTPARFSGSLSGGKAALTLSGVQPEDEAEYYCVLWYSNRWVFGSGTKLTVLGGGGCPPCPAPELLGGPSVFLFPPKPKDTLMISRTPEVTCVVVDVSHEEPEVKFNWYVDGVEVHNAKTKPCEEQYGSTYRCVSVLTVLHQDWLNGKEYKCKVSNKALPAPIEKTISKAKGQPREPQVYTLPPSREEMTKNQVSLTCLVKGFYPSDIAVEWESNGQPENNYKTTPPVLDSDGSFFLYSKLTVDKSRWQQGNVFSCSVMHEALHNHYTQKSLSLSPGKGGGGQGGGGQGGGGQGGGGQGGGGQGGGGQCPPCPAPELLGGPSVFLFPPKPKDTLMISRTPEVTCVVVDVSHEEPEVKFNWYVDGVEVHNAKTKPCEEQYGSTYRCVSVLTVLHQDWLNGKEYKCKVSNKALPAPIEKTISKAKGQPREPQVYTLPPSREEMTKNQVSLTCLVKGFYPSDIAVEWESNGQPENNYKTTPPVLDSDGSFFLYSKLTVDKSRWQQGNVFSCSVMHEALHNHYTQKSLSLSPGK

SEQ ID NO: 2744 - protein, 499 aa, Artificial Sequence
  Synthetic
EVQLVESGGGLVQPGGSLTLSCAASGFTFHDYTMHWVRQTPGKCLEWLSGIGWNGYSKGYADSVKGRFTISRDNAKNSLFLQMNSLTSDDTALYYCVKDYHYGSGILDNYYGLDVWGQGTTVTVSSGGGGSGGGGSGGGGSEIVLTQSPATLSVSPGERATLSCRASQSISNNLAWYQQKPGQAPRLLIYGASSRATGIPDRFSGSGSGTEFTLTISSLQSEDFAVYYCQQYKNWPLTFGCGTKVDIKSGGGGSQVQLVQSGGEVKKPGASVKVSCKASGYTFTSYGISWVRQAPGQCLEWMGWISAYTGETLYAQKLQGRVTMTRDTSTSTAYMELRSLRSDDTAVYYCARDPDYYGSGSYSDYWGQGTLVTVSSGGGGSGGGGSGGGGSEIVLTQSPATLSVSPGERATLSCRASQSVSSNLAWYQQKPGQAPRLLIYGASSRATGIPARFSGSGSGTEFTLTISSLQSEDFAVYYCQQYHSWPLLTFGCGTKVEIK

SEQ ID NO: 2745 - protein, 499 aa, Artificial Sequence
  Synthetic
EVQLVESGGGLVQPGGSLTLSCAASGFTFHDYTMHWVRQTPGKCLEWLSGIGWNGYSKGYADSVKGRFTISRDNAKNSLFLQMNSLTSDDTALYYCVKDYHYGSGILDNYYGLDVWGQGTTVTVSSGGGGQGGGGQGGGGQEIVLTQSPATLSVSPGERATLSCRASQSISNNLAWYQQKPGQAPRLLIYGASSRATGIPDRFSGSGSGTEFTLTISSLQSEDFAVYYCQQYKNWPLTFGCGTKVDIKSGGGGQQVQLVQSGGEVKKPGASVKVSCKASGYTFTSYGISWVRQAPGQCLEWMGWISAYTGETLYAQKLQGRVTMTRDTSTSTAYMELRSLRSDDTAVYYCARDPDYYGSGSYSDYWGQGTLVTVSSGGGGQGGGGQGGGGQEIVLTQSPATLSVSPGERATLSCRASQSVSSNLAWYQQKPGQAPRLLIYGASSRATGIPARFSGSGSGTEFTLTISSLQSEDFAVYYCQQYHSWPLLTFGCGTKVEIK

SEQ ID NO: 2746 - protein, 754 aa, Artificial Sequence
  Synthetic
EVQLVESGGGLVQPGGSLTLSCAASGFTFHDYTMHWVRQTPGKCLEWLSGIGWNGYSKGYADSVKGRFTISRDNAKNSLFLQMNSLTSDDTALYYCVKDYHYGSGILDNYYGLDVWGQGTTVTVSSGGGGSGGGGSGGGGSEIVLTQSPATLSVSPGERATLSCRASQSISNNLAWYQQKPGQAPRLLIYGASSRATGIPDRFSGSGSGTEFTLTISSLQSEDFAVYYCQQYKNWPLTFGCGTKVDIKSGGGGSQVQLVQSGGEVKKPGASVKVSCKASGYTFTSYGISWVRQAPGQCLEWMGWISAYTGETLYAQKLQGRVTMTRDTSTSTAYMELRSLRSDDTAVYYCARDPDYYGSGSYSDYWGQGTLVTVSSGGGGSGGGGSGGGGSEIVLTQSPATLSVSPGERATLSCRASQSVSSNLAWYQQKPGQAPRLLIYGASSRATGIPARFSGSGSGTEFTLTISSLQSEDFAVYYCQQYHSWPLLTFGCGTKVEIKSGGGGSEVQLVESGGGLVQPGGSLKLSCAASGFTFNKYAMNWVRQAPGKGLEWVARIRSKYNNYATYYADSVKDRFTISRDDSKNTAYLQMNNLKTEDTAVYYCVRHGNFGNSYISYWAYWGQGTLVTVSSGGGGSGGGGSGGGGSQTVVTQEPSLTVSPGGTVTLTCGSSTGAVTSGNYPNWVQQKPGQAPRGLIGGTKFLAPGTPARFSGSLLGGKAALTLSGVQPEDEAEYYCVLWYSNRWVFGGGTKLTVL

SEQ ID NO: 2747 - protein, 754 aa, Artificial Sequence
  Synthetic
EVQLVESGGGLVQPGGSLTLSCAASGFTFHDYTMHWVRQTPGKCLEWLSGIGWNGYSKGYADSVKGRFTISRDNAKNSLFLQMNSLTSDDTALYYCVKDYHYGSGILDNYYGLDVWGQGTTVTVSSGGGGQGGGGQGGGGQEIVLTQSPATLSVSPGERATLSCRASQSISNNLAWYQQKPGQAPRLLIYGASSRATGIPDRFSGSGSGTEFTLTISSLQSEDFAVYYCQQYKNWPLTFGCGTKVDIKSGGGGQQVQLVQSGGEVKKPGASVKVSCKASGYTFTSYGISWVRQAPGQCLEWMGWISAYTGETLYAQKLQGRVTMTRDTSTSTAYMELRSLRSDDTAVYYCARDPDYYGSGSYSDYWGQGTLVTVSSGGGGQGGGGQGGGGQEIVLTQSPATLSVSPGERATLSCRASQSVSSNLAWYQQKPGQAPRLLIYGASSRATGIPARFSGSGSGTEFTLTISSLQSEDFAVYYCQQYHSWPLLTFGCGTKVEIKSGGGGQEVQLVESGGGLVQPGGSLKLSCAASGFTFNKYAMNWVRQAPGKGLEWVARIRSKYNNYATYYADSVKDRFTISRDDSKNTAYLQMNNLKTEDTAVYYCVRHGNFGNSYISYWAYWGQGTLVTVSSGGGGQGGGGQGGGGQQTVVTQEPSLTVSPGGTVTLTCGSSTGAVTSGNYPNWVQQKPGQAPRGLIGGTKFLAPGTPARFSGSLLGGKAALTLSGVQPEDEAEYYCVLWYSNRWVFGGGTKLTVL

SEQ ID NO: 2748 - protein, 754 aa, Artificial Sequence
  Synthetic
EVQLVESGGGLVQPGGSLTLSCAASGFTFHDYTMHWVRQTPGKCLEWLSGIGWNGYSKGYADSVKGRFTISRDNAKNSLFLQMNSLTSDDTALYYCVKDYHYGSGILDNYYGLDVWGQGTTVTVSSGGGGSGGGGSGGGGSEIVLTQSPATLSVSPGERATLSCRASQSISNNLAWYQQKPGQAPRLLIYGASSRATGIPDRFSGSGSGTEFTLTISSLQSEDFAVYYCQQYKNWPLTFGCGTKVDIKSGGGGSQVQLVQSGGEVKKPGASVKVSCKASGYTFTSYGISWVRQAPGQCLEWMGWISAYTGETLYAQKLQGRVTMTRDTSTSTAYMELRSLRSDDTAVYYCARDPDYYGSGSYSDYWGQGTLVTVSSGGGGSGGGGSGGGGSEIVLTQSPATLSVSPGERATLSCRASQSVSSNLAWYQQKPGQAPRLLIYGASSRATGIPARFSGSGSGTEFTLTISSLQSEDFAVYYCQQYHSWPLLTFGCGTKVEIKSGGGGSEVQLVESGGGLVQPGGSLKLSCAASGFTFNKYAINWVRQAPGKGLEWVARIRSKYNNYATYYADAVKDRFTISRDDSKNTVYLQMNNLKTEDTAVYYCARAGNFGSSYISYWAYWGQGTLVTVSSGGGGSGGGGSGGGGSQTVVTQEPSLTVSPGGTVTITCGSSTGAVTSGNYPNWVQKKPGQAPRGLIGGTKFLAPGTPARFSGSLSGGKAALTLSGVQPEDEAEYYCVLWYSNRWVFGSGTKLTVL

SEQ ID NO: 2749 - protein, 754 aa, Artificial Sequence
  Synthetic
EVQLVESGGGLVQPGGSLTLSCAASGFTFHDYTMHWVRQTPGKCLEWLSGIGWNGYSKGYADSVKGRFTISRDNAKNSLFLQMNSLTSDDTALYYCVKDYHYGSGILDNYYGLDVWGQGTTVTVSSGGGGQGGGGQGGGGQEIVLTQSPATLSVSPGERATLSCRASQSISNNLAWYQQKPGQAPRLLIYGASSRATGIPDRFSGSGSGTEFTLTISSLQSEDFAVYYCQQYKNWPLTFGCGTKVDIKSGGGGQQVQLVQSGGEVKKPGASVKVSCKASGYTFTSYGISWVRQAPGQCLEWMGWISAYTGETLYAQKLQGRVTMTRDTSTSTAYMELRSLRSDDTAVYYCARDPDYYGSGSYSDYWGQGTLVTVSSGGGGQGGGGQGGGGQEIVLTQSPATLSVSPGERATLSCRASQSVSSNLAWYQQKPGQAPRLLIYGASSRATGIPARFSGSGSGTEFTLTISSLQSEDFAVYYCQQYHSWPLLTFGCGTKVEIKSGGGGQEVQLVESGGGLVQPGGSLKLSCAASGFTFNKYAINWVRQAPGKGLEWVARIRSKYNNYATYYADAVKDRFTISRDDSKNTVYLQMNNLKTEDTAVYYCARAGNFGSSYISYWAYWGQGTLVTVSSGGGGQGGGGQGGGGQQTVVTQEPSLTVSPGGTVTITCGSSTGAVTSGNYPNWVQKKPGQAPRGLIGGTKFLAPGTPARFSGSLSGGKAALTLSGVQPEDEAEYYCVLWYSNRWVFGSGTKLTVL

SEQ ID NO: 2750 - protein, 1242 aa, Artificial Sequence
  Synthetic
EVQLVESGGGLVQPGGSLTLSCAASGFTFHDYTMHWVRQTPGKCLEWLSGIGWNGYSKGYADSVKGRFTISRDNAKNSLFLQMNSLTSDDTALYYCVKDYHYGSGILDNYYGLDVWGQGTTVTVSSGGGGSGGGGSGGGGSEIVLTQSPATLSVSPGERATLSCRASQSISNNLAWYQQKPGQAPRLLIYGASSRATGIPDRFSGSGSGTEFTLTISSLQSEDFAVYYCQQYKNWPLTFGCGTKVDIKSGGGGSQVQLVQSGGEVKKPGASVKVSCKASGYTFTSYGISWVRQAPGQCLEWMGWISAYTGETLYAQKLQGRVTMTRDTSTSTAYMELRSLRSDDTAVYYCARDPDYYGSGSYSDYWGQGTLVTVSSGGGGSGGGGSGGGGSEIVLTQSPATLSVSPGERATLSCRASQSVSSNLAWYQQKPGQAPRLLIYGASSRATGIPARFSGSGSGTEFTLTISSLQSEDFAVYYCQQYHSWPLLTFGCGTKVEIKSGGGGSEVQLVESGGGLVQPGGSLKLSCAASGFTFNKYAMNWVRQAPGKGLEWVARIRSKYNNYATYYADSVKDRFTISRDDSKNTAYLQMNNLKTEDTAVYYCVRHGNFGNSYISYWAYWGQGTLVTVSSGGGGSGGGGSGGGGSQTVVTQEPSLTVSPGGTVTLTCGSSTGAVTSGNYPNWVQQKPGQAPRGLIGGTKFLAPGTPARFSGSLLGGKAALTLSGVQPEDEAEYYCVLWYSNRWVFGGGTKLTVLGGGGDKTHTCPPCPAPELLGGPSVFLFPPKPKDTLMISRTPEVTCVVVDVSHEDPEVKFNWYVDGVEVHNAKTKPCEEQYGSTYRCVSVLTVLHQDWLNGKEYKCKVSNKALPAPIEKTISKAKGQPREPQVYTLPPSREEMTKNQVSLTCLVKGFYPSDIAVEWESNGQPENNYKTTPPVLDSDGSFFLYSKLTVDKSRWQQGNVFSCSVMHEALHNHYTQKSLSLSPGKGGGGSGGGGSGGGGSGGGGSGGGGSGGGGSDKTHTCPPCPAPELLGGPSVFLFPPKPKDTLMISRTPEVTCVVVDVSHEDPEVKFNWYVDGVEVHNAKTKPCEEQYGSTYRCVSVLTVLHQDWLNGKEYKCKVSNKALPAPIEKTISKAKGQPREPQVYTLPPSREEMTKNQVSLTCLVKGFYPSDIAVEWESNGQPENNYKTTPPVLDSDGSFFLYSKLTVDKSRWQQGNVFSCSVMHEALHNHYTQKSLSLSPGK

SEQ ID NO: 2751 - protein, 1232 aa, Artificial Sequence
  Synthetic
EVQLVESGGGLVQPGGSLTLSCAASGFTFHDYTMHWVRQTPGKCLEWLSGIGWNGYSKGYADSVKGRFTISRDNAKNSLFLQMNSLTSDDTALYYCVKDYHYGSGILDNYYGLDVWGQGTTVTVSSGGGGQGGGGQGGGGQEIVLTQSPATLSVSPGERATLSCRASQSISNNLAWYQQKPGQAPRLLIYGASSRATGIPDRFSGSGSGTEFTLTISSLQSEDFAVYYCQQYKNWPLTFGCGTKVDIKSGGGGQQVQLVQSGGEVKKPGASVKVSCKASGYTFTSYGISWVRQAPGQCLEWMGWISAYTGETLYAQKLQGRVTMTRDTSTSTAYMELRSLRSDDTAVYYCARDPDYYGSGSYSDYWGQGTLVTVSSGGGGQGGGGQGGGGQEIVLTQSPATLSVSPGERATLSCRASQSVSSNLAWYQQKPGQAPRLLIYGASSRATGIPARFSGSGSGTEFTLTISSLQSEDFAVYYCQQYHSWPLLTFGCGTKVEIKSGGGGQEVQLVESGGGLVQPGGSLKLSCAASGFTFNKYAMNWVRQAPGKGLEWVARIRSKYNNYATYYADSVKDRFTISRDDSKNTAYLQMNNLKTEDTAVYYCVRHGNFGNSYISYWAYWGQGTLVTVSSGGGGQGGGGQGGGGQQTVVTQEPSLTVSPGGTVTLTCGSSTGAVTSGNYPNWVQQKPGQAPRGLIGGTKFLAPGTPARFSGSLLGGKAALTLSGVQPEDEAEYYCVLWYSNRWVFGGGTKLTVLGGGGCPPCPAPELLGGPSVFLFPPKPKDTLMISRTPEVTCVVVDVSHEEPEVKFNWYVDGVEVHNAKTKPCEEQYGSTYRCVSVLTVLHQDWLNGKEYKCKVSNKALPAPIEKTISKAKGQPREPQVYTLPPSREEMTKNQVSLTCLVKGFYPSDIAVEWESNGQPENNYKTTPPVLDSDGSFFLYSKLTVDKSRWQQGNVFSCSVMHEALHNHYTQKSLSLSPGKGGGGQGGGGQGGGGQGGGGQGGGGQGGGGQCPPCPAPELLGGPSVFLFPPKPKDTLMISRTPEVTCVVVDVSHEEPEVKFNWYVDGVEVHNAKTKPCEEQYGSTYRCVSVLTVLHQDWLNGKEYKCKVSNKALPAPIEKTISKAKGQPREPQVYTLPPSREEMTKNQVSLTCLVKGFYPSDIAVEWESNGQPENNYKTTPPVLDSDGSFFLYSKLTVDKSRWQQGNVFSCSVMHEALHNHYTQKSLSLSPGK

SEQ ID NO: 2752 - protein, 1242 aa, Artificial Sequence
  Synthetic
EVQLVESGGGLVQPGGSLTLSCAASGFTFHDYTMHWVRQTPGKCLEWLSGIGWNGYSKGYADSVKGRFTISRDNAKNSLFLQMNSLTSDDTALYYCVKDYHYGSGILDNYYGLDVWGQGTTVTVSSGGGGSGGGGSGGGGSEIVLTQSPATLSVSPGERATLSCRASQSISNNLAWYQQKPGQAPRLLIYGASSRATGIPDRFSGSGSGTEFTLTISSLQSEDFAVYYCQQYKNWPLTFGCGTKVDIKSGGGGSQVQLVQSGGEVKKPGASVKVSCKASGYTFTSYGISWVRQAPGQCLEWMGWISAYTGETLYAQKLQGRVTMTRDTSTSTAYMELRSLRSDDTAVYYCARDPDYYGSGSYSDYWGQGTLVTVSSGGGGSGGGGSGGGGSEIVLTQSPATLSVSPGERATLSCRASQSVSSNLAWYQQKPGQAPRLLIYGASSRATGIPARFSGSGSGTEFTLTISSLQSEDFAVYYCQQYHSWPLLTFGCGTKVEIKSGGGGSEVQLVESGGGLVQPGGSLKLSCAASGFTFNKYAINWVRQAPGKGLEWVARIRSKYNNYATYYADAVKDRFTISRDDSKNTVYLQMNNLKTEDTAVYYCARAGNFGSSYISYWAYWGQGTLVTVSSGGGGSGGGGSGGGGSQTVVTQEPSLTVSPGGTVTITCGSSTGAVTSGNYPNWVQKKPGQAPRGLIGGTKFLAPGTPARFSGSLSGGKAALTLSGVQPEDEAEYYCVLWYSNRWVFGSGTKLTVLGGGGDKTHTCPPCPAPELLGGPSVFLFPPKPKDTLMISRTPEVTCVVVDVSHEDPEVKFNWYVDGVEVHNAKTKPCEEQYGSTYRCVSVLTVLHQDWLNGKEYKCKVSNKALPAPIEKTISKAKGQPREPQVYTLPPSREEMTKNQVSLTCLVKGFYPSDIAVEWESNGQPENNYKTTPPVLDSDGSFFLYSKLTVDKSRWQQGNVFSCSVMHEALHNHYTQKSLSLSPGKGGGGSGGGGSGGGGSGGGGSGGGGSGGGGSDKTHTCPPCPAPELLGGPSVFLFPPKPKDTLMISRTPEVTCVVVDVSHEDPEVKFNWYVDGVEVHNAKTKPCEEQYGSTYRCVSVLTVLHQDWLNGKEYKCKVSNKALPAPIEKTISKAKGQPREPQVYTLPPSREEMTKNQVSLTCLVKGFYPSDIAVEWESNGQPENNYKTTPPVLDSDGSFFLYSKLTVDKSRWQQGNVFSCSVMHEALHNHYTQKSLSLSPGK

SEQ ID NO: 2753 - protein, 1232 aa, Artificial Sequence
  Synthetic
EVQLVESGGGLVQPGGSLTLSCAASGFTFHDYTMHWVRQTPGKCLEWLSGIGWNGYSKGYADSVKGRFTISRDNAKNSLFLQMNSLTSDDTALYYCVKDYHYGSGILDNYYGLDVWGQGTTVTVSSGGGGQGGGGQGGGGQEIVLTQSPATLSVSPGERATLSCRASQSISNNLAWYQQKPGQAPRLLIYGASSRATGIPDRFSGSGSGTEFTLTISSLQSEDFAVYYCQQYKNWPLTFGCGTKVDIKSGGGGQQVQLVQSGGEVKKPGASVKVSCKASGYTFTSYGISWVRQAPGQCLEWMGWISAYTGETLYAQKLQGRVTMTRDTSTSTAYMELRSLRSDDTAVYYCARDPDYYGSGSYSDYWGQGTLVTVSSGGGGQGGGGQGGGGQEIVLTQSPATLSVSPGERATLSCRASQSVSSNLAWYQQKPGQAPRLLIYGASSRATGIPARFSGSGSGTEFTLTISSLQSEDFAVYYCQQYHSWPLLTFGCGTKVEIKSGGGGQEVQLVESGGGLVQPGGSLKLSCAASGFTFNKYAINWVRQAPGKGLEWVARIRSKYNNYATYYADAVKDRFTISRDDSKNTVYLQMNNLKTEDTAVYYCARAGNFGSSYISYWAYWGQGTLVTVSSGGGGQGGGGQGGGGQQTVVTQEPSLTVSPGGTVTITCGSSTGAVTSGNYPNWVQKKPGQAPRGLIGGTKFLAPGTPARFSGSLSGGKAALTLSGVQPEDEAEYYCVLWYSNRWVFGSGTKLTVLGGGGCPPCPAPELLGGPSVFLFPPKPKDTLMISRTPEVTCVVVDVSHEEPEVKFNWYVDGVEVHNAKTKPCEEQYGSTYRCVSVLTVLHQDWLNGKEYKCKVSNKALPAPIEKTISKAKGQPREPQVYTLPPSREEMTKNQVSLTCLVKGFYPSDIAVEWESNGQPENNYKTTPPVLDSDGSFFLYSKLTVDKSRWQQGNVFSCSVMHEALHNHYTQKSLSLSPGKGGGGQGGGGQGGGGQGGGGQGGGGQGGGGQCPPCPAPELLGGPSVFLFPPKPKDTLMISRTPEVTCVVVDVSHEEPEVKFNWYVDGVEVHNAKTKPCEEQYGSTYRCVSVLTVLHQDWLNGKEYKCKVSNKALPAPIEKTISKAKGQPREPQVYTLPPSREEMTKNQVSLTCLVKGFYPSDIAVEWESNGQPENNYKTTPPVLDSDGSFFLYSKLTVDKSRWQQGNVFSCSVMHEALHNHYTQKSLSLSPGK

SEQ ID NO: 2754 - protein, 499 aa, Artificial Sequence
  Synthetic
EVQLVESGGGLVQPGGSLTLSCAASGFTFHDYTMHWVRQTPGKCLEWLSGIGWNGYSKGYADSVKGRFTISRDNAKNSLFLQMNSLTSDDTALYYCVKDYHYGSGILDNYYGLDVWGQGTTVTVSSGGGGSGGGGSGGGGSEIVLTQSPATLSVSPGERATLSCRASQSISNNLAWYQQKPGQAPRLLIYGASSRATGIPDRFSGSGSGTEFTLTISSLQSEDFAVYYCQQYKNWPLTFGCGTKVDIKSGGGGSQVQLVQSGGEVKKPGASVKVSCKASGYTFTSYGISWVRQAPGQCLEWMGWISPQTGNAIYAQKLQGRVTMTRDTSTSTAYMELRSLRSDDTAVYYCARDPDYYGSGSYSDYWGQGTLVTVSSGGGGSGGGGSGGGGSEIVLTQSPATLSVSPGERATLSCRASQSVSSNLAWYQQKPGQAPRLLIYGASSRATGIPARFSGSGSGTEFTLTISSLQSEDFAVYYCQQYHSWPLLTFGCGTKVEIK

SEQ ID NO: 2755 - protein, 499 aa, Artificial Sequence
  Synthetic
EVQLVESGGGLVQPGGSLTLSCAASGFTFHDYTMHWVRQTPGKCLEWLSGIGWNGYSKGYADSVKGRFTISRDNAKNSLFLQMNSLTSDDTALYYCVKDYHYGSGILDNYYGLDVWGQGTTVTVSSGGGGQGGGGQGGGGQEIVLTQSPATLSVSPGERATLSCRASQSISNNLAWYQQKPGQAPRLLIYGASSRATGIPDRFSGSGSGTEFTLTISSLQSEDFAVYYCQQYKNWPLTFGCGTKVDIKSGGGGQQVQLVQSGGEVKKPGASVKVSCKASGYTFTSYGISWVRQAPGQCLEWMGWISPQTGNAIYAQKLQGRVTMTRDTSTSTAYMELRSLRSDDTAVYYCARDPDYYGSGSYSDYWGQGTLVTVSSGGGGQGGGGQGGGGQEIVLTQSPATLSVSPGERATLSCRASQSVSSNLAWYQQKPGQAPRLLIYGASSRATGIPARFSGSGSGTEFTLTISSLQSEDFAVYYCQQYHSWPLLTFGCGTKVEIK

SEQ ID NO: 2756 - protein, 754 aa, Artificial Sequence
  Synthetic
EVQLVESGGGLVQPGGSLTLSCAASGFTFHDYTMHWVRQTPGKCLEWLSGIGWNGYSKGYADSVKGRFTISRDNAKNSLFLQMNSLTSDDTALYYCVKDYHYGSGILDNYYGLDVWGQGTTVTVSSGGGGSGGGGSGGGGSEIVLTQSPATLSVSPGERATLSCRASQSISNNLAWYQQKPGQAPRLLIYGASSRATGIPDRFSGSGSGTEFTLTISSLQSEDFAVYYCQQYKNWPLTFGCGTKVDIKSGGGGSQVQLVQSGGEVKKPGASVKVSCKASGYTFTSYGISWVRQAPGQCLEWMGWISPQTGNAIYAQKLQGRVTMTRDTSTSTAYMELRSLRSDDTAVYYCARDPDYYGSGSYSDYWGQGTLVTVSSGGGGSGGGGSGGGGSEIVLTQSPATLSVSPGERATLSCRASQSVSSNLAWYQQKPGQAPRLLIYGASSRATGIPARFSGSGSGTEFTLTISSLQSEDFAVYYCQQYHSWPLLTFGCGTKVEIKSGGGGSEVQLVESGGGLVQPGGSLKLSCAASGFTFNKYAMNWVRQAPGKGLEWVARIRSKYNNYATYYADSVKDRFTISRDDSKNTAYLQMNNLKTEDTAVYYCVRHGNFGNSYISYWAYWGQGTLVTVSSGGGGSGGGGSGGGGSQTVVTQEPSLTVSPGGTVTLTCGSSTGAVTSGNYPNWVQQKPGQAPRGLIGGTKFLAPGTPARFSGSLLGGKAALTLSGVQPEDEAEYYCVLWYSNRWVFGGGTKLTVL

SEQ ID NO: 2757 - protein, 754 aa, Artificial Sequence
  Synthetic
EVQLVESGGGLVQPGGSLTLSCAASGFTFHDYTMHWVRQTPGKCLEWLSGIGWNGYSKGYADSVKGRFTISRDNAKNSLFLQMNSLTSDDTALYYCVKDYHYGSGILDNYYGLDVWGQGTTVTVSSGGGGQGGGGQGGGGQEIVLTQSPATLSVSPGERATLSCRASQSISNNLAWYQQKPGQAPRLLIYGASSRATGIPDRFSGSGSGTEFTLTISSLQSEDFAVYYCQQYKNWPLTFGCGTKVDIKSGGGGQQVQLVQSGGEVKKPGASVKVSCKASGYTFTSYGISWVRQAPGQCLEWMGWISPQTGNAIYAQKLQGRVTMTRDTSTSTAYMELRSLRSDDTAVYYCARDPDYYGSGSYSDYWGQGTLVTVSSGGGGQGGGGQGGGGQEIVLTQSPATLSVSPGERATLSCRASQSVSSNLAWYQQKPGQAPRLLIYGASSRATGIPARFSGSGSGTEFTLTISSLQSEDFAVYYCQQYHSWPLLTFGCGTKVEIKSGGGGQEVQLVESGGGLVQPGGSLKLSCAASGFTFNKYAMNWVRQAPGKGLEWVARIRSKYNNYATYYADSVKDRFTISRDDSKNTAYLQMNNLKTEDTAVYYCVRHGNFGNSYISYWAYWGQGTLVTVSSGGGGQGGGGQGGGGQQTVVTQEPSLTVSPGGTVTLTCGSSTGAVTSGNYPNWVQQKPGQAPRGLIGGTKFLAPGTPARFSGSLLGGKAALTLSGVQPEDEAEYYCVLWYSNRWVFGGGTKLTVL

SEQ ID NO: 2758 - protein, 754 aa, Artificial Sequence
  Synthetic
EVQLVESGGGLVQPGGSLTLSCAASGFTFHDYTMHWVRQTPGKCLEWLSGIGWNGYSKGYADSVKGRFTISRDNAKNSLFLQMNSLTSDDTALYYCVKDYHYGSGILDNYYGLDVWGQGTTVTVSSGGGGSGGGGSGGGGSEIVLTQSPATLSVSPGERATLSCRASQSISNNLAWYQQKPGQAPRLLIYGASSRATGIPDRFSGSGSGTEFTLTISSLQSEDFAVYYCQQYKNWPLTFGCGTKVDIKSGGGGSQVQLVQSGGEVKKPGASVKVSCKASGYTFTSYGISWVRQAPGQCLEWMGWISPQTGNAIYAQKLQGRVTMTRDTSTSTAYMELRSLRSDDTAVYYCARDPDYYGSGSYSDYWGQGTLVTVSSGGGGSGGGGSGGGGSEIVLTQSPATLSVSPGERATLSCRASQSVSSNLAWYQQKPGQAPRLLIYGASSRATGIPARFSGSGSGTEFTLTISSLQSEDFAVYYCQQYHSWPLLTFGCGTKVEIKSGGGGSEVQLVESGGGLVQPGGSLKLSCAASGFTFNKYAINWVRQAPGKGLEWVARIRSKYNNYATYYADAVKDRFTISRDDSKNTVYLQMNNLKTEDTAVYYCARAGNFGSSYISYWAYWGQGTLVTVSSGGGGSGGGGSGGGGSQTVVTQEPSLTVSPGGTVTITCGSSTGAVTSGNYPNWVQKKPGQAPRGLIGGTKFLAPGTPARFSGSLSGGKAALTLSGVQPEDEAEYYCVLWYSNRWVFGSGTKLTVL

SEQ ID NO: 2759 - protein, 754 aa, Artificial Sequence
  Synthetic
EVQLVESGGGLVQPGGSLTLSCAASGFTFHDYTMHWVRQTPGKCLEWLSGIGWNGYSKGYADSVKGRFTISRDNAKNSLFLQMNSLTSDDTALYYCVKDYHYGSGILDNYYGLDVWGQGTTVTVSSGGGGQGGGGQGGGGQEIVLTQSPATLSVSPGERATLSCRASQSISNNLAWYQQKPGQAPRLLIYGASSRATGIPDRFSGSGSGTEFTLTISSLQSEDFAVYYCQQYKNWPLTFGCGTKVDIKSGGGGQQVQLVQSGGEVKKPGASVKVSCKASGYTFTSYGISWVRQAPGQCLEWMGWISPQTGNAIYAQKLQGRVTMTRDTSTSTAYMELRSLRSDDTAVYYCARDPDYYGSGSYSDYWGQGTLVTVSSGGGGQGGGGQGGGGQEIVLTQSPATLSVSPGERATLSCRASQSVSSNLAWYQQKPGQAPRLLIYGASSRATGIPARFSGSGSGTEFTLTISSLQSEDFAVYYCQQYHSWPLLTFGCGTKVEIKSGGGGQEVQLVESGGGLVQPGGSLKLSCAASGFTFNKYAINWVRQAPGKGLEWVARIRSKYNNYATYYADAVKDRFTISRDDSKNTVYLQMNNLKTEDTAVYYCARAGNFGSSYISYWAYWGQGTLVTVSSGGGGQGGGGQGGGGQQTVVTQEPSLTVSPGGTVTITCGSSTGAVTSGNYPNWVQKKPGQAPRGLIGGTKFLAPGTPARFSGSLSGGKAALTLSGVQPEDEAEYYCVLWYSNRWVFGSGTKLTVL

SEQ ID NO: 2760 - protein, 1242 aa, Artificial Sequence
  Synthetic
EVQLVESGGGLVQPGGSLTLSCAASGFTFHDYTMHWVRQTPGKCLEWLSGIGWNGYSKGYADSVKGRFTISRDNAKNSLFLQMNSLTSDDTALYYCVKDYHYGSGILDNYYGLDVWGQGTTVTVSSGGGGSGGGGSGGGGSEIVLTQSPATLSVSPGERATLSCRASQSISNNLAWYQQKPGQAPRLLIYGASSRATGIPDRFSGSGSGTEFTLTISSLQSEDFAVYYCQQYKNWPLTFGCGTKVDIKSGGGGSQVQLVQSGGEVKKPGASVKVSCKASGYTFTSYGISWVRQAPGQCLEWMGWISPQTGNAIYAQKLQGRVTMTRDTSTSTAYMELRSLRSDDTAVYYCARDPDYYGSGSYSDYWGQGTLVTVSSGGGGSGGGGSGGGGSEIVLTQSPATLSVSPGERATLSCRASQSVSSNLAWYQQKPGQAPRLLIYGASSRATGIPARFSGSGSGTEFTLTISSLQSEDFAVYYCQQYHSWPLLTFGCGTKVEIKSGGGGSEVQLVESGGGLVQPGGSLKLSCAASGFTFNKYAMNWVRQAPGKGLEWVARIRSKYNNYATYYADSVKDRFTISRDDSKNTAYLQMNNLKTEDTAVYYCVRHGNFGNSYISYWAYWGQGTLVTVSSGGGGSGGGGSGGGGSQTVVTQEPSLTVSPGGTVTLTCGSSTGAVTSGNYPNWVQQKPGQAPRGLIGGTKFLAPGTPARFSGSLLGGKAALTLSGVQPEDEAEYYCVLWYSNRWVFGGGTKLTVLGGGGDKTHTCPPCPAPELLGGPSVFLFPPKPKDTLMISRTPEVTCVVVDVSHEDPEVKFNWYVDGVEVHNAKTKPCEEQYGSTYRCVSVLTVLHQDWLNGKEYKCKVSNKALPAPIEKTISKAKGQPREPQVYTLPPSREEMTKNQVSLTCLVKGFYPSDIAVEWESNGQPENNYKTTPPVLDSDGSFFLYSKLTVDKSRWQQGNVFSCSVMHEALHNHYTQKSLSLSPGKGGGGSGGGGSGGGGSGGGGSGGGGSGGGGSDKTHTCPPCPAPELLGGPSVFLFPPKPKDTLMISRTPEVTCVVVDVSHEDPEVKFNWYVDGVEVHNAKTKPCEEQYGSTYRCVSVLTVLHQDWLNGKEYKCKVSNKALPAPIEKTISKAKGQPREPQVYTLPPSREEMTKNQVSLTCLVKGFYPSDIAVEWESNGQPENNYKTTPPVLDSDGSFFLYSKLTVDKSRWQQGNVFSCSVMHEALHNHYTQKSLSLSPGK

SEQ ID NO: 2761 - protein, 1232 aa, Artificial Sequence
  Synthetic
EVQLVESGGGLVQPGGSLTLSCAASGFTFHDYTMHWVRQTPGKCLEWLSGIGWNGYSKGYADSVKGRFTISRDNAKNSLFLQMNSLTSDDTALYYCVKDYHYGSGILDNYYGLDVWGQGTTVTVSSGGGGQGGGGQGGGGQEIVLTQSPATLSVSPGERATLSCRASQSISNNLAWYQQKPGQAPRLLIYGASSRATGIPDRFSGSGSGTEFTLTISSLQSEDFAVYYCQQYKNWPLTFGCGTKVDIKSGGGGQQVQLVQSGGEVKKPGASVKVSCKASGYTFTSYGISWVRQAPGQCLEWMGWISPQTGNAIYAQKLQGRVTMTRDTSTSTAYMELRSLRSDDTAVYYCARDPDYYGSGSYSDYWGQGTLVTVSSGGGGQGGGGQGGGGQEIVLTQSPATLSVSPGERATLSCRASQSVSSNLAWYQQKPGQAPRLLIYGASSRATGIPARFSGSGSGTEFTLTISSLQSEDFAVYYCQQYHSWPLLTFGCGTKVEIKSGGGGQEVQLVESGGGLVQPGGSLKLSCAASGFTFNKYAMNWVRQAPGKGLEWVARIRSKYNNYATYYADSVKDRFTISRDDSKNTAYLQMNNLKTEDTAVYYCVRHGNFGNSYISYWAYWGQGTLVTVSSGGGGQGGGGQGGGGQQTVVTQEPSLTVSPGGTVTLTCGSSTGAVTSGNYPNWVQQKPGQAPRGLIGGTKFLAPGTPARFSGSLLGGKAALTLSGVQPEDEAEYYCVLWYSNRWVFGGGTKLTVLGGGGCPPCPAPELLGGPSVFLFPPKPKDTLMISRTPEVTCVVVDVSHEEPEVKFNWYVDGVEVHNAKTKPCEEQYGSTYRCVSVLTVLHQDWLNGKEYKCKVSNKALPAPIEKTISKAKGQPREPQVYTLPPSREEMTKNQVSLTCLVKGFYPSDIAVEWESNGQPENNYKTTPPVLDSDGSFFLYSKLTVDKSRWQQGNVFSCSVMHEALHNHYTQKSLSLSPGKGGGGQGGGGQGGGGQGGGGQGGGGQGGGGQCPPCPAPELLGGPSVFLFPPKPKDTLMISRTPEVTCVVVDVSHEEPEVKFNWYVDGVEVHNAKTKPCEEQYGSTYRCVSVLTVLHQDWLNGKEYKCKVSNKALPAPIEKTISKAKGQPREPQVYTLPPSREEMTKNQVSLTCLVKGFYPSDIAVEWESNGQPENNYKTTPPVLDSDGSFFLYSKLTVDKSRWQQGNVFSCSVMHEALHNHYTQKSLSLSPGK

SEQ ID NO: 2762 - protein, 1242 aa, Artificial Sequence
  Synthetic
EVQLVESGGGLVQPGGSLTLSCAASGFTFHDYTMHWVRQTPGKCLEWLSGIGWNGYSKGYADSVKGRFTISRDNAKNSLFLQMNSLTSDDTALYYCVKDYHYGSGILDNYYGLDVWGQGTTVTVSSGGGGSGGGGSGGGGSEIVLTQSPATLSVSPGERATLSCRASQSISNNLAWYQQKPGQAPRLLIYGASSRATGIPDRFSGSGSGTEFTLTISSLQSEDFAVYYCQQYKNWPLTFGCGTKVDIKSGGGGSQVQLVQSGGEVKKPGASVKVSCKASGYTFTSYGISWVRQAPGQCLEWMGWISPQTGNAIYAQKLQGRVTMTRDTSTSTAYMELRSLRSDDTAVYYCARDPDYYGSGSYSDYWGQGTLVTVSSGGGGSGGGGSGGGGSEIVLTQSPATLSVSPGERATLSCRASQSVSSNLAWYQQKPGQAPRLLIYGASSRATGIPARFSGSGSGTEFTLTISSLQSEDFAVYYCQQYHSWPLLTFGCGTKVEIKSGGGGSEVQLVESGGGLVQPGGSLKLSCAASGFTFNKYAINWVRQAPGKGLEWVARIRSKYNNYATYYADAVKDRFTISRDDSKNTVYLQMNNLKTEDTAVYYCARAGNFGSSYISYWAYWGQGTLVTVSSGGGGSGGGGSGGGGSQTVVTQEPSLTVSPGGTVTITCGSSTGAVTSGNYPNWVQKKPGQAPRGLIGGTKFLAPGTPARFSGSLSGGKAALTLSGVQPEDEAEYYCVLWYSNRWVFGSGTKLTVLGGGGDKTHTCPPCPAPELLGGPSVFLFPPKPKDTLMISRTPEVTCVVVDVSHEDPEVKFNWYVDGVEVHNAKTKPCEEQYGSTYRCVSVLTVLHQDWLNGKEYKCKVSNKALPAPIEKTISKAKGQPREPQVYTLPPSREEMTKNQVSLTCLVKGFYPSDIAVEWESNGQPENNYKTTPPVLDSDGSFFLYSKLTVDKSRWQQGNVFSCSVMHEALHNHYTQKSLSLSPGKGGGGSGGGGSGGGGSGGGGSGGGGSGGGGSDKTHTCPPCPAPELLGGPSVFLFPPKPKDTLMISRTPEVTCVVVDVSHEDPEVKFNWYVDGVEVHNAKTKPCEEQYGSTYRCVSVLTVLHQDWLNGKEYKCKVSNKALPAPIEKTISKAKGQPREPQVYTLPPSREEMTKNQVSLTCLVKGFYPSDIAVEWESNGQPENNYKTTPPVLDSDGSFFLYSKLTVDKSRWQQGNVFSCSVMHEALHNHYTQKSLSLSPGK

SEQ ID NO: 2763 - protein, 1232 aa, Artificial Sequence
  Synthetic
EVQLVESGGGLVQPGGSLTLSCAASGFTFHDYTMHWVRQTPGKCLEWLSGIGWNGYSKGYADSVKGRFTISRDNAKNSLFLQMNSLTSDDTALYYCVKDYHYGSGILDNYYGLDVWGQGTTVTVSSGGGGQGGGGQGGGGQEIVLTQSPATLSVSPGERATLSCRASQSISNNLAWYQQKPGQAPRLLIYGASSRATGIPDRFSGSGSGTEFTLTISSLQSEDFAVYYCQQYKNWPLTFGCGTKVDIKSGGGGQQVQLVQSGGEVKKPGASVKVSCKASGYTFTSYGISWVRQAPGQCLEWMGWISPQTGNAIYAQKLQGRVTMTRDTSTSTAYMELRSLRSDDTAVYYCARDPDYYGSGSYSDYWGQGTLVTVSSGGGGQGGGGQGGGGQEIVLTQSPATLSVSPGERATLSCRASQSVSSNLAWYQQKPGQAPRLLIYGASSRATGIPARFSGSGSGTEFTLTISSLQSEDFAVYYCQQYHSWPLLTFGCGTKVEIKSGGGGQEVQLVESGGGLVQPGGSLKLSCAASGFTFNKYAINWVRQAPGKGLEWVARIRSKYNNYATYYADAVKDRFTISRDDSKNTVYLQMNNLKTEDTAVYYCARAGNFGSSYISYWAYWGQGTLVTVSSGGGGQGGGGQGGGGQQTVVTQEPSLTVSPGGTVTITCGSSTGAVTSGNYPNWVQKKPGQAPRGLIGGTKFLAPGTPARFSGSLSGGKAALTLSGVQPEDEAEYYCVLWYSNRWVFGSGTKLTVLGGGGCPPCPAPELLGGPSVFLFPPKPKDTLMISRTPEVTCVVVDVSHEEPEVKFNWYVDGVEVHNAKTKPCEEQYGSTYRCVSVLTVLHQDWLNGKEYKCKVSNKALPAPIEKTISKAKGQPREPQVYTLPPSREEMTKNQVSLTCLVKGFYPSDIAVEWESNGQPENNYKTTPPVLDSDGSFFLYSKLTVDKSRWQQGNVFSCSVMHEALHNHYTQKSLSLSPGKGGGGQGGGGQGGGGQGGGGQGGGGQGGGGQCPPCPAPELLGGPSVFLFPPKPKDTLMISRTPEVTCVVVDVSHEEPEVKFNWYVDGVEVHNAKTKPCEEQYGSTYRCVSVLTVLHQDWLNGKEYKCKVSNKALPAPIEKTISKAKGQPREPQVYTLPPSREEMTKNQVSLTCLVKGFYPSDIAVEWESNGQPENNYKTTPPVLDSDGSFFLYSKLTVDKSRWQQGNVFSCSVMHEALHNHYTQKSLSLSPGK

SEQ ID NO: 2764 - protein, 499 aa, Artificial Sequence
  Synthetic
EVQLVESGGGLVQPGGSLTLSCAASGFTFHDYTMHWVRQTPGKCLEWLSGIGWNGYSKGYADSVKGRFTISRDNAKNSLFLQMNSLTSDDTALYYCVKDYHYGSGILDNYYGLDVWGQGTTVTVSSGGGGSGGGGSGGGGSEIVLTQSPATLSVSPGERATLSCRASQSISNNLAWYQQKPGQAPRLLIYGASSRATGIPDRFSGSGSGTEFTLTISSLQSEDFAVYYCQQYKNWPLTFGCGTKVDIKSGGGGSQVQLVQSGAEVKKPGASVKVSCKASGYTFTSYGISWVRQAPGQCLEWMGWISAYNGNAIYAQKLQGRVTMTRDTSTSTAYMELRSLRSDDTAVYYCARDPDYYGSGSYSDYWGQGTLVTVSSGGGGSGGGGSGGGGSEIVLTQSPATLSVSPGERATLSCRASQSVSSNLAWYQQKPGQAPRLLIYGASSRATGIPARFSGSGSGTEFTLTISSLQSEDFAVYYCQQYHSWPILHFGCGTKVEIK

SEQ ID NO: 2765 - protein, 499 aa, Artificial Sequence
  Synthetic
EVQLVESGGGLVQPGGSLTLSCAASGFTFHDYTMHWVRQTPGKCLEWLSGIGWNGYSKGYADSVKGRFTISRDNAKNSLFLQMNSLTSDDTALYYCVKDYHYGSGILDNYYGLDVWGQGTTVTVSSGGGGQGGGGQGGGGQEIVLTQSPATLSVSPGERATLSCRASQSISNNLAWYQQKPGQAPRLLIYGASSRATGIPDRFSGSGSGTEFTLTISSLQSEDFAVYYCQQYKNWPLTFGCGTKVDIKSGGGGQQVQLVQSGAEVKKPGASVKVSCKASGYTFTSYGISWVRQAPGQCLEWMGWISAYNGNAIYAQKLQGRVTMTRDTSTSTAYMELRSLRSDDTAVYYCARDPDYYGSGSYSDYWGQGTLVTVSSGGGGQGGGGQGGGGQEIVLTQSPATLSVSPGERATLSCRASQSVSSNLAWYQQKPGQAPRLLIYGASSRATGIPARFSGSGSGTEFTLTISSLQSEDFAVYYCQQYHSWPILHFGCGTKVEIK

SEQ ID NO: 2766 - protein, 754 aa, Artificial Sequence
  Synthetic
EVQLVESGGGLVQPGGSLTLSCAASGFTFHDYTMHWVRQTPGKCLEWLSGIGWNGYSKGYADSVKGRFTISRDNAKNSLFLQMNSLTSDDTALYYCVKDYHYGSGILDNYYGLDVWGQGTTVTVSSGGGGSGGGGSGGGGSEIVLTQSPATLSVSPGERATLSCRASQSISNNLAWYQQKPGQAPRLLIYGASSRATGIPDRFSGSGSGTEFTLTISSLQSEDFAVYYCQQYKNWPLTFGCGTKVDIKSGGGGSQVQLVQSGAEVKKPGASVKVSCKASGYTFTSYGISWVRQAPGQCLEWMGWISAYNGNAIYAQKLQGRVTMTRDTSTSTAYMELRSLRSDDTAVYYCARDPDYYGSGSYSDYWGQGTLVTVSSGGGGSGGGGSGGGGSEIVLTQSPATLSVSPGERATLSCRASQSVSSNLAWYQQKPGQAPRLLIYGASSRATGIPARFSGSGSGTEFTLTISSLQSEDFAVYYCQQYHSWPILHFGCGTKVEIKSGGGGSEVQLVESGGGLVQPGGSLKLSCAASGFTFNKYAMNWVRQAPGKGLEWVARIRSKYNNYATYYADSVKDRFTISRDDSKNTAYLQMNNLKTEDTAVYYCVRHGNFGNSYISYWAYWGQGTLVTVSSGGGGSGGGGSGGGGSQTVVTQEPSLTVSPGGTVTLTCGSSTGAVTSGNYPNWVQQKPGQAPRGLIGGTKFLAPGTPARFSGSLLGGKAALTLSGVQPEDEAEYYCVLWYSNRWVFGGGTKLTVL

SEQ ID NO: 2767 - protein, 754 aa, Artificial Sequence
  Synthetic
EVQLVESGGGLVQPGGSLTLSCAASGFTFHDYTMHWVRQTPGKCLEWLSGIGWNGYSKGYADSVKGRFTISRDNAKNSLFLQMNSLTSDDTALYYCVKDYHYGSGILDNYYGLDVWGQGTTVTVSSGGGGQGGGGQGGGGQEIVLTQSPATLSVSPGERATLSCRASQSISNNLAWYQQKPGQAPRLLIYGASSRATGIPDRFSGSGSGTEFTLTISSLQSEDFAVYYCQQYKNWPLTFGCGTKVDIKSGGGGQQVQLVQSGAEVKKPGASVKVSCKASGYTFTSYGISWVRQAPGQCLEWMGWISAYNGNAIYAQKLQGRVTMTRDTSTSTAYMELRSLRSDDTAVYYCARDPDYYGSGSYSDYWGQGTLVTVSSGGGGQGGGGQGGGGQEIVLTQSPATLSVSPGERATLSCRASQSVSSNLAWYQQKPGQAPRLLIYGASSRATGIPARFSGSGSGTEFTLTISSLQSEDFAVYYCQQYHSWPILHFGCGTKVEIKSGGGGQEVQLVESGGGLVQPGGSLKLSCAASGFTFNKYAMNWVRQAPGKGLEWVARIRSKYNNYATYYADSVKDRFTISRDDSKNTAYLQMNNLKTEDTAVYYCVRHGNFGNSYISYWAYWGQGTLVTVSSGGGGQGGGGQGGGGQQTVVTQEPSLTVSPGGTVTLTCGSSTGAVTSGNYPNWVQQKPGQAPRGLIGGTKFLAPGTPARFSGSLLGGKAALTLSGVQPEDEAEYYCVLWYSNRWVFGGGTKLTVL

SEQ ID NO: 2768 - protein, 754 aa, Artificial Sequence
  Synthetic
EVQLVESGGGLVQPGGSLTLSCAASGFTFHDYTMHWVRQTPGKCLEWLSGIGWNGYSKGYADSVKGRFTISRDNAKNSLFLQMNSLTSDDTALYYCVKDYHYGSGILDNYYGLDVWGQGTTVTVSSGGGGSGGGGSGGGGSEIVLTQSPATLSVSPGERATLSCRASQSISNNLAWYQQKPGQAPRLLIYGASSRATGIPDRFSGSGSGTEFTLTISSLQSEDFAVYYCQQYKNWPLTFGCGTKVDIKSGGGGSQVQLVQSGAEVKKPGASVKVSCKASGYTFTSYGISWVRQAPGQCLEWMGWISAYNGNAIYAQKLQGRVTMTRDTSTSTAYMELRSLRSDDTAVYYCARDPDYYGSGSYSDYWGQGTLVTVSSGGGGSGGGGSGGGGSEIVLTQSPATLSVSPGERATLSCRASQSVSSNLAWYQQKPGQAPRLLIYGASSRATGIPARFSGSGSGTEFTLTISSLQSEDFAVYYCQQYHSWPILHFGCGTKVEIKSGGGGSEVQLVESGGGLVQPGGSLKLSCAASGFTFNKYAINWVRQAPGKGLEWVARIRSKYNNYATYYADAVKDRFTISRDDSKNTVYLQMNNLKTEDTAVYYCARAGNFGSSYISYWAYWGQGTLVTVSSGGGGSGGGGSGGGGSQTVVTQEPSLTVSPGGTVTITCGSSTGAVTSGNYPNWVQKKPGQAPRGLIGGTKFLAPGTPARFSGSLSGGKAALTLSGVQPEDEAEYYCVLWYSNRWVFGSGTKLTVL

SEQ ID NO: 2769 - protein, 754 aa, Artificial Sequence
  Synthetic
EVQLVESGGGLVQPGGSLTLSCAASGFTFHDYTMHWVRQTPGKCLEWLSGIGWNGYSKGYADSVKGRFTISRDNAKNSLFLQMNSLTSDDTALYYCVKDYHYGSGILDNYYGLDVWGQGTTVTVSSGGGGQGGGGQGGGGQEIVLTQSPATLSVSPGERATLSCRASQSISNNLAWYQQKPGQAPRLLIYGASSRATGIPDRFSGSGSGTEFTLTISSLQSEDFAVYYCQQYKNWPLTFGCGTKVDIKSGGGGQQVQLVQSGAEVKKPGASVKVSCKASGYTFTSYGISWVRQAPGQCLEWMGWISAYNGNAIYAQKLQGRVTMTRDTSTSTAYMELRSLRSDDTAVYYCARDPDYYGSGSYSDYWGQGTLVTVSSGGGGQGGGGQGGGGQEIVLTQSPATLSVSPGERATLSCRASQSVSSNLAWYQQKPGQAPRLLIYGASSRATGIPARFSGSGSGTEFTLTISSLQSEDFAVYYCQQYHSWPILHFGCGTKVEIKSGGGGQEVQLVESGGGLVQPGGSLKLSCAASGFTFNKYAINWVRQAPGKGLEWVARIRSKYNNYATYYADAVKDRFTISRDDSKNTVYLQMNNLKTEDTAVYYCARAGNFGSSYISYWAYWGQGTLVTVSSGGGGQGGGGQGGGGQQTVVTQEPSLTVSPGGTVTITCGSSTGAVTSGNYPNWVQKKPGQAPRGLIGGTKFLAPGTPARFSGSLSGGKAALTLSGVQPEDEAEYYCVLWYSNRWVFGSGTKLTVL

SEQ ID NO: 2770 - protein, 1242 aa, Artificial Sequence
  Synthetic
EVQLVESGGGLVQPGGSLTLSCAASGFTFHDYTMHWVRQTPGKCLEWLSGIGWNGYSKGYADSVKGRFTISRDNAKNSLFLQMNSLTSDDTALYYCVKDYHYGSGILDNYYGLDVWGQGTTVTVSSGGGGSGGGGSGGGGSEIVLTQSPATLSVSPGERATLSCRASQSISNNLAWYQQKPGQAPRLLIYGASSRATGIPDRFSGSGSGTEFTLTISSLQSEDFAVYYCQQYKNWPLTFGCGTKVDIKSGGGGSQVQLVQSGAEVKKPGASVKVSCKASGYTFTSYGISWVRQAPGQCLEWMGWISAYNGNAIYAQKLQGRVTMTRDTSTSTAYMELRSLRSDDTAVYYCARDPDYYGSGSYSDYWGQGTLVTVSSGGGGSGGGGSGGGGSEIVLTQSPATLSVSPGERATLSCRASQSVSSNLAWYQQKPGQAPRLLIYGASSRATGIPARFSGSGSGTEFTLTISSLQSEDFAVYYCQQYHSWPILHFGCGTKVEIKSGGGGSEVQLVESGGGLVQPGGSLKLSCAASGFTFNKYAMNWVRQAPGKGLEWVARIRSKYNNYATYYADSVKDRFTISRDDSKNTAYLQMNNLKTEDTAVYYCVRHGNFGNSYISYWAYWGQGTLVTVSSGGGGSGGGGSGGGGSQTVVTQEPSLTVSPGGTVTLTCGSSTGAVTSGNYPNWVQQKPGQAPRGLIGGTKFLAPGTPARFSGSLLGGKAALTLSGVQPEDEAEYYCVLWYSNRWVFGGGTKLTVLGGGGDKTHTCPPCPAPELLGGPSVFLFPPKPKDTLMISRTPEVTCVVVDVSHEDPEVKFNWYVDGVEVHNAKTKPCEEQYGSTYRCVSVLTVLHQDWLNGKEYKCKVSNKALPAPIEKTISKAKGQPREPQVYTLPPSREEMTKNQVSLTCLVKGFYPSDIAVEWESNGQPENNYKTTPPVLDSDGSFFLYSKLTVDKSRWQQGNVFSCSVMHEALHNHYTQKSLSLSPGKGGGGSGGGGSGGGGSGGGGSGGGGSGGGGSDKTHTCPPCPAPELLGGPSVFLFPPKPKDTLMISRTPEVTCVVVDVSHEDPEVKFNWYVDGVEVHNAKTKPCEEQYGSTYRCVSVLTVLHQDWLNGKEYKCKVSNKALPAPIEKTISKAKGQPREPQVYTLPPSREEMTKNQVSLTCLVKGFYPSDIAVEWESNGQPENNYKTTPPVLDSDGSFFLYSKLTVDKSRWQQGNVFSCSVMHEALHNHYTQKSLSLSPGK

SEQ ID NO: 2771 - protein, 1232 aa, Artificial Sequence
  Synthetic
EVQLVESGGGLVQPGGSLTLSCAASGFTFHDYTMHWVRQTPGKCLEWLSGIGWNGYSKGYADSVKGRFTISRDNAKNSLFLQMNSLTSDDTALYYCVKDYHYGSGILDNYYGLDVWGQGTTVTVSSGGGGQGGGGQGGGGQEIVLTQSPATLSVSPGERATLSCRASQSISNNLAWYQQKPGQAPRLLIYGASSRATGIPDRFSGSGSGTEFTLTISSLQSEDFAVYYCQQYKNWPLTFGCGTKVDIKSGGGGQQVQLVQSGAEVKKPGASVKVSCKASGYTFTSYGISWVRQAPGQCLEWMGWISAYNGNAIYAQKLQGRVTMTRDTSTSTAYMELRSLRSDDTAVYYCARDPDYYGSGSYSDYWGQGTLVTVSSGGGGQGGGGQGGGGQEIVLTQSPATLSVSPGERATLSCRASQSVSSNLAWYQQKPGQAPRLLIYGASSRATGIPARFSGSGSGTEFTLTISSLQSEDFAVYYCQQYHSWPILHFGCGTKVEIKSGGGGQEVQLVESGGGLVQPGGSLKLSCAASGFTFNKYAMNWVRQAPGKGLEWVARIRSKYNNYATYYADSVKDRFTISRDDSKNTAYLQMNNLKTEDTAVYYCVRHGNFGNSYISYWAYWGQGTLVTVSSGGGGQGGGGQGGGGQQTVVTQEPSLTVSPGGTVTLTCGSSTGAVTSGNYPNWVQQKPGQAPRGLIGGTKFLAPGTPARFSGSLLGGKAALTLSGVQPEDEAEYYCVLWYSNRWVFGGGTKLTVLGGGGCPPCPAPELLGGPSVFLFPPKPKDTLMISRTPEVTCVVVDVSHEEPEVKFNWYVDGVEVHNAKTKPCEEQYGSTYRCVSVLTVLHQDWLNGKEYKCKVSNKALPAPIEKTISKAKGQPREPQVYTLPPSREEMTKNQVSLTCLVKGFYPSDIAVEWESNGQPENNYKTTPPVLDSDGSFFLYSKLTVDKSRWQQGNVFSCSVMHEALHNHYTQKSLSLSPGKGGGGQGGGGQGGGGQGGGGQGGGGQGGGGQCPPCPAPELLGGPSVFLFPPKPKDTLMISRTPEVTCVVVDVSHEEPEVKFNWYVDGVEVHNAKTKPCEEQYGSTYRCVSVLTVLHQDWLNGKEYKCKVSNKALPAPIEKTISKAKGQPREPQVYTLPPSREEMTKNQVSLTCLVKGFYPSDIAVEWESNGQPENNYKTTPPVLDSDGSFFLYSKLTVDKSRWQQGNVFSCSVMHEALHNHYTQKSLSLSPGK

SEQ ID NO: 2772 - protein, 1242 aa, Artificial Sequence
  Synthetic
EVQLVESGGGLVQPGGSLTLSCAASGFTFHDYTMHWVRQTPGKCLEWLSGIGWNGYSKGYADSVKGRFTISRDNAKNSLFLQMNSLTSDDTALYYCVKDYHYGSGILDNYYGLDVWGQGTTVTVSSGGGGSGGGGSGGGGSEIVLTQSPATLSVSPGERATLSCRASQSISNNLAWYQQKPGQAPRLLIYGASSRATGIPDRFSGSGSGTEFTLTISSLQSEDFAVYYCQQYKNWPLTFGCGTKVDIKSGGGGSQVQLVQSGAEVKKPGASVKVSCKASGYTFTSYGISWVRQAPGQCLEWMGWISAYNGNAIYAQKLQGRVTMTRDTSTSTAYMELRSLRSDDTAVYYCARDPDYYGSGSYSDYWGQGTLVTVSSGGGGSGGGGSGGGGSEIVLTQSPATLSVSPGERATLSCRASQSVSSNLAWYQQKPGQAPRLLIYGASSRATGIPARFSGSGSGTEFTLTISSLQSEDFAVYYCQQYHSWPILHFGCGTKVEIKSGGGGSEVQLVESGGGLVQPGGSLKLSCAASGFTFNKYAINWVRQAPGKGLEWVARIRSKYNNYATYYADAVKDRFTISRDDSKNTVYLQMNNLKTEDTAVYYCARAGNFGSSYISYWAYWGQGTLVTVSSGGGGSGGGGSGGGGSQTVVTQEPSLTVSPGGTVTITCGSSTGAVTSGNYPNWVQKKPGQAPRGLIGGTKFLAPGTPARFSGSLSGGKAALTLSGVQPEDEAEYYCVLWYSNRWVFGSGTKLTVLGGGGDKTHTCPPCPAPELLGGPSVFLFPPKPKDTLMISRTPEVTCVVVDVSHEDPEVKFNWYVDGVEVHNAKTKPCEEQYGSTYRCVSVLTVLHQDWLNGKEYKCKVSNKALPAPIEKTISKAKGQPREPQVYTLPPSREEMTKNQVSLTCLVKGFYPSDIAVEWESNGQPENNYKTTPPVLDSDGSFFLYSKLTVDKSRWQQGNVFSCSVMHEALHNHYTQKSLSLSPGKGGGGSGGGGSGGGGSGGGGSGGGGSGGGGSDKTHTCPPCPAPELLGGPSVFLFPPKPKDTLMISRTPEVTCVVVDVSHEDPEVKFNWYVDGVEVHNAKTKPCEEQYGSTYRCVSVLTVLHQDWLNGKEYKCKVSNKALPAPIEKTISKAKGQPREPQVYTLPPSREEMTKNQVSLTCLVKGFYPSDIAVEWESNGQPENNYKTTPPVLDSDGSFFLYSKLTVDKSRWQQGNVFSCSVMHEALHNHYTQKSLSLSPGK

SEQ ID NO: 2773 - protein, 1232 aa, Artificial Sequence
  Synthetic
EVQLVESGGGLVQPGGSLTLSCAASGFTFHDYTMHWVRQTPGKCLEWLSGIGWNGYSKGYADSVKGRFTISRDNAKNSLFLQMNSLTSDDTALYYCVKDYHYGSGILDNYYGLDVWGQGTTVTVSSGGGGQGGGGQGGGGQEIVLTQSPATLSVSPGERATLSCRASQSISNNLAWYQQKPGQAPRLLIYGASSRATGIPDRFSGSGSGTEFTLTISSLQSEDFAVYYCQQYKNWPLTFGCGTKVDIKSGGGGQQVQLVQSGAEVKKPGASVKVSCKASGYTFTSYGISWVRQAPGQCLEWMGWISAYNGNAIYAQKLQGRVTMTRDTSTSTAYMELRSLRSDDTAVYYCARDPDYYGSGSYSDYWGQGTLVTVSSGGGGQGGGGQGGGGQEIVLTQSPATLSVSPGERATLSCRASQSVSSNLAWYQQKPGQAPRLLIYGASSRATGIPARFSGSGSGTEFTLTISSLQSEDFAVYYCQQYHSWPILHFGCGTKVEIKSGGGGQEVQLVESGGGLVQPGGSLKLSCAASGFTFNKYAINWVRQAPGKGLEWVARIRSKYNNYATYYADAVKDRFTISRDDSKNTVYLQMNNLKTEDTAVYYCARAGNFGSSYISYWAYWGQGTLVTVSSGGGGQGGGGQGGGGQQTVVTQEPSLTVSPGGTVTITCGSSTGAVTSGNYPNWVQKKPGQAPRGLIGGTKFLAPGTPARFSGSLSGGKAALTLSGVQPEDEAEYYCVLWYSNRWVFGSGTKLTVLGGGGCPPCPAPELLGGPSVFLFPPKPKDTLMISRTPEVTCVVVDVSHEEPEVKFNWYVDGVEVHNAKTKPCEEQYGSTYRCVSVLTVLHQDWLNGKEYKCKVSNKALPAPIEKTISKAKGQPREPQVYTLPPSREEMTKNQVSLTCLVKGFYPSDIAVEWESNGQPENNYKTTPPVLDSDGSFFLYSKLTVDKSRWQQGNVFSCSVMHEALHNHYTQKSLSLSPGKGGGGQGGGGQGGGGQGGGGQGGGGQGGGGQCPPCPAPELLGGPSVFLFPPKPKDTLMISRTPEVTCVVVDVSHEEPEVKFNWYVDGVEVHNAKTKPCEEQYGSTYRCVSVLTVLHQDWLNGKEYKCKVSNKALPAPIEKTISKAKGQPREPQVYTLPPSREEMTKNQVSLTCLVKGFYPSDIAVEWESNGQPENNYKTTPPVLDSDGSFFLYSKLTVDKSRWQQGNVFSCSVMHEALHNHYTQKSLSLSPGK

SEQ ID NO: 2774 - protein, 493 aa, Artificial Sequence
  Synthetic
EVQLVESGGGLVQPGGSLTLSCAASGFTFHDYTMHWVRQTPGKCLEWLSGIGWNGYSKGYADSVKGRFTISRDNAKNSLFLQMNSLTSDDTALYYCVKDYHYGSGILDNYYGLDVWGQGTTVTVSSGGGGSGGGGSGGGGSEIVLTQSPATLSVSPGERATLSCRASQSISNNLAWYQQKPGQAPRLLIYGASSRATGIPDRFSGSGSGTEFTLTISSLQSEDFAVYYCQQYKNWPLTFGCGTKVDIKSGGGGSQVQLVQSGAEVKKPGASVKVSCKASGYTFTSYGISWVRQAPGQCLEWMGWISAYNGNTVYAQKLQDRVTMTTDTSTSTAYMELRSLRSDDTAVYFCVRDGDPLDYWGQGTLVTVSSGGGGSGGGGSGGGGSEIVLTQSPGTLSLSPGERATLSCRASQSVSSNLAWYQQKPGQAPRLLIYGASTRATGIPARFSGSGSGTEFTLTISSLQSEDFAVYYCQQYHTWPPVTFGCGTKVEIK

SEQ ID NO: 2775 - protein, 493 aa, Artificial Sequence
  Synthetic
EVQLVESGGGLVQPGGSLTLSCAASGFTFHDYTMHWVRQTPGKCLEWLSGIGWNGYSKGYADSVKGRFTISRDNAKNSLFLQMNSLTSDDTALYYCVKDYHYGSGILDNYYGLDVWGQGTTVTVSSGGGGQGGGGQGGGGQEIVLTQSPATLSVSPGERATLSCRASQSISNNLAWYQQKPGQAPRLLIYGASSRATGIPDRFSGSGSGTEFTLTISSLQSEDFAVYYCQQYKNWPLTFGCGTKVDIKSGGGGQQVQLVQSGAEVKKPGASVKVSCKASGYTFTSYGISWVRQAPGQCLEWMGWISAYNGNTVYAQKLQDRVTMTTDTSTSTAYMELRSLRSDDTAVYFCVRDGDPLDYWGQGTLVTVSSGGGGQGGGGQGGGGQEIVLTQSPGTLSLSPGERATLSCRASQSVSSNLAWYQQKPGQAPRLLIYGASTRATGIPARFSGSGSGTEFTLTISSLQSEDFAVYYCQQYHTWPPVTFGCGTKVEIK

SEQ ID NO: 2776 - protein, 748 aa, Artificial Sequence
  Synthetic
EVQLVESGGGLVQPGGSLTLSCAASGFTFHDYTMHWVRQTPGKCLEWLSGIGWNGYSKGYADSVKGRFTISRDNAKNSLFLQMNSLTSDDTALYYCVKDYHYGSGILDNYYGLDVWGQGTTVTVSSGGGGSGGGGSGGGGSEIVLTQSPATLSVSPGERATLSCRASQSISNNLAWYQQKPGQAPRLLIYGASSRATGIPDRFSGSGSGTEFTLTISSLQSEDFAVYYCQQYKNWPLTFGCGTKVDIKSGGGGSQVQLVQSGAEVKKPGASVKVSCKASGYTFTSYGISWVRQAPGQCLEWMGWISAYNGNTVYAQKLQDRVTMTTDTSTSTAYMELRSLRSDDTAVYFCVRDGDPLDYWGQGTLVTVSSGGGGSGGGGSGGGGSEIVLTQSPGTLSLSPGERATLSCRASQSVSSNLAWYQQKPGQAPRLLIYGASTRATGIPARFSGSGSGTEFTLTISSLQSEDFAVYYCQQYHTWPPVTFGCGTKVEIKSGGGGSEVQLVESGGGLVQPGGSLKLSCAASGFTFNKYAMNWVRQAPGKGLEWVARIRSKYNNYATYYADSVKDRFTISRDDSKNTAYLQMNNLKTEDTAVYYCVRHGNFGNSYISYWAYWGQGTLVTVSSGGGGSGGGGSGGGGSQTVVTQEPSLTVSPGGTVTLTCGSSTGAVTSGNYPNWVQQKPGQAPRGLIGGTKFLAPGTPARFSGSLLGGKAALTLSGVQPEDEAEYYCVLWYSNRWVFGGGTKLTVL

SEQ ID NO: 2777 - protein, 748 aa, Artificial Sequence
  Synthetic
EVQLVESGGGLVQPGGSLTLSCAASGFTFHDYTMHWVRQTPGKCLEWLSGIGWNGYSKGYADSVKGRFTISRDNAKNSLFLQMNSLTSDDTALYYCVKDYHYGSGILDNYYGLDVWGQGTTVTVSSGGGGQGGGGQGGGGQEIVLTQSPATLSVSPGERATLSCRASQSISNNLAWYQQKPGQAPRLLIYGASSRATGIPDRFSGSGSGTEFTLTISSLQSEDFAVYYCQQYKNWPLTFGCGTKVDIKSGGGGQQVQLVQSGAEVKKPGASVKVSCKASGYTFTSYGISWVRQAPGQCLEWMGWISAYNGNTVYAQKLQDRVTMTTDTSTSTAYMELRSLRSDDTAVYFCVRDGDPLDYWGQGTLVTVSSGGGGQGGGGQGGGGQEIVLTQSPGTLSLSPGERATLSCRASQSVSSNLAWYQQKPGQAPRLLIYGASTRATGIPARFSGSGSGTEFTLTISSLQSEDFAVYYCQQYHTWPPVTFGCGTKVEIKSGGGGQEVQLVESGGGLVQPGGSLKLSCAASGFTFNKYAMNWVRQAPGKGLEWVARIRSKYNNYATYYADSVKDRFTISRDDSKNTAYLQMNNLKTEDTAVYYCVRHGNFGNSYISYWAYWGQGTLVTVSSGGGGQGGGGQGGGGQQTVVTQEPSLTVSPGGTVTLTCGSSTGAVTSGNYPNWVQQKPGQAPRGLIGGTKFLAPGTPARFSGSLLGGKAALTLSGVQPEDEAEYYCVLWYSNRWVFGGGTKLTVL

SEQ ID NO: 2778 - protein, 748 aa, Artificial Sequence
  Synthetic
EVQLVESGGGLVQPGGSLTLSCAASGFTFHDYTMHWVRQTPGKCLEWLSGIGWNGYSKGYADSVKGRFTISRDNAKNSLFLQMNSLTSDDTALYYCVKDYHYGSGILDNYYGLDVWGQGTTVTVSSGGGGSGGGGSGGGGSEIVLTQSPATLSVSPGERATLSCRASQSISNNLAWYQQKPGQAPRLLIYGASSRATGIPDRFSGSGSGTEFTLTISSLQSEDFAVYYCQQYKNWPLTFGCGTKVDIKSGGGGSQVQLVQSGAEVKKPGASVKVSCKASGYTFTSYGISWVRQAPGQCLEWMGWISAYNGNTVYAQKLQDRVTMTTDTSTSTAYMELRSLRSDDTAVYFCVRDGDPLDYWGQGTLVTVSSGGGGSGGGGSGGGGSEIVLTQSPGTLSLSPGERATLSCRASQSVSSNLAWYQQKPGQAPRLLIYGASTRATGIPARFSGSGSGTEFTLTISSLQSEDFAVYYCQQYHTWPPVTFGCGTKVEIKSGGGGSEVQLVESGGGLVQPGGSLKLSCAASGFTFNKYAINWVRQAPGKGLEWVARIRSKYNNYATYYADAVKDRFTISRDDSKNTVYLQMNNLKTEDTAVYYCARAGNFGSSYISYWAYWGQGTLVTVSSGGGGSGGGGSGGGGSQTVVTQEPSLTVSPGGTVTITCGSSTGAVTSGNYPNWVQKKPGQAPRGLIGGTKFLAPGTPARFSGSLSGGKAALTLSGVQPEDEAEYYCVLWYSNRWVFGSGTKLTVL

SEQ ID NO: 2779 - protein, 748 aa, Artificial Sequence
  Synthetic
EVQLVESGGGLVQPGGSLTLSCAASGFTFHDYTMHWVRQTPGKCLEWLSGIGWNGYSKGYADSVKGRFTISRDNAKNSLFLQMNSLTSDDTALYYCVKDYHYGSGILDNYYGLDVWGQGTTVTVSSGGGGQGGGGQGGGGQEIVLTQSPATLSVSPGERATLSCRASQSISNNLAWYQQKPGQAPRLLIYGASSRATGIPDRFSGSGSGTEFTLTISSLQSEDFAVYYCQQYKNWPLTFGCGTKVDIKSGGGGQQVQLVQSGAEVKKPGASVKVSCKASGYTFTSYGISWVRQAPGQCLEWMGWISAYNGNTVYAQKLQDRVTMTTDTSTSTAYMELRSLRSDDTAVYFCVRDGDPLDYWGQGTLVTVSSGGGGQGGGGQGGGGQEIVLTQSPGTLSLSPGERATLSCRASQSVSSNLAWYQQKPGQAPRLLIYGASTRATGIPARFSGSGSGTEFTLTISSLQSEDFAVYYCQQYHTWPPVTFGCGTKVEIKSGGGGQEVQLVESGGGLVQPGGSLKLSCAASGFTFNKYAINWVRQAPGKGLEWVARIRSKYNNYATYYADAVKDRFTISRDDSKNTVYLQMNNLKTEDTAVYYCARAGNFGSSYISYWAYWGQGTLVTVSSGGGGQGGGGQGGGGQQTVVTQEPSLTVSPGGTVTITCGSSTGAVTSGNYPNWVQKKPGQAPRGLIGGTKFLAPGTPARFSGSLSGGKAALTLSGVQPEDEAEYYCVLWYSNRWVFGSGTKLTVL

SEQ ID NO: 2780 - protein, 1236 aa, Artificial Sequence
  Synthetic
EVQLVESGGGLVQPGGSLTLSCAASGFTFHDYTMHWVRQTPGKCLEWLSGIGWNGYSKGYADSVKGRFTISRDNAKNSLFLQMNSLTSDDTALYYCVKDYHYGSGILDNYYGLDVWGQGTTVTVSSGGGGSGGGGSGGGGSEIVLTQSPATLSVSPGERATLSCRASQSISNNLAWYQQKPGQAPRLLIYGASSRATGIPDRFSGSGSGTEFTLTISSLQSEDFAVYYCQQYKNWPLTFGCGTKVDIKSGGGGSQVQLVQSGAEVKKPGASVKVSCKASGYTFTSYGISWVRQAPGQCLEWMGWISAYNGNTVYAQKLQDRVTMTTDTSTSTAYMELRSLRSDDTAVYFCVRDGDPLDYWGQGTLVTVSSGGGGSGGGGSGGGGSEIVLTQSPGTLSLSPGERATLSCRASQSVSSNLAWYQQKPGQAPRLLIYGASTRATGIPARFSGSGSGTEFTLTISSLQSEDFAVYYCQQYHTWPPVTFGCGTKVEIKSGGGGSEVQLVESGGGLVQPGGSLKLSCAASGFTFNKYAMNWVRQAPGKGLEWVARIRSKYNNYATYYADSVKDRFTISRDDSKNTAYLQMNNLKTEDTAVYYCVRHGNFGNSYISYWAYWGQGTLVTVSSGGGGSGGGGSGGGGSQTVVTQEPSLTVSPGGTVTLTCGSSTGAVTSGNYPNWVQQKPGQAPRGLIGGTKFLAPGTPARFSGSLLGGKAALTLSGVQPEDEAEYYCVLWYSNRWVFGGGTKLTVLGGGGDKTHTCPPCPAPELLGGPSVFLFPPKPKDTLMISRTPEVTCVVVDVSHEDPEVKFNWYVDGVEVHNAKTKPCEEQYGSTYRCVSVLTVLHQDWLNGKEYKCKVSNKALPAPIEKTISKAKGQPREPQVYTLPPSREEMTKNQVSLTCLVKGFYPSDIAVEWESNGQPENNYKTTPPVLDSDGSFFLYSKLTVDKSRWQQGNVFSCSVMHEALHNHYTQKSLSLSPGKGGGGSGGGGSGGGGSGGGGSGGGGSGGGGSDKTHTCPPCPAPELLGGPSVFLFPPKPKDTLMISRTPEVTCVVVDVSHEDPEVKFNWYVDGVEVHNAKTKPCEEQYGSTYRCVSVLTVLHQDWLNGKEYKCKVSNKALPAPIEKTISKAKGQPREPQVYTLPPSREEMTKNQVSLTCLVKGFYPSDIAVEWESNGQPENNYKTTPPVLDSDGSFFLYSKLTVDKSRWQQGNVFSCSVMHEALHNHYTQKSLSLSPGK

SEQ ID NO: 2781 - protein, 1226 aa, Artificial Sequence
  Synthetic
EVQLVESGGGLVQPGGSLTLSCAASGFTFHDYTMHWVRQTPGKCLEWLSGIGWNGYSKGYADSVKGRFTISRDNAKNSLFLQMNSLTSDDTALYYCVKDYHYGSGILDNYYGLDVWGQGTTVTVSSGGGGQGGGGQGGGGQEIVLTQSPATLSVSPGERATLSCRASQSISNNLAWYQQKPGQAPRLLIYGASSRATGIPDRFSGSGSGTEFTLTISSLQSEDFAVYYCQQYKNWPLTFGCGTKVDIKSGGGGQQVQLVQSGAEVKKPGASVKVSCKASGYTFTSYGISWVRQAPGQCLEWMGWISAYNGNTVYAQKLQDRVTMTTDTSTSTAYMELRSLRSDDTAVYFCVRDGDPLDYWGQGTLVTVSSGGGGQGGGGQGGGGQEIVLTQSPGTLSLSPGERATLSCRASQSVSSNLAWYQQKPGQAPRLLIYGASTRATGIPARFSGSGSGTEFTLTISSLQSEDFAVYYCQQYHTWPPVTFGCGTKVEIKSGGGGQEVQLVESGGGLVQPGGSLKLSCAASGFTFNKYAMNWVRQAPGKGLEWVARIRSKYNNYATYYADSVKDRFTISRDDSKNTAYLQMNNLKTEDTAVYYCVRHGNFGNSYISYWAYWGQGTLVTVSSGGGGQGGGGQGGGGQQTVVTQEPSLTVSPGGTVTLTCGSSTGAVTSGNYPNWVQQKPGQAPRGLIGGTKFLAPGTPARFSGSLLGGKAALTLSGVQPEDEAEYYCVLWYSNRWVFGGGTKLTVLGGGGCPPCPAPELLGGPSVFLFPPKPKDTLMISRTPEVTCVVVDVSHEEPEVKFNWYVDGVEVHNAKTKPCEEQYGSTYRCVSVLTVLHQDWLNGKEYKCKVSNKALPAPIEKTISKAKGQPREPQVYTLPPSREEMTKNQVSLTCLVKGFYPSDIAVEWESNGQPENNYKTTPPVLDSDGSFFLYSKLTVDKSRWQQGNVFSCSVMHEALHNHYTQKSLSLSPGKGGGGQGGGGQGGGGQGGGGQGGGGQGGGGQCPPCPAPELLGGPSVFLFPPKPKDTLMISRTPEVTCVVVDVSHEEPEVKFNWYVDGVEVHNAKTKPCEEQYGSTYRCVSVLTVLHQDWLNGKEYKCKVSNKALPAPIEKTISKAKGQPREPQVYTLPPSREEMTKNQVSLTCLVKGFYPSDIAVEWESNGQPENNYKTTPPVLDSDGSFFLYSKLTVDKSRWQQGNVFSCSVMHEALHNHYTQKSLSLSPGK

SEQ ID NO: 2782 - protein, 1236 aa, Artificial Sequence
  Synthetic
EVQLVESGGGLVQPGGSLTLSCAASGFTFHDYTMHWVRQTPGKCLEWLSGIGWNGYSKGYADSVKGRFTISRDNAKNSLFLQMNSLTSDDTALYYCVKDYHYGSGILDNYYGLDVWGQGTTVTVSSGGGGSGGGGSGGGGSEIVLTQSPATLSVSPGERATLSCRASQSISNNLAWYQQKPGQAPRLLIYGASSRATGIPDRFSGSGSGTEFTLTISSLQSEDFAVYYCQQYKNWPLTFGCGTKVDIKSGGGGSQVQLVQSGAEVKKPGASVKVSCKASGYTFTSYGISWVRQAPGQCLEWMGWISAYNGNTVYAQKLQDRVTMTTDTSTSTAYMELRSLRSDDTAVYFCVRDGDPLDYWGQGTLVTVSSGGGGSGGGGSGGGGSEIVLTQSPGTLSLSPGERATLSCRASQSVSSNLAWYQQKPGQAPRLLIYGASTRATGIPARFSGSGSGTEFTLTISSLQSEDFAVYYCQQYHTWPPVTFGCGTKVEIKSGGGGSEVQLVESGGGLVQPGGSLKLSCAASGFTFNKYAINWVRQAPGKGLEWVARIRSKYNNYATYYADAVKDRFTISRDDSKNTVYLQMNNLKTEDTAVYYCARAGNFGSSYISYWAYWGQGTLVTVSSGGGGSGGGGSGGGGSQTVVTQEPSLTVSPGGTVTITCGSSTGAVTSGNYPNWVQKKPGQAPRGLIGGTKFLAPGTPARFSGSLSGGKAALTLSGVQPEDEAEYYCVLWYSNRWVFGSGTKLTVLGGGGDKTHTCPPCPAPELLGGPSVFLFPPKPKDTLMISRTPEVTCVVVDVSHEDPEVKFNWYVDGVEVHNAKTKPCEEQYGSTYRCVSVLTVLHQDWLNGKEYKCKVSNKALPAPIEKTISKAKGQPREPQVYTLPPSREEMTKNQVSLTCLVKGFYPSDIAVEWESNGQPENNYKTTPPVLDSDGSFFLYSKLTVDKSRWQQGNVFSCSVMHEALHNHYTQKSLSLSPGKGGGGSGGGGSGGGGSGGGGSGGGGSGGGGSDKTHTCPPCPAPELLGGPSVFLFPPKPKDTLMISRTPEVTCVVVDVSHEDPEVKFNWYVDGVEVHNAKTKPCEEQYGSTYRCVSVLTVLHQDWLNGKEYKCKVSNKALPAPIEKTISKAKGQPREPQVYTLPPSREEMTKNQVSLTCLVKGFYPSDIAVEWESNGQPENNYKTTPPVLDSDGSFFLYSKLTVDKSRWQQGNVFSCSVMHEALHNHYTQKSLSLSPGK

SEQ ID NO: 2783 - protein, 1226 aa, Artificial Sequence
  Synthetic
EVQLVESGGGLVQPGGSLTLSCAASGFTFHDYTMHWVRQTPGKCLEWLSGIGWNGYSKGYADSVKGRFTISRDNAKNSLFLQMNSLTSDDTALYYCVKDYHYGSGILDNYYGLDVWGQGTTVTVSSGGGGQGGGGQGGGGQEIVLTQSPATLSVSPGERATLSCRASQSISNNLAWYQQKPGQAPRLLIYGASSRATGIPDRFSGSGSGTEFTLTISSLQSEDFAVYYCQQYKNWPLTFGCGTKVDIKSGGGGQQVQLVQSGAEVKKPGASVKVSCKASGYTFTSYGISWVRQAPGQCLEWMGWISAYNGNTVYAQKLQDRVTMTTDTSTSTAYMELRSLRSDDTAVYFCVRDGDPLDYWGQGTLVTVSSGGGGQGGGGQGGGGQEIVLTQSPGTLSLSPGERATLSCRASQSVSSNLAWYQQKPGQAPRLLIYGASTRATGIPARFSGSGSGTEFTLTISSLQSEDFAVYYCQQYHTWPPVTFGCGTKVEIKSGGGGQEVQLVESGGGLVQPGGSLKLSCAASGFTFNKYAINWVRQAPGKGLEWVARIRSKYNNYATYYADAVKDRFTISRDDSKNTVYLQMNNLKTEDTAVYYCARAGNFGSSYISYWAYWGQGTLVTVSSGGGGQGGGGQGGGGQQTVVTQEPSLTVSPGGTVTITCGSSTGAVTSGNYPNWVQKKPGQAPRGLIGGTKFLAPGTPARFSGSLSGGKAALTLSGVQPEDEAEYYCVLWYSNRWVFGSGTKLTVLGGGGCPPCPAPELLGGPSVFLFPPKPKDTLMISRTPEVTCVVVDVSHEEPEVKFNWYVDGVEVHNAKTKPCEEQYGSTYRCVSVLTVLHQDWLNGKEYKCKVSNKALPAPIEKTISKAKGQPREPQVYTLPPSREEMTKNQVSLTCLVKGFYPSDIAVEWESNGQPENNYKTTPPVLDSDGSFFLYSKLTVDKSRWQQGNVFSCSVMHEALHNHYTQKSLSLSPGKGGGGQGGGGQGGGGQGGGGQGGGGQGGGGQCPPCPAPELLGGPSVFLFPPKPKDTLMISRTPEVTCVVVDVSHEEPEVKFNWYVDGVEVHNAKTKPCEEQYGSTYRCVSVLTVLHQDWLNGKEYKCKVSNKALPAPIEKTISKAKGQPREPQVYTLPPSREEMTKNQVSLTCLVKGFYPSDIAVEWESNGQPENNYKTTPPVLDSDGSFFLYSKLTVDKSRWQQGNVFSCSVMHEALHNHYTQKSLSLSPGK

SEQ ID NO: 2784 - protein, 493 aa, Artificial Sequence
  Synthetic
EVQLVESGGGLVQPGGSLTLSCAASGFTFHDYTMHWVRQTPGKCLEWLSGIGWNGYSKGYADSVKGRFTISRDNAKNSLFLQMNSLTSDDTALYYCVKDYHYGSGILDNYYGLDVWGQGTTVTVSSGGGGSGGGGSGGGGSEIVLTQSPATLSVSPGERATLSCRASQSISNNLAWYQQKPGQAPRLLIYGASSRATGIPDRFSGSGSGTEFTLTISSLQSEDFAVYYCQQYKNWPLTFGCGTKVDIKSGGGGSQVQLVQSGAEVKKPGASVKVSCKASGYSFTSYGITWVRQAPGQCLEWMGWISAYNGNTIYAQKLQGRVTMTTDTSTSTAYMELRSLRSDDTAVYYCVRDSNHEDFWGQGTLVTVSSGGGGSGGGGSGGGGSEIVLTQSPATLSVSPGERATLSCRASQSVSSNLAWYQQKPGQAPRLLIYGASTRATGIPARFSGSGSGTEFTLTISSLQSEDFAVYYCQQYHTWPPVTFGCGTKVEIK

SEQ ID NO: 2785 - protein, 493 aa, Artificial Sequence
  Synthetic
EVQLVESGGGLVQPGGSLTLSCAASGFTFHDYTMHWVRQTPGKCLEWLSGIGWNGYSKGYADSVKGRFTISRDNAKNSLFLQMNSLTSDDTALYYCVKDYHYGSGILDNYYGLDVWGQGTTVTVSSGGGGQGGGGQGGGGQEIVLTQSPATLSVSPGERATLSCRASQSISNNLAWYQQKPGQAPRLLIYGASSRATGIPDRFSGSGSGTEFTLTISSLQSEDFAVYYCQQYKNWPLTFGCGTKVDIKSGGGGQQVQLVQSGAEVKKPGASVKVSCKASGYSFTSYGITWVRQAPGQCLEWMGWISAYNGNTIYAQKLQGRVTMTTDTSTSTAYMELRSLRSDDTAVYYCVRDSNHEDFWGQGTLVTVSSGGGGQGGGGQGGGGQEIVLTQSPATLSVSPGERATLSCRASQSVSSNLAWYQQKPGQAPRLLIYGASTRATGIPARFSGSGSGTEFTLTISSLQSEDFAVYYCQQYHTWPPVTFGCGTKVEIK

SEQ ID NO: 2786 - protein, 748 aa, Artificial Sequence
  Synthetic
EVQLVESGGGLVQPGGSLTLSCAASGFTFHDYTMHWVRQTPGKCLEWLSGIGWNGYSKGYADSVKGRFTISRDNAKNSLFLQMNSLTSDDTALYYCVKDYHYGSGILDNYYGLDVWGQGTTVTVSSGGGGSGGGGSGGGGSEIVLTQSPATLSVSPGERATLSCRASQSISNNLAWYQQKPGQAPRLLIYGASSRATGIPDRFSGSGSGTEFTLTISSLQSEDFAVYYCQQYKNWPLTFGCGTKVDIKSGGGGSQVQLVQSGAEVKKPGASVKVSCKASGYSFTSYGITWVRQAPGQCLEWMGWISAYNGNTIYAQKLQGRVTMTTDTSTSTAYMELRSLRSDDTAVYYCVRDSNHEDFWGQGTLVTVSSGGGGSGGGGSGGGGSEIVLTQSPATLSVSPGERATLSCRASQSVSSNLAWYQQKPGQAPRLLIYGASTRATGIPARFSGSGSGTEFTLTISSLQSEDFAVYYCQQYHTWPPVTFGCGTKVEIKSGGGGSEVQLVESGGGLVQPGGSLKLSCAASGFTFNKYAMNWVRQAPGKGLEWVARIRSKYNNYATYYADSVKDRFTISRDDSKNTAYLQMNNLKTEDTAVYYCVRHGNFGNSYISYWAYWGQGTLVTVSSGGGGSGGGGSGGGGSQTVVTQEPSLTVSPGGTVTLTCGSSTGAVTSGNYPNWVQQKPGQAPRGLIGGTKFLAPGTPARFSGSLLGGKAALTLSGVQPEDEAEYYCVLWYSNRWVFGGGTKLTVL

SEQ ID NO: 2787 - protein, 748 aa, Artificial Sequence
  Synthetic
EVQLVESGGGLVQPGGSLTLSCAASGFTFHDYTMHWVRQTPGKCLEWLSGIGWNGYSKGYADSVKGRFTISRDNAKNSLFLQMNSLTSDDTALYYCVKDYHYGSGILDNYYGLDVWGQGTTVTVSSGGGGQGGGGQGGGGQEIVLTQSPATLSVSPGERATLSCRASQSISNNLAWYQQKPGQAPRLLIYGASSRATGIPDRFSGSGSGTEFTLTISSLQSEDFAVYYCQQYKNWPLTFGCGTKVDIKSGGGGQQVQLVQSGAEVKKPGASVKVSCKASGYSFTSYGITWVRQAPGQCLEWMGWISAYNGNTIYAQKLQGRVTMTTDTSTSTAYMELRSLRSDDTAVYYCVRDSNHEDFWGQGTLVTVSSGGGGQGGGGQGGGGQEIVLTQSPATLSVSPGERATLSCRASQSVSSNLAWYQQKPGQAPRLLIYGASTRATGIPARFSGSGSGTEFTLTISSLQSEDFAVYYCQQYHTWPPVTFGCGTKVEIKSGGGGQEVQLVESGGGLVQPGGSLKLSCAASGFTFNKYAMNWVRQAPGKGLEWVARIRSKYNNYATYYADSVKDRFTISRDDSKNTAYLQMNNLKTEDTAVYYCVRHGNFGNSYISYWAYWGQGTLVTVSSGGGGQGGGGQGGGGQQTVVTQEPSLTVSPGGTVTLTCGSSTGAVTSGNYPNWVQQKPGQAPRGLIGGTKFLAPGTPARFSGSLLGGKAALTLSGVQPEDEAEYYCVLWYSNRWVFGGGTKLTVL

SEQ ID NO: 2788 - protein, 748 aa, Artificial Sequence
  Synthetic
EVQLVESGGGLVQPGGSLTLSCAASGFTFHDYTMHWVRQTPGKCLEWLSGIGWNGYSKGYADSVKGRFTISRDNAKNSLFLQMNSLTSDDTALYYCVKDYHYGSGILDNYYGLDVWGQGTTVTVSSGGGGSGGGGSGGGGSEIVLTQSPATLSVSPGERATLSCRASQSISNNLAWYQQKPGQAPRLLIYGASSRATGIPDRFSGSGSGTEFTLTISSLQSEDFAVYYCQQYKNWPLTFGCGTKVDIKSGGGGSQVQLVQSGAEVKKPGASVKVSCKASGYSFTSYGITWVRQAPGQCLEWMGWISAYNGNTIYAQKLQGRVTMTTDTSTSTAYMELRSLRSDDTAVYYCVRDSNHEDFWGQGTLVTVSSGGGGSGGGGSGGGGSEIVLTQSPATLSVSPGERATLSCRASQSVSSNLAWYQQKPGQAPRLLIYGASTRATGIPARFSGSGSGTEFTLTISSLQSEDFAVYYCQQYHTWPPVTFGCGTKVEIKSGGGGSEVQLVESGGGLVQPGGSLKLSCAASGFTFNKYAINWVRQAPGKGLEWVARIRSKYNNYATYYADAVKDRFTISRDDSKNTVYLQMNNLKTEDTAVYYCARAGNFGSSYISYWAYWGQGTLVTVSSGGGGSGGGGSGGGGSQTVVTQEPSLTVSPGGTVTITCGSSTGAVTSGNYPNWVQKKPGQAPRGLIGGTKFLAPGTPARFSGSLSGGKAALTLSGVQPEDEAEYYCVLWYSNRWVFGSGTKLTVL

SEQ ID NO: 2789 - protein, 748 aa, Artificial Sequence
  Synthetic
EVQLVESGGGLVQPGGSLTLSCAASGFTFHDYTMHWVRQTPGKCLEWLSGIGWNGYSKGYADSVKGRFTISRDNAKNSLFLQMNSLTSDDTALYYCVKDYHYGSGILDNYYGLDVWGQGTTVTVSSGGGGQGGGGQGGGGQEIVLTQSPATLSVSPGERATLSCRASQSISNNLAWYQQKPGQAPRLLIYGASSRATGIPDRFSGSGSGTEFTLTISSLQSEDFAVYYCQQYKNWPLTFGCGTKVDIKSGGGGQQVQLVQSGAEVKKPGASVKVSCKASGYSFTSYGITWVRQAPGQCLEWMGWISAYNGNTIYAQKLQGRVTMTTDTSTSTAYMELRSLRSDDTAVYYCVRDSNHEDFWGQGTLVTVSSGGGGQGGGGQGGGGQEIVLTQSPATLSVSPGERATLSCRASQSVSSNLAWYQQKPGQAPRLLIYGASTRATGIPARFSGSGSGTEFTLTISSLQSEDFAVYYCQQYHTWPPVTFGCGTKVEIKSGGGGQEVQLVESGGGLVQPGGSLKLSCAASGFTFNKYAINWVRQAPGKGLEWVARIRSKYNNYATYYADAVKDRFTISRDDSKNTVYLQMNNLKTEDTAVYYCARAGNFGSSYISYWAYWGQGTLVTVSSGGGGQGGGGQGGGGQQTVVTQEPSLTVSPGGTVTITCGSSTGAVTSGNYPNWVQKKPGQAPRGLIGGTKFLAPGTPARFSGSLSGGKAALTLSGVQPEDEAEYYCVLWYSNRWVFGSGTKLTVL

SEQ ID NO: 2790 - protein, 1236 aa, Artificial Sequence
  Synthetic
EVQLVESGGGLVQPGGSLTLSCAASGFTFHDYTMHWVRQTPGKCLEWLSGIGWNGYSKGYADSVKGRFTISRDNAKNSLFLQMNSLTSDDTALYYCVKDYHYGSGILDNYYGLDVWGQGTTVTVSSGGGGSGGGGSGGGGSEIVLTQSPATLSVSPGERATLSCRASQSISNNLAWYQQKPGQAPRLLIYGASSRATGIPDRFSGSGSGTEFTLTISSLQSEDFAVYYCQQYKNWPLTFGCGTKVDIKSGGGGSQVQLVQSGAEVKKPGASVKVSCKASGYSFTSYGITWVRQAPGQCLEWMGWISAYNGNTIYAQKLQGRVTMTTDTSTSTAYMELRSLRSDDTAVYYCVRDSNHEDFWGQGTLVTVSSGGGGSGGGGSGGGGSEIVLTQSPATLSVSPGERATLSCRASQSVSSNLAWYQQKPGQAPRLLIYGASTRATGIPARFSGSGSGTEFTLTISSLQSEDFAVYYCQQYHTWPPVTFGCGTKVEIKSGGGGSEVQLVESGGGLVQPGGSLKLSCAASGFTFNKYAMNWVRQAPGKGLEWVARIRSKYNNYATYYADSVKDRFTISRDDSKNTAYLQMNNLKTEDTAVYYCVRHGNFGNSYISYWAYWGQGTLVTVSSGGGGSGGGGSGGGGSQTVVTQEPSLTVSPGGTVTLTCGSSTGAVTSGNYPNWVQQKPGQAPRGLIGGTKFLAPGTPARFSGSLLGGKAALTLSGVQPEDEAEYYCVLWYSNRWVFGGGTKLTVLGGGGDKTHTCPPCPAPELLGGPSVFLFPPKPKDTLMISRTPEVTCVVVDVSHEDPEVKFNWYVDGVEVHNAKTKPCEEQYGSTYRCVSVLTVLHQDWLNGKEYKCKVSNKALPAPIEKTISKAKGQPREPQVYTLPPSREEMTKNQVSLTCLVKGFYPSDIAVEWESNGQPENNYKTTPPVLDSDGSFFLYSKLTVDKSRWQQGNVFSCSVMHEALHNHYTQKSLSLSPGKGGGGSGGGGSGGGGSGGGGSGGGGSGGGGSDKTHTCPPCPAPELLGGPSVFLFPPKPKDTLMISRTPEVTCVVVDVSHEDPEVKFNWYVDGVEVHNAKTKPCEEQYGSTYRCVSVLTVLHQDWLNGKEYKCKVSNKALPAPIEKTISKAKGQPREPQVYTLPPSREEMTKNQVSLTCLVKGFYPSDIAVEWESNGQPENNYKTTPPVLDSDGSFFLYSKLTVDKSRWQQGNVFSCSVMHEALHNHYTQKSLSLSPGK

SEQ ID NO: 2791 - protein, 1226 aa, Artificial Sequence
  Synthetic
EVQLVESGGGLVQPGGSLTLSCAASGFTFHDYTMHWVRQTPGKCLEWLSGIGWNGYSKGYADSVKGRFTISRDNAKNSLFLQMNSLTSDDTALYYCVKDYHYGSGILDNYYGLDVWGQGTTVTVSSGGGGQGGGGQGGGGQEIVLTQSPATLSVSPGERATLSCRASQSISNNLAWYQQKPGQAPRLLIYGASSRATGIPDRFSGSGSGTEFTLTISSLQSEDFAVYYCQQYKNWPLTFGCGTKVDIKSGGGGQQVQLVQSGAEVKKPGASVKVSCKASGYSFTSYGITWVRQAPGQCLEWMGWISAYNGNTIYAQKLQGRVTMTTDTSTSTAYMELRSLRSDDTAVYYCVRDSNHEDFWGQGTLVTVSSGGGGQGGGGQGGGGQEIVLTQSPATLSVSPGERATLSCRASQSVSSNLAWYQQKPGQAPRLLIYGASTRATGIPARFSGSGSGTEFTLTISSLQSEDFAVYYCQQYHTWPPVTFGCGTKVEIKSGGGGQEVQLVESGGGLVQPGGSLKLSCAASGFTFNKYAMNWVRQAPGKGLEWVARIRSKYNNYATYYADSVKDRFTISRDDSKNTAYLQMNNLKTEDTAVYYCVRHGNFGNSYISYWAYWGQGTLVTVSSGGGGQGGGGQGGGGQQTVVTQEPSLTVSPGGTVTLTCGSSTGAVTSGNYPNWVQQKPGQAPRGLIGGTKFLAPGTPARFSGSLLGGKAALTLSGVQPEDEAEYYCVLWYSNRWVFGGGTKLTVLGGGGCPPCPAPELLGGPSVFLFPPKPKDTLMISRTPEVTCVVVDVSHEEPEVKFNWYVDGVEVHNAKTKPCEEQYGSTYRCVSVLTVLHQDWLNGKEYKCKVSNKALPAPIEKTISKAKGQPREPQVYTLPPSREEMTKNQVSLTCLVKGFYPSDIAVEWESNGQPENNYKTTPPVLDSDGSFFLYSKLTVDKSRWQQGNVFSCSVMHEALHNHYTQKSLSLSPGKGGGGQGGGGQGGGGQGGGGQGGGGQGGGGQCPPCPAPELLGGPSVFLFPPKPKDTLMISRTPEVTCVVVDVSHEEPEVKFNWYVDGVEVHNAKTKPCEEQYGSTYRCVSVLTVLHQDWLNGKEYKCKVSNKALPAPIEKTISKAKGQPREPQVYTLPPSREEMTKNQVSLTCLVKGFYPSDIAVEWESNGQPENNYKTTPPVLDSDGSFFLYSKLTVDKSRWQQGNVFSCSVMHEALHNHYTQKSLSLSPGK

SEQ ID NO: 2792 - protein, 1236 aa, Artificial Sequence
  Synthetic
EVQLVESGGGLVQPGGSLTLSCAASGFTFHDYTMHWVRQTPGKCLEWLSGIGWNGYSKGYADSVKGRFTISRDNAKNSLFLQMNSLTSDDTALYYCVKDYHYGSGILDNYYGLDVWGQGTTVTVSSGGGGSGGGGSGGGGSEIVLTQSPATLSVSPGERATLSCRASQSISNNLAWYQQKPGQAPRLLIYGASSRATGIPDRFSGSGSGTEFTLTISSLQSEDFAVYYCQQYKNWPLTFGCGTKVDIKSGGGGSQVQLVQSGAEVKKPGASVKVSCKASGYSFTSYGITWVRQAPGQCLEWMGWISAYNGNTIYAQKLQGRVTMTTDTSTSTAYMELRSLRSDDTAVYYCVRDSNHEDFWGQGTLVTVSSGGGGSGGGGSGGGGSEIVLTQSPATLSVSPGERATLSCRASQSVSSNLAWYQQKPGQAPRLLIYGASTRATGIPARFSGSGSGTEFTLTISSLQSEDFAVYYCQQYHTWPPVTFGCGTKVEIKSGGGGSEVQLVESGGGLVQPGGSLKLSCAASGFTFNKYAINWVRQAPGKGLEWVARIRSKYNNYATYYADAVKDRFTISRDDSKNTVYLQMNNLKTEDTAVYYCARAGNFGSSYISYWAYWGQGTLVTVSSGGGGSGGGGSGGGGSQTVVTQEPSLTVSPGGTVTITCGSSTGAVTSGNYPNWVQKKPGQAPRGLIGGTKFLAPGTPARFSGSLSGGKAALTLSGVQPEDEAEYYCVLWYSNRWVFGSGTKLTVLGGGGDKTHTCPPCPAPELLGGPSVFLFPPKPKDTLMISRTPEVTCVVVDVSHEDPEVKFNWYVDGVEVHNAKTKPCEEQYGSTYRCVSVLTVLHQDWLNGKEYKCKVSNKALPAPIEKTISKAKGQPREPQVYTLPPSREEMTKNQVSLTCLVKGFYPSDIAVEWESNGQPENNYKTTPPVLDSDGSFFLYSKLTVDKSRWQQGNVFSCSVMHEALHNHYTQKSLSLSPGKGGGGSGGGGSGGGGSGGGGSGGGGSGGGGSDKTHTCPPCPAPELLGGPSVFLFPPKPKDTLMISRTPEVTCVVVDVSHEDPEVKFNWYVDGVEVHNAKTKPCEEQYGSTYRCVSVLTVLHQDWLNGKEYKCKVSNKALPAPIEKTISKAKGQPREPQVYTLPPSREEMTKNQVSLTCLVKGFYPSDIAVEWESNGQPENNYKTTPPVLDSDGSFFLYSKLTVDKSRWQQGNVFSCSVMHEALHNHYTQKSLSLSPGK

SEQ ID NO: 2793 - protein, 1226 aa, Artificial Sequence
  Synthetic
EVQLVESGGGLVQPGGSLTLSCAASGFTFHDYTMHWVRQTPGKCLEWLSGIGWNGYSKGYADSVKGRFTISRDNAKNSLFLQMNSLTSDDTALYYCVKDYHYGSGILDNYYGLDVWGQGTTVTVSSGGGGQGGGGQGGGGQEIVLTQSPATLSVSPGERATLSCRASQSISNNLAWYQQKPGQAPRLLIYGASSRATGIPDRFSGSGSGTEFTLTISSLQSEDFAVYYCQQYKNWPLTFGCGTKVDIKSGGGGQQVQLVQSGAEVKKPGASVKVSCKASGYSFTSYGITWVRQAPGQCLEWMGWISAYNGNTIYAQKLQGRVTMTTDTSTSTAYMELRSLRSDDTAVYYCVRDSNHEDFWGQGTLVTVSSGGGGQGGGGQGGGGQEIVLTQSPATLSVSPGERATLSCRASQSVSSNLAWYQQKPGQAPRLLIYGASTRATGIPARFSGSGSGTEFTLTISSLQSEDFAVYYCQQYHTWPPVTFGCGTKVEIKSGGGGQEVQLVESGGGLVQPGGSLKLSCAASGFTFNKYAINWVRQAPGKGLEWVARIRSKYNNYATYYADAVKDRFTISRDDSKNTVYLQMNNLKTEDTAVYYCARAGNFGSSYISYWAYWGQGTLVTVSSGGGGQGGGGQGGGGQQTVVTQEPSLTVSPGGTVTITCGSSTGAVTSGNYPNWVQKKPGQAPRGLIGGTKFLAPGTPARFSGSLSGGKAALTLSGVQPEDEAEYYCVLWYSNRWVFGSGTKLTVLGGGGCPPCPAPELLGGPSVFLFPPKPKDTLMISRTPEVTCVVVDVSHEEPEVKFNWYVDGVEVHNAKTKPCEEQYGSTYRCVSVLTVLHQDWLNGKEYKCKVSNKALPAPIEKTISKAKGQPREPQVYTLPPSREEMTKNQVSLTCLVKGFYPSDIAVEWESNGQPENNYKTTPPVLDSDGSFFLYSKLTVDKSRWQQGNVFSCSVMHEALHNHYTQKSLSLSPGKGGGGQGGGGQGGGGQGGGGQGGGGQGGGGQCPPCPAPELLGGPSVFLFPPKPKDTLMISRTPEVTCVVVDVSHEEPEVKFNWYVDGVEVHNAKTKPCEEQYGSTYRCVSVLTVLHQDWLNGKEYKCKVSNKALPAPIEKTISKAKGQPREPQVYTLPPSREEMTKNQVSLTCLVKGFYPSDIAVEWESNGQPENNYKTTPPVLDSDGSFFLYSKLTVDKSRWQQGNVFSCSVMHEALHNHYTQKSLSLSPGK

SEQ ID NO: 2794 - protein, 495 aa, Artificial Sequence
  Synthetic
EVQLVESGGGLVQPGGSLTLSCAASGFTFHDYTMHWVRQTPGKCLEWLSGIGWNGYSKGYADSVKGRFTISRDNAKNSLFLQMNSLTSDDTALYYCVKDYHYGSGILDNYYGLDVWGQGTTVTVSSGGGGSGGGGSGGGGSEIVLTQSPATLSVSPGERATLSCRASQSISNNLAWYQQKPGQAPRLLIYGASSRATGIPDRFSGSGSGTEFTLTISSLQSEDFAVYYCQQYKNWPLTFGCGTKVDIKSGGGGSQVQLVQSGAEVKKPGESLKISCKGSGYSFTSYGISWVRQAPGQCLEWMGWISAYNGNTIYAQKLQGRVTMTTDTSTSTAYMELRRLRSDDTAVYYCARDPGVTGDDYWGQGTLVTVSSGGGGSGGGGSGGGGSEIVLTQSPATLSVSPGERATLSCRASLSVSSNLAWYQQKPGQAPRLLIYGASTRATGIPARFSGSGSGTEFTLTISSLQSEDFAVYFCQQYHSWPALTFGCGTKVEIK

SEQ ID NO: 2795 - protein, 495 aa, Artificial Sequence
  Synthetic
EVQLVESGGGLVQPGGSLTLSCAASGFTFHDYTMHWVRQTPGKCLEWLSGIGWNGYSKGYADSVKGRFTISRDNAKNSLFLQMNSLTSDDTALYYCVKDYHYGSGILDNYYGLDVWGQGTTVTVSSGGGGQGGGGQGGGGQEIVLTQSPATLSVSPGERATLSCRASQSISNNLAWYQQKPGQAPRLLIYGASSRATGIPDRFSGSGSGTEFTLTISSLQSEDFAVYYCQQYKNWPLTFGCGTKVDIKSGGGGQQVQLVQSGAEVKKPGESLKISCKGSGYSFTSYGISWVRQAPGQCLEWMGWISAYNGNTIYAQKLQGRVTMTTDTSTSTAYMELRRLRSDDTAVYYCARDPGVTGDDYWGQGTLVTVSSGGGGQGGGGQGGGGQEIVLTQSPATLSVSPGERATLSCRASLSVSSNLAWYQQKPGQAPRLLIYGASTRATGIPARFSGSGSGTEFTLTISSLQSEDFAVYFCQQYHSWPALTFGCGTKVEIK

SEQ ID NO: 2796 - protein, 750 aa, Artificial Sequence
  Synthetic
EVQLVESGGGLVQPGGSLTLSCAASGFTFHDYTMHWVRQTPGKCLEWLSGIGWNGYSKGYADSVKGRFTISRDNAKNSLFLQMNSLTSDDTALYYCVKDYHYGSGILDNYYGLDVWGQGTTVTVSSGGGGSGGGGSGGGGSEIVLTQSPATLSVSPGERATLSCRASQSISNNLAWYQQKPGQAPRLLIYGASSRATGIPDRFSGSGSGTEFTLTISSLQSEDFAVYYCQQYKNWPLTFGCGTKVDIKSGGGGSQVQLVQSGAEVKKPGESLKISCKGSGYSFTSYGISWVRQAPGQCLEWMGWISAYNGNTIYAQKLQGRVTMTTDTSTSTAYMELRRLRSDDTAVYYCARDPGVTGDDYWGQGTLVTVSSGGGGSGGGGSGGGGSEIVLTQSPATLSVSPGERATLSCRASLSVSSNLAWYQQKPGQAPRLLIYGASTRATGIPARFSGSGSGTEFTLTISSLQSEDFAVYFCQQYHSWPALTFGCGTKVEIKSGGGGSEVQLVESGGGLVQPGGSLKLSCAASGFTFNKYAMNWVRQAPGKGLEWVARIRSKYNNYATYYADSVKDRFTISRDDSKNTAYLQMNNLKTEDTAVYYCVRHGNFGNSYISYWAYWGQGTLVTVSSGGGGSGGGGSGGGGSQTVVTQEPSLTVSPGGTVTLTCGSSTGAVTSGNYPNWVQQKPGQAPRGLIGGTKFLAPGTPARFSGSLLGGKAALTLSGVQPEDEAEYYCVLWYSNRWVFGGGTKLTVL

SEQ ID NO: 2797 - protein, 750 aa, Artificial Sequence
  Synthetic
EVQLVESGGGLVQPGGSLTLSCAASGFTFHDYTMHWVRQTPGKCLEWLSGIGWNGYSKGYADSVKGRFTISRDNAKNSLFLQMNSLTSDDTALYYCVKDYHYGSGILDNYYGLDVWGQGTTVTVSSGGGGQGGGGQGGGGQEIVLTQSPATLSVSPGERATLSCRASQSISNNLAWYQQKPGQAPRLLIYGASSRATGIPDRFSGSGSGTEFTLTISSLQSEDFAVYYCQQYKNWPLTFGCGTKVDIKSGGGGQQVQLVQSGAEVKKPGESLKISCKGSGYSFTSYGISWVRQAPGQCLEWMGWISAYNGNTIYAQKLQGRVTMTTDTSTSTAYMELRRLRSDDTAVYYCARDPGVTGDDYWGQGTLVTVSSGGGGQGGGGQGGGGQEIVLTQSPATLSVSPGERATLSCRASLSVSSNLAWYQQKPGQAPRLLIYGASTRATGIPARFSGSGSGTEFTLTISSLQSEDFAVYFCQQYHSWPALTFGCGTKVEIKSGGGGQEVQLVESGGGLVQPGGSLKLSCAASGFTFNKYAMNWVRQAPGKGLEWVARIRSKYNNYATYYADSVKDRFTISRDDSKNTAYLQMNNLKTEDTAVYYCVRHGNFGNSYISYWAYWGQGTLVTVSSGGGGQGGGGQGGGGQQTVVTQEPSLTVSPGGTVTLTCGSSTGAVTSGNYPNWVQQKPGQAPRGLIGGTKFLAPGTPARFSGSLLGGKAALTLSGVQPEDEAEYYCVLWYSNRWVFGGGTKLTVL

SEQ ID NO: 2798 - protein, 750 aa, Artificial Sequence
  Synthetic
EVQLVESGGGLVQPGGSLTLSCAASGFTFHDYTMHWVRQTPGKCLEWLSGIGWNGYSKGYADSVKGRFTISRDNAKNSLFLQMNSLTSDDTALYYCVKDYHYGSGILDNYYGLDVWGQGTTVTVSSGGGGSGGGGSGGGGSEIVLTQSPATLSVSPGERATLSCRASQSISNNLAWYQQKPGQAPRLLIYGASSRATGIPDRFSGSGSGTEFTLTISSLQSEDFAVYYCQQYKNWPLTFGCGTKVDIKSGGGGSQVQLVQSGAEVKKPGESLKISCKGSGYSFTSYGISWVRQAPGQCLEWMGWISAYNGNTIYAQKLQGRVTMTTDTSTSTAYMELRRLRSDDTAVYYCARDPGVTGDDYWGQGTLVTVSSGGGGSGGGGSGGGGSEIVLTQSPATLSVSPGERATLSCRASLSVSSNLAWYQQKPGQAPRLLIYGASTRATGIPARFSGSGSGTEFTLTISSLQSEDFAVYFCQQYHSWPALTFGCGTKVEIKSGGGGSEVQLVESGGGLVQPGGSLKLSCAASGFTFNKYAINWVRQAPGKGLEWVARIRSKYNNYATYYADAVKDRFTISRDDSKNTVYLQMNNLKTEDTAVYYCARAGNFGSSYISYWAYWGQGTLVTVSSGGGGSGGGGSGGGGSQTVVTQEPSLTVSPGGTVTITCGSSTGAVTSGNYPNWVQKKPGQAPRGLIGGTKFLAPGTPARFSGSLSGGKAALTLSGVQPEDEAEYYCVLWYSNRWVFGSGTKLTVL

SEQ ID NO: 2799 - protein, 750 aa, Artificial Sequence
  Synthetic
EVQLVESGGGLVQPGGSLTLSCAASGFTFHDYTMHWVRQTPGKCLEWLSGIGWNGYSKGYADSVKGRFTISRDNAKNSLFLQMNSLTSDDTALYYCVKDYHYGSGILDNYYGLDVWGQGTTVTVSSGGGGQGGGGQGGGGQEIVLTQSPATLSVSPGERATLSCRASQSISNNLAWYQQKPGQAPRLLIYGASSRATGIPDRFSGSGSGTEFTLTISSLQSEDFAVYYCQQYKNWPLTFGCGTKVDIKSGGGGQQVQLVQSGAEVKKPGESLKISCKGSGYSFTSYGISWVRQAPGQCLEWMGWISAYNGNTIYAQKLQGRVTMTTDTSTSTAYMELRRLRSDDTAVYYCARDPGVTGDDYWGQGTLVTVSSGGGGQGGGGQGGGGQEIVLTQSPATLSVSPGERATLSCRASLSVSSNLAWYQQKPGQAPRLLIYGASTRATGIPARFSGSGSGTEFTLTISSLQSEDFAVYFCQQYHSWPALTFGCGTKVEIKSGGGGQEVQLVESGGGLVQPGGSLKLSCAASGFTFNKYAINWVRQAPGKGLEWVARIRSKYNNYATYYADAVKDRFTISRDDSKNTVYLQMNNLKTEDTAVYYCARAGNFGSSYISYWAYWGQGTLVTVSSGGGGQGGGGQGGGGQQTVVTQEPSLTVSPGGTVTITCGSSTGAVTSGNYPNWVQKKPGQAPRGLIGGTKFLAPGTPARFSGSLSGGKAALTLSGVQPEDEAEYYCVLWYSNRWVFGSGTKLTVL

SEQ ID NO: 2800 - protein, 1238 aa, Artificial Sequence
  Synthetic
EVQLVESGGGLVQPGGSLTLSCAASGFTFHDYTMHWVRQTPGKCLEWLSGIGWNGYSKGYADSVKGRFTISRDNAKNSLFLQMNSLTSDDTALYYCVKDYHYGSGILDNYYGLDVWGQGTTVTVSSGGGGSGGGGSGGGGSEIVLTQSPATLSVSPGERATLSCRASQSISNNLAWYQQKPGQAPRLLIYGASSRATGIPDRFSGSGSGTEFTLTISSLQSEDFAVYYCQQYKNWPLTFGCGTKVDIKSGGGGSQVQLVQSGAEVKKPGESLKISCKGSGYSFTSYGISWVRQAPGQCLEWMGWISAYNGNTIYAQKLQGRVTMTTDTSTSTAYMELRRLRSDDTAVYYCARDPGVTGDDYWGQGTLVTVSSGGGGSGGGGSGGGGSEIVLTQSPATLSVSPGERATLSCRASLSVSSNLAWYQQKPGQAPRLLIYGASTRATGIPARFSGSGSGTEFTLTISSLQSEDFAVYFCQQYHSWPALTFGCGTKVEIKSGGGGSEVQLVESGGGLVQPGGSLKLSCAASGFTFNKYAMNWVRQAPGKGLEWVARIRSKYNNYATYYADSVKDRFTISRDDSKNTAYLQMNNLKTEDTAVYYCVRHGNFGNSYISYWAYWGQGTLVTVSSGGGGSGGGGSGGGGSQTVVTQEPSLTVSPGGTVTLTCGSSTGAVTSGNYPNWVQQKPGQAPRGLIGGTKFLAPGTPARFSGSLLGGKAALTLSGVQPEDEAEYYCVLWYSNRWVFGGGTKLTVLGGGGDKTHTCPPCPAPELLGGPSVFLFPPKPKDTLMISRTPEVTCVVVDVSHEDPEVKFNWYVDGVEVHNAKTKPCEEQYGSTYRCVSVLTVLHQDWLNGKEYKCKVSNKALPAPIEKTISKAKGQPREPQVYTLPPSREEMTKNQVSLTCLVKGFYPSDIAVEWESNGQPENNYKTTPPVLDSDGSFFLYSKLTVDKSRWQQGNVFSCSVMHEALHNHYTQKSLSLSPGKGGGGSGGGGSGGGGSGGGGSGGGGSGGGGSDKTHTCPPCPAPELLGGPSVFLFPPKPKDTLMISRTPEVTCVVVDVSHEDPEVKFNWYVDGVEVHNAKTKPCEEQYGSTYRCVSVLTVLHQDWLNGKEYKCKVSNKALPAPIEKTISKAKGQPREPQVYTLPPSREEMTKNQVSLTCLVKGFYPSDIAVEWESNGQPENNYKTTPPVLDSDGSFFLYSKLTVDKSRWQQGNVFSCSVMHEALHNHYTQKSLSLSPGK

SEQ ID NO: 2801 - protein, 1228 aa, Artificial Sequence
  Synthetic
EVQLVESGGGLVQPGGSLTLSCAASGFTFHDYTMHWVRQTPGKCLEWLSGIGWNGYSKGYADSVKGRFTISRDNAKNSLFLQMNSLTSDDTALYYCVKDYHYGSGILDNYYGLDVWGQGTTVTVSSGGGGQGGGGQGGGGQEIVLTQSPATLSVSPGERATLSCRASQSISNNLAWYQQKPGQAPRLLIYGASSRATGIPDRFSGSGSGTEFTLTISSLQSEDFAVYYCQQYKNWPLTFGCGTKVDIKSGGGGQQVQLVQSGAEVKKPGESLKISCKGSGYSFTSYGISWVRQAPGQCLEWMGWISAYNGNTIYAQKLQGRVTMTTDTSTSTAYMELRRLRSDDTAVYYCARDPGVTGDDYWGQGTLVTVSSGGGGQGGGGQGGGGQEIVLTQSPATLSVSPGERATLSCRASLSVSSNLAWYQQKPGQAPRLLIYGASTRATGIPARFSGSGSGTEFTLTISSLQSEDFAVYFCQQYHSWPALTFGCGTKVEIKSGGGGQEVQLVESGGGLVQPGGSLKLSCAASGFTFNKYAMNWVRQAPGKGLEWVARIRSKYNNYATYYADSVKDRFTISRDDSKNTAYLQMNNLKTEDTAVYYCVRHGNFGNSYISYWAYWGQGTLVTVSSGGGGQGGGGQGGGGQQTVVTQEPSLTVSPGGTVTLTCGSSTGAVTSGNYPNWVQQKPGQAPRGLIGGTKFLAPGTPARFSGSLLGGKAALTLSGVQPEDEAEYYCVLWYSNRWVFGGGTKLTVLGGGGCPPCPAPELLGGPSVFLFPPKPKDTLMISRTPEVTCVVVDVSHEEPEVKFNWYVDGVEVHNAKTKPCEEQYGSTYRCVSVLTVLHQDWLNGKEYKCKVSNKALPAPIEKTISKAKGQPREPQVYTLPPSREEMTKNQVSLTCLVKGFYPSDIAVEWESNGQPENNYKTTPPVLDSDGSFFLYSKLTVDKSRWQQGNVFSCSVMHEALHNHYTQKSLSLSPGKGGGGQGGGGQGGGGQGGGGQGGGGQGGGGQCPPCPAPELLGGPSVFLFPPKPKDTLMISRTPEVTCVVVDVSHEEPEVKFNWYVDGVEVHNAKTKPCEEQYGSTYRCVSVLTVLHQDWLNGKEYKCKVSNKALPAPIEKTISKAKGQPREPQVYTLPPSREEMTKNQVSLTCLVKGFYPSDIAVEWESNGQPENNYKTTPPVLDSDGSFFLYSKLTVDKSRWQQGNVFSCSVMHEALHNHYTQKSLSLSPGK

SEQ ID NO: 2802 - protein, 1238 aa, Artificial Sequence
  Synthetic
EVQLVESGGGLVQPGGSLTLSCAASGFTFHDYTMHWVRQTPGKCLEWLSGIGWNGYSKGYADSVKGRFTISRDNAKNSLFLQMNSLTSDDTALYYCVKDYHYGSGILDNYYGLDVWGQGTTVTVSSGGGGSGGGGSGGGGSEIVLTQSPATLSVSPGERATLSCRASQSISNNLAWYQQKPGQAPRLLIYGASSRATGIPDRFSGSGSGTEFTLTISSLQSEDFAVYYCQQYKNWPLTFGCGTKVDIKSGGGGSQVQLVQSGAEVKKPGESLKISCKGSGYSFTSYGISWVRQAPGQCLEWMGWISAYNGNTIYAQKLQGRVTMTTDTSTSTAYMELRRLRSDDTAVYYCARDPGVTGDDYWGQGTLVTVSSGGGGSGGGGSGGGGSEIVLTQSPATLSVSPGERATLSCRASLSVSSNLAWYQQKPGQAPRLLIYGASTRATGIPARFSGSGSGTEFTLTISSLQSEDFAVYFCQQYHSWPALTFGCGTKVEIKSGGGGSEVQLVESGGGLVQPGGSLKLSCAASGFTFNKYAINWVRQAPGKGLEWVARIRSKYNNYATYYADAVKDRFTISRDDSKNTVYLQMNNLKTEDTAVYYCARAGNFGSSYISYWAYWGQGTLVTVSSGGGGSGGGGSGGGGSQTVVTQEPSLTVSPGGTVTITCGSSTGAVTSGNYPNWVQKKPGQAPRGLIGGTKFLAPGTPARFSGSLSGGKAALTLSGVQPEDEAEYYCVLWYSNRWVFGSGTKLTVLGGGGDKTHTCPPCPAPELLGGPSVFLFPPKPKDTLMISRTPEVTCVVVDVSHEDPEVKFNWYVDGVEVHNAKTKPCEEQYGSTYRCVSVLTVLHQDWLNGKEYKCKVSNKALPAPIEKTISKAKGQPREPQVYTLPPSREEMTKNQVSLTCLVKGFYPSDIAVEWESNGQPENNYKTTPPVLDSDGSFFLYSKLTVDKSRWQQGNVFSCSVMHEALHNHYTQKSLSLSPGKGGGGSGGGGSGGGGSGGGGSGGGGSGGGGSDKTHTCPPCPAPELLGGPSVFLFPPKPKDTLMISRTPEVTCVVVDVSHEDPEVKFNWYVDGVEVHNAKTKPCEEQYGSTYRCVSVLTVLHQDWLNGKEYKCKVSNKALPAPIEKTISKAKGQPREPQVYTLPPSREEMTKNQVSLTCLVKGFYPSDIAVEWESNGQPENNYKTTPPVLDSDGSFFLYSKLTVDKSRWQQGNVFSCSVMHEALHNHYTQKSLSLSPGK

SEQ ID NO: 2803 - protein, 1228 aa, Artificial Sequence
  Synthetic
EVQLVESGGGLVQPGGSLTLSCAASGFTFHDYTMHWVRQTPGKCLEWLSGIGWNGYSKGYADSVKGRFTISRDNAKNSLFLQMNSLTSDDTALYYCVKDYHYGSGILDNYYGLDVWGQGTTVTVSSGGGGQGGGGQGGGGQEIVLTQSPATLSVSPGERATLSCRASQSISNNLAWYQQKPGQAPRLLIYGASSRATGIPDRFSGSGSGTEFTLTISSLQSEDFAVYYCQQYKNWPLTFGCGTKVDIKSGGGGQQVQLVQSGAEVKKPGESLKISCKGSGYSFTSYGISWVRQAPGQCLEWMGWISAYNGNTIYAQKLQGRVTMTTDTSTSTAYMELRRLRSDDTAVYYCARDPGVTGDDYWGQGTLVTVSSGGGGQGGGGQGGGGQEIVLTQSPATLSVSPGERATLSCRASLSVSSNLAWYQQKPGQAPRLLIYGASTRATGIPARFSGSGSGTEFTLTISSLQSEDFAVYFCQQYHSWPALTFGCGTKVEIKSGGGGQEVQLVESGGGLVQPGGSLKLSCAASGFTFNKYAINWVRQAPGKGLEWVARIRSKYNNYATYYADAVKDRFTISRDDSKNTVYLQMNNLKTEDTAVYYCARAGNFGSSYISYWAYWGQGTLVTVSSGGGGQGGGGQGGGGQQTVVTQEPSLTVSPGGTVTITCGSSTGAVTSGNYPNWVQKKPGQAPRGLIGGTKFLAPGTPARFSGSLSGGKAALTLSGVQPEDEAEYYCVLWYSNRWVFGSGTKLTVLGGGGCPPCPAPELLGGPSVFLFPPKPKDTLMISRTPEVTCVVVDVSHEEPEVKFNWYVDGVEVHNAKTKPCEEQYGSTYRCVSVLTVLHQDWLNGKEYKCKVSNKALPAPIEKTISKAKGQPREPQVYTLPPSREEMTKNQVSLTCLVKGFYPSDIAVEWESNGQPENNYKTTPPVLDSDGSFFLYSKLTVDKSRWQQGNVFSCSVMHEALHNHYTQKSLSLSPGKGGGGQGGGGQGGGGQGGGGQGGGGQGGGGQCPPCPAPELLGGPSVFLFPPKPKDTLMISRTPEVTCVVVDVSHEEPEVKFNWYVDGVEVHNAKTKPCEEQYGSTYRCVSVLTVLHQDWLNGKEYKCKVSNKALPAPIEKTISKAKGQPREPQVYTLPPSREEMTKNQVSLTCLVKGFYPSDIAVEWESNGQPENNYKTTPPVLDSDGSFFLYSKLTVDKSRWQQGNVFSCSVMHEALHNHYTQKSLSLSPGK

SEQ ID NO: 2804 - protein, 493 aa, Artificial Sequence
  Synthetic
EVQLVESGGGLVQPGGSLTLSCAASGFTFHDYTMHWVRQTPGKCLEWLSGIGWNGYSKGYADSVKGRFTISRDNAKNSLFLQMNSLTSDDTALYYCVKDYHYGSGILDNYYGLDVWGQGTTVTVSSGGGGSGGGGSGGGGSEIVLTQSPATLSVSPGERATLSCRASQSISNNLAWYQQKPGQAPRLLIYGASSRATGIPDRFSGSGSGTEFTLTISSLQSEDFAVYYCQQYKNWPLTFGCGTKVDIKSGGGGSQVQLVQSGAEVKKPGASVKVSCKTSGYPFTSYGISWVRQAPGQCLEWMGWISPYSGAPTYAQKVQGRVTMTTDTSTTTAYMELRSLRSDDTAVYYCVRDGLEEDYWGQGTLVTVSSGGGGSGGGGSGGGGSEIVLTQSPATLSVSPGEGATLSCRASQSVSSNLAWYQQSPGQAPRLLIYGASTRATGIPARFSGSGSGTEFTLTISSLQSEDFAVYYCQQYHSWPALTFGCGTKVDIK

SEQ ID NO: 2805 - protein, 493 aa, Artificial Sequence
  Synthetic
EVQLVESGGGLVQPGGSLTLSCAASGFTFHDYTMHWVRQTPGKCLEWLSGIGWNGYSKGYADSVKGRFTISRDNAKNSLFLQMNSLTSDDTALYYCVKDYHYGSGILDNYYGLDVWGQGTTVTVSSGGGGQGGGGQGGGGQEIVLTQSPATLSVSPGERATLSCRASQSISNNLAWYQQKPGQAPRLLIYGASSRATGIPDRFSGSGSGTEFTLTISSLQSEDFAVYYCQQYKNWPLTFGCGTKVDIKSGGGGQQVQLVQSGAEVKKPGASVKVSCKTSGYPFTSYGISWVRQAPGQCLEWMGWISPYSGAPTYAQKVQGRVTMTTDTSTTTAYMELRSLRSDDTAVYYCVRDGLEEDYWGQGTLVTVSSGGGGQGGGGQGGGGQEIVLTQSPATLSVSPGEGATLSCRASQSVSSNLAWYQQSPGQAPRLLIYGASTRATGIPARFSGSGSGTEFTLTISSLQSEDFAVYYCQQYHSWPALTFGCGTKVDIK

SEQ ID NO: 2806 - protein, 748 aa, Artificial Sequence
  Synthetic
EVQLVESGGGLVQPGGSLTLSCAASGFTFHDYTMHWVRQTPGKCLEWLSGIGWNGYSKGYADSVKGRFTISRDNAKNSLFLQMNSLTSDDTALYYCVKDYHYGSGILDNYYGLDVWGQGTTVTVSSGGGGSGGGGSGGGGSEIVLTQSPATLSVSPGERATLSCRASQSISNNLAWYQQKPGQAPRLLIYGASSRATGIPDRFSGSGSGTEFTLTISSLQSEDFAVYYCQQYKNWPLTFGCGTKVDIKSGGGGSQVQLVQSGAEVKKPGASVKVSCKTSGYPFTSYGISWVRQAPGQCLEWMGWISPYSGAPTYAQKVQGRVTMTTDTSTTTAYMELRSLRSDDTAVYYCVRDGLEEDYWGQGTLVTVSSGGGGSGGGGSGGGGSEIVLTQSPATLSVSPGEGATLSCRASQSVSSNLAWYQQSPGQAPRLLIYGASTRATGIPARFSGSGSGTEFTLTISSLQSEDFAVYYCQQYHSWPALTFGCGTKVDIKSGGGGSEVQLVESGGGLVQPGGSLKLSCAASGFTFNKYAMNWVRQAPGKGLEWVARIRSKYNNYATYYADSVKDRFTISRDDSKNTAYLQMNNLKTEDTAVYYCVRHGNFGNSYISYWAYWGQGTLVTVSSGGGGSGGGGSGGGGSQTVVTQEPSLTVSPGGTVTLTCGSSTGAVTSGNYPNWVQQKPGQAPRGLIGGTKFLAPGTPARFSGSLLGGKAALTLSGVQPEDEAEYYCVLWYSNRWVFGGGTKLTVL

SEQ ID NO: 2807 - protein, 748 aa, Artificial Sequence
  Synthetic
EVQLVESGGGLVQPGGSLTLSCAASGFTFHDYTMHWVRQTPGKCLEWLSGIGWNGYSKGYADSVKGRFTISRDNAKNSLFLQMNSLTSDDTALYYCVKDYHYGSGILDNYYGLDVWGQGTTVTVSSGGGGQGGGGQGGGGQEIVLTQSPATLSVSPGERATLSCRASQSISNNLAWYQQKPGQAPRLLIYGASSRATGIPDRFSGSGSGTEFTLTISSLQSEDFAVYYCQQYKNWPLTFGCGTKVDIKSGGGGQQVQLVQSGAEVKKPGASVKVSCKTSGYPFTSYGISWVRQAPGQCLEWMGWISPYSGAPTYAQKVQGRVTMTTDTSTTTAYMELRSLRSDDTAVYYCVRDGLEEDYWGQGTLVTVSSGGGGQGGGGQGGGGQEIVLTQSPATLSVSPGEGATLSCRASQSVSSNLAWYQQSPGQAPRLLIYGASTRATGIPARFSGSGSGTEFTLTISSLQSEDFAVYYCQQYHSWPALTFGCGTKVDIKSGGGGQEVQLVESGGGLVQPGGSLKLSCAASGFTFNKYAMNWVRQAPGKGLEWVARIRSKYNNYATYYADSVKDRFTISRDDSKNTAYLQMNNLKTEDTAVYYCVRHGNFGNSYISYWAYWGQGTLVTVSSGGGGQGGGGQGGGGQQTVVTQEPSLTVSPGGTVTLTCGSSTGAVTSGNYPNWVQQKPGQAPRGLIGGTKFLAPGTPARFSGSLLGGKAALTLSGVQPEDEAEYYCVLWYSNRWVFGGGTKLTVL

SEQ ID NO: 2808 - protein, 748 aa, Artificial Sequence
  Synthetic
EVQLVESGGGLVQPGGSLTLSCAASGFTFHDYTMHWVRQTPGKCLEWLSGIGWNGYSKGYADSVKGRFTISRDNAKNSLFLQMNSLTSDDTALYYCVKDYHYGSGILDNYYGLDVWGQGTTVTVSSGGGGSGGGGSGGGGSEIVLTQSPATLSVSPGERATLSCRASQSISNNLAWYQQKPGQAPRLLIYGASSRATGIPDRFSGSGSGTEFTLTISSLQSEDFAVYYCQQYKNWPLTFGCGTKVDIKSGGGGSQVQLVQSGAEVKKPGASVKVSCKTSGYPFTSYGISWVRQAPGQCLEWMGWISPYSGAPTYAQKVQGRVTMTTDTSTTTAYMELRSLRSDDTAVYYCVRDGLEEDYWGQGTLVTVSSGGGGSGGGGSGGGGSEIVLTQSPATLSVSPGEGATLSCRASQSVSSNLAWYQQSPGQAPRLLIYGASTRATGIPARFSGSGSGTEFTLTISSLQSEDFAVYYCQQYHSWPALTFGCGTKVDIKSGGGGSEVQLVESGGGLVQPGGSLKLSCAASGFTFNKYAINWVRQAPGKGLEWVARIRSKYNNYATYYADAVKDRFTISRDDSKNTVYLQMNNLKTEDTAVYYCARAGNFGSSYISYWAYWGQGTLVTVSSGGGGSGGGGSGGGGSQTVVTQEPSLTVSPGGTVTITCGSSTGAVTSGNYPNWVQKKPGQAPRGLIGGTKFLAPGTPARFSGSLSGGKAALTLSGVQPEDEAEYYCVLWYSNRWVFGSGTKLTVL

SEQ ID NO: 2809 - protein, 748 aa, Artificial Sequence
  Synthetic
EVQLVESGGGLVQPGGSLTLSCAASGFTFHDYTMHWVRQTPGKCLEWLSGIGWNGYSKGYADSVKGRFTISRDNAKNSLFLQMNSLTSDDTALYYCVKDYHYGSGILDNYYGLDVWGQGTTVTVSSGGGGQGGGGQGGGGQEIVLTQSPATLSVSPGERATLSCRASQSISNNLAWYQQKPGQAPRLLIYGASSRATGIPDRFSGSGSGTEFTLTISSLQSEDFAVYYCQQYKNWPLTFGCGTKVDIKSGGGGQQVQLVQSGAEVKKPGASVKVSCKTSGYPFTSYGISWVRQAPGQCLEWMGWISPYSGAPTYAQKVQGRVTMTTDTSTTTAYMELRSLRSDDTAVYYCVRDGLEEDYWGQGTLVTVSSGGGGQGGGGQGGGGQEIVLTQSPATLSVSPGEGATLSCRASQSVSSNLAWYQQSPGQAPRLLIYGASTRATGIPARFSGSGSGTEFTLTISSLQSEDFAVYYCQQYHSWPALTFGCGTKVDIKSGGGGQEVQLVESGGGLVQPGGSLKLSCAASGFTFNKYAINWVRQAPGKGLEWVARIRSKYNNYATYYADAVKDRFTISRDDSKNTVYLQMNNLKTEDTAVYYCARAGNFGSSYISYWAYWGQGTLVTVSSGGGGQGGGGQGGGGQQTVVTQEPSLTVSPGGTVTITCGSSTGAVTSGNYPNWVQKKPGQAPRGLIGGTKFLAPGTPARFSGSLSGGKAALTLSGVQPEDEAEYYCVLWYSNRWVFGSGTKLTVL

SEQ ID NO: 2810 - protein, 1236 aa, Artificial Sequence
  Synthetic
EVQLVESGGGLVQPGGSLTLSCAASGFTFHDYTMHWVRQTPGKCLEWLSGIGWNGYSKGYADSVKGRFTISRDNAKNSLFLQMNSLTSDDTALYYCVKDYHYGSGILDNYYGLDVWGQGTTVTVSSGGGGSGGGGSGGGGSEIVLTQSPATLSVSPGERATLSCRASQSISNNLAWYQQKPGQAPRLLIYGASSRATGIPDRFSGSGSGTEFTLTISSLQSEDFAVYYCQQYKNWPLTFGCGTKVDIKSGGGGSQVQLVQSGAEVKKPGASVKVSCKTSGYPFTSYGISWVRQAPGQCLEWMGWISPYSGAPTYAQKVQGRVTMTTDTSTTTAYMELRSLRSDDTAVYYCVRDGLEEDYWGQGTLVTVSSGGGGSGGGGSGGGGSEIVLTQSPATLSVSPGEGATLSCRASQSVSSNLAWYQQSPGQAPRLLIYGASTRATGIPARFSGSGSGTEFTLTISSLQSEDFAVYYCQQYHSWPALTFGCGTKVDIKSGGGGSEVQLVESGGGLVQPGGSLKLSCAASGFTFNKYAMNWVRQAPGKGLEWVARIRSKYNNYATYYADSVKDRFTISRDDSKNTAYLQMNNLKTEDTAVYYCVRHGNFGNSYISYWAYWGQGTLVTVSSGGGGSGGGGSGGGGSQTVVTQEPSLTVSPGGTVTLTCGSSTGAVTSGNYPNWVQQKPGQAPRGLIGGTKFLAPGTPARFSGSLLGGKAALTLSGVQPEDEAEYYCVLWYSNRWVFGGGTKLTVLGGGGDKTHTCPPCPAPELLGGPSVFLFPPKPKDTLMISRTPEVTCVVVDVSHEDPEVKFNWYVDGVEVHNAKTKPCEEQYGSTYRCVSVLTVLHQDWLNGKEYKCKVSNKALPAPIEKTISKAKGQPREPQVYTLPPSREEMTKNQVSLTCLVKGFYPSDIAVEWESNGQPENNYKTTPPVLDSDGSFFLYSKLTVDKSRWQQGNVFSCSVMHEALHNHYTQKSLSLSPGKGGGGSGGGGSGGGGSGGGGSGGGGSGGGGSDKTHTCPPCPAPELLGGPSVFLFPPKPKDTLMISRTPEVTCVVVDVSHEDPEVKFNWYVDGVEVHNAKTKPCEEQYGSTYRCVSVLTVLHQDWLNGKEYKCKVSNKALPAPIEKTISKAKGQPREPQVYTLPPSREEMTKNQVSLTCLVKGFYPSDIAVEWESNGQPENNYKTTPPVLDSDGSFFLYSKLTVDKSRWQQGNVFSCSVMHEALHNHYTQKSLSLSPGK

SEQ ID NO: 2811 - protein, 1226 aa, Artificial Sequence
  Synthetic
EVQLVESGGGLVQPGGSLTLSCAASGFTFHDYTMHWVRQTPGKCLEWLSGIGWNGYSKGYADSVKGRFTISRDNAKNSLFLQMNSLTSDDTALYYCVKDYHYGSGILDNYYGLDVWGQGTTVTVSSGGGGQGGGGQGGGGQEIVLTQSPATLSVSPGERATLSCRASQSISNNLAWYQQKPGQAPRLLIYGASSRATGIPDRFSGSGSGTEFTLTISSLQSEDFAVYYCQQYKNWPLTFGCGTKVDIKSGGGGQQVQLVQSGAEVKKPGASVKVSCKTSGYPFTSYGISWVRQAPGQCLEWMGWISPYSGAPTYAQKVQGRVTMTTDTSTTTAYMELRSLRSDDTAVYYCVRDGLEEDYWGQGTLVTVSSGGGGQGGGGQGGGGQEIVLTQSPATLSVSPGEGATLSCRASQSVSSNLAWYQQSPGQAPRLLIYGASTRATGIPARFSGSGSGTEFTLTISSLQSEDFAVYYCQQYHSWPALTFGCGTKVDIKSGGGGQEVQLVESGGGLVQPGGSLKLSCAASGFTFNKYAMNWVRQAPGKGLEWVARIRSKYNNYATYYADSVKDRFTISRDDSKNTAYLQMNNLKTEDTAVYYCVRHGNFGNSYISYWAYWGQGTLVTVSSGGGGQGGGGQGGGGQQTVVTQEPSLTVSPGGTVTLTCGSSTGAVTSGNYPNWVQQKPGQAPRGLIGGTKFLAPGTPARFSGSLLGGKAALTLSGVQPEDEAEYYCVLWYSNRWVFGGGTKLTVLGGGGCPPCPAPELLGGPSVFLFPPKPKDTLMISRTPEVTCVVVDVSHEEPEVKFNWYVDGVEVHNAKTKPCEEQYGSTYRCVSVLTVLHQDWLNGKEYKCKVSNKALPAPIEKTISKAKGQPREPQVYTLPPSREEMTKNQVSLTCLVKGFYPSDIAVEWESNGQPENNYKTTPPVLDSDGSFFLYSKLTVDKSRWQQGNVFSCSVMHEALHNHYTQKSLSLSPGKGGGGQGGGGQGGGGQGGGGQGGGGQGGGGQCPPCPAPELLGGPSVFLFPPKPKDTLMISRTPEVTCVVVDVSHEEPEVKFNWYVDGVEVHNAKTKPCEEQYGSTYRCVSVLTVLHQDWLNGKEYKCKVSNKALPAPIEKTISKAKGQPREPQVYTLPPSREEMTKNQVSLTCLVKGFYPSDIAVEWESNGQPENNYKTTPPVLDSDGSFFLYSKLTVDKSRWQQGNVFSCSVMHEALHNHYTQKSLSLSPGK

SEQ ID NO: 2812 - protein, 1236 aa, Artificial Sequence
  Synthetic
EVQLVESGGGLVQPGGSLTLSCAASGFTFHDYTMHWVRQTPGKCLEWLSGIGWNGYSKGYADSVKGRFTISRDNAKNSLFLQMNSLTSDDTALYYCVKDYHYGSGILDNYYGLDVWGQGTTVTVSSGGGGSGGGGSGGGGSEIVLTQSPATLSVSPGERATLSCRASQSISNNLAWYQQKPGQAPRLLIYGASSRATGIPDRFSGSGSGTEFTLTISSLQSEDFAVYYCQQYKNWPLTFGCGTKVDIKSGGGGSQVQLVQSGAEVKKPGASVKVSCKTSGYPFTSYGISWVRQAPGQCLEWMGWISPYSGAPTYAQKVQGRVTMTTDTSTTTAYMELRSLRSDDTAVYYCVRDGLEEDYWGQGTLVTVSSGGGGSGGGGSGGGGSEIVLTQSPATLSVSPGEGATLSCRASQSVSSNLAWYQQSPGQAPRLLIYGASTRATGIPARFSGSGSGTEFTLTISSLQSEDFAVYYCQQYHSWPALTFGCGTKVDIKSGGGGSEVQLVESGGGLVQPGGSLKLSCAASGFTFNKYAINWVRQAPGKGLEWVARIRSKYNNYATYYADAVKDRFTISRDDSKNTVYLQMNNLKTEDTAVYYCARAGNFGSSYISYWAYWGQGTLVTVSSGGGGSGGGGSGGGGSQTVVTQEPSLTVSPGGTVTITCGSSTGAVTSGNYPNWVQKKPGQAPRGLIGGTKFLAPGTPARFSGSLSGGKAALTLSGVQPEDEAEYYCVLWYSNRWVFGSGTKLTVLGGGGDKTHTCPPCPAPELLGGPSVFLFPPKPKDTLMISRTPEVTCVVVDVSHEDPEVKFNWYVDGVEVHNAKTKPCEEQYGSTYRCVSVLTVLHQDWLNGKEYKCKVSNKALPAPIEKTISKAKGQPREPQVYTLPPSREEMTKNQVSLTCLVKGFYPSDIAVEWESNGQPENNYKTTPPVLDSDGSFFLYSKLTVDKSRWQQGNVFSCSVMHEALHNHYTQKSLSLSPGKGGGGSGGGGSGGGGSGGGGSGGGGSGGGGSDKTHTCPPCPAPELLGGPSVFLFPPKPKDTLMISRTPEVTCVVVDVSHEDPEVKFNWYVDGVEVHNAKTKPCEEQYGSTYRCVSVLTVLHQDWLNGKEYKCKVSNKALPAPIEKTISKAKGQPREPQVYTLPPSREEMTKNQVSLTCLVKGFYPSDIAVEWESNGQPENNYKTTPPVLDSDGSFFLYSKLTVDKSRWQQGNVFSCSVMHEALHNHYTQKSLSLSPGK

SEQ ID NO: 2813 - protein, 1226 aa, Artificial Sequence
  Synthetic
EVQLVESGGGLVQPGGSLTLSCAASGFTFHDYTMHWVRQTPGKCLEWLSGIGWNGYSKGYADSVKGRFTISRDNAKNSLFLQMNSLTSDDTALYYCVKDYHYGSGILDNYYGLDVWGQGTTVTVSSGGGGQGGGGQGGGGQEIVLTQSPATLSVSPGERATLSCRASQSISNNLAWYQQKPGQAPRLLIYGASSRATGIPDRFSGSGSGTEFTLTISSLQSEDFAVYYCQQYKNWPLTFGCGTKVDIKSGGGGQQVQLVQSGAEVKKPGASVKVSCKTSGYPFTSYGISWVRQAPGQCLEWMGWISPYSGAPTYAQKVQGRVTMTTDTSTTTAYMELRSLRSDDTAVYYCVRDGLEEDYWGQGTLVTVSSGGGGQGGGGQGGGGQEIVLTQSPATLSVSPGEGATLSCRASQSVSSNLAWYQQSPGQAPRLLIYGASTRATGIPARFSGSGSGTEFTLTISSLQSEDFAVYYCQQYHSWPALTFGCGTKVDIKSGGGGQEVQLVESGGGLVQPGGSLKLSCAASGFTFNKYAINWVRQAPGKGLEWVARIRSKYNNYATYYADAVKDRFTISRDDSKNTVYLQMNNLKTEDTAVYYCARAGNFGSSYISYWAYWGQGTLVTVSSGGGGQGGGGQGGGGQQTVVTQEPSLTVSPGGTVTITCGSSTGAVTSGNYPNWVQKKPGQAPRGLIGGTKFLAPGTPARFSGSLSGGKAALTLSGVQPEDEAEYYCVLWYSNRWVFGSGTKLTVLGGGGCPPCPAPELLGGPSVFLFPPKPKDTLMISRTPEVTCVVVDVSHEEPEVKFNWYVDGVEVHNAKTKPCEEQYGSTYRCVSVLTVLHQDWLNGKEYKCKVSNKALPAPIEKTISKAKGQPREPQVYTLPPSREEMTKNQVSLTCLVKGFYPSDIAVEWESNGQPENNYKTTPPVLDSDGSFFLYSKLTVDKSRWQQGNVFSCSVMHEALHNHYTQKSLSLSPGKGGGGQGGGGQGGGGQGGGGQGGGGQGGGGQCPPCPAPELLGGPSVFLFPPKPKDTLMISRTPEVTCVVVDVSHEEPEVKFNWYVDGVEVHNAKTKPCEEQYGSTYRCVSVLTVLHQDWLNGKEYKCKVSNKALPAPIEKTISKAKGQPREPQVYTLPPSREEMTKNQVSLTCLVKGFYPSDIAVEWESNGQPENNYKTTPPVLDSDGSFFLYSKLTVDKSRWQQGNVFSCSVMHEALHNHYTQKSLSLSPGK

SEQ ID NO: 2814 - protein, 493 aa, Artificial Sequence
  Synthetic
EVQLVESGGGLVQPGGSLTLSCAASGFTFHDYTMHWVRQTPGKCLEWLSGIGWNGYSKGYADSVKGRFTISRDNAKNSLFLQMNSLTSDDTALYYCVKDYHYGSGILDNYYGLDVWGQGTTVTVSSGGGGSGGGGSGGGGSEIVLTQSPATLSVSPGERATLSCRASQSISNNLAWYQQKPGQAPRLLIYGASSRATGIPDRFSGSGSGTEFTLTISSLQSEDFAVYYCQQYKNWPLTFGCGTKVDIKSGGGGSQVQLVQSGAEVKKPGASVKVSCKASGYTFNNYGISWVRQAPGQCLEWMGWISAYNGKTSYAQKFQGRVTMTTDTSTGTAYMELRSLRSDDTAVYYCARSTGDGEYWGQGTLVTVSSGGGGSGGGGSGGGGSEIVMTQSPATLSVSPGERATLSCRASQSVSSNLAWYQQKPGQAPRLLIYGASTRATGIPARFSGGGSGTEFTLTISSLQSEDFAVYYCQQYHTWPVLTFGCGTKVEIK

SEQ ID NO: 2815 - protein, 493 aa, Artificial Sequence
  Synthetic
EVQLVESGGGLVQPGGSLTLSCAASGFTFHDYTMHWVRQTPGKCLEWLSGIGWNGYSKGYADSVKGRFTISRDNAKNSLFLQMNSLTSDDTALYYCVKDYHYGSGILDNYYGLDVWGQGTTVTVSSGGGGQGGGGQGGGGQEIVLTQSPATLSVSPGERATLSCRASQSISNNLAWYQQKPGQAPRLLIYGASSRATGIPDRFSGSGSGTEFTLTISSLQSEDFAVYYCQQYKNWPLTFGCGTKVDIKSGGGGQQVQLVQSGAEVKKPGASVKVSCKASGYTFNNYGISWVRQAPGQCLEWMGWISAYNGKTSYAQKFQGRVTMTTDTSTGTAYMELRSLRSDDTAVYYCARSTGDGEYWGQGTLVTVSSGGGGQGGGGQGGGGQEIVMTQSPATLSVSPGERATLSCRASQSVSSNLAWYQQKPGQAPRLLIYGASTRATGIPARFSGGGSGTEFTLTISSLQSEDFAVYYCQQYHTWPVLTFGCGTKVEIK

SEQ ID NO: 2816 - protein, 748 aa, Artificial Sequence
  Synthetic
EVQLVESGGGLVQPGGSLTLSCAASGFTFHDYTMHWVRQTPGKCLEWLSGIGWNGYSKGYADSVKGRFTISRDNAKNSLFLQMNSLTSDDTALYYCVKDYHYGSGILDNYYGLDVWGQGTTVTVSSGGGGSGGGGSGGGGSEIVLTQSPATLSVSPGERATLSCRASQSISNNLAWYQQKPGQAPRLLIYGASSRATGIPDRFSGSGSGTEFTLTISSLQSEDFAVYYCQQYKNWPLTFGCGTKVDIKSGGGGSQVQLVQSGAEVKKPGASVKVSCKASGYTFNNYGISWVRQAPGQCLEWMGWISAYNGKTSYAQKFQGRVTMTTDTSTGTAYMELRSLRSDDTAVYYCARSTGDGEYWGQGTLVTVSSGGGGSGGGGSGGGGSEIVMTQSPATLSVSPGERATLSCRASQSVSSNLAWYQQKPGQAPRLLIYGASTRATGIPARFSGGGSGTEFTLTISSLQSEDFAVYYCQQYHTWPVLTFGCGTKVEIKSGGGGSEVQLVESGGGLVQPGGSLKLSCAASGFTFNKYAMNWVRQAPGKGLEWVARIRSKYNNYATYYADSVKDRFTISRDDSKNTAYLQMNNLKTEDTAVYYCVRHGNFGNSYISYWAYWGQGTLVTVSSGGGGSGGGGSGGGGSQTVVTQEPSLTVSPGGTVTLTCGSSTGAVTSGNYPNWVQQKPGQAPRGLIGGTKFLAPGTPARFSGSLLGGKAALTLSGVQPEDEAEYYCVLWYSNRWVFGGGTKLTVL

SEQ ID NO: 2817 - protein, 748 aa, Artificial Sequence
  Synthetic
EVQLVESGGGLVQPGGSLTLSCAASGFTFHDYTMHWVRQTPGKCLEWLSGIGWNGYSKGYADSVKGRFTISRDNAKNSLFLQMNSLTSDDTALYYCVKDYHYGSGILDNYYGLDVWGQGTTVTVSSGGGGQGGGGQGGGGQEIVLTQSPATLSVSPGERATLSCRASQSISNNLAWYQQKPGQAPRLLIYGASSRATGIPDRFSGSGSGTEFTLTISSLQSEDFAVYYCQQYKNWPLTFGCGTKVDIKSGGGGQQVQLVQSGAEVKKPGASVKVSCKASGYTFNNYGISWVRQAPGQCLEWMGWISAYNGKTSYAQKFQGRVTMTTDTSTGTAYMELRSLRSDDTAVYYCARSTGDGEYWGQGTLVTVSSGGGGQGGGGQGGGGQEIVMTQSPATLSVSPGERATLSCRASQSVSSNLAWYQQKPGQAPRLLIYGASTRATGIPARFSGGGSGTEFTLTISSLQSEDFAVYYCQQYHTWPVLTFGCGTKVEIKSGGGGQEVQLVESGGGLVQPGGSLKLSCAASGFTFNKYAMNWVRQAPGKGLEWVARIRSKYNNYATYYADSVKDRFTISRDDSKNTAYLQMNNLKTEDTAVYYCVRHGNFGNSYISYWAYWGQGTLVTVSSGGGGQGGGGQGGGGQQTVVTQEPSLTVSPGGTVTLTCGSSTGAVTSGNYPNWVQQKPGQAPRGLIGGTKFLAPGTPARFSGSLLGGKAALTLSGVQPEDEAEYYCVLWYSNRWVFGGGTKLTVL

SEQ ID NO: 2818 - protein, 748 aa, Artificial Sequence
  Synthetic
EVQLVESGGGLVQPGGSLTLSCAASGFTFHDYTMHWVRQTPGKCLEWLSGIGWNGYSKGYADSVKGRFTISRDNAKNSLFLQMNSLTSDDTALYYCVKDYHYGSGILDNYYGLDVWGQGTTVTVSSGGGGSGGGGSGGGGSEIVLTQSPATLSVSPGERATLSCRASQSISNNLAWYQQKPGQAPRLLIYGASSRATGIPDRFSGSGSGTEFTLTISSLQSEDFAVYYCQQYKNWPLTFGCGTKVDIKSGGGGSQVQLVQSGAEVKKPGASVKVSCKASGYTFNNYGISWVRQAPGQCLEWMGWISAYNGKTSYAQKFQGRVTMTTDTSTGTAYMELRSLRSDDTAVYYCARSTGDGEYWGQGTLVTVSSGGGGSGGGGSGGGGSEIVMTQSPATLSVSPGERATLSCRASQSVSSNLAWYQQKPGQAPRLLIYGASTRATGIPARFSGGGSGTEFTLTISSLQSEDFAVYYCQQYHTWPVLTFGCGTKVEIKSGGGGSEVQLVESGGGLVQPGGSLKLSCAASGFTFNKYAINWVRQAPGKGLEWVARIRSKYNNYATYYADAVKDRFTISRDDSKNTVYLQMNNLKTEDTAVYYCARAGNFGSSYISYWAYWGQGTLVTVSSGGGGSGGGGSGGGGSQTVVTQEPSLTVSPGGTVTITCGSSTGAVTSGNYPNWVQKKPGQAPRGLIGGTKFLAPGTPARFSGSLSGGKAALTLSGVQPEDEAEYYCVLWYSNRWVFGSGTKLTVL

SEQ ID NO: 2819 - protein, 748 aa, Artificial Sequence
  Synthetic
EVQLVESGGGLVQPGGSLTLSCAASGFTFHDYTMHWVRQTPGKCLEWLSGIGWNGYSKGYADSVKGRFTISRDNAKNSLFLQMNSLTSDDTALYYCVKDYHYGSGILDNYYGLDVWGQGTTVTVSSGGGGQGGGGQGGGGQEIVLTQSPATLSVSPGERATLSCRASQSISNNLAWYQQKPGQAPRLLIYGASSRATGIPDRFSGSGSGTEFTLTISSLQSEDFAVYYCQQYKNWPLTFGCGTKVDIKSGGGGQQVQLVQSGAEVKKPGASVKVSCKASGYTFNNYGISWVRQAPGQCLEWMGWISAYNGKTSYAQKFQGRVTMTTDTSTGTAYMELRSLRSDDTAVYYCARSTGDGEYWGQGTLVTVSSGGGGQGGGGQGGGGQEIVMTQSPATLSVSPGERATLSCRASQSVSSNLAWYQQKPGQAPRLLIYGASTRATGIPARFSGGGSGTEFTLTISSLQSEDFAVYYCQQYHTWPVLTFGCGTKVEIKSGGGGQEVQLVESGGGLVQPGGSLKLSCAASGFTFNKYAINWVRQAPGKGLEWVARIRSKYNNYATYYADAVKDRFTISRDDSKNTVYLQMNNLKTEDTAVYYCARAGNFGSSYISYWAYWGQGTLVTVSSGGGGQGGGGQGGGGQQTVVTQEPSLTVSPGGTVTITCGSSTGAVTSGNYPNWVQKKPGQAPRGLIGGTKFLAPGTPARFSGSLSGGKAALTLSGVQPEDEAEYYCVLWYSNRWVFGSGTKLTVL

SEQ ID NO: 2820 - protein, 1236 aa, Artificial Sequence
  Synthetic
EVQLVESGGGLVQPGGSLTLSCAASGFTFHDYTMHWVRQTPGKCLEWLSGIGWNGYSKGYADSVKGRFTISRDNAKNSLFLQMNSLTSDDTALYYCVKDYHYGSGILDNYYGLDVWGQGTTVTVSSGGGGSGGGGSGGGGSEIVLTQSPATLSVSPGERATLSCRASQSISNNLAWYQQKPGQAPRLLIYGASSRATGIPDRFSGSGSGTEFTLTISSLQSEDFAVYYCQQYKNWPLTFGCGTKVDIKSGGGGSQVQLVQSGAEVKKPGASVKVSCKASGYTFNNYGISWVRQAPGQCLEWMGWISAYNGKTSYAQKFQGRVTMTTDTSTGTAYMELRSLRSDDTAVYYCARSTGDGEYWGQGTLVTVSSGGGGSGGGGSGGGGSEIVMTQSPATLSVSPGERATLSCRASQSVSSNLAWYQQKPGQAPRLLIYGASTRATGIPARFSGGGSGTEFTLTISSLQSEDFAVYYCQQYHTWPVLTFGCGTKVEIKSGGGGSEVQLVESGGGLVQPGGSLKLSCAASGFTFNKYAMNWVRQAPGKGLEWVARIRSKYNNYATYYADSVKDRFTISRDDSKNTAYLQMNNLKTEDTAVYYCVRHGNFGNSYISYWAYWGQGTLVTVSSGGGGSGGGGSGGGGSQTVVTQEPSLTVSPGGTVTLTCGSSTGAVTSGNYPNWVQQKPGQAPRGLIGGTKFLAPGTPARFSGSLLGGKAALTLSGVQPEDEAEYYCVLWYSNRWVFGGGTKLTVLGGGGDKTHTCPPCPAPELLGGPSVFLFPPKPKDTLMISRTPEVTCVVVDVSHEDPEVKFNWYVDGVEVHNAKTKPCEEQYGSTYRCVSVLTVLHQDWLNGKEYKCKVSNKALPAPIEKTISKAKGQPREPQVYTLPPSREEMTKNQVSLTCLVKGFYPSDIAVEWESNGQPENNYKTTPPVLDSDGSFFLYSKLTVDKSRWQQGNVFSCSVMHEALHNHYTQKSLSLSPGKGGGGSGGGGSGGGGSGGGGSGGGGSGGGGSDKTHTCPPCPAPELLGGPSVFLFPPKPKDTLMISRTPEVTCVVVDVSHEDPEVKFNWYVDGVEVHNAKTKPCEEQYGSTYRCVSVLTVLHQDWLNGKEYKCKVSNKALPAPIEKTISKAKGQPREPQVYTLPPSREEMTKNQVSLTCLVKGFYPSDIAVEWESNGQPENNYKTTPPVLDSDGSFFLYSKLTVDKSRWQQGNVFSCSVMHEALHNHYTQKSLSLSPGK

SEQ ID NO: 2821 - protein, 1226 aa, Artificial Sequence
  Synthetic
EVQLVESGGGLVQPGGSLTLSCAASGFTFHDYTMHWVRQTPGKCLEWLSGIGWNGYSKGYADSVKGRFTISRDNAKNSLFLQMNSLTSDDTALYYCVKDYHYGSGILDNYYGLDVWGQGTTVTVSSGGGGQGGGGQGGGGQEIVLTQSPATLSVSPGERATLSCRASQSISNNLAWYQQKPGQAPRLLIYGASSRATGIPDRFSGSGSGTEFTLTISSLQSEDFAVYYCQQYKNWPLTFGCGTKVDIKSGGGGQQVQLVQSGAEVKKPGASVKVSCKASGYTFNNYGISWVRQAPGQCLEWMGWISAYNGKTSYAQKFQGRVTMTTDTSTGTAYMELRSLRSDDTAVYYCARSTGDGEYWGQGTLVTVSSGGGGQGGGGQGGGGQEIVMTQSPATLSVSPGERATLSCRASQSVSSNLAWYQQKPGQAPRLLIYGASTRATGIPARFSGGGSGTEFTLTISSLQSEDFAVYYCQQYHTWPVLTFGCGTKVEIKSGGGGQEVQLVESGGGLVQPGGSLKLSCAASGFTFNKYAMNWVRQAPGKGLEWVARIRSKYNNYATYYADSVKDRFTISRDDSKNTAYLQMNNLKTEDTAVYYCVRHGNFGNSYISYWAYWGQGTLVTVSSGGGGQGGGGQGGGGQQTVVTQEPSLTVSPGGTVTLTCGSSTGAVTSGNYPNWVQQKPGQAPRGLIGGTKFLAPGTPARFSGSLLGGKAALTLSGVQPEDEAEYYCVLWYSNRWVFGGGTKLTVLGGGGCPPCPAPELLGGPSVFLFPPKPKDTLMISRTPEVTCVVVDVSHEEPEVKFNWYVDGVEVHNAKTKPCEEQYGSTYRCVSVLTVLHQDWLNGKEYKCKVSNKALPAPIEKTISKAKGQPREPQVYTLPPSREEMTKNQVSLTCLVKGFYPSDIAVEWESNGQPENNYKTTPPVLDSDGSFFLYSKLTVDKSRWQQGNVFSCSVMHEALHNHYTQKSLSLSPGKGGGGQGGGGQGGGGQGGGGQGGGGQGGGGQCPPCPAPELLGGPSVFLFPPKPKDTLMISRTPEVTCVVVDVSHEEPEVKFNWYVDGVEVHNAKTKPCEEQYGSTYRCVSVLTVLHQDWLNGKEYKCKVSNKALPAPIEKTISKAKGQPREPQVYTLPPSREEMTKNQVSLTCLVKGFYPSDIAVEWESNGQPENNYKTTPPVLDSDGSFFLYSKLTVDKSRWQQGNVFSCSVMHEALHNHYTQKSLSLSPGK

SEQ ID NO: 2822 - protein, 1236 aa, Artificial Sequence
  Synthetic
EVQLVESGGGLVQPGGSLTLSCAASGFTFHDYTMHWVRQTPGKCLEWLSGIGWNGYSKGYADSVKGRFTISRDNAKNSLFLQMNSLTSDDTALYYCVKDYHYGSGILDNYYGLDVWGQGTTVTVSSGGGGSGGGGSGGGGSEIVLTQSPATLSVSPGERATLSCRASQSISNNLAWYQQKPGQAPRLLIYGASSRATGIPDRFSGSGSGTEFTLTISSLQSEDFAVYYCQQYKNWPLTFGCGTKVDIKSGGGGSQVQLVQSGAEVKKPGASVKVSCKASGYTFNNYGISWVRQAPGQCLEWMGWISAYNGKTSYAQKFQGRVTMTTDTSTGTAYMELRSLRSDDTAVYYCARSTGDGEYWGQGTLVTVSSGGGGSGGGGSGGGGSEIVMTQSPATLSVSPGERATLSCRASQSVSSNLAWYQQKPGQAPRLLIYGASTRATGIPARFSGGGSGTEFTLTISSLQSEDFAVYYCQQYHTWPVLTFGCGTKVEIKSGGGGSEVQLVESGGGLVQPGGSLKLSCAASGFTFNKYAINWVRQAPGKGLEWVARIRSKYNNYATYYADAVKDRFTISRDDSKNTVYLQMNNLKTEDTAVYYCARAGNFGSSYISYWAYWGQGTLVTVSSGGGGSGGGGSGGGGSQTVVTQEPSLTVSPGGTVTITCGSSTGAVTSGNYPNWVQKKPGQAPRGLIGGTKFLAPGTPARFSGSLSGGKAALTLSGVQPEDEAEYYCVLWYSNRWVFGSGTKLTVLGGGGDKTHTCPPCPAPELLGGPSVFLFPPKPKDTLMISRTPEVTCVVVDVSHEDPEVKFNWYVDGVEVHNAKTKPCEEQYGSTYRCVSVLTVLHQDWLNGKEYKCKVSNKALPAPIEKTISKAKGQPREPQVYTLPPSREEMTKNQVSLTCLVKGFYPSDIAVEWESNGQPENNYKTTPPVLDSDGSFFLYSKLTVDKSRWQQGNVFSCSVMHEALHNHYTQKSLSLSPGKGGGGSGGGGSGGGGSGGGGSGGGGSGGGGSDKTHTCPPCPAPELLGGPSVFLFPPKPKDTLMISRTPEVTCVVVDVSHEDPEVKFNWYVDGVEVHNAKTKPCEEQYGSTYRCVSVLTVLHQDWLNGKEYKCKVSNKALPAPIEKTISKAKGQPREPQVYTLPPSREEMTKNQVSLTCLVKGFYPSDIAVEWESNGQPENNYKTTPPVLDSDGSFFLYSKLTVDKSRWQQGNVFSCSVMHEALHNHYTQKSLSLSPGK

SEQ ID NO: 2823 - protein, 1226 aa, Artificial Sequence
  Synthetic
EVQLVESGGGLVQPGGSLTLSCAASGFTFHDYTMHWVRQTPGKCLEWLSGIGWNGYSKGYADSVKGRFTISRDNAKNSLFLQMNSLTSDDTALYYCVKDYHYGSGILDNYYGLDVWGQGTTVTVSSGGGGQGGGGQGGGGQEIVLTQSPATLSVSPGERATLSCRASQSISNNLAWYQQKPGQAPRLLIYGASSRATGIPDRFSGSGSGTEFTLTISSLQSEDFAVYYCQQYKNWPLTFGCGTKVDIKSGGGGQQVQLVQSGAEVKKPGASVKVSCKASGYTFNNYGISWVRQAPGQCLEWMGWISAYNGKTSYAQKFQGRVTMTTDTSTGTAYMELRSLRSDDTAVYYCARSTGDGEYWGQGTLVTVSSGGGGQGGGGQGGGGQEIVMTQSPATLSVSPGERATLSCRASQSVSSNLAWYQQKPGQAPRLLIYGASTRATGIPARFSGGGSGTEFTLTISSLQSEDFAVYYCQQYHTWPVLTFGCGTKVEIKSGGGGQEVQLVESGGGLVQPGGSLKLSCAASGFTFNKYAINWVRQAPGKGLEWVARIRSKYNNYATYYADAVKDRFTISRDDSKNTVYLQMNNLKTEDTAVYYCARAGNFGSSYISYWAYWGQGTLVTVSSGGGGQGGGGQGGGGQQTVVTQEPSLTVSPGGTVTITCGSSTGAVTSGNYPNWVQKKPGQAPRGLIGGTKFLAPGTPARFSGSLSGGKAALTLSGVQPEDEAEYYCVLWYSNRWVFGSGTKLTVLGGGGCPPCPAPELLGGPSVFLFPPKPKDTLMISRTPEVTCVVVDVSHEEPEVKFNWYVDGVEVHNAKTKPCEEQYGSTYRCVSVLTVLHQDWLNGKEYKCKVSNKALPAPIEKTISKAKGQPREPQVYTLPPSREEMTKNQVSLTCLVKGFYPSDIAVEWESNGQPENNYKTTPPVLDSDGSFFLYSKLTVDKSRWQQGNVFSCSVMHEALHNHYTQKSLSLSPGKGGGGQGGGGQGGGGQGGGGQGGGGQGGGGQCPPCPAPELLGGPSVFLFPPKPKDTLMISRTPEVTCVVVDVSHEEPEVKFNWYVDGVEVHNAKTKPCEEQYGSTYRCVSVLTVLHQDWLNGKEYKCKVSNKALPAPIEKTISKAKGQPREPQVYTLPPSREEMTKNQVSLTCLVKGFYPSDIAVEWESNGQPENNYKTTPPVLDSDGSFFLYSKLTVDKSRWQQGNVFSCSVMHEALHNHYTQKSLSLSPGK

SEQ ID NO: 2824 - protein, 502 aa, Artificial Sequence
  Synthetic
EVQLVESGGGLVQPGGSLTLSCAASGFTFHDYTMHWVRQTPGKCLEWLSGIGWNGYSKGYADSVKGRFTISRDNAKNSLFLQMNSLTSDDTALYYCVKDYHYGSGILDNYYGLDVWGQGTTVTVSSGGGGSGGGGSGGGGSEIVLTQSPATLSVSPGERATLSCRASQSISNNLAWYQQKPGQAPRLLIYGASSRATGIPDRFSGSGSGTEFTLTISSLQSEDFAVYYCQQYKNWPLTFGCGTKVDIKSGGGGSQVQLQQSGPGLVKPSQTLSLTCAISGDSVSSKSAAWNWIRQSPSGCLEWLGRTFYRSTWYNDYAVSVKSRITINPDTSKNQFSLQLNSVIPEDTAVYYCAREGQWLVYGMDVWGQGTTVTVSSGGGGSGGGGSGGGGSQSVLTQPPSASGTPGQRITISCSGSSSNIGSNTVNWYQQLPGTAPKLLIYRNNQRPSGVPDRFSGSKSGTSASLAISGLQSEDEADYYCAAWDDSLNGRVFGCGTKLTVL

SEQ ID NO: 2825 - protein, 502 aa, Artificial Sequence
  Synthetic
EVQLVESGGGLVQPGGSLTLSCAASGFTFHDYTMHWVRQTPGKCLEWLSGIGWNGYSKGYADSVKGRFTISRDNAKNSLFLQMNSLTSDDTALYYCVKDYHYGSGILDNYYGLDVWGQGTTVTVSSGGGGQGGGGQGGGGQEIVLTQSPATLSVSPGERATLSCRASQSISNNLAWYQQKPGQAPRLLIYGASSRATGIPDRFSGSGSGTEFTLTISSLQSEDFAVYYCQQYKNWPLTFGCGTKVDIKSGGGGQQVQLQQSGPGLVKPSQTLSLTCAISGDSVSSKSAAWNWIRQSPSGCLEWLGRTFYRSTWYNDYAVSVKSRITINPDTSKNQFSLQLNSVIPEDTAVYYCAREGQWLVYGMDVWGQGTTVTVSSGGGGQGGGGQGGGGQQSVLTQPPSASGTPGQRITISCSGSSSNIGSNTVNWYQQLPGTAPKLLIYRNNQRPSGVPDRFSGSKSGTSASLAISGLQSEDEADYYCAAWDDSLNGRVFGCGTKLTVL

SEQ ID NO: 2826 - protein, 757 aa, Artificial Sequence
  Synthetic
EVQLVESGGGLVQPGGSLTLSCAASGFTFHDYTMHWVRQTPGKCLEWLSGIGWNGYSKGYADSVKGRFTISRDNAKNSLFLQMNSLTSDDTALYYCVKDYHYGSGILDNYYGLDVWGQGTTVTVSSGGGGSGGGGSGGGGSEIVLTQSPATLSVSPGERATLSCRASQSISNNLAWYQQKPGQAPRLLIYGASSRATGIPDRFSGSGSGTEFTLTISSLQSEDFAVYYCQQYKNWPLTFGCGTKVDIKSGGGGSQVQLQQSGPGLVKPSQTLSLTCAISGDSVSSKSAAWNWIRQSPSGCLEWLGRTFYRSTWYNDYAVSVKSRITINPDTSKNQFSLQLNSVIPEDTAVYYCAREGQWLVYGMDVWGQGTTVTVSSGGGGSGGGGSGGGGSQSVLTQPPSASGTPGQRITISCSGSSSNIGSNTVNWYQQLPGTAPKLLIYRNNQRPSGVPDRFSGSKSGTSASLAISGLQSEDEADYYCAAWDDSLNGRVFGCGTKLTVLSGGGGSEVQLVESGGGLVQPGGSLKLSCAASGFTFNKYAMNWVRQAPGKGLEWVARIRSKYNNYATYYADSVKDRFTISRDDSKNTAYLQMNNLKTEDTAVYYCVRHGNFGNSYISYWAYWGQGTLVTVSSGGGGSGGGGSGGGGSQTVVTQEPSLTVSPGGTVTLTCGSSTGAVTSGNYPNWVQQKPGQAPRGLIGGTKFLAPGTPARFSGSLLGGKAALTLSGVQPEDEAEYYCVLWYSNRWVFGGGTKLTVL

SEQ ID NO: 2827 - protein, 757 aa, Artificial Sequence
  Synthetic
EVQLVESGGGLVQPGGSLTLSCAASGFTFHDYTMHWVRQTPGKCLEWLSGIGWNGYSKGYADSVKGRFTISRDNAKNSLFLQMNSLTSDDTALYYCVKDYHYGSGILDNYYGLDVWGQGTTVTVSSGGGGQGGGGQGGGGQEIVLTQSPATLSVSPGERATLSCRASQSISNNLAWYQQKPGQAPRLLIYGASSRATGIPDRFSGSGSGTEFTLTISSLQSEDFAVYYCQQYKNWPLTFGCGTKVDIKSGGGGQQVQLQQSGPGLVKPSQTLSLTCAISGDSVSSKSAAWNWIRQSPSGCLEWLGRTFYRSTWYNDYAVSVKSRITINPDTSKNQFSLQLNSVIPEDTAVYYCAREGQWLVYGMDVWGQGTTVTVSSGGGGQGGGGQGGGGQQSVLTQPPSASGTPGQRITISCSGSSSNIGSNTVNWYQQLPGTAPKLLIYRNNQRPSGVPDRFSGSKSGTSASLAISGLQSEDEADYYCAAWDDSLNGRVFGCGTKLTVLSGGGGQEVQLVESGGGLVQPGGSLKLSCAASGFTFNKYAMNWVRQAPGKGLEWVARIRSKYNNYATYYADSVKDRFTISRDDSKNTAYLQMNNLKTEDTAVYYCVRHGNFGNSYISYWAYWGQGTLVTVSSGGGGQGGGGQGGGGQQTVVTQEPSLTVSPGGTVTLTCGSSTGAVTSGNYPNWVQQKPGQAPRGLIGGTKFLAPGTPARFSGSLLGGKAALTLSGVQPEDEAEYYCVLWYSNRWVFGGGTKLTVL

SEQ ID NO: 2828 - protein, 757 aa, Artificial Sequence
  Synthetic
EVQLVESGGGLVQPGGSLTLSCAASGFTFHDYTMHWVRQTPGKCLEWLSGIGWNGYSKGYADSVKGRFTISRDNAKNSLFLQMNSLTSDDTALYYCVKDYHYGSGILDNYYGLDVWGQGTTVTVSSGGGGSGGGGSGGGGSEIVLTQSPATLSVSPGERATLSCRASQSISNNLAWYQQKPGQAPRLLIYGASSRATGIPDRFSGSGSGTEFTLTISSLQSEDFAVYYCQQYKNWPLTFGCGTKVDIKSGGGGSQVQLQQSGPGLVKPSQTLSLTCAISGDSVSSKSAAWNWIRQSPSGCLEWLGRTFYRSTWYNDYAVSVKSRITINPDTSKNQFSLQLNSVIPEDTAVYYCAREGQWLVYGMDVWGQGTTVTVSSGGGGSGGGGSGGGGSQSVLTQPPSASGTPGQRITISCSGSSSNIGSNTVNWYQQLPGTAPKLLIYRNNQRPSGVPDRFSGSKSGTSASLAISGLQSEDEADYYCAAWDDSLNGRVFGCGTKLTVLSGGGGSEVQLVESGGGLVQPGGSLKLSCAASGFTFNKYAINWVRQAPGKGLEWVARIRSKYNNYATYYADAVKDRFTISRDDSKNTVYLQMNNLKTEDTAVYYCARAGNFGSSYISYWAYWGQGTLVTVSSGGGGSGGGGSGGGGSQTVVTQEPSLTVSPGGTVTITCGSSTGAVTSGNYPNWVQKKPGQAPRGLIGGTKFLAPGTPARFSGSLSGGKAALTLSGVQPEDEAEYYCVLWYSNRWVFGSGTKLTVL

SEQ ID NO: 2829 - protein, 757 aa, Artificial Sequence
  Synthetic
EVQLVESGGGLVQPGGSLTLSCAASGFTFHDYTMHWVRQTPGKCLEWLSGIGWNGYSKGYADSVKGRFTISRDNAKNSLFLQMNSLTSDDTALYYCVKDYHYGSGILDNYYGLDVWGQGTTVTVSSGGGGQGGGGQGGGGQEIVLTQSPATLSVSPGERATLSCRASQSISNNLAWYQQKPGQAPRLLIYGASSRATGIPDRFSGSGSGTEFTLTISSLQSEDFAVYYCQQYKNWPLTFGCGTKVDIKSGGGGQQVQLQQSGPGLVKPSQTLSLTCAISGDSVSSKSAAWNWIRQSPSGCLEWLGRTFYRSTWYNDYAVSVKSRITINPDTSKNQFSLQLNSVIPEDTAVYYCAREGQWLVYGMDVWGQGTTVTVSSGGGGQGGGGQGGGGQQSVLTQPPSASGTPGQRITISCSGSSSNIGSNTVNWYQQLPGTAPKLLIYRNNQRPSGVPDRFSGSKSGTSASLAISGLQSEDEADYYCAAWDDSLNGRVFGCGTKLTVLSGGGGQEVQLVESGGGLVQPGGSLKLSCAASGFTFNKYAINWVRQAPGKGLEWVARIRSKYNNYATYYADAVKDRFTISRDDSKNTVYLQMNNLKTEDTAVYYCARAGNFGSSYISYWAYWGQGTLVTVSSGGGGQGGGGQGGGGQQTVVTQEPSLTVSPGGTVTITCGSSTGAVTSGNYPNWVQKKPGQAPRGLIGGTKFLAPGTPARFSGSLSGGKAALTLSGVQPEDEAEYYCVLWYSNRWVFGSGTKLTVL

SEQ ID NO: 2830 - protein, 1245 aa, Artificial Sequence
  Synthetic
EVQLVESGGGLVQPGGSLTLSCAASGFTFHDYTMHWVRQTPGKCLEWLSGIGWNGYSKGYADSVKGRFTISRDNAKNSLFLQMNSLTSDDTALYYCVKDYHYGSGILDNYYGLDVWGQGTTVTVSSGGGGSGGGGSGGGGSEIVLTQSPATLSVSPGERATLSCRASQSISNNLAWYQQKPGQAPRLLIYGASSRATGIPDRFSGSGSGTEFTLTISSLQSEDFAVYYCQQYKNWPLTFGCGTKVDIKSGGGGSQVQLQQSGPGLVKPSQTLSLTCAISGDSVSSKSAAWNWIRQSPSGCLEWLGRTFYRSTWYNDYAVSVKSRITINPDTSKNQFSLQLNSVIPEDTAVYYCAREGQWLVYGMDVWGQGTTVTVSSGGGGSGGGGSGGGGSQSVLTQPPSASGTPGQRITISCSGSSSNIGSNTVNWYQQLPGTAPKLLIYRNNQRPSGVPDRFSGSKSGTSASLAISGLQSEDEADYYCAAWDDSLNGRVFGCGTKLTVLSGGGGSEVQLVESGGGLVQPGGSLKLSCAASGFTFNKYAMNWVRQAPGKGLEWVARIRSKYNNYATYYADSVKDRFTISRDDSKNTAYLQMNNLKTEDTAVYYCVRHGNFGNSYISYWAYWGQGTLVTVSSGGGGSGGGGSGGGGSQTVVTQEPSLTVSPGGTVTLTCGSSTGAVTSGNYPNWVQQKPGQAPRGLIGGTKFLAPGTPARFSGSLLGGKAALTLSGVQPEDEAEYYCVLWYSNRWVFGGGTKLTVLGGGGDKTHTCPPCPAPELLGGPSVFLFPPKPKDTLMISRTPEVTCVVVDVSHEDPEVKFNWYVDGVEVHNAKTKPCEEQYGSTYRCVSVLTVLHQDWLNGKEYKCKVSNKALPAPIEKTISKAKGQPREPQVYTLPPSREEMTKNQVSLTCLVKGFYPSDIAVEWESNGQPENNYKTTPPVLDSDGSFFLYSKLTVDKSRWQQGNVFSCSVMHEALHNHYTQKSLSLSPGKGGGGSGGGGSGGGGSGGGGSGGGGSGGGGSDKTHTCPPCPAPELLGGPSVFLFPPKPKDTLMISRTPEVTCVVVDVSHEDPEVKFNWYVDGVEVHNAKTKPCEEQYGSTYRCVSVLTVLHQDWLNGKEYKCKVSNKALPAPIEKTISKAKGQPREPQVYTLPPSREEMTKNQVSLTCLVKGFYPSDIAVEWESNGQPENNYKTTPPVLDSDGSFFLYSKLTVDKSRWQQGNVFSCSVMHEALHNHYTQKSLSLSPGK

SEQ ID NO: 2831 - protein, 1235 aa, Artificial Sequence
  Synthetic
EVQLVESGGGLVQPGGSLTLSCAASGFTFHDYTMHWVRQTPGKCLEWLSGIGWNGYSKGYADSVKGRFTISRDNAKNSLFLQMNSLTSDDTALYYCVKDYHYGSGILDNYYGLDVWGQGTTVTVSSGGGGQGGGGQGGGGQEIVLTQSPATLSVSPGERATLSCRASQSISNNLAWYQQKPGQAPRLLIYGASSRATGIPDRFSGSGSGTEFTLTISSLQSEDFAVYYCQQYKNWPLTFGCGTKVDIKSGGGGQQVQLQQSGPGLVKPSQTLSLTCAISGDSVSSKSAAWNWIRQSPSGCLEWLGRTFYRSTWYNDYAVSVKSRITINPDTSKNQFSLQLNSVIPEDTAVYYCAREGQWLVYGMDVWGQGTTVTVSSGGGGQGGGGQGGGGQQSVLTQPPSASGTPGQRITISCSGSSSNIGSNTVNWYQQLPGTAPKLLIYRNNQRPSGVPDRFSGSKSGTSASLAISGLQSEDEADYYCAAWDDSLNGRVFGCGTKLTVLSGGGGQEVQLVESGGGLVQPGGSLKLSCAASGFTFNKYAMNWVRQAPGKGLEWVARIRSKYNNYATYYADSVKDRFTISRDDSKNTAYLQMNNLKTEDTAVYYCVRHGNFGNSYISYWAYWGQGTLVTVSSGGGGQGGGGQGGGGQQTVVTQEPSLTVSPGGTVTLTCGSSTGAVTSGNYPNWVQQKPGQAPRGLIGGTKFLAPGTPARFSGSLLGGKAALTLSGVQPEDEAEYYCVLWYSNRWVFGGGTKLTVLGGGGCPPCPAPELLGGPSVFLFPPKPKDTLMISRTPEVTCVVVDVSHEEPEVKFNWYVDGVEVHNAKTKPCEEQYGSTYRCVSVLTVLHQDWLNGKEYKCKVSNKALPAPIEKTISKAKGQPREPQVYTLPPSREEMTKNQVSLTCLVKGFYPSDIAVEWESNGQPENNYKTTPPVLDSDGSFFLYSKLTVDKSRWQQGNVFSCSVMHEALHNHYTQKSLSLSPGKGGGGQGGGGQGGGGQGGGGQGGGGQGGGGQCPPCPAPELLGGPSVFLFPPKPKDTLMISRTPEVTCVVVDVSHEEPEVKFNWYVDGVEVHNAKTKPCEEQYGSTYRCVSVLTVLHQDWLNGKEYKCKVSNKALPAPIEKTISKAKGQPREPQVYTLPPSREEMTKNQVSLTCLVKGFYPSDIAVEWESNGQPENNYKTTPPVLDSDGSFFLYSKLTVDKSRWQQGNVFSCSVMHEALHNHYTQKSLSLSPGK

SEQ ID NO: 2832 - protein, 1245 aa, Artificial Sequence
  Synthetic
EVQLVESGGGLVQPGGSLTLSCAASGFTFHDYTMHWVRQTPGKCLEWLSGIGWNGYSKGYADSVKGRFTISRDNAKNSLFLQMNSLTSDDTALYYCVKDYHYGSGILDNYYGLDVWGQGTTVTVSSGGGGSGGGGSGGGGSEIVLTQSPATLSVSPGERATLSCRASQSISNNLAWYQQKPGQAPRLLIYGASSRATGIPDRFSGSGSGTEFTLTISSLQSEDFAVYYCQQYKNWPLTFGCGTKVDIKSGGGGSQVQLQQSGPGLVKPSQTLSLTCAISGDSVSSKSAAWNWIRQSPSGCLEWLGRTFYRSTWYNDYAVSVKSRITINPDTSKNQFSLQLNSVIPEDTAVYYCAREGQWLVYGMDVWGQGTTVTVSSGGGGSGGGGSGGGGSQSVLTQPPSASGTPGQRITISCSGSSSNIGSNTVNWYQQLPGTAPKLLIYRNNQRPSGVPDRFSGSKSGTSASLAISGLQSEDEADYYCAAWDDSLNGRVFGCGTKLTVLSGGGGSEVQLVESGGGLVQPGGSLKLSCAASGFTFNKYAINWVRQAPGKGLEWVARIRSKYNNYATYYADAVKDRFTISRDDSKNTVYLQMNNLKTEDTAVYYCARAGNFGSSYISYWAYWGQGTLVTVSSGGGGSGGGGSGGGGSQTVVTQEPSLTVSPGGTVTITCGSSTGAVTSGNYPNWVQKKPGQAPRGLIGGTKFLAPGTPARFSGSLSGGKAALTLSGVQPEDEAEYYCVLWYSNRWVFGSGTKLTVLGGGGDKTHTCPPCPAPELLGGPSVFLFPPKPKDTLMISRTPEVTCVVVDVSHEDPEVKFNWYVDGVEVHNAKTKPCEEQYGSTYRCVSVLTVLHQDWLNGKEYKCKVSNKALPAPIEKTISKAKGQPREPQVYTLPPSREEMTKNQVSLTCLVKGFYPSDIAVEWESNGQPENNYKTTPPVLDSDGSFFLYSKLTVDKSRWQQGNVFSCSVMHEALHNHYTQKSLSLSPGKGGGGSGGGGSGGGGSGGGGSGGGGSGGGGSDKTHTCPPCPAPELLGGPSVFLFPPKPKDTLMISRTPEVTCVVVDVSHEDPEVKFNWYVDGVEVHNAKTKPCEEQYGSTYRCVSVLTVLHQDWLNGKEYKCKVSNKALPAPIEKTISKAKGQPREPQVYTLPPSREEMTKNQVSLTCLVKGFYPSDIAVEWESNGQPENNYKTTPPVLDSDGSFFLYSKLTVDKSRWQQGNVFSCSVMHEALHNHYTQKSLSLSPGK

SEQ ID NO: 2833 - protein, 1235 aa, Artificial Sequence
  Synthetic
EVQLVESGGGLVQPGGSLTLSCAASGFTFHDYTMHWVRQTPGKCLEWLSGIGWNGYSKGYADSVKGRFTISRDNAKNSLFLQMNSLTSDDTALYYCVKDYHYGSGILDNYYGLDVWGQGTTVTVSSGGGGQGGGGQGGGGQEIVLTQSPATLSVSPGERATLSCRASQSISNNLAWYQQKPGQAPRLLIYGASSRATGIPDRFSGSGSGTEFTLTISSLQSEDFAVYYCQQYKNWPLTFGCGTKVDIKSGGGGQQVQLQQSGPGLVKPSQTLSLTCAISGDSVSSKSAAWNWIRQSPSGCLEWLGRTFYRSTWYNDYAVSVKSRITINPDTSKNQFSLQLNSVIPEDTAVYYCAREGQWLVYGMDVWGQGTTVTVSSGGGGQGGGGQGGGGQQSVLTQPPSASGTPGQRITISCSGSSSNIGSNTVNWYQQLPGTAPKLLIYRNNQRPSGVPDRFSGSKSGTSASLAISGLQSEDEADYYCAAWDDSLNGRVFGCGTKLTVLSGGGGQEVQLVESGGGLVQPGGSLKLSCAASGFTFNKYAINWVRQAPGKGLEWVARIRSKYNNYATYYADAVKDRFTISRDDSKNTVYLQMNNLKTEDTAVYYCARAGNFGSSYISYWAYWGQGTLVTVSSGGGGQGGGGQGGGGQQTVVTQEPSLTVSPGGTVTITCGSSTGAVTSGNYPNWVQKKPGQAPRGLIGGTKFLAPGTPARFSGSLSGGKAALTLSGVQPEDEAEYYCVLWYSNRWVFGSGTKLTVLGGGGCPPCPAPELLGGPSVFLFPPKPKDTLMISRTPEVTCVVVDVSHEEPEVKFNWYVDGVEVHNAKTKPCEEQYGSTYRCVSVLTVLHQDWLNGKEYKCKVSNKALPAPIEKTISKAKGQPREPQVYTLPPSREEMTKNQVSLTCLVKGFYPSDIAVEWESNGQPENNYKTTPPVLDSDGSFFLYSKLTVDKSRWQQGNVFSCSVMHEALHNHYTQKSLSLSPGKGGGGQGGGGQGGGGQGGGGQGGGGQGGGGQCPPCPAPELLGGPSVFLFPPKPKDTLMISRTPEVTCVVVDVSHEEPEVKFNWYVDGVEVHNAKTKPCEEQYGSTYRCVSVLTVLHQDWLNGKEYKCKVSNKALPAPIEKTISKAKGQPREPQVYTLPPSREEMTKNQVSLTCLVKGFYPSDIAVEWESNGQPENNYKTTPPVLDSDGSFFLYSKLTVDKSRWQQGNVFSCSVMHEALHNHYTQKSLSLSPGK

SEQ ID NO: 2834 - protein, 496 aa, Artificial Sequence
  Synthetic
EVQLVESGGGLVQPGGSLTLSCAASGFTFHDYTMHWVRQTPGKCLEWLSGIGWNGYSKGYADSVKGRFTISRDNAKNSLFLQMNSLTSDDTALYYCVKDYHYGSGILDNYYGLDVWGQGTTVTVSSGGGGSGGGGSGGGGSEIVLTQSPATLSVSPGERATLSCRASQSISNNLAWYQQKPGQAPRLLIYGASSRATGIPDRFSGSGSGTEFTLTISSLQSEDFAVYYCQQYKNWPLTFGCGTKVDIKSGGGGSQVQLVQSGAEVKKPGASVKVSCKASGYTFNNYGISWVRQAPGQCLEWMGWISAYNGKTSYAQKFQGRVTMTTDTSTGTAYMELRSLRSDDTAVYYCARDLDFLTGWEYWGQGTLVTVSSGGGGSGGGGSGGGGSEIVLTQSPATLSVSPGERATLSCRASQSVNSNLAWYQQKPGQAPRLLIYGASTRATGIPARFSGSGSGTEFTLTISSLQSEDFAVYYCQQYHTWPVLTFGCGTKVEIK

SEQ ID NO: 2835 - protein, 496 aa, Artificial Sequence
  Synthetic
EVQLVESGGGLVQPGGSLTLSCAASGFTFHDYTMHWVRQTPGKCLEWLSGIGWNGYSKGYADSVKGRFTISRDNAKNSLFLQMNSLTSDDTALYYCVKDYHYGSGILDNYYGLDVWGQGTTVTVSSGGGGQGGGGQGGGGQEIVLTQSPATLSVSPGERATLSCRASQSISNNLAWYQQKPGQAPRLLIYGASSRATGIPDRFSGSGSGTEFTLTISSLQSEDFAVYYCQQYKNWPLTFGCGTKVDIKSGGGGQQVQLVQSGAEVKKPGASVKVSCKASGYTFNNYGISWVRQAPGQCLEWMGWISAYNGKTSYAQKFQGRVTMTTDTSTGTAYMELRSLRSDDTAVYYCARDLDFLTGWEYWGQGTLVTVSSGGGGQGGGGQGGGGQEIVLTQSPATLSVSPGERATLSCRASQSVNSNLAWYQQKPGQAPRLLIYGASTRATGIPARFSGSGSGTEFTLTISSLQSEDFAVYYCQQYHTWPVLTFGCGTKVEIK

SEQ ID NO: 2836 - protein, 751 aa, Artificial Sequence
  Synthetic
EVQLVESGGGLVQPGGSLTLSCAASGFTFHDYTMHWVRQTPGKCLEWLSGIGWNGYSKGYADSVKGRFTISRDNAKNSLFLQMNSLTSDDTALYYCVKDYHYGSGILDNYYGLDVWGQGTTVTVSSGGGGSGGGGSGGGGSEIVLTQSPATLSVSPGERATLSCRASQSISNNLAWYQQKPGQAPRLLIYGASSRATGIPDRFSGSGSGTEFTLTISSLQSEDFAVYYCQQYKNWPLTFGCGTKVDIKSGGGGSQVQLVQSGAEVKKPGASVKVSCKASGYTFNNYGISWVRQAPGQCLEWMGWISAYNGKTSYAQKFQGRVTMTTDTSTGTAYMELRSLRSDDTAVYYCARDLDFLTGWEYWGQGTLVTVSSGGGGSGGGGSGGGGSEIVLTQSPATLSVSPGERATLSCRASQSVNSNLAWYQQKPGQAPRLLIYGASTRATGIPARFSGSGSGTEFTLTISSLQSEDFAVYYCQQYHTWPVLTFGCGTKVEIKSGGGGSEVQLVESGGGLVQPGGSLKLSCAASGFTFNKYAMNWVRQAPGKGLEWVARIRSKYNNYATYYADSVKDRFTISRDDSKNTAYLQMNNLKTEDTAVYYCVRHGNFGNSYISYWAYWGQGTLVTVSSGGGGSGGGGSGGGGSQTVVTQEPSLTVSPGGTVTLTCGSSTGAVTSGNYPNWVQQKPGQAPRGLIGGTKFLAPGTPARFSGSLLGGKAALTLSGVQPEDEAEYYCVLWYSNRWVFGGGTKLTVL

SEQ ID NO: 2837 - protein, 751 aa, Artificial Sequence
  Synthetic
EVQLVESGGGLVQPGGSLTLSCAASGFTFHDYTMHWVRQTPGKCLEWLSGIGWNGYSKGYADSVKGRFTISRDNAKNSLFLQMNSLTSDDTALYYCVKDYHYGSGILDNYYGLDVWGQGTTVTVSSGGGGQGGGGQGGGGQEIVLTQSPATLSVSPGERATLSCRASQSISNNLAWYQQKPGQAPRLLIYGASSRATGIPDRFSGSGSGTEFTLTISSLQSEDFAVYYCQQYKNWPLTFGCGTKVDIKSGGGGQQVQLVQSGAEVKKPGASVKVSCKASGYTFNNYGISWVRQAPGQCLEWMGWISAYNGKTSYAQKFQGRVTMTTDTSTGTAYMELRSLRSDDTAVYYCARDLDFLTGWEYWGQGTLVTVSSGGGGQGGGGQGGGGQEIVLTQSPATLSVSPGERATLSCRASQSVNSNLAWYQQKPGQAPRLLIYGASTRATGIPARFSGSGSGTEFTLTISSLQSEDFAVYYCQQYHTWPVLTFGCGTKVEIKSGGGGQEVQLVESGGGLVQPGGSLKLSCAASGFTFNKYAMNWVRQAPGKGLEWVARIRSKYNNYATYYADSVKDRFTISRDDSKNTAYLQMNNLKTEDTAVYYCVRHGNFGNSYISYWAYWGQGTLVTVSSGGGGQGGGGQGGGGQQTVVTQEPSLTVSPGGTVTLTCGSSTGAVTSGNYPNWVQQKPGQAPRGLIGGTKFLAPGTPARFSGSLLGGKAALTLSGVQPEDEAEYYCVLWYSNRWVFGGGTKLTVL

SEQ ID NO: 2838 - protein, 751 aa, Artificial Sequence
  Synthetic
EVQLVESGGGLVQPGGSLTLSCAASGFTFHDYTMHWVRQTPGKCLEWLSGIGWNGYSKGYADSVKGRFTISRDNAKNSLFLQMNSLTSDDTALYYCVKDYHYGSGILDNYYGLDVWGQGTTVTVSSGGGGSGGGGSGGGGSEIVLTQSPATLSVSPGERATLSCRASQSISNNLAWYQQKPGQAPRLLIYGASSRATGIPDRFSGSGSGTEFTLTISSLQSEDFAVYYCQQYKNWPLTFGCGTKVDIKSGGGGSQVQLVQSGAEVKKPGASVKVSCKASGYTFNNYGISWVRQAPGQCLEWMGWISAYNGKTSYAQKFQGRVTMTTDTSTGTAYMELRSLRSDDTAVYYCARDLDFLTGWEYWGQGTLVTVSSGGGGSGGGGSGGGGSEIVLTQSPATLSVSPGERATLSCRASQSVNSNLAWYQQKPGQAPRLLIYGASTRATGIPARFSGSGSGTEFTLTISSLQSEDFAVYYCQQYHTWPVLTFGCGTKVEIKSGGGGSEVQLVESGGGLVQPGGSLKLSCAASGFTFNKYAINWVRQAPGKGLEWVARIRSKYNNYATYYADAVKDRFTISRDDSKNTVYLQMNNLKTEDTAVYYCARAGNFGSSYISYWAYWGQGTLVTVSSGGGGSGGGGSGGGGSQTVVTQEPSLTVSPGGTVTITCGSSTGAVTSGNYPNWVQKKPGQAPRGLIGGTKFLAPGTPARFSGSLSGGKAALTLSGVQPEDEAEYYCVLWYSNRWVFGSGTKLTVL

SEQ ID NO: 2839 - protein, 751 aa, Artificial Sequence
  Synthetic
EVQLVESGGGLVQPGGSLTLSCAASGFTFHDYTMHWVRQTPGKCLEWLSGIGWNGYSKGYADSVKGRFTISRDNAKNSLFLQMNSLTSDDTALYYCVKDYHYGSGILDNYYGLDVWGQGTTVTVSSGGGGQGGGGQGGGGQEIVLTQSPATLSVSPGERATLSCRASQSISNNLAWYQQKPGQAPRLLIYGASSRATGIPDRFSGSGSGTEFTLTISSLQSEDFAVYYCQQYKNWPLTFGCGTKVDIKSGGGGQQVQLVQSGAEVKKPGASVKVSCKASGYTFNNYGISWVRQAPGQCLEWMGWISAYNGKTSYAQKFQGRVTMTTDTSTGTAYMELRSLRSDDTAVYYCARDLDFLTGWEYWGQGTLVTVSSGGGGQGGGGQGGGGQEIVLTQSPATLSVSPGERATLSCRASQSVNSNLAWYQQKPGQAPRLLIYGASTRATGIPARFSGSGSGTEFTLTISSLQSEDFAVYYCQQYHTWPVLTFGCGTKVEIKSGGGGQEVQLVESGGGLVQPGGSLKLSCAASGFTFNKYAINWVRQAPGKGLEWVARIRSKYNNYATYYADAVKDRFTISRDDSKNTVYLQMNNLKTEDTAVYYCARAGNFGSSYISYWAYWGQGTLVTVSSGGGGQGGGGQGGGGQQTVVTQEPSLTVSPGGTVTITCGSSTGAVTSGNYPNWVQKKPGQAPRGLIGGTKFLAPGTPARFSGSLSGGKAALTLSGVQPEDEAEYYCVLWYSNRWVFGSGTKLTVL

SEQ ID NO: 2840 - protein, 1239 aa, Artificial Sequence
  Synthetic
EVQLVESGGGLVQPGGSLTLSCAASGFTFHDYTMHWVRQTPGKCLEWLSGIGWNGYSKGYADSVKGRFTISRDNAKNSLFLQMNSLTSDDTALYYCVKDYHYGSGILDNYYGLDVWGQGTTVTVSSGGGGSGGGGSGGGGSEIVLTQSPATLSVSPGERATLSCRASQSISNNLAWYQQKPGQAPRLLIYGASSRATGIPDRFSGSGSGTEFTLTISSLQSEDFAVYYCQQYKNWPLTFGCGTKVDIKSGGGGSQVQLVQSGAEVKKPGASVKVSCKASGYTFNNYGISWVRQAPGQCLEWMGWISAYNGKTSYAQKFQGRVTMTTDTSTGTAYMELRSLRSDDTAVYYCARDLDFLTGWEYWGQGTLVTVSSGGGGSGGGGSGGGGSEIVLTQSPATLSVSPGERATLSCRASQSVNSNLAWYQQKPGQAPRLLIYGASTRATGIPARFSGSGSGTEFTLTISSLQSEDFAVYYCQQYHTWPVLTFGCGTKVEIKSGGGGSEVQLVESGGGLVQPGGSLKLSCAASGFTFNKYAMNWVRQAPGKGLEWVARIRSKYNNYATYYADSVKDRFTISRDDSKNTAYLQMNNLKTEDTAVYYCVRHGNFGNSYISYWAYWGQGTLVTVSSGGGGSGGGGSGGGGSQTVVTQEPSLTVSPGGTVTLTCGSSTGAVTSGNYPNWVQQKPGQAPRGLIGGTKFLAPGTPARFSGSLLGGKAALTLSGVQPEDEAEYYCVLWYSNRWVFGGGTKLTVLGGGGDKTHTCPPCPAPELLGGPSVFLFPPKPKDTLMISRTPEVTCVVVDVSHEDPEVKFNWYVDGVEVHNAKTKPCEEQYGSTYRCVSVLTVLHQDWLNGKEYKCKVSNKALPAPIEKTISKAKGQPREPQVYTLPPSREEMTKNQVSLTCLVKGFYPSDIAVEWESNGQPENNYKTTPPVLDSDGSFFLYSKLTVDKSRWQQGNVFSCSVMHEALHNHYTQKSLSLSPGKGGGGSGGGGSGGGGSGGGGSGGGGSGGGGSDKTHTCPPCPAPELLGGPSVFLFPPKPKDTLMISRTPEVTCVVVDVSHEDPEVKFNWYVDGVEVHNAKTKPCEEQYGSTYRCVSVLTVLHQDWLNGKEYKCKVSNKALPAPIEKTISKAKGQPREPQVYTLPPSREEMTKNQVSLTCLVKGFYPSDIAVEWESNGQPENNYKTTPPVLDSDGSFFLYSKLTVDKSRWQQGNVFSCSVMHEALHNHYTQKSLSLSPGK

SEQ ID NO: 2841 - protein, 1229 aa, Artificial Sequence
  Synthetic
EVQLVESGGGLVQPGGSLTLSCAASGFTFHDYTMHWVRQTPGKCLEWLSGIGWNGYSKGYADSVKGRFTISRDNAKNSLFLQMNSLTSDDTALYYCVKDYHYGSGILDNYYGLDVWGQGTTVTVSSGGGGQGGGGQGGGGQEIVLTQSPATLSVSPGERATLSCRASQSISNNLAWYQQKPGQAPRLLIYGASSRATGIPDRFSGSGSGTEFTLTISSLQSEDFAVYYCQQYKNWPLTFGCGTKVDIKSGGGGQQVQLVQSGAEVKKPGASVKVSCKASGYTFNNYGISWVRQAPGQCLEWMGWISAYNGKTSYAQKFQGRVTMTTDTSTGTAYMELRSLRSDDTAVYYCARDLDFLTGWEYWGQGTLVTVSSGGGGQGGGGQGGGGQEIVLTQSPATLSVSPGERATLSCRASQSVNSNLAWYQQKPGQAPRLLIYGASTRATGIPARFSGSGSGTEFTLTISSLQSEDFAVYYCQQYHTWPVLTFGCGTKVEIKSGGGGQEVQLVESGGGLVQPGGSLKLSCAASGFTFNKYAMNWVRQAPGKGLEWVARIRSKYNNYATYYADSVKDRFTISRDDSKNTAYLQMNNLKTEDTAVYYCVRHGNFGNSYISYWAYWGQGTLVTVSSGGGGQGGGGQGGGGQQTVVTQEPSLTVSPGGTVTLTCGSSTGAVTSGNYPNWVQQKPGQAPRGLIGGTKFLAPGTPARFSGSLLGGKAALTLSGVQPEDEAEYYCVLWYSNRWVFGGGTKLTVLGGGGCPPCPAPELLGGPSVFLFPPKPKDTLMISRTPEVTCVVVDVSHEEPEVKFNWYVDGVEVHNAKTKPCEEQYGSTYRCVSVLTVLHQDWLNGKEYKCKVSNKALPAPIEKTISKAKGQPREPQVYTLPPSREEMTKNQVSLTCLVKGFYPSDIAVEWESNGQPENNYKTTPPVLDSDGSFFLYSKLTVDKSRWQQGNVFSCSVMHEALHNHYTQKSLSLSPGKGGGGQGGGGQGGGGQGGGGQGGGGQGGGGQCPPCPAPELLGGPSVFLFPPKPKDTLMISRTPEVTCVVVDVSHEEPEVKFNWYVDGVEVHNAKTKPCEEQYGSTYRCVSVLTVLHQDWLNGKEYKCKVSNKALPAPIEKTISKAKGQPREPQVYTLPPSREEMTKNQVSLTCLVKGFYPSDIAVEWESNGQPENNYKTTPPVLDSDGSFFLYSKLTVDKSRWQQGNVFSCSVMHEALHNHYTQKSLSLSPGK

SEQ ID NO: 2842 - protein, 1239 aa, Artificial Sequence
  Synthetic
EVQLVESGGGLVQPGGSLTLSCAASGFTFHDYTMHWVRQTPGKCLEWLSGIGWNGYSKGYADSVKGRFTISRDNAKNSLFLQMNSLTSDDTALYYCVKDYHYGSGILDNYYGLDVWGQGTTVTVSSGGGGSGGGGSGGGGSEIVLTQSPATLSVSPGERATLSCRASQSISNNLAWYQQKPGQAPRLLIYGASSRATGIPDRFSGSGSGTEFTLTISSLQSEDFAVYYCQQYKNWPLTFGCGTKVDIKSGGGGSQVQLVQSGAEVKKPGASVKVSCKASGYTFNNYGISWVRQAPGQCLEWMGWISAYNGKTSYAQKFQGRVTMTTDTSTGTAYMELRSLRSDDTAVYYCARDLDFLTGWEYWGQGTLVTVSSGGGGSGGGGSGGGGSEIVLTQSPATLSVSPGERATLSCRASQSVNSNLAWYQQKPGQAPRLLIYGASTRATGIPARFSGSGSGTEFTLTISSLQSEDFAVYYCQQYHTWPVLTFGCGTKVEIKSGGGGSEVQLVESGGGLVQPGGSLKLSCAASGFTFNKYAINWVRQAPGKGLEWVARIRSKYNNYATYYADAVKDRFTISRDDSKNTVYLQMNNLKTEDTAVYYCARAGNFGSSYISYWAYWGQGTLVTVSSGGGGSGGGGSGGGGSQTVVTQEPSLTVSPGGTVTITCGSSTGAVTSGNYPNWVQKKPGQAPRGLIGGTKFLAPGTPARFSGSLSGGKAALTLSGVQPEDEAEYYCVLWYSNRWVFGSGTKLTVLGGGGDKTHTCPPCPAPELLGGPSVFLFPPKPKDTLMISRTPEVTCVVVDVSHEDPEVKFNWYVDGVEVHNAKTKPCEEQYGSTYRCVSVLTVLHQDWLNGKEYKCKVSNKALPAPIEKTISKAKGQPREPQVYTLPPSREEMTKNQVSLTCLVKGFYPSDIAVEWESNGQPENNYKTTPPVLDSDGSFFLYSKLTVDKSRWQQGNVFSCSVMHEALHNHYTQKSLSLSPGKGGGGSGGGGSGGGGSGGGGSGGGGSGGGGSDKTHTCPPCPAPELLGGPSVFLFPPKPKDTLMISRTPEVTCVVVDVSHEDPEVKFNWYVDGVEVHNAKTKPCEEQYGSTYRCVSVLTVLHQDWLNGKEYKCKVSNKALPAPIEKTISKAKGQPREPQVYTLPPSREEMTKNQVSLTCLVKGFYPSDIAVEWESNGQPENNYKTTPPVLDSDGSFFLYSKLTVDKSRWQQGNVFSCSVMHEALHNHYTQKSLSLSPGK

SEQ ID NO: 2843 - protein, 1229 aa, Artificial Sequence
  Synthetic
EVQLVESGGGLVQPGGSLTLSCAASGFTFHDYTMHWVRQTPGKCLEWLSGIGWNGYSKGYADSVKGRFTISRDNAKNSLFLQMNSLTSDDTALYYCVKDYHYGSGILDNYYGLDVWGQGTTVTVSSGGGGQGGGGQGGGGQEIVLTQSPATLSVSPGERATLSCRASQSISNNLAWYQQKPGQAPRLLIYGASSRATGIPDRFSGSGSGTEFTLTISSLQSEDFAVYYCQQYKNWPLTFGCGTKVDIKSGGGGQQVQLVQSGAEVKKPGASVKVSCKASGYTFNNYGISWVRQAPGQCLEWMGWISAYNGKTSYAQKFQGRVTMTTDTSTGTAYMELRSLRSDDTAVYYCARDLDFLTGWEYWGQGTLVTVSSGGGGQGGGGQGGGGQEIVLTQSPATLSVSPGERATLSCRASQSVNSNLAWYQQKPGQAPRLLIYGASTRATGIPARFSGSGSGTEFTLTISSLQSEDFAVYYCQQYHTWPVLTFGCGTKVEIKSGGGGQEVQLVESGGGLVQPGGSLKLSCAASGFTFNKYAINWVRQAPGKGLEWVARIRSKYNNYATYYADAVKDRFTISRDDSKNTVYLQMNNLKTEDTAVYYCARAGNFGSSYISYWAYWGQGTLVTVSSGGGGQGGGGQGGGGQQTVVTQEPSLTVSPGGTVTITCGSSTGAVTSGNYPNWVQKKPGQAPRGLIGGTKFLAPGTPARFSGSLSGGKAALTLSGVQPEDEAEYYCVLWYSNRWVFGSGTKLTVLGGGGCPPCPAPELLGGPSVFLFPPKPKDTLMISRTPEVTCVVVDVSHEEPEVKFNWYVDGVEVHNAKTKPCEEQYGSTYRCVSVLTVLHQDWLNGKEYKCKVSNKALPAPIEKTISKAKGQPREPQVYTLPPSREEMTKNQVSLTCLVKGFYPSDIAVEWESNGQPENNYKTTPPVLDSDGSFFLYSKLTVDKSRWQQGNVFSCSVMHEALHNHYTQKSLSLSPGKGGGGQGGGGQGGGGQGGGGQGGGGQGGGGQCPPCPAPELLGGPSVFLFPPKPKDTLMISRTPEVTCVVVDVSHEEPEVKFNWYVDGVEVHNAKTKPCEEQYGSTYRCVSVLTVLHQDWLNGKEYKCKVSNKALPAPIEKTISKAKGQPREPQVYTLPPSREEMTKNQVSLTCLVKGFYPSDIAVEWESNGQPENNYKTTPPVLDSDGSFFLYSKLTVDKSRWQQGNVFSCSVMHEALHNHYTQKSLSLSPGK

SEQ ID NO: 2844 - protein, 499 aa, Artificial Sequence
  Synthetic
EVQLVESGGGLVQPGGSLTLSCAASGFTFHDYTMHWVRQTPGKCLEWLSGIGWNGYSKGYADSVKGRFTISRDNAKNSLFLQMNSLTSDDTALYYCVKDYHYGSGILDNYYGLDVWGQGTTVTVSSGGGGSGGGGSGGGGSEIVLTQSPATLSVSPGERATLSCRASQSISNNLAWYQQKPGQAPRLLIYGASSRATGIPDRFSGSGSGTEFTLTISSLQSEDFAVYYCQQYKNWPLTFGCGTKVDIKSGGGGSQLQLQESGPGLVKPSETLSLTCFVSGGSISNSDYFWGWIRQPPGKCLEWIGTIYYSGRTYYNPSLKSRVTISVDTSKNQFSLMLSSVTAVDTAVYYCARYQYGSFDYWGQGTLVTVSSGGGGSGGGGSGGGGSDIVMTQTPLSLPVTPGEPASISCRSSQSLLHSNGYNYLDWYLQKPGQSPQLLIYLGSNRASGVPDRFSGSGSGTDFTLKISRVEAEDVGVYYCMQALQTPYTFGCGTKVEIR

SEQ ID NO: 2845 - protein, 499 aa, Artificial Sequence
  Synthetic
EVQLVESGGGLVQPGGSLTLSCAASGFTFHDYTMHWVRQTPGKCLEWLSGIGWNGYSKGYADSVKGRFTISRDNAKNSLFLQMNSLTSDDTALYYCVKDYHYGSGILDNYYGLDVWGQGTTVTVSSGGGGQGGGGQGGGGQEIVLTQSPATLSVSPGERATLSCRASQSISNNLAWYQQKPGQAPRLLIYGASSRATGIPDRFSGSGSGTEFTLTISSLQSEDFAVYYCQQYKNWPLTFGCGTKVDIKSGGGGQQLQLQESGPGLVKPSETLSLTCFVSGGSISNSDYFWGWIRQPPGKCLEWIGTIYYSGRTYYNPSLKSRVTISVDTSKNQFSLMLSSVTAVDTAVYYCARYQYGSFDYWGQGTLVTVSSGGGGQGGGGQGGGGQEIVMTQTPLSLPVTPGEPASISCRSSQSLLHSNGYNYLDWYLQKPGQSPQLLIYLGSNRASGVPDRFSGSGSGTDFTLKISRVEAEDVGVYYCMQALQTPYTFGCGTKVEIR

SEQ ID NO: 2846 - protein, 754 aa, Artificial Sequence
  Synthetic
EVQLVESGGGLVQPGGSLTLSCAASGFTFHDYTMHWVRQTPGKCLEWLSGIGWNGYSKGYADSVKGRFTISRDNAKNSLFLQMNSLTSDDTALYYCVKDYHYGSGILDNYYGLDVWGQGTTVTVSSGGGGSGGGGSGGGGSEIVLTQSPATLSVSPGERATLSCRASQSISNNLAWYQQKPGQAPRLLIYGASSRATGIPDRFSGSGSGTEFTLTISSLQSEDFAVYYCQQYKNWPLTFGCGTKVDIKSGGGGSQLQLQESGPGLVKPSETLSLTCFVSGGSISNSDYFWGWIRQPPGKCLEWIGTIYYSGRTYYNPSLKSRVTISVDTSKNQFSLMLSSVTAVDTAVYYCARYQYGSFDYWGQGTLVTVSSGGGGSGGGGSGGGGSDIVMTQTPLSLPVTPGEPASISCRSSQSLLHSNGYNYLDWYLQKPGQSPQLLIYLGSNRASGVPDRFSGSGSGTDFTLKISRVEAEDVGVYYCMQALQTPYTFGCGTKVEIRSGGGGSEVQLVESGGGLVQPGGSLKLSCAASGFTFNKYAMNWVRQAPGKGLEWVARIRSKYNNYATYYADSVKDRFTISRDDSKNTAYLQMNNLKTEDTAVYYCVRHGNFGNSYISYWAYWGQGTLVTVSSGGGGSGGGGSGGGGSQTVVTQEPSLTVSPGGTVTLTCGSSTGAVTSGNYPNWVQQKPGQAPRGLIGGTKFLAPGTPARFSGSLLGGKAALTLSGVQPEDEAEYYCVLWYSNRWVFGGGTKLTVL

SEQ ID NO: 2847 - protein, 754 aa, Artificial Sequence
  Synthetic
EVQLVESGGGLVQPGGSLTLSCAASGFTFHDYTMHWVRQTPGKCLEWLSGIGWNGYSKGYADSVKGRFTISRDNAKNSLFLQMNSLTSDDTALYYCVKDYHYGSGILDNYYGLDVWGQGTTVTVSSGGGGQGGGGQGGGGQEIVLTQSPATLSVSPGERATLSCRASQSISNNLAWYQQKPGQAPRLLIYGASSRATGIPDRFSGSGSGTEFTLTISSLQSEDFAVYYCQQYKNWPLTFGCGTKVDIKSGGGGQQLQLQESGPGLVKPSETLSLTCFVSGGSISNSDYFWGWIRQPPGKCLEWIGTIYYSGRTYYNPSLKSRVTISVDTSKNQFSLMLSSVTAVDTAVYYCARYQYGSFDYWGQGTLVTVSSGGGGQGGGGQGGGGQEIVMTQTPLSLPVTPGEPASISCRSSQSLLHSNGYNYLDWYLQKPGQSPQLLIYLGSNRASGVPDRFSGSGSGTDFTLKISRVEAEDVGVYYCMQALQTPYTFGCGTKVEIRSGGGGQEVQLVESGGGLVQPGGSLKLSCAASGFTFNKYAMNWVRQAPGKGLEWVARIRSKYNNYATYYADSVKDRFTISRDDSKNTAYLQMNNLKTEDTAVYYCVRHGNFGNSYISYWAYWGQGTLVTVSSGGGGQGGGGQGGGGQQTVVTQEPSLTVSPGGTVTLTCGSSTGAVTSGNYPNWVQQKPGQAPRGLIGGTKFLAPGTPARFSGSLLGGKAALTLSGVQPEDEAEYYCVLWYSNRWVFGGGTKLTVL

SEQ ID NO: 2848 - protein, 754 aa, Artificial Sequence
  Synthetic
EVQLVESGGGLVQPGGSLTLSCAASGFTFHDYTMHWVRQTPGKCLEWLSGIGWNGYSKGYADSVKGRFTISRDNAKNSLFLQMNSLTSDDTALYYCVKDYHYGSGILDNYYGLDVWGQGTTVTVSSGGGGSGGGGSGGGGSEIVLTQSPATLSVSPGERATLSCRASQSISNNLAWYQQKPGQAPRLLIYGASSRATGIPDRFSGSGSGTEFTLTISSLQSEDFAVYYCQQYKNWPLTFGCGTKVDIKSGGGGSQLQLQESGPGLVKPSETLSLTCFVSGGSISNSDYFWGWIRQPPGKCLEWIGTIYYSGRTYYNPSLKSRVTISVDTSKNQFSLMLSSVTAVDTAVYYCARYQYGSFDYWGQGTLVTVSSGGGGSGGGGSGGGGSDIVMTQTPLSLPVTPGEPASISCRSSQSLLHSNGYNYLDWYLQKPGQSPQLLIYLGSNRASGVPDRFSGSGSGTDFTLKISRVEAEDVGVYYCMQALQTPYTFGCGTKVEIRSGGGGSEVQLVESGGGLVQPGGSLKLSCAASGFTFNKYAINWVRQAPGKGLEWVARIRSKYNNYATYYADAVKDRFTISRDDSKNTVYLQMNNLKTEDTAVYYCARAGNFGSSYISYWAYWGQGTLVTVSSGGGGSGGGGSGGGGSQTVVTQEPSLTVSPGGTVTITCGSSTGAVTSGNYPNWVQKKPGQAPRGLIGGTKFLAPGTPARFSGSLSGGKAALTLSGVQPEDEAEYYCVLWYSNRWVFGSGTKLTVL

SEQ ID NO: 2849 - protein, 754 aa, Artificial Sequence
  Synthetic
EVQLVESGGGLVQPGGSLTLSCAASGFTFHDYTMHWVRQTPGKCLEWLSGIGWNGYSKGYADSVKGRFTISRDNAKNSLFLQMNSLTSDDTALYYCVKDYHYGSGILDNYYGLDVWGQGTTVTVSSGGGGQGGGGQGGGGQEIVLTQSPATLSVSPGERATLSCRASQSISNNLAWYQQKPGQAPRLLIYGASSRATGIPDRFSGSGSGTEFTLTISSLQSEDFAVYYCQQYKNWPLTFGCGTKVDIKSGGGGQQLQLQESGPGLVKPSETLSLTCFVSGGSISNSDYFWGWIRQPPGKCLEWIGTIYYSGRTYYNPSLKSRVTISVDTSKNQFSLMLSSVTAVDTAVYYCARYQYGSFDYWGQGTLVTVSSGGGGQGGGGQGGGGQEIVMTQTPLSLPVTPGEPASISCRSSQSLLHSNGYNYLDWYLQKPGQSPQLLIYLGSNRASGVPDRFSGSGSGTDFTLKISRVEAEDVGVYYCMQALQTPYTFGCGTKVEIRSGGGGQEVQLVESGGGLVQPGGSLKLSCAASGFTFNKYAINWVRQAPGKGLEWVARIRSKYNNYATYYADAVKDRFTISRDDSKNTVYLQMNNLKTEDTAVYYCARAGNFGSSYISYWAYWGQGTLVTVSSGGGGQGGGGQGGGGQQTVVTQEPSLTVSPGGTVTITCGSSTGAVTSGNYPNWVQKKPGQAPRGLIGGTKFLAPGTPARFSGSLSGGKAALTLSGVQPEDEAEYYCVLWYSNRWVFGSGTKLTVL

SEQ ID NO: 2850 - protein, 1242 aa, Artificial Sequence
  Synthetic
EVQLVESGGGLVQPGGSLTLSCAASGFTFHDYTMHWVRQTPGKCLEWLSGIGWNGYSKGYADSVKGRFTISRDNAKNSLFLQMNSLTSDDTALYYCVKDYHYGSGILDNYYGLDVWGQGTTVTVSSGGGGSGGGGSGGGGSEIVLTQSPATLSVSPGERATLSCRASQSISNNLAWYQQKPGQAPRLLIYGASSRATGIPDRFSGSGSGTEFTLTISSLQSEDFAVYYCQQYKNWPLTFGCGTKVDIKSGGGGSQLQLQESGPGLVKPSETLSLTCFVSGGSISNSDYFWGWIRQPPGKCLEWIGTIYYSGRTYYNPSLKSRVTISVDTSKNQFSLMLSSVTAVDTAVYYCARYQYGSFDYWGQGTLVTVSSGGGGSGGGGSGGGGSDIVMTQTPLSLPVTPGEPASISCRSSQSLLHSNGYNYLDWYLQKPGQSPQLLIYLGSNRASGVPDRFSGSGSGTDFTLKISRVEAEDVGVYYCMQALQTPYTFGCGTKVEIRSGGGGSEVQLVESGGGLVQPGGSLKLSCAASGFTFNKYAMNWVRQAPGKGLEWVARIRSKYNNYATYYADSVKDRFTISRDDSKNTAYLQMNNLKTEDTAVYYCVRHGNFGNSYISYWAYWGQGTLVTVSSGGGGSGGGGSGGGGSQTVVTQEPSLTVSPGGTVTLTCGSSTGAVTSGNYPNWVQQKPGQAPRGLIGGTKFLAPGTPARFSGSLLGGKAALTLSGVQPEDEAEYYCVLWYSNRWVFGGGTKLTVLGGGGDKTHTCPPCPAPELLGGPSVFLFPPKPKDTLMISRTPEVTCVVVDVSHEDPEVKFNWYVDGVEVHNAKTKPCEEQYGSTYRCVSVLTVLHQDWLNGKEYKCKVSNKALPAPIEKTISKAKGQPREPQVYTLPPSREEMTKNQVSLTCLVKGFYPSDIAVEWESNGQPENNYKTTPPVLDSDGSFFLYSKLTVDKSRWQQGNVFSCSVMHEALHNHYTQKSLSLSPGKGGGGSGGGGSGGGGSGGGGSGGGGSGGGGSDKTHTCPPCPAPELLGGPSVFLFPPKPKDTLMISRTPEVTCVVVDVSHEDPEVKFNWYVDGVEVHNAKTKPCEEQYGSTYRCVSVLTVLHQDWLNGKEYKCKVSNKALPAPIEKTISKAKGQPREPQVYTLPPSREEMTKNQVSLTCLVKGFYPSDIAVEWESNGQPENNYKTTPPVLDSDGSFFLYSKLTVDKSRWQQGNVFSCSVMHEALHNHYTQKSLSLSPGK

SEQ ID NO: 2851 - protein, 1232 aa, Artificial Sequence
  Synthetic
EVQLVESGGGLVQPGGSLTLSCAASGFTFHDYTMHWVRQTPGKCLEWLSGIGWNGYSKGYADSVKGRFTISRDNAKNSLFLQMNSLTSDDTALYYCVKDYHYGSGILDNYYGLDVWGQGTTVTVSSGGGGQGGGGQGGGGQEIVLTQSPATLSVSPGERATLSCRASQSISNNLAWYQQKPGQAPRLLIYGASSRATGIPDRFSGSGSGTEFTLTISSLQSEDFAVYYCQQYKNWPLTFGCGTKVDIKSGGGGQQLQLQESGPGLVKPSETLSLTCFVSGGSISNSDYFWGWIRQPPGKCLEWIGTIYYSGRTYYNPSLKSRVTISVDTSKNQFSLMLSSVTAVDTAVYYCARYQYGSFDYWGQGTLVTVSSGGGGQGGGGQGGGGQEIVMTQTPLSLPVTPGEPASISCRSSQSLLHSNGYNYLDWYLQKPGQSPQLLIYLGSNRASGVPDRFSGSGSGTDFTLKISRVEAEDVGVYYCMQALQTPYTFGCGTKVEIRSGGGGQEVQLVESGGGLVQPGGSLKLSCAASGFTFNKYAMNWVRQAPGKGLEWVARIRSKYNNYATYYADSVKDRFTISRDDSKNTAYLQMNNLKTEDTAVYYCVRHGNFGNSYISYWAYWGQGTLVTVSSGGGGQGGGGQGGGGQQTVVTQEPSLTVSPGGTVTLTCGSSTGAVTSGNYPNWVQQKPGQAPRGLIGGTKFLAPGTPARFSGSLLGGKAALTLSGVQPEDEAEYYCVLWYSNRWVFGGGTKLTVLGGGGCPPCPAPELLGGPSVFLFPPKPKDTLMISRTPEVTCVVVDVSHEEPEVKFNWYVDGVEVHNAKTKPCEEQYGSTYRCVSVLTVLHQDWLNGKEYKCKVSNKALPAPIEKTISKAKGQPREPQVYTLPPSREEMTKNQVSLTCLVKGFYPSDIAVEWESNGQPENNYKTTPPVLDSDGSFFLYSKLTVDKSRWQQGNVFSCSVMHEALHNHYTQKSLSLSPGKGGGGQGGGGQGGGGQGGGGQGGGGQGGGGQCPPCPAPELLGGPSVFLFPPKPKDTLMISRTPEVTCVVVDVSHEEPEVKFNWYVDGVEVHNAKTKPCEEQYGSTYRCVSVLTVLHQDWLNGKEYKCKVSNKALPAPIEKTISKAKGQPREPQVYTLPPSREEMTKNQVSLTCLVKGFYPSDIAVEWESNGQPENNYKTTPPVLDSDGSFFLYSKLTVDKSRWQQGNVFSCSVMHEALHNHYTQKSLSLSPGK

SEQ ID NO: 2852 - protein, 1242 aa, Artificial Sequence
  Synthetic
EVQLVESGGGLVQPGGSLTLSCAASGFTFHDYTMHWVRQTPGKCLEWLSGIGWNGYSKGYADSVKGRFTISRDNAKNSLFLQMNSLTSDDTALYYCVKDYHYGSGILDNYYGLDVWGQGTTVTVSSGGGGSGGGGSGGGGSEIVLTQSPATLSVSPGERATLSCRASQSISNNLAWYQQKPGQAPRLLIYGASSRATGIPDRFSGSGSGTEFTLTISSLQSEDFAVYYCQQYKNWPLTFGCGTKVDIKSGGGGSQLQLQESGPGLVKPSETLSLTCFVSGGSISNSDYFWGWIRQPPGKCLEWIGTIYYSGRTYYNPSLKSRVTISVDTSKNQFSLMLSSVTAVDTAVYYCARYQYGSFDYWGQGTLVTVSSGGGGSGGGGSGGGGSDIVMTQTPLSLPVTPGEPASISCRSSQSLLHSNGYNYLDWYLQKPGQSPQLLIYLGSNRASGVPDRFSGSGSGTDFTLKISRVEAEDVGVYYCMQALQTPYTFGCGTKVEIRSGGGGSEVQLVESGGGLVQPGGSLKLSCAASGFTFNKYAINWVRQAPGKGLEWVARIRSKYNNYATYYADAVKDRFTISRDDSKNTVYLQMNNLKTEDTAVYYCARAGNFGSSYISYWAYWGQGTLVTVSSGGGGSGGGGSGGGGSQTVVTQEPSLTVSPGGTVTITCGSSTGAVTSGNYPNWVQKKPGQAPRGLIGGTKFLAPGTPARFSGSLSGGKAALTLSGVQPEDEAEYYCVLWYSNRWVFGSGTKLTVLGGGGDKTHTCPPCPAPELLGGPSVFLFPPKPKDTLMISRTPEVTCVVVDVSHEDPEVKFNWYVDGVEVHNAKTKPCEEQYGSTYRCVSVLTVLHQDWLNGKEYKCKVSNKALPAPIEKTISKAKGQPREPQVYTLPPSREEMTKNQVSLTCLVKGFYPSDIAVEWESNGQPENNYKTTPPVLDSDGSFFLYSKLTVDKSRWQQGNVFSCSVMHEALHNHYTQKSLSLSPGKGGGGSGGGGSGGGGSGGGGSGGGGSGGGGSDKTHTCPPCPAPELLGGPSVFLFPPKPKDTLMISRTPEVTCVVVDVSHEDPEVKFNWYVDGVEVHNAKTKPCEEQYGSTYRCVSVLTVLHQDWLNGKEYKCKVSNKALPAPIEKTISKAKGQPREPQVYTLPPSREEMTKNQVSLTCLVKGFYPSDIAVEWESNGQPENNYKTTPPVLDSDGSFFLYSKLTVDKSRWQQGNVFSCSVMHEALHNHYTQKSLSLSPGK

SEQ ID NO: 2853 - protein, 1232 aa, Artificial Sequence
  Synthetic
EVQLVESGGGLVQPGGSLTLSCAASGFTFHDYTMHWVRQTPGKCLEWLSGIGWNGYSKGYADSVKGRFTISRDNAKNSLFLQMNSLTSDDTALYYCVKDYHYGSGILDNYYGLDVWGQGTTVTVSSGGGGQGGGGQGGGGQEIVLTQSPATLSVSPGERATLSCRASQSISNNLAWYQQKPGQAPRLLIYGASSRATGIPDRFSGSGSGTEFTLTISSLQSEDFAVYYCQQYKNWPLTFGCGTKVDIKSGGGGQQLQLQESGPGLVKPSETLSLTCFVSGGSISNSDYFWGWIRQPPGKCLEWIGTIYYSGRTYYNPSLKSRVTISVDTSKNQFSLMLSSVTAVDTAVYYCARYQYGSFDYWGQGTLVTVSSGGGGQGGGGQGGGGQEIVMTQTPLSLPVTPGEPASISCRSSQSLLHSNGYNYLDWYLQKPGQSPQLLIYLGSNRASGVPDRFSGSGSGTDFTLKISRVEAEDVGVYYCMQALQTPYTFGCGTKVEIRSGGGGQEVQLVESGGGLVQPGGSLKLSCAASGFTFNKYAINWVRQAPGKGLEWVARIRSKYNNYATYYADAVKDRFTISRDDSKNTVYLQMNNLKTEDTAVYYCARAGNFGSSYISYWAYWGQGTLVTVSSGGGGQGGGGQGGGGQQTVVTQEPSLTVSPGGTVTITCGSSTGAVTSGNYPNWVQKKPGQAPRGLIGGTKFLAPGTPARFSGSLSGGKAALTLSGVQPEDEAEYYCVLWYSNRWVFGSGTKLTVLGGGGCPPCPAPELLGGPSVFLFPPKPKDTLMISRTPEVTCVVVDVSHEEPEVKFNWYVDGVEVHNAKTKPCEEQYGSTYRCVSVLTVLHQDWLNGKEYKCKVSNKALPAPIEKTISKAKGQPREPQVYTLPPSREEMTKNQVSLTCLVKGFYPSDIAVEWESNGQPENNYKTTPPVLDSDGSFFLYSKLTVDKSRWQQGNVFSCSVMHEALHNHYTQKSLSLSPGKGGGGQGGGGQGGGGQGGGGQGGGGQGGGGQCPPCPAPELLGGPSVFLFPPKPKDTLMISRTPEVTCVVVDVSHEEPEVKFNWYVDGVEVHNAKTKPCEEQYGSTYRCVSVLTVLHQDWLNGKEYKCKVSNKALPAPIEKTISKAKGQPREPQVYTLPPSREEMTKNQVSLTCLVKGFYPSDIAVEWESNGQPENNYKTTPPVLDSDGSFFLYSKLTVDKSRWQQGNVFSCSVMHEALHNHYTQKSLSLSPGK

SEQ ID NO: 2854 - protein, 501 aa, Artificial Sequence
  Synthetic
EVQLVESGGGLVQPGGSLTLSCAASGFTFHDYTMHWVRQTPGKCLEWLSGIGWNGYSKGYADSVKGRFTISRDNAKNSLFLQMNSLTSDDTALYYCVKDYHYGSGILDNYYGLDVWGQGTTVTVSSGGGGSGGGGSGGGGSEIVLTQSPATLSVSPGERATLSCRASQSISNNLAWYQQKPGQAPRLLIYGASSRATGIPDRFSGSGSGTEFTLTISSLQSEDFAVYYCQQYKNWPLTFGCGTKVDIKSGGGGSQVQLVESGGGVVQPGRSLRLSCAASGFTFSAYGMHWVRQAPGKCLEWVAVILYDGSNKYYADSVKGRFTISRDNSKNTLYLQMNSLRAEDTAVYYCARGSGWLQLGDYFDYWGQGTLVTVSSGGGGSGGGGSGGGGSQSALTQPPSVSGSPGQSITISCTGTSSDVGGYNYVSWYQQHPGKAPKLMIYEVSNRPSGVSNRFSGSKSGNTASLTISGLQAEDEADYYCSSYTSSSTLVFGCGTKLTVL

SEQ ID NO: 2855 - protein, 501 aa, Artificial Sequence
  Synthetic
EVQLVESGGGLVQPGGSLTLSCAASGFTFHDYTMHWVRQTPGKCLEWLSGIGWNGYSKGYADSVKGRFTISRDNAKNSLFLQMNSLTSDDTALYYCVKDYHYGSGILDNYYGLDVWGQGTTVTVSSGGGGQGGGGQGGGGQEIVLTQSPATLSVSPGERATLSCRASQSISNNLAWYQQKPGQAPRLLIYGASSRATGIPDRFSGSGSGTEFTLTISSLQSEDFAVYYCQQYKNWPLTFGCGTKVDIKSGGGGQQVQLVESGGGVVQPGRSLRLSCAASGFTFSAYGMHWVRQAPGKCLEWVAVILYDGSNKYYADSVKGRFTISRDNSKNTLYLQMNSLRAEDTAVYYCARGSGWLQLGDYFDYWGQGTLVTVSSGGGGQGGGGQGGGGQQSALTQPPSVSGSPGQSITISCTGTSSDVGGYNYVSWYQQHPGKAPKLMIYEVSNRPSGVSNRFSGSKSGNTASLTISGLQAEDEADYYCSSYTSSSTLVFGCGTKLTVL

SEQ ID NO: 2856 - protein, 756 aa, Artificial Sequence
  Synthetic
EVQLVESGGGLVQPGGSLTLSCAASGFTFHDYTMHWVRQTPGKCLEWLSGIGWNGYSKGYADSVKGRFTISRDNAKNSLFLQMNSLTSDDTALYYCVKDYHYGSGILDNYYGLDVWGQGTTVTVSSGGGGSGGGGSGGGGSEIVLTQSPATLSVSPGERATLSCRASQSISNNLAWYQQKPGQAPRLLIYGASSRATGIPDRFSGSGSGTEFTLTISSLQSEDFAVYYCQQYKNWPLTFGCGTKVDIKSGGGGSQVQLVESGGGVVQPGRSLRLSCAASGFTFSAYGMHWVRQAPGKCLEWVAVILYDGSNKYYADSVKGRFTISRDNSKNTLYLQMNSLRAEDTAVYYCARGSGWLQLGDYFDYWGQGTLVTVSSGGGGSGGGGSGGGGSQSALTQPPSVSGSPGQSITISCTGTSSDVGGYNYVSWYQQHPGKAPKLMIYEVSNRPSGVSNRFSGSKSGNTASLTISGLQAEDEADYYCSSYTSSSTLVFGCGTKLTVLSGGGGSEVQLVESGGGLVQPGGSLKLSCAASGFTFNKYAMNWVRQAPGKGLEWVARIRSKYNNYATYYADSVKDRFTISRDDSKNTAYLQMNNLKTEDTAVYYCVRHGNFGNSYISYWAYWGQGTLVTVSSGGGGSGGGGSGGGGSQTVVTQEPSLTVSPGGTVTLTCGSSTGAVTSGNYPNWVQQKPGQAPRGLIGGTKFLAPGTPARFSGSLLGGKAALTLSGVQPEDEAEYYCVLWYSNRWVFGGGTKLTVL

SEQ ID NO: 2857 - protein, 756 aa, Artificial Sequence
  Synthetic
EVQLVESGGGLVQPGGSLTLSCAASGFTFHDYTMHWVRQTPGKCLEWLSGIGWNGYSKGYADSVKGRFTISRDNAKNSLFLQMNSLTSDDTALYYCVKDYHYGSGILDNYYGLDVWGQGTTVTVSSGGGGQGGGGQGGGGQEIVLTQSPATLSVSPGERATLSCRASQSISNNLAWYQQKPGQAPRLLIYGASSRATGIPDRFSGSGSGTEFTLTISSLQSEDFAVYYCQQYKNWPLTFGCGTKVDIKSGGGGQQVQLVESGGGVVQPGRSLRLSCAASGFTFSAYGMHWVRQAPGKCLEWVAVILYDGSNKYYADSVKGRFTISRDNSKNTLYLQMNSLRAEDTAVYYCARGSGWLQLGDYFDYWGQGTLVTVSSGGGGQGGGGQGGGGQQSALTQPPSVSGSPGQSITISCTGTSSDVGGYNYVSWYQQHPGKAPKLMIYEVSNRPSGVSNRFSGSKSGNTASLTISGLQAEDEADYYCSSYTSSSTLVFGCGTKLTVLSGGGGQEVQLVESGGGLVQPGGSLKLSCAASGFTFNKYAMNWVRQAPGKGLEWVARIRSKYNNYATYYADSVKDRFTISRDDSKNTAYLQMNNLKTEDTAVYYCVRHGNFGNSYISYWAYWGQGTLVTVSSGGGGQGGGGQGGGGQQTVVTQEPSLTVSPGGTVTLTCGSSTGAVTSGNYPNWVQQKPGQAPRGLIGGTKFLAPGTPARFSGSLLGGKAALTLSGVQPEDEAEYYCVLWYSNRWVFGGGTKLTVL

SEQ ID NO: 2858 - protein, 756 aa, Artificial Sequence
  Synthetic
EVQLVESGGGLVQPGGSLTLSCAASGFTFHDYTMHWVRQTPGKCLEWLSGIGWNGYSKGYADSVKGRFTISRDNAKNSLFLQMNSLTSDDTALYYCVKDYHYGSGILDNYYGLDVWGQGTTVTVSSGGGGSGGGGSGGGGSEIVLTQSPATLSVSPGERATLSCRASQSISNNLAWYQQKPGQAPRLLIYGASSRATGIPDRFSGSGSGTEFTLTISSLQSEDFAVYYCQQYKNWPLTFGCGTKVDIKSGGGGSQVQLVESGGGVVQPGRSLRLSCAASGFTFSAYGMHWVRQAPGKCLEWVAVILYDGSNKYYADSVKGRFTISRDNSKNTLYLQMNSLRAEDTAVYYCARGSGWLQLGDYFDYWGQGTLVTVSSGGGGSGGGGSGGGGSQSALTQPPSVSGSPGQSITISCTGTSSDVGGYNYVSWYQQHPGKAPKLMIYEVSNRPSGVSNRFSGSKSGNTASLTISGLQAEDEADYYCSSYTSSSTLVFGCGTKLTVLSGGGGSEVQLVESGGGLVQPGGSLKLSCAASGFTFNKYAINWVRQAPGKGLEWVARIRSKYNNYATYYADAVKDRFTISRDDSKNTVYLQMNNLKTEDTAVYYCARAGNFGSSYISYWAYWGQGTLVTVSSGGGGSGGGGSGGGGSQTVVTQEPSLTVSPGGTVTITCGSSTGAVTSGNYPNWVQKKPGQAPRGLIGGTKFLAPGTPARFSGSLSGGKAALTLSGVQPEDEAEYYCVLWYSNRWVFGSGTKLTVL

SEQ ID NO: 2859 - protein, 756 aa, Artificial Sequence
  Synthetic
EVQLVESGGGLVQPGGSLTLSCAASGFTFHDYTMHWVRQTPGKCLEWLSGIGWNGYSKGYADSVKGRFTISRDNAKNSLFLQMNSLTSDDTALYYCVKDYHYGSGILDNYYGLDVWGQGTTVTVSSGGGGQGGGGQGGGGQEIVLTQSPATLSVSPGERATLSCRASQSISNNLAWYQQKPGQAPRLLIYGASSRATGIPDRFSGSGSGTEFTLTISSLQSEDFAVYYCQQYKNWPLTFGCGTKVDIKSGGGGQQVQLVESGGGVVQPGRSLRLSCAASGFTFSAYGMHWVRQAPGKCLEWVAVILYDGSNKYYADSVKGRFTISRDNSKNTLYLQMNSLRAEDTAVYYCARGSGWLQLGDYFDYWGQGTLVTVSSGGGGQGGGGQGGGGQQSALTQPPSVSGSPGQSITISCTGTSSDVGGYNYVSWYQQHPGKAPKLMIYEVSNRPSGVSNRFSGSKSGNTASLTISGLQAEDEADYYCSSYTSSSTLVFGCGTKLTVLSGGGGQEVQLVESGGGLVQPGGSLKLSCAASGFTFNKYAINWVRQAPGKGLEWVARIRSKYNNYATYYADAVKDRFTISRDDSKNTVYLQMNNLKTEDTAVYYCARAGNFGSSYISYWAYWGQGTLVTVSSGGGGQGGGGQGGGGQQTVVTQEPSLTVSPGGTVTITCGSSTGAVTSGNYPNWVQKKPGQAPRGLIGGTKFLAPGTPARFSGSLSGGKAALTLSGVQPEDEAEYYCVLWYSNRWVFGSGTKLTVL

SEQ ID NO: 2860 - protein, 1244 aa, Artificial Sequence
  Synthetic
EVQLVESGGGLVQPGGSLTLSCAASGFTFHDYTMHWVRQTPGKCLEWLSGIGWNGYSKGYADSVKGRFTISRDNAKNSLFLQMNSLTSDDTALYYCVKDYHYGSGILDNYYGLDVWGQGTTVTVSSGGGGSGGGGSGGGGSEIVLTQSPATLSVSPGERATLSCRASQSISNNLAWYQQKPGQAPRLLIYGASSRATGIPDRFSGSGSGTEFTLTISSLQSEDFAVYYCQQYKNWPLTFGCGTKVDIKSGGGGSQVQLVESGGGVVQPGRSLRLSCAASGFTFSAYGMHWVRQAPGKCLEWVAVILYDGSNKYYADSVKGRFTISRDNSKNTLYLQMNSLRAEDTAVYYCARGSGWLQLGDYFDYWGQGTLVTVSSGGGGSGGGGSGGGGSQSALTQPPSVSGSPGQSITISCTGTSSDVGGYNYVSWYQQHPGKAPKLMIYEVSNRPSGVSNRFSGSKSGNTASLTISGLQAEDEADYYCSSYTSSSTLVFGCGTKLTVLSGGGGSEVQLVESGGGLVQPGGSLKLSCAASGFTFNKYAMNWVRQAPGKGLEWVARIRSKYNNYATYYADSVKDRFTISRDDSKNTAYLQMNNLKTEDTAVYYCVRHGNFGNSYISYWAYWGQGTLVTVSSGGGGSGGGGSGGGGSQTVVTQEPSLTVSPGGTVTLTCGSSTGAVTSGNYPNWVQQKPGQAPRGLIGGTKFLAPGTPARFSGSLLGGKAALTLSGVQPEDEAEYYCVLWYSNRWVFGGGTKLTVLGGGGDKTHTCPPCPAPELLGGPSVFLFPPKPKDTLMISRTPEVTCVVVDVSHEDPEVKFNWYVDGVEVHNAKTKPCEEQYGSTYRCVSVLTVLHQDWLNGKEYKCKVSNKALPAPIEKTISKAKGQPREPQVYTLPPSREEMTKNQVSLTCLVKGFYPSDIAVEWESNGQPENNYKTTPPVLDSDGSFFLYSKLTVDKSRWQQGNVFSCSVMHEALHNHYTQKSLSLSPGKGGGGSGGGGSGGGGSGGGGSGGGGSGGGGSDKTHTCPPCPAPELLGGPSVFLFPPKPKDTLMISRTPEVTCVVVDVSHEDPEVKFNWYVDGVEVHNAKTKPCEEQYGSTYRCVSVLTVLHQDWLNGKEYKCKVSNKALPAPIEKTISKAKGQPREPQVYTLPPSREEMTKNQVSLTCLVKGFYPSDIAVEWESNGQPENNYKTTPPVLDSDGSFFLYSKLTVDKSRWQQGNVFSCSVMHEALHNHYTQKSLSLSPGK

SEQ ID NO: 2861 - protein, 1234 aa, Artificial Sequence
  Synthetic
EVQLVESGGGLVQPGGSLTLSCAASGFTFHDYTMHWVRQTPGKCLEWLSGIGWNGYSKGYADSVKGRFTISRDNAKNSLFLQMNSLTSDDTALYYCVKDYHYGSGILDNYYGLDVWGQGTTVTVSSGGGGQGGGGQGGGGQEIVLTQSPATLSVSPGERATLSCRASQSISNNLAWYQQKPGQAPRLLIYGASSRATGIPDRFSGSGSGTEFTLTISSLQSEDFAVYYCQQYKNWPLTFGCGTKVDIKSGGGGQQVQLVESGGGVVQPGRSLRLSCAASGFTFSAYGMHWVRQAPGKCLEWVAVILYDGSNKYYADSVKGRFTISRDNSKNTLYLQMNSLRAEDTAVYYCARGSGWLQLGDYFDYWGQGTLVTVSSGGGGQGGGGQGGGGQQSALTQPPSVSGSPGQSITISCTGTSSDVGGYNYVSWYQQHPGKAPKLMIYEVSNRPSGVSNRFSGSKSGNTASLTISGLQAEDEADYYCSSYTSSSTLVFGCGTKLTVLSGGGGQEVQLVESGGGLVQPGGSLKLSCAASGFTFNKYAMNWVRQAPGKGLEWVARIRSKYNNYATYYADSVKDRFTISRDDSKNTAYLQMNNLKTEDTAVYYCVRHGNFGNSYISYWAYWGQGTLVTVSSGGGGQGGGGQGGGGQQTVVTQEPSLTVSPGGTVTLTCGSSTGAVTSGNYPNWVQQKPGQAPRGLIGGTKFLAPGTPARFSGSLLGGKAALTLSGVQPEDEAEYYCVLWYSNRWVFGGGTKLTVLGGGGCPPCPAPELLGGPSVFLFPPKPKDTLMISRTPEVTCVVVDVSHEEPEVKFNWYVDGVEVHNAKTKPCEEQYGSTYRCVSVLTVLHQDWLNGKEYKCKVSNKALPAPIEKTISKAKGQPREPQVYTLPPSREEMTKNQVSLTCLVKGFYPSDIAVEWESNGQPENNYKTTPPVLDSDGSFFLYSKLTVDKSRWQQGNVFSCSVMHEALHNHYTQKSLSLSPGKGGGGQGGGGQGGGGQGGGGQGGGGQGGGGQCPPCPAPELLGGPSVFLFPPKPKDTLMISRTPEVTCVVVDVSHEEPEVKFNWYVDGVEVHNAKTKPCEEQYGSTYRCVSVLTVLHQDWLNGKEYKCKVSNKALPAPIEKTISKAKGQPREPQVYTLPPSREEMTKNQVSLTCLVKGFYPSDIAVEWESNGQPENNYKTTPPVLDSDGSFFLYSKLTVDKSRWQQGNVFSCSVMHEALHNHYTQKSLSLSPGK

SEQ ID NO: 2862 - protein, 1244 aa, Artificial Sequence
  Synthetic
EVQLVESGGGLVQPGGSLTLSCAASGFTFHDYTMHWVRQTPGKCLEWLSGIGWNGYSKGYADSVKGRFTISRDNAKNSLFLQMNSLTSDDTALYYCVKDYHYGSGILDNYYGLDVWGQGTTVTVSSGGGGSGGGGSGGGGSEIVLTQSPATLSVSPGERATLSCRASQSISNNLAWYQQKPGQAPRLLIYGASSRATGIPDRFSGSGSGTEFTLTISSLQSEDFAVYYCQQYKNWPLTFGCGTKVDIKSGGGGSQVQLVESGGGVVQPGRSLRLSCAASGFTFSAYGMHWVRQAPGKCLEWVAVILYDGSNKYYADSVKGRFTISRDNSKNTLYLQMNSLRAEDTAVYYCARGSGWLQLGDYFDYWGQGTLVTVSSGGGGSGGGGSGGGGSQSALTQPPSVSGSPGQSITISCTGTSSDVGGYNYVSWYQQHPGKAPKLMIYEVSNRPSGVSNRFSGSKSGNTASLTISGLQAEDEADYYCSSYTSSSTLVFGCGTKLTVLSGGGGSEVQLVESGGGLVQPGGSLKLSCAASGFTFNKYAINWVRQAPGKGLEWVARIRSKYNNYATYYADAVKDRFTISRDDSKNTVYLQMNNLKTEDTAVYYCARAGNFGSSYISYWAYWGQGTLVTVSSGGGGSGGGGSGGGGSQTVVTQEPSLTVSPGGTVTITCGSSTGAVTSGNYPNWVQKKPGQAPRGLIGGTKFLAPGTPARFSGSLSGGKAALTLSGVQPEDEAEYYCVLWYSNRWVFGSGTKLTVLGGGGDKTHTCPPCPAPELLGGPSVFLFPPKPKDTLMISRTPEVTCVVVDVSHEDPEVKFNWYVDGVEVHNAKTKPCEEQYGSTYRCVSVLTVLHQDWLNGKEYKCKVSNKALPAPIEKTISKAKGQPREPQVYTLPPSREEMTKNQVSLTCLVKGFYPSDIAVEWESNGQPENNYKTTPPVLDSDGSFFLYSKLTVDKSRWQQGNVFSCSVMHEALHNHYTQKSLSLSPGKGGGGSGGGGSGGGGSGGGGSGGGGSGGGGSDKTHTCPPCPAPELLGGPSVFLFPPKPKDTLMISRTPEVTCVVVDVSHEDPEVKFNWYVDGVEVHNAKTKPCEEQYGSTYRCVSVLTVLHQDWLNGKEYKCKVSNKALPAPIEKTISKAKGQPREPQVYTLPPSREEMTKNQVSLTCLVKGFYPSDIAVEWESNGQPENNYKTTPPVLDSDGSFFLYSKLTVDKSRWQQGNVFSCSVMHEALHNHYTQKSLSLSPGK

SEQ ID NO: 2863 - protein, 1234 aa, Artificial Sequence
  Synthetic
EVQLVESGGGLVQPGGSLTLSCAASGFTFHDYTMHWVRQTPGKCLEWLSGIGWNGYSKGYADSVKGRFTISRDNAKNSLFLQMNSLTSDDTALYYCVKDYHYGSGILDNYYGLDVWGQGTTVTVSSGGGGQGGGGQGGGGQEIVLTQSPATLSVSPGERATLSCRASQSISNNLAWYQQKPGQAPRLLIYGASSRATGIPDRFSGSGSGTEFTLTISSLQSEDFAVYYCQQYKNWPLTFGCGTKVDIKSGGGGQQVQLVESGGGVVQPGRSLRLSCAASGFTFSAYGMHWVRQAPGKCLEWVAVILYDGSNKYYADSVKGRFTISRDNSKNTLYLQMNSLRAEDTAVYYCARGSGWLQLGDYFDYWGQGTLVTVSSGGGGQGGGGQGGGGQQSALTQPPSVSGSPGQSITISCTGTSSDVGGYNYVSWYQQHPGKAPKLMIYEVSNRPSGVSNRFSGSKSGNTASLTISGLQAEDEADYYCSSYTSSSTLVFGCGTKLTVLSGGGGQEVQLVESGGGLVQPGGSLKLSCAASGFTFNKYAINWVRQAPGKGLEWVARIRSKYNNYATYYADAVKDRFTISRDDSKNTVYLQMNNLKTEDTAVYYCARAGNFGSSYISYWAYWGQGTLVTVSSGGGGQGGGGQGGGGQQTVVTQEPSLTVSPGGTVTITCGSSTGAVTSGNYPNWVQKKPGQAPRGLIGGTKFLAPGTPARFSGSLSGGKAALTLSGVQPEDEAEYYCVLWYSNRWVFGSGTKLTVLGGGGCPPCPAPELLGGPSVFLFPPKPKDTLMISRTPEVTCVVVDVSHEEPEVKFNWYVDGVEVHNAKTKPCEEQYGSTYRCVSVLTVLHQDWLNGKEYKCKVSNKALPAPIEKTISKAKGQPREPQVYTLPPSREEMTKNQVSLTCLVKGFYPSDIAVEWESNGQPENNYKTTPPVLDSDGSFFLYSKLTVDKSRWQQGNVFSCSVMHEALHNHYTQKSLSLSPGKGGGGQGGGGQGGGGQGGGGQGGGGQGGGGQCPPCPAPELLGGPSVFLFPPKPKDTLMISRTPEVTCVVVDVSHEEPEVKFNWYVDGVEVHNAKTKPCEEQYGSTYRCVSVLTVLHQDWLNGKEYKCKVSNKALPAPIEKTISKAKGQPREPQVYTLPPSREEMTKNQVSLTCLVKGFYPSDIAVEWESNGQPENNYKTTPPVLDSDGSFFLYSKLTVDKSRWQQGNVFSCSVMHEALHNHYTQKSLSLSPGK

SEQ ID NO: 2864 - protein, 498 aa, Artificial Sequence
  Synthetic
EVQLVESGGGLVQPGRSLRLSCAASGFTFHDYTMHWVRQAPGKCLEWVSGISWNTGTIGYADSVKGRFTISRDNAKNSLYLQMNSLRAEDTALYYCVKDAFYGGDYYYNYGMDVWGHGTTVTVSSGGGGSGGGGSGGGGSEIVLTQSPATLSVSPGERATLSCRASQSVNNNLAWYQQKPGQAPRLLIYGASTRATGIPARFSGSGSGTDFTLTISSLQSDDFAVYYCQQYNNWPLTFGCGTKVEIKSGGGGSQVQLVQSGGEVKKPGASVKVSCKASGYTFTSYGISWVRQAPGQCLEWMGWMSPYNGNAIYAQKLQGRVTMTRDTSTSTAYMELRSLRSDDTAVYYCARDPDYYGSGSYSDYWGQGTLVTVSSGGGGSGGGGSGGGGSEIVLTQSPATLSVSPGERATLSCRASQSVSSNLAWYQQKPGQAPRLLIYGASSRATGIPARFSGSGSGTEFTLTISSLQSEDFAVYYCQQYHSWPLLTFGCGTKVEIK

SEQ ID NO: 2865 - protein, 498 aa, Artificial Sequence
  Synthetic
EVQLVESGGGLVQPGRSLRLSCAASGFTFHDYTMHWVRQAPGKCLEWVSGISWNTGTIGYADSVKGRFTISRDNAKNSLYLQMNSLRAEDTALYYCVKDAFYGGDYYYNYGMDVWGHGTTVTVSSGGGGQGGGGQGGGGQEIVLTQSPATLSVSPGERATLSCRASQSVNNNLAWYQQKPGQAPRLLIYGASTRATGIPARFSGSGSGTDFTLTISSLQSDDFAVYYCQQYNNWPLTFGCGTKVEIKSGGGGQQVQLVQSGGEVKKPGASVKVSCKASGYTFTSYGISWVRQAPGQCLEWMGWMSPYNGNAIYAQKLQGRVTMTRDTSTSTAYMELRSLRSDDTAVYYCARDPDYYGSGSYSDYWGQGTLVTVSSGGGGQGGGGQGGGGQEIVLTQSPATLSVSPGERATLSCRASQSVSSNLAWYQQKPGQAPRLLIYGASSRATGIPARFSGSGSGTEFTLTISSLQSEDFAVYYCQQYHSWPLLTFGCGTKVEIK

SEQ ID NO: 2866 - protein, 753 aa, Artificial Sequence
  Synthetic
EVQLVESGGGLVQPGRSLRLSCAASGFTFHDYTMHWVRQAPGKCLEWVSGISWNTGTIGYADSVKGRFTISRDNAKNSLYLQMNSLRAEDTALYYCVKDAFYGGDYYYNYGMDVWGHGTTVTVSSGGGGSGGGGSGGGGSEIVLTQSPATLSVSPGERATLSCRASQSVNNNLAWYQQKPGQAPRLLIYGASTRATGIPARFSGSGSGTDFTLTISSLQSDDFAVYYCQQYNNWPLTFGCGTKVEIKSGGGGSQVQLVQSGGEVKKPGASVKVSCKASGYTFTSYGISWVRQAPGQCLEWMGWMSPYNGNAIYAQKLQGRVTMTRDTSTSTAYMELRSLRSDDTAVYYCARDPDYYGSGSYSDYWGQGTLVTVSSGGGGSGGGGSGGGGSEIVLTQSPATLSVSPGERATLSCRASQSVSSNLAWYQQKPGQAPRLLIYGASSRATGIPARFSGSGSGTEFTLTISSLQSEDFAVYYCQQYHSWPLLTFGCGTKVEIKSGGGGSEVQLVESGGGLVQPGGSLKLSCAASGFTFNKYAMNWVRQAPGKGLEWVARIRSKYNNYATYYADSVKDRFTISRDDSKNTAYLQMNNLKTEDTAVYYCVRHGNFGNSYISYWAYWGQGTLVTVSSGGGGSGGGGSGGGGSQTVVTQEPSLTVSPGGTVTLTCGSSTGAVTSGNYPNWVQQKPGQAPRGLIGGTKFLAPGTPARFSGSLLGGKAALTLSGVQPEDEAEYYCVLWYSNRWVFGGGTKLTVL

SEQ ID NO: 2867 - protein, 753 aa, Artificial Sequence
  Synthetic
EVQLVESGGGLVQPGRSLRLSCAASGFTFHDYTMHWVRQAPGKCLEWVSGISWNTGTIGYADSVKGRFTISRDNAKNSLYLQMNSLRAEDTALYYCVKDAFYGGDYYYNYGMDVWGHGTTVTVSSGGGGQGGGGQGGGGQEIVLTQSPATLSVSPGERATLSCRASQSVNNNLAWYQQKPGQAPRLLIYGASTRATGIPARFSGSGSGTDFTLTISSLQSDDFAVYYCQQYNNWPLTFGCGTKVEIKSGGGGQQVQLVQSGGEVKKPGASVKVSCKASGYTFTSYGISWVRQAPGQCLEWMGWMSPYNGNAIYAQKLQGRVTMTRDTSTSTAYMELRSLRSDDTAVYYCARDPDYYGSGSYSDYWGQGTLVTVSSGGGGQGGGGQGGGGQEIVLTQSPATLSVSPGERATLSCRASQSVSSNLAWYQQKPGQAPRLLIYGASSRATGIPARFSGSGSGTEFTLTISSLQSEDFAVYYCQQYHSWPLLTFGCGTKVEIKSGGGGQEVQLVESGGGLVQPGGSLKLSCAASGFTFNKYAMNWVRQAPGKGLEWVARIRSKYNNYATYYADSVKDRFTISRDDSKNTAYLQMNNLKTEDTAVYYCVRHGNFGNSYISYWAYWGQGTLVTVSSGGGGQGGGGQGGGGQQTVVTQEPSLTVSPGGTVTLTCGSSTGAVTSGNYPNWVQQKPGQAPRGLIGGTKFLAPGTPARFSGSLLGGKAALTLSGVQPEDEAEYYCVLWYSNRWVFGGGTKLTVL

SEQ ID NO: 2868 - protein, 753 aa, Artificial Sequence
  Synthetic
EVQLVESGGGLVQPGRSLRLSCAASGFTFHDYTMHWVRQAPGKCLEWVSGISWNTGTIGYADSVKGRFTISRDNAKNSLYLQMNSLRAEDTALYYCVKDAFYGGDYYYNYGMDVWGHGTTVTVSSGGGGSGGGGSGGGGSEIVLTQSPATLSVSPGERATLSCRASQSVNNNLAWYQQKPGQAPRLLIYGASTRATGIPARFSGSGSGTDFTLTISSLQSDDFAVYYCQQYNNWPLTFGCGTKVEIKSGGGGSQVQLVQSGGEVKKPGASVKVSCKASGYTFTSYGISWVRQAPGQCLEWMGWMSPYNGNAIYAQKLQGRVTMTRDTSTSTAYMELRSLRSDDTAVYYCARDPDYYGSGSYSDYWGQGTLVTVSSGGGGSGGGGSGGGGSEIVLTQSPATLSVSPGERATLSCRASQSVSSNLAWYQQKPGQAPRLLIYGASSRATGIPARFSGSGSGTEFTLTISSLQSEDFAVYYCQQYHSWPLLTFGCGTKVEIKSGGGGSEVQLVESGGGLVQPGGSLKLSCAASGFTFNKYAINWVRQAPGKGLEWVARIRSKYNNYATYYADAVKDRFTISRDDSKNTVYLQMNNLKTEDTAVYYCARAGNFGSSYISYWAYWGQGTLVTVSSGGGGSGGGGSGGGGSQTVVTQEPSLTVSPGGTVTITCGSSTGAVTSGNYPNWVQKKPGQAPRGLIGGTKFLAPGTPARFSGSLSGGKAALTLSGVQPEDEAEYYCVLWYSNRWVFGSGTKLTVL

SEQ ID NO: 2869 - protein, 753 aa, Artificial Sequence
  Synthetic
EVQLVESGGGLVQPGRSLRLSCAASGFTFHDYTMHWVRQAPGKCLEWVSGISWNTGTIGYADSVKGRFTISRDNAKNSLYLQMNSLRAEDTALYYCVKDAFYGGDYYYNYGMDVWGHGTTVTVSSGGGGQGGGGQGGGGQEIVLTQSPATLSVSPGERATLSCRASQSVNNNLAWYQQKPGQAPRLLIYGASTRATGIPARFSGSGSGTDFTLTISSLQSDDFAVYYCQQYNNWPLTFGCGTKVEIKSGGGGQQVQLVQSGGEVKKPGASVKVSCKASGYTFTSYGISWVRQAPGQCLEWMGWMSPYNGNAIYAQKLQGRVTMTRDTSTSTAYMELRSLRSDDTAVYYCARDPDYYGSGSYSDYWGQGTLVTVSSGGGGQGGGGQGGGGQEIVLTQSPATLSVSPGERATLSCRASQSVSSNLAWYQQKPGQAPRLLIYGASSRATGIPARFSGSGSGTEFTLTISSLQSEDFAVYYCQQYHSWPLLTFGCGTKVEIKSGGGGQEVQLVESGGGLVQPGGSLKLSCAASGFTFNKYAINWVRQAPGKGLEWVARIRSKYNNYATYYADAVKDRFTISRDDSKNTVYLQMNNLKTEDTAVYYCARAGNFGSSYISYWAYWGQGTLVTVSSGGGGQGGGGQGGGGQQTVVTQEPSLTVSPGGTVTITCGSSTGAVTSGNYPNWVQKKPGQAPRGLIGGTKFLAPGTPARFSGSLSGGKAALTLSGVQPEDEAEYYCVLWYSNRWVFGSGTKLTVL

SEQ ID NO: 2870 - protein, 1241 aa, Artificial Sequence
  Synthetic
EVQLVESGGGLVQPGRSLRLSCAASGFTFHDYTMHWVRQAPGKCLEWVSGISWNTGTIGYADSVKGRFTISRDNAKNSLYLQMNSLRAEDTALYYCVKDAFYGGDYYYNYGMDVWGHGTTVTVSSGGGGSGGGGSGGGGSEIVLTQSPATLSVSPGERATLSCRASQSVNNNLAWYQQKPGQAPRLLIYGASTRATGIPARFSGSGSGTDFTLTISSLQSDDFAVYYCQQYNNWPLTFGCGTKVEIKSGGGGSQVQLVQSGGEVKKPGASVKVSCKASGYTFTSYGISWVRQAPGQCLEWMGWMSPYNGNAIYAQKLQGRVTMTRDTSTSTAYMELRSLRSDDTAVYYCARDPDYYGSGSYSDYWGQGTLVTVSSGGGGSGGGGSGGGGSEIVLTQSPATLSVSPGERATLSCRASQSVSSNLAWYQQKPGQAPRLLIYGASSRATGIPARFSGSGSGTEFTLTISSLQSEDFAVYYCQQYHSWPLLTFGCGTKVEIKSGGGGSEVQLVESGGGLVQPGGSLKLSCAASGFTFNKYAMNWVRQAPGKGLEWVARIRSKYNNYATYYADSVKDRFTISRDDSKNTAYLQMNNLKTEDTAVYYCVRHGNFGNSYISYWAYWGQGTLVTVSSGGGGSGGGGSGGGGSQTVVTQEPSLTVSPGGTVTLTCGSSTGAVTSGNYPNWVQQKPGQAPRGLIGGTKFLAPGTPARFSGSLLGGKAALTLSGVQPEDEAEYYCVLWYSNRWVFGGGTKLTVLGGGGDKTHTCPPCPAPELLGGPSVFLFPPKPKDTLMISRTPEVTCVVVDVSHEDPEVKFNWYVDGVEVHNAKTKPCEEQYGSTYRCVSVLTVLHQDWLNGKEYKCKVSNKALPAPIEKTISKAKGQPREPQVYTLPPSREEMTKNQVSLTCLVKGFYPSDIAVEWESNGQPENNYKTTPPVLDSDGSFFLYSKLTVDKSRWQQGNVFSCSVMHEALHNHYTQKSLSLSPGKGGGGSGGGGSGGGGSGGGGSGGGGSGGGGSDKTHTCPPCPAPELLGGPSVFLFPPKPKDTLMISRTPEVTCVVVDVSHEDPEVKFNWYVDGVEVHNAKTKPCEEQYGSTYRCVSVLTVLHQDWLNGKEYKCKVSNKALPAPIEKTISKAKGQPREPQVYTLPPSREEMTKNQVSLTCLVKGFYPSDIAVEWESNGQPENNYKTTPPVLDSDGSFFLYSKLTVDKSRWQQGNVFSCSVMHEALHNHYTQKSLSLSPGK

SEQ ID NO: 2871 - protein, 1231 aa, Artificial Sequence
  Synthetic
EVQLVESGGGLVQPGRSLRLSCAASGFTFHDYTMHWVRQAPGKCLEWVSGISWNTGTIGYADSVKGRFTISRDNAKNSLYLQMNSLRAEDTALYYCVKDAFYGGDYYYNYGMDVWGHGTTVTVSSGGGGQGGGGQGGGGQEIVLTQSPATLSVSPGERATLSCRASQSVNNNLAWYQQKPGQAPRLLIYGASTRATGIPARFSGSGSGTDFTLTISSLQSDDFAVYYCQQYNNWPLTFGCGTKVEIKSGGGGQQVQLVQSGGEVKKPGASVKVSCKASGYTFTSYGISWVRQAPGQCLEWMGWMSPYNGNAIYAQKLQGRVTMTRDTSTSTAYMELRSLRSDDTAVYYCARDPDYYGSGSYSDYWGQGTLVTVSSGGGGQGGGGQGGGGQEIVLTQSPATLSVSPGERATLSCRASQSVSSNLAWYQQKPGQAPRLLIYGASSRATGIPARFSGSGSGTEFTLTISSLQSEDFAVYYCQQYHSWPLLTFGCGTKVEIKSGGGGQEVQLVESGGGLVQPGGSLKLSCAASGFTFNKYAMNWVRQAPGKGLEWVARIRSKYNNYATYYADSVKDRFTISRDDSKNTAYLQMNNLKTEDTAVYYCVRHGNFGNSYISYWAYWGQGTLVTVSSGGGGQGGGGQGGGGQQTVVTQEPSLTVSPGGTVTLTCGSSTGAVTSGNYPNWVQQKPGQAPRGLIGGTKFLAPGTPARFSGSLLGGKAALTLSGVQPEDEAEYYCVLWYSNRWVFGGGTKLTVLGGGGCPPCPAPELLGGPSVFLFPPKPKDTLMISRTPEVTCVVVDVSHEEPEVKFNWYVDGVEVHNAKTKPCEEQYGSTYRCVSVLTVLHQDWLNGKEYKCKVSNKALPAPIEKTISKAKGQPREPQVYTLPPSREEMTKNQVSLTCLVKGFYPSDIAVEWESNGQPENNYKTTPPVLDSDGSFFLYSKLTVDKSRWQQGNVFSCSVMHEALHNHYTQKSLSLSPGKGGGGQGGGGQGGGGQGGGGQGGGGQGGGGQCPPCPAPELLGGPSVFLFPPKPKDTLMISRTPEVTCVVVDVSHEEPEVKFNWYVDGVEVHNAKTKPCEEQYGSTYRCVSVLTVLHQDWLNGKEYKCKVSNKALPAPIEKTISKAKGQPREPQVYTLPPSREEMTKNQVSLTCLVKGFYPSDIAVEWESNGQPENNYKTTPPVLDSDGSFFLYSKLTVDKSRWQQGNVFSCSVMHEALHNHYTQKSLSLSPGK

SEQ ID NO: 2872 - protein, 1241 aa, Artificial Sequence
  Synthetic
EVQLVESGGGLVQPGRSLRLSCAASGFTFHDYTMHWVRQAPGKCLEWVSGISWNTGTIGYADSVKGRFTISRDNAKNSLYLQMNSLRAEDTALYYCVKDAFYGGDYYYNYGMDVWGHGTTVTVSSGGGGSGGGGSGGGGSEIVLTQSPATLSVSPGERATLSCRASQSVNNNLAWYQQKPGQAPRLLIYGASTRATGIPARFSGSGSGTDFTLTISSLQSDDFAVYYCQQYNNWPLTFGCGTKVEIKSGGGGSQVQLVQSGGEVKKPGASVKVSCKASGYTFTSYGISWVRQAPGQCLEWMGWMSPYNGNAIYAQKLQGRVTMTRDTSTSTAYMELRSLRSDDTAVYYCARDPDYYGSGSYSDYWGQGTLVTVSSGGGGSGGGGSGGGGSEIVLTQSPATLSVSPGERATLSCRASQSVSSNLAWYQQKPGQAPRLLIYGASSRATGIPARFSGSGSGTEFTLTISSLQSEDFAVYYCQQYHSWPLLTFGCGTKVEIKSGGGGSEVQLVESGGGLVQPGGSLKLSCAASGFTFNKYAINWVRQAPGKGLEWVARIRSKYNNYATYYADAVKDRFTISRDDSKNTVYLQMNNLKTEDTAVYYCARAGNFGSSYISYWAYWGQGTLVTVSSGGGGSGGGGSGGGGSQTVVTQEPSLTVSPGGTVTITCGSSTGAVTSGNYPNWVQKKPGQAPRGLIGGTKFLAPGTPARFSGSLSGGKAALTLSGVQPEDEAEYYCVLWYSNRWVFGSGTKLTVLGGGGDKTHTCPPCPAPELLGGPSVFLFPPKPKDTLMISRTPEVTCVVVDVSHEDPEVKFNWYVDGVEVHNAKTKPCEEQYGSTYRCVSVLTVLHQDWLNGKEYKCKVSNKALPAPIEKTISKAKGQPREPQVYTLPPSREEMTKNQVSLTCLVKGFYPSDIAVEWESNGQPENNYKTTPPVLDSDGSFFLYSKLTVDKSRWQQGNVFSCSVMHEALHNHYTQKSLSLSPGKGGGGSGGGGSGGGGSGGGGSGGGGSGGGGSDKTHTCPPCPAPELLGGPSVFLFPPKPKDTLMISRTPEVTCVVVDVSHEDPEVKFNWYVDGVEVHNAKTKPCEEQYGSTYRCVSVLTVLHQDWLNGKEYKCKVSNKALPAPIEKTISKAKGQPREPQVYTLPPSREEMTKNQVSLTCLVKGFYPSDIAVEWESNGQPENNYKTTPPVLDSDGSFFLYSKLTVDKSRWQQGNVFSCSVMHEALHNHYTQKSLSLSPGK

SEQ ID NO: 2873 - protein, 1231 aa, Artificial Sequence
  Synthetic
EVQLVESGGGLVQPGRSLRLSCAASGFTFHDYTMHWVRQAPGKCLEWVSGISWNTGTIGYADSVKGRFTISRDNAKNSLYLQMNSLRAEDTALYYCVKDAFYGGDYYYNYGMDVWGHGTTVTVSSGGGGQGGGGQGGGGQEIVLTQSPATLSVSPGERATLSCRASQSVNNNLAWYQQKPGQAPRLLIYGASTRATGIPARFSGSGSGTDFTLTISSLQSDDFAVYYCQQYNNWPLTFGCGTKVEIKSGGGGQQVQLVQSGGEVKKPGASVKVSCKASGYTFTSYGISWVRQAPGQCLEWMGWMSPYNGNAIYAQKLQGRVTMTRDTSTSTAYMELRSLRSDDTAVYYCARDPDYYGSGSYSDYWGQGTLVTVSSGGGGQGGGGQGGGGQEIVLTQSPATLSVSPGERATLSCRASQSVSSNLAWYQQKPGQAPRLLIYGASSRATGIPARFSGSGSGTEFTLTISSLQSEDFAVYYCQQYHSWPLLTFGCGTKVEIKSGGGGQEVQLVESGGGLVQPGGSLKLSCAASGFTFNKYAINWVRQAPGKGLEWVARIRSKYNNYATYYADAVKDRFTISRDDSKNTVYLQMNNLKTEDTAVYYCARAGNFGSSYISYWAYWGQGTLVTVSSGGGGQGGGGQGGGGQQTVVTQEPSLTVSPGGTVTITCGSSTGAVTSGNYPNWVQKKPGQAPRGLIGGTKFLAPGTPARFSGSLSGGKAALTLSGVQPEDEAEYYCVLWYSNRWVFGSGTKLTVLGGGGCPPCPAPELLGGPSVFLFPPKPKDTLMISRTPEVTCVVVDVSHEEPEVKFNWYVDGVEVHNAKTKPCEEQYGSTYRCVSVLTVLHQDWLNGKEYKCKVSNKALPAPIEKTISKAKGQPREPQVYTLPPSREEMTKNQVSLTCLVKGFYPSDIAVEWESNGQPENNYKTTPPVLDSDGSFFLYSKLTVDKSRWQQGNVFSCSVMHEALHNHYTQKSLSLSPGKGGGGQGGGGQGGGGQGGGGQGGGGQGGGGQCPPCPAPELLGGPSVFLFPPKPKDTLMISRTPEVTCVVVDVSHEEPEVKFNWYVDGVEVHNAKTKPCEEQYGSTYRCVSVLTVLHQDWLNGKEYKCKVSNKALPAPIEKTISKAKGQPREPQVYTLPPSREEMTKNQVSLTCLVKGFYPSDIAVEWESNGQPENNYKTTPPVLDSDGSFFLYSKLTVDKSRWQQGNVFSCSVMHEALHNHYTQKSLSLSPGK

SEQ ID NO: 2874 - protein, 498 aa, Artificial Sequence
  Synthetic
EVQLVESGGGLVQPGRSLRLSCAASGFTFHDYTMHWVRQAPGKCLEWVSGISWNTGTIGYADSVKGRFTISRDNAKNSLYLQMNSLRAEDTALYYCVKDAFYGGDYYYNYGMDVWGHGTTVTVSSGGGGSGGGGSGGGGSEIVLTQSPATLSVSPGERATLSCRASQSVNNNLAWYQQKPGQAPRLLIYGASTRATGIPARFSGSGSGTDFTLTISSLQSDDFAVYYCQQYNNWPLTFGCGTKVEIKSGGGGSQVQLVQSGAEVKKPGASVKVSCKASGYTFTSYGISWVRQAPGQCLEWMGWISAYNGNTIYAQKFQGRVTLTRDTSTSTAYMELRSLRSDDTAMYYCARDPDYYGSGSYSDYWGQGTLVTVSSGGGGSGGGGSGGGGSEIVLTQSPATLSVSPGERATLSCRASQSVSSNLAWYQQKPGQAPRLLIYGASSRATGIPARFSGSGSGTEFTLTISSLQSEDFAVYYCQQYHSWPLLTFGCGTKVEIK

SEQ ID NO: 2875 - protein, 498 aa, Artificial Sequence
  Synthetic
EVQLVESGGGLVQPGRSLRLSCAASGFTFHDYTMHWVRQAPGKCLEWVSGISWNTGTIGYADSVKGRFTISRDNAKNSLYLQMNSLRAEDTALYYCVKDAFYGGDYYYNYGMDVWGHGTTVTVSSGGGGQGGGGQGGGGQEIVLTQSPATLSVSPGERATLSCRASQSVNNNLAWYQQKPGQAPRLLIYGASTRATGIPARFSGSGSGTDFTLTISSLQSDDFAVYYCQQYNNWPLTFGCGTKVEIKSGGGGQQVQLVQSGAEVKKPGASVKVSCKASGYTFTSYGISWVRQAPGQCLEWMGWISAYNGNTIYAQKFQGRVTLTRDTSTSTAYMELRSLRSDDTAMYYCARDPDYYGSGSYSDYWGQGTLVTVSSGGGGQGGGGQGGGGQEIVLTQSPATLSVSPGERATLSCRASQSVSSNLAWYQQKPGQAPRLLIYGASSRATGIPARFSGSGSGTEFTLTISSLQSEDFAVYYCQQYHSWPLLTFGCGTKVEIK

SEQ ID NO: 2876 - protein, 753 aa, Artificial Sequence
  Synthetic
EVQLVESGGGLVQPGRSLRLSCAASGFTFHDYTMHWVRQAPGKCLEWVSGISWNTGTIGYADSVKGRFTISRDNAKNSLYLQMNSLRAEDTALYYCVKDAFYGGDYYYNYGMDVWGHGTTVTVSSGGGGSGGGGSGGGGSEIVLTQSPATLSVSPGERATLSCRASQSVNNNLAWYQQKPGQAPRLLIYGASTRATGIPARFSGSGSGTDFTLTISSLQSDDFAVYYCQQYNNWPLTFGCGTKVEIKSGGGGSQVQLVQSGAEVKKPGASVKVSCKASGYTFTSYGISWVRQAPGQCLEWMGWISAYNGNTIYAQKFQGRVTLTRDTSTSTAYMELRSLRSDDTAMYYCARDPDYYGSGSYSDYWGQGTLVTVSSGGGGSGGGGSGGGGSEIVLTQSPATLSVSPGERATLSCRASQSVSSNLAWYQQKPGQAPRLLIYGASSRATGIPARFSGSGSGTEFTLTISSLQSEDFAVYYCQQYHSWPLLTFGCGTKVEIKSGGGGSEVQLVESGGGLVQPGGSLKLSCAASGFTFNKYAMNWVRQAPGKGLEWVARIRSKYNNYATYYADSVKDRFTISRDDSKNTAYLQMNNLKTEDTAVYYCVRHGNFGNSYISYWAYWGQGTLVTVSSGGGGSGGGGSGGGGSQTVVTQEPSLTVSPGGTVTLTCGSSTGAVTSGNYPNWVQQKPGQAPRGLIGGTKFLAPGTPARFSGSLLGGKAALTLSGVQPEDEAEYYCVLWYSNRWVFGGGTKLTVL

SEQ ID NO: 2877 - protein, 753 aa, Artificial Sequence
  Synthetic
EVQLVESGGGLVQPGRSLRLSCAASGFTFHDYTMHWVRQAPGKCLEWVSGISWNTGTIGYADSVKGRFTISRDNAKNSLYLQMNSLRAEDTALYYCVKDAFYGGDYYYNYGMDVWGHGTTVTVSSGGGGQGGGGQGGGGQEIVLTQSPATLSVSPGERATLSCRASQSVNNNLAWYQQKPGQAPRLLIYGASTRATGIPARFSGSGSGTDFTLTISSLQSDDFAVYYCQQYNNWPLTFGCGTKVEIKSGGGGQQVQLVQSGAEVKKPGASVKVSCKASGYTFTSYGISWVRQAPGQCLEWMGWISAYNGNTIYAQKFQGRVTLTRDTSTSTAYMELRSLRSDDTAMYYCARDPDYYGSGSYSDYWGQGTLVTVSSGGGGQGGGGQGGGGQEIVLTQSPATLSVSPGERATLSCRASQSVSSNLAWYQQKPGQAPRLLIYGASSRATGIPARFSGSGSGTEFTLTISSLQSEDFAVYYCQQYHSWPLLTFGCGTKVEIKSGGGGQEVQLVESGGGLVQPGGSLKLSCAASGFTFNKYAMNWVRQAPGKGLEWVARIRSKYNNYATYYADSVKDRFTISRDDSKNTAYLQMNNLKTEDTAVYYCVRHGNFGNSYISYWAYWGQGTLVTVSSGGGGQGGGGQGGGGQQTVVTQEPSLTVSPGGTVTLTCGSSTGAVTSGNYPNWVQQKPGQAPRGLIGGTKFLAPGTPARFSGSLLGGKAALTLSGVQPEDEAEYYCVLWYSNRWVFGGGTKLTVL

SEQ ID NO: 2878 - protein, 753 aa, Artificial Sequence
  Synthetic
EVQLVESGGGLVQPGRSLRLSCAASGFTFHDYTMHWVRQAPGKCLEWVSGISWNTGTIGYADSVKGRFTISRDNAKNSLYLQMNSLRAEDTALYYCVKDAFYGGDYYYNYGMDVWGHGTTVTVSSGGGGSGGGGSGGGGSEIVLTQSPATLSVSPGERATLSCRASQSVNNNLAWYQQKPGQAPRLLIYGASTRATGIPARFSGSGSGTDFTLTISSLQSDDFAVYYCQQYNNWPLTFGCGTKVEIKSGGGGSQVQLVQSGAEVKKPGASVKVSCKASGYTFTSYGISWVRQAPGQCLEWMGWISAYNGNTIYAQKFQGRVTLTRDTSTSTAYMELRSLRSDDTAMYYCARDPDYYGSGSYSDYWGQGTLVTVSSGGGGSGGGGSGGGGSEIVLTQSPATLSVSPGERATLSCRASQSVSSNLAWYQQKPGQAPRLLIYGASSRATGIPARFSGSGSGTEFTLTISSLQSEDFAVYYCQQYHSWPLLTFGCGTKVEIKSGGGGSEVQLVESGGGLVQPGGSLKLSCAASGFTFNKYAINWVRQAPGKGLEWVARIRSKYNNYATYYADAVKDRFTISRDDSKNTVYLQMNNLKTEDTAVYYCARAGNFGSSYISYWAYWGQGTLVTVSSGGGGSGGGGSGGGGSQTVVTQEPSLTVSPGGTVTITCGSSTGAVTSGNYPNWVQKKPGQAPRGLIGGTKFLAPGTPARFSGSLSGGKAALTLSGVQPEDEAEYYCVLWYSNRWVFGSGTKLTVL

SEQ ID NO: 2879 - protein, 753 aa, Artificial Sequence
  Synthetic
EVQLVESGGGLVQPGRSLRLSCAASGFTFHDYTMHWVRQAPGKCLEWVSGISWNTGTIGYADSVKGRFTISRDNAKNSLYLQMNSLRAEDTALYYCVKDAFYGGDYYYNYGMDVWGHGTTVTVSSGGGGQGGGGQGGGGQEIVLTQSPATLSVSPGERATLSCRASQSVNNNLAWYQQKPGQAPRLLIYGASTRATGIPARFSGSGSGTDFTLTISSLQSDDFAVYYCQQYNNWPLTFGCGTKVEIKSGGGGQQVQLVQSGAEVKKPGASVKVSCKASGYTFTSYGISWVRQAPGQCLEWMGWISAYNGNTIYAQKFQGRVTLTRDTSTSTAYMELRSLRSDDTAMYYCARDPDYYGSGSYSDYWGQGTLVTVSSGGGGQGGGGQGGGGQEIVLTQSPATLSVSPGERATLSCRASQSVSSNLAWYQQKPGQAPRLLIYGASSRATGIPARFSGSGSGTEFTLTISSLQSEDFAVYYCQQYHSWPLLTFGCGTKVEIKSGGGGQEVQLVESGGGLVQPGGSLKLSCAASGFTFNKYAINWVRQAPGKGLEWVARIRSKYNNYATYYADAVKDRFTISRDDSKNTVYLQMNNLKTEDTAVYYCARAGNFGSSYISYWAYWGQGTLVTVSSGGGGQGGGGQGGGGQQTVVTQEPSLTVSPGGTVTITCGSSTGAVTSGNYPNWVQKKPGQAPRGLIGGTKFLAPGTPARFSGSLSGGKAALTLSGVQPEDEAEYYCVLWYSNRWVFGSGTKLTVL

SEQ ID NO: 2880 - protein, 1241 aa, Artificial Sequence
  Synthetic
EVQLVESGGGLVQPGRSLRLSCAASGFTFHDYTMHWVRQAPGKCLEWVSGISWNTGTIGYADSVKGRFTISRDNAKNSLYLQMNSLRAEDTALYYCVKDAFYGGDYYYNYGMDVWGHGTTVTVSSGGGGSGGGGSGGGGSEIVLTQSPATLSVSPGERATLSCRASQSVNNNLAWYQQKPGQAPRLLIYGASTRATGIPARFSGSGSGTDFTLTISSLQSDDFAVYYCQQYNNWPLTFGCGTKVEIKSGGGGSQVQLVQSGAEVKKPGASVKVSCKASGYTFTSYGISWVRQAPGQCLEWMGWISAYNGNTIYAQKFQGRVTLTRDTSTSTAYMELRSLRSDDTAMYYCARDPDYYGSGSYSDYWGQGTLVTVSSGGGGSGGGGSGGGGSEIVLTQSPATLSVSPGERATLSCRASQSVSSNLAWYQQKPGQAPRLLIYGASSRATGIPARFSGSGSGTEFTLTISSLQSEDFAVYYCQQYHSWPLLTFGCGTKVEIKSGGGGSEVQLVESGGGLVQPGGSLKLSCAASGFTFNKYAMNWVRQAPGKGLEWVARIRSKYNNYATYYADSVKDRFTISRDDSKNTAYLQMNNLKTEDTAVYYCVRHGNFGNSYISYWAYWGQGTLVTVSSGGGGSGGGGSGGGGSQTVVTQEPSLTVSPGGTVTLTCGSSTGAVTSGNYPNWVQQKPGQAPRGLIGGTKFLAPGTPARFSGSLLGGKAALTLSGVQPEDEAEYYCVLWYSNRWVFGGGTKLTVLGGGGDKTHTCPPCPAPELLGGPSVFLFPPKPKDTLMISRTPEVTCVVVDVSHEDPEVKFNWYVDGVEVHNAKTKPCEEQYGSTYRCVSVLTVLHQDWLNGKEYKCKVSNKALPAPIEKTISKAKGQPREPQVYTLPPSREEMTKNQVSLTCLVKGFYPSDIAVEWESNGQPENNYKTTPPVLDSDGSFFLYSKLTVDKSRWQQGNVFSCSVMHEALHNHYTQKSLSLSPGKGGGGSGGGGSGGGGSGGGGSGGGGSGGGGSDKTHTCPPCPAPELLGGPSVFLFPPKPKDTLMISRTPEVTCVVVDVSHEDPEVKFNWYVDGVEVHNAKTKPCEEQYGSTYRCVSVLTVLHQDWLNGKEYKCKVSNKALPAPIEKTISKAKGQPREPQVYTLPPSREEMTKNQVSLTCLVKGFYPSDIAVEWESNGQPENNYKTTPPVLDSDGSFFLYSKLTVDKSRWQQGNVFSCSVMHEALHNHYTQKSLSLSPGK

SEQ ID NO: 2881 - protein, 1231 aa, Artificial Sequence
  Synthetic
EVQLVESGGGLVQPGRSLRLSCAASGFTFHDYTMHWVRQAPGKCLEWVSGISWNTGTIGYADSVKGRFTISRDNAKNSLYLQMNSLRAEDTALYYCVKDAFYGGDYYYNYGMDVWGHGTTVTVSSGGGGQGGGGQGGGGQEIVLTQSPATLSVSPGERATLSCRASQSVNNNLAWYQQKPGQAPRLLIYGASTRATGIPARFSGSGSGTDFTLTISSLQSDDFAVYYCQQYNNWPLTFGCGTKVEIKSGGGGQQVQLVQSGAEVKKPGASVKVSCKASGYTFTSYGISWVRQAPGQCLEWMGWISAYNGNTIYAQKFQGRVTLTRDTSTSTAYMELRSLRSDDTAMYYCARDPDYYGSGSYSDYWGQGTLVTVSSGGGGQGGGGQGGGGQEIVLTQSPATLSVSPGERATLSCRASQSVSSNLAWYQQKPGQAPRLLIYGASSRATGIPARFSGSGSGTEFTLTISSLQSEDFAVYYCQQYHSWPLLTFGCGTKVEIKSGGGGQEVQLVESGGGLVQPGGSLKLSCAASGFTFNKYAMNWVRQAPGKGLEWVARIRSKYNNYATYYADSVKDRFTISRDDSKNTAYLQMNNLKTEDTAVYYCVRHGNFGNSYISYWAYWGQGTLVTVSSGGGGQGGGGQGGGGQQTVVTQEPSLTVSPGGTVTLTCGSSTGAVTSGNYPNWVQQKPGQAPRGLIGGTKFLAPGTPARFSGSLLGGKAALTLSGVQPEDEAEYYCVLWYSNRWVFGGGTKLTVLGGGGCPPCPAPELLGGPSVFLFPPKPKDTLMISRTPEVTCVVVDVSHEEPEVKFNWYVDGVEVHNAKTKPCEEQYGSTYRCVSVLTVLHQDWLNGKEYKCKVSNKALPAPIEKTISKAKGQPREPQVYTLPPSREEMTKNQVSLTCLVKGFYPSDIAVEWESNGQPENNYKTTPPVLDSDGSFFLYSKLTVDKSRWQQGNVFSCSVMHEALHNHYTQKSLSLSPGKGGGGQGGGGQGGGGQGGGGQGGGGQGGGGQCPPCPAPELLGGPSVFLFPPKPKDTLMISRTPEVTCVVVDVSHEEPEVKFNWYVDGVEVHNAKTKPCEEQYGSTYRCVSVLTVLHQDWLNGKEYKCKVSNKALPAPIEKTISKAKGQPREPQVYTLPPSREEMTKNQVSLTCLVKGFYPSDIAVEWESNGQPENNYKTTPPVLDSDGSFFLYSKLTVDKSRWQQGNVFSCSVMHEALHNHYTQKSLSLSPGK

SEQ ID NO: 2882 - protein, 1241 aa, Artificial Sequence
  Synthetic
EVQLVESGGGLVQPGRSLRLSCAASGFTFHDYTMHWVRQAPGKCLEWVSGISWNTGTIGYADSVKGRFTISRDNAKNSLYLQMNSLRAEDTALYYCVKDAFYGGDYYYNYGMDVWGHGTTVTVSSGGGGSGGGGSGGGGSEIVLTQSPATLSVSPGERATLSCRASQSVNNNLAWYQQKPGQAPRLLIYGASTRATGIPARFSGSGSGTDFTLTISSLQSDDFAVYYCQQYNNWPLTFGCGTKVEIKSGGGGSQVQLVQSGAEVKKPGASVKVSCKASGYTFTSYGISWVRQAPGQCLEWMGWISAYNGNTIYAQKFQGRVTLTRDTSTSTAYMELRSLRSDDTAMYYCARDPDYYGSGSYSDYWGQGTLVTVSSGGGGSGGGGSGGGGSEIVLTQSPATLSVSPGERATLSCRASQSVSSNLAWYQQKPGQAPRLLIYGASSRATGIPARFSGSGSGTEFTLTISSLQSEDFAVYYCQQYHSWPLLTFGCGTKVEIKSGGGGSEVQLVESGGGLVQPGGSLKLSCAASGFTFNKYAINWVRQAPGKGLEWVARIRSKYNNYATYYADAVKDRFTISRDDSKNTVYLQMNNLKTEDTAVYYCARAGNFGSSYISYWAYWGQGTLVTVSSGGGGSGGGGSGGGGSQTVVTQEPSLTVSPGGTVTITCGSSTGAVTSGNYPNWVQKKPGQAPRGLIGGTKFLAPGTPARFSGSLSGGKAALTLSGVQPEDEAEYYCVLWYSNRWVFGSGTKLTVLGGGGDKTHTCPPCPAPELLGGPSVFLFPPKPKDTLMISRTPEVTCVVVDVSHEDPEVKFNWYVDGVEVHNAKTKPCEEQYGSTYRCVSVLTVLHQDWLNGKEYKCKVSNKALPAPIEKTISKAKGQPREPQVYTLPPSREEMTKNQVSLTCLVKGFYPSDIAVEWESNGQPENNYKTTPPVLDSDGSFFLYSKLTVDKSRWQQGNVFSCSVMHEALHNHYTQKSLSLSPGKGGGGSGGGGSGGGGSGGGGSGGGGSGGGGSDKTHTCPPCPAPELLGGPSVFLFPPKPKDTLMISRTPEVTCVVVDVSHEDPEVKFNWYVDGVEVHNAKTKPCEEQYGSTYRCVSVLTVLHQDWLNGKEYKCKVSNKALPAPIEKTISKAKGQPREPQVYTLPPSREEMTKNQVSLTCLVKGFYPSDIAVEWESNGQPENNYKTTPPVLDSDGSFFLYSKLTVDKSRWQQGNVFSCSVMHEALHNHYTQKSLSLSPGK

SEQ ID NO: 2883 - protein, 1231 aa, Artificial Sequence
  Synthetic
EVQLVESGGGLVQPGRSLRLSCAASGFTFHDYTMHWVRQAPGKCLEWVSGISWNTGTIGYADSVKGRFTISRDNAKNSLYLQMNSLRAEDTALYYCVKDAFYGGDYYYNYGMDVWGHGTTVTVSSGGGGQGGGGQGGGGQEIVLTQSPATLSVSPGERATLSCRASQSVNNNLAWYQQKPGQAPRLLIYGASTRATGIPARFSGSGSGTDFTLTISSLQSDDFAVYYCQQYNNWPLTFGCGTKVEIKSGGGGQQVQLVQSGAEVKKPGASVKVSCKASGYTFTSYGISWVRQAPGQCLEWMGWISAYNGNTIYAQKFQGRVTLTRDTSTSTAYMELRSLRSDDTAMYYCARDPDYYGSGSYSDYWGQGTLVTVSSGGGGQGGGGQGGGGQEIVLTQSPATLSVSPGERATLSCRASQSVSSNLAWYQQKPGQAPRLLIYGASSRATGIPARFSGSGSGTEFTLTISSLQSEDFAVYYCQQYHSWPLLTFGCGTKVEIKSGGGGQEVQLVESGGGLVQPGGSLKLSCAASGFTFNKYAINWVRQAPGKGLEWVARIRSKYNNYATYYADAVKDRFTISRDDSKNTVYLQMNNLKTEDTAVYYCARAGNFGSSYISYWAYWGQGTLVTVSSGGGGQGGGGQGGGGQQTVVTQEPSLTVSPGGTVTITCGSSTGAVTSGNYPNWVQKKPGQAPRGLIGGTKFLAPGTPARFSGSLSGGKAALTLSGVQPEDEAEYYCVLWYSNRWVFGSGTKLTVLGGGGCPPCPAPELLGGPSVFLFPPKPKDTLMISRTPEVTCVVVDVSHEEPEVKFNWYVDGVEVHNAKTKPCEEQYGSTYRCVSVLTVLHQDWLNGKEYKCKVSNKALPAPIEKTISKAKGQPREPQVYTLPPSREEMTKNQVSLTCLVKGFYPSDIAVEWESNGQPENNYKTTPPVLDSDGSFFLYSKLTVDKSRWQQGNVFSCSVMHEALHNHYTQKSLSLSPGKGGGGQGGGGQGGGGQGGGGQGGGGQGGGGQCPPCPAPELLGGPSVFLFPPKPKDTLMISRTPEVTCVVVDVSHEEPEVKFNWYVDGVEVHNAKTKPCEEQYGSTYRCVSVLTVLHQDWLNGKEYKCKVSNKALPAPIEKTISKAKGQPREPQVYTLPPSREEMTKNQVSLTCLVKGFYPSDIAVEWESNGQPENNYKTTPPVLDSDGSFFLYSKLTVDKSRWQQGNVFSCSVMHEALHNHYTQKSLSLSPGK

SEQ ID NO: 2884 - protein, 498 aa, Artificial Sequence
  Synthetic
EVQLVESGGGLVQPGRSLRLSCAASGFTFHDYTMHWVRQAPGKCLEWVSGISWNTGTIGYADSVKGRFTISRDNAKNSLYLQMNSLRAEDTALYYCVKDAFYGGDYYYNYGMDVWGHGTTVTVSSGGGGSGGGGSGGGGSEIVLTQSPATLSVSPGERATLSCRASQSVNNNLAWYQQKPGQAPRLLIYGASTRATGIPARFSGSGSGTDFTLTISSLQSDDFAVYYCQQYNNWPLTFGCGTKVEIKSGGGGSQVQLVQSGAEVKKPGASVKVSCKASGYTFTTYGISWVRQAPGQCLEWMGWISPKNGVTTYAQKFQGRVTITADESTSTAYMELSRLTSDDTAMYYCARDPDYYGSGSYSDYWGQGTLVTVSSGGGGSGGGGSGGGGSEIVLTQSPATLSVSPGERATLSCRASQSVSSNLAWYQQKPGQAPRLLIYGASSRATGIPARFSGSGSGTEFTLTISSLQSEDFAVYYCQQYHSWPLLTFGCGTKVEIK

SEQ ID NO: 2885 - protein, 498 aa, Artificial Sequence
  Synthetic
EVQLVESGGGLVQPGRSLRLSCAASGFTFHDYTMHWVRQAPGKCLEWVSGISWNTGTIGYADSVKGRFTISRDNAKNSLYLQMNSLRAEDTALYYCVKDAFYGGDYYYNYGMDVWGHGTTVTVSSGGGGQGGGGQGGGGQEIVLTQSPATLSVSPGERATLSCRASQSVNNNLAWYQQKPGQAPRLLIYGASTRATGIPARFSGSGSGTDFTLTISSLQSDDFAVYYCQQYNNWPLTFGCGTKVEIKSGGGGQQVQLVQSGAEVKKPGASVKVSCKASGYTFTTYGISWVRQAPGQCLEWMGWISPKNGVTTYAQKFQGRVTITADESTSTAYMELSRLTSDDTAMYYCARDPDYYGSGSYSDYWGQGTLVTVSSGGGGQGGGGQGGGGQEIVLTQSPATLSVSPGERATLSCRASQSVSSNLAWYQQKPGQAPRLLIYGASSRATGIPARFSGSGSGTEFTLTISSLQSEDFAVYYCQQYHSWPLLTFGCGTKVEIK

SEQ ID NO: 2886 - protein, 753 aa, Artificial Sequence
  Synthetic
EVQLVESGGGLVQPGRSLRLSCAASGFTFHDYTMHWVRQAPGKCLEWVSGISWNTGTIGYADSVKGRFTISRDNAKNSLYLQMNSLRAEDTALYYCVKDAFYGGDYYYNYGMDVWGHGTTVTVSSGGGGSGGGGSGGGGSEIVLTQSPATLSVSPGERATLSCRASQSVNNNLAWYQQKPGQAPRLLIYGASTRATGIPARFSGSGSGTDFTLTISSLQSDDFAVYYCQQYNNWPLTFGCGTKVEIKSGGGGSQVQLVQSGAEVKKPGASVKVSCKASGYTFTTYGISWVRQAPGQCLEWMGWISPKNGVTTYAQKFQGRVTITADESTSTAYMELSRLTSDDTAMYYCARDPDYYGSGSYSDYWGQGTLVTVSSGGGGSGGGGSGGGGSEIVLTQSPATLSVSPGERATLSCRASQSVSSNLAWYQQKPGQAPRLLIYGASSRATGIPARFSGSGSGTEFTLTISSLQSEDFAVYYCQQYHSWPLLTFGCGTKVEIKSGGGGSEVQLVESGGGLVQPGGSLKLSCAASGFTFNKYAMNWVRQAPGKGLEWVARIRSKYNNYATYYADSVKDRFTISRDDSKNTAYLQMNNLKTEDTAVYYCVRHGNFGNSYISYWAYWGQGTLVTVSSGGGGSGGGGSGGGGSQTVVTQEPSLTVSPGGTVTLTCGSSTGAVTSGNYPNWVQQKPGQAPRGLIGGTKFLAPGTPARFSGSLLGGKAALTLSGVQPEDEAEYYCVLWYSNRWVFGGGTKLTVL

SEQ ID NO: 2887 - protein, 753 aa, Artificial Sequence
  Synthetic
EVQLVESGGGLVQPGRSLRLSCAASGFTFHDYTMHWVRQAPGKCLEWVSGISWNTGTIGYADSVKGRFTISRDNAKNSLYLQMNSLRAEDTALYYCVKDAFYGGDYYYNYGMDVWGHGTTVTVSSGGGGQGGGGQGGGGQEIVLTQSPATLSVSPGERATLSCRASQSVNNNLAWYQQKPGQAPRLLIYGASTRATGIPARFSGSGSGTDFTLTISSLQSDDFAVYYCQQYNNWPLTFGCGTKVEIKSGGGGQQVQLVQSGAEVKKPGASVKVSCKASGYTFTTYGISWVRQAPGQCLEWMGWISPKNGVTTYAQKFQGRVTITADESTSTAYMELSRLTSDDTAMYYCARDPDYYGSGSYSDYWGQGTLVTVSSGGGGQGGGGQGGGGQEIVLTQSPATLSVSPGERATLSCRASQSVSSNLAWYQQKPGQAPRLLIYGASSRATGIPARFSGSGSGTEFTLTISSLQSEDFAVYYCQQYHSWPLLTFGCGTKVEIKSGGGGQEVQLVESGGGLVQPGGSLKLSCAASGFTFNKYAMNWVRQAPGKGLEWVARIRSKYNNYATYYADSVKDRFTISRDDSKNTAYLQMNNLKTEDTAVYYCVRHGNFGNSYISYWAYWGQGTLVTVSSGGGGQGGGGQGGGGQQTVVTQEPSLTVSPGGTVTLTCGSSTGAVTSGNYPNWVQQKPGQAPRGLIGGTKFLAPGTPARFSGSLLGGKAALTLSGVQPEDEAEYYCVLWYSNRWVFGGGTKLTVL

SEQ ID NO: 2888 - protein, 753 aa, Artificial Sequence
  Synthetic
EVQLVESGGGLVQPGRSLRLSCAASGFTFHDYTMHWVRQAPGKCLEWVSGISWNTGTIGYADSVKGRFTISRDNAKNSLYLQMNSLRAEDTALYYCVKDAFYGGDYYYNYGMDVWGHGTTVTVSSGGGGSGGGGSGGGGSEIVLTQSPATLSVSPGERATLSCRASQSVNNNLAWYQQKPGQAPRLLIYGASTRATGIPARFSGSGSGTDFTLTISSLQSDDFAVYYCQQYNNWPLTFGCGTKVEIKSGGGGSQVQLVQSGAEVKKPGASVKVSCKASGYTFTTYGISWVRQAPGQCLEWMGWISPKNGVTTYAQKFQGRVTITADESTSTAYMELSRLTSDDTAMYYCARDPDYYGSGSYSDYWGQGTLVTVSSGGGGSGGGGSGGGGSEIVLTQSPATLSVSPGERATLSCRASQSVSSNLAWYQQKPGQAPRLLIYGASSRATGIPARFSGSGSGTEFTLTISSLQSEDFAVYYCQQYHSWPLLTFGCGTKVEIKSGGGGSEVQLVESGGGLVQPGGSLKLSCAASGFTFNKYAINWVRQAPGKGLEWVARIRSKYNNYATYYADAVKDRFTISRDDSKNTVYLQMNNLKTEDTAVYYCARAGNFGSSYISYWAYWGQGTLVTVSSGGGGSGGGGSGGGGSQTVVTQEPSLTVSPGGTVTITCGSSTGAVTSGNYPNWVQKKPGQAPRGLIGGTKFLAPGTPARFSGSLSGGKAALTLSGVQPEDEAEYYCVLWYSNRWVFGSGTKLTVL

SEQ ID NO: 2889 - protein, 753 aa, Artificial Sequence
  Synthetic
EVQLVESGGGLVQPGRSLRLSCAASGFTFHDYTMHWVRQAPGKCLEWVSGISWNTGTIGYADSVKGRFTISRDNAKNSLYLQMNSLRAEDTALYYCVKDAFYGGDYYYNYGMDVWGHGTTVTVSSGGGGQGGGGQGGGGQEIVLTQSPATLSVSPGERATLSCRASQSVNNNLAWYQQKPGQAPRLLIYGASTRATGIPARFSGSGSGTDFTLTISSLQSDDFAVYYCQQYNNWPLTFGCGTKVEIKSGGGGQQVQLVQSGAEVKKPGASVKVSCKASGYTFTTYGISWVRQAPGQCLEWMGWISPKNGVTTYAQKFQGRVTITADESTSTAYMELSRLTSDDTAMYYCARDPDYYGSGSYSDYWGQGTLVTVSSGGGGQGGGGQGGGGQEIVLTQSPATLSVSPGERATLSCRASQSVSSNLAWYQQKPGQAPRLLIYGASSRATGIPARFSGSGSGTEFTLTISSLQSEDFAVYYCQQYHSWPLLTFGCGTKVEIKSGGGGQEVQLVESGGGLVQPGGSLKLSCAASGFTFNKYAINWVRQAPGKGLEWVARIRSKYNNYATYYADAVKDRFTISRDDSKNTVYLQMNNLKTEDTAVYYCARAGNFGSSYISYWAYWGQGTLVTVSSGGGGQGGGGQGGGGQQTVVTQEPSLTVSPGGTVTITCGSSTGAVTSGNYPNWVQKKPGQAPRGLIGGTKFLAPGTPARFSGSLSGGKAALTLSGVQPEDEAEYYCVLWYSNRWVFGSGTKLTVL

SEQ ID NO: 2890 - protein, 1241 aa, Artificial Sequence
  Synthetic
EVQLVESGGGLVQPGRSLRLSCAASGFTFHDYTMHWVRQAPGKCLEWVSGISWNTGTIGYADSVKGRFTISRDNAKNSLYLQMNSLRAEDTALYYCVKDAFYGGDYYYNYGMDVWGHGTTVTVSSGGGGSGGGGSGGGGSEIVLTQSPATLSVSPGERATLSCRASQSVNNNLAWYQQKPGQAPRLLIYGASTRATGIPARFSGSGSGTDFTLTISSLQSDDFAVYYCQQYNNWPLTFGCGTKVEIKSGGGGSQVQLVQSGAEVKKPGASVKVSCKASGYTFTTYGISWVRQAPGQCLEWMGWISPKNGVTTYAQKFQGRVTITADESTSTAYMELSRLTSDDTAMYYCARDPDYYGSGSYSDYWGQGTLVTVSSGGGGSGGGGSGGGGSEIVLTQSPATLSVSPGERATLSCRASQSVSSNLAWYQQKPGQAPRLLIYGASSRATGIPARFSGSGSGTEFTLTISSLQSEDFAVYYCQQYHSWPLLTFGCGTKVEIKSGGGGSEVQLVESGGGLVQPGGSLKLSCAASGFTFNKYAMNWVRQAPGKGLEWVARIRSKYNNYATYYADSVKDRFTISRDDSKNTAYLQMNNLKTEDTAVYYCVRHGNFGNSYISYWAYWGQGTLVTVSSGGGGSGGGGSGGGGSQTVVTQEPSLTVSPGGTVTLTCGSSTGAVTSGNYPNWVQQKPGQAPRGLIGGTKFLAPGTPARFSGSLLGGKAALTLSGVQPEDEAEYYCVLWYSNRWVFGGGTKLTVLGGGGDKTHTCPPCPAPELLGGPSVFLFPPKPKDTLMISRTPEVTCVVVDVSHEDPEVKFNWYVDGVEVHNAKTKPCEEQYGSTYRCVSVLTVLHQDWLNGKEYKCKVSNKALPAPIEKTISKAKGQPREPQVYTLPPSREEMTKNQVSLTCLVKGFYPSDIAVEWESNGQPENNYKTTPPVLDSDGSFFLYSKLTVDKSRWQQGNVFSCSVMHEALHNHYTQKSLSLSPGKGGGGSGGGGSGGGGSGGGGSGGGGSGGGGSDKTHTCPPCPAPELLGGPSVFLFPPKPKDTLMISRTPEVTCVVVDVSHEDPEVKFNWYVDGVEVHNAKTKPCEEQYGSTYRCVSVLTVLHQDWLNGKEYKCKVSNKALPAPIEKTISKAKGQPREPQVYTLPPSREEMTKNQVSLTCLVKGFYPSDIAVEWESNGQPENNYKTTPPVLDSDGSFFLYSKLTVDKSRWQQGNVFSCSVMHEALHNHYTQKSLSLSPGK

SEQ ID NO: 2891 - protein, 1231 aa, Artificial Sequence
  Synthetic
EVQLVESGGGLVQPGRSLRLSCAASGFTFHDYTMHWVRQAPGKCLEWVSGISWNTGTIGYADSVKGRFTISRDNAKNSLYLQMNSLRAEDTALYYCVKDAFYGGDYYYNYGMDVWGHGTTVTVSSGGGGQGGGGQGGGGQEIVLTQSPATLSVSPGERATLSCRASQSVNNNLAWYQQKPGQAPRLLIYGASTRATGIPARFSGSGSGTDFTLTISSLQSDDFAVYYCQQYNNWPLTFGCGTKVEIKSGGGGQQVQLVQSGAEVKKPGASVKVSCKASGYTFTTYGISWVRQAPGQCLEWMGWISPKNGVTTYAQKFQGRVTITADESTSTAYMELSRLTSDDTAMYYCARDPDYYGSGSYSDYWGQGTLVTVSSGGGGQGGGGQGGGGQEIVLTQSPATLSVSPGERATLSCRASQSVSSNLAWYQQKPGQAPRLLIYGASSRATGIPARFSGSGSGTEFTLTISSLQSEDFAVYYCQQYHSWPLLTFGCGTKVEIKSGGGGQEVQLVESGGGLVQPGGSLKLSCAASGFTFNKYAMNWVRQAPGKGLEWVARIRSKYNNYATYYADSVKDRFTISRDDSKNTAYLQMNNLKTEDTAVYYCVRHGNFGNSYISYWAYWGQGTLVTVSSGGGGQGGGGQGGGGQQTVVTQEPSLTVSPGGTVTLTCGSSTGAVTSGNYPNWVQQKPGQAPRGLIGGTKFLAPGTPARFSGSLLGGKAALTLSGVQPEDEAEYYCVLWYSNRWVFGGGTKLTVLGGGGCPPCPAPELLGGPSVFLFPPKPKDTLMISRTPEVTCVVVDVSHEEPEVKFNWYVDGVEVHNAKTKPCEEQYGSTYRCVSVLTVLHQDWLNGKEYKCKVSNKALPAPIEKTISKAKGQPREPQVYTLPPSREEMTKNQVSLTCLVKGFYPSDIAVEWESNGQPENNYKTTPPVLDSDGSFFLYSKLTVDKSRWQQGNVFSCSVMHEALHNHYTQKSLSLSPGKGGGGQGGGGQGGGGQGGGGQGGGGQGGGGQCPPCPAPELLGGPSVFLFPPKPKDTLMISRTPEVTCVVVDVSHEEPEVKFNWYVDGVEVHNAKTKPCEEQYGSTYRCVSVLTVLHQDWLNGKEYKCKVSNKALPAPIEKTISKAKGQPREPQVYTLPPSREEMTKNQVSLTCLVKGFYPSDIAVEWESNGQPENNYKTTPPVLDSDGSFFLYSKLTVDKSRWQQGNVFSCSVMHEALHNHYTQKSLSLSPGK

SEQ ID NO: 2892 - protein, 1241 aa, Artificial Sequence
  Synthetic
EVQLVESGGGLVQPGRSLRLSCAASGFTFHDYTMHWVRQAPGKCLEWVSGISWNTGTIGYADSVKGRFTISRDNAKNSLYLQMNSLRAEDTALYYCVKDAFYGGDYYYNYGMDVWGHGTTVTVSSGGGGSGGGGSGGGGSEIVLTQSPATLSVSPGERATLSCRASQSVNNNLAWYQQKPGQAPRLLIYGASTRATGIPARFSGSGSGTDFTLTISSLQSDDFAVYYCQQYNNWPLTFGCGTKVEIKSGGGGSQVQLVQSGAEVKKPGASVKVSCKASGYTFTTYGISWVRQAPGQCLEWMGWISPKNGVTTYAQKFQGRVTITADESTSTAYMELSRLTSDDTAMYYCARDPDYYGSGSYSDYWGQGTLVTVSSGGGGSGGGGSGGGGSEIVLTQSPATLSVSPGERATLSCRASQSVSSNLAWYQQKPGQAPRLLIYGASSRATGIPARFSGSGSGTEFTLTISSLQSEDFAVYYCQQYHSWPLLTFGCGTKVEIKSGGGGSEVQLVESGGGLVQPGGSLKLSCAASGFTFNKYAINWVRQAPGKGLEWVARIRSKYNNYATYYADAVKDRFTISRDDSKNTVYLQMNNLKTEDTAVYYCARAGNFGSSYISYWAYWGQGTLVTVSSGGGGSGGGGSGGGGSQTVVTQEPSLTVSPGGTVTITCGSSTGAVTSGNYPNWVQKKPGQAPRGLIGGTKFLAPGTPARFSGSLSGGKAALTLSGVQPEDEAEYYCVLWYSNRWVFGSGTKLTVLGGGGDKTHTCPPCPAPELLGGPSVFLFPPKPKDTLMISRTPEVTCVVVDVSHEDPEVKFNWYVDGVEVHNAKTKPCEEQYGSTYRCVSVLTVLHQDWLNGKEYKCKVSNKALPAPIEKTISKAKGQPREPQVYTLPPSREEMTKNQVSLTCLVKGFYPSDIAVEWESNGQPENNYKTTPPVLDSDGSFFLYSKLTVDKSRWQQGNVFSCSVMHEALHNHYTQKSLSLSPGKGGGGSGGGGSGGGGSGGGGSGGGGSGGGGSDKTHTCPPCPAPELLGGPSVFLFPPKPKDTLMISRTPEVTCVVVDVSHEDPEVKFNWYVDGVEVHNAKTKPCEEQYGSTYRCVSVLTVLHQDWLNGKEYKCKVSNKALPAPIEKTISKAKGQPREPQVYTLPPSREEMTKNQVSLTCLVKGFYPSDIAVEWESNGQPENNYKTTPPVLDSDGSFFLYSKLTVDKSRWQQGNVFSCSVMHEALHNHYTQKSLSLSPGK

SEQ ID NO: 2893 - protein, 1231 aa, Artificial Sequence
  Synthetic
EVQLVESGGGLVQPGRSLRLSCAASGFTFHDYTMHWVRQAPGKCLEWVSGISWNTGTIGYADSVKGRFTISRDNAKNSLYLQMNSLRAEDTALYYCVKDAFYGGDYYYNYGMDVWGHGTTVTVSSGGGGQGGGGQGGGGQEIVLTQSPATLSVSPGERATLSCRASQSVNNNLAWYQQKPGQAPRLLIYGASTRATGIPARFSGSGSGTDFTLTISSLQSDDFAVYYCQQYNNWPLTFGCGTKVEIKSGGGGQQVQLVQSGAEVKKPGASVKVSCKASGYTFTTYGISWVRQAPGQCLEWMGWISPKNGVTTYAQKFQGRVTITADESTSTAYMELSRLTSDDTAMYYCARDPDYYGSGSYSDYWGQGTLVTVSSGGGGQGGGGQGGGGQEIVLTQSPATLSVSPGERATLSCRASQSVSSNLAWYQQKPGQAPRLLIYGASSRATGIPARFSGSGSGTEFTLTISSLQSEDFAVYYCQQYHSWPLLTFGCGTKVEIKSGGGGQEVQLVESGGGLVQPGGSLKLSCAASGFTFNKYAINWVRQAPGKGLEWVARIRSKYNNYATYYADAVKDRFTISRDDSKNTVYLQMNNLKTEDTAVYYCARAGNFGSSYISYWAYWGQGTLVTVSSGGGGQGGGGQGGGGQQTVVTQEPSLTVSPGGTVTITCGSSTGAVTSGNYPNWVQKKPGQAPRGLIGGTKFLAPGTPARFSGSLSGGKAALTLSGVQPEDEAEYYCVLWYSNRWVFGSGTKLTVLGGGGCPPCPAPELLGGPSVFLFPPKPKDTLMISRTPEVTCVVVDVSHEEPEVKFNWYVDGVEVHNAKTKPCEEQYGSTYRCVSVLTVLHQDWLNGKEYKCKVSNKALPAPIEKTISKAKGQPREPQVYTLPPSREEMTKNQVSLTCLVKGFYPSDIAVEWESNGQPENNYKTTPPVLDSDGSFFLYSKLTVDKSRWQQGNVFSCSVMHEALHNHYTQKSLSLSPGKGGGGQGGGGQGGGGQGGGGQGGGGQGGGGQCPPCPAPELLGGPSVFLFPPKPKDTLMISRTPEVTCVVVDVSHEEPEVKFNWYVDGVEVHNAKTKPCEEQYGSTYRCVSVLTVLHQDWLNGKEYKCKVSNKALPAPIEKTISKAKGQPREPQVYTLPPSREEMTKNQVSLTCLVKGFYPSDIAVEWESNGQPENNYKTTPPVLDSDGSFFLYSKLTVDKSRWQQGNVFSCSVMHEALHNHYTQKSLSLSPGK

SEQ ID NO: 2894 - protein, 498 aa, Artificial Sequence
  Synthetic
EVQLVESGGGLVQPGRSLRLSCAASGFTFHDYTMHWVRQAPGKCLEWVSGISWNTGTIGYADSVKGRFTISRDNAKNSLYLQMNSLRAEDTALYYCVKDAFYGGDYYYNYGMDVWGHGTTVTVSSGGGGSGGGGSGGGGSEIVLTQSPATLSVSPGERATLSCRASQSVNNNLAWYQQKPGQAPRLLIYGASTRATGIPARFSGSGSGTDFTLTISSLQSDDFAVYYCQQYNNWPLTFGCGTKVEIKSGGGGSQVQLVQSGGEVKKPGASVKVSCKASGYTFTSYGISWVRQAPGQCLEWMGWISAYTGETLYAQKLQGRVTMTRDTSTSTAYMELRSLRSDDTAVYYCARDPDYYGSGSYSDYWGQGTLVTVSSGGGGSGGGGSGGGGSEIVLTQSPATLSVSPGERATLSCRASQSVSSNLAWYQQKPGQAPRLLIYGASSRATGIPARFSGSGSGTEFTLTISSLQSEDFAVYYCQQYHSWPLLTFGCGTKVEIK

SEQ ID NO: 2895 - protein, 498 aa, Artificial Sequence
  Synthetic
EVQLVESGGGLVQPGRSLRLSCAASGFTFHDYTMHWVRQAPGKCLEWVSGISWNTGTIGYADSVKGRFTISRDNAKNSLYLQMNSLRAEDTALYYCVKDAFYGGDYYYNYGMDVWGHGTTVTVSSGGGGQGGGGQGGGGQEIVLTQSPATLSVSPGERATLSCRASQSVNNNLAWYQQKPGQAPRLLIYGASTRATGIPARFSGSGSGTDFTLTISSLQSDDFAVYYCQQYNNWPLTFGCGTKVEIKSGGGGQQVQLVQSGGEVKKPGASVKVSCKASGYTFTSYGISWVRQAPGQCLEWMGWISAYTGETLYAQKLQGRVTMTRDTSTSTAYMELRSLRSDDTAVYYCARDPDYYGSGSYSDYWGQGTLVTVSSGGGGQGGGGQGGGGQEIVLTQSPATLSVSPGERATLSCRASQSVSSNLAWYQQKPGQAPRLLIYGASSRATGIPARFSGSGSGTEFTLTISSLQSEDFAVYYCQQYHSWPLLTFGCGTKVEIK

SEQ ID NO: 2896 - protein, 753 aa, Artificial Sequence
  Synthetic
EVQLVESGGGLVQPGRSLRLSCAASGFTFHDYTMHWVRQAPGKCLEWVSGISWNTGTIGYADSVKGRFTISRDNAKNSLYLQMNSLRAEDTALYYCVKDAFYGGDYYYNYGMDVWGHGTTVTVSSGGGGSGGGGSGGGGSEIVLTQSPATLSVSPGERATLSCRASQSVNNNLAWYQQKPGQAPRLLIYGASTRATGIPARFSGSGSGTDFTLTISSLQSDDFAVYYCQQYNNWPLTFGCGTKVEIKSGGGGSQVQLVQSGGEVKKPGASVKVSCKASGYTFTSYGISWVRQAPGQCLEWMGWISAYTGETLYAQKLQGRVTMTRDTSTSTAYMELRSLRSDDTAVYYCARDPDYYGSGSYSDYWGQGTLVTVSSGGGGSGGGGSGGGGSEIVLTQSPATLSVSPGERATLSCRASQSVSSNLAWYQQKPGQAPRLLIYGASSRATGIPARFSGSGSGTEFTLTISSLQSEDFAVYYCQQYHSWPLLTFGCGTKVEIKSGGGGSEVQLVESGGGLVQPGGSLKLSCAASGFTFNKYAMNWVRQAPGKGLEWVARIRSKYNNYATYYADSVKDRFTISRDDSKNTAYLQMNNLKTEDTAVYYCVRHGNFGNSYISYWAYWGQGTLVTVSSGGGGSGGGGSGGGGSQTVVTQEPSLTVSPGGTVTLTCGSSTGAVTSGNYPNWVQQKPGQAPRGLIGGTKFLAPGTPARFSGSLLGGKAALTLSGVQPEDEAEYYCVLWYSNRWVFGGGTKLTVL

SEQ ID NO: 2897 - protein, 753 aa, Artificial Sequence
  Synthetic
EVQLVESGGGLVQPGRSLRLSCAASGFTFHDYTMHWVRQAPGKCLEWVSGISWNTGTIGYADSVKGRFTISRDNAKNSLYLQMNSLRAEDTALYYCVKDAFYGGDYYYNYGMDVWGHGTTVTVSSGGGGQGGGGQGGGGQEIVLTQSPATLSVSPGERATLSCRASQSVNNNLAWYQQKPGQAPRLLIYGASTRATGIPARFSGSGSGTDFTLTISSLQSDDFAVYYCQQYNNWPLTFGCGTKVEIKSGGGGQQVQLVQSGGEVKKPGASVKVSCKASGYTFTSYGISWVRQAPGQCLEWMGWISAYTGETLYAQKLQGRVTMTRDTSTSTAYMELRSLRSDDTAVYYCARDPDYYGSGSYSDYWGQGTLVTVSSGGGGQGGGGQGGGGQEIVLTQSPATLSVSPGERATLSCRASQSVSSNLAWYQQKPGQAPRLLIYGASSRATGIPARFSGSGSGTEFTLTISSLQSEDFAVYYCQQYHSWPLLTFGCGTKVEIKSGGGGQEVQLVESGGGLVQPGGSLKLSCAASGFTFNKYAMNWVRQAPGKGLEWVARIRSKYNNYATYYADSVKDRFTISRDDSKNTAYLQMNNLKTEDTAVYYCVRHGNFGNSYISYWAYWGQGTLVTVSSGGGGQGGGGQGGGGQQTVVTQEPSLTVSPGGTVTLTCGSSTGAVTSGNYPNWVQQKPGQAPRGLIGGTKFLAPGTPARFSGSLLGGKAALTLSGVQPEDEAEYYCVLWYSNRWVFGGGTKLTVL

SEQ ID NO: 2898 - protein, 753 aa, Artificial Sequence
  Synthetic
EVQLVESGGGLVQPGRSLRLSCAASGFTFHDYTMHWVRQAPGKCLEWVSGISWNTGTIGYADSVKGRFTISRDNAKNSLYLQMNSLRAEDTALYYCVKDAFYGGDYYYNYGMDVWGHGTTVTVSSGGGGSGGGGSGGGGSEIVLTQSPATLSVSPGERATLSCRASQSVNNNLAWYQQKPGQAPRLLIYGASTRATGIPARFSGSGSGTDFTLTISSLQSDDFAVYYCQQYNNWPLTFGCGTKVEIKSGGGGSQVQLVQSGGEVKKPGASVKVSCKASGYTFTSYGISWVRQAPGQCLEWMGWISAYTGETLYAQKLQGRVTMTRDTSTSTAYMELRSLRSDDTAVYYCARDPDYYGSGSYSDYWGQGTLVTVSSGGGGSGGGGSGGGGSEIVLTQSPATLSVSPGERATLSCRASQSVSSNLAWYQQKPGQAPRLLIYGASSRATGIPARFSGSGSGTEFTLTISSLQSEDFAVYYCQQYHSWPLLTFGCGTKVEIKSGGGGSEVQLVESGGGLVQPGGSLKLSCAASGFTFNKYAINWVRQAPGKGLEWVARIRSKYNNYATYYADAVKDRFTISRDDSKNTVYLQMNNLKTEDTAVYYCARAGNFGSSYISYWAYWGQGTLVTVSSGGGGSGGGGSGGGGSQTVVTQEPSLTVSPGGTVTITCGSSTGAVTSGNYPNWVQKKPGQAPRGLIGGTKFLAPGTPARFSGSLSGGKAALTLSGVQPEDEAEYYCVLWYSNRWVFGSGTKLTVL

SEQ ID NO: 2899 - protein, 753 aa, Artificial Sequence
  Synthetic
EVQLVESGGGLVQPGRSLRLSCAASGFTFHDYTMHWVRQAPGKCLEWVSGISWNTGTIGYADSVKGRFTISRDNAKNSLYLQMNSLRAEDTALYYCVKDAFYGGDYYYNYGMDVWGHGTTVTVSSGGGGQGGGGQGGGGQEIVLTQSPATLSVSPGERATLSCRASQSVNNNLAWYQQKPGQAPRLLIYGASTRATGIPARFSGSGSGTDFTLTISSLQSDDFAVYYCQQYNNWPLTFGCGTKVEIKSGGGGQQVQLVQSGGEVKKPGASVKVSCKASGYTFTSYGISWVRQAPGQCLEWMGWISAYTGETLYAQKLQGRVTMTRDTSTSTAYMELRSLRSDDTAVYYCARDPDYYGSGSYSDYWGQGTLVTVSSGGGGQGGGGQGGGGQEIVLTQSPATLSVSPGERATLSCRASQSVSSNLAWYQQKPGQAPRLLIYGASSRATGIPARFSGSGSGTEFTLTISSLQSEDFAVYYCQQYHSWPLLTFGCGTKVEIKSGGGGQEVQLVESGGGLVQPGGSLKLSCAASGFTFNKYAINWVRQAPGKGLEWVARIRSKYNNYATYYADAVKDRFTISRDDSKNTVYLQMNNLKTEDTAVYYCARAGNFGSSYISYWAYWGQGTLVTVSSGGGGQGGGGQGGGGQQTVVTQEPSLTVSPGGTVTITCGSSTGAVTSGNYPNWVQKKPGQAPRGLIGGTKFLAPGTPARFSGSLSGGKAALTLSGVQPEDEAEYYCVLWYSNRWVFGSGTKLTVL

SEQ ID NO: 2900 - protein, 1241 aa, Artificial Sequence
  Synthetic
EVQLVESGGGLVQPGRSLRLSCAASGFTFHDYTMHWVRQAPGKCLEWVSGISWNTGTIGYADSVKGRFTISRDNAKNSLYLQMNSLRAEDTALYYCVKDAFYGGDYYYNYGMDVWGHGTTVTVSSGGGGSGGGGSGGGGSEIVLTQSPATLSVSPGERATLSCRASQSVNNNLAWYQQKPGQAPRLLIYGASTRATGIPARFSGSGSGTDFTLTISSLQSDDFAVYYCQQYNNWPLTFGCGTKVEIKSGGGGSQVQLVQSGGEVKKPGASVKVSCKASGYTFTSYGISWVRQAPGQCLEWMGWISAYTGETLYAQKLQGRVTMTRDTSTSTAYMELRSLRSDDTAVYYCARDPDYYGSGSYSDYWGQGTLVTVSSGGGGSGGGGSGGGGSEIVLTQSPATLSVSPGERATLSCRASQSVSSNLAWYQQKPGQAPRLLIYGASSRATGIPARFSGSGSGTEFTLTISSLQSEDFAVYYCQQYHSWPLLTFGCGTKVEIKSGGGGSEVQLVESGGGLVQPGGSLKLSCAASGFTFNKYAMNWVRQAPGKGLEWVARIRSKYNNYATYYADSVKDRFTISRDDSKNTAYLQMNNLKTEDTAVYYCVRHGNFGNSYISYWAYWGQGTLVTVSSGGGGSGGGGSGGGGSQTVVTQEPSLTVSPGGTVTLTCGSSTGAVTSGNYPNWVQQKPGQAPRGLIGGTKFLAPGTPARFSGSLLGGKAALTLSGVQPEDEAEYYCVLWYSNRWVFGGGTKLTVLGGGGDKTHTCPPCPAPELLGGPSVFLFPPKPKDTLMISRTPEVTCVVVDVSHEDPEVKFNWYVDGVEVHNAKTKPCEEQYGSTYRCVSVLTVLHQDWLNGKEYKCKVSNKALPAPIEKTISKAKGQPREPQVYTLPPSREEMTKNQVSLTCLVKGFYPSDIAVEWESNGQPENNYKTTPPVLDSDGSFFLYSKLTVDKSRWQQGNVFSCSVMHEALHNHYTQKSLSLSPGKGGGGSGGGGSGGGGSGGGGSGGGGSGGGGSDKTHTCPPCPAPELLGGPSVFLFPPKPKDTLMISRTPEVTCVVVDVSHEDPEVKFNWYVDGVEVHNAKTKPCEEQYGSTYRCVSVLTVLHQDWLNGKEYKCKVSNKALPAPIEKTISKAKGQPREPQVYTLPPSREEMTKNQVSLTCLVKGFYPSDIAVEWESNGQPENNYKTTPPVLDSDGSFFLYSKLTVDKSRWQQGNVFSCSVMHEALHNHYTQKSLSLSPGK

SEQ ID NO: 2901 - protein, 1231 aa, Artificial Sequence
  Synthetic
EVQLVESGGGLVQPGRSLRLSCAASGFTFHDYTMHWVRQAPGKCLEWVSGISWNTGTIGYADSVKGRFTISRDNAKNSLYLQMNSLRAEDTALYYCVKDAFYGGDYYYNYGMDVWGHGTTVTVSSGGGGQGGGGQGGGGQEIVLTQSPATLSVSPGERATLSCRASQSVNNNLAWYQQKPGQAPRLLIYGASTRATGIPARFSGSGSGTDFTLTISSLQSDDFAVYYCQQYNNWPLTFGCGTKVEIKSGGGGQQVQLVQSGGEVKKPGASVKVSCKASGYTFTSYGISWVRQAPGQCLEWMGWISAYTGETLYAQKLQGRVTMTRDTSTSTAYMELRSLRSDDTAVYYCARDPDYYGSGSYSDYWGQGTLVTVSSGGGGQGGGGQGGGGQEIVLTQSPATLSVSPGERATLSCRASQSVSSNLAWYQQKPGQAPRLLIYGASSRATGIPARFSGSGSGTEFTLTISSLQSEDFAVYYCQQYHSWPLLTFGCGTKVEIKSGGGGQEVQLVESGGGLVQPGGSLKLSCAASGFTFNKYAMNWVRQAPGKGLEWVARIRSKYNNYATYYADSVKDRFTISRDDSKNTAYLQMNNLKTEDTAVYYCVRHGNFGNSYISYWAYWGQGTLVTVSSGGGGQGGGGQGGGGQQTVVTQEPSLTVSPGGTVTLTCGSSTGAVTSGNYPNWVQQKPGQAPRGLIGGTKFLAPGTPARFSGSLLGGKAALTLSGVQPEDEAEYYCVLWYSNRWVFGGGTKLTVLGGGGCPPCPAPELLGGPSVFLFPPKPKDTLMISRTPEVTCVVVDVSHEEPEVKFNWYVDGVEVHNAKTKPCEEQYGSTYRCVSVLTVLHQDWLNGKEYKCKVSNKALPAPIEKTISKAKGQPREPQVYTLPPSREEMTKNQVSLTCLVKGFYPSDIAVEWESNGQPENNYKTTPPVLDSDGSFFLYSKLTVDKSRWQQGNVFSCSVMHEALHNHYTQKSLSLSPGKGGGGQGGGGQGGGGQGGGGQGGGGQGGGGQCPPCPAPELLGGPSVFLFPPKPKDTLMISRTPEVTCVVVDVSHEEPEVKFNWYVDGVEVHNAKTKPCEEQYGSTYRCVSVLTVLHQDWLNGKEYKCKVSNKALPAPIEKTISKAKGQPREPQVYTLPPSREEMTKNQVSLTCLVKGFYPSDIAVEWESNGQPENNYKTTPPVLDSDGSFFLYSKLTVDKSRWQQGNVFSCSVMHEALHNHYTQKSLSLSPGK

SEQ ID NO: 2902 - protein, 1241 aa, Artificial Sequence
  Synthetic
EVQLVESGGGLVQPGRSLRLSCAASGFTFHDYTMHWVRQAPGKCLEWVSGISWNTGTIGYADSVKGRFTISRDNAKNSLYLQMNSLRAEDTALYYCVKDAFYGGDYYYNYGMDVWGHGTTVTVSSGGGGSGGGGSGGGGSEIVLTQSPATLSVSPGERATLSCRASQSVNNNLAWYQQKPGQAPRLLIYGASTRATGIPARFSGSGSGTDFTLTISSLQSDDFAVYYCQQYNNWPLTFGCGTKVEIKSGGGGSQVQLVQSGGEVKKPGASVKVSCKASGYTFTSYGISWVRQAPGQCLEWMGWISAYTGETLYAQKLQGRVTMTRDTSTSTAYMELRSLRSDDTAVYYCARDPDYYGSGSYSDYWGQGTLVTVSSGGGGSGGGGSGGGGSEIVLTQSPATLSVSPGERATLSCRASQSVSSNLAWYQQKPGQAPRLLIYGASSRATGIPARFSGSGSGTEFTLTISSLQSEDFAVYYCQQYHSWPLLTFGCGTKVEIKSGGGGSEVQLVESGGGLVQPGGSLKLSCAASGFTFNKYAINWVRQAPGKGLEWVARIRSKYNNYATYYADAVKDRFTISRDDSKNTVYLQMNNLKTEDTAVYYCARAGNFGSSYISYWAYWGQGTLVTVSSGGGGSGGGGSGGGGSQTVVTQEPSLTVSPGGTVTITCGSSTGAVTSGNYPNWVQKKPGQAPRGLIGGTKFLAPGTPARFSGSLSGGKAALTLSGVQPEDEAEYYCVLWYSNRWVFGSGTKLTVLGGGGDKTHTCPPCPAPELLGGPSVFLFPPKPKDTLMISRTPEVTCVVVDVSHEDPEVKFNWYVDGVEVHNAKTKPCEEQYGSTYRCVSVLTVLHQDWLNGKEYKCKVSNKALPAPIEKTISKAKGQPREPQVYTLPPSREEMTKNQVSLTCLVKGFYPSDIAVEWESNGQPENNYKTTPPVLDSDGSFFLYSKLTVDKSRWQQGNVFSCSVMHEALHNHYTQKSLSLSPGKGGGGSGGGGSGGGGSGGGGSGGGGSGGGGSDKTHTCPPCPAPELLGGPSVFLFPPKPKDTLMISRTPEVTCVVVDVSHEDPEVKFNWYVDGVEVHNAKTKPCEEQYGSTYRCVSVLTVLHQDWLNGKEYKCKVSNKALPAPIEKTISKAKGQPREPQVYTLPPSREEMTKNQVSLTCLVKGFYPSDIAVEWESNGQPENNYKTTPPVLDSDGSFFLYSKLTVDKSRWQQGNVFSCSVMHEALHNHYTQKSLSLSPGK

SEQ ID NO: 2903 - protein, 1231 aa, Artificial Sequence
  Synthetic
EVQLVESGGGLVQPGRSLRLSCAASGFTFHDYTMHWVRQAPGKCLEWVSGISWNTGTIGYADSVKGRFTISRDNAKNSLYLQMNSLRAEDTALYYCVKDAFYGGDYYYNYGMDVWGHGTTVTVSSGGGGQGGGGQGGGGQEIVLTQSPATLSVSPGERATLSCRASQSVNNNLAWYQQKPGQAPRLLIYGASTRATGIPARFSGSGSGTDFTLTISSLQSDDFAVYYCQQYNNWPLTFGCGTKVEIKSGGGGQQVQLVQSGGEVKKPGASVKVSCKASGYTFTSYGISWVRQAPGQCLEWMGWISAYTGETLYAQKLQGRVTMTRDTSTSTAYMELRSLRSDDTAVYYCARDPDYYGSGSYSDYWGQGTLVTVSSGGGGQGGGGQGGGGQEIVLTQSPATLSVSPGERATLSCRASQSVSSNLAWYQQKPGQAPRLLIYGASSRATGIPARFSGSGSGTEFTLTISSLQSEDFAVYYCQQYHSWPLLTFGCGTKVEIKSGGGGQEVQLVESGGGLVQPGGSLKLSCAASGFTFNKYAINWVRQAPGKGLEWVARIRSKYNNYATYYADAVKDRFTISRDDSKNTVYLQMNNLKTEDTAVYYCARAGNFGSSYISYWAYWGQGTLVTVSSGGGGQGGGGQGGGGQQTVVTQEPSLTVSPGGTVTITCGSSTGAVTSGNYPNWVQKKPGQAPRGLIGGTKFLAPGTPARFSGSLSGGKAALTLSGVQPEDEAEYYCVLWYSNRWVFGSGTKLTVLGGGGCPPCPAPELLGGPSVFLFPPKPKDTLMISRTPEVTCVVVDVSHEEPEVKFNWYVDGVEVHNAKTKPCEEQYGSTYRCVSVLTVLHQDWLNGKEYKCKVSNKALPAPIEKTISKAKGQPREPQVYTLPPSREEMTKNQVSLTCLVKGFYPSDIAVEWESNGQPENNYKTTPPVLDSDGSFFLYSKLTVDKSRWQQGNVFSCSVMHEALHNHYTQKSLSLSPGKGGGGQGGGGQGGGGQGGGGQGGGGQGGGGQCPPCPAPELLGGPSVFLFPPKPKDTLMISRTPEVTCVVVDVSHEEPEVKFNWYVDGVEVHNAKTKPCEEQYGSTYRCVSVLTVLHQDWLNGKEYKCKVSNKALPAPIEKTISKAKGQPREPQVYTLPPSREEMTKNQVSLTCLVKGFYPSDIAVEWESNGQPENNYKTTPPVLDSDGSFFLYSKLTVDKSRWQQGNVFSCSVMHEALHNHYTQKSLSLSPGK

SEQ ID NO: 2904 - protein, 498 aa, Artificial Sequence
  Synthetic
EVQLVESGGGLVQPGRSLRLSCAASGFTFHDYTMHWVRQAPGKCLEWVSGISWNTGTIGYADSVKGRFTISRDNAKNSLYLQMNSLRAEDTALYYCVKDAFYGGDYYYNYGMDVWGHGTTVTVSSGGGGSGGGGSGGGGSEIVLTQSPATLSVSPGERATLSCRASQSVNNNLAWYQQKPGQAPRLLIYGASTRATGIPARFSGSGSGTDFTLTISSLQSDDFAVYYCQQYNNWPLTFGCGTKVEIKSGGGGSQVQLVQSGGEVKKPGASVKVSCKASGYTFTSYGISWVRQAPGQCLEWMGWISPQTGNAIYAQKLQGRVTMTRDTSTSTAYMELRSLRSDDTAVYYCARDPDYYGSGSYSDYWGQGTLVTVSSGGGGSGGGGSGGGGSEIVLTQSPATLSVSPGERATLSCRASQSVSSNLAWYQQKPGQAPRLLIYGASSRATGIPARFSGSGSGTEFTLTISSLQSEDFAVYYCQQYHSWPLLTFGCGTKVEIK

SEQ ID NO: 2905 - protein, 498 aa, Artificial Sequence
  Synthetic
EVQLVESGGGLVQPGRSLRLSCAASGFTFHDYTMHWVRQAPGKCLEWVSGISWNTGTIGYADSVKGRFTISRDNAKNSLYLQMNSLRAEDTALYYCVKDAFYGGDYYYNYGMDVWGHGTTVTVSSGGGGQGGGGQGGGGQEIVLTQSPATLSVSPGERATLSCRASQSVNNNLAWYQQKPGQAPRLLIYGASTRATGIPARFSGSGSGTDFTLTISSLQSDDFAVYYCQQYNNWPLTFGCGTKVEIKSGGGGQQVQLVQSGGEVKKPGASVKVSCKASGYTFTSYGISWVRQAPGQCLEWMGWISPQTGNAIYAQKLQGRVTMTRDTSTSTAYMELRSLRSDDTAVYYCARDPDYYGSGSYSDYWGQGTLVTVSSGGGGQGGGGQGGGGQEIVLTQSPATLSVSPGERATLSCRASQSVSSNLAWYQQKPGQAPRLLIYGASSRATGIPARFSGSGSGTEFTLTISSLQSEDFAVYYCQQYHSWPLLTFGCGTKVEIK

SEQ ID NO: 2906 - protein, 753 aa, Artificial Sequence
  Synthetic
EVQLVESGGGLVQPGRSLRLSCAASGFTFHDYTMHWVRQAPGKCLEWVSGISWNTGTIGYADSVKGRFTISRDNAKNSLYLQMNSLRAEDTALYYCVKDAFYGGDYYYNYGMDVWGHGTTVTVSSGGGGSGGGGSGGGGSEIVLTQSPATLSVSPGERATLSCRASQSVNNNLAWYQQKPGQAPRLLIYGASTRATGIPARFSGSGSGTDFTLTISSLQSDDFAVYYCQQYNNWPLTFGCGTKVEIKSGGGGSQVQLVQSGGEVKKPGASVKVSCKASGYTFTSYGISWVRQAPGQCLEWMGWISPQTGNAIYAQKLQGRVTMTRDTSTSTAYMELRSLRSDDTAVYYCARDPDYYGSGSYSDYWGQGTLVTVSSGGGGSGGGGSGGGGSEIVLTQSPATLSVSPGERATLSCRASQSVSSNLAWYQQKPGQAPRLLIYGASSRATGIPARFSGSGSGTEFTLTISSLQSEDFAVYYCQQYHSWPLLTFGCGTKVEIKSGGGGSEVQLVESGGGLVQPGGSLKLSCAASGFTFNKYAMNWVRQAPGKGLEWVARIRSKYNNYATYYADSVKDRFTISRDDSKNTAYLQMNNLKTEDTAVYYCVRHGNFGNSYISYWAYWGQGTLVTVSSGGGGSGGGGSGGGGSQTVVTQEPSLTVSPGGTVTLTCGSSTGAVTSGNYPNWVQQKPGQAPRGLIGGTKFLAPGTPARFSGSLLGGKAALTLSGVQPEDEAEYYCVLWYSNRWVFGGGTKLTVL

SEQ ID NO: 2907 - protein, 753 aa, Artificial Sequence
  Synthetic
EVQLVESGGGLVQPGRSLRLSCAASGFTFHDYTMHWVRQAPGKCLEWVSGISWNTGTIGYADSVKGRFTISRDNAKNSLYLQMNSLRAEDTALYYCVKDAFYGGDYYYNYGMDVWGHGTTVTVSSGGGGQGGGGQGGGGQEIVLTQSPATLSVSPGERATLSCRASQSVNNNLAWYQQKPGQAPRLLIYGASTRATGIPARFSGSGSGTDFTLTISSLQSDDFAVYYCQQYNNWPLTFGCGTKVEIKSGGGGQQVQLVQSGGEVKKPGASVKVSCKASGYTFTSYGISWVRQAPGQCLEWMGWISPQTGNAIYAQKLQGRVTMTRDTSTSTAYMELRSLRSDDTAVYYCARDPDYYGSGSYSDYWGQGTLVTVSSGGGGQGGGGQGGGGQEIVLTQSPATLSVSPGERATLSCRASQSVSSNLAWYQQKPGQAPRLLIYGASSRATGIPARFSGSGSGTEFTLTISSLQSEDFAVYYCQQYHSWPLLTFGCGTKVEIKSGGGGQEVQLVESGGGLVQPGGSLKLSCAASGFTFNKYAMNWVRQAPGKGLEWVARIRSKYNNYATYYADSVKDRFTISRDDSKNTAYLQMNNLKTEDTAVYYCVRHGNFGNSYISYWAYWGQGTLVTVSSGGGGQGGGGQGGGGQQTVVTQEPSLTVSPGGTVTLTCGSSTGAVTSGNYPNWVQQKPGQAPRGLIGGTKFLAPGTPARFSGSLLGGKAALTLSGVQPEDEAEYYCVLWYSNRWVFGGGTKLTVL

SEQ ID NO: 2908 - protein, 753 aa, Artificial Sequence
  Synthetic
EVQLVESGGGLVQPGRSLRLSCAASGFTFHDYTMHWVRQAPGKCLEWVSGISWNTGTIGYADSVKGRFTISRDNAKNSLYLQMNSLRAEDTALYYCVKDAFYGGDYYYNYGMDVWGHGTTVTVSSGGGGSGGGGSGGGGSEIVLTQSPATLSVSPGERATLSCRASQSVNNNLAWYQQKPGQAPRLLIYGASTRATGIPARFSGSGSGTDFTLTISSLQSDDFAVYYCQQYNNWPLTFGCGTKVEIKSGGGGSQVQLVQSGGEVKKPGASVKVSCKASGYTFTSYGISWVRQAPGQCLEWMGWISPQTGNAIYAQKLQGRVTMTRDTSTSTAYMELRSLRSDDTAVYYCARDPDYYGSGSYSDYWGQGTLVTVSSGGGGSGGGGSGGGGSEIVLTQSPATLSVSPGERATLSCRASQSVSSNLAWYQQKPGQAPRLLIYGASSRATGIPARFSGSGSGTEFTLTISSLQSEDFAVYYCQQYHSWPLLTFGCGTKVEIKSGGGGSEVQLVESGGGLVQPGGSLKLSCAASGFTFNKYAINWVRQAPGKGLEWVARIRSKYNNYATYYADAVKDRFTISRDDSKNTVYLQMNNLKTEDTAVYYCARAGNFGSSYISYWAYWGQGTLVTVSSGGGGSGGGGSGGGGSQTVVTQEPSLTVSPGGTVTITCGSSTGAVTSGNYPNWVQKKPGQAPRGLIGGTKFLAPGTPARFSGSLSGGKAALTLSGVQPEDEAEYYCVLWYSNRWVFGSGTKLTVL

SEQ ID NO: 2909 - protein, 753 aa, Artificial Sequence
  Synthetic
EVQLVESGGGLVQPGRSLRLSCAASGFTFHDYTMHWVRQAPGKCLEWVSGISWNTGTIGYADSVKGRFTISRDNAKNSLYLQMNSLRAEDTALYYCVKDAFYGGDYYYNYGMDVWGHGTTVTVSSGGGGQGGGGQGGGGQEIVLTQSPATLSVSPGERATLSCRASQSVNNNLAWYQQKPGQAPRLLIYGASTRATGIPARFSGSGSGTDFTLTISSLQSDDFAVYYCQQYNNWPLTFGCGTKVEIKSGGGGQQVQLVQSGGEVKKPGASVKVSCKASGYTFTSYGISWVRQAPGQCLEWMGWISPQTGNAIYAQKLQGRVTMTRDTSTSTAYMELRSLRSDDTAVYYCARDPDYYGSGSYSDYWGQGTLVTVSSGGGGQGGGGQGGGGQEIVLTQSPATLSVSPGERATLSCRASQSVSSNLAWYQQKPGQAPRLLIYGASSRATGIPARFSGSGSGTEFTLTISSLQSEDFAVYYCQQYHSWPLLTFGCGTKVEIKSGGGGQEVQLVESGGGLVQPGGSLKLSCAASGFTFNKYAINWVRQAPGKGLEWVARIRSKYNNYATYYADAVKDRFTISRDDSKNTVYLQMNNLKTEDTAVYYCARAGNFGSSYISYWAYWGQGTLVTVSSGGGGQGGGGQGGGGQQTVVTQEPSLTVSPGGTVTITCGSSTGAVTSGNYPNWVQKKPGQAPRGLIGGTKFLAPGTPARFSGSLSGGKAALTLSGVQPEDEAEYYCVLWYSNRWVFGSGTKLTVL

SEQ ID NO: 2910 - protein, 1241 aa, Artificial Sequence
  Synthetic
EVQLVESGGGLVQPGRSLRLSCAASGFTFHDYTMHWVRQAPGKCLEWVSGISWNTGTIGYADSVKGRFTISRDNAKNSLYLQMNSLRAEDTALYYCVKDAFYGGDYYYNYGMDVWGHGTTVTVSSGGGGSGGGGSGGGGSEIVLTQSPATLSVSPGERATLSCRASQSVNNNLAWYQQKPGQAPRLLIYGASTRATGIPARFSGSGSGTDFTLTISSLQSDDFAVYYCQQYNNWPLTFGCGTKVEIKSGGGGSQVQLVQSGGEVKKPGASVKVSCKASGYTFTSYGISWVRQAPGQCLEWMGWISPQTGNAIYAQKLQGRVTMTRDTSTSTAYMELRSLRSDDTAVYYCARDPDYYGSGSYSDYWGQGTLVTVSSGGGGSGGGGSGGGGSEIVLTQSPATLSVSPGERATLSCRASQSVSSNLAWYQQKPGQAPRLLIYGASSRATGIPARFSGSGSGTEFTLTISSLQSEDFAVYYCQQYHSWPLLTFGCGTKVEIKSGGGGSEVQLVESGGGLVQPGGSLKLSCAASGFTFNKYAMNWVRQAPGKGLEWVARIRSKYNNYATYYADSVKDRFTISRDDSKNTAYLQMNNLKTEDTAVYYCVRHGNFGNSYISYWAYWGQGTLVTVSSGGGGSGGGGSGGGGSQTVVTQEPSLTVSPGGTVTLTCGSSTGAVTSGNYPNWVQQKPGQAPRGLIGGTKFLAPGTPARFSGSLLGGKAALTLSGVQPEDEAEYYCVLWYSNRWVFGGGTKLTVLGGGGDKTHTCPPCPAPELLGGPSVFLFPPKPKDTLMISRTPEVTCVVVDVSHEDPEVKFNWYVDGVEVHNAKTKPCEEQYGSTYRCVSVLTVLHQDWLNGKEYKCKVSNKALPAPIEKTISKAKGQPREPQVYTLPPSREEMTKNQVSLTCLVKGFYPSDIAVEWESNGQPENNYKTTPPVLDSDGSFFLYSKLTVDKSRWQQGNVFSCSVMHEALHNHYTQKSLSLSPGKGGGGSGGGGSGGGGSGGGGSGGGGSGGGGSDKTHTCPPCPAPELLGGPSVFLFPPKPKDTLMISRTPEVTCVVVDVSHEDPEVKFNWYVDGVEVHNAKTKPCEEQYGSTYRCVSVLTVLHQDWLNGKEYKCKVSNKALPAPIEKTISKAKGQPREPQVYTLPPSREEMTKNQVSLTCLVKGFYPSDIAVEWESNGQPENNYKTTPPVLDSDGSFFLYSKLTVDKSRWQQGNVFSCSVMHEALHNHYTQKSLSLSPGK

SEQ ID NO: 2911 - protein, 1231 aa, Artificial Sequence
  Synthetic
EVQLVESGGGLVQPGRSLRLSCAASGFTFHDYTMHWVRQAPGKCLEWVSGISWNTGTIGYADSVKGRFTISRDNAKNSLYLQMNSLRAEDTALYYCVKDAFYGGDYYYNYGMDVWGHGTTVTVSSGGGGQGGGGQGGGGQEIVLTQSPATLSVSPGERATLSCRASQSVNNNLAWYQQKPGQAPRLLIYGASTRATGIPARFSGSGSGTDFTLTISSLQSDDFAVYYCQQYNNWPLTFGCGTKVEIKSGGGGQQVQLVQSGGEVKKPGASVKVSCKASGYTFTSYGISWVRQAPGQCLEWMGWISPQTGNAIYAQKLQGRVTMTRDTSTSTAYMELRSLRSDDTAVYYCARDPDYYGSGSYSDYWGQGTLVTVSSGGGGQGGGGQGGGGQEIVLTQSPATLSVSPGERATLSCRASQSVSSNLAWYQQKPGQAPRLLIYGASSRATGIPARFSGSGSGTEFTLTISSLQSEDFAVYYCQQYHSWPLLTFGCGTKVEIKSGGGGQEVQLVESGGGLVQPGGSLKLSCAASGFTFNKYAMNWVRQAPGKGLEWVARIRSKYNNYATYYADSVKDRFTISRDDSKNTAYLQMNNLKTEDTAVYYCVRHGNFGNSYISYWAYWGQGTLVTVSSGGGGQGGGGQGGGGQQTVVTQEPSLTVSPGGTVTLTCGSSTGAVTSGNYPNWVQQKPGQAPRGLIGGTKFLAPGTPARFSGSLLGGKAALTLSGVQPEDEAEYYCVLWYSNRWVFGGGTKLTVLGGGGCPPCPAPELLGGPSVFLFPPKPKDTLMISRTPEVTCVVVDVSHEEPEVKFNWYVDGVEVHNAKTKPCEEQYGSTYRCVSVLTVLHQDWLNGKEYKCKVSNKALPAPIEKTISKAKGQPREPQVYTLPPSREEMTKNQVSLTCLVKGFYPSDIAVEWESNGQPENNYKTTPPVLDSDGSFFLYSKLTVDKSRWQQGNVFSCSVMHEALHNHYTQKSLSLSPGKGGGGQGGGGQGGGGQGGGGQGGGGQGGGGQCPPCPAPELLGGPSVFLFPPKPKDTLMISRTPEVTCVVVDVSHEEPEVKFNWYVDGVEVHNAKTKPCEEQYGSTYRCVSVLTVLHQDWLNGKEYKCKVSNKALPAPIEKTISKAKGQPREPQVYTLPPSREEMTKNQVSLTCLVKGFYPSDIAVEWESNGQPENNYKTTPPVLDSDGSFFLYSKLTVDKSRWQQGNVFSCSVMHEALHNHYTQKSLSLSPGK

SEQ ID NO: 2912 - protein, 1241 aa, Artificial Sequence
  Synthetic
EVQLVESGGGLVQPGRSLRLSCAASGFTFHDYTMHWVRQAPGKCLEWVSGISWNTGTIGYADSVKGRFTISRDNAKNSLYLQMNSLRAEDTALYYCVKDAFYGGDYYYNYGMDVWGHGTTVTVSSGGGGSGGGGSGGGGSEIVLTQSPATLSVSPGERATLSCRASQSVNNNLAWYQQKPGQAPRLLIYGASTRATGIPARFSGSGSGTDFTLTISSLQSDDFAVYYCQQYNNWPLTFGCGTKVEIKSGGGGSQVQLVQSGGEVKKPGASVKVSCKASGYTFTSYGISWVRQAPGQCLEWMGWISPQTGNAIYAQKLQGRVTMTRDTSTSTAYMELRSLRSDDTAVYYCARDPDYYGSGSYSDYWGQGTLVTVSSGGGGSGGGGSGGGGSEIVLTQSPATLSVSPGERATLSCRASQSVSSNLAWYQQKPGQAPRLLIYGASSRATGIPARFSGSGSGTEFTLTISSLQSEDFAVYYCQQYHSWPLLTFGCGTKVEIKSGGGGSEVQLVESGGGLVQPGGSLKLSCAASGFTFNKYAINWVRQAPGKGLEWVARIRSKYNNYATYYADAVKDRFTISRDDSKNTVYLQMNNLKTEDTAVYYCARAGNFGSSYISYWAYWGQGTLVTVSSGGGGSGGGGSGGGGSQTVVTQEPSLTVSPGGTVTITCGSSTGAVTSGNYPNWVQKKPGQAPRGLIGGTKFLAPGTPARFSGSLSGGKAALTLSGVQPEDEAEYYCVLWYSNRWVFGSGTKLTVLGGGGDKTHTCPPCPAPELLGGPSVFLFPPKPKDTLMISRTPEVTCVVVDVSHEDPEVKFNWYVDGVEVHNAKTKPCEEQYGSTYRCVSVLTVLHQDWLNGKEYKCKVSNKALPAPIEKTISKAKGQPREPQVYTLPPSREEMTKNQVSLTCLVKGFYPSDIAVEWESNGQPENNYKTTPPVLDSDGSFFLYSKLTVDKSRWQQGNVFSCSVMHEALHNHYTQKSLSLSPGKGGGGSGGGGSGGGGSGGGGSGGGGSGGGGSDKTHTCPPCPAPELLGGPSVFLFPPKPKDTLMISRTPEVTCVVVDVSHEDPEVKFNWYVDGVEVHNAKTKPCEEQYGSTYRCVSVLTVLHQDWLNGKEYKCKVSNKALPAPIEKTISKAKGQPREPQVYTLPPSREEMTKNQVSLTCLVKGFYPSDIAVEWESNGQPENNYKTTPPVLDSDGSFFLYSKLTVDKSRWQQGNVFSCSVMHEALHNHYTQKSLSLSPGK

SEQ ID NO: 2913 - protein, 1231 aa, Artificial Sequence
  Synthetic
EVQLVESGGGLVQPGRSLRLSCAASGFTFHDYTMHWVRQAPGKCLEWVSGISWNTGTIGYADSVKGRFTISRDNAKNSLYLQMNSLRAEDTALYYCVKDAFYGGDYYYNYGMDVWGHGTTVTVSSGGGGQGGGGQGGGGQEIVLTQSPATLSVSPGERATLSCRASQSVNNNLAWYQQKPGQAPRLLIYGASTRATGIPARFSGSGSGTDFTLTISSLQSDDFAVYYCQQYNNWPLTFGCGTKVEIKSGGGGQQVQLVQSGGEVKKPGASVKVSCKASGYTFTSYGISWVRQAPGQCLEWMGWISPQTGNAIYAQKLQGRVTMTRDTSTSTAYMELRSLRSDDTAVYYCARDPDYYGSGSYSDYWGQGTLVTVSSGGGGQGGGGQGGGGQEIVLTQSPATLSVSPGERATLSCRASQSVSSNLAWYQQKPGQAPRLLIYGASSRATGIPARFSGSGSGTEFTLTISSLQSEDFAVYYCQQYHSWPLLTFGCGTKVEIKSGGGGQEVQLVESGGGLVQPGGSLKLSCAASGFTFNKYAINWVRQAPGKGLEWVARIRSKYNNYATYYADAVKDRFTISRDDSKNTVYLQMNNLKTEDTAVYYCARAGNFGSSYISYWAYWGQGTLVTVSSGGGGQGGGGQGGGGQQTVVTQEPSLTVSPGGTVTITCGSSTGAVTSGNYPNWVQKKPGQAPRGLIGGTKFLAPGTPARFSGSLSGGKAALTLSGVQPEDEAEYYCVLWYSNRWVFGSGTKLTVLGGGGCPPCPAPELLGGPSVFLFPPKPKDTLMISRTPEVTCVVVDVSHEEPEVKFNWYVDGVEVHNAKTKPCEEQYGSTYRCVSVLTVLHQDWLNGKEYKCKVSNKALPAPIEKTISKAKGQPREPQVYTLPPSREEMTKNQVSLTCLVKGFYPSDIAVEWESNGQPENNYKTTPPVLDSDGSFFLYSKLTVDKSRWQQGNVFSCSVMHEALHNHYTQKSLSLSPGKGGGGQGGGGQGGGGQGGGGQGGGGQGGGGQCPPCPAPELLGGPSVFLFPPKPKDTLMISRTPEVTCVVVDVSHEEPEVKFNWYVDGVEVHNAKTKPCEEQYGSTYRCVSVLTVLHQDWLNGKEYKCKVSNKALPAPIEKTISKAKGQPREPQVYTLPPSREEMTKNQVSLTCLVKGFYPSDIAVEWESNGQPENNYKTTPPVLDSDGSFFLYSKLTVDKSRWQQGNVFSCSVMHEALHNHYTQKSLSLSPGK

SEQ ID NO: 2914 - protein, 498 aa, Artificial Sequence
  Synthetic
EVQLVESGGGLVQPGRSLRLSCAASGFTFHDYTMHWVRQAPGKCLEWVSGISWNTGTIGYADSVKGRFTISRDNAKNSLYLQMNSLRAEDTALYYCVKDAFYGGDYYYNYGMDVWGHGTTVTVSSGGGGSGGGGSGGGGSEIVLTQSPATLSVSPGERATLSCRASQSVNNNLAWYQQKPGQAPRLLIYGASTRATGIPARFSGSGSGTDFTLTISSLQSDDFAVYYCQQYNNWPLTFGCGTKVEIKSGGGGSQVQLVQSGAEVKKPGASVKVSCKASGYTFTSYGISWVRQAPGQCLEWMGWISAYNGNAIYAQKLQGRVTMTRDTSTSTAYMELRSLRSDDTAVYYCARDPDYYGSGSYSDYWGQGTLVTVSSGGGGSGGGGSGGGGSEIVLTQSPATLSVSPGERATLSCRASQSVSSNLAWYQQKPGQAPRLLIYGASSRATGIPARFSGSGSGTEFTLTISSLQSEDFAVYYCQQYHSWPILHFGCGTKVEIK

SEQ ID NO: 2915 - protein, 498 aa, Artificial Sequence
  Synthetic
EVQLVESGGGLVQPGRSLRLSCAASGFTFHDYTMHWVRQAPGKCLEWVSGISWNTGTIGYADSVKGRFTISRDNAKNSLYLQMNSLRAEDTALYYCVKDAFYGGDYYYNYGMDVWGHGTTVTVSSGGGGQGGGGQGGGGQEIVLTQSPATLSVSPGERATLSCRASQSVNNNLAWYQQKPGQAPRLLIYGASTRATGIPARFSGSGSGTDFTLTISSLQSDDFAVYYCQQYNNWPLTFGCGTKVEIKSGGGGQQVQLVQSGAEVKKPGASVKVSCKASGYTFTSYGISWVRQAPGQCLEWMGWISAYNGNAIYAQKLQGRVTMTRDTSTSTAYMELRSLRSDDTAVYYCARDPDYYGSGSYSDYWGQGTLVTVSSGGGGQGGGGQGGGGQEIVLTQSPATLSVSPGERATLSCRASQSVSSNLAWYQQKPGQAPRLLIYGASSRATGIPARFSGSGSGTEFTLTISSLQSEDFAVYYCQQYHSWPILHFGCGTKVEIK

SEQ ID NO: 2916 - protein, 753 aa, Artificial Sequence
  Synthetic
EVQLVESGGGLVQPGRSLRLSCAASGFTFHDYTMHWVRQAPGKCLEWVSGISWNTGTIGYADSVKGRFTISRDNAKNSLYLQMNSLRAEDTALYYCVKDAFYGGDYYYNYGMDVWGHGTTVTVSSGGGGSGGGGSGGGGSEIVLTQSPATLSVSPGERATLSCRASQSVNNNLAWYQQKPGQAPRLLIYGASTRATGIPARFSGSGSGTDFTLTISSLQSDDFAVYYCQQYNNWPLTFGCGTKVEIKSGGGGSQVQLVQSGAEVKKPGASVKVSCKASGYTFTSYGISWVRQAPGQCLEWMGWISAYNGNAIYAQKLQGRVTMTRDTSTSTAYMELRSLRSDDTAVYYCARDPDYYGSGSYSDYWGQGTLVTVSSGGGGSGGGGSGGGGSEIVLTQSPATLSVSPGERATLSCRASQSVSSNLAWYQQKPGQAPRLLIYGASSRATGIPARFSGSGSGTEFTLTISSLQSEDFAVYYCQQYHSWPILHFGCGTKVEIKSGGGGSEVQLVESGGGLVQPGGSLKLSCAASGFTFNKYAMNWVRQAPGKGLEWVARIRSKYNNYATYYADSVKDRFTISRDDSKNTAYLQMNNLKTEDTAVYYCVRHGNFGNSYISYWAYWGQGTLVTVSSGGGGSGGGGSGGGGSQTVVTQEPSLTVSPGGTVTLTCGSSTGAVTSGNYPNWVQQKPGQAPRGLIGGTKFLAPGTPARFSGSLLGGKAALTLSGVQPEDEAEYYCVLWYSNRWVFGGGTKLTVL

SEQ ID NO: 2917 - protein, 753 aa, Artificial Sequence
  Synthetic
EVQLVESGGGLVQPGRSLRLSCAASGFTFHDYTMHWVRQAPGKCLEWVSGISWNTGTIGYADSVKGRFTISRDNAKNSLYLQMNSLRAEDTALYYCVKDAFYGGDYYYNYGMDVWGHGTTVTVSSGGGGQGGGGQGGGGQEIVLTQSPATLSVSPGERATLSCRASQSVNNNLAWYQQKPGQAPRLLIYGASTRATGIPARFSGSGSGTDFTLTISSLQSDDFAVYYCQQYNNWPLTFGCGTKVEIKSGGGGQQVQLVQSGAEVKKPGASVKVSCKASGYTFTSYGISWVRQAPGQCLEWMGWISAYNGNAIYAQKLQGRVTMTRDTSTSTAYMELRSLRSDDTAVYYCARDPDYYGSGSYSDYWGQGTLVTVSSGGGGQGGGGQGGGGQEIVLTQSPATLSVSPGERATLSCRASQSVSSNLAWYQQKPGQAPRLLIYGASSRATGIPARFSGSGSGTEFTLTISSLQSEDFAVYYCQQYHSWPILHFGCGTKVEIKSGGGGQEVQLVESGGGLVQPGGSLKLSCAASGFTFNKYAMNWVRQAPGKGLEWVARIRSKYNNYATYYADSVKDRFTISRDDSKNTAYLQMNNLKTEDTAVYYCVRHGNFGNSYISYWAYWGQGTLVTVSSGGGGQGGGGQGGGGQQTVVTQEPSLTVSPGGTVTLTCGSSTGAVTSGNYPNWVQQKPGQAPRGLIGGTKFLAPGTPARFSGSLLGGKAALTLSGVQPEDEAEYYCVLWYSNRWVFGGGTKLTVL

SEQ ID NO: 2918 - protein, 753 aa, Artificial Sequence
  Synthetic
EVQLVESGGGLVQPGRSLRLSCAASGFTFHDYTMHWVRQAPGKCLEWVSGISWNTGTIGYADSVKGRFTISRDNAKNSLYLQMNSLRAEDTALYYCVKDAFYGGDYYYNYGMDVWGHGTTVTVSSGGGGSGGGGSGGGGSEIVLTQSPATLSVSPGERATLSCRASQSVNNNLAWYQQKPGQAPRLLIYGASTRATGIPARFSGSGSGTDFTLTISSLQSDDFAVYYCQQYNNWPLTFGCGTKVEIKSGGGGSQVQLVQSGAEVKKPGASVKVSCKASGYTFTSYGISWVRQAPGQCLEWMGWISAYNGNAIYAQKLQGRVTMTRDTSTSTAYMELRSLRSDDTAVYYCARDPDYYGSGSYSDYWGQGTLVTVSSGGGGSGGGGSGGGGSEIVLTQSPATLSVSPGERATLSCRASQSVSSNLAWYQQKPGQAPRLLIYGASSRATGIPARFSGSGSGTEFTLTISSLQSEDFAVYYCQQYHSWPILHFGCGTKVEIKSGGGGSEVQLVESGGGLVQPGGSLKLSCAASGFTFNKYAINWVRQAPGKGLEWVARIRSKYNNYATYYADAVKDRFTISRDDSKNTVYLQMNNLKTEDTAVYYCARAGNFGSSYISYWAYWGQGTLVTVSSGGGGSGGGGSGGGGSQTVVTQEPSLTVSPGGTVTITCGSSTGAVTSGNYPNWVQKKPGQAPRGLIGGTKFLAPGTPARFSGSLSGGKAALTLSGVQPEDEAEYYCVLWYSNRWVFGSGTKLTVL

SEQ ID NO: 2919 - protein, 753 aa, Artificial Sequence
  Synthetic
EVQLVESGGGLVQPGRSLRLSCAASGFTFHDYTMHWVRQAPGKCLEWVSGISWNTGTIGYADSVKGRFTISRDNAKNSLYLQMNSLRAEDTALYYCVKDAFYGGDYYYNYGMDVWGHGTTVTVSSGGGGQGGGGQGGGGQEIVLTQSPATLSVSPGERATLSCRASQSVNNNLAWYQQKPGQAPRLLIYGASTRATGIPARFSGSGSGTDFTLTISSLQSDDFAVYYCQQYNNWPLTFGCGTKVEIKSGGGGQQVQLVQSGAEVKKPGASVKVSCKASGYTFTSYGISWVRQAPGQCLEWMGWISAYNGNAIYAQKLQGRVTMTRDTSTSTAYMELRSLRSDDTAVYYCARDPDYYGSGSYSDYWGQGTLVTVSSGGGGQGGGGQGGGGQEIVLTQSPATLSVSPGERATLSCRASQSVSSNLAWYQQKPGQAPRLLIYGASSRATGIPARFSGSGSGTEFTLTISSLQSEDFAVYYCQQYHSWPILHFGCGTKVEIKSGGGGQEVQLVESGGGLVQPGGSLKLSCAASGFTFNKYAINWVRQAPGKGLEWVARIRSKYNNYATYYADAVKDRFTISRDDSKNTVYLQMNNLKTEDTAVYYCARAGNFGSSYISYWAYWGQGTLVTVSSGGGGQGGGGQGGGGQQTVVTQEPSLTVSPGGTVTITCGSSTGAVTSGNYPNWVQKKPGQAPRGLIGGTKFLAPGTPARFSGSLSGGKAALTLSGVQPEDEAEYYCVLWYSNRWVFGSGTKLTVL

SEQ ID NO: 2920 - protein, 1241 aa, Artificial Sequence
  Synthetic
EVQLVESGGGLVQPGRSLRLSCAASGFTFHDYTMHWVRQAPGKCLEWVSGISWNTGTIGYADSVKGRFTISRDNAKNSLYLQMNSLRAEDTALYYCVKDAFYGGDYYYNYGMDVWGHGTTVTVSSGGGGSGGGGSGGGGSEIVLTQSPATLSVSPGERATLSCRASQSVNNNLAWYQQKPGQAPRLLIYGASTRATGIPARFSGSGSGTDFTLTISSLQSDDFAVYYCQQYNNWPLTFGCGTKVEIKSGGGGSQVQLVQSGAEVKKPGASVKVSCKASGYTFTSYGISWVRQAPGQCLEWMGWISAYNGNAIYAQKLQGRVTMTRDTSTSTAYMELRSLRSDDTAVYYCARDPDYYGSGSYSDYWGQGTLVTVSSGGGGSGGGGSGGGGSEIVLTQSPATLSVSPGERATLSCRASQSVSSNLAWYQQKPGQAPRLLIYGASSRATGIPARFSGSGSGTEFTLTISSLQSEDFAVYYCQQYHSWPILHFGCGTKVEIKSGGGGSEVQLVESGGGLVQPGGSLKLSCAASGFTFNKYAMNWVRQAPGKGLEWVARIRSKYNNYATYYADSVKDRFTISRDDSKNTAYLQMNNLKTEDTAVYYCVRHGNFGNSYISYWAYWGQGTLVTVSSGGGGSGGGGSGGGGSQTVVTQEPSLTVSPGGTVTLTCGSSTGAVTSGNYPNWVQQKPGQAPRGLIGGTKFLAPGTPARFSGSLLGGKAALTLSGVQPEDEAEYYCVLWYSNRWVFGGGTKLTVLGGGGDKTHTCPPCPAPELLGGPSVFLFPPKPKDTLMISRTPEVTCVVVDVSHEDPEVKFNWYVDGVEVHNAKTKPCEEQYGSTYRCVSVLTVLHQDWLNGKEYKCKVSNKALPAPIEKTISKAKGQPREPQVYTLPPSREEMTKNQVSLTCLVKGFYPSDIAVEWESNGQPENNYKTTPPVLDSDGSFFLYSKLTVDKSRWQQGNVFSCSVMHEALHNHYTQKSLSLSPGKGGGGSGGGGSGGGGSGGGGSGGGGSGGGGSDKTHTCPPCPAPELLGGPSVFLFPPKPKDTLMISRTPEVTCVVVDVSHEDPEVKFNWYVDGVEVHNAKTKPCEEQYGSTYRCVSVLTVLHQDWLNGKEYKCKVSNKALPAPIEKTISKAKGQPREPQVYTLPPSREEMTKNQVSLTCLVKGFYPSDIAVEWESNGQPENNYKTTPPVLDSDGSFFLYSKLTVDKSRWQQGNVFSCSVMHEALHNHYTQKSLSLSPGK

SEQ ID NO: 2921 - protein, 1231 aa, Artificial Sequence
  Synthetic
EVQLVESGGGLVQPGRSLRLSCAASGFTFHDYTMHWVRQAPGKCLEWVSGISWNTGTIGYADSVKGRFTISRDNAKNSLYLQMNSLRAEDTALYYCVKDAFYGGDYYYNYGMDVWGHGTTVTVSSGGGGQGGGGQGGGGQEIVLTQSPATLSVSPGERATLSCRASQSVNNNLAWYQQKPGQAPRLLIYGASTRATGIPARFSGSGSGTDFTLTISSLQSDDFAVYYCQQYNNWPLTFGCGTKVEIKSGGGGQQVQLVQSGAEVKKPGASVKVSCKASGYTFTSYGISWVRQAPGQCLEWMGWISAYNGNAIYAQKLQGRVTMTRDTSTSTAYMELRSLRSDDTAVYYCARDPDYYGSGSYSDYWGQGTLVTVSSGGGGQGGGGQGGGGQEIVLTQSPATLSVSPGERATLSCRASQSVSSNLAWYQQKPGQAPRLLIYGASSRATGIPARFSGSGSGTEFTLTISSLQSEDFAVYYCQQYHSWPILHFGCGTKVEIKSGGGGQEVQLVESGGGLVQPGGSLKLSCAASGFTFNKYAMNWVRQAPGKGLEWVARIRSKYNNYATYYADSVKDRFTISRDDSKNTAYLQMNNLKTEDTAVYYCVRHGNFGNSYISYWAYWGQGTLVTVSSGGGGQGGGGQGGGGQQTVVTQEPSLTVSPGGTVTLTCGSSTGAVTSGNYPNWVQQKPGQAPRGLIGGTKFLAPGTPARFSGSLLGGKAALTLSGVQPEDEAEYYCVLWYSNRWVFGGGTKLTVLGGGGCPPCPAPELLGGPSVFLFPPKPKDTLMISRTPEVTCVVVDVSHEEPEVKFNWYVDGVEVHNAKTKPCEEQYGSTYRCVSVLTVLHQDWLNGKEYKCKVSNKALPAPIEKTISKAKGQPREPQVYTLPPSREEMTKNQVSLTCLVKGFYPSDIAVEWESNGQPENNYKTTPPVLDSDGSFFLYSKLTVDKSRWQQGNVFSCSVMHEALHNHYTQKSLSLSPGKGGGGQGGGGQGGGGQGGGGQGGGGQGGGGQCPPCPAPELLGGPSVFLFPPKPKDTLMISRTPEVTCVVVDVSHEEPEVKFNWYVDGVEVHNAKTKPCEEQYGSTYRCVSVLTVLHQDWLNGKEYKCKVSNKALPAPIEKTISKAKGQPREPQVYTLPPSREEMTKNQVSLTCLVKGFYPSDIAVEWESNGQPENNYKTTPPVLDSDGSFFLYSKLTVDKSRWQQGNVFSCSVMHEALHNHYTQKSLSLSPGK

SEQ ID NO: 2922 - protein, 1241 aa, Artificial Sequence
  Synthetic
EVQLVESGGGLVQPGRSLRLSCAASGFTFHDYTMHWVRQAPGKCLEWVSGISWNTGTIGYADSVKGRFTISRDNAKNSLYLQMNSLRAEDTALYYCVKDAFYGGDYYYNYGMDVWGHGTTVTVSSGGGGSGGGGSGGGGSEIVLTQSPATLSVSPGERATLSCRASQSVNNNLAWYQQKPGQAPRLLIYGASTRATGIPARFSGSGSGTDFTLTISSLQSDDFAVYYCQQYNNWPLTFGCGTKVEIKSGGGGSQVQLVQSGAEVKKPGASVKVSCKASGYTFTSYGISWVRQAPGQCLEWMGWISAYNGNAIYAQKLQGRVTMTRDTSTSTAYMELRSLRSDDTAVYYCARDPDYYGSGSYSDYWGQGTLVTVSSGGGGSGGGGSGGGGSEIVLTQSPATLSVSPGERATLSCRASQSVSSNLAWYQQKPGQAPRLLIYGASSRATGIPARFSGSGSGTEFTLTISSLQSEDFAVYYCQQYHSWPILHFGCGTKVEIKSGGGGSEVQLVESGGGLVQPGGSLKLSCAASGFTFNKYAINWVRQAPGKGLEWVARIRSKYNNYATYYADAVKDRFTISRDDSKNTVYLQMNNLKTEDTAVYYCARAGNFGSSYISYWAYWGQGTLVTVSSGGGGSGGGGSGGGGSQTVVTQEPSLTVSPGGTVTITCGSSTGAVTSGNYPNWVQKKPGQAPRGLIGGTKFLAPGTPARFSGSLSGGKAALTLSGVQPEDEAEYYCVLWYSNRWVFGSGTKLTVLGGGGDKTHTCPPCPAPELLGGPSVFLFPPKPKDTLMISRTPEVTCVVVDVSHEDPEVKFNWYVDGVEVHNAKTKPCEEQYGSTYRCVSVLTVLHQDWLNGKEYKCKVSNKALPAPIEKTISKAKGQPREPQVYTLPPSREEMTKNQVSLTCLVKGFYPSDIAVEWESNGQPENNYKTTPPVLDSDGSFFLYSKLTVDKSRWQQGNVFSCSVMHEALHNHYTQKSLSLSPGKGGGGSGGGGSGGGGSGGGGSGGGGSGGGGSDKTHTCPPCPAPELLGGPSVFLFPPKPKDTLMISRTPEVTCVVVDVSHEDPEVKFNWYVDGVEVHNAKTKPCEEQYGSTYRCVSVLTVLHQDWLNGKEYKCKVSNKALPAPIEKTISKAKGQPREPQVYTLPPSREEMTKNQVSLTCLVKGFYPSDIAVEWESNGQPENNYKTTPPVLDSDGSFFLYSKLTVDKSRWQQGNVFSCSVMHEALHNHYTQKSLSLSPGK

SEQ ID NO: 2923 - protein, 1231 aa, Artificial Sequence
  Synthetic
EVQLVESGGGLVQPGRSLRLSCAASGFTFHDYTMHWVRQAPGKCLEWVSGISWNTGTIGYADSVKGRFTISRDNAKNSLYLQMNSLRAEDTALYYCVKDAFYGGDYYYNYGMDVWGHGTTVTVSSGGGGQGGGGQGGGGQEIVLTQSPATLSVSPGERATLSCRASQSVNNNLAWYQQKPGQAPRLLIYGASTRATGIPARFSGSGSGTDFTLTISSLQSDDFAVYYCQQYNNWPLTFGCGTKVEIKSGGGGQQVQLVQSGAEVKKPGASVKVSCKASGYTFTSYGISWVRQAPGQCLEWMGWISAYNGNAIYAQKLQGRVTMTRDTSTSTAYMELRSLRSDDTAVYYCARDPDYYGSGSYSDYWGQGTLVTVSSGGGGQGGGGQGGGGQEIVLTQSPATLSVSPGERATLSCRASQSVSSNLAWYQQKPGQAPRLLIYGASSRATGIPARFSGSGSGTEFTLTISSLQSEDFAVYYCQQYHSWPILHFGCGTKVEIKSGGGGQEVQLVESGGGLVQPGGSLKLSCAASGFTFNKYAINWVRQAPGKGLEWVARIRSKYNNYATYYADAVKDRFTISRDDSKNTVYLQMNNLKTEDTAVYYCARAGNFGSSYISYWAYWGQGTLVTVSSGGGGQGGGGQGGGGQQTVVTQEPSLTVSPGGTVTITCGSSTGAVTSGNYPNWVQKKPGQAPRGLIGGTKFLAPGTPARFSGSLSGGKAALTLSGVQPEDEAEYYCVLWYSNRWVFGSGTKLTVLGGGGCPPCPAPELLGGPSVFLFPPKPKDTLMISRTPEVTCVVVDVSHEEPEVKFNWYVDGVEVHNAKTKPCEEQYGSTYRCVSVLTVLHQDWLNGKEYKCKVSNKALPAPIEKTISKAKGQPREPQVYTLPPSREEMTKNQVSLTCLVKGFYPSDIAVEWESNGQPENNYKTTPPVLDSDGSFFLYSKLTVDKSRWQQGNVFSCSVMHEALHNHYTQKSLSLSPGKGGGGQGGGGQGGGGQGGGGQGGGGQGGGGQCPPCPAPELLGGPSVFLFPPKPKDTLMISRTPEVTCVVVDVSHEEPEVKFNWYVDGVEVHNAKTKPCEEQYGSTYRCVSVLTVLHQDWLNGKEYKCKVSNKALPAPIEKTISKAKGQPREPQVYTLPPSREEMTKNQVSLTCLVKGFYPSDIAVEWESNGQPENNYKTTPPVLDSDGSFFLYSKLTVDKSRWQQGNVFSCSVMHEALHNHYTQKSLSLSPGK

SEQ ID NO: 2924 - protein, 492 aa, Artificial Sequence
  Synthetic
EVQLVESGGGLVQPGRSLRLSCAASGFTFHDYTMHWVRQAPGKCLEWVSGISWNTGTIGYADSVKGRFTISRDNAKNSLYLQMNSLRAEDTALYYCVKDAFYGGDYYYNYGMDVWGHGTTVTVSSGGGGSGGGGSGGGGSEIVLTQSPATLSVSPGERATLSCRASQSVNNNLAWYQQKPGQAPRLLIYGASTRATGIPARFSGSGSGTDFTLTISSLQSDDFAVYYCQQYNNWPLTFGCGTKVEIKSGGGGSQVQLVQSGAEVKKPGASVKVSCKASGYTFTSYGISWVRQAPGQCLEWMGWISAYNGNTVYAQKLQDRVTMTTDTSTSTAYMELRSLRSDDTAVYFCVRDGDPLDYWGQGTLVTVSSGGGGSGGGGSGGGGSEIVLTQSPGTLSLSPGERATLSCRASQSVSSNLAWYQQKPGQAPRLLIYGASTRATGIPARFSGSGSGTEFTLTISSLQSEDFAVYYCQQYHTWPPVTFGCGTKVEIK

SEQ ID NO: 2925 - protein, 492 aa, Artificial Sequence
  Synthetic
EVQLVESGGGLVQPGRSLRLSCAASGFTFHDYTMHWVRQAPGKCLEWVSGISWNTGTIGYADSVKGRFTISRDNAKNSLYLQMNSLRAEDTALYYCVKDAFYGGDYYYNYGMDVWGHGTTVTVSSGGGGQGGGGQGGGGQEIVLTQSPATLSVSPGERATLSCRASQSVNNNLAWYQQKPGQAPRLLIYGASTRATGIPARFSGSGSGTDFTLTISSLQSDDFAVYYCQQYNNWPLTFGCGTKVEIKSGGGGQQVQLVQSGAEVKKPGASVKVSCKASGYTFTSYGISWVRQAPGQCLEWMGWISAYNGNTVYAQKLQDRVTMTTDTSTSTAYMELRSLRSDDTAVYFCVRDGDPLDYWGQGTLVTVSSGGGGQGGGGQGGGGQEIVLTQSPGTLSLSPGERATLSCRASQSVSSNLAWYQQKPGQAPRLLIYGASTRATGIPARFSGSGSGTEFTLTISSLQSEDFAVYYCQQYHTWPPVTFGCGTKVEIK

SEQ ID NO: 2926 - protein, 747 aa, Artificial Sequence
  Synthetic
EVQLVESGGGLVQPGRSLRLSCAASGFTFHDYTMHWVRQAPGKCLEWVSGISWNTGTIGYADSVKGRFTISRDNAKNSLYLQMNSLRAEDTALYYCVKDAFYGGDYYYNYGMDVWGHGTTVTVSSGGGGSGGGGSGGGGSEIVLTQSPATLSVSPGERATLSCRASQSVNNNLAWYQQKPGQAPRLLIYGASTRATGIPARFSGSGSGTDFTLTISSLQSDDFAVYYCQQYNNWPLTFGCGTKVEIKSGGGGSQVQLVQSGAEVKKPGASVKVSCKASGYTFTSYGISWVRQAPGQCLEWMGWISAYNGNTVYAQKLQDRVTMTTDTSTSTAYMELRSLRSDDTAVYFCVRDGDPLDYWGQGTLVTVSSGGGGSGGGGSGGGGSEIVLTQSPGTLSLSPGERATLSCRASQSVSSNLAWYQQKPGQAPRLLIYGASTRATGIPARFSGSGSGTEFTLTISSLQSEDFAVYYCQQYHTWPPVTFGCGTKVEIKSGGGGSEVQLVESGGGLVQPGGSLKLSCAASGFTFNKYAMNWVRQAPGKGLEWVARIRSKYNNYATYYADSVKDRFTISRDDSKNTAYLQMNNLKTEDTAVYYCVRHGNFGNSYISYWAYWGQGTLVTVSSGGGGSGGGGSGGGGSQTVVTQEPSLTVSPGGTVTLTCGSSTGAVTSGNYPNWVQQKPGQAPRGLIGGTKFLAPGTPARFSGSLLGGKAALTLSGVQPEDEAEYYCVLWYSNRWVFGGGTKLTVL

SEQ ID NO: 2927 - protein, 747 aa, Artificial Sequence
  Synthetic
EVQLVESGGGLVQPGRSLRLSCAASGFTFHDYTMHWVRQAPGKCLEWVSGISWNTGTIGYADSVKGRFTISRDNAKNSLYLQMNSLRAEDTALYYCVKDAFYGGDYYYNYGMDVWGHGTTVTVSSGGGGQGGGGQGGGGQEIVLTQSPATLSVSPGERATLSCRASQSVNNNLAWYQQKPGQAPRLLIYGASTRATGIPARFSGSGSGTDFTLTISSLQSDDFAVYYCQQYNNWPLTFGCGTKVEIKSGGGGQQVQLVQSGAEVKKPGASVKVSCKASGYTFTSYGISWVRQAPGQCLEWMGWISAYNGNTVYAQKLQDRVTMTTDTSTSTAYMELRSLRSDDTAVYFCVRDGDPLDYWGQGTLVTVSSGGGGQGGGGQGGGGQEIVLTQSPGTLSLSPGERATLSCRASQSVSSNLAWYQQKPGQAPRLLIYGASTRATGIPARFSGSGSGTEFTLTISSLQSEDFAVYYCQQYHTWPPVTFGCGTKVEIKSGGGGQEVQLVESGGGLVQPGGSLKLSCAASGFTFNKYAMNWVRQAPGKGLEWVARIRSKYNNYATYYADSVKDRFTISRDDSKNTAYLQMNNLKTEDTAVYYCVRHGNFGNSYISYWAYWGQGTLVTVSSGGGGQGGGGQGGGGQQTVVTQEPSLTVSPGGTVTLTCGSSTGAVTSGNYPNWVQQKPGQAPRGLIGGTKFLAPGTPARFSGSLLGGKAALTLSGVQPEDEAEYYCVLWYSNRWVFGGGTKLTVL

SEQ ID NO: 2928 - protein, 747 aa, Artificial Sequence
  Synthetic
EVQLVESGGGLVQPGRSLRLSCAASGFTFHDYTMHWVRQAPGKCLEWVSGISWNTGTIGYADSVKGRFTISRDNAKNSLYLQMNSLRAEDTALYYCVKDAFYGGDYYYNYGMDVWGHGTTVTVSSGGGGSGGGGSGGGGSEIVLTQSPATLSVSPGERATLSCRASQSVNNNLAWYQQKPGQAPRLLIYGASTRATGIPARFSGSGSGTDFTLTISSLQSDDFAVYYCQQYNNWPLTFGCGTKVEIKSGGGGSQVQLVQSGAEVKKPGASVKVSCKASGYTFTSYGISWVRQAPGQCLEWMGWISAYNGNTVYAQKLQDRVTMTTDTSTSTAYMELRSLRSDDTAVYFCVRDGDPLDYWGQGTLVTVSSGGGGSGGGGSGGGGSEIVLTQSPGTLSLSPGERATLSCRASQSVSSNLAWYQQKPGQAPRLLIYGASTRATGIPARFSGSGSGTEFTLTISSLQSEDFAVYYCQQYHTWPPVTFGCGTKVEIKSGGGGSEVQLVESGGGLVQPGGSLKLSCAASGFTFNKYAINWVRQAPGKGLEWVARIRSKYNNYATYYADAVKDRFTISRDDSKNTVYLQMNNLKTEDTAVYYCARAGNFGSSYISYWAYWGQGTLVTVSSGGGGSGGGGSGGGGSQTVVTQEPSLTVSPGGTVTITCGSSTGAVTSGNYPNWVQKKPGQAPRGLIGGTKFLAPGTPARFSGSLSGGKAALTLSGVQPEDEAEYYCVLWYSNRWVFGSGTKLTVL

SEQ ID NO: 2929 - protein, 747 aa, Artificial Sequence
  Synthetic
EVQLVESGGGLVQPGRSLRLSCAASGFTFHDYTMHWVRQAPGKCLEWVSGISWNTGTIGYADSVKGRFTISRDNAKNSLYLQMNSLRAEDTALYYCVKDAFYGGDYYYNYGMDVWGHGTTVTVSSGGGGQGGGGQGGGGQEIVLTQSPATLSVSPGERATLSCRASQSVNNNLAWYQQKPGQAPRLLIYGASTRATGIPARFSGSGSGTDFTLTISSLQSDDFAVYYCQQYNNWPLTFGCGTKVEIKSGGGGQQVQLVQSGAEVKKPGASVKVSCKASGYTFTSYGISWVRQAPGQCLEWMGWISAYNGNTVYAQKLQDRVTMTTDTSTSTAYMELRSLRSDDTAVYFCVRDGDPLDYWGQGTLVTVSSGGGGQGGGGQGGGGQEIVLTQSPGTLSLSPGERATLSCRASQSVSSNLAWYQQKPGQAPRLLIYGASTRATGIPARFSGSGSGTEFTLTISSLQSEDFAVYYCQQYHTWPPVTFGCGTKVEIKSGGGGQEVQLVESGGGLVQPGGSLKLSCAASGFTFNKYAINWVRQAPGKGLEWVARIRSKYNNYATYYADAVKDRFTISRDDSKNTVYLQMNNLKTEDTAVYYCARAGNFGSSYISYWAYWGQGTLVTVSSGGGGQGGGGQGGGGQQTVVTQEPSLTVSPGGTVTITCGSSTGAVTSGNYPNWVQKKPGQAPRGLIGGTKFLAPGTPARFSGSLSGGKAALTLSGVQPEDEAEYYCVLWYSNRWVFGSGTKLTVL

SEQ ID NO: 2930 - protein, 1235 aa, Artificial Sequence
  Synthetic
EVQLVESGGGLVQPGRSLRLSCAASGFTFHDYTMHWVRQAPGKCLEWVSGISWNTGTIGYADSVKGRFTISRDNAKNSLYLQMNSLRAEDTALYYCVKDAFYGGDYYYNYGMDVWGHGTTVTVSSGGGGSGGGGSGGGGSEIVLTQSPATLSVSPGERATLSCRASQSVNNNLAWYQQKPGQAPRLLIYGASTRATGIPARFSGSGSGTDFTLTISSLQSDDFAVYYCQQYNNWPLTFGCGTKVEIKSGGGGSQVQLVQSGAEVKKPGASVKVSCKASGYTFTSYGISWVRQAPGQCLEWMGWISAYNGNTVYAQKLQDRVTMTTDTSTSTAYMELRSLRSDDTAVYFCVRDGDPLDYWGQGTLVTVSSGGGGSGGGGSGGGGSEIVLTQSPGTLSLSPGERATLSCRASQSVSSNLAWYQQKPGQAPRLLIYGASTRATGIPARFSGSGSGTEFTLTISSLQSEDFAVYYCQQYHTWPPVTFGCGTKVEIKSGGGGSEVQLVESGGGLVQPGGSLKLSCAASGFTFNKYAMNWVRQAPGKGLEWVARIRSKYNNYATYYADSVKDRFTISRDDSKNTAYLQMNNLKTEDTAVYYCVRHGNFGNSYISYWAYWGQGTLVTVSSGGGGSGGGGSGGGGSQTVVTQEPSLTVSPGGTVTLTCGSSTGAVTSGNYPNWVQQKPGQAPRGLIGGTKFLAPGTPARFSGSLLGGKAALTLSGVQPEDEAEYYCVLWYSNRWVFGGGTKLTVLGGGGDKTHTCPPCPAPELLGGPSVFLFPPKPKDTLMISRTPEVTCVVVDVSHEDPEVKFNWYVDGVEVHNAKTKPCEEQYGSTYRCVSVLTVLHQDWLNGKEYKCKVSNKALPAPIEKTISKAKGQPREPQVYTLPPSREEMTKNQVSLTCLVKGFYPSDIAVEWESNGQPENNYKTTPPVLDSDGSFFLYSKLTVDKSRWQQGNVFSCSVMHEALHNHYTQKSLSLSPGKGGGGSGGGGSGGGGSGGGGSGGGGSGGGGSDKTHTCPPCPAPELLGGPSVFLFPPKPKDTLMISRTPEVTCVVVDVSHEDPEVKFNWYVDGVEVHNAKTKPCEEQYGSTYRCVSVLTVLHQDWLNGKEYKCKVSNKALPAPIEKTISKAKGQPREPQVYTLPPSREEMTKNQVSLTCLVKGFYPSDIAVEWESNGQPENNYKTTPPVLDSDGSFFLYSKLTVDKSRWQQGNVFSCSVMHEALHNHYTQKSLSLSPGK

SEQ ID NO: 2931 - protein, 1225 aa, Artificial Sequence
  Synthetic
EVQLVESGGGLVQPGRSLRLSCAASGFTFHDYTMHWVRQAPGKCLEWVSGISWNTGTIGYADSVKGRFTISRDNAKNSLYLQMNSLRAEDTALYYCVKDAFYGGDYYYNYGMDVWGHGTTVTVSSGGGGQGGGGQGGGGQEIVLTQSPATLSVSPGERATLSCRASQSVNNNLAWYQQKPGQAPRLLIYGASTRATGIPARFSGSGSGTDFTLTISSLQSDDFAVYYCQQYNNWPLTFGCGTKVEIKSGGGGQQVQLVQSGAEVKKPGASVKVSCKASGYTFTSYGISWVRQAPGQCLEWMGWISAYNGNTVYAQKLQDRVTMTTDTSTSTAYMELRSLRSDDTAVYFCVRDGDPLDYWGQGTLVTVSSGGGGQGGGGQGGGGQEIVLTQSPGTLSLSPGERATLSCRASQSVSSNLAWYQQKPGQAPRLLIYGASTRATGIPARFSGSGSGTEFTLTISSLQSEDFAVYYCQQYHTWPPVTFGCGTKVEIKSGGGGQEVQLVESGGGLVQPGGSLKLSCAASGFTFNKYAMNWVRQAPGKGLEWVARIRSKYNNYATYYADSVKDRFTISRDDSKNTAYLQMNNLKTEDTAVYYCVRHGNFGNSYISYWAYWGQGTLVTVSSGGGGQGGGGQGGGGQQTVVTQEPSLTVSPGGTVTLTCGSSTGAVTSGNYPNWVQQKPGQAPRGLIGGTKFLAPGTPARFSGSLLGGKAALTLSGVQPEDEAEYYCVLWYSNRWVFGGGTKLTVLGGGGCPPCPAPELLGGPSVFLFPPKPKDTLMISRTPEVTCVVVDVSHEEPEVKFNWYVDGVEVHNAKTKPCEEQYGSTYRCVSVLTVLHQDWLNGKEYKCKVSNKALPAPIEKTISKAKGQPREPQVYTLPPSREEMTKNQVSLTCLVKGFYPSDIAVEWESNGQPENNYKTTPPVLDSDGSFFLYSKLTVDKSRWQQGNVFSCSVMHEALHNHYTQKSLSLSPGKGGGGQGGGGQGGGGQGGGGQGGGGQGGGGQCPPCPAPELLGGPSVFLFPPKPKDTLMISRTPEVTCVVVDVSHEEPEVKFNWYVDGVEVHNAKTKPCEEQYGSTYRCVSVLTVLHQDWLNGKEYKCKVSNKALPAPIEKTISKAKGQPREPQVYTLPPSREEMTKNQVSLTCLVKGFYPSDIAVEWESNGQPENNYKTTPPVLDSDGSFFLYSKLTVDKSRWQQGNVFSCSVMHEALHNHYTQKSLSLSPGK

SEQ ID NO: 2932 - protein, 1235 aa, Artificial Sequence
  Synthetic
EVQLVESGGGLVQPGRSLRLSCAASGFTFHDYTMHWVRQAPGKCLEWVSGISWNTGTIGYADSVKGRFTISRDNAKNSLYLQMNSLRAEDTALYYCVKDAFYGGDYYYNYGMDVWGHGTTVTVSSGGGGSGGGGSGGGGSEIVLTQSPATLSVSPGERATLSCRASQSVNNNLAWYQQKPGQAPRLLIYGASTRATGIPARFSGSGSGTDFTLTISSLQSDDFAVYYCQQYNNWPLTFGCGTKVEIKSGGGGSQVQLVQSGAEVKKPGASVKVSCKASGYTFTSYGISWVRQAPGQCLEWMGWISAYNGNTVYAQKLQDRVTMTTDTSTSTAYMELRSLRSDDTAVYFCVRDGDPLDYWGQGTLVTVSSGGGGSGGGGSGGGGSEIVLTQSPGTLSLSPGERATLSCRASQSVSSNLAWYQQKPGQAPRLLIYGASTRATGIPARFSGSGSGTEFTLTISSLQSEDFAVYYCQQYHTWPPVTFGCGTKVEIKSGGGGSEVQLVESGGGLVQPGGSLKLSCAASGFTFNKYAINWVRQAPGKGLEWVARIRSKYNNYATYYADAVKDRFTISRDDSKNTVYLQMNNLKTEDTAVYYCARAGNFGSSYISYWAYWGQGTLVTVSSGGGGSGGGGSGGGGSQTVVTQEPSLTVSPGGTVTITCGSSTGAVTSGNYPNWVQKKPGQAPRGLIGGTKFLAPGTPARFSGSLSGGKAALTLSGVQPEDEAEYYCVLWYSNRWVFGSGTKLTVLGGGGDKTHTCPPCPAPELLGGPSVFLFPPKPKDTLMISRTPEVTCVVVDVSHEDPEVKFNWYVDGVEVHNAKTKPCEEQYGSTYRCVSVLTVLHQDWLNGKEYKCKVSNKALPAPIEKTISKAKGQPREPQVYTLPPSREEMTKNQVSLTCLVKGFYPSDIAVEWESNGQPENNYKTTPPVLDSDGSFFLYSKLTVDKSRWQQGNVFSCSVMHEALHNHYTQKSLSLSPGKGGGGSGGGGSGGGGSGGGGSGGGGSGGGGSDKTHTCPPCPAPELLGGPSVFLFPPKPKDTLMISRTPEVTCVVVDVSHEDPEVKFNWYVDGVEVHNAKTKPCEEQYGSTYRCVSVLTVLHQDWLNGKEYKCKVSNKALPAPIEKTISKAKGQPREPQVYTLPPSREEMTKNQVSLTCLVKGFYPSDIAVEWESNGQPENNYKTTPPVLDSDGSFFLYSKLTVDKSRWQQGNVFSCSVMHEALHNHYTQKSLSLSPGK

SEQ ID NO: 2933 - protein, 1225 aa, Artificial Sequence
  Synthetic
EVQLVESGGGLVQPGRSLRLSCAASGFTFHDYTMHWVRQAPGKCLEWVSGISWNTGTIGYADSVKGRFTISRDNAKNSLYLQMNSLRAEDTALYYCVKDAFYGGDYYYNYGMDVWGHGTTVTVSSGGGGQGGGGQGGGGQEIVLTQSPATLSVSPGERATLSCRASQSVNNNLAWYQQKPGQAPRLLIYGASTRATGIPARFSGSGSGTDFTLTISSLQSDDFAVYYCQQYNNWPLTFGCGTKVEIKSGGGGQQVQLVQSGAEVKKPGASVKVSCKASGYTFTSYGISWVRQAPGQCLEWMGWISAYNGNTVYAQKLQDRVTMTTDTSTSTAYMELRSLRSDDTAVYFCVRDGDPLDYWGQGTLVTVSSGGGGQGGGGQGGGGQEIVLTQSPGTLSLSPGERATLSCRASQSVSSNLAWYQQKPGQAPRLLIYGASTRATGIPARFSGSGSGTEFTLTISSLQSEDFAVYYCQQYHTWPPVTFGCGTKVEIKSGGGGQEVQLVESGGGLVQPGGSLKLSCAASGFTFNKYAINWVRQAPGKGLEWVARIRSKYNNYATYYADAVKDRFTISRDDSKNTVYLQMNNLKTEDTAVYYCARAGNFGSSYISYWAYWGQGTLVTVSSGGGGQGGGGQGGGGQQTVVTQEPSLTVSPGGTVTITCGSSTGAVTSGNYPNWVQKKPGQAPRGLIGGTKFLAPGTPARFSGSLSGGKAALTLSGVQPEDEAEYYCVLWYSNRWVFGSGTKLTVLGGGGCPPCPAPELLGGPSVFLFPPKPKDTLMISRTPEVTCVVVDVSHEEPEVKFNWYVDGVEVHNAKTKPCEEQYGSTYRCVSVLTVLHQDWLNGKEYKCKVSNKALPAPIEKTISKAKGQPREPQVYTLPPSREEMTKNQVSLTCLVKGFYPSDIAVEWESNGQPENNYKTTPPVLDSDGSFFLYSKLTVDKSRWQQGNVFSCSVMHEALHNHYTQKSLSLSPGKGGGGQGGGGQGGGGQGGGGQGGGGQGGGGQCPPCPAPELLGGPSVFLFPPKPKDTLMISRTPEVTCVVVDVSHEEPEVKFNWYVDGVEVHNAKTKPCEEQYGSTYRCVSVLTVLHQDWLNGKEYKCKVSNKALPAPIEKTISKAKGQPREPQVYTLPPSREEMTKNQVSLTCLVKGFYPSDIAVEWESNGQPENNYKTTPPVLDSDGSFFLYSKLTVDKSRWQQGNVFSCSVMHEALHNHYTQKSLSLSPGK

SEQ ID NO: 2934 - protein, 492 aa, Artificial Sequence
  Synthetic
EVQLVESGGGLVQPGRSLRLSCAASGFTFHDYTMHWVRQAPGKCLEWVSGISWNTGTIGYADSVKGRFTISRDNAKNSLYLQMNSLRAEDTALYYCVKDAFYGGDYYYNYGMDVWGHGTTVTVSSGGGGSGGGGSGGGGSEIVLTQSPATLSVSPGERATLSCRASQSVNNNLAWYQQKPGQAPRLLIYGASTRATGIPARFSGSGSGTDFTLTISSLQSDDFAVYYCQQYNNWPLTFGCGTKVEIKSGGGGSQVQLVQSGAEVKKPGASVKVSCKASGYSFTSYGITWVRQAPGQCLEWMGWISAYNGNTIYAQKLQGRVTMTTDTSTSTAYMELRSLRSDDTAVYYCVRDSNHEDFWGQGTLVTVSSGGGGSGGGGSGGGGSEIVLTQSPATLSVSPGERATLSCRASQSVSSNLAWYQQKPGQAPRLLIYGASTRATGIPARFSGSGSGTEFTLTISSLQSEDFAVYYCQQYHTWPPVTFGCGTKVEIK

SEQ ID NO: 2935 - protein, 492 aa, Artificial Sequence
  Synthetic
EVQLVESGGGLVQPGRSLRLSCAASGFTFHDYTMHWVRQAPGKCLEWVSGISWNTGTIGYADSVKGRFTISRDNAKNSLYLQMNSLRAEDTALYYCVKDAFYGGDYYYNYGMDVWGHGTTVTVSSGGGGQGGGGQGGGGQEIVLTQSPATLSVSPGERATLSCRASQSVNNNLAWYQQKPGQAPRLLIYGASTRATGIPARFSGSGSGTDFTLTISSLQSDDFAVYYCQQYNNWPLTFGCGTKVEIKSGGGGQQVQLVQSGAEVKKPGASVKVSCKASGYSFTSYGITWVRQAPGQCLEWMGWISAYNGNTIYAQKLQGRVTMTTDTSTSTAYMELRSLRSDDTAVYYCVRDSNHEDFWGQGTLVTVSSGGGGQGGGGQGGGGQEIVLTQSPATLSVSPGERATLSCRASQSVSSNLAWYQQKPGQAPRLLIYGASTRATGIPARFSGSGSGTEFTLTISSLQSEDFAVYYCQQYHTWPPVTFGCGTKVEIK

SEQ ID NO: 2936 - protein, 747 aa, Artificial Sequence
  Synthetic
EVQLVESGGGLVQPGRSLRLSCAASGFTFHDYTMHWVRQAPGKCLEWVSGISWNTGTIGYADSVKGRFTISRDNAKNSLYLQMNSLRAEDTALYYCVKDAFYGGDYYYNYGMDVWGHGTTVTVSSGGGGSGGGGSGGGGSEIVLTQSPATLSVSPGERATLSCRASQSVNNNLAWYQQKPGQAPRLLIYGASTRATGIPARFSGSGSGTDFTLTISSLQSDDFAVYYCQQYNNWPLTFGCGTKVEIKSGGGGSQVQLVQSGAEVKKPGASVKVSCKASGYSFTSYGITWVRQAPGQCLEWMGWISAYNGNTIYAQKLQGRVTMTTDTSTSTAYMELRSLRSDDTAVYYCVRDSNHEDFWGQGTLVTVSSGGGGSGGGGSGGGGSEIVLTQSPATLSVSPGERATLSCRASQSVSSNLAWYQQKPGQAPRLLIYGASTRATGIPARFSGSGSGTEFTLTISSLQSEDFAVYYCQQYHTWPPVTFGCGTKVEIKSGGGGSEVQLVESGGGLVQPGGSLKLSCAASGFTFNKYAMNWVRQAPGKGLEWVARIRSKYNNYATYYADSVKDRFTISRDDSKNTAYLQMNNLKTEDTAVYYCVRHGNFGNSYISYWAYWGQGTLVTVSSGGGGSGGGGSGGGGSQTVVTQEPSLTVSPGGTVTLTCGSSTGAVTSGNYPNWVQQKPGQAPRGLIGGTKFLAPGTPARFSGSLLGGKAALTLSGVQPEDEAEYYCVLWYSNRWVFGGGTKLTVL

SEQ ID NO: 2937 - protein, 747 aa, Artificial Sequence
  Synthetic
EVQLVESGGGLVQPGRSLRLSCAASGFTFHDYTMHWVRQAPGKCLEWVSGISWNTGTIGYADSVKGRFTISRDNAKNSLYLQMNSLRAEDTALYYCVKDAFYGGDYYYNYGMDVWGHGTTVTVSSGGGGQGGGGQGGGGQEIVLTQSPATLSVSPGERATLSCRASQSVNNNLAWYQQKPGQAPRLLIYGASTRATGIPARFSGSGSGTDFTLTISSLQSDDFAVYYCQQYNNWPLTFGCGTKVEIKSGGGGQQVQLVQSGAEVKKPGASVKVSCKASGYSFTSYGITWVRQAPGQCLEWMGWISAYNGNTIYAQKLQGRVTMTTDTSTSTAYMELRSLRSDDTAVYYCVRDSNHEDFWGQGTLVTVSSGGGGQGGGGQGGGGQEIVLTQSPATLSVSPGERATLSCRASQSVSSNLAWYQQKPGQAPRLLIYGASTRATGIPARFSGSGSGTEFTLTISSLQSEDFAVYYCQQYHTWPPVTFGCGTKVEIKSGGGGQEVQLVESGGGLVQPGGSLKLSCAASGFTFNKYAMNWVRQAPGKGLEWVARIRSKYNNYATYYADSVKDRFTISRDDSKNTAYLQMNNLKTEDTAVYYCVRHGNFGNSYISYWAYWGQGTLVTVSSGGGGQGGGGQGGGGQQTVVTQEPSLTVSPGGTVTLTCGSSTGAVTSGNYPNWVQQKPGQAPRGLIGGTKFLAPGTPARFSGSLLGGKAALTLSGVQPEDEAEYYCVLWYSNRWVFGGGTKLTVL

SEQ ID NO: 2938 - protein, 747 aa, Artificial Sequence
  Synthetic
EVQLVESGGGLVQPGRSLRLSCAASGFTFHDYTMHWVRQAPGKCLEWVSGISWNTGTIGYADSVKGRFTISRDNAKNSLYLQMNSLRAEDTALYYCVKDAFYGGDYYYNYGMDVWGHGTTVTVSSGGGGSGGGGSGGGGSEIVLTQSPATLSVSPGERATLSCRASQSVNNNLAWYQQKPGQAPRLLIYGASTRATGIPARFSGSGSGTDFTLTISSLQSDDFAVYYCQQYNNWPLTFGCGTKVEIKSGGGGSQVQLVQSGAEVKKPGASVKVSCKASGYSFTSYGITWVRQAPGQCLEWMGWISAYNGNTIYAQKLQGRVTMTTDTSTSTAYMELRSLRSDDTAVYYCVRDSNHEDFWGQGTLVTVSSGGGGSGGGGSGGGGSEIVLTQSPATLSVSPGERATLSCRASQSVSSNLAWYQQKPGQAPRLLIYGASTRATGIPARFSGSGSGTEFTLTISSLQSEDFAVYYCQQYHTWPPVTFGCGTKVEIKSGGGGSEVQLVESGGGLVQPGGSLKLSCAASGFTFNKYAINWVRQAPGKGLEWVARIRSKYNNYATYYADAVKDRFTISRDDSKNTVYLQMNNLKTEDTAVYYCARAGNFGSSYISYWAYWGQGTLVTVSSGGGGSGGGGSGGGGSQTVVTQEPSLTVSPGGTVTITCGSSTGAVTSGNYPNWVQKKPGQAPRGLIGGTKFLAPGTPARFSGSLSGGKAALTLSGVQPEDEAEYYCVLWYSNRWVFGSGTKLTVL

SEQ ID NO: 2939 - protein, 747 aa, Artificial Sequence
  Synthetic
EVQLVESGGGLVQPGRSLRLSCAASGFTFHDYTMHWVRQAPGKCLEWVSGISWNTGTIGYADSVKGRFTISRDNAKNSLYLQMNSLRAEDTALYYCVKDAFYGGDYYYNYGMDVWGHGTTVTVSSGGGGQGGGGQGGGGQEIVLTQSPATLSVSPGERATLSCRASQSVNNNLAWYQQKPGQAPRLLIYGASTRATGIPARFSGSGSGTDFTLTISSLQSDDFAVYYCQQYNNWPLTFGCGTKVEIKSGGGGQQVQLVQSGAEVKKPGASVKVSCKASGYSFTSYGITWVRQAPGQCLEWMGWISAYNGNTIYAQKLQGRVTMTTDTSTSTAYMELRSLRSDDTAVYYCVRDSNHEDFWGQGTLVTVSSGGGGQGGGGQGGGGQEIVLTQSPATLSVSPGERATLSCRASQSVSSNLAWYQQKPGQAPRLLIYGASTRATGIPARFSGSGSGTEFTLTISSLQSEDFAVYYCQQYHTWPPVTFGCGTKVEIKSGGGGQEVQLVESGGGLVQPGGSLKLSCAASGFTFNKYAINWVRQAPGKGLEWVARIRSKYNNYATYYADAVKDRFTISRDDSKNTVYLQMNNLKTEDTAVYYCARAGNFGSSYISYWAYWGQGTLVTVSSGGGGQGGGGQGGGGQQTVVTQEPSLTVSPGGTVTITCGSSTGAVTSGNYPNWVQKKPGQAPRGLIGGTKFLAPGTPARFSGSLSGGKAALTLSGVQPEDEAEYYCVLWYSNRWVFGSGTKLTVL

SEQ ID NO: 2940 - protein, 1235 aa, Artificial Sequence
  Synthetic
EVQLVESGGGLVQPGRSLRLSCAASGFTFHDYTMHWVRQAPGKCLEWVSGISWNTGTIGYADSVKGRFTISRDNAKNSLYLQMNSLRAEDTALYYCVKDAFYGGDYYYNYGMDVWGHGTTVTVSSGGGGSGGGGSGGGGSEIVLTQSPATLSVSPGERATLSCRASQSVNNNLAWYQQKPGQAPRLLIYGASTRATGIPARFSGSGSGTDFTLTISSLQSDDFAVYYCQQYNNWPLTFGCGTKVEIKSGGGGSQVQLVQSGAEVKKPGASVKVSCKASGYSFTSYGITWVRQAPGQCLEWMGWISAYNGNTIYAQKLQGRVTMTTDTSTSTAYMELRSLRSDDTAVYYCVRDSNHEDFWGQGTLVTVSSGGGGSGGGGSGGGGSEIVLTQSPATLSVSPGERATLSCRASQSVSSNLAWYQQKPGQAPRLLIYGASTRATGIPARFSGSGSGTEFTLTISSLQSEDFAVYYCQQYHTWPPVTFGCGTKVEIKSGGGGSEVQLVESGGGLVQPGGSLKLSCAASGFTFNKYAMNWVRQAPGKGLEWVARIRSKYNNYATYYADSVKDRFTISRDDSKNTAYLQMNNLKTEDTAVYYCVRHGNFGNSYISYWAYWGQGTLVTVSSGGGGSGGGGSGGGGSQTVVTQEPSLTVSPGGTVTLTCGSSTGAVTSGNYPNWVQQKPGQAPRGLIGGTKFLAPGTPARFSGSLLGGKAALTLSGVQPEDEAEYYCVLWYSNRWVFGGGTKLTVLGGGGDKTHTCPPCPAPELLGGPSVFLFPPKPKDTLMISRTPEVTCVVVDVSHEDPEVKFNWYVDGVEVHNAKTKPCEEQYGSTYRCVSVLTVLHQDWLNGKEYKCKVSNKALPAPIEKTISKAKGQPREPQVYTLPPSREEMTKNQVSLTCLVKGFYPSDIAVEWESNGQPENNYKTTPPVLDSDGSFFLYSKLTVDKSRWQQGNVFSCSVMHEALHNHYTQKSLSLSPGKGGGGSGGGGSGGGGSGGGGSGGGGSGGGGSDKTHTCPPCPAPELLGGPSVFLFPPKPKDTLMISRTPEVTCVVVDVSHEDPEVKFNWYVDGVEVHNAKTKPCEEQYGSTYRCVSVLTVLHQDWLNGKEYKCKVSNKALPAPIEKTISKAKGQPREPQVYTLPPSREEMTKNQVSLTCLVKGFYPSDIAVEWESNGQPENNYKTTPPVLDSDGSFFLYSKLTVDKSRWQQGNVFSCSVMHEALHNHYTQKSLSLSPGK

SEQ ID NO: 2941 - protein, 1225 aa, Artificial Sequence
  Synthetic
EVQLVESGGGLVQPGRSLRLSCAASGFTFHDYTMHWVRQAPGKCLEWVSGISWNTGTIGYADSVKGRFTISRDNAKNSLYLQMNSLRAEDTALYYCVKDAFYGGDYYYNYGMDVWGHGTTVTVSSGGGGQGGGGQGGGGQEIVLTQSPATLSVSPGERATLSCRASQSVNNNLAWYQQKPGQAPRLLIYGASTRATGIPARFSGSGSGTDFTLTISSLQSDDFAVYYCQQYNNWPLTFGCGTKVEIKSGGGGQQVQLVQSGAEVKKPGASVKVSCKASGYSFTSYGITWVRQAPGQCLEWMGWISAYNGNTIYAQKLQGRVTMTTDTSTSTAYMELRSLRSDDTAVYYCVRDSNHEDFWGQGTLVTVSSGGGGQGGGGQGGGGQEIVLTQSPATLSVSPGERATLSCRASQSVSSNLAWYQQKPGQAPRLLIYGASTRATGIPARFSGSGSGTEFTLTISSLQSEDFAVYYCQQYHTWPPVTFGCGTKVEIKSGGGGQEVQLVESGGGLVQPGGSLKLSCAASGFTFNKYAMNWVRQAPGKGLEWVARIRSKYNNYATYYADSVKDRFTISRDDSKNTAYLQMNNLKTEDTAVYYCVRHGNFGNSYISYWAYWGQGTLVTVSSGGGGQGGGGQGGGGQQTVVTQEPSLTVSPGGTVTLTCGSSTGAVTSGNYPNWVQQKPGQAPRGLIGGTKFLAPGTPARFSGSLLGGKAALTLSGVQPEDEAEYYCVLWYSNRWVFGGGTKLTVLGGGGCPPCPAPELLGGPSVFLFPPKPKDTLMISRTPEVTCVVVDVSHEEPEVKFNWYVDGVEVHNAKTKPCEEQYGSTYRCVSVLTVLHQDWLNGKEYKCKVSNKALPAPIEKTISKAKGQPREPQVYTLPPSREEMTKNQVSLTCLVKGFYPSDIAVEWESNGQPENNYKTTPPVLDSDGSFFLYSKLTVDKSRWQQGNVFSCSVMHEALHNHYTQKSLSLSPGKGGGGQGGGGQGGGGQGGGGQGGGGQGGGGQCPPCPAPELLGGPSVFLFPPKPKDTLMISRTPEVTCVVVDVSHEEPEVKFNWYVDGVEVHNAKTKPCEEQYGSTYRCVSVLTVLHQDWLNGKEYKCKVSNKALPAPIEKTISKAKGQPREPQVYTLPPSREEMTKNQVSLTCLVKGFYPSDIAVEWESNGQPENNYKTTPPVLDSDGSFFLYSKLTVDKSRWQQGNVFSCSVMHEALHNHYTQKSLSLSPGK

SEQ ID NO: 2942 - protein, 1235 aa, Artificial Sequence
  Synthetic
EVQLVESGGGLVQPGRSLRLSCAASGFTFHDYTMHWVRQAPGKCLEWVSGISWNTGTIGYADSVKGRFTISRDNAKNSLYLQMNSLRAEDTALYYCVKDAFYGGDYYYNYGMDVWGHGTTVTVSSGGGGSGGGGSGGGGSEIVLTQSPATLSVSPGERATLSCRASQSVNNNLAWYQQKPGQAPRLLIYGASTRATGIPARFSGSGSGTDFTLTISSLQSDDFAVYYCQQYNNWPLTFGCGTKVEIKSGGGGSQVQLVQSGAEVKKPGASVKVSCKASGYSFTSYGITWVRQAPGQCLEWMGWISAYNGNTIYAQKLQGRVTMTTDTSTSTAYMELRSLRSDDTAVYYCVRDSNHEDFWGQGTLVTVSSGGGGSGGGGSGGGGSEIVLTQSPATLSVSPGERATLSCRASQSVSSNLAWYQQKPGQAPRLLIYGASTRATGIPARFSGSGSGTEFTLTISSLQSEDFAVYYCQQYHTWPPVTFGCGTKVEIKSGGGGSEVQLVESGGGLVQPGGSLKLSCAASGFTFNKYAINWVRQAPGKGLEWVARIRSKYNNYATYYADAVKDRFTISRDDSKNTVYLQMNNLKTEDTAVYYCARAGNFGSSYISYWAYWGQGTLVTVSSGGGGSGGGGSGGGGSQTVVTQEPSLTVSPGGTVTITCGSSTGAVTSGNYPNWVQKKPGQAPRGLIGGTKFLAPGTPARFSGSLSGGKAALTLSGVQPEDEAEYYCVLWYSNRWVFGSGTKLTVLGGGGDKTHTCPPCPAPELLGGPSVFLFPPKPKDTLMISRTPEVTCVVVDVSHEDPEVKFNWYVDGVEVHNAKTKPCEEQYGSTYRCVSVLTVLHQDWLNGKEYKCKVSNKALPAPIEKTISKAKGQPREPQVYTLPPSREEMTKNQVSLTCLVKGFYPSDIAVEWESNGQPENNYKTTPPVLDSDGSFFLYSKLTVDKSRWQQGNVFSCSVMHEALHNHYTQKSLSLSPGKGGGGSGGGGSGGGGSGGGGSGGGGSGGGGSDKTHTCPPCPAPELLGGPSVFLFPPKPKDTLMISRTPEVTCVVVDVSHEDPEVKFNWYVDGVEVHNAKTKPCEEQYGSTYRCVSVLTVLHQDWLNGKEYKCKVSNKALPAPIEKTISKAKGQPREPQVYTLPPSREEMTKNQVSLTCLVKGFYPSDIAVEWESNGQPENNYKTTPPVLDSDGSFFLYSKLTVDKSRWQQGNVFSCSVMHEALHNHYTQKSLSLSPGK

SEQ ID NO: 2943 - protein, 1225 aa, Artificial Sequence
  Synthetic
EVQLVESGGGLVQPGRSLRLSCAASGFTFHDYTMHWVRQAPGKCLEWVSGISWNTGTIGYADSVKGRFTISRDNAKNSLYLQMNSLRAEDTALYYCVKDAFYGGDYYYNYGMDVWGHGTTVTVSSGGGGQGGGGQGGGGQEIVLTQSPATLSVSPGERATLSCRASQSVNNNLAWYQQKPGQAPRLLIYGASTRATGIPARFSGSGSGTDFTLTISSLQSDDFAVYYCQQYNNWPLTFGCGTKVEIKSGGGGQQVQLVQSGAEVKKPGASVKVSCKASGYSFTSYGITWVRQAPGQCLEWMGWISAYNGNTIYAQKLQGRVTMTTDTSTSTAYMELRSLRSDDTAVYYCVRDSNHEDFWGQGTLVTVSSGGGGQGGGGQGGGGQEIVLTQSPATLSVSPGERATLSCRASQSVSSNLAWYQQKPGQAPRLLIYGASTRATGIPARFSGSGSGTEFTLTISSLQSEDFAVYYCQQYHTWPPVTFGCGTKVEIKSGGGGQEVQLVESGGGLVQPGGSLKLSCAASGFTFNKYAINWVRQAPGKGLEWVARIRSKYNNYATYYADAVKDRFTISRDDSKNTVYLQMNNLKTEDTAVYYCARAGNFGSSYISYWAYWGQGTLVTVSSGGGGQGGGGQGGGGQQTVVTQEPSLTVSPGGTVTITCGSSTGAVTSGNYPNWVQKKPGQAPRGLIGGTKFLAPGTPARFSGSLSGGKAALTLSGVQPEDEAEYYCVLWYSNRWVFGSGTKLTVLGGGGCPPCPAPELLGGPSVFLFPPKPKDTLMISRTPEVTCVVVDVSHEEPEVKFNWYVDGVEVHNAKTKPCEEQYGSTYRCVSVLTVLHQDWLNGKEYKCKVSNKALPAPIEKTISKAKGQPREPQVYTLPPSREEMTKNQVSLTCLVKGFYPSDIAVEWESNGQPENNYKTTPPVLDSDGSFFLYSKLTVDKSRWQQGNVFSCSVMHEALHNHYTQKSLSLSPGKGGGGQGGGGQGGGGQGGGGQGGGGQGGGGQCPPCPAPELLGGPSVFLFPPKPKDTLMISRTPEVTCVVVDVSHEEPEVKFNWYVDGVEVHNAKTKPCEEQYGSTYRCVSVLTVLHQDWLNGKEYKCKVSNKALPAPIEKTISKAKGQPREPQVYTLPPSREEMTKNQVSLTCLVKGFYPSDIAVEWESNGQPENNYKTTPPVLDSDGSFFLYSKLTVDKSRWQQGNVFSCSVMHEALHNHYTQKSLSLSPGK

SEQ ID NO: 2944 - protein, 494 aa, Artificial Sequence
  Synthetic
EVQLVESGGGLVQPGRSLRLSCAASGFTFHDYTMHWVRQAPGKCLEWVSGISWNTGTIGYADSVKGRFTISRDNAKNSLYLQMNSLRAEDTALYYCVKDAFYGGDYYYNYGMDVWGHGTTVTVSSGGGGSGGGGSGGGGSEIVLTQSPATLSVSPGERATLSCRASQSVNNNLAWYQQKPGQAPRLLIYGASTRATGIPARFSGSGSGTDFTLTISSLQSDDFAVYYCQQYNNWPLTFGCGTKVEIKSGGGGSQVQLVQSGAEVKKPGESLKISCKGSGYSFTSYGISWVRQAPGQCLEWMGWISAYNGNTIYAQKLQGRVTMTTDTSTSTAYMELRRLRSDDTAVYYCARDPGVTGDDYWGQGTLVTVSSGGGGSGGGGSGGGGSEIVLTQSPATLSVSPGERATLSCRASLSVSSNLAWYQQKPGQAPRLLIYGASTRATGIPARFSGSGSGTEFTLTISSLQSEDFAVYFCQQYHSWPALTFGCGTKVEIK

SEQ ID NO: 2945 - protein, 494 aa, Artificial Sequence
  Synthetic
EVQLVESGGGLVQPGRSLRLSCAASGFTFHDYTMHWVRQAPGKCLEWVSGISWNTGTIGYADSVKGRFTISRDNAKNSLYLQMNSLRAEDTALYYCVKDAFYGGDYYYNYGMDVWGHGTTVTVSSGGGGQGGGGQGGGGQEIVLTQSPATLSVSPGERATLSCRASQSVNNNLAWYQQKPGQAPRLLIYGASTRATGIPARFSGSGSGTDFTLTISSLQSDDFAVYYCQQYNNWPLTFGCGTKVEIKSGGGGQQVQLVQSGAEVKKPGESLKISCKGSGYSFTSYGISWVRQAPGQCLEWMGWISAYNGNTIYAQKLQGRVTMTTDTSTSTAYMELRRLRSDDTAVYYCARDPGVTGDDYWGQGTLVTVSSGGGGQGGGGQGGGGQEIVLTQSPATLSVSPGERATLSCRASLSVSSNLAWYQQKPGQAPRLLIYGASTRATGIPARFSGSGSGTEFTLTISSLQSEDFAVYFCQQYHSWPALTFGCGTKVEIK

SEQ ID NO: 2946 - protein, 749 aa, Artificial Sequence
  Synthetic
EVQLVESGGGLVQPGRSLRLSCAASGFTFHDYTMHWVRQAPGKCLEWVSGISWNTGTIGYADSVKGRFTISRDNAKNSLYLQMNSLRAEDTALYYCVKDAFYGGDYYYNYGMDVWGHGTTVTVSSGGGGSGGGGSGGGGSEIVLTQSPATLSVSPGERATLSCRASQSVNNNLAWYQQKPGQAPRLLIYGASTRATGIPARFSGSGSGTDFTLTISSLQSDDFAVYYCQQYNNWPLTFGCGTKVEIKSGGGGSQVQLVQSGAEVKKPGESLKISCKGSGYSFTSYGISWVRQAPGQCLEWMGWISAYNGNTIYAQKLQGRVTMTTDTSTSTAYMELRRLRSDDTAVYYCARDPGVTGDDYWGQGTLVTVSSGGGGSGGGGSGGGGSEIVLTQSPATLSVSPGERATLSCRASLSVSSNLAWYQQKPGQAPRLLIYGASTRATGIPARFSGSGSGTEFTLTISSLQSEDFAVYFCQQYHSWPALTFGCGTKVEIKSGGGGSEVQLVESGGGLVQPGGSLKLSCAASGFTFNKYAMNWVRQAPGKGLEWVARIRSKYNNYATYYADSVKDRFTISRDDSKNTAYLQMNNLKTEDTAVYYCVRHGNFGNSYISYWAYWGQGTLVTVSSGGGGSGGGGSGGGGSQTVVTQEPSLTVSPGGTVTLTCGSSTGAVTSGNYPNWVQQKPGQAPRGLIGGTKFLAPGTPARFSGSLLGGKAALTLSGVQPEDEAEYYCVLWYSNRWVFGGGTKLTVL

SEQ ID NO: 2947 - protein, 749 aa, Artificial Sequence
  Synthetic
EVQLVESGGGLVQPGRSLRLSCAASGFTFHDYTMHWVRQAPGKCLEWVSGISWNTGTIGYADSVKGRFTISRDNAKNSLYLQMNSLRAEDTALYYCVKDAFYGGDYYYNYGMDVWGHGTTVTVSSGGGGQGGGGQGGGGQEIVLTQSPATLSVSPGERATLSCRASQSVNNNLAWYQQKPGQAPRLLIYGASTRATGIPARFSGSGSGTDFTLTISSLQSDDFAVYYCQQYNNWPLTFGCGTKVEIKSGGGGQQVQLVQSGAEVKKPGESLKISCKGSGYSFTSYGISWVRQAPGQCLEWMGWISAYNGNTIYAQKLQGRVTMTTDTSTSTAYMELRRLRSDDTAVYYCARDPGVTGDDYWGQGTLVTVSSGGGGQGGGGQGGGGQEIVLTQSPATLSVSPGERATLSCRASLSVSSNLAWYQQKPGQAPRLLIYGASTRATGIPARFSGSGSGTEFTLTISSLQSEDFAVYFCQQYHSWPALTFGCGTKVEIKSGGGGQEVQLVESGGGLVQPGGSLKLSCAASGFTFNKYAMNWVRQAPGKGLEWVARIRSKYNNYATYYADSVKDRFTISRDDSKNTAYLQMNNLKTEDTAVYYCVRHGNFGNSYISYWAYWGQGTLVTVSSGGGGQGGGGQGGGGQQTVVTQEPSLTVSPGGTVTLTCGSSTGAVTSGNYPNWVQQKPGQAPRGLIGGTKFLAPGTPARFSGSLLGGKAALTLSGVQPEDEAEYYCVLWYSNRWVFGGGTKLTVL

SEQ ID NO: 2948 - protein, 749 aa, Artificial Sequence
  Synthetic
EVQLVESGGGLVQPGRSLRLSCAASGFTFHDYTMHWVRQAPGKCLEWVSGISWNTGTIGYADSVKGRFTISRDNAKNSLYLQMNSLRAEDTALYYCVKDAFYGGDYYYNYGMDVWGHGTTVTVSSGGGGSGGGGSGGGGSEIVLTQSPATLSVSPGERATLSCRASQSVNNNLAWYQQKPGQAPRLLIYGASTRATGIPARFSGSGSGTDFTLTISSLQSDDFAVYYCQQYNNWPLTFGCGTKVEIKSGGGGSQVQLVQSGAEVKKPGESLKISCKGSGYSFTSYGISWVRQAPGQCLEWMGWISAYNGNTIYAQKLQGRVTMTTDTSTSTAYMELRRLRSDDTAVYYCARDPGVTGDDYWGQGTLVTVSSGGGGSGGGGSGGGGSEIVLTQSPATLSVSPGERATLSCRASLSVSSNLAWYQQKPGQAPRLLIYGASTRATGIPARFSGSGSGTEFTLTISSLQSEDFAVYFCQQYHSWPALTFGCGTKVEIKSGGGGSEVQLVESGGGLVQPGGSLKLSCAASGFTFNKYAINWVRQAPGKGLEWVARIRSKYNNYATYYADAVKDRFTISRDDSKNTVYLQMNNLKTEDTAVYYCARAGNFGSSYISYWAYWGQGTLVTVSSGGGGSGGGGSGGGGSQTVVTQEPSLTVSPGGTVTITCGSSTGAVTSGNYPNWVQKKPGQAPRGLIGGTKFLAPGTPARFSGSLSGGKAALTLSGVQPEDEAEYYCVLWYSNRWVFGSGTKLTVL

SEQ ID NO: 2949 - protein, 749 aa, Artificial Sequence
  Synthetic
EVQLVESGGGLVQPGRSLRLSCAASGFTFHDYTMHWVRQAPGKCLEWVSGISWNTGTIGYADSVKGRFTISRDNAKNSLYLQMNSLRAEDTALYYCVKDAFYGGDYYYNYGMDVWGHGTTVTVSSGGGGQGGGGQGGGGQEIVLTQSPATLSVSPGERATLSCRASQSVNNNLAWYQQKPGQAPRLLIYGASTRATGIPARFSGSGSGTDFTLTISSLQSDDFAVYYCQQYNNWPLTFGCGTKVEIKSGGGGQQVQLVQSGAEVKKPGESLKISCKGSGYSFTSYGISWVRQAPGQCLEWMGWISAYNGNTIYAQKLQGRVTMTTDTSTSTAYMELRRLRSDDTAVYYCARDPGVTGDDYWGQGTLVTVSSGGGGQGGGGQGGGGQEIVLTQSPATLSVSPGERATLSCRASLSVSSNLAWYQQKPGQAPRLLIYGASTRATGIPARFSGSGSGTEFTLTISSLQSEDFAVYFCQQYHSWPALTFGCGTKVEIKSGGGGQEVQLVESGGGLVQPGGSLKLSCAASGFTFNKYAINWVRQAPGKGLEWVARIRSKYNNYATYYADAVKDRFTISRDDSKNTVYLQMNNLKTEDTAVYYCARAGNFGSSYISYWAYWGQGTLVTVSSGGGGQGGGGQGGGGQQTVVTQEPSLTVSPGGTVTITCGSSTGAVTSGNYPNWVQKKPGQAPRGLIGGTKFLAPGTPARFSGSLSGGKAALTLSGVQPEDEAEYYCVLWYSNRWVFGSGTKLTVL

SEQ ID NO: 2950 - protein, 1237 aa, Artificial Sequence
  Synthetic
EVQLVESGGGLVQPGRSLRLSCAASGFTFHDYTMHWVRQAPGKCLEWVSGISWNTGTIGYADSVKGRFTISRDNAKNSLYLQMNSLRAEDTALYYCVKDAFYGGDYYYNYGMDVWGHGTTVTVSSGGGGSGGGGSGGGGSEIVLTQSPATLSVSPGERATLSCRASQSVNNNLAWYQQKPGQAPRLLIYGASTRATGIPARFSGSGSGTDFTLTISSLQSDDFAVYYCQQYNNWPLTFGCGTKVEIKSGGGGSQVQLVQSGAEVKKPGESLKISCKGSGYSFTSYGISWVRQAPGQCLEWMGWISAYNGNTIYAQKLQGRVTMTTDTSTSTAYMELRRLRSDDTAVYYCARDPGVTGDDYWGQGTLVTVSSGGGGSGGGGSGGGGSEIVLTQSPATLSVSPGERATLSCRASLSVSSNLAWYQQKPGQAPRLLIYGASTRATGIPARFSGSGSGTEFTLTISSLQSEDFAVYFCQQYHSWPALTFGCGTKVEIKSGGGGSEVQLVESGGGLVQPGGSLKLSCAASGFTFNKYAMNWVRQAPGKGLEWVARIRSKYNNYATYYADSVKDRFTISRDDSKNTAYLQMNNLKTEDTAVYYCVRHGNFGNSYISYWAYWGQGTLVTVSSGGGGSGGGGSGGGGSQTVVTQEPSLTVSPGGTVTLTCGSSTGAVTSGNYPNWVQQKPGQAPRGLIGGTKFLAPGTPARFSGSLLGGKAALTLSGVQPEDEAEYYCVLWYSNRWVFGGGTKLTVLGGGGDKTHTCPPCPAPELLGGPSVFLFPPKPKDTLMISRTPEVTCVVVDVSHEDPEVKFNWYVDGVEVHNAKTKPCEEQYGSTYRCVSVLTVLHQDWLNGKEYKCKVSNKALPAPIEKTISKAKGQPREPQVYTLPPSREEMTKNQVSLTCLVKGFYPSDIAVEWESNGQPENNYKTTPPVLDSDGSFFLYSKLTVDKSRWQQGNVFSCSVMHEALHNHYTQKSLSLSPGKGGGGSGGGGSGGGGSGGGGSGGGGSGGGGSDKTHTCPPCPAPELLGGPSVFLFPPKPKDTLMISRTPEVTCVVVDVSHEDPEVKFNWYVDGVEVHNAKTKPCEEQYGSTYRCVSVLTVLHQDWLNGKEYKCKVSNKALPAPIEKTISKAKGQPREPQVYTLPPSREEMTKNQVSLTCLVKGFYPSDIAVEWESNGQPENNYKTTPPVLDSDGSFFLYSKLTVDKSRWQQGNVFSCSVMHEALHNHYTQKSLSLSPGK

SEQ ID NO: 2951 - protein, 1227 aa, Artificial Sequence
  Synthetic
EVQLVESGGGLVQPGRSLRLSCAASGFTFHDYTMHWVRQAPGKCLEWVSGISWNTGTIGYADSVKGRFTISRDNAKNSLYLQMNSLRAEDTALYYCVKDAFYGGDYYYNYGMDVWGHGTTVTVSSGGGGQGGGGQGGGGQEIVLTQSPATLSVSPGERATLSCRASQSVNNNLAWYQQKPGQAPRLLIYGASTRATGIPARFSGSGSGTDFTLTISSLQSDDFAVYYCQQYNNWPLTFGCGTKVEIKSGGGGQQVQLVQSGAEVKKPGESLKISCKGSGYSFTSYGISWVRQAPGQCLEWMGWISAYNGNTIYAQKLQGRVTMTTDTSTSTAYMELRRLRSDDTAVYYCARDPGVTGDDYWGQGTLVTVSSGGGGQGGGGQGGGGQEIVLTQSPATLSVSPGERATLSCRASLSVSSNLAWYQQKPGQAPRLLIYGASTRATGIPARFSGSGSGTEFTLTISSLQSEDFAVYFCQQYHSWPALTFGCGTKVEIKSGGGGQEVQLVESGGGLVQPGGSLKLSCAASGFTFNKYAMNWVRQAPGKGLEWVARIRSKYNNYATYYADSVKDRFTISRDDSKNTAYLQMNNLKTEDTAVYYCVRHGNFGNSYISYWAYWGQGTLVTVSSGGGGQGGGGQGGGGQQTVVTQEPSLTVSPGGTVTLTCGSSTGAVTSGNYPNWVQQKPGQAPRGLIGGTKFLAPGTPARFSGSLLGGKAALTLSGVQPEDEAEYYCVLWYSNRWVFGGGTKLTVLGGGGCPPCPAPELLGGPSVFLFPPKPKDTLMISRTPEVTCVVVDVSHEEPEVKFNWYVDGVEVHNAKTKPCEEQYGSTYRCVSVLTVLHQDWLNGKEYKCKVSNKALPAPIEKTISKAKGQPREPQVYTLPPSREEMTKNQVSLTCLVKGFYPSDIAVEWESNGQPENNYKTTPPVLDSDGSFFLYSKLTVDKSRWQQGNVFSCSVMHEALHNHYTQKSLSLSPGKGGGGQGGGGQGGGGQGGGGQGGGGQGGGGQCPPCPAPELLGGPSVFLFPPKPKDTLMISRTPEVTCVVVDVSHEEPEVKFNWYVDGVEVHNAKTKPCEEQYGSTYRCVSVLTVLHQDWLNGKEYKCKVSNKALPAPIEKTISKAKGQPREPQVYTLPPSREEMTKNQVSLTCLVKGFYPSDIAVEWESNGQPENNYKTTPPVLDSDGSFFLYSKLTVDKSRWQQGNVFSCSVMHEALHNHYTQKSLSLSPGK

SEQ ID NO: 2952 - protein, 1237 aa, Artificial Sequence
  Synthetic
EVQLVESGGGLVQPGRSLRLSCAASGFTFHDYTMHWVRQAPGKCLEWVSGISWNTGTIGYADSVKGRFTISRDNAKNSLYLQMNSLRAEDTALYYCVKDAFYGGDYYYNYGMDVWGHGTTVTVSSGGGGSGGGGSGGGGSEIVLTQSPATLSVSPGERATLSCRASQSVNNNLAWYQQKPGQAPRLLIYGASTRATGIPARFSGSGSGTDFTLTISSLQSDDFAVYYCQQYNNWPLTFGCGTKVEIKSGGGGSQVQLVQSGAEVKKPGESLKISCKGSGYSFTSYGISWVRQAPGQCLEWMGWISAYNGNTIYAQKLQGRVTMTTDTSTSTAYMELRRLRSDDTAVYYCARDPGVTGDDYWGQGTLVTVSSGGGGSGGGGSGGGGSEIVLTQSPATLSVSPGERATLSCRASLSVSSNLAWYQQKPGQAPRLLIYGASTRATGIPARFSGSGSGTEFTLTISSLQSEDFAVYFCQQYHSWPALTFGCGTKVEIKSGGGGSEVQLVESGGGLVQPGGSLKLSCAASGFTFNKYAINWVRQAPGKGLEWVARIRSKYNNYATYYADAVKDRFTISRDDSKNTVYLQMNNLKTEDTAVYYCARAGNFGSSYISYWAYWGQGTLVTVSSGGGGSGGGGSGGGGSQTVVTQEPSLTVSPGGTVTITCGSSTGAVTSGNYPNWVQKKPGQAPRGLIGGTKFLAPGTPARFSGSLSGGKAALTLSGVQPEDEAEYYCVLWYSNRWVFGSGTKLTVLGGGGDKTHTCPPCPAPELLGGPSVFLFPPKPKDTLMISRTPEVTCVVVDVSHEDPEVKFNWYVDGVEVHNAKTKPCEEQYGSTYRCVSVLTVLHQDWLNGKEYKCKVSNKALPAPIEKTISKAKGQPREPQVYTLPPSREEMTKNQVSLTCLVKGFYPSDIAVEWESNGQPENNYKTTPPVLDSDGSFFLYSKLTVDKSRWQQGNVFSCSVMHEALHNHYTQKSLSLSPGKGGGGSGGGGSGGGGSGGGGSGGGGSGGGGSDKTHTCPPCPAPELLGGPSVFLFPPKPKDTLMISRTPEVTCVVVDVSHEDPEVKFNWYVDGVEVHNAKTKPCEEQYGSTYRCVSVLTVLHQDWLNGKEYKCKVSNKALPAPIEKTISKAKGQPREPQVYTLPPSREEMTKNQVSLTCLVKGFYPSDIAVEWESNGQPENNYKTTPPVLDSDGSFFLYSKLTVDKSRWQQGNVFSCSVMHEALHNHYTQKSLSLSPGK

SEQ ID NO: 2953 - protein, 1227 aa, Artificial Sequence
  Synthetic
EVQLVESGGGLVQPGRSLRLSCAASGFTFHDYTMHWVRQAPGKCLEWVSGISWNTGTIGYADSVKGRFTISRDNAKNSLYLQMNSLRAEDTALYYCVKDAFYGGDYYYNYGMDVWGHGTTVTVSSGGGGQGGGGQGGGGQEIVLTQSPATLSVSPGERATLSCRASQSVNNNLAWYQQKPGQAPRLLIYGASTRATGIPARFSGSGSGTDFTLTISSLQSDDFAVYYCQQYNNWPLTFGCGTKVEIKSGGGGQQVQLVQSGAEVKKPGESLKISCKGSGYSFTSYGISWVRQAPGQCLEWMGWISAYNGNTIYAQKLQGRVTMTTDTSTSTAYMELRRLRSDDTAVYYCARDPGVTGDDYWGQGTLVTVSSGGGGQGGGGQGGGGQEIVLTQSPATLSVSPGERATLSCRASLSVSSNLAWYQQKPGQAPRLLIYGASTRATGIPARFSGSGSGTEFTLTISSLQSEDFAVYFCQQYHSWPALTFGCGTKVEIKSGGGGQEVQLVESGGGLVQPGGSLKLSCAASGFTFNKYAINWVRQAPGKGLEWVARIRSKYNNYATYYADAVKDRFTISRDDSKNTVYLQMNNLKTEDTAVYYCARAGNFGSSYISYWAYWGQGTLVTVSSGGGGQGGGGQGGGGQQTVVTQEPSLTVSPGGTVTITCGSSTGAVTSGNYPNWVQKKPGQAPRGLIGGTKFLAPGTPARFSGSLSGGKAALTLSGVQPEDEAEYYCVLWYSNRWVFGSGTKLTVLGGGGCPPCPAPELLGGPSVFLFPPKPKDTLMISRTPEVTCVVVDVSHEEPEVKFNWYVDGVEVHNAKTKPCEEQYGSTYRCVSVLTVLHQDWLNGKEYKCKVSNKALPAPIEKTISKAKGQPREPQVYTLPPSREEMTKNQVSLTCLVKGFYPSDIAVEWESNGQPENNYKTTPPVLDSDGSFFLYSKLTVDKSRWQQGNVFSCSVMHEALHNHYTQKSLSLSPGKGGGGQGGGGQGGGGQGGGGQGGGGQGGGGQCPPCPAPELLGGPSVFLFPPKPKDTLMISRTPEVTCVVVDVSHEEPEVKFNWYVDGVEVHNAKTKPCEEQYGSTYRCVSVLTVLHQDWLNGKEYKCKVSNKALPAPIEKTISKAKGQPREPQVYTLPPSREEMTKNQVSLTCLVKGFYPSDIAVEWESNGQPENNYKTTPPVLDSDGSFFLYSKLTVDKSRWQQGNVFSCSVMHEALHNHYTQKSLSLSPGK

SEQ ID NO: 2954 - protein, 492 aa, Artificial Sequence
  Synthetic
EVQLVESGGGLVQPGRSLRLSCAASGFTFHDYTMHWVRQAPGKCLEWVSGISWNTGTIGYADSVKGRFTISRDNAKNSLYLQMNSLRAEDTALYYCVKDAFYGGDYYYNYGMDVWGHGTTVTVSSGGGGSGGGGSGGGGSEIVLTQSPATLSVSPGERATLSCRASQSVNNNLAWYQQKPGQAPRLLIYGASTRATGIPARFSGSGSGTDFTLTISSLQSDDFAVYYCQQYNNWPLTFGCGTKVEIKSGGGGSQVQLVQSGAEVKKPGASVKVSCKTSGYPFTSYGISWVRQAPGQCLEWMGWISPYSGAPTYAQKVQGRVTMTTDTSTTTAYMELRSLRSDDTAVYYCVRDGLEEDYWGQGTLVTVSSGGGGSGGGGSGGGGSEIVLTQSPATLSVSPGEGATLSCRASQSVSSNLAWYQQSPGQAPRLLIYGASTRATGIPARFSGSGSGTEFTLTISSLQSEDFAVYYCQQYHSWPALTFGCGTKVDIK

SEQ ID NO: 2955 - protein, 492 aa, Artificial Sequence
  Synthetic
EVQLVESGGGLVQPGRSLRLSCAASGFTFHDYTMHWVRQAPGKCLEWVSGISWNTGTIGYADSVKGRFTISRDNAKNSLYLQMNSLRAEDTALYYCVKDAFYGGDYYYNYGMDVWGHGTTVTVSSGGGGQGGGGQGGGGQEIVLTQSPATLSVSPGERATLSCRASQSVNNNLAWYQQKPGQAPRLLIYGASTRATGIPARFSGSGSGTDFTLTISSLQSDDFAVYYCQQYNNWPLTFGCGTKVEIKSGGGGQQVQLVQSGAEVKKPGASVKVSCKTSGYPFTSYGISWVRQAPGQCLEWMGWISPYSGAPTYAQKVQGRVTMTTDTSTTTAYMELRSLRSDDTAVYYCVRDGLEEDYWGQGTLVTVSSGGGGQGGGGQGGGGQEIVLTQSPATLSVSPGEGATLSCRASQSVSSNLAWYQQSPGQAPRLLIYGASTRATGIPARFSGSGSGTEFTLTISSLQSEDFAVYYCQQYHSWPALTFGCGTKVDIK

SEQ ID NO: 2956 - protein, 747 aa, Artificial Sequence
  Synthetic
EVQLVESGGGLVQPGRSLRLSCAASGFTFHDYTMHWVRQAPGKCLEWVSGISWNTGTIGYADSVKGRFTISRDNAKNSLYLQMNSLRAEDTALYYCVKDAFYGGDYYYNYGMDVWGHGTTVTVSSGGGGSGGGGSGGGGSEIVLTQSPATLSVSPGERATLSCRASQSVNNNLAWYQQKPGQAPRLLIYGASTRATGIPARFSGSGSGTDFTLTISSLQSDDFAVYYCQQYNNWPLTFGCGTKVEIKSGGGGSQVQLVQSGAEVKKPGASVKVSCKTSGYPFTSYGISWVRQAPGQCLEWMGWISPYSGAPTYAQKVQGRVTMTTDTSTTTAYMELRSLRSDDTAVYYCVRDGLEEDYWGQGTLVTVSSGGGGSGGGGSGGGGSEIVLTQSPATLSVSPGEGATLSCRASQSVSSNLAWYQQSPGQAPRLLIYGASTRATGIPARFSGSGSGTEFTLTISSLQSEDFAVYYCQQYHSWPALTFGCGTKVDIKSGGGGSEVQLVESGGGLVQPGGSLKLSCAASGFTFNKYAMNWVRQAPGKGLEWVARIRSKYNNYATYYADSVKDRFTISRDDSKNTAYLQMNNLKTEDTAVYYCVRHGNFGNSYISYWAYWGQGTLVTVSSGGGGSGGGGSGGGGSQTVVTQEPSLTVSPGGTVTLTCGSSTGAVTSGNYPNWVQQKPGQAPRGLIGGTKFLAPGTPARFSGSLLGGKAALTLSGVQPEDEAEYYCVLWYSNRWVFGGGTKLTVL

SEQ ID NO: 2957 - protein, 747 aa, Artificial Sequence
  Synthetic
EVQLVESGGGLVQPGRSLRLSCAASGFTFHDYTMHWVRQAPGKCLEWVSGISWNTGTIGYADSVKGRFTISRDNAKNSLYLQMNSLRAEDTALYYCVKDAFYGGDYYYNYGMDVWGHGTTVTVSSGGGGQGGGGQGGGGQEIVLTQSPATLSVSPGERATLSCRASQSVNNNLAWYQQKPGQAPRLLIYGASTRATGIPARFSGSGSGTDFTLTISSLQSDDFAVYYCQQYNNWPLTFGCGTKVEIKSGGGGQQVQLVQSGAEVKKPGASVKVSCKTSGYPFTSYGISWVRQAPGQCLEWMGWISPYSGAPTYAQKVQGRVTMTTDTSTTTAYMELRSLRSDDTAVYYCVRDGLEEDYWGQGTLVTVSSGGGGQGGGGQGGGGQEIVLTQSPATLSVSPGEGATLSCRASQSVSSNLAWYQQSPGQAPRLLIYGASTRATGIPARFSGSGSGTEFTLTISSLQSEDFAVYYCQQYHSWPALTFGCGTKVDIKSGGGGQEVQLVESGGGLVQPGGSLKLSCAASGFTFNKYAMNWVRQAPGKGLEWVARIRSKYNNYATYYADSVKDRFTISRDDSKNTAYLQMNNLKTEDTAVYYCVRHGNFGNSYISYWAYWGQGTLVTVSSGGGGQGGGGQGGGGQQTVVTQEPSLTVSPGGTVTLTCGSSTGAVTSGNYPNWVQQKPGQAPRGLIGGTKFLAPGTPARFSGSLLGGKAALTLSGVQPEDEAEYYCVLWYSNRWVFGGGTKLTVL

SEQ ID NO: 2958 - protein, 747 aa, Artificial Sequence
  Synthetic
EVQLVESGGGLVQPGRSLRLSCAASGFTFHDYTMHWVRQAPGKCLEWVSGISWNTGTIGYADSVKGRFTISRDNAKNSLYLQMNSLRAEDTALYYCVKDAFYGGDYYYNYGMDVWGHGTTVTVSSGGGGSGGGGSGGGGSEIVLTQSPATLSVSPGERATLSCRASQSVNNNLAWYQQKPGQAPRLLIYGASTRATGIPARFSGSGSGTDFTLTISSLQSDDFAVYYCQQYNNWPLTFGCGTKVEIKSGGGGSQVQLVQSGAEVKKPGASVKVSCKTSGYPFTSYGISWVRQAPGQCLEWMGWISPYSGAPTYAQKVQGRVTMTTDTSTTTAYMELRSLRSDDTAVYYCVRDGLEEDYWGQGTLVTVSSGGGGSGGGGSGGGGSEIVLTQSPATLSVSPGEGATLSCRASQSVSSNLAWYQQSPGQAPRLLIYGASTRATGIPARFSGSGSGTEFTLTISSLQSEDFAVYYCQQYHSWPALTFGCGTKVDIKSGGGGSEVQLVESGGGLVQPGGSLKLSCAASGFTFNKYAINWVRQAPGKGLEWVARIRSKYNNYATYYADAVKDRFTISRDDSKNTVYLQMNNLKTEDTAVYYCARAGNFGSSYISYWAYWGQGTLVTVSSGGGGSGGGGSGGGGSQTVVTQEPSLTVSPGGTVTITCGSSTGAVTSGNYPNWVQKKPGQAPRGLIGGTKFLAPGTPARFSGSLSGGKAALTLSGVQPEDEAEYYCVLWYSNRWVFGSGTKLTVL

SEQ ID NO: 2959 - protein, 747 aa, Artificial Sequence
  Synthetic
EVQLVESGGGLVQPGRSLRLSCAASGFTFHDYTMHWVRQAPGKCLEWVSGISWNTGTIGYADSVKGRFTISRDNAKNSLYLQMNSLRAEDTALYYCVKDAFYGGDYYYNYGMDVWGHGTTVTVSSGGGGQGGGGQGGGGQEIVLTQSPATLSVSPGERATLSCRASQSVNNNLAWYQQKPGQAPRLLIYGASTRATGIPARFSGSGSGTDFTLTISSLQSDDFAVYYCQQYNNWPLTFGCGTKVEIKSGGGGQQVQLVQSGAEVKKPGASVKVSCKTSGYPFTSYGISWVRQAPGQCLEWMGWISPYSGAPTYAQKVQGRVTMTTDTSTTTAYMELRSLRSDDTAVYYCVRDGLEEDYWGQGTLVTVSSGGGGQGGGGQGGGGQEIVLTQSPATLSVSPGEGATLSCRASQSVSSNLAWYQQSPGQAPRLLIYGASTRATGIPARFSGSGSGTEFTLTISSLQSEDFAVYYCQQYHSWPALTFGCGTKVDIKSGGGGQEVQLVESGGGLVQPGGSLKLSCAASGFTFNKYAINWVRQAPGKGLEWVARIRSKYNNYATYYADAVKDRFTISRDDSKNTVYLQMNNLKTEDTAVYYCARAGNFGSSYISYWAYWGQGTLVTVSSGGGGQGGGGQGGGGQQTVVTQEPSLTVSPGGTVTITCGSSTGAVTSGNYPNWVQKKPGQAPRGLIGGTKFLAPGTPARFSGSLSGGKAALTLSGVQPEDEAEYYCVLWYSNRWVFGSGTKLTVL

SEQ ID NO: 2960 - protein, 1235 aa, Artificial Sequence
  Synthetic
EVQLVESGGGLVQPGRSLRLSCAASGFTFHDYTMHWVRQAPGKCLEWVSGISWNTGTIGYADSVKGRFTISRDNAKNSLYLQMNSLRAEDTALYYCVKDAFYGGDYYYNYGMDVWGHGTTVTVSSGGGGSGGGGSGGGGSEIVLTQSPATLSVSPGERATLSCRASQSVNNNLAWYQQKPGQAPRLLIYGASTRATGIPARFSGSGSGTDFTLTISSLQSDDFAVYYCQQYNNWPLTFGCGTKVEIKSGGGGSQVQLVQSGAEVKKPGASVKVSCKTSGYPFTSYGISWVRQAPGQCLEWMGWISPYSGAPTYAQKVQGRVTMTTDTSTTTAYMELRSLRSDDTAVYYCVRDGLEEDYWGQGTLVTVSSGGGGSGGGGSGGGGSEIVLTQSPATLSVSPGEGATLSCRASQSVSSNLAWYQQSPGQAPRLLIYGASTRATGIPARFSGSGSGTEFTLTISSLQSEDFAVYYCQQYHSWPALTFGCGTKVDIKSGGGGSEVQLVESGGGLVQPGGSLKLSCAASGFTFNKYAMNWVRQAPGKGLEWVARIRSKYNNYATYYADSVKDRFTISRDDSKNTAYLQMNNLKTEDTAVYYCVRHGNFGNSYISYWAYWGQGTLVTVSSGGGGSGGGGSGGGGSQTVVTQEPSLTVSPGGTVTLTCGSSTGAVTSGNYPNWVQQKPGQAPRGLIGGTKFLAPGTPARFSGSLLGGKAALTLSGVQPEDEAEYYCVLWYSNRWVFGGGTKLTVLGGGGDKTHTCPPCPAPELLGGPSVFLFPPKPKDTLMISRTPEVTCVVVDVSHEDPEVKFNWYVDGVEVHNAKTKPCEEQYGSTYRCVSVLTVLHQDWLNGKEYKCKVSNKALPAPIEKTISKAKGQPREPQVYTLPPSREEMTKNQVSLTCLVKGFYPSDIAVEWESNGQPENNYKTTPPVLDSDGSFFLYSKLTVDKSRWQQGNVFSCSVMHEALHNHYTQKSLSLSPGKGGGGSGGGGSGGGGSGGGGSGGGGSGGGGSDKTHTCPPCPAPELLGGPSVFLFPPKPKDTLMISRTPEVTCVVVDVSHEDPEVKFNWYVDGVEVHNAKTKPCEEQYGSTYRCVSVLTVLHQDWLNGKEYKCKVSNKALPAPIEKTISKAKGQPREPQVYTLPPSREEMTKNQVSLTCLVKGFYPSDIAVEWESNGQPENNYKTTPPVLDSDGSFFLYSKLTVDKSRWQQGNVFSCSVMHEALHNHYTQKSLSLSPGK

SEQ ID NO: 2961 - protein, 1225 aa, Artificial Sequence
  Synthetic
EVQLVESGGGLVQPGRSLRLSCAASGFTFHDYTMHWVRQAPGKCLEWVSGISWNTGTIGYADSVKGRFTISRDNAKNSLYLQMNSLRAEDTALYYCVKDAFYGGDYYYNYGMDVWGHGTTVTVSSGGGGQGGGGQGGGGQEIVLTQSPATLSVSPGERATLSCRASQSVNNNLAWYQQKPGQAPRLLIYGASTRATGIPARFSGSGSGTDFTLTISSLQSDDFAVYYCQQYNNWPLTFGCGTKVEIKSGGGGQQVQLVQSGAEVKKPGASVKVSCKTSGYPFTSYGISWVRQAPGQCLEWMGWISPYSGAPTYAQKVQGRVTMTTDTSTTTAYMELRSLRSDDTAVYYCVRDGLEEDYWGQGTLVTVSSGGGGQGGGGQGGGGQEIVLTQSPATLSVSPGEGATLSCRASQSVSSNLAWYQQSPGQAPRLLIYGASTRATGIPARFSGSGSGTEFTLTISSLQSEDFAVYYCQQYHSWPALTFGCGTKVDIKSGGGGQEVQLVESGGGLVQPGGSLKLSCAASGFTFNKYAMNWVRQAPGKGLEWVARIRSKYNNYATYYADSVKDRFTISRDDSKNTAYLQMNNLKTEDTAVYYCVRHGNFGNSYISYWAYWGQGTLVTVSSGGGGQGGGGQGGGGQQTVVTQEPSLTVSPGGTVTLTCGSSTGAVTSGNYPNWVQQKPGQAPRGLIGGTKFLAPGTPARFSGSLLGGKAALTLSGVQPEDEAEYYCVLWYSNRWVFGGGTKLTVLGGGGCPPCPAPELLGGPSVFLFPPKPKDTLMISRTPEVTCVVVDVSHEEPEVKFNWYVDGVEVHNAKTKPCEEQYGSTYRCVSVLTVLHQDWLNGKEYKCKVSNKALPAPIEKTISKAKGQPREPQVYTLPPSREEMTKNQVSLTCLVKGFYPSDIAVEWESNGQPENNYKTTPPVLDSDGSFFLYSKLTVDKSRWQQGNVFSCSVMHEALHNHYTQKSLSLSPGKGGGGQGGGGQGGGGQGGGGQGGGGQGGGGQCPPCPAPELLGGPSVFLFPPKPKDTLMISRTPEVTCVVVDVSHEEPEVKFNWYVDGVEVHNAKTKPCEEQYGSTYRCVSVLTVLHQDWLNGKEYKCKVSNKALPAPIEKTISKAKGQPREPQVYTLPPSREEMTKNQVSLTCLVKGFYPSDIAVEWESNGQPENNYKTTPPVLDSDGSFFLYSKLTVDKSRWQQGNVFSCSVMHEALHNHYTQKSLSLSPGK

SEQ ID NO: 2962 - protein, 1235 aa, Artificial Sequence
  Synthetic
EVQLVESGGGLVQPGRSLRLSCAASGFTFHDYTMHWVRQAPGKCLEWVSGISWNTGTIGYADSVKGRFTISRDNAKNSLYLQMNSLRAEDTALYYCVKDAFYGGDYYYNYGMDVWGHGTTVTVSSGGGGSGGGGSGGGGSEIVLTQSPATLSVSPGERATLSCRASQSVNNNLAWYQQKPGQAPRLLIYGASTRATGIPARFSGSGSGTDFTLTISSLQSDDFAVYYCQQYNNWPLTFGCGTKVEIKSGGGGSQVQLVQSGAEVKKPGASVKVSCKTSGYPFTSYGISWVRQAPGQCLEWMGWISPYSGAPTYAQKVQGRVTMTTDTSTTTAYMELRSLRSDDTAVYYCVRDGLEEDYWGQGTLVTVSSGGGGSGGGGSGGGGSEIVLTQSPATLSVSPGEGATLSCRASQSVSSNLAWYQQSPGQAPRLLIYGASTRATGIPARFSGSGSGTEFTLTISSLQSEDFAVYYCQQYHSWPALTFGCGTKVDIKSGGGGSEVQLVESGGGLVQPGGSLKLSCAASGFTFNKYAINWVRQAPGKGLEWVARIRSKYNNYATYYADAVKDRFTISRDDSKNTVYLQMNNLKTEDTAVYYCARAGNFGSSYISYWAYWGQGTLVTVSSGGGGSGGGGSGGGGSQTVVTQEPSLTVSPGGTVTITCGSSTGAVTSGNYPNWVQKKPGQAPRGLIGGTKFLAPGTPARFSGSLSGGKAALTLSGVQPEDEAEYYCVLWYSNRWVFGSGTKLTVLGGGGDKTHTCPPCPAPELLGGPSVFLFPPKPKDTLMISRTPEVTCVVVDVSHEDPEVKFNWYVDGVEVHNAKTKPCEEQYGSTYRCVSVLTVLHQDWLNGKEYKCKVSNKALPAPIEKTISKAKGQPREPQVYTLPPSREEMTKNQVSLTCLVKGFYPSDIAVEWESNGQPENNYKTTPPVLDSDGSFFLYSKLTVDKSRWQQGNVFSCSVMHEALHNHYTQKSLSLSPGKGGGGSGGGGSGGGGSGGGGSGGGGSGGGGSDKTHTCPPCPAPELLGGPSVFLFPPKPKDTLMISRTPEVTCVVVDVSHEDPEVKFNWYVDGVEVHNAKTKPCEEQYGSTYRCVSVLTVLHQDWLNGKEYKCKVSNKALPAPIEKTISKAKGQPREPQVYTLPPSREEMTKNQVSLTCLVKGFYPSDIAVEWESNGQPENNYKTTPPVLDSDGSFFLYSKLTVDKSRWQQGNVFSCSVMHEALHNHYTQKSLSLSPGK

SEQ ID NO: 2963 - protein, 1225 aa, Artificial Sequence
  Synthetic
EVQLVESGGGLVQPGRSLRLSCAASGFTFHDYTMHWVRQAPGKCLEWVSGISWNTGTIGYADSVKGRFTISRDNAKNSLYLQMNSLRAEDTALYYCVKDAFYGGDYYYNYGMDVWGHGTTVTVSSGGGGQGGGGQGGGGQEIVLTQSPATLSVSPGERATLSCRASQSVNNNLAWYQQKPGQAPRLLIYGASTRATGIPARFSGSGSGTDFTLTISSLQSDDFAVYYCQQYNNWPLTFGCGTKVEIKSGGGGQQVQLVQSGAEVKKPGASVKVSCKTSGYPFTSYGISWVRQAPGQCLEWMGWISPYSGAPTYAQKVQGRVTMTTDTSTTTAYMELRSLRSDDTAVYYCVRDGLEEDYWGQGTLVTVSSGGGGQGGGGQGGGGQEIVLTQSPATLSVSPGEGATLSCRASQSVSSNLAWYQQSPGQAPRLLIYGASTRATGIPARFSGSGSGTEFTLTISSLQSEDFAVYYCQQYHSWPALTFGCGTKVDIKSGGGGQEVQLVESGGGLVQPGGSLKLSCAASGFTFNKYAINWVRQAPGKGLEWVARIRSKYNNYATYYADAVKDRFTISRDDSKNTVYLQMNNLKTEDTAVYYCARAGNFGSSYISYWAYWGQGTLVTVSSGGGGQGGGGQGGGGQQTVVTQEPSLTVSPGGTVTITCGSSTGAVTSGNYPNWVQKKPGQAPRGLIGGTKFLAPGTPARFSGSLSGGKAALTLSGVQPEDEAEYYCVLWYSNRWVFGSGTKLTVLGGGGCPPCPAPELLGGPSVFLFPPKPKDTLMISRTPEVTCVVVDVSHEEPEVKFNWYVDGVEVHNAKTKPCEEQYGSTYRCVSVLTVLHQDWLNGKEYKCKVSNKALPAPIEKTISKAKGQPREPQVYTLPPSREEMTKNQVSLTCLVKGFYPSDIAVEWESNGQPENNYKTTPPVLDSDGSFFLYSKLTVDKSRWQQGNVFSCSVMHEALHNHYTQKSLSLSPGKGGGGQGGGGQGGGGQGGGGQGGGGQGGGGQCPPCPAPELLGGPSVFLFPPKPKDTLMISRTPEVTCVVVDVSHEEPEVKFNWYVDGVEVHNAKTKPCEEQYGSTYRCVSVLTVLHQDWLNGKEYKCKVSNKALPAPIEKTISKAKGQPREPQVYTLPPSREEMTKNQVSLTCLVKGFYPSDIAVEWESNGQPENNYKTTPPVLDSDGSFFLYSKLTVDKSRWQQGNVFSCSVMHEALHNHYTQKSLSLSPGK

SEQ ID NO: 2964 - protein, 492 aa, Artificial Sequence
  Synthetic
EVQLVESGGGLVQPGRSLRLSCAASGFTFHDYTMHWVRQAPGKCLEWVSGISWNTGTIGYADSVKGRFTISRDNAKNSLYLQMNSLRAEDTALYYCVKDAFYGGDYYYNYGMDVWGHGTTVTVSSGGGGSGGGGSGGGGSEIVLTQSPATLSVSPGERATLSCRASQSVNNNLAWYQQKPGQAPRLLIYGASTRATGIPARFSGSGSGTDFTLTISSLQSDDFAVYYCQQYNNWPLTFGCGTKVEIKSGGGGSQVQLVQSGAEVKKPGASVKVSCKASGYTFNNYGISWVRQAPGQCLEWMGWISAYNGKTSYAQKFQGRVTMTTDTSTGTAYMELRSLRSDDTAVYYCARSTGDGEYWGQGTLVTVSSGGGGSGGGGSGGGGSEIVMTQSPATLSVSPGERATLSCRASQSVSSNLAWYQQKPGQAPRLLIYGASTRATGIPARFSGGGSGTEFTLTISSLQSEDFAVYYCQQYHTWPVLTFGCGTKVEIK

SEQ ID NO: 2965 - protein, 492 aa, Artificial Sequence
  Synthetic
EVQLVESGGGLVQPGRSLRLSCAASGFTFHDYTMHWVRQAPGKCLEWVSGISWNTGTIGYADSVKGRFTISRDNAKNSLYLQMNSLRAEDTALYYCVKDAFYGGDYYYNYGMDVWGHGTTVTVSSGGGGQGGGGQGGGGQEIVLTQSPATLSVSPGERATLSCRASQSVNNNLAWYQQKPGQAPRLLIYGASTRATGIPARFSGSGSGTDFTLTISSLQSDDFAVYYCQQYNNWPLTFGCGTKVEIKSGGGGQQVQLVQSGAEVKKPGASVKVSCKASGYTFNNYGISWVRQAPGQCLEWMGWISAYNGKTSYAQKFQGRVTMTTDTSTGTAYMELRSLRSDDTAVYYCARSTGDGEYWGQGTLVTVSSGGGGQGGGGQGGGGQEIVMTQSPATLSVSPGERATLSCRASQSVSSNLAWYQQKPGQAPRLLIYGASTRATGIPARFSGGGSGTEFTLTISSLQSEDFAVYYCQQYHTWPVLTFGCGTKVEIK

SEQ ID NO: 2966 - protein, 747 aa, Artificial Sequence
  Synthetic
EVQLVESGGGLVQPGRSLRLSCAASGFTFHDYTMHWVRQAPGKCLEWVSGISWNTGTIGYADSVKGRFTISRDNAKNSLYLQMNSLRAEDTALYYCVKDAFYGGDYYYNYGMDVWGHGTTVTVSSGGGGSGGGGSGGGGSEIVLTQSPATLSVSPGERATLSCRASQSVNNNLAWYQQKPGQAPRLLIYGASTRATGIPARFSGSGSGTDFTLTISSLQSDDFAVYYCQQYNNWPLTFGCGTKVEIKSGGGGSQVQLVQSGAEVKKPGASVKVSCKASGYTFNNYGISWVRQAPGQCLEWMGWISAYNGKTSYAQKFQGRVTMTTDTSTGTAYMELRSLRSDDTAVYYCARSTGDGEYWGQGTLVTVSSGGGGSGGGGSGGGGSEIVMTQSPATLSVSPGERATLSCRASQSVSSNLAWYQQKPGQAPRLLIYGASTRATGIPARFSGGGSGTEFTLTISSLQSEDFAVYYCQQYHTWPVLTFGCGTKVEIKSGGGGSEVQLVESGGGLVQPGGSLKLSCAASGFTFNKYAMNWVRQAPGKGLEWVARIRSKYNNYATYYADSVKDRFTISRDDSKNTAYLQMNNLKTEDTAVYYCVRHGNFGNSYISYWAYWGQGTLVTVSSGGGGSGGGGSGGGGSQTVVTQEPSLTVSPGGTVTLTCGSSTGAVTSGNYPNWVQQKPGQAPRGLIGGTKFLAPGTPARFSGSLLGGKAALTLSGVQPEDEAEYYCVLWYSNRWVFGGGTKLTVL

SEQ ID NO: 2967 - protein, 747 aa, Artificial Sequence
  Synthetic
EVQLVESGGGLVQPGRSLRLSCAASGFTFHDYTMHWVRQAPGKCLEWVSGISWNTGTIGYADSVKGRFTISRDNAKNSLYLQMNSLRAEDTALYYCVKDAFYGGDYYYNYGMDVWGHGTTVTVSSGGGGQGGGGQGGGGQEIVLTQSPATLSVSPGERATLSCRASQSVNNNLAWYQQKPGQAPRLLIYGASTRATGIPARFSGSGSGTDFTLTISSLQSDDFAVYYCQQYNNWPLTFGCGTKVEIKSGGGGQQVQLVQSGAEVKKPGASVKVSCKASGYTFNNYGISWVRQAPGQCLEWMGWISAYNGKTSYAQKFQGRVTMTTDTSTGTAYMELRSLRSDDTAVYYCARSTGDGEYWGQGTLVTVSSGGGGQGGGGQGGGGQEIVMTQSPATLSVSPGERATLSCRASQSVSSNLAWYQQKPGQAPRLLIYGASTRATGIPARFSGGGSGTEFTLTISSLQSEDFAVYYCQQYHTWPVLTFGCGTKVEIKSGGGGQEVQLVESGGGLVQPGGSLKLSCAASGFTFNKYAMNWVRQAPGKGLEWVARIRSKYNNYATYYADSVKDRFTISRDDSKNTAYLQMNNLKTEDTAVYYCVRHGNFGNSYISYWAYWGQGTLVTVSSGGGGQGGGGQGGGGQQTVVTQEPSLTVSPGGTVTLTCGSSTGAVTSGNYPNWVQQKPGQAPRGLIGGTKFLAPGTPARFSGSLLGGKAALTLSGVQPEDEAEYYCVLWYSNRWVFGGGTKLTVL

SEQ ID NO: 2968 - protein, 747 aa, Artificial Sequence
  Synthetic
EVQLVESGGGLVQPGRSLRLSCAASGFTFHDYTMHWVRQAPGKCLEWVSGISWNTGTIGYADSVKGRFTISRDNAKNSLYLQMNSLRAEDTALYYCVKDAFYGGDYYYNYGMDVWGHGTTVTVSSGGGGSGGGGSGGGGSEIVLTQSPATLSVSPGERATLSCRASQSVNNNLAWYQQKPGQAPRLLIYGASTRATGIPARFSGSGSGTDFTLTISSLQSDDFAVYYCQQYNNWPLTFGCGTKVEIKSGGGGSQVQLVQSGAEVKKPGASVKVSCKASGYTFNNYGISWVRQAPGQCLEWMGWISAYNGKTSYAQKFQGRVTMTTDTSTGTAYMELRSLRSDDTAVYYCARSTGDGEYWGQGTLVTVSSGGGGSGGGGSGGGGSEIVMTQSPATLSVSPGERATLSCRASQSVSSNLAWYQQKPGQAPRLLIYGASTRATGIPARFSGGGSGTEFTLTISSLQSEDFAVYYCQQYHTWPVLTFGCGTKVEIKSGGGGSEVQLVESGGGLVQPGGSLKLSCAASGFTFNKYAINWVRQAPGKGLEWVARIRSKYNNYATYYADAVKDRFTISRDDSKNTVYLQMNNLKTEDTAVYYCARAGNFGSSYISYWAYWGQGTLVTVSSGGGGSGGGGSGGGGSQTVVTQEPSLTVSPGGTVTITCGSSTGAVTSGNYPNWVQKKPGQAPRGLIGGTKFLAPGTPARFSGSLSGGKAALTLSGVQPEDEAEYYCVLWYSNRWVFGSGTKLTVL

SEQ ID NO: 2969 - protein, 747 aa, Artificial Sequence
  Synthetic
EVQLVESGGGLVQPGRSLRLSCAASGFTFHDYTMHWVRQAPGKCLEWVSGISWNTGTIGYADSVKGRFTISRDNAKNSLYLQMNSLRAEDTALYYCVKDAFYGGDYYYNYGMDVWGHGTTVTVSSGGGGQGGGGQGGGGQEIVLTQSPATLSVSPGERATLSCRASQSVNNNLAWYQQKPGQAPRLLIYGASTRATGIPARFSGSGSGTDFTLTISSLQSDDFAVYYCQQYNNWPLTFGCGTKVEIKSGGGGQQVQLVQSGAEVKKPGASVKVSCKASGYTFNNYGISWVRQAPGQCLEWMGWISAYNGKTSYAQKFQGRVTMTTDTSTGTAYMELRSLRSDDTAVYYCARSTGDGEYWGQGTLVTVSSGGGGQGGGGQGGGGQEIVMTQSPATLSVSPGERATLSCRASQSVSSNLAWYQQKPGQAPRLLIYGASTRATGIPARFSGGGSGTEFTLTISSLQSEDFAVYYCQQYHTWPVLTFGCGTKVEIKSGGGGQEVQLVESGGGLVQPGGSLKLSCAASGFTFNKYAINWVRQAPGKGLEWVARIRSKYNNYATYYADAVKDRFTISRDDSKNTVYLQMNNLKTEDTAVYYCARAGNFGSSYISYWAYWGQGTLVTVSSGGGGQGGGGQGGGGQQTVVTQEPSLTVSPGGTVTITCGSSTGAVTSGNYPNWVQKKPGQAPRGLIGGTKFLAPGTPARFSGSLSGGKAALTLSGVQPEDEAEYYCVLWYSNRWVFGSGTKLTVL

SEQ ID NO: 2970 - protein, 1235 aa, Artificial Sequence
  Synthetic
EVQLVESGGGLVQPGRSLRLSCAASGFTFHDYTMHWVRQAPGKCLEWVSGISWNTGTIGYADSVKGRFTISRDNAKNSLYLQMNSLRAEDTALYYCVKDAFYGGDYYYNYGMDVWGHGTTVTVSSGGGGSGGGGSGGGGSEIVLTQSPATLSVSPGERATLSCRASQSVNNNLAWYQQKPGQAPRLLIYGASTRATGIPARFSGSGSGTDFTLTISSLQSDDFAVYYCQQYNNWPLTFGCGTKVEIKSGGGGSQVQLVQSGAEVKKPGASVKVSCKASGYTFNNYGISWVRQAPGQCLEWMGWISAYNGKTSYAQKFQGRVTMTTDTSTGTAYMELRSLRSDDTAVYYCARSTGDGEYWGQGTLVTVSSGGGGSGGGGSGGGGSEIVMTQSPATLSVSPGERATLSCRASQSVSSNLAWYQQKPGQAPRLLIYGASTRATGIPARFSGGGSGTEFTLTISSLQSEDFAVYYCQQYHTWPVLTFGCGTKVEIKSGGGGSEVQLVESGGGLVQPGGSLKLSCAASGFTFNKYAMNWVRQAPGKGLEWVARIRSKYNNYATYYADSVKDRFTISRDDSKNTAYLQMNNLKTEDTAVYYCVRHGNFGNSYISYWAYWGQGTLVTVSSGGGGSGGGGSGGGGSQTVVTQEPSLTVSPGGTVTLTCGSSTGAVTSGNYPNWVQQKPGQAPRGLIGGTKFLAPGTPARFSGSLLGGKAALTLSGVQPEDEAEYYCVLWYSNRWVFGGGTKLTVLGGGGDKTHTCPPCPAPELLGGPSVFLFPPKPKDTLMISRTPEVTCVVVDVSHEDPEVKFNWYVDGVEVHNAKTKPCEEQYGSTYRCVSVLTVLHQDWLNGKEYKCKVSNKALPAPIEKTISKAKGQPREPQVYTLPPSREEMTKNQVSLTCLVKGFYPSDIAVEWESNGQPENNYKTTPPVLDSDGSFFLYSKLTVDKSRWQQGNVFSCSVMHEALHNHYTQKSLSLSPGKGGGGSGGGGSGGGGSGGGGSGGGGSGGGGSDKTHTCPPCPAPELLGGPSVFLFPPKPKDTLMISRTPEVTCVVVDVSHEDPEVKFNWYVDGVEVHNAKTKPCEEQYGSTYRCVSVLTVLHQDWLNGKEYKCKVSNKALPAPIEKTISKAKGQPREPQVYTLPPSREEMTKNQVSLTCLVKGFYPSDIAVEWESNGQPENNYKTTPPVLDSDGSFFLYSKLTVDKSRWQQGNVFSCSVMHEALHNHYTQKSLSLSPGK

SEQ ID NO: 2971 - protein, 1225 aa, Artificial Sequence
  Synthetic
EVQLVESGGGLVQPGRSLRLSCAASGFTFHDYTMHWVRQAPGKCLEWVSGISWNTGTIGYADSVKGRFTISRDNAKNSLYLQMNSLRAEDTALYYCVKDAFYGGDYYYNYGMDVWGHGTTVTVSSGGGGQGGGGQGGGGQEIVLTQSPATLSVSPGERATLSCRASQSVNNNLAWYQQKPGQAPRLLIYGASTRATGIPARFSGSGSGTDFTLTISSLQSDDFAVYYCQQYNNWPLTFGCGTKVEIKSGGGGQQVQLVQSGAEVKKPGASVKVSCKASGYTFNNYGISWVRQAPGQCLEWMGWISAYNGKTSYAQKFQGRVTMTTDTSTGTAYMELRSLRSDDTAVYYCARSTGDGEYWGQGTLVTVSSGGGGQGGGGQGGGGQEIVMTQSPATLSVSPGERATLSCRASQSVSSNLAWYQQKPGQAPRLLIYGASTRATGIPARFSGGGSGTEFTLTISSLQSEDFAVYYCQQYHTWPVLTFGCGTKVEIKSGGGGQEVQLVESGGGLVQPGGSLKLSCAASGFTFNKYAMNWVRQAPGKGLEWVARIRSKYNNYATYYADSVKDRFTISRDDSKNTAYLQMNNLKTEDTAVYYCVRHGNFGNSYISYWAYWGQGTLVTVSSGGGGQGGGGQGGGGQQTVVTQEPSLTVSPGGTVTLTCGSSTGAVTSGNYPNWVQQKPGQAPRGLIGGTKFLAPGTPARFSGSLLGGKAALTLSGVQPEDEAEYYCVLWYSNRWVFGGGTKLTVLGGGGCPPCPAPELLGGPSVFLFPPKPKDTLMISRTPEVTCVVVDVSHEEPEVKFNWYVDGVEVHNAKTKPCEEQYGSTYRCVSVLTVLHQDWLNGKEYKCKVSNKALPAPIEKTISKAKGQPREPQVYTLPPSREEMTKNQVSLTCLVKGFYPSDIAVEWESNGQPENNYKTTPPVLDSDGSFFLYSKLTVDKSRWQQGNVFSCSVMHEALHNHYTQKSLSLSPGKGGGGQGGGGQGGGGQGGGGQGGGGQGGGGQCPPCPAPELLGGPSVFLFPPKPKDTLMISRTPEVTCVVVDVSHEEPEVKFNWYVDGVEVHNAKTKPCEEQYGSTYRCVSVLTVLHQDWLNGKEYKCKVSNKALPAPIEKTISKAKGQPREPQVYTLPPSREEMTKNQVSLTCLVKGFYPSDIAVEWESNGQPENNYKTTPPVLDSDGSFFLYSKLTVDKSRWQQGNVFSCSVMHEALHNHYTQKSLSLSPGK

SEQ ID NO: 2972 - protein, 1235 aa, Artificial Sequence
  Synthetic
EVQLVESGGGLVQPGRSLRLSCAASGFTFHDYTMHWVRQAPGKCLEWVSGISWNTGTIGYADSVKGRFTISRDNAKNSLYLQMNSLRAEDTALYYCVKDAFYGGDYYYNYGMDVWGHGTTVTVSSGGGGSGGGGSGGGGSEIVLTQSPATLSVSPGERATLSCRASQSVNNNLAWYQQKPGQAPRLLIYGASTRATGIPARFSGSGSGTDFTLTISSLQSDDFAVYYCQQYNNWPLTFGCGTKVEIKSGGGGSQVQLVQSGAEVKKPGASVKVSCKASGYTFNNYGISWVRQAPGQCLEWMGWISAYNGKTSYAQKFQGRVTMTTDTSTGTAYMELRSLRSDDTAVYYCARSTGDGEYWGQGTLVTVSSGGGGSGGGGSGGGGSEIVMTQSPATLSVSPGERATLSCRASQSVSSNLAWYQQKPGQAPRLLIYGASTRATGIPARFSGGGSGTEFTLTISSLQSEDFAVYYCQQYHTWPVLTFGCGTKVEIKSGGGGSEVQLVESGGGLVQPGGSLKLSCAASGFTFNKYAINWVRQAPGKGLEWVARIRSKYNNYATYYADAVKDRFTISRDDSKNTVYLQMNNLKTEDTAVYYCARAGNFGSSYISYWAYWGQGTLVTVSSGGGGSGGGGSGGGGSQTVVTQEPSLTVSPGGTVTITCGSSTGAVTSGNYPNWVQKKPGQAPRGLIGGTKFLAPGTPARFSGSLSGGKAALTLSGVQPEDEAEYYCVLWYSNRWVFGSGTKLTVLGGGGDKTHTCPPCPAPELLGGPSVFLFPPKPKDTLMISRTPEVTCVVVDVSHEDPEVKFNWYVDGVEVHNAKTKPCEEQYGSTYRCVSVLTVLHQDWLNGKEYKCKVSNKALPAPIEKTISKAKGQPREPQVYTLPPSREEMTKNQVSLTCLVKGFYPSDIAVEWESNGQPENNYKTTPPVLDSDGSFFLYSKLTVDKSRWQQGNVFSCSVMHEALHNHYTQKSLSLSPGKGGGGSGGGGSGGGGSGGGGSGGGGSGGGGSDKTHTCPPCPAPELLGGPSVFLFPPKPKDTLMISRTPEVTCVVVDVSHEDPEVKFNWYVDGVEVHNAKTKPCEEQYGSTYRCVSVLTVLHQDWLNGKEYKCKVSNKALPAPIEKTISKAKGQPREPQVYTLPPSREEMTKNQVSLTCLVKGFYPSDIAVEWESNGQPENNYKTTPPVLDSDGSFFLYSKLTVDKSRWQQGNVFSCSVMHEALHNHYTQKSLSLSPGK

SEQ ID NO: 2973 - protein, 1225 aa, Artificial Sequence
  Synthetic
EVQLVESGGGLVQPGRSLRLSCAASGFTFHDYTMHWVRQAPGKCLEWVSGISWNTGTIGYADSVKGRFTISRDNAKNSLYLQMNSLRAEDTALYYCVKDAFYGGDYYYNYGMDVWGHGTTVTVSSGGGGQGGGGQGGGGQEIVLTQSPATLSVSPGERATLSCRASQSVNNNLAWYQQKPGQAPRLLIYGASTRATGIPARFSGSGSGTDFTLTISSLQSDDFAVYYCQQYNNWPLTFGCGTKVEIKSGGGGQQVQLVQSGAEVKKPGASVKVSCKASGYTFNNYGISWVRQAPGQCLEWMGWISAYNGKTSYAQKFQGRVTMTTDTSTGTAYMELRSLRSDDTAVYYCARSTGDGEYWGQGTLVTVSSGGGGQGGGGQGGGGQEIVMTQSPATLSVSPGERATLSCRASQSVSSNLAWYQQKPGQAPRLLIYGASTRATGIPARFSGGGSGTEFTLTISSLQSEDFAVYYCQQYHTWPVLTFGCGTKVEIKSGGGGQEVQLVESGGGLVQPGGSLKLSCAASGFTFNKYAINWVRQAPGKGLEWVARIRSKYNNYATYYADAVKDRFTISRDDSKNTVYLQMNNLKTEDTAVYYCARAGNFGSSYISYWAYWGQGTLVTVSSGGGGQGGGGQGGGGQQTVVTQEPSLTVSPGGTVTITCGSSTGAVTSGNYPNWVQKKPGQAPRGLIGGTKFLAPGTPARFSGSLSGGKAALTLSGVQPEDEAEYYCVLWYSNRWVFGSGTKLTVLGGGGCPPCPAPELLGGPSVFLFPPKPKDTLMISRTPEVTCVVVDVSHEEPEVKFNWYVDGVEVHNAKTKPCEEQYGSTYRCVSVLTVLHQDWLNGKEYKCKVSNKALPAPIEKTISKAKGQPREPQVYTLPPSREEMTKNQVSLTCLVKGFYPSDIAVEWESNGQPENNYKTTPPVLDSDGSFFLYSKLTVDKSRWQQGNVFSCSVMHEALHNHYTQKSLSLSPGKGGGGQGGGGQGGGGQGGGGQGGGGQGGGGQCPPCPAPELLGGPSVFLFPPKPKDTLMISRTPEVTCVVVDVSHEEPEVKFNWYVDGVEVHNAKTKPCEEQYGSTYRCVSVLTVLHQDWLNGKEYKCKVSNKALPAPIEKTISKAKGQPREPQVYTLPPSREEMTKNQVSLTCLVKGFYPSDIAVEWESNGQPENNYKTTPPVLDSDGSFFLYSKLTVDKSRWQQGNVFSCSVMHEALHNHYTQKSLSLSPGK

SEQ ID NO: 2974 - protein, 501 aa, Artificial Sequence
  Synthetic
EVQLVESGGGLVQPGRSLRLSCAASGFTFHDYTMHWVRQAPGKCLEWVSGISWNTGTIGYADSVKGRFTISRDNAKNSLYLQMNSLRAEDTALYYCVKDAFYGGDYYYNYGMDVWGHGTTVTVSSGGGGSGGGGSGGGGSEIVLTQSPATLSVSPGERATLSCRASQSVNNNLAWYQQKPGQAPRLLIYGASTRATGIPARFSGSGSGTDFTLTISSLQSDDFAVYYCQQYNNWPLTFGCGTKVEIKSGGGGSQVQLQQSGPGLVKPSQTLSLTCAISGDSVSSKSAAWNWIRQSPSGCLEWLGRTFYRSTWYNDYAVSVKSRITINPDTSKNQFSLQLNSVIPEDTAVYYCAREGQWLVYGMDVWGQGTTVTVSSGGGGSGGGGSGGGGSQSVLTQPPSASGTPGQRITISCSGSSSNIGSNTVNWYQQLPGTAPKLLIYRNNQRPSGVPDRFSGSKSGTSASLAISGLQSEDEADYYCAAWDDSLNGRVFGCGTKLTVL

SEQ ID NO: 2975 - protein, 501 aa, Artificial Sequence
  Synthetic
EVQLVESGGGLVQPGRSLRLSCAASGFTFHDYTMHWVRQAPGKCLEWVSGISWNTGTIGYADSVKGRFTISRDNAKNSLYLQMNSLRAEDTALYYCVKDAFYGGDYYYNYGMDVWGHGTTVTVSSGGGGQGGGGQGGGGQEIVLTQSPATLSVSPGERATLSCRASQSVNNNLAWYQQKPGQAPRLLIYGASTRATGIPARFSGSGSGTDFTLTISSLQSDDFAVYYCQQYNNWPLTFGCGTKVEIKSGGGGQQVQLQQSGPGLVKPSQTLSLTCAISGDSVSSKSAAWNWIRQSPSGCLEWLGRTFYRSTWYNDYAVSVKSRITINPDTSKNQFSLQLNSVIPEDTAVYYCAREGQWLVYGMDVWGQGTTVTVSSGGGGQGGGGQGGGGQQSVLTQPPSASGTPGQRITISCSGSSSNIGSNTVNWYQQLPGTAPKLLIYRNNQRPSGVPDRFSGSKSGTSASLAISGLQSEDEADYYCAAWDDSLNGRVFGCGTKLTVL

SEQ ID NO: 2976 - protein, 756 aa, Artificial Sequence
  Synthetic
EVQLVESGGGLVQPGRSLRLSCAASGFTFHDYTMHWVRQAPGKCLEWVSGISWNTGTIGYADSVKGRFTISRDNAKNSLYLQMNSLRAEDTALYYCVKDAFYGGDYYYNYGMDVWGHGTTVTVSSGGGGSGGGGSGGGGSEIVLTQSPATLSVSPGERATLSCRASQSVNNNLAWYQQKPGQAPRLLIYGASTRATGIPARFSGSGSGTDFTLTISSLQSDDFAVYYCQQYNNWPLTFGCGTKVEIKSGGGGSQVQLQQSGPGLVKPSQTLSLTCAISGDSVSSKSAAWNWIRQSPSGCLEWLGRTFYRSTWYNDYAVSVKSRITINPDTSKNQFSLQLNSVIPEDTAVYYCAREGQWLVYGMDVWGQGTTVTVSSGGGGSGGGGSGGGGSQSVLTQPPSASGTPGQRITISCSGSSSNIGSNTVNWYQQLPGTAPKLLIYRNNQRPSGVPDRFSGSKSGTSASLAISGLQSEDEADYYCAAWDDSLNGRVFGCGTKLTVLSGGGGSEVQLVESGGGLVQPGGSLKLSCAASGFTFNKYAMNWVRQAPGKGLEWVARIRSKYNNYATYYADSVKDRFTISRDDSKNTAYLQMNNLKTEDTAVYYCVRHGNFGNSYISYWAYWGQGTLVTVSSGGGGSGGGGSGGGGSQTVVTQEPSLTVSPGGTVTLTCGSSTGAVTSGNYPNWVQQKPGQAPRGLIGGTKFLAPGTPARFSGSLLGGKAALTLSGVQPEDEAEYYCVLWYSNRWVFGGGTKLTVL

SEQ ID NO: 2977 - protein, 756 aa, Artificial Sequence
  Synthetic
EVQLVESGGGLVQPGRSLRLSCAASGFTFHDYTMHWVRQAPGKCLEWVSGISWNTGTIGYADSVKGRFTISRDNAKNSLYLQMNSLRAEDTALYYCVKDAFYGGDYYYNYGMDVWGHGTTVTVSSGGGGQGGGGQGGGGQEIVLTQSPATLSVSPGERATLSCRASQSVNNNLAWYQQKPGQAPRLLIYGASTRATGIPARFSGSGSGTDFTLTISSLQSDDFAVYYCQQYNNWPLTFGCGTKVEIKSGGGGQQVQLQQSGPGLVKPSQTLSLTCAISGDSVSSKSAAWNWIRQSPSGCLEWLGRTFYRSTWYNDYAVSVKSRITINPDTSKNQFSLQLNSVIPEDTAVYYCAREGQWLVYGMDVWGQGTTVTVSSGGGGQGGGGQGGGGQQSVLTQPPSASGTPGQRITISCSGSSSNIGSNTVNWYQQLPGTAPKLLIYRNNQRPSGVPDRFSGSKSGTSASLAISGLQSEDEADYYCAAWDDSLNGRVFGCGTKLTVLSGGGGQEVQLVESGGGLVQPGGSLKLSCAASGFTFNKYAMNWVRQAPGKGLEWVARIRSKYNNYATYYADSVKDRFTISRDDSKNTAYLQMNNLKTEDTAVYYCVRHGNFGNSYISYWAYWGQGTLVTVSSGGGGQGGGGQGGGGQQTVVTQEPSLTVSPGGTVTLTCGSSTGAVTSGNYPNWVQQKPGQAPRGLIGGTKFLAPGTPARFSGSLLGGKAALTLSGVQPEDEAEYYCVLWYSNRWVFGGGTKLTVL

SEQ ID NO: 2978 - protein, 756 aa, Artificial Sequence
  Synthetic
EVQLVESGGGLVQPGRSLRLSCAASGFTFHDYTMHWVRQAPGKCLEWVSGISWNTGTIGYADSVKGRFTISRDNAKNSLYLQMNSLRAEDTALYYCVKDAFYGGDYYYNYGMDVWGHGTTVTVSSGGGGSGGGGSGGGGSEIVLTQSPATLSVSPGERATLSCRASQSVNNNLAWYQQKPGQAPRLLIYGASTRATGIPARFSGSGSGTDFTLTISSLQSDDFAVYYCQQYNNWPLTFGCGTKVEIKSGGGGSQVQLQQSGPGLVKPSQTLSLTCAISGDSVSSKSAAWNWIRQSPSGCLEWLGRTFYRSTWYNDYAVSVKSRITINPDTSKNQFSLQLNSVIPEDTAVYYCAREGQWLVYGMDVWGQGTTVTVSSGGGGSGGGGSGGGGSQSVLTQPPSASGTPGQRITISCSGSSSNIGSNTVNWYQQLPGTAPKLLIYRNNQRPSGVPDRFSGSKSGTSASLAISGLQSEDEADYYCAAWDDSLNGRVFGCGTKLTVLSGGGGSEVQLVESGGGLVQPGGSLKLSCAASGFTFNKYAINWVRQAPGKGLEWVARIRSKYNNYATYYADAVKDRFTISRDDSKNTVYLQMNNLKTEDTAVYYCARAGNFGSSYISYWAYWGQGTLVTVSSGGGGSGGGGSGGGGSQTVVTQEPSLTVSPGGTVTITCGSSTGAVTSGNYPNWVQKKPGQAPRGLIGGTKFLAPGTPARFSGSLSGGKAALTLSGVQPEDEAEYYCVLWYSNRWVFGSGTKLTVL

SEQ ID NO: 2979 - protein, 756 aa, Artificial Sequence
  Synthetic
EVQLVESGGGLVQPGRSLRLSCAASGFTFHDYTMHWVRQAPGKCLEWVSGISWNTGTIGYADSVKGRFTISRDNAKNSLYLQMNSLRAEDTALYYCVKDAFYGGDYYYNYGMDVWGHGTTVTVSSGGGGQGGGGQGGGGQEIVLTQSPATLSVSPGERATLSCRASQSVNNNLAWYQQKPGQAPRLLIYGASTRATGIPARFSGSGSGTDFTLTISSLQSDDFAVYYCQQYNNWPLTFGCGTKVEIKSGGGGQQVQLQQSGPGLVKPSQTLSLTCAISGDSVSSKSAAWNWIRQSPSGCLEWLGRTFYRSTWYNDYAVSVKSRITINPDTSKNQFSLQLNSVIPEDTAVYYCAREGQWLVYGMDVWGQGTTVTVSSGGGGQGGGGQGGGGQQSVLTQPPSASGTPGQRITISCSGSSSNIGSNTVNWYQQLPGTAPKLLIYRNNQRPSGVPDRFSGSKSGTSASLAISGLQSEDEADYYCAAWDDSLNGRVFGCGTKLTVLSGGGGQEVQLVESGGGLVQPGGSLKLSCAASGFTFNKYAINWVRQAPGKGLEWVARIRSKYNNYATYYADAVKDRFTISRDDSKNTVYLQMNNLKTEDTAVYYCARAGNFGSSYISYWAYWGQGTLVTVSSGGGGQGGGGQGGGGQQTVVTQEPSLTVSPGGTVTITCGSSTGAVTSGNYPNWVQKKPGQAPRGLIGGTKFLAPGTPARFSGSLSGGKAALTLSGVQPEDEAEYYCVLWYSNRWVFGSGTKLTVL

SEQ ID NO: 2980 - protein, 1244 aa, Artificial Sequence
  Synthetic
EVQLVESGGGLVQPGRSLRLSCAASGFTFHDYTMHWVRQAPGKCLEWVSGISWNTGTIGYADSVKGRFTISRDNAKNSLYLQMNSLRAEDTALYYCVKDAFYGGDYYYNYGMDVWGHGTTVTVSSGGGGSGGGGSGGGGSEIVLTQSPATLSVSPGERATLSCRASQSVNNNLAWYQQKPGQAPRLLIYGASTRATGIPARFSGSGSGTDFTLTISSLQSDDFAVYYCQQYNNWPLTFGCGTKVEIKSGGGGSQVQLQQSGPGLVKPSQTLSLTCAISGDSVSSKSAAWNWIRQSPSGCLEWLGRTFYRSTWYNDYAVSVKSRITINPDTSKNQFSLQLNSVIPEDTAVYYCAREGQWLVYGMDVWGQGTTVTVSSGGGGSGGGGSGGGGSQSVLTQPPSASGTPGQRITISCSGSSSNIGSNTVNWYQQLPGTAPKLLIYRNNQRPSGVPDRFSGSKSGTSASLAISGLQSEDEADYYCAAWDDSLNGRVFGCGTKLTVLSGGGGSEVQLVESGGGLVQPGGSLKLSCAASGFTFNKYAMNWVRQAPGKGLEWVARIRSKYNNYATYYADSVKDRFTISRDDSKNTAYLQMNNLKTEDTAVYYCVRHGNFGNSYISYWAYWGQGTLVTVSSGGGGSGGGGSGGGGSQTVVTQEPSLTVSPGGTVTLTCGSSTGAVTSGNYPNWVQQKPGQAPRGLIGGTKFLAPGTPARFSGSLLGGKAALTLSGVQPEDEAEYYCVLWYSNRWVFGGGTKLTVLGGGGDKTHTCPPCPAPELLGGPSVFLFPPKPKDTLMISRTPEVTCVVVDVSHEDPEVKFNWYVDGVEVHNAKTKPCEEQYGSTYRCVSVLTVLHQDWLNGKEYKCKVSNKALPAPIEKTISKAKGQPREPQVYTLPPSREEMTKNQVSLTCLVKGFYPSDIAVEWESNGQPENNYKTTPPVLDSDGSFFLYSKLTVDKSRWQQGNVFSCSVMHEALHNHYTQKSLSLSPGKGGGGSGGGGSGGGGSGGGGSGGGGSGGGGSDKTHTCPPCPAPELLGGPSVFLFPPKPKDTLMISRTPEVTCVVVDVSHEDPEVKFNWYVDGVEVHNAKTKPCEEQYGSTYRCVSVLTVLHQDWLNGKEYKCKVSNKALPAPIEKTISKAKGQPREPQVYTLPPSREEMTKNQVSLTCLVKGFYPSDIAVEWESNGQPENNYKTTPPVLDSDGSFFLYSKLTVDKSRWQQGNVFSCSVMHEALHNHYTQKSLSLSPGK

SEQ ID NO: 2981 - protein, 1234 aa, Artificial Sequence
  Synthetic
EVQLVESGGGLVQPGRSLRLSCAASGFTFHDYTMHWVRQAPGKCLEWVSGISWNTGTIGYADSVKGRFTISRDNAKNSLYLQMNSLRAEDTALYYCVKDAFYGGDYYYNYGMDVWGHGTTVTVSSGGGGQGGGGQGGGGQEIVLTQSPATLSVSPGERATLSCRASQSVNNNLAWYQQKPGQAPRLLIYGASTRATGIPARFSGSGSGTDFTLTISSLQSDDFAVYYCQQYNNWPLTFGCGTKVEIKSGGGGQQVQLQQSGPGLVKPSQTLSLTCAISGDSVSSKSAAWNWIRQSPSGCLEWLGRTFYRSTWYNDYAVSVKSRITINPDTSKNQFSLQLNSVIPEDTAVYYCAREGQWLVYGMDVWGQGTTVTVSSGGGGQGGGGQGGGGQQSVLTQPPSASGTPGQRITISCSGSSSNIGSNTVNWYQQLPGTAPKLLIYRNNQRPSGVPDRFSGSKSGTSASLAISGLQSEDEADYYCAAWDDSLNGRVFGCGTKLTVLSGGGGQEVQLVESGGGLVQPGGSLKLSCAASGFTFNKYAMNWVRQAPGKGLEWVARIRSKYNNYATYYADSVKDRFTISRDDSKNTAYLQMNNLKTEDTAVYYCVRHGNFGNSYISYWAYWGQGTLVTVSSGGGGQGGGGQGGGGQQTVVTQEPSLTVSPGGTVTLTCGSSTGAVTSGNYPNWVQQKPGQAPRGLIGGTKFLAPGTPARFSGSLLGGKAALTLSGVQPEDEAEYYCVLWYSNRWVFGGGTKLTVLGGGGCPPCPAPELLGGPSVFLFPPKPKDTLMISRTPEVTCVVVDVSHEEPEVKFNWYVDGVEVHNAKTKPCEEQYGSTYRCVSVLTVLHQDWLNGKEYKCKVSNKALPAPIEKTISKAKGQPREPQVYTLPPSREEMTKNQVSLTCLVKGFYPSDIAVEWESNGQPENNYKTTPPVLDSDGSFFLYSKLTVDKSRWQQGNVFSCSVMHEALHNHYTQKSLSLSPGKGGGGQGGGGQGGGGQGGGGQGGGGQGGGGQCPPCPAPELLGGPSVFLFPPKPKDTLMISRTPEVTCVVVDVSHEEPEVKFNWYVDGVEVHNAKTKPCEEQYGSTYRCVSVLTVLHQDWLNGKEYKCKVSNKALPAPIEKTISKAKGQPREPQVYTLPPSREEMTKNQVSLTCLVKGFYPSDIAVEWESNGQPENNYKTTPPVLDSDGSFFLYSKLTVDKSRWQQGNVFSCSVMHEALHNHYTQKSLSLSPGK

SEQ ID NO: 2982 - protein, 1244 aa, Artificial Sequence
  Synthetic
EVQLVESGGGLVQPGRSLRLSCAASGFTFHDYTMHWVRQAPGKCLEWVSGISWNTGTIGYADSVKGRFTISRDNAKNSLYLQMNSLRAEDTALYYCVKDAFYGGDYYYNYGMDVWGHGTTVTVSSGGGGSGGGGSGGGGSEIVLTQSPATLSVSPGERATLSCRASQSVNNNLAWYQQKPGQAPRLLIYGASTRATGIPARFSGSGSGTDFTLTISSLQSDDFAVYYCQQYNNWPLTFGCGTKVEIKSGGGGSQVQLQQSGPGLVKPSQTLSLTCAISGDSVSSKSAAWNWIRQSPSGCLEWLGRTFYRSTWYNDYAVSVKSRITINPDTSKNQFSLQLNSVIPEDTAVYYCAREGQWLVYGMDVWGQGTTVTVSSGGGGSGGGGSGGGGSQSVLTQPPSASGTPGQRITISCSGSSSNIGSNTVNWYQQLPGTAPKLLIYRNNQRPSGVPDRFSGSKSGTSASLAISGLQSEDEADYYCAAWDDSLNGRVFGCGTKLTVLSGGGGSEVQLVESGGGLVQPGGSLKLSCAASGFTFNKYAINWVRQAPGKGLEWVARIRSKYNNYATYYADAVKDRFTISRDDSKNTVYLQMNNLKTEDTAVYYCARAGNFGSSYISYWAYWGQGTLVTVSSGGGGSGGGGSGGGGSQTVVTQEPSLTVSPGGTVTITCGSSTGAVTSGNYPNWVQKKPGQAPRGLIGGTKFLAPGTPARFSGSLSGGKAALTLSGVQPEDEAEYYCVLWYSNRWVFGSGTKLTVLGGGGDKTHTCPPCPAPELLGGPSVFLFPPKPKDTLMISRTPEVTCVVVDVSHEDPEVKFNWYVDGVEVHNAKTKPCEEQYGSTYRCVSVLTVLHQDWLNGKEYKCKVSNKALPAPIEKTISKAKGQPREPQVYTLPPSREEMTKNQVSLTCLVKGFYPSDIAVEWESNGQPENNYKTTPPVLDSDGSFFLYSKLTVDKSRWQQGNVFSCSVMHEALHNHYTQKSLSLSPGKGGGGSGGGGSGGGGSGGGGSGGGGSGGGGSDKTHTCPPCPAPELLGGPSVFLFPPKPKDTLMISRTPEVTCVVVDVSHEDPEVKFNWYVDGVEVHNAKTKPCEEQYGSTYRCVSVLTVLHQDWLNGKEYKCKVSNKALPAPIEKTISKAKGQPREPQVYTLPPSREEMTKNQVSLTCLVKGFYPSDIAVEWESNGQPENNYKTTPPVLDSDGSFFLYSKLTVDKSRWQQGNVFSCSVMHEALHNHYTQKSLSLSPGK

SEQ ID NO: 2983 - protein, 1234 aa, Artificial Sequence
  Synthetic
EVQLVESGGGLVQPGRSLRLSCAASGFTFHDYTMHWVRQAPGKCLEWVSGISWNTGTIGYADSVKGRFTISRDNAKNSLYLQMNSLRAEDTALYYCVKDAFYGGDYYYNYGMDVWGHGTTVTVSSGGGGQGGGGQGGGGQEIVLTQSPATLSVSPGERATLSCRASQSVNNNLAWYQQKPGQAPRLLIYGASTRATGIPARFSGSGSGTDFTLTISSLQSDDFAVYYCQQYNNWPLTFGCGTKVEIKSGGGGQQVQLQQSGPGLVKPSQTLSLTCAISGDSVSSKSAAWNWIRQSPSGCLEWLGRTFYRSTWYNDYAVSVKSRITINPDTSKNQFSLQLNSVIPEDTAVYYCAREGQWLVYGMDVWGQGTTVTVSSGGGGQGGGGQGGGGQQSVLTQPPSASGTPGQRITISCSGSSSNIGSNTVNWYQQLPGTAPKLLIYRNNQRPSGVPDRFSGSKSGTSASLAISGLQSEDEADYYCAAWDDSLNGRVFGCGTKLTVLSGGGGQEVQLVESGGGLVQPGGSLKLSCAASGFTFNKYAINWVRQAPGKGLEWVARIRSKYNNYATYYADAVKDRFTISRDDSKNTVYLQMNNLKTEDTAVYYCARAGNFGSSYISYWAYWGQGTLVTVSSGGGGQGGGGQGGGGQQTVVTQEPSLTVSPGGTVTITCGSSTGAVTSGNYPNWVQKKPGQAPRGLIGGTKFLAPGTPARFSGSLSGGKAALTLSGVQPEDEAEYYCVLWYSNRWVFGSGTKLTVLGGGGCPPCPAPELLGGPSVFLFPPKPKDTLMISRTPEVTCVVVDVSHEEPEVKFNWYVDGVEVHNAKTKPCEEQYGSTYRCVSVLTVLHQDWLNGKEYKCKVSNKALPAPIEKTISKAKGQPREPQVYTLPPSREEMTKNQVSLTCLVKGFYPSDIAVEWESNGQPENNYKTTPPVLDSDGSFFLYSKLTVDKSRWQQGNVFSCSVMHEALHNHYTQKSLSLSPGKGGGGQGGGGQGGGGQGGGGQGGGGQGGGGQCPPCPAPELLGGPSVFLFPPKPKDTLMISRTPEVTCVVVDVSHEEPEVKFNWYVDGVEVHNAKTKPCEEQYGSTYRCVSVLTVLHQDWLNGKEYKCKVSNKALPAPIEKTISKAKGQPREPQVYTLPPSREEMTKNQVSLTCLVKGFYPSDIAVEWESNGQPENNYKTTPPVLDSDGSFFLYSKLTVDKSRWQQGNVFSCSVMHEALHNHYTQKSLSLSPGK

SEQ ID NO: 2984 - protein, 495 aa, Artificial Sequence
  Synthetic
EVQLVESGGGLVQPGRSLRLSCAASGFTFHDYTMHWVRQAPGKCLEWVSGISWNTGTIGYADSVKGRFTISRDNAKNSLYLQMNSLRAEDTALYYCVKDAFYGGDYYYNYGMDVWGHGTTVTVSSGGGGSGGGGSGGGGSEIVLTQSPATLSVSPGERATLSCRASQSVNNNLAWYQQKPGQAPRLLIYGASTRATGIPARFSGSGSGTDFTLTISSLQSDDFAVYYCQQYNNWPLTFGCGTKVEIKSGGGGSQVQLVQSGAEVKKPGASVKVSCKASGYTFNNYGISWVRQAPGQCLEWMGWISAYNGKTSYAQKFQGRVTMTTDTSTGTAYMELRSLRSDDTAVYYCARDLDFLTGWEYWGQGTLVTVSSGGGGSGGGGSGGGGSEIVLTQSPATLSVSPGERATLSCRASQSVNSNLAWYQQKPGQAPRLLIYGASTRATGIPARFSGSGSGTEFTLTISSLQSEDFAVYYCQQYHTWPVLTFGCGTKVEIK

SEQ ID NO: 2985 - protein, 495 aa, Artificial Sequence
  Synthetic
EVQLVESGGGLVQPGRSLRLSCAASGFTFHDYTMHWVRQAPGKCLEWVSGISWNTGTIGYADSVKGRFTISRDNAKNSLYLQMNSLRAEDTALYYCVKDAFYGGDYYYNYGMDVWGHGTTVTVSSGGGGQGGGGQGGGGQEIVLTQSPATLSVSPGERATLSCRASQSVNNNLAWYQQKPGQAPRLLIYGASTRATGIPARFSGSGSGTDFTLTISSLQSDDFAVYYCQQYNNWPLTFGCGTKVEIKSGGGGQQVQLVQSGAEVKKPGASVKVSCKASGYTFNNYGISWVRQAPGQCLEWMGWISAYNGKTSYAQKFQGRVTMTTDTSTGTAYMELRSLRSDDTAVYYCARDLDFLTGWEYWGQGTLVTVSSGGGGQGGGGQGGGGQEIVLTQSPATLSVSPGERATLSCRASQSVNSNLAWYQQKPGQAPRLLIYGASTRATGIPARFSGSGSGTEFTLTISSLQSEDFAVYYCQQYHTWPVLTFGCGTKVEIK

SEQ ID NO: 2986 - protein, 750 aa, Artificial Sequence
  Synthetic
EVQLVESGGGLVQPGRSLRLSCAASGFTFHDYTMHWVRQAPGKCLEWVSGISWNTGTIGYADSVKGRFTISRDNAKNSLYLQMNSLRAEDTALYYCVKDAFYGGDYYYNYGMDVWGHGTTVTVSSGGGGSGGGGSGGGGSEIVLTQSPATLSVSPGERATLSCRASQSVNNNLAWYQQKPGQAPRLLIYGASTRATGIPARFSGSGSGTDFTLTISSLQSDDFAVYYCQQYNNWPLTFGCGTKVEIKSGGGGSQVQLVQSGAEVKKPGASVKVSCKASGYTFNNYGISWVRQAPGQCLEWMGWISAYNGKTSYAQKFQGRVTMTTDTSTGTAYMELRSLRSDDTAVYYCARDLDFLTGWEYWGQGTLVTVSSGGGGSGGGGSGGGGSEIVLTQSPATLSVSPGERATLSCRASQSVNSNLAWYQQKPGQAPRLLIYGASTRATGIPARFSGSGSGTEFTLTISSLQSEDFAVYYCQQYHTWPVLTFGCGTKVEIKSGGGGSEVQLVESGGGLVQPGGSLKLSCAASGFTFNKYAMNWVRQAPGKGLEWVARIRSKYNNYATYYADSVKDRFTISRDDSKNTAYLQMNNLKTEDTAVYYCVRHGNFGNSYISYWAYWGQGTLVTVSSGGGGSGGGGSGGGGSQTVVTQEPSLTVSPGGTVTLTCGSSTGAVTSGNYPNWVQQKPGQAPRGLIGGTKFLAPGTPARFSGSLLGGKAALTLSGVQPEDEAEYYCVLWYSNRWVFGGGTKLTVL

SEQ ID NO: 2987 - protein, 750 aa, Artificial Sequence
  Synthetic
EVQLVESGGGLVQPGRSLRLSCAASGFTFHDYTMHWVRQAPGKCLEWVSGISWNTGTIGYADSVKGRFTISRDNAKNSLYLQMNSLRAEDTALYYCVKDAFYGGDYYYNYGMDVWGHGTTVTVSSGGGGQGGGGQGGGGQEIVLTQSPATLSVSPGERATLSCRASQSVNNNLAWYQQKPGQAPRLLIYGASTRATGIPARFSGSGSGTDFTLTISSLQSDDFAVYYCQQYNNWPLTFGCGTKVEIKSGGGGQQVQLVQSGAEVKKPGASVKVSCKASGYTFNNYGISWVRQAPGQCLEWMGWISAYNGKTSYAQKFQGRVTMTTDTSTGTAYMELRSLRSDDTAVYYCARDLDFLTGWEYWGQGTLVTVSSGGGGQGGGGQGGGGQEIVLTQSPATLSVSPGERATLSCRASQSVNSNLAWYQQKPGQAPRLLIYGASTRATGIPARFSGSGSGTEFTLTISSLQSEDFAVYYCQQYHTWPVLTFGCGTKVEIKSGGGGQEVQLVESGGGLVQPGGSLKLSCAASGFTFNKYAMNWVRQAPGKGLEWVARIRSKYNNYATYYADSVKDRFTISRDDSKNTAYLQMNNLKTEDTAVYYCVRHGNFGNSYISYWAYWGQGTLVTVSSGGGGQGGGGQGGGGQQTVVTQEPSLTVSPGGTVTLTCGSSTGAVTSGNYPNWVQQKPGQAPRGLIGGTKFLAPGTPARFSGSLLGGKAALTLSGVQPEDEAEYYCVLWYSNRWVFGGGTKLTVL

SEQ ID NO: 2988 - protein, 750 aa, Artificial Sequence
  Synthetic
EVQLVESGGGLVQPGRSLRLSCAASGFTFHDYTMHWVRQAPGKCLEWVSGISWNTGTIGYADSVKGRFTISRDNAKNSLYLQMNSLRAEDTALYYCVKDAFYGGDYYYNYGMDVWGHGTTVTVSSGGGGSGGGGSGGGGSEIVLTQSPATLSVSPGERATLSCRASQSVNNNLAWYQQKPGQAPRLLIYGASTRATGIPARFSGSGSGTDFTLTISSLQSDDFAVYYCQQYNNWPLTFGCGTKVEIKSGGGGSQVQLVQSGAEVKKPGASVKVSCKASGYTFNNYGISWVRQAPGQCLEWMGWISAYNGKTSYAQKFQGRVTMTTDTSTGTAYMELRSLRSDDTAVYYCARDLDFLTGWEYWGQGTLVTVSSGGGGSGGGGSGGGGSEIVLTQSPATLSVSPGERATLSCRASQSVNSNLAWYQQKPGQAPRLLIYGASTRATGIPARFSGSGSGTEFTLTISSLQSEDFAVYYCQQYHTWPVLTFGCGTKVEIKSGGGGSEVQLVESGGGLVQPGGSLKLSCAASGFTFNKYAINWVRQAPGKGLEWVARIRSKYNNYATYYADAVKDRFTISRDDSKNTVYLQMNNLKTEDTAVYYCARAGNFGSSYISYWAYWGQGTLVTVSSGGGGSGGGGSGGGGSQTVVTQEPSLTVSPGGTVTITCGSSTGAVTSGNYPNWVQKKPGQAPRGLIGGTKFLAPGTPARFSGSLSGGKAALTLSGVQPEDEAEYYCVLWYSNRWVFGSGTKLTVL

SEQ ID NO: 2989 - protein, 750 aa, Artificial Sequence
  Synthetic
EVQLVESGGGLVQPGRSLRLSCAASGFTFHDYTMHWVRQAPGKCLEWVSGISWNTGTIGYADSVKGRFTISRDNAKNSLYLQMNSLRAEDTALYYCVKDAFYGGDYYYNYGMDVWGHGTTVTVSSGGGGQGGGGQGGGGQEIVLTQSPATLSVSPGERATLSCRASQSVNNNLAWYQQKPGQAPRLLIYGASTRATGIPARFSGSGSGTDFTLTISSLQSDDFAVYYCQQYNNWPLTFGCGTKVEIKSGGGGQQVQLVQSGAEVKKPGASVKVSCKASGYTFNNYGISWVRQAPGQCLEWMGWISAYNGKTSYAQKFQGRVTMTTDTSTGTAYMELRSLRSDDTAVYYCARDLDFLTGWEYWGQGTLVTVSSGGGGQGGGGQGGGGQEIVLTQSPATLSVSPGERATLSCRASQSVNSNLAWYQQKPGQAPRLLIYGASTRATGIPARFSGSGSGTEFTLTISSLQSEDFAVYYCQQYHTWPVLTFGCGTKVEIKSGGGGQEVQLVESGGGLVQPGGSLKLSCAASGFTFNKYAINWVRQAPGKGLEWVARIRSKYNNYATYYADAVKDRFTISRDDSKNTVYLQMNNLKTEDTAVYYCARAGNFGSSYISYWAYWGQGTLVTVSSGGGGQGGGGQGGGGQQTVVTQEPSLTVSPGGTVTITCGSSTGAVTSGNYPNWVQKKPGQAPRGLIGGTKFLAPGTPARFSGSLSGGKAALTLSGVQPEDEAEYYCVLWYSNRWVFGSGTKLTVL

SEQ ID NO: 2990 - protein, 1238 aa, Artificial Sequence
  Synthetic
EVQLVESGGGLVQPGRSLRLSCAASGFTFHDYTMHWVRQAPGKCLEWVSGISWNTGTIGYADSVKGRFTISRDNAKNSLYLQMNSLRAEDTALYYCVKDAFYGGDYYYNYGMDVWGHGTTVTVSSGGGGSGGGGSGGGGSEIVLTQSPATLSVSPGERATLSCRASQSVNNNLAWYQQKPGQAPRLLIYGASTRATGIPARFSGSGSGTDFTLTISSLQSDDFAVYYCQQYNNWPLTFGCGTKVEIKSGGGGSQVQLVQSGAEVKKPGASVKVSCKASGYTFNNYGISWVRQAPGQCLEWMGWISAYNGKTSYAQKFQGRVTMTTDTSTGTAYMELRSLRSDDTAVYYCARDLDFLTGWEYWGQGTLVTVSSGGGGSGGGGSGGGGSEIVLTQSPATLSVSPGERATLSCRASQSVNSNLAWYQQKPGQAPRLLIYGASTRATGIPARFSGSGSGTEFTLTISSLQSEDFAVYYCQQYHTWPVLTFGCGTKVEIKSGGGGSEVQLVESGGGLVQPGGSLKLSCAASGFTFNKYAMNWVRQAPGKGLEWVARIRSKYNNYATYYADSVKDRFTISRDDSKNTAYLQMNNLKTEDTAVYYCVRHGNFGNSYISYWAYWGQGTLVTVSSGGGGSGGGGSGGGGSQTVVTQEPSLTVSPGGTVTLTCGSSTGAVTSGNYPNWVQQKPGQAPRGLIGGTKFLAPGTPARFSGSLLGGKAALTLSGVQPEDEAEYYCVLWYSNRWVFGGGTKLTVLGGGGDKTHTCPPCPAPELLGGPSVFLFPPKPKDTLMISRTPEVTCVVVDVSHEDPEVKFNWYVDGVEVHNAKTKPCEEQYGSTYRCVSVLTVLHQDWLNGKEYKCKVSNKALPAPIEKTISKAKGQPREPQVYTLPPSREEMTKNQVSLTCLVKGFYPSDIAVEWESNGQPENNYKTTPPVLDSDGSFFLYSKLTVDKSRWQQGNVFSCSVMHEALHNHYTQKSLSLSPGKGGGGSGGGGSGGGGSGGGGSGGGGSGGGGSDKTHTCPPCPAPELLGGPSVFLFPPKPKDTLMISRTPEVTCVVVDVSHEDPEVKFNWYVDGVEVHNAKTKPCEEQYGSTYRCVSVLTVLHQDWLNGKEYKCKVSNKALPAPIEKTISKAKGQPREPQVYTLPPSREEMTKNQVSLTCLVKGFYPSDIAVEWESNGQPENNYKTTPPVLDSDGSFFLYSKLTVDKSRWQQGNVFSCSVMHEALHNHYTQKSLSLSPGK

SEQ ID NO: 2991 - protein, 1228 aa, Artificial Sequence
  Synthetic
EVQLVESGGGLVQPGRSLRLSCAASGFTFHDYTMHWVRQAPGKCLEWVSGISWNTGTIGYADSVKGRFTISRDNAKNSLYLQMNSLRAEDTALYYCVKDAFYGGDYYYNYGMDVWGHGTTVTVSSGGGGQGGGGQGGGGQEIVLTQSPATLSVSPGERATLSCRASQSVNNNLAWYQQKPGQAPRLLIYGASTRATGIPARFSGSGSGTDFTLTISSLQSDDFAVYYCQQYNNWPLTFGCGTKVEIKSGGGGQQVQLVQSGAEVKKPGASVKVSCKASGYTFNNYGISWVRQAPGQCLEWMGWISAYNGKTSYAQKFQGRVTMTTDTSTGTAYMELRSLRSDDTAVYYCARDLDFLTGWEYWGQGTLVTVSSGGGGQGGGGQGGGGQEIVLTQSPATLSVSPGERATLSCRASQSVNSNLAWYQQKPGQAPRLLIYGASTRATGIPARFSGSGSGTEFTLTISSLQSEDFAVYYCQQYHTWPVLTFGCGTKVEIKSGGGGQEVQLVESGGGLVQPGGSLKLSCAASGFTFNKYAMNWVRQAPGKGLEWVARIRSKYNNYATYYADSVKDRFTISRDDSKNTAYLQMNNLKTEDTAVYYCVRHGNFGNSYISYWAYWGQGTLVTVSSGGGGQGGGGQGGGGQQTVVTQEPSLTVSPGGTVTLTCGSSTGAVTSGNYPNWVQQKPGQAPRGLIGGTKFLAPGTPARFSGSLLGGKAALTLSGVQPEDEAEYYCVLWYSNRWVFGGGTKLTVLGGGGCPPCPAPELLGGPSVFLFPPKPKDTLMISRTPEVTCVVVDVSHEEPEVKFNWYVDGVEVHNAKTKPCEEQYGSTYRCVSVLTVLHQDWLNGKEYKCKVSNKALPAPIEKTISKAKGQPREPQVYTLPPSREEMTKNQVSLTCLVKGFYPSDIAVEWESNGQPENNYKTTPPVLDSDGSFFLYSKLTVDKSRWQQGNVFSCSVMHEALHNHYTQKSLSLSPGKGGGGQGGGGQGGGGQGGGGQGGGGQGGGGQCPPCPAPELLGGPSVFLFPPKPKDTLMISRTPEVTCVVVDVSHEEPEVKFNWYVDGVEVHNAKTKPCEEQYGSTYRCVSVLTVLHQDWLNGKEYKCKVSNKALPAPIEKTISKAKGQPREPQVYTLPPSREEMTKNQVSLTCLVKGFYPSDIAVEWESNGQPENNYKTTPPVLDSDGSFFLYSKLTVDKSRWQQGNVFSCSVMHEALHNHYTQKSLSLSPGK

SEQ ID NO: 2992 - protein, 1238 aa, Artificial Sequence
  Synthetic
EVQLVESGGGLVQPGRSLRLSCAASGFTFHDYTMHWVRQAPGKCLEWVSGISWNTGTIGYADSVKGRFTISRDNAKNSLYLQMNSLRAEDTALYYCVKDAFYGGDYYYNYGMDVWGHGTTVTVSSGGGGSGGGGSGGGGSEIVLTQSPATLSVSPGERATLSCRASQSVNNNLAWYQQKPGQAPRLLIYGASTRATGIPARFSGSGSGTDFTLTISSLQSDDFAVYYCQQYNNWPLTFGCGTKVEIKSGGGGSQVQLVQSGAEVKKPGASVKVSCKASGYTFNNYGISWVRQAPGQCLEWMGWISAYNGKTSYAQKFQGRVTMTTDTSTGTAYMELRSLRSDDTAVYYCARDLDFLTGWEYWGQGTLVTVSSGGGGSGGGGSGGGGSEIVLTQSPATLSVSPGERATLSCRASQSVNSNLAWYQQKPGQAPRLLIYGASTRATGIPARFSGSGSGTEFTLTISSLQSEDFAVYYCQQYHTWPVLTFGCGTKVEIKSGGGGSEVQLVESGGGLVQPGGSLKLSCAASGFTFNKYAINWVRQAPGKGLEWVARIRSKYNNYATYYADAVKDRFTISRDDSKNTVYLQMNNLKTEDTAVYYCARAGNFGSSYISYWAYWGQGTLVTVSSGGGGSGGGGSGGGGSQTVVTQEPSLTVSPGGTVTITCGSSTGAVTSGNYPNWVQKKPGQAPRGLIGGTKFLAPGTPARFSGSLSGGKAALTLSGVQPEDEAEYYCVLWYSNRWVFGSGTKLTVLGGGGDKTHTCPPCPAPELLGGPSVFLFPPKPKDTLMISRTPEVTCVVVDVSHEDPEVKFNWYVDGVEVHNAKTKPCEEQYGSTYRCVSVLTVLHQDWLNGKEYKCKVSNKALPAPIEKTISKAKGQPREPQVYTLPPSREEMTKNQVSLTCLVKGFYPSDIAVEWESNGQPENNYKTTPPVLDSDGSFFLYSKLTVDKSRWQQGNVFSCSVMHEALHNHYTQKSLSLSPGKGGGGSGGGGSGGGGSGGGGSGGGGSGGGGSDKTHTCPPCPAPELLGGPSVFLFPPKPKDTLMISRTPEVTCVVVDVSHEDPEVKFNWYVDGVEVHNAKTKPCEEQYGSTYRCVSVLTVLHQDWLNGKEYKCKVSNKALPAPIEKTISKAKGQPREPQVYTLPPSREEMTKNQVSLTCLVKGFYPSDIAVEWESNGQPENNYKTTPPVLDSDGSFFLYSKLTVDKSRWQQGNVFSCSVMHEALHNHYTQKSLSLSPGK

SEQ ID NO: 2993 - protein, 1228 aa, Artificial Sequence
  Synthetic
EVQLVESGGGLVQPGRSLRLSCAASGFTFHDYTMHWVRQAPGKCLEWVSGISWNTGTIGYADSVKGRFTISRDNAKNSLYLQMNSLRAEDTALYYCVKDAFYGGDYYYNYGMDVWGHGTTVTVSSGGGGQGGGGQGGGGQEIVLTQSPATLSVSPGERATLSCRASQSVNNNLAWYQQKPGQAPRLLIYGASTRATGIPARFSGSGSGTDFTLTISSLQSDDFAVYYCQQYNNWPLTFGCGTKVEIKSGGGGQQVQLVQSGAEVKKPGASVKVSCKASGYTFNNYGISWVRQAPGQCLEWMGWISAYNGKTSYAQKFQGRVTMTTDTSTGTAYMELRSLRSDDTAVYYCARDLDFLTGWEYWGQGTLVTVSSGGGGQGGGGQGGGGQEIVLTQSPATLSVSPGERATLSCRASQSVNSNLAWYQQKPGQAPRLLIYGASTRATGIPARFSGSGSGTEFTLTISSLQSEDFAVYYCQQYHTWPVLTFGCGTKVEIKSGGGGQEVQLVESGGGLVQPGGSLKLSCAASGFTFNKYAINWVRQAPGKGLEWVARIRSKYNNYATYYADAVKDRFTISRDDSKNTVYLQMNNLKTEDTAVYYCARAGNFGSSYISYWAYWGQGTLVTVSSGGGGQGGGGQGGGGQQTVVTQEPSLTVSPGGTVTITCGSSTGAVTSGNYPNWVQKKPGQAPRGLIGGTKFLAPGTPARFSGSLSGGKAALTLSGVQPEDEAEYYCVLWYSNRWVFGSGTKLTVLGGGGCPPCPAPELLGGPSVFLFPPKPKDTLMISRTPEVTCVVVDVSHEEPEVKFNWYVDGVEVHNAKTKPCEEQYGSTYRCVSVLTVLHQDWLNGKEYKCKVSNKALPAPIEKTISKAKGQPREPQVYTLPPSREEMTKNQVSLTCLVKGFYPSDIAVEWESNGQPENNYKTTPPVLDSDGSFFLYSKLTVDKSRWQQGNVFSCSVMHEALHNHYTQKSLSLSPGKGGGGQGGGGQGGGGQGGGGQGGGGQGGGGQCPPCPAPELLGGPSVFLFPPKPKDTLMISRTPEVTCVVVDVSHEEPEVKFNWYVDGVEVHNAKTKPCEEQYGSTYRCVSVLTVLHQDWLNGKEYKCKVSNKALPAPIEKTISKAKGQPREPQVYTLPPSREEMTKNQVSLTCLVKGFYPSDIAVEWESNGQPENNYKTTPPVLDSDGSFFLYSKLTVDKSRWQQGNVFSCSVMHEALHNHYTQKSLSLSPGK

SEQ ID NO: 2994 - protein, 498 aa, Artificial Sequence
  Synthetic
EVQLVESGGGLVQPGRSLRLSCAASGFTFHDYTMHWVRQAPGKCLEWVSGISWNTGTIGYADSVKGRFTISRDNAKNSLYLQMNSLRAEDTALYYCVKDAFYGGDYYYNYGMDVWGHGTTVTVSSGGGGSGGGGSGGGGSEIVLTQSPATLSVSPGERATLSCRASQSVNNNLAWYQQKPGQAPRLLIYGASTRATGIPARFSGSGSGTDFTLTISSLQSDDFAVYYCQQYNNWPLTFGCGTKVEIKSGGGGSQLQLQESGPGLVKPSETLSLTCFVSGGSISNSDYFWGWIRQPPGKCLEWIGTIYYSGRTYYNPSLKSRVTISVDTSKNQFSLMLSSVTAVDTAVYYCARYQYGSFDYWGQGTLVTVSSGGGGSGGGGSGGGGSDIVMTQTPLSLPVTPGEPASISCRSSQSLLHSNGYNYLDWYLQKPGQSPQLLIYLGSNRASGVPDRFSGSGSGTDFTLKISRVEAEDVGVYYCMQALQTPYTFGCGTKVEIR

SEQ ID NO: 2995 - protein, 498 aa, Artificial Sequence
  Synthetic
EVQLVESGGGLVQPGRSLRLSCAASGFTFHDYTMHWVRQAPGKCLEWVSGISWNTGTIGYADSVKGRFTISRDNAKNSLYLQMNSLRAEDTALYYCVKDAFYGGDYYYNYGMDVWGHGTTVTVSSGGGGQGGGGQGGGGQEIVLTQSPATLSVSPGERATLSCRASQSVNNNLAWYQQKPGQAPRLLIYGASTRATGIPARFSGSGSGTDFTLTISSLQSDDFAVYYCQQYNNWPLTFGCGTKVEIKSGGGGQQLQLQESGPGLVKPSETLSLTCFVSGGSISNSDYFWGWIRQPPGKCLEWIGTIYYSGRTYYNPSLKSRVTISVDTSKNQFSLMLSSVTAVDTAVYYCARYQYGSFDYWGQGTLVTVSSGGGGQGGGGQGGGGQEIVMTQTPLSLPVTPGEPASISCRSSQSLLHSNGYNYLDWYLQKPGQSPQLLIYLGSNRASGVPDRFSGSGSGTDFTLKISRVEAEDVGVYYCMQALQTPYTFGCGTKVEIR

SEQ ID NO: 2996 - protein, 753 aa, Artificial Sequence
  Synthetic
EVQLVESGGGLVQPGRSLRLSCAASGFTFHDYTMHWVRQAPGKCLEWVSGISWNTGTIGYADSVKGRFTISRDNAKNSLYLQMNSLRAEDTALYYCVKDAFYGGDYYYNYGMDVWGHGTTVTVSSGGGGSGGGGSGGGGSEIVLTQSPATLSVSPGERATLSCRASQSVNNNLAWYQQKPGQAPRLLIYGASTRATGIPARFSGSGSGTDFTLTISSLQSDDFAVYYCQQYNNWPLTFGCGTKVEIKSGGGGSQLQLQESGPGLVKPSETLSLTCFVSGGSISNSDYFWGWIRQPPGKCLEWIGTIYYSGRTYYNPSLKSRVTISVDTSKNQFSLMLSSVTAVDTAVYYCARYQYGSFDYWGQGTLVTVSSGGGGSGGGGSGGGGSDIVMTQTPLSLPVTPGEPASISCRSSQSLLHSNGYNYLDWYLQKPGQSPQLLIYLGSNRASGVPDRFSGSGSGTDFTLKISRVEAEDVGVYYCMQALQTPYTFGCGTKVEIRSGGGGSEVQLVESGGGLVQPGGSLKLSCAASGFTFNKYAMNWVRQAPGKGLEWVARIRSKYNNYATYYADSVKDRFTISRDDSKNTAYLQMNNLKTEDTAVYYCVRHGNFGNSYISYWAYWGQGTLVTVSSGGGGSGGGGSGGGGSQTVVTQEPSLTVSPGGTVTLTCGSSTGAVTSGNYPNWVQQKPGQAPRGLIGGTKFLAPGTPARFSGSLLGGKAALTLSGVQPEDEAEYYCVLWYSNRWVFGGGTKLTVL

SEQ ID NO: 2997 - protein, 753 aa, Artificial Sequence
  Synthetic
EVQLVESGGGLVQPGRSLRLSCAASGFTFHDYTMHWVRQAPGKCLEWVSGISWNTGTIGYADSVKGRFTISRDNAKNSLYLQMNSLRAEDTALYYCVKDAFYGGDYYYNYGMDVWGHGTTVTVSSGGGGQGGGGQGGGGQEIVLTQSPATLSVSPGERATLSCRASQSVNNNLAWYQQKPGQAPRLLIYGASTRATGIPARFSGSGSGTDFTLTISSLQSDDFAVYYCQQYNNWPLTFGCGTKVEIKSGGGGQQLQLQESGPGLVKPSETLSLTCFVSGGSISNSDYFWGWIRQPPGKCLEWIGTIYYSGRTYYNPSLKSRVTISVDTSKNQFSLMLSSVTAVDTAVYYCARYQYGSFDYWGQGTLVTVSSGGGGQGGGGQGGGGQEIVMTQTPLSLPVTPGEPASISCRSSQSLLHSNGYNYLDWYLQKPGQSPQLLIYLGSNRASGVPDRFSGSGSGTDFTLKISRVEAEDVGVYYCMQALQTPYTFGCGTKVEIRSGGGGQEVQLVESGGGLVQPGGSLKLSCAASGFTFNKYAMNWVRQAPGKGLEWVARIRSKYNNYATYYADSVKDRFTISRDDSKNTAYLQMNNLKTEDTAVYYCVRHGNFGNSYISYWAYWGQGTLVTVSSGGGGQGGGGQGGGGQQTVVTQEPSLTVSPGGTVTLTCGSSTGAVTSGNYPNWVQQKPGQAPRGLIGGTKFLAPGTPARFSGSLLGGKAALTLSGVQPEDEAEYYCVLWYSNRWVFGGGTKLTVL

SEQ ID NO: 2998 - protein, 753 aa, Artificial Sequence
  Synthetic
EVQLVESGGGLVQPGRSLRLSCAASGFTFHDYTMHWVRQAPGKCLEWVSGISWNTGTIGYADSVKGRFTISRDNAKNSLYLQMNSLRAEDTALYYCVKDAFYGGDYYYNYGMDVWGHGTTVTVSSGGGGSGGGGSGGGGSEIVLTQSPATLSVSPGERATLSCRASQSVNNNLAWYQQKPGQAPRLLIYGASTRATGIPARFSGSGSGTDFTLTISSLQSDDFAVYYCQQYNNWPLTFGCGTKVEIKSGGGGSQLQLQESGPGLVKPSETLSLTCFVSGGSISNSDYFWGWIRQPPGKCLEWIGTIYYSGRTYYNPSLKSRVTISVDTSKNQFSLMLSSVTAVDTAVYYCARYQYGSFDYWGQGTLVTVSSGGGGSGGGGSGGGGSDIVMTQTPLSLPVTPGEPASISCRSSQSLLHSNGYNYLDWYLQKPGQSPQLLIYLGSNRASGVPDRFSGSGSGTDFTLKISRVEAEDVGVYYCMQALQTPYTFGCGTKVEIRSGGGGSEVQLVESGGGLVQPGGSLKLSCAASGFTFNKYAINWVRQAPGKGLEWVARIRSKYNNYATYYADAVKDRFTISRDDSKNTVYLQMNNLKTEDTAVYYCARAGNFGSSYISYWAYWGQGTLVTVSSGGGGSGGGGSGGGGSQTVVTQEPSLTVSPGGTVTITCGSSTGAVTSGNYPNWVQKKPGQAPRGLIGGTKFLAPGTPARFSGSLSGGKAALTLSGVQPEDEAEYYCVLWYSNRWVFGSGTKLTVL

SEQ ID NO: 2999 - protein, 753 aa, Artificial Sequence
  Synthetic
EVQLVESGGGLVQPGRSLRLSCAASGFTFHDYTMHWVRQAPGKCLEWVSGISWNTGTIGYADSVKGRFTISRDNAKNSLYLQMNSLRAEDTALYYCVKDAFYGGDYYYNYGMDVWGHGTTVTVSSGGGGQGGGGQGGGGQEIVLTQSPATLSVSPGERATLSCRASQSVNNNLAWYQQKPGQAPRLLIYGASTRATGIPARFSGSGSGTDFTLTISSLQSDDFAVYYCQQYNNWPLTFGCGTKVEIKSGGGGQQLQLQESGPGLVKPSETLSLTCFVSGGSISNSDYFWGWIRQPPGKCLEWIGTIYYSGRTYYNPSLKSRVTISVDTSKNQFSLMLSSVTAVDTAVYYCARYQYGSFDYWGQGTLVTVSSGGGGQGGGGQGGGGQEIVMTQTPLSLPVTPGEPASISCRSSQSLLHSNGYNYLDWYLQKPGQSPQLLIYLGSNRASGVPDRFSGSGSGTDFTLKISRVEAEDVGVYYCMQALQTPYTFGCGTKVEIRSGGGGQEVQLVESGGGLVQPGGSLKLSCAASGFTFNKYAINWVRQAPGKGLEWVARIRSKYNNYATYYADAVKDRFTISRDDSKNTVYLQMNNLKTEDTAVYYCARAGNFGSSYISYWAYWGQGTLVTVSSGGGGQGGGGQGGGGQQTVVTQEPSLTVSPGGTVTITCGSSTGAVTSGNYPNWVQKKPGQAPRGLIGGTKFLAPGTPARFSGSLSGGKAALTLSGVQPEDEAEYYCVLWYSNRWVFGSGTKLTVL

SEQ ID NO: 3000 - protein, 1241 aa, Artificial Sequence
  Synthetic
EVQLVESGGGLVQPGRSLRLSCAASGFTFHDYTMHWVRQAPGKCLEWVSGISWNTGTIGYADSVKGRFTISRDNAKNSLYLQMNSLRAEDTALYYCVKDAFYGGDYYYNYGMDVWGHGTTVTVSSGGGGSGGGGSGGGGSEIVLTQSPATLSVSPGERATLSCRASQSVNNNLAWYQQKPGQAPRLLIYGASTRATGIPARFSGSGSGTDFTLTISSLQSDDFAVYYCQQYNNWPLTFGCGTKVEIKSGGGGSQLQLQESGPGLVKPSETLSLTCFVSGGSISNSDYFWGWIRQPPGKCLEWIGTIYYSGRTYYNPSLKSRVTISVDTSKNQFSLMLSSVTAVDTAVYYCARYQYGSFDYWGQGTLVTVSSGGGGSGGGGSGGGGSDIVMTQTPLSLPVTPGEPASISCRSSQSLLHSNGYNYLDWYLQKPGQSPQLLIYLGSNRASGVPDRFSGSGSGTDFTLKISRVEAEDVGVYYCMQALQTPYTFGCGTKVEIRSGGGGSEVQLVESGGGLVQPGGSLKLSCAASGFTFNKYAMNWVRQAPGKGLEWVARIRSKYNNYATYYADSVKDRFTISRDDSKNTAYLQMNNLKTEDTAVYYCVRHGNFGNSYISYWAYWGQGTLVTVSSGGGGSGGGGSGGGGSQTVVTQEPSLTVSPGGTVTLTCGSSTGAVTSGNYPNWVQQKPGQAPRGLIGGTKFLAPGTPARFSGSLLGGKAALTLSGVQPEDEAEYYCVLWYSNRWVFGGGTKLTVLGGGGDKTHTCPPCPAPELLGGPSVFLFPPKPKDTLMISRTPEVTCVVVDVSHEDPEVKFNWYVDGVEVHNAKTKPCEEQYGSTYRCVSVLTVLHQDWLNGKEYKCKVSNKALPAPIEKTISKAKGQPREPQVYTLPPSREEMTKNQVSLTCLVKGFYPSDIAVEWESNGQPENNYKTTPPVLDSDGSFFLYSKLTVDKSRWQQGNVFSCSVMHEALHNHYTQKSLSLSPGKGGGGSGGGGSGGGGSGGGGSGGGGSGGGGSDKTHTCPPCPAPELLGGPSVFLFPPKPKDTLMISRTPEVTCVVVDVSHEDPEVKFNWYVDGVEVHNAKTKPCEEQYGSTYRCVSVLTVLHQDWLNGKEYKCKVSNKALPAPIEKTISKAKGQPREPQVYTLPPSREEMTKNQVSLTCLVKGFYPSDIAVEWESNGQPENNYKTTPPVLDSDGSFFLYSKLTVDKSRWQQGNVFSCSVMHEALHNHYTQKSLSLSPGK

SEQ ID NO: 3001 - protein, 1231 aa, Artificial Sequence
  Synthetic
EVQLVESGGGLVQPGRSLRLSCAASGFTFHDYTMHWVRQAPGKCLEWVSGISWNTGTIGYADSVKGRFTISRDNAKNSLYLQMNSLRAEDTALYYCVKDAFYGGDYYYNYGMDVWGHGTTVTVSSGGGGQGGGGQGGGGQEIVLTQSPATLSVSPGERATLSCRASQSVNNNLAWYQQKPGQAPRLLIYGASTRATGIPARFSGSGSGTDFTLTISSLQSDDFAVYYCQQYNNWPLTFGCGTKVEIKSGGGGQQLQLQESGPGLVKPSETLSLTCFVSGGSISNSDYFWGWIRQPPGKCLEWIGTIYYSGRTYYNPSLKSRVTISVDTSKNQFSLMLSSVTAVDTAVYYCARYQYGSFDYWGQGTLVTVSSGGGGQGGGGQGGGGQEIVMTQTPLSLPVTPGEPASISCRSSQSLLHSNGYNYLDWYLQKPGQSPQLLIYLGSNRASGVPDRFSGSGSGTDFTLKISRVEAEDVGVYYCMQALQTPYTFGCGTKVEIRSGGGGQEVQLVESGGGLVQPGGSLKLSCAASGFTFNKYAMNWVRQAPGKGLEWVARIRSKYNNYATYYADSVKDRFTISRDDSKNTAYLQMNNLKTEDTAVYYCVRHGNFGNSYISYWAYWGQGTLVTVSSGGGGQGGGGQGGGGQQTVVTQEPSLTVSPGGTVTLTCGSSTGAVTSGNYPNWVQQKPGQAPRGLIGGTKFLAPGTPARFSGSLLGGKAALTLSGVQPEDEAEYYCVLWYSNRWVFGGGTKLTVLGGGGCPPCPAPELLGGPSVFLFPPKPKDTLMISRTPEVTCVVVDVSHEEPEVKFNWYVDGVEVHNAKTKPCEEQYGSTYRCVSVLTVLHQDWLNGKEYKCKVSNKALPAPIEKTISKAKGQPREPQVYTLPPSREEMTKNQVSLTCLVKGFYPSDIAVEWESNGQPENNYKTTPPVLDSDGSFFLYSKLTVDKSRWQQGNVFSCSVMHEALHNHYTQKSLSLSPGKGGGGQGGGGQGGGGQGGGGQGGGGQGGGGQCPPCPAPELLGGPSVFLFPPKPKDTLMISRTPEVTCVVVDVSHEEPEVKFNWYVDGVEVHNAKTKPCEEQYGSTYRCVSVLTVLHQDWLNGKEYKCKVSNKALPAPIEKTISKAKGQPREPQVYTLPPSREEMTKNQVSLTCLVKGFYPSDIAVEWESNGQPENNYKTTPPVLDSDGSFFLYSKLTVDKSRWQQGNVFSCSVMHEALHNHYTQKSLSLSPGK

SEQ ID NO: 3002 - protein, 1241 aa, Artificial Sequence
  Synthetic
EVQLVESGGGLVQPGRSLRLSCAASGFTFHDYTMHWVRQAPGKCLEWVSGISWNTGTIGYADSVKGRFTISRDNAKNSLYLQMNSLRAEDTALYYCVKDAFYGGDYYYNYGMDVWGHGTTVTVSSGGGGSGGGGSGGGGSEIVLTQSPATLSVSPGERATLSCRASQSVNNNLAWYQQKPGQAPRLLIYGASTRATGIPARFSGSGSGTDFTLTISSLQSDDFAVYYCQQYNNWPLTFGCGTKVEIKSGGGGSQLQLQESGPGLVKPSETLSLTCFVSGGSISNSDYFWGWIRQPPGKCLEWIGTIYYSGRTYYNPSLKSRVTISVDTSKNQFSLMLSSVTAVDTAVYYCARYQYGSFDYWGQGTLVTVSSGGGGSGGGGSGGGGSDIVMTQTPLSLPVTPGEPASISCRSSQSLLHSNGYNYLDWYLQKPGQSPQLLIYLGSNRASGVPDRFSGSGSGTDFTLKISRVEAEDVGVYYCMQALQTPYTFGCGTKVEIRSGGGGSEVQLVESGGGLVQPGGSLKLSCAASGFTFNKYAINWVRQAPGKGLEWVARIRSKYNNYATYYADAVKDRFTISRDDSKNTVYLQMNNLKTEDTAVYYCARAGNFGSSYISYWAYWGQGTLVTVSSGGGGSGGGGSGGGGSQTVVTQEPSLTVSPGGTVTITCGSSTGAVTSGNYPNWVQKKPGQAPRGLIGGTKFLAPGTPARFSGSLSGGKAALTLSGVQPEDEAEYYCVLWYSNRWVFGSGTKLTVLGGGGDKTHTCPPCPAPELLGGPSVFLFPPKPKDTLMISRTPEVTCVVVDVSHEDPEVKFNWYVDGVEVHNAKTKPCEEQYGSTYRCVSVLTVLHQDWLNGKEYKCKVSNKALPAPIEKTISKAKGQPREPQVYTLPPSREEMTKNQVSLTCLVKGFYPSDIAVEWESNGQPENNYKTTPPVLDSDGSFFLYSKLTVDKSRWQQGNVFSCSVMHEALHNHYTQKSLSLSPGKGGGGSGGGGSGGGGSGGGGSGGGGSGGGGSDKTHTCPPCPAPELLGGPSVFLFPPKPKDTLMISRTPEVTCVVVDVSHEDPEVKFNWYVDGVEVHNAKTKPCEEQYGSTYRCVSVLTVLHQDWLNGKEYKCKVSNKALPAPIEKTISKAKGQPREPQVYTLPPSREEMTKNQVSLTCLVKGFYPSDIAVEWESNGQPENNYKTTPPVLDSDGSFFLYSKLTVDKSRWQQGNVFSCSVMHEALHNHYTQKSLSLSPGK

SEQ ID NO: 3003 - protein, 1231 aa, Artificial Sequence
  Synthetic
EVQLVESGGGLVQPGRSLRLSCAASGFTFHDYTMHWVRQAPGKCLEWVSGISWNTGTIGYADSVKGRFTISRDNAKNSLYLQMNSLRAEDTALYYCVKDAFYGGDYYYNYGMDVWGHGTTVTVSSGGGGQGGGGQGGGGQEIVLTQSPATLSVSPGERATLSCRASQSVNNNLAWYQQKPGQAPRLLIYGASTRATGIPARFSGSGSGTDFTLTISSLQSDDFAVYYCQQYNNWPLTFGCGTKVEIKSGGGGQQLQLQESGPGLVKPSETLSLTCFVSGGSISNSDYFWGWIRQPPGKCLEWIGTIYYSGRTYYNPSLKSRVTISVDTSKNQFSLMLSSVTAVDTAVYYCARYQYGSFDYWGQGTLVTVSSGGGGQGGGGQGGGGQEIVMTQTPLSLPVTPGEPASISCRSSQSLLHSNGYNYLDWYLQKPGQSPQLLIYLGSNRASGVPDRFSGSGSGTDFTLKISRVEAEDVGVYYCMQALQTPYTFGCGTKVEIRSGGGGQEVQLVESGGGLVQPGGSLKLSCAASGFTFNKYAINWVRQAPGKGLEWVARIRSKYNNYATYYADAVKDRFTISRDDSKNTVYLQMNNLKTEDTAVYYCARAGNFGSSYISYWAYWGQGTLVTVSSGGGGQGGGGQGGGGQQTVVTQEPSLTVSPGGTVTITCGSSTGAVTSGNYPNWVQKKPGQAPRGLIGGTKFLAPGTPARFSGSLSGGKAALTLSGVQPEDEAEYYCVLWYSNRWVFGSGTKLTVLGGGGCPPCPAPELLGGPSVFLFPPKPKDTLMISRTPEVTCVVVDVSHEEPEVKFNWYVDGVEVHNAKTKPCEEQYGSTYRCVSVLTVLHQDWLNGKEYKCKVSNKALPAPIEKTISKAKGQPREPQVYTLPPSREEMTKNQVSLTCLVKGFYPSDIAVEWESNGQPENNYKTTPPVLDSDGSFFLYSKLTVDKSRWQQGNVFSCSVMHEALHNHYTQKSLSLSPGKGGGGQGGGGQGGGGQGGGGQGGGGQGGGGQCPPCPAPELLGGPSVFLFPPKPKDTLMISRTPEVTCVVVDVSHEEPEVKFNWYVDGVEVHNAKTKPCEEQYGSTYRCVSVLTVLHQDWLNGKEYKCKVSNKALPAPIEKTISKAKGQPREPQVYTLPPSREEMTKNQVSLTCLVKGFYPSDIAVEWESNGQPENNYKTTPPVLDSDGSFFLYSKLTVDKSRWQQGNVFSCSVMHEALHNHYTQKSLSLSPGK

SEQ ID NO: 3004 - protein, 500 aa, Artificial Sequence
  Synthetic
EVQLVESGGGLVQPGRSLRLSCAASGFTFHDYTMHWVRQAPGKCLEWVSGISWNTGTIGYADSVKGRFTISRDNAKNSLYLQMNSLRAEDTALYYCVKDAFYGGDYYYNYGMDVWGHGTTVTVSSGGGGSGGGGSGGGGSEIVLTQSPATLSVSPGERATLSCRASQSVNNNLAWYQQKPGQAPRLLIYGASTRATGIPARFSGSGSGTDFTLTISSLQSDDFAVYYCQQYNNWPLTFGCGTKVEIKSGGGGSQVQLVESGGGVVQPGRSLRLSCAASGFTFSAYGMHWVRQAPGKCLEWVAVILYDGSNKYYADSVKGRFTISRDNSKNTLYLQMNSLRAEDTAVYYCARGSGWLQLGDYFDYWGQGTLVTVSSGGGGSGGGGSGGGGSQSALTQPPSVSGSPGQSITISCTGTSSDVGGYNYVSWYQQHPGKAPKLMIYEVSNRPSGVSNRFSGSKSGNTASLTISGLQAEDEADYYCSSYTSSSTLVFGCGTKLTVL

SEQ ID NO: 3005 - protein, 500 aa, Artificial Sequence
  Synthetic
EVQLVESGGGLVQPGRSLRLSCAASGFTFHDYTMHWVRQAPGKCLEWVSGISWNTGTIGYADSVKGRFTISRDNAKNSLYLQMNSLRAEDTALYYCVKDAFYGGDYYYNYGMDVWGHGTTVTVSSGGGGQGGGGQGGGGQEIVLTQSPATLSVSPGERATLSCRASQSVNNNLAWYQQKPGQAPRLLIYGASTRATGIPARFSGSGSGTDFTLTISSLQSDDFAVYYCQQYNNWPLTFGCGTKVEIKSGGGGQQVQLVESGGGVVQPGRSLRLSCAASGFTFSAYGMHWVRQAPGKCLEWVAVILYDGSNKYYADSVKGRFTISRDNSKNTLYLQMNSLRAEDTAVYYCARGSGWLQLGDYFDYWGQGTLVTVSSGGGGQGGGGQGGGGQQSALTQPPSVSGSPGQSITISCTGTSSDVGGYNYVSWYQQHPGKAPKLMIYEVSNRPSGVSNRFSGSKSGNTASLTISGLQAEDEADYYCSSYTSSSTLVFGCGTKLTVL

SEQ ID NO: 3006 - protein, 755 aa, Artificial Sequence
  Synthetic
EVQLVESGGGLVQPGRSLRLSCAASGFTFHDYTMHWVRQAPGKCLEWVSGISWNTGTIGYADSVKGRFTISRDNAKNSLYLQMNSLRAEDTALYYCVKDAFYGGDYYYNYGMDVWGHGTTVTVSSGGGGSGGGGSGGGGSEIVLTQSPATLSVSPGERATLSCRASQSVNNNLAWYQQKPGQAPRLLIYGASTRATGIPARFSGSGSGTDFTLTISSLQSDDFAVYYCQQYNNWPLTFGCGTKVEIKSGGGGSQVQLVESGGGVVQPGRSLRLSCAASGFTFSAYGMHWVRQAPGKCLEWVAVILYDGSNKYYADSVKGRFTISRDNSKNTLYLQMNSLRAEDTAVYYCARGSGWLQLGDYFDYWGQGTLVTVSSGGGGSGGGGSGGGGSQSALTQPPSVSGSPGQSITISCTGTSSDVGGYNYVSWYQQHPGKAPKLMIYEVSNRPSGVSNRFSGSKSGNTASLTISGLQAEDEADYYCSSYTSSSTLVFGCGTKLTVLSGGGGSEVQLVESGGGLVQPGGSLKLSCAASGFTFNKYAMNWVRQAPGKGLEWVARIRSKYNNYATYYADSVKDRFTISRDDSKNTAYLQMNNLKTEDTAVYYCVRHGNFGNSYISYWAYWGQGTLVTVSSGGGGSGGGGSGGGGSQTVVTQEPSLTVSPGGTVTLTCGSSTGAVTSGNYPNWVQQKPGQAPRGLIGGTKFLAPGTPARFSGSLLGGKAALTLSGVQPEDEAEYYCVLWYSNRWVFGGGTKLTVL

SEQ ID NO: 3007 - protein, 755 aa, Artificial Sequence
  Synthetic
EVQLVESGGGLVQPGRSLRLSCAASGFTFHDYTMHWVRQAPGKCLEWVSGISWNTGTIGYADSVKGRFTISRDNAKNSLYLQMNSLRAEDTALYYCVKDAFYGGDYYYNYGMDVWGHGTTVTVSSGGGGQGGGGQGGGGQEIVLTQSPATLSVSPGERATLSCRASQSVNNNLAWYQQKPGQAPRLLIYGASTRATGIPARFSGSGSGTDFTLTISSLQSDDFAVYYCQQYNNWPLTFGCGTKVEIKSGGGGQQVQLVESGGGVVQPGRSLRLSCAASGFTFSAYGMHWVRQAPGKCLEWVAVILYDGSNKYYADSVKGRFTISRDNSKNTLYLQMNSLRAEDTAVYYCARGSGWLQLGDYFDYWGQGTLVTVSSGGGGQGGGGQGGGGQQSALTQPPSVSGSPGQSITISCTGTSSDVGGYNYVSWYQQHPGKAPKLMIYEVSNRPSGVSNRFSGSKSGNTASLTISGLQAEDEADYYCSSYTSSSTLVFGCGTKLTVLSGGGGQEVQLVESGGGLVQPGGSLKLSCAASGFTFNKYAMNWVRQAPGKGLEWVARIRSKYNNYATYYADSVKDRFTISRDDSKNTAYLQMNNLKTEDTAVYYCVRHGNFGNSYISYWAYWGQGTLVTVSSGGGGQGGGGQGGGGQQTVVTQEPSLTVSPGGTVTLTCGSSTGAVTSGNYPNWVQQKPGQAPRGLIGGTKFLAPGTPARFSGSLLGGKAALTLSGVQPEDEAEYYCVLWYSNRWVFGGGTKLTVL

SEQ ID NO: 3008 - protein, 755 aa, Artificial Sequence
  Synthetic
EVQLVESGGGLVQPGRSLRLSCAASGFTFHDYTMHWVRQAPGKCLEWVSGISWNTGTIGYADSVKGRFTISRDNAKNSLYLQMNSLRAEDTALYYCVKDAFYGGDYYYNYGMDVWGHGTTVTVSSGGGGSGGGGSGGGGSEIVLTQSPATLSVSPGERATLSCRASQSVNNNLAWYQQKPGQAPRLLIYGASTRATGIPARFSGSGSGTDFTLTISSLQSDDFAVYYCQQYNNWPLTFGCGTKVEIKSGGGGSQVQLVESGGGVVQPGRSLRLSCAASGFTFSAYGMHWVRQAPGKCLEWVAVILYDGSNKYYADSVKGRFTISRDNSKNTLYLQMNSLRAEDTAVYYCARGSGWLQLGDYFDYWGQGTLVTVSSGGGGSGGGGSGGGGSQSALTQPPSVSGSPGQSITISCTGTSSDVGGYNYVSWYQQHPGKAPKLMIYEVSNRPSGVSNRFSGSKSGNTASLTISGLQAEDEADYYCSSYTSSSTLVFGCGTKLTVLSGGGGSEVQLVESGGGLVQPGGSLKLSCAASGFTFNKYAINWVRQAPGKGLEWVARIRSKYNNYATYYADAVKDRFTISRDDSKNTVYLQMNNLKTEDTAVYYCARAGNFGSSYISYWAYWGQGTLVTVSSGGGGSGGGGSGGGGSQTVVTQEPSLTVSPGGTVTITCGSSTGAVTSGNYPNWVQKKPGQAPRGLIGGTKFLAPGTPARFSGSLSGGKAALTLSGVQPEDEAEYYCVLWYSNRWVFGSGTKLTVL

SEQ ID NO: 3009 - protein, 755 aa, Artificial Sequence
  Synthetic
EVQLVESGGGLVQPGRSLRLSCAASGFTFHDYTMHWVRQAPGKCLEWVSGISWNTGTIGYADSVKGRFTISRDNAKNSLYLQMNSLRAEDTALYYCVKDAFYGGDYYYNYGMDVWGHGTTVTVSSGGGGQGGGGQGGGGQEIVLTQSPATLSVSPGERATLSCRASQSVNNNLAWYQQKPGQAPRLLIYGASTRATGIPARFSGSGSGTDFTLTISSLQSDDFAVYYCQQYNNWPLTFGCGTKVEIKSGGGGQQVQLVESGGGVVQPGRSLRLSCAASGFTFSAYGMHWVRQAPGKCLEWVAVILYDGSNKYYADSVKGRFTISRDNSKNTLYLQMNSLRAEDTAVYYCARGSGWLQLGDYFDYWGQGTLVTVSSGGGGQGGGGQGGGGQQSALTQPPSVSGSPGQSITISCTGTSSDVGGYNYVSWYQQHPGKAPKLMIYEVSNRPSGVSNRFSGSKSGNTASLTISGLQAEDEADYYCSSYTSSSTLVFGCGTKLTVLSGGGGQEVQLVESGGGLVQPGGSLKLSCAASGFTFNKYAINWVRQAPGKGLEWVARIRSKYNNYATYYADAVKDRFTISRDDSKNTVYLQMNNLKTEDTAVYYCARAGNFGSSYISYWAYWGQGTLVTVSSGGGGQGGGGQGGGGQQTVVTQEPSLTVSPGGTVTITCGSSTGAVTSGNYPNWVQKKPGQAPRGLIGGTKFLAPGTPARFSGSLSGGKAALTLSGVQPEDEAEYYCVLWYSNRWVFGSGTKLTVL

SEQ ID NO: 3010 - protein, 1243 aa, Artificial Sequence
  Synthetic
EVQLVESGGGLVQPGRSLRLSCAASGFTFHDYTMHWVRQAPGKCLEWVSGISWNTGTIGYADSVKGRFTISRDNAKNSLYLQMNSLRAEDTALYYCVKDAFYGGDYYYNYGMDVWGHGTTVTVSSGGGGSGGGGSGGGGSEIVLTQSPATLSVSPGERATLSCRASQSVNNNLAWYQQKPGQAPRLLIYGASTRATGIPARFSGSGSGTDFTLTISSLQSDDFAVYYCQQYNNWPLTFGCGTKVEIKSGGGGSQVQLVESGGGVVQPGRSLRLSCAASGFTFSAYGMHWVRQAPGKCLEWVAVILYDGSNKYYADSVKGRFTISRDNSKNTLYLQMNSLRAEDTAVYYCARGSGWLQLGDYFDYWGQGTLVTVSSGGGGSGGGGSGGGGSQSALTQPPSVSGSPGQSITISCTGTSSDVGGYNYVSWYQQHPGKAPKLMIYEVSNRPSGVSNRFSGSKSGNTASLTISGLQAEDEADYYCSSYTSSSTLVFGCGTKLTVLSGGGGSEVQLVESGGGLVQPGGSLKLSCAASGFTFNKYAMNWVRQAPGKGLEWVARIRSKYNNYATYYADSVKDRFTISRDDSKNTAYLQMNNLKTEDTAVYYCVRHGNFGNSYISYWAYWGQGTLVTVSSGGGGSGGGGSGGGGSQTVVTQEPSLTVSPGGTVTLTCGSSTGAVTSGNYPNWVQQKPGQAPRGLIGGTKFLAPGTPARFSGSLLGGKAALTLSGVQPEDEAEYYCVLWYSNRWVFGGGTKLTVLGGGGDKTHTCPPCPAPELLGGPSVFLFPPKPKDTLMISRTPEVTCVVVDVSHEDPEVKFNWYVDGVEVHNAKTKPCEEQYGSTYRCVSVLTVLHQDWLNGKEYKCKVSNKALPAPIEKTISKAKGQPREPQVYTLPPSREEMTKNQVSLTCLVKGFYPSDIAVEWESNGQPENNYKTTPPVLDSDGSFFLYSKLTVDKSRWQQGNVFSCSVMHEALHNHYTQKSLSLSPGKGGGGSGGGGSGGGGSGGGGSGGGGSGGGGSDKTHTCPPCPAPELLGGPSVFLFPPKPKDTLMISRTPEVTCVVVDVSHEDPEVKFNWYVDGVEVHNAKTKPCEEQYGSTYRCVSVLTVLHQDWLNGKEYKCKVSNKALPAPIEKTISKAKGQPREPQVYTLPPSREEMTKNQVSLTCLVKGFYPSDIAVEWESNGQPENNYKTTPPVLDSDGSFFLYSKLTVDKSRWQQGNVFSCSVMHEALHNHYTQKSLSLSPGK

SEQ ID NO: 3011 - protein, 1233 aa, Artificial Sequence
  Synthetic
EVQLVESGGGLVQPGRSLRLSCAASGFTFHDYTMHWVRQAPGKCLEWVSGISWNTGTIGYADSVKGRFTISRDNAKNSLYLQMNSLRAEDTALYYCVKDAFYGGDYYYNYGMDVWGHGTTVTVSSGGGGQGGGGQGGGGQEIVLTQSPATLSVSPGERATLSCRASQSVNNNLAWYQQKPGQAPRLLIYGASTRATGIPARFSGSGSGTDFTLTISSLQSDDFAVYYCQQYNNWPLTFGCGTKVEIKSGGGGQQVQLVESGGGVVQPGRSLRLSCAASGFTFSAYGMHWVRQAPGKCLEWVAVILYDGSNKYYADSVKGRFTISRDNSKNTLYLQMNSLRAEDTAVYYCARGSGWLQLGDYFDYWGQGTLVTVSSGGGGQGGGGQGGGGQQSALTQPPSVSGSPGQSITISCTGTSSDVGGYNYVSWYQQHPGKAPKLMIYEVSNRPSGVSNRFSGSKSGNTASLTISGLQAEDEADYYCSSYTSSSTLVFGCGTKLTVLSGGGGQEVQLVESGGGLVQPGGSLKLSCAASGFTFNKYAMNWVRQAPGKGLEWVARIRSKYNNYATYYADSVKDRFTISRDDSKNTAYLQMNNLKTEDTAVYYCVRHGNFGNSYISYWAYWGQGTLVTVSSGGGGQGGGGQGGGGQQTVVTQEPSLTVSPGGTVTLTCGSSTGAVTSGNYPNWVQQKPGQAPRGLIGGTKFLAPGTPARFSGSLLGGKAALTLSGVQPEDEAEYYCVLWYSNRWVFGGGTKLTVLGGGGCPPCPAPELLGGPSVFLFPPKPKDTLMISRTPEVTCVVVDVSHEEPEVKFNWYVDGVEVHNAKTKPCEEQYGSTYRCVSVLTVLHQDWLNGKEYKCKVSNKALPAPIEKTISKAKGQPREPQVYTLPPSREEMTKNQVSLTCLVKGFYPSDIAVEWESNGQPENNYKTTPPVLDSDGSFFLYSKLTVDKSRWQQGNVFSCSVMHEALHNHYTQKSLSLSPGKGGGGQGGGGQGGGGQGGGGQGGGGQGGGGQCPPCPAPELLGGPSVFLFPPKPKDTLMISRTPEVTCVVVDVSHEEPEVKFNWYVDGVEVHNAKTKPCEEQYGSTYRCVSVLTVLHQDWLNGKEYKCKVSNKALPAPIEKTISKAKGQPREPQVYTLPPSREEMTKNQVSLTCLVKGFYPSDIAVEWESNGQPENNYKTTPPVLDSDGSFFLYSKLTVDKSRWQQGNVFSCSVMHEALHNHYTQKSLSLSPGK

SEQ ID NO: 3012 - protein, 1243 aa, Artificial Sequence
  Synthetic
EVQLVESGGGLVQPGRSLRLSCAASGFTFHDYTMHWVRQAPGKCLEWVSGISWNTGTIGYADSVKGRFTISRDNAKNSLYLQMNSLRAEDTALYYCVKDAFYGGDYYYNYGMDVWGHGTTVTVSSGGGGSGGGGSGGGGSEIVLTQSPATLSVSPGERATLSCRASQSVNNNLAWYQQKPGQAPRLLIYGASTRATGIPARFSGSGSGTDFTLTISSLQSDDFAVYYCQQYNNWPLTFGCGTKVEIKSGGGGSQVQLVESGGGVVQPGRSLRLSCAASGFTFSAYGMHWVRQAPGKCLEWVAVILYDGSNKYYADSVKGRFTISRDNSKNTLYLQMNSLRAEDTAVYYCARGSGWLQLGDYFDYWGQGTLVTVSSGGGGSGGGGSGGGGSQSALTQPPSVSGSPGQSITISCTGTSSDVGGYNYVSWYQQHPGKAPKLMIYEVSNRPSGVSNRFSGSKSGNTASLTISGLQAEDEADYYCSSYTSSSTLVFGCGTKLTVLSGGGGSEVQLVESGGGLVQPGGSLKLSCAASGFTFNKYAINWVRQAPGKGLEWVARIRSKYNNYATYYADAVKDRFTISRDDSKNTVYLQMNNLKTEDTAVYYCARAGNFGSSYISYWAYWGQGTLVTVSSGGGGSGGGGSGGGGSQTVVTQEPSLTVSPGGTVTITCGSSTGAVTSGNYPNWVQKKPGQAPRGLIGGTKFLAPGTPARFSGSLSGGKAALTLSGVQPEDEAEYYCVLWYSNRWVFGSGTKLTVLGGGGDKTHTCPPCPAPELLGGPSVFLFPPKPKDTLMISRTPEVTCVVVDVSHEDPEVKFNWYVDGVEVHNAKTKPCEEQYGSTYRCVSVLTVLHQDWLNGKEYKCKVSNKALPAPIEKTISKAKGQPREPQVYTLPPSREEMTKNQVSLTCLVKGFYPSDIAVEWESNGQPENNYKTTPPVLDSDGSFFLYSKLTVDKSRWQQGNVFSCSVMHEALHNHYTQKSLSLSPGKGGGGSGGGGSGGGGSGGGGSGGGGSGGGGSDKTHTCPPCPAPELLGGPSVFLFPPKPKDTLMISRTPEVTCVVVDVSHEDPEVKFNWYVDGVEVHNAKTKPCEEQYGSTYRCVSVLTVLHQDWLNGKEYKCKVSNKALPAPIEKTISKAKGQPREPQVYTLPPSREEMTKNQVSLTCLVKGFYPSDIAVEWESNGQPENNYKTTPPVLDSDGSFFLYSKLTVDKSRWQQGNVFSCSVMHEALHNHYTQKSLSLSPGK

SEQ ID NO: 3013 - protein, 1233 aa, Artificial Sequence
  Synthetic
EVQLVESGGGLVQPGRSLRLSCAASGFTFHDYTMHWVRQAPGKCLEWVSGISWNTGTIGYADSVKGRFTISRDNAKNSLYLQMNSLRAEDTALYYCVKDAFYGGDYYYNYGMDVWGHGTTVTVSSGGGGQGGGGQGGGGQEIVLTQSPATLSVSPGERATLSCRASQSVNNNLAWYQQKPGQAPRLLIYGASTRATGIPARFSGSGSGTDFTLTISSLQSDDFAVYYCQQYNNWPLTFGCGTKVEIKSGGGGQQVQLVESGGGVVQPGRSLRLSCAASGFTFSAYGMHWVRQAPGKCLEWVAVILYDGSNKYYADSVKGRFTISRDNSKNTLYLQMNSLRAEDTAVYYCARGSGWLQLGDYFDYWGQGTLVTVSSGGGGQGGGGQGGGGQQSALTQPPSVSGSPGQSITISCTGTSSDVGGYNYVSWYQQHPGKAPKLMIYEVSNRPSGVSNRFSGSKSGNTASLTISGLQAEDEADYYCSSYTSSSTLVFGCGTKLTVLSGGGGQEVQLVESGGGLVQPGGSLKLSCAASGFTFNKYAINWVRQAPGKGLEWVARIRSKYNNYATYYADAVKDRFTISRDDSKNTVYLQMNNLKTEDTAVYYCARAGNFGSSYISYWAYWGQGTLVTVSSGGGGQGGGGQGGGGQQTVVTQEPSLTVSPGGTVTITCGSSTGAVTSGNYPNWVQKKPGQAPRGLIGGTKFLAPGTPARFSGSLSGGKAALTLSGVQPEDEAEYYCVLWYSNRWVFGSGTKLTVLGGGGCPPCPAPELLGGPSVFLFPPKPKDTLMISRTPEVTCVVVDVSHEEPEVKFNWYVDGVEVHNAKTKPCEEQYGSTYRCVSVLTVLHQDWLNGKEYKCKVSNKALPAPIEKTISKAKGQPREPQVYTLPPSREEMTKNQVSLTCLVKGFYPSDIAVEWESNGQPENNYKTTPPVLDSDGSFFLYSKLTVDKSRWQQGNVFSCSVMHEALHNHYTQKSLSLSPGKGGGGQGGGGQGGGGQGGGGQGGGGQGGGGQCPPCPAPELLGGPSVFLFPPKPKDTLMISRTPEVTCVVVDVSHEEPEVKFNWYVDGVEVHNAKTKPCEEQYGSTYRCVSVLTVLHQDWLNGKEYKCKVSNKALPAPIEKTISKAKGQPREPQVYTLPPSREEMTKNQVSLTCLVKGFYPSDIAVEWESNGQPENNYKTTPPVLDSDGSFFLYSKLTVDKSRWQQGNVFSCSVMHEALHNHYTQKSLSLSPGK

SEQ ID NO: 3014 - protein, 495 aa, Artificial Sequence
  Synthetic
EVQLVESGGGLVQPGRSLRLSCAASGFTFHDYTMHWVRQAPGKCLEWVSGISWNSGTIGYADSVRGRFTISRDNAKNSLYLQVNSLRPEDTALYYCAKDGHYGAYYYGMDVWGQGTTVTVSSGGGGSGGGGSGGGGSEIVLTQSPATLSVSPGERATLSCRASQSVNNNLAWYQQKPGQAPRLLIYGASTRATGIPARFSGSGSGTEFTLTISSLQSEDFAVYYCQQYNDWPITFGCGTRLEIKSGGGGSQVQLVQSGGEVKKPGASVKVSCKASGYTFTSYGISWVRQAPGQCLEWMGWMSPYNGNAIYAQKLQGRVTMTRDTSTSTAYMELRSLRSDDTAVYYCARDPDYYGSGSYSDYWGQGTLVTVSSGGGGSGGGGSGGGGSEIVLTQSPATLSVSPGERATLSCRASQSVSSNLAWYQQKPGQAPRLLIYGASSRATGIPARFSGSGSGTEFTLTISSLQSEDFAVYYCQQYHSWPLLTFGCGTKVEIK

SEQ ID NO: 3015 - protein, 495 aa, Artificial Sequence
  Synthetic
EVQLVESGGGLVQPGRSLRLSCAASGFTFHDYTMHWVRQAPGKCLEWVSGISWNSGTIGYADSVRGRFTISRDNAKNSLYLQVNSLRPEDTALYYCAKDGHYGAYYYGMDVWGQGTTVTVSSGGGGQGGGGQGGGGQEIVLTQSPATLSVSPGERATLSCRASQSVNNNLAWYQQKPGQAPRLLIYGASTRATGIPARFSGSGSGTEFTLTISSLQSEDFAVYYCQQYNDWPITFGCGTRLEIKSGGGGQQVQLVQSGGEVKKPGASVKVSCKASGYTFTSYGISWVRQAPGQCLEWMGWMSPYNGNAIYAQKLQGRVTMTRDTSTSTAYMELRSLRSDDTAVYYCARDPDYYGSGSYSDYWGQGTLVTVSSGGGGQGGGGQGGGGQEIVLTQSPATLSVSPGERATLSCRASQSVSSNLAWYQQKPGQAPRLLIYGASSRATGIPARFSGSGSGTEFTLTISSLQSEDFAVYYCQQYHSWPLLTFGCGTKVEIK

SEQ ID NO: 3016 - protein, 750 aa, Artificial Sequence
  Synthetic
EVQLVESGGGLVQPGRSLRLSCAASGFTFHDYTMHWVRQAPGKCLEWVSGISWNSGTIGYADSVRGRFTISRDNAKNSLYLQVNSLRPEDTALYYCAKDGHYGAYYYGMDVWGQGTTVTVSSGGGGSGGGGSGGGGSEIVLTQSPATLSVSPGERATLSCRASQSVNNNLAWYQQKPGQAPRLLIYGASTRATGIPARFSGSGSGTEFTLTISSLQSEDFAVYYCQQYNDWPITFGCGTRLEIKSGGGGSQVQLVQSGGEVKKPGASVKVSCKASGYTFTSYGISWVRQAPGQCLEWMGWMSPYNGNAIYAQKLQGRVTMTRDTSTSTAYMELRSLRSDDTAVYYCARDPDYYGSGSYSDYWGQGTLVTVSSGGGGSGGGGSGGGGSEIVLTQSPATLSVSPGERATLSCRASQSVSSNLAWYQQKPGQAPRLLIYGASSRATGIPARFSGSGSGTEFTLTISSLQSEDFAVYYCQQYHSWPLLTFGCGTKVEIKSGGGGSEVQLVESGGGLVQPGGSLKLSCAASGFTFNKYAMNWVRQAPGKGLEWVARIRSKYNNYATYYADSVKDRFTISRDDSKNTAYLQMNNLKTEDTAVYYCVRHGNFGNSYISYWAYWGQGTLVTVSSGGGGSGGGGSGGGGSQTVVTQEPSLTVSPGGTVTLTCGSSTGAVTSGNYPNWVQQKPGQAPRGLIGGTKFLAPGTPARFSGSLLGGKAALTLSGVQPEDEAEYYCVLWYSNRWVFGGGTKLTVL

SEQ ID NO: 3017 - protein, 750 aa, Artificial Sequence
  Synthetic
EVQLVESGGGLVQPGRSLRLSCAASGFTFHDYTMHWVRQAPGKCLEWVSGISWNSGTIGYADSVRGRFTISRDNAKNSLYLQVNSLRPEDTALYYCAKDGHYGAYYYGMDVWGQGTTVTVSSGGGGQGGGGQGGGGQEIVLTQSPATLSVSPGERATLSCRASQSVNNNLAWYQQKPGQAPRLLIYGASTRATGIPARFSGSGSGTEFTLTISSLQSEDFAVYYCQQYNDWPITFGCGTRLEIKSGGGGQQVQLVQSGGEVKKPGASVKVSCKASGYTFTSYGISWVRQAPGQCLEWMGWMSPYNGNAIYAQKLQGRVTMTRDTSTSTAYMELRSLRSDDTAVYYCARDPDYYGSGSYSDYWGQGTLVTVSSGGGGQGGGGQGGGGQEIVLTQSPATLSVSPGERATLSCRASQSVSSNLAWYQQKPGQAPRLLIYGASSRATGIPARFSGSGSGTEFTLTISSLQSEDFAVYYCQQYHSWPLLTFGCGTKVEIKSGGGGQEVQLVESGGGLVQPGGSLKLSCAASGFTFNKYAMNWVRQAPGKGLEWVARIRSKYNNYATYYADSVKDRFTISRDDSKNTAYLQMNNLKTEDTAVYYCVRHGNFGNSYISYWAYWGQGTLVTVSSGGGGQGGGGQGGGGQQTVVTQEPSLTVSPGGTVTLTCGSSTGAVTSGNYPNWVQQKPGQAPRGLIGGTKFLAPGTPARFSGSLLGGKAALTLSGVQPEDEAEYYCVLWYSNRWVFGGGTKLTVL

SEQ ID NO: 3018 - protein, 750 aa, Artificial Sequence
  Synthetic
EVQLVESGGGLVQPGRSLRLSCAASGFTFHDYTMHWVRQAPGKCLEWVSGISWNSGTIGYADSVRGRFTISRDNAKNSLYLQVNSLRPEDTALYYCAKDGHYGAYYYGMDVWGQGTTVTVSSGGGGSGGGGSGGGGSEIVLTQSPATLSVSPGERATLSCRASQSVNNNLAWYQQKPGQAPRLLIYGASTRATGIPARFSGSGSGTEFTLTISSLQSEDFAVYYCQQYNDWPITFGCGTRLEIKSGGGGSQVQLVQSGGEVKKPGASVKVSCKASGYTFTSYGISWVRQAPGQCLEWMGWMSPYNGNAIYAQKLQGRVTMTRDTSTSTAYMELRSLRSDDTAVYYCARDPDYYGSGSYSDYWGQGTLVTVSSGGGGSGGGGSGGGGSEIVLTQSPATLSVSPGERATLSCRASQSVSSNLAWYQQKPGQAPRLLIYGASSRATGIPARFSGSGSGTEFTLTISSLQSEDFAVYYCQQYHSWPLLTFGCGTKVEIKSGGGGSEVQLVESGGGLVQPGGSLKLSCAASGFTFNKYAINWVRQAPGKGLEWVARIRSKYNNYATYYADAVKDRFTISRDDSKNTVYLQMNNLKTEDTAVYYCARAGNFGSSYISYWAYWGQGTLVTVSSGGGGSGGGGSGGGGSQTVVTQEPSLTVSPGGTVTITCGSSTGAVTSGNYPNWVQKKPGQAPRGLIGGTKFLAPGTPARFSGSLSGGKAALTLSGVQPEDEAEYYCVLWYSNRWVFGSGTKLTVL

SEQ ID NO: 3019 - protein, 750 aa, Artificial Sequence
  Synthetic
EVQLVESGGGLVQPGRSLRLSCAASGFTFHDYTMHWVRQAPGKCLEWVSGISWNSGTIGYADSVRGRFTISRDNAKNSLYLQVNSLRPEDTALYYCAKDGHYGAYYYGMDVWGQGTTVTVSSGGGGQGGGGQGGGGQEIVLTQSPATLSVSPGERATLSCRASQSVNNNLAWYQQKPGQAPRLLIYGASTRATGIPARFSGSGSGTEFTLTISSLQSEDFAVYYCQQYNDWPITFGCGTRLEIKSGGGGQQVQLVQSGGEVKKPGASVKVSCKASGYTFTSYGISWVRQAPGQCLEWMGWMSPYNGNAIYAQKLQGRVTMTRDTSTSTAYMELRSLRSDDTAVYYCARDPDYYGSGSYSDYWGQGTLVTVSSGGGGQGGGGQGGGGQEIVLTQSPATLSVSPGERATLSCRASQSVSSNLAWYQQKPGQAPRLLIYGASSRATGIPARFSGSGSGTEFTLTISSLQSEDFAVYYCQQYHSWPLLTFGCGTKVEIKSGGGGQEVQLVESGGGLVQPGGSLKLSCAASGFTFNKYAINWVRQAPGKGLEWVARIRSKYNNYATYYADAVKDRFTISRDDSKNTVYLQMNNLKTEDTAVYYCARAGNFGSSYISYWAYWGQGTLVTVSSGGGGQGGGGQGGGGQQTVVTQEPSLTVSPGGTVTITCGSSTGAVTSGNYPNWVQKKPGQAPRGLIGGTKFLAPGTPARFSGSLSGGKAALTLSGVQPEDEAEYYCVLWYSNRWVFGSGTKLTVL

SEQ ID NO: 3020 - protein, 1238 aa, Artificial Sequence
  Synthetic
EVQLVESGGGLVQPGRSLRLSCAASGFTFHDYTMHWVRQAPGKCLEWVSGISWNSGTIGYADSVRGRFTISRDNAKNSLYLQVNSLRPEDTALYYCAKDGHYGAYYYGMDVWGQGTTVTVSSGGGGSGGGGSGGGGSEIVLTQSPATLSVSPGERATLSCRASQSVNNNLAWYQQKPGQAPRLLIYGASTRATGIPARFSGSGSGTEFTLTISSLQSEDFAVYYCQQYNDWPITFGCGTRLEIKSGGGGSQVQLVQSGGEVKKPGASVKVSCKASGYTFTSYGISWVRQAPGQCLEWMGWMSPYNGNAIYAQKLQGRVTMTRDTSTSTAYMELRSLRSDDTAVYYCARDPDYYGSGSYSDYWGQGTLVTVSSGGGGSGGGGSGGGGSEIVLTQSPATLSVSPGERATLSCRASQSVSSNLAWYQQKPGQAPRLLIYGASSRATGIPARFSGSGSGTEFTLTISSLQSEDFAVYYCQQYHSWPLLTFGCGTKVEIKSGGGGSEVQLVESGGGLVQPGGSLKLSCAASGFTFNKYAMNWVRQAPGKGLEWVARIRSKYNNYATYYADSVKDRFTISRDDSKNTAYLQMNNLKTEDTAVYYCVRHGNFGNSYISYWAYWGQGTLVTVSSGGGGSGGGGSGGGGSQTVVTQEPSLTVSPGGTVTLTCGSSTGAVTSGNYPNWVQQKPGQAPRGLIGGTKFLAPGTPARFSGSLLGGKAALTLSGVQPEDEAEYYCVLWYSNRWVFGGGTKLTVLGGGGDKTHTCPPCPAPELLGGPSVFLFPPKPKDTLMISRTPEVTCVVVDVSHEDPEVKFNWYVDGVEVHNAKTKPCEEQYGSTYRCVSVLTVLHQDWLNGKEYKCKVSNKALPAPIEKTISKAKGQPREPQVYTLPPSREEMTKNQVSLTCLVKGFYPSDIAVEWESNGQPENNYKTTPPVLDSDGSFFLYSKLTVDKSRWQQGNVFSCSVMHEALHNHYTQKSLSLSPGKGGGGSGGGGSGGGGSGGGGSGGGGSGGGGSDKTHTCPPCPAPELLGGPSVFLFPPKPKDTLMISRTPEVTCVVVDVSHEDPEVKFNWYVDGVEVHNAKTKPCEEQYGSTYRCVSVLTVLHQDWLNGKEYKCKVSNKALPAPIEKTISKAKGQPREPQVYTLPPSREEMTKNQVSLTCLVKGFYPSDIAVEWESNGQPENNYKTTPPVLDSDGSFFLYSKLTVDKSRWQQGNVFSCSVMHEALHNHYTQKSLSLSPGK

SEQ ID NO: 3021 - protein, 1228 aa, Artificial Sequence
  Synthetic
EVQLVESGGGLVQPGRSLRLSCAASGFTFHDYTMHWVRQAPGKCLEWVSGISWNSGTIGYADSVRGRFTISRDNAKNSLYLQVNSLRPEDTALYYCAKDGHYGAYYYGMDVWGQGTTVTVSSGGGGQGGGGQGGGGQEIVLTQSPATLSVSPGERATLSCRASQSVNNNLAWYQQKPGQAPRLLIYGASTRATGIPARFSGSGSGTEFTLTISSLQSEDFAVYYCQQYNDWPITFGCGTRLEIKSGGGGQQVQLVQSGGEVKKPGASVKVSCKASGYTFTSYGISWVRQAPGQCLEWMGWMSPYNGNAIYAQKLQGRVTMTRDTSTSTAYMELRSLRSDDTAVYYCARDPDYYGSGSYSDYWGQGTLVTVSSGGGGQGGGGQGGGGQEIVLTQSPATLSVSPGERATLSCRASQSVSSNLAWYQQKPGQAPRLLIYGASSRATGIPARFSGSGSGTEFTLTISSLQSEDFAVYYCQQYHSWPLLTFGCGTKVEIKSGGGGQEVQLVESGGGLVQPGGSLKLSCAASGFTFNKYAMNWVRQAPGKGLEWVARIRSKYNNYATYYADSVKDRFTISRDDSKNTAYLQMNNLKTEDTAVYYCVRHGNFGNSYISYWAYWGQGTLVTVSSGGGGQGGGGQGGGGQQTVVTQEPSLTVSPGGTVTLTCGSSTGAVTSGNYPNWVQQKPGQAPRGLIGGTKFLAPGTPARFSGSLLGGKAALTLSGVQPEDEAEYYCVLWYSNRWVFGGGTKLTVLGGGGCPPCPAPELLGGPSVFLFPPKPKDTLMISRTPEVTCVVVDVSHEEPEVKFNWYVDGVEVHNAKTKPCEEQYGSTYRCVSVLTVLHQDWLNGKEYKCKVSNKALPAPIEKTISKAKGQPREPQVYTLPPSREEMTKNQVSLTCLVKGFYPSDIAVEWESNGQPENNYKTTPPVLDSDGSFFLYSKLTVDKSRWQQGNVFSCSVMHEALHNHYTQKSLSLSPGKGGGGQGGGGQGGGGQGGGGQGGGGQGGGGQCPPCPAPELLGGPSVFLFPPKPKDTLMISRTPEVTCVVVDVSHEEPEVKFNWYVDGVEVHNAKTKPCEEQYGSTYRCVSVLTVLHQDWLNGKEYKCKVSNKALPAPIEKTISKAKGQPREPQVYTLPPSREEMTKNQVSLTCLVKGFYPSDIAVEWESNGQPENNYKTTPPVLDSDGSFFLYSKLTVDKSRWQQGNVFSCSVMHEALHNHYTQKSLSLSPGK

SEQ ID NO: 3022 - protein, 1238 aa, Artificial Sequence
  Synthetic
EVQLVESGGGLVQPGRSLRLSCAASGFTFHDYTMHWVRQAPGKCLEWVSGISWNSGTIGYADSVRGRFTISRDNAKNSLYLQVNSLRPEDTALYYCAKDGHYGAYYYGMDVWGQGTTVTVSSGGGGSGGGGSGGGGSEIVLTQSPATLSVSPGERATLSCRASQSVNNNLAWYQQKPGQAPRLLIYGASTRATGIPARFSGSGSGTEFTLTISSLQSEDFAVYYCQQYNDWPITFGCGTRLEIKSGGGGSQVQLVQSGGEVKKPGASVKVSCKASGYTFTSYGISWVRQAPGQCLEWMGWMSPYNGNAIYAQKLQGRVTMTRDTSTSTAYMELRSLRSDDTAVYYCARDPDYYGSGSYSDYWGQGTLVTVSSGGGGSGGGGSGGGGSEIVLTQSPATLSVSPGERATLSCRASQSVSSNLAWYQQKPGQAPRLLIYGASSRATGIPARFSGSGSGTEFTLTISSLQSEDFAVYYCQQYHSWPLLTFGCGTKVEIKSGGGGSEVQLVESGGGLVQPGGSLKLSCAASGFTFNKYAINWVRQAPGKGLEWVARIRSKYNNYATYYADAVKDRFTISRDDSKNTVYLQMNNLKTEDTAVYYCARAGNFGSSYISYWAYWGQGTLVTVSSGGGGSGGGGSGGGGSQTVVTQEPSLTVSPGGTVTITCGSSTGAVTSGNYPNWVQKKPGQAPRGLIGGTKFLAPGTPARFSGSLSGGKAALTLSGVQPEDEAEYYCVLWYSNRWVFGSGTKLTVLGGGGDKTHTCPPCPAPELLGGPSVFLFPPKPKDTLMISRTPEVTCVVVDVSHEDPEVKFNWYVDGVEVHNAKTKPCEEQYGSTYRCVSVLTVLHQDWLNGKEYKCKVSNKALPAPIEKTISKAKGQPREPQVYTLPPSREEMTKNQVSLTCLVKGFYPSDIAVEWESNGQPENNYKTTPPVLDSDGSFFLYSKLTVDKSRWQQGNVFSCSVMHEALHNHYTQKSLSLSPGKGGGGSGGGGSGGGGSGGGGSGGGGSGGGGSDKTHTCPPCPAPELLGGPSVFLFPPKPKDTLMISRTPEVTCVVVDVSHEDPEVKFNWYVDGVEVHNAKTKPCEEQYGSTYRCVSVLTVLHQDWLNGKEYKCKVSNKALPAPIEKTISKAKGQPREPQVYTLPPSREEMTKNQVSLTCLVKGFYPSDIAVEWESNGQPENNYKTTPPVLDSDGSFFLYSKLTVDKSRWQQGNVFSCSVMHEALHNHYTQKSLSLSPGK

SEQ ID NO: 3023 - protein, 1228 aa, Artificial Sequence
  Synthetic
EVQLVESGGGLVQPGRSLRLSCAASGFTFHDYTMHWVRQAPGKCLEWVSGISWNSGTIGYADSVRGRFTISRDNAKNSLYLQVNSLRPEDTALYYCAKDGHYGAYYYGMDVWGQGTTVTVSSGGGGQGGGGQGGGGQEIVLTQSPATLSVSPGERATLSCRASQSVNNNLAWYQQKPGQAPRLLIYGASTRATGIPARFSGSGSGTEFTLTISSLQSEDFAVYYCQQYNDWPITFGCGTRLEIKSGGGGQQVQLVQSGGEVKKPGASVKVSCKASGYTFTSYGISWVRQAPGQCLEWMGWMSPYNGNAIYAQKLQGRVTMTRDTSTSTAYMELRSLRSDDTAVYYCARDPDYYGSGSYSDYWGQGTLVTVSSGGGGQGGGGQGGGGQEIVLTQSPATLSVSPGERATLSCRASQSVSSNLAWYQQKPGQAPRLLIYGASSRATGIPARFSGSGSGTEFTLTISSLQSEDFAVYYCQQYHSWPLLTFGCGTKVEIKSGGGGQEVQLVESGGGLVQPGGSLKLSCAASGFTFNKYAINWVRQAPGKGLEWVARIRSKYNNYATYYADAVKDRFTISRDDSKNTVYLQMNNLKTEDTAVYYCARAGNFGSSYISYWAYWGQGTLVTVSSGGGGQGGGGQGGGGQQTVVTQEPSLTVSPGGTVTITCGSSTGAVTSGNYPNWVQKKPGQAPRGLIGGTKFLAPGTPARFSGSLSGGKAALTLSGVQPEDEAEYYCVLWYSNRWVFGSGTKLTVLGGGGCPPCPAPELLGGPSVFLFPPKPKDTLMISRTPEVTCVVVDVSHEEPEVKFNWYVDGVEVHNAKTKPCEEQYGSTYRCVSVLTVLHQDWLNGKEYKCKVSNKALPAPIEKTISKAKGQPREPQVYTLPPSREEMTKNQVSLTCLVKGFYPSDIAVEWESNGQPENNYKTTPPVLDSDGSFFLYSKLTVDKSRWQQGNVFSCSVMHEALHNHYTQKSLSLSPGKGGGGQGGGGQGGGGQGGGGQGGGGQGGGGQCPPCPAPELLGGPSVFLFPPKPKDTLMISRTPEVTCVVVDVSHEEPEVKFNWYVDGVEVHNAKTKPCEEQYGSTYRCVSVLTVLHQDWLNGKEYKCKVSNKALPAPIEKTISKAKGQPREPQVYTLPPSREEMTKNQVSLTCLVKGFYPSDIAVEWESNGQPENNYKTTPPVLDSDGSFFLYSKLTVDKSRWQQGNVFSCSVMHEALHNHYTQKSLSLSPGK

SEQ ID NO: 3024 - protein, 495 aa, Artificial Sequence
  Synthetic
EVQLVESGGGLVQPGRSLRLSCAASGFTFHDYTMHWVRQAPGKCLEWVSGISWNSGTIGYADSVRGRFTISRDNAKNSLYLQVNSLRPEDTALYYCAKDGHYGAYYYGMDVWGQGTTVTVSSGGGGSGGGGSGGGGSEIVLTQSPATLSVSPGERATLSCRASQSVNNNLAWYQQKPGQAPRLLIYGASTRATGIPARFSGSGSGTEFTLTISSLQSEDFAVYYCQQYNDWPITFGCGTRLEIKSGGGGSQVQLVQSGAEVKKPGASVKVSCKASGYTFTSYGISWVRQAPGQCLEWMGWISAYNGNTIYAQKFQGRVTLTRDTSTSTAYMELRSLRSDDTAMYYCARDPDYYGSGSYSDYWGQGTLVTVSSGGGGSGGGGSGGGGSEIVLTQSPATLSVSPGERATLSCRASQSVSSNLAWYQQKPGQAPRLLIYGASSRATGIPARFSGSGSGTEFTLTISSLQSEDFAVYYCQQYHSWPLLTFGCGTKVEIK

SEQ ID NO: 3025 - protein, 495 aa, Artificial Sequence
  Synthetic
EVQLVESGGGLVQPGRSLRLSCAASGFTFHDYTMHWVRQAPGKCLEWVSGISWNSGTIGYADSVRGRFTISRDNAKNSLYLQVNSLRPEDTALYYCAKDGHYGAYYYGMDVWGQGTTVTVSSGGGGQGGGGQGGGGQEIVLTQSPATLSVSPGERATLSCRASQSVNNNLAWYQQKPGQAPRLLIYGASTRATGIPARFSGSGSGTEFTLTISSLQSEDFAVYYCQQYNDWPITFGCGTRLEIKSGGGGQQVQLVQSGAEVKKPGASVKVSCKASGYTFTSYGISWVRQAPGQCLEWMGWISAYNGNTIYAQKFQGRVTLTRDTSTSTAYMELRSLRSDDTAMYYCARDPDYYGSGSYSDYWGQGTLVTVSSGGGGQGGGGQGGGGQEIVLTQSPATLSVSPGERATLSCRASQSVSSNLAWYQQKPGQAPRLLIYGASSRATGIPARFSGSGSGTEFTLTISSLQSEDFAVYYCQQYHSWPLLTFGCGTKVEIK

SEQ ID NO: 3026 - protein, 750 aa, Artificial Sequence
  Synthetic
EVQLVESGGGLVQPGRSLRLSCAASGFTFHDYTMHWVRQAPGKCLEWVSGISWNSGTIGYADSVRGRFTISRDNAKNSLYLQVNSLRPEDTALYYCAKDGHYGAYYYGMDVWGQGTTVTVSSGGGGSGGGGSGGGGSEIVLTQSPATLSVSPGERATLSCRASQSVNNNLAWYQQKPGQAPRLLIYGASTRATGIPARFSGSGSGTEFTLTISSLQSEDFAVYYCQQYNDWPITFGCGTRLEIKSGGGGSQVQLVQSGAEVKKPGASVKVSCKASGYTFTSYGISWVRQAPGQCLEWMGWISAYNGNTIYAQKFQGRVTLTRDTSTSTAYMELRSLRSDDTAMYYCARDPDYYGSGSYSDYWGQGTLVTVSSGGGGSGGGGSGGGGSEIVLTQSPATLSVSPGERATLSCRASQSVSSNLAWYQQKPGQAPRLLIYGASSRATGIPARFSGSGSGTEFTLTISSLQSEDFAVYYCQQYHSWPLLTFGCGTKVEIKSGGGGSEVQLVESGGGLVQPGGSLKLSCAASGFTFNKYAMNWVRQAPGKGLEWVARIRSKYNNYATYYADSVKDRFTISRDDSKNTAYLQMNNLKTEDTAVYYCVRHGNFGNSYISYWAYWGQGTLVTVSSGGGGSGGGGSGGGGSQTVVTQEPSLTVSPGGTVTLTCGSSTGAVTSGNYPNWVQQKPGQAPRGLIGGTKFLAPGTPARFSGSLLGGKAALTLSGVQPEDEAEYYCVLWYSNRWVFGGGTKLTVL

SEQ ID NO: 3027 - protein, 750 aa, Artificial Sequence
  Synthetic
EVQLVESGGGLVQPGRSLRLSCAASGFTFHDYTMHWVRQAPGKCLEWVSGISWNSGTIGYADSVRGRFTISRDNAKNSLYLQVNSLRPEDTALYYCAKDGHYGAYYYGMDVWGQGTTVTVSSGGGGQGGGGQGGGGQEIVLTQSPATLSVSPGERATLSCRASQSVNNNLAWYQQKPGQAPRLLIYGASTRATGIPARFSGSGSGTEFTLTISSLQSEDFAVYYCQQYNDWPITFGCGTRLEIKSGGGGQQVQLVQSGAEVKKPGASVKVSCKASGYTFTSYGISWVRQAPGQCLEWMGWISAYNGNTIYAQKFQGRVTLTRDTSTSTAYMELRSLRSDDTAMYYCARDPDYYGSGSYSDYWGQGTLVTVSSGGGGQGGGGQGGGGQEIVLTQSPATLSVSPGERATLSCRASQSVSSNLAWYQQKPGQAPRLLIYGASSRATGIPARFSGSGSGTEFTLTISSLQSEDFAVYYCQQYHSWPLLTFGCGTKVEIKSGGGGQEVQLVESGGGLVQPGGSLKLSCAASGFTFNKYAMNWVRQAPGKGLEWVARIRSKYNNYATYYADSVKDRFTISRDDSKNTAYLQMNNLKTEDTAVYYCVRHGNFGNSYISYWAYWGQGTLVTVSSGGGGQGGGGQGGGGQQTVVTQEPSLTVSPGGTVTLTCGSSTGAVTSGNYPNWVQQKPGQAPRGLIGGTKFLAPGTPARFSGSLLGGKAALTLSGVQPEDEAEYYCVLWYSNRWVFGGGTKLTVL

SEQ ID NO: 3028 - protein, 750 aa, Artificial Sequence
  Synthetic
EVQLVESGGGLVQPGRSLRLSCAASGFTFHDYTMHWVRQAPGKCLEWVSGISWNSGTIGYADSVRGRFTISRDNAKNSLYLQVNSLRPEDTALYYCAKDGHYGAYYYGMDVWGQGTTVTVSSGGGGSGGGGSGGGGSEIVLTQSPATLSVSPGERATLSCRASQSVNNNLAWYQQKPGQAPRLLIYGASTRATGIPARFSGSGSGTEFTLTISSLQSEDFAVYYCQQYNDWPITFGCGTRLEIKSGGGGSQVQLVQSGAEVKKPGASVKVSCKASGYTFTSYGISWVRQAPGQCLEWMGWISAYNGNTIYAQKFQGRVTLTRDTSTSTAYMELRSLRSDDTAMYYCARDPDYYGSGSYSDYWGQGTLVTVSSGGGGSGGGGSGGGGSEIVLTQSPATLSVSPGERATLSCRASQSVSSNLAWYQQKPGQAPRLLIYGASSRATGIPARFSGSGSGTEFTLTISSLQSEDFAVYYCQQYHSWPLLTFGCGTKVEIKSGGGGSEVQLVESGGGLVQPGGSLKLSCAASGFTFNKYAINWVRQAPGKGLEWVARIRSKYNNYATYYADAVKDRFTISRDDSKNTVYLQMNNLKTEDTAVYYCARAGNFGSSYISYWAYWGQGTLVTVSSGGGGSGGGGSGGGGSQTVVTQEPSLTVSPGGTVTITCGSSTGAVTSGNYPNWVQKKPGQAPRGLIGGTKFLAPGTPARFSGSLSGGKAALTLSGVQPEDEAEYYCVLWYSNRWVFGSGTKLTVL

SEQ ID NO: 3029 - protein, 750 aa, Artificial Sequence
  Synthetic
EVQLVESGGGLVQPGRSLRLSCAASGFTFHDYTMHWVRQAPGKCLEWVSGISWNSGTIGYADSVRGRFTISRDNAKNSLYLQVNSLRPEDTALYYCAKDGHYGAYYYGMDVWGQGTTVTVSSGGGGQGGGGQGGGGQEIVLTQSPATLSVSPGERATLSCRASQSVNNNLAWYQQKPGQAPRLLIYGASTRATGIPARFSGSGSGTEFTLTISSLQSEDFAVYYCQQYNDWPITFGCGTRLEIKSGGGGQQVQLVQSGAEVKKPGASVKVSCKASGYTFTSYGISWVRQAPGQCLEWMGWISAYNGNTIYAQKFQGRVTLTRDTSTSTAYMELRSLRSDDTAMYYCARDPDYYGSGSYSDYWGQGTLVTVSSGGGGQGGGGQGGGGQEIVLTQSPATLSVSPGERATLSCRASQSVSSNLAWYQQKPGQAPRLLIYGASSRATGIPARFSGSGSGTEFTLTISSLQSEDFAVYYCQQYHSWPLLTFGCGTKVEIKSGGGGQEVQLVESGGGLVQPGGSLKLSCAASGFTFNKYAINWVRQAPGKGLEWVARIRSKYNNYATYYADAVKDRFTISRDDSKNTVYLQMNNLKTEDTAVYYCARAGNFGSSYISYWAYWGQGTLVTVSSGGGGQGGGGQGGGGQQTVVTQEPSLTVSPGGTVTITCGSSTGAVTSGNYPNWVQKKPGQAPRGLIGGTKFLAPGTPARFSGSLSGGKAALTLSGVQPEDEAEYYCVLWYSNRWVFGSGTKLTVL

SEQ ID NO: 3030 - protein, 1238 aa, Artificial Sequence
  Synthetic
EVQLVESGGGLVQPGRSLRLSCAASGFTFHDYTMHWVRQAPGKCLEWVSGISWNSGTIGYADSVRGRFTISRDNAKNSLYLQVNSLRPEDTALYYCAKDGHYGAYYYGMDVWGQGTTVTVSSGGGGSGGGGSGGGGSEIVLTQSPATLSVSPGERATLSCRASQSVNNNLAWYQQKPGQAPRLLIYGASTRATGIPARFSGSGSGTEFTLTISSLQSEDFAVYYCQQYNDWPITFGCGTRLEIKSGGGGSQVQLVQSGAEVKKPGASVKVSCKASGYTFTSYGISWVRQAPGQCLEWMGWISAYNGNTIYAQKFQGRVTLTRDTSTSTAYMELRSLRSDDTAMYYCARDPDYYGSGSYSDYWGQGTLVTVSSGGGGSGGGGSGGGGSEIVLTQSPATLSVSPGERATLSCRASQSVSSNLAWYQQKPGQAPRLLIYGASSRATGIPARFSGSGSGTEFTLTISSLQSEDFAVYYCQQYHSWPLLTFGCGTKVEIKSGGGGSEVQLVESGGGLVQPGGSLKLSCAASGFTFNKYAMNWVRQAPGKGLEWVARIRSKYNNYATYYADSVKDRFTISRDDSKNTAYLQMNNLKTEDTAVYYCVRHGNFGNSYISYWAYWGQGTLVTVSSGGGGSGGGGSGGGGSQTVVTQEPSLTVSPGGTVTLTCGSSTGAVTSGNYPNWVQQKPGQAPRGLIGGTKFLAPGTPARFSGSLLGGKAALTLSGVQPEDEAEYYCVLWYSNRWVFGGGTKLTVLGGGGDKTHTCPPCPAPELLGGPSVFLFPPKPKDTLMISRTPEVTCVVVDVSHEDPEVKFNWYVDGVEVHNAKTKPCEEQYGSTYRCVSVLTVLHQDWLNGKEYKCKVSNKALPAPIEKTISKAKGQPREPQVYTLPPSREEMTKNQVSLTCLVKGFYPSDIAVEWESNGQPENNYKTTPPVLDSDGSFFLYSKLTVDKSRWQQGNVFSCSVMHEALHNHYTQKSLSLSPGKGGGGSGGGGSGGGGSGGGGSGGGGSGGGGSDKTHTCPPCPAPELLGGPSVFLFPPKPKDTLMISRTPEVTCVVVDVSHEDPEVKFNWYVDGVEVHNAKTKPCEEQYGSTYRCVSVLTVLHQDWLNGKEYKCKVSNKALPAPIEKTISKAKGQPREPQVYTLPPSREEMTKNQVSLTCLVKGFYPSDIAVEWESNGQPENNYKTTPPVLDSDGSFFLYSKLTVDKSRWQQGNVFSCSVMHEALHNHYTQKSLSLSPGK

SEQ ID NO: 3031 - protein, 1228 aa, Artificial Sequence
  Synthetic
EVQLVESGGGLVQPGRSLRLSCAASGFTFHDYTMHWVRQAPGKCLEWVSGISWNSGTIGYADSVRGRFTISRDNAKNSLYLQVNSLRPEDTALYYCAKDGHYGAYYYGMDVWGQGTTVTVSSGGGGQGGGGQGGGGQEIVLTQSPATLSVSPGERATLSCRASQSVNNNLAWYQQKPGQAPRLLIYGASTRATGIPARFSGSGSGTEFTLTISSLQSEDFAVYYCQQYNDWPITFGCGTRLEIKSGGGGQQVQLVQSGAEVKKPGASVKVSCKASGYTFTSYGISWVRQAPGQCLEWMGWISAYNGNTIYAQKFQGRVTLTRDTSTSTAYMELRSLRSDDTAMYYCARDPDYYGSGSYSDYWGQGTLVTVSSGGGGQGGGGQGGGGQEIVLTQSPATLSVSPGERATLSCRASQSVSSNLAWYQQKPGQAPRLLIYGASSRATGIPARFSGSGSGTEFTLTISSLQSEDFAVYYCQQYHSWPLLTFGCGTKVEIKSGGGGQEVQLVESGGGLVQPGGSLKLSCAASGFTFNKYAMNWVRQAPGKGLEWVARIRSKYNNYATYYADSVKDRFTISRDDSKNTAYLQMNNLKTEDTAVYYCVRHGNFGNSYISYWAYWGQGTLVTVSSGGGGQGGGGQGGGGQQTVVTQEPSLTVSPGGTVTLTCGSSTGAVTSGNYPNWVQQKPGQAPRGLIGGTKFLAPGTPARFSGSLLGGKAALTLSGVQPEDEAEYYCVLWYSNRWVFGGGTKLTVLGGGGCPPCPAPELLGGPSVFLFPPKPKDTLMISRTPEVTCVVVDVSHEEPEVKFNWYVDGVEVHNAKTKPCEEQYGSTYRCVSVLTVLHQDWLNGKEYKCKVSNKALPAPIEKTISKAKGQPREPQVYTLPPSREEMTKNQVSLTCLVKGFYPSDIAVEWESNGQPENNYKTTPPVLDSDGSFFLYSKLTVDKSRWQQGNVFSCSVMHEALHNHYTQKSLSLSPGKGGGGQGGGGQGGGGQGGGGQGGGGQGGGGQCPPCPAPELLGGPSVFLFPPKPKDTLMISRTPEVTCVVVDVSHEEPEVKFNWYVDGVEVHNAKTKPCEEQYGSTYRCVSVLTVLHQDWLNGKEYKCKVSNKALPAPIEKTISKAKGQPREPQVYTLPPSREEMTKNQVSLTCLVKGFYPSDIAVEWESNGQPENNYKTTPPVLDSDGSFFLYSKLTVDKSRWQQGNVFSCSVMHEALHNHYTQKSLSLSPGK

SEQ ID NO: 3032 - protein, 1238 aa, Artificial Sequence
  Synthetic
EVQLVESGGGLVQPGRSLRLSCAASGFTFHDYTMHWVRQAPGKCLEWVSGISWNSGTIGYADSVRGRFTISRDNAKNSLYLQVNSLRPEDTALYYCAKDGHYGAYYYGMDVWGQGTTVTVSSGGGGSGGGGSGGGGSEIVLTQSPATLSVSPGERATLSCRASQSVNNNLAWYQQKPGQAPRLLIYGASTRATGIPARFSGSGSGTEFTLTISSLQSEDFAVYYCQQYNDWPITFGCGTRLEIKSGGGGSQVQLVQSGAEVKKPGASVKVSCKASGYTFTSYGISWVRQAPGQCLEWMGWISAYNGNTIYAQKFQGRVTLTRDTSTSTAYMELRSLRSDDTAMYYCARDPDYYGSGSYSDYWGQGTLVTVSSGGGGSGGGGSGGGGSEIVLTQSPATLSVSPGERATLSCRASQSVSSNLAWYQQKPGQAPRLLIYGASSRATGIPARFSGSGSGTEFTLTISSLQSEDFAVYYCQQYHSWPLLTFGCGTKVEIKSGGGGSEVQLVESGGGLVQPGGSLKLSCAASGFTFNKYAINWVRQAPGKGLEWVARIRSKYNNYATYYADAVKDRFTISRDDSKNTVYLQMNNLKTEDTAVYYCARAGNFGSSYISYWAYWGQGTLVTVSSGGGGSGGGGSGGGGSQTVVTQEPSLTVSPGGTVTITCGSSTGAVTSGNYPNWVQKKPGQAPRGLIGGTKFLAPGTPARFSGSLSGGKAALTLSGVQPEDEAEYYCVLWYSNRWVFGSGTKLTVLGGGGDKTHTCPPCPAPELLGGPSVFLFPPKPKDTLMISRTPEVTCVVVDVSHEDPEVKFNWYVDGVEVHNAKTKPCEEQYGSTYRCVSVLTVLHQDWLNGKEYKCKVSNKALPAPIEKTISKAKGQPREPQVYTLPPSREEMTKNQVSLTCLVKGFYPSDIAVEWESNGQPENNYKTTPPVLDSDGSFFLYSKLTVDKSRWQQGNVFSCSVMHEALHNHYTQKSLSLSPGKGGGGSGGGGSGGGGSGGGGSGGGGSGGGGSDKTHTCPPCPAPELLGGPSVFLFPPKPKDTLMISRTPEVTCVVVDVSHEDPEVKFNWYVDGVEVHNAKTKPCEEQYGSTYRCVSVLTVLHQDWLNGKEYKCKVSNKALPAPIEKTISKAKGQPREPQVYTLPPSREEMTKNQVSLTCLVKGFYPSDIAVEWESNGQPENNYKTTPPVLDSDGSFFLYSKLTVDKSRWQQGNVFSCSVMHEALHNHYTQKSLSLSPGK

SEQ ID NO: 3033 - protein, 1228 aa, Artificial Sequence
  Synthetic
EVQLVESGGGLVQPGRSLRLSCAASGFTFHDYTMHWVRQAPGKCLEWVSGISWNSGTIGYADSVRGRFTISRDNAKNSLYLQVNSLRPEDTALYYCAKDGHYGAYYYGMDVWGQGTTVTVSSGGGGQGGGGQGGGGQEIVLTQSPATLSVSPGERATLSCRASQSVNNNLAWYQQKPGQAPRLLIYGASTRATGIPARFSGSGSGTEFTLTISSLQSEDFAVYYCQQYNDWPITFGCGTRLEIKSGGGGQQVQLVQSGAEVKKPGASVKVSCKASGYTFTSYGISWVRQAPGQCLEWMGWISAYNGNTIYAQKFQGRVTLTRDTSTSTAYMELRSLRSDDTAMYYCARDPDYYGSGSYSDYWGQGTLVTVSSGGGGQGGGGQGGGGQEIVLTQSPATLSVSPGERATLSCRASQSVSSNLAWYQQKPGQAPRLLIYGASSRATGIPARFSGSGSGTEFTLTISSLQSEDFAVYYCQQYHSWPLLTFGCGTKVEIKSGGGGQEVQLVESGGGLVQPGGSLKLSCAASGFTFNKYAINWVRQAPGKGLEWVARIRSKYNNYATYYADAVKDRFTISRDDSKNTVYLQMNNLKTEDTAVYYCARAGNFGSSYISYWAYWGQGTLVTVSSGGGGQGGGGQGGGGQQTVVTQEPSLTVSPGGTVTITCGSSTGAVTSGNYPNWVQKKPGQAPRGLIGGTKFLAPGTPARFSGSLSGGKAALTLSGVQPEDEAEYYCVLWYSNRWVFGSGTKLTVLGGGGCPPCPAPELLGGPSVFLFPPKPKDTLMISRTPEVTCVVVDVSHEEPEVKFNWYVDGVEVHNAKTKPCEEQYGSTYRCVSVLTVLHQDWLNGKEYKCKVSNKALPAPIEKTISKAKGQPREPQVYTLPPSREEMTKNQVSLTCLVKGFYPSDIAVEWESNGQPENNYKTTPPVLDSDGSFFLYSKLTVDKSRWQQGNVFSCSVMHEALHNHYTQKSLSLSPGKGGGGQGGGGQGGGGQGGGGQGGGGQGGGGQCPPCPAPELLGGPSVFLFPPKPKDTLMISRTPEVTCVVVDVSHEEPEVKFNWYVDGVEVHNAKTKPCEEQYGSTYRCVSVLTVLHQDWLNGKEYKCKVSNKALPAPIEKTISKAKGQPREPQVYTLPPSREEMTKNQVSLTCLVKGFYPSDIAVEWESNGQPENNYKTTPPVLDSDGSFFLYSKLTVDKSRWQQGNVFSCSVMHEALHNHYTQKSLSLSPGK

SEQ ID NO: 3034 - protein, 495 aa, Artificial Sequence
  Synthetic
EVQLVESGGGLVQPGRSLRLSCAASGFTFHDYTMHWVRQAPGKCLEWVSGISWNSGTIGYADSVRGRFTISRDNAKNSLYLQVNSLRPEDTALYYCAKDGHYGAYYYGMDVWGQGTTVTVSSGGGGSGGGGSGGGGSEIVLTQSPATLSVSPGERATLSCRASQSVNNNLAWYQQKPGQAPRLLIYGASTRATGIPARFSGSGSGTEFTLTISSLQSEDFAVYYCQQYNDWPITFGCGTRLEIKSGGGGSQVQLVQSGAEVKKPGASVKVSCKASGYTFTTYGISWVRQAPGQCLEWMGWISPKNGVTTYAQKFQGRVTITADESTSTAYMELSRLTSDDTAMYYCARDPDYYGSGSYSDYWGQGTLVTVSSGGGGSGGGGSGGGGSEIVLTQSPATLSVSPGERATLSCRASQSVSSNLAWYQQKPGQAPRLLIYGASSRATGIPARFSGSGSGTEFTLTISSLQSEDFAVYYCQQYHSWPLLTFGCGTKVEIK

SEQ ID NO: 3035 - protein, 495 aa, Artificial Sequence
  Synthetic
EVQLVESGGGLVQPGRSLRLSCAASGFTFHDYTMHWVRQAPGKCLEWVSGISWNSGTIGYADSVRGRFTISRDNAKNSLYLQVNSLRPEDTALYYCAKDGHYGAYYYGMDVWGQGTTVTVSSGGGGQGGGGQGGGGQEIVLTQSPATLSVSPGERATLSCRASQSVNNNLAWYQQKPGQAPRLLIYGASTRATGIPARFSGSGSGTEFTLTISSLQSEDFAVYYCQQYNDWPITFGCGTRLEIKSGGGGQQVQLVQSGAEVKKPGASVKVSCKASGYTFTTYGISWVRQAPGQCLEWMGWISPKNGVTTYAQKFQGRVTITADESTSTAYMELSRLTSDDTAMYYCARDPDYYGSGSYSDYWGQGTLVTVSSGGGGQGGGGQGGGGQEIVLTQSPATLSVSPGERATLSCRASQSVSSNLAWYQQKPGQAPRLLIYGASSRATGIPARFSGSGSGTEFTLTISSLQSEDFAVYYCQQYHSWPLLTFGCGTKVEIK

SEQ ID NO: 3036 - protein, 750 aa, Artificial Sequence
  Synthetic
EVQLVESGGGLVQPGRSLRLSCAASGFTFHDYTMHWVRQAPGKCLEWVSGISWNSGTIGYADSVRGRFTISRDNAKNSLYLQVNSLRPEDTALYYCAKDGHYGAYYYGMDVWGQGTTVTVSSGGGGSGGGGSGGGGSEIVLTQSPATLSVSPGERATLSCRASQSVNNNLAWYQQKPGQAPRLLIYGASTRATGIPARFSGSGSGTEFTLTISSLQSEDFAVYYCQQYNDWPITFGCGTRLEIKSGGGGSQVQLVQSGAEVKKPGASVKVSCKASGYTFTTYGISWVRQAPGQCLEWMGWISPKNGVTTYAQKFQGRVTITADESTSTAYMELSRLTSDDTAMYYCARDPDYYGSGSYSDYWGQGTLVTVSSGGGGSGGGGSGGGGSEIVLTQSPATLSVSPGERATLSCRASQSVSSNLAWYQQKPGQAPRLLIYGASSRATGIPARFSGSGSGTEFTLTISSLQSEDFAVYYCQQYHSWPLLTFGCGTKVEIKSGGGGSEVQLVESGGGLVQPGGSLKLSCAASGFTFNKYAMNWVRQAPGKGLEWVARIRSKYNNYATYYADSVKDRFTISRDDSKNTAYLQMNNLKTEDTAVYYCVRHGNFGNSYISYWAYWGQGTLVTVSSGGGGSGGGGSGGGGSQTVVTQEPSLTVSPGGTVTLTCGSSTGAVTSGNYPNWVQQKPGQAPRGLIGGTKFLAPGTPARFSGSLLGGKAALTLSGVQPEDEAEYYCVLWYSNRWVFGGGTKLTVL

SEQ ID NO: 3037 - protein, 750 aa, Artificial Sequence
  Synthetic
EVQLVESGGGLVQPGRSLRLSCAASGFTFHDYTMHWVRQAPGKCLEWVSGISWNSGTIGYADSVRGRFTISRDNAKNSLYLQVNSLRPEDTALYYCAKDGHYGAYYYGMDVWGQGTTVTVSSGGGGQGGGGQGGGGQEIVLTQSPATLSVSPGERATLSCRASQSVNNNLAWYQQKPGQAPRLLIYGASTRATGIPARFSGSGSGTEFTLTISSLQSEDFAVYYCQQYNDWPITFGCGTRLEIKSGGGGQQVQLVQSGAEVKKPGASVKVSCKASGYTFTTYGISWVRQAPGQCLEWMGWISPKNGVTTYAQKFQGRVTITADESTSTAYMELSRLTSDDTAMYYCARDPDYYGSGSYSDYWGQGTLVTVSSGGGGQGGGGQGGGGQEIVLTQSPATLSVSPGERATLSCRASQSVSSNLAWYQQKPGQAPRLLIYGASSRATGIPARFSGSGSGTEFTLTISSLQSEDFAVYYCQQYHSWPLLTFGCGTKVEIKSGGGGQEVQLVESGGGLVQPGGSLKLSCAASGFTFNKYAMNWVRQAPGKGLEWVARIRSKYNNYATYYADSVKDRFTISRDDSKNTAYLQMNNLKTEDTAVYYCVRHGNFGNSYISYWAYWGQGTLVTVSSGGGGQGGGGQGGGGQQTVVTQEPSLTVSPGGTVTLTCGSSTGAVTSGNYPNWVQQKPGQAPRGLIGGTKFLAPGTPARFSGSLLGGKAALTLSGVQPEDEAEYYCVLWYSNRWVFGGGTKLTVL

SEQ ID NO: 3038 - protein, 750 aa, Artificial Sequence
  Synthetic
EVQLVESGGGLVQPGRSLRLSCAASGFTFHDYTMHWVRQAPGKCLEWVSGISWNSGTIGYADSVRGRFTISRDNAKNSLYLQVNSLRPEDTALYYCAKDGHYGAYYYGMDVWGQGTTVTVSSGGGGSGGGGSGGGGSEIVLTQSPATLSVSPGERATLSCRASQSVNNNLAWYQQKPGQAPRLLIYGASTRATGIPARFSGSGSGTEFTLTISSLQSEDFAVYYCQQYNDWPITFGCGTRLEIKSGGGGSQVQLVQSGAEVKKPGASVKVSCKASGYTFTTYGISWVRQAPGQCLEWMGWISPKNGVTTYAQKFQGRVTITADESTSTAYMELSRLTSDDTAMYYCARDPDYYGSGSYSDYWGQGTLVTVSSGGGGSGGGGSGGGGSEIVLTQSPATLSVSPGERATLSCRASQSVSSNLAWYQQKPGQAPRLLIYGASSRATGIPARFSGSGSGTEFTLTISSLQSEDFAVYYCQQYHSWPLLTFGCGTKVEIKSGGGGSEVQLVESGGGLVQPGGSLKLSCAASGFTFNKYAINWVRQAPGKGLEWVARIRSKYNNYATYYADAVKDRFTISRDDSKNTVYLQMNNLKTEDTAVYYCARAGNFGSSYISYWAYWGQGTLVTVSSGGGGSGGGGSGGGGSQTVVTQEPSLTVSPGGTVTITCGSSTGAVTSGNYPNWVQKKPGQAPRGLIGGTKFLAPGTPARFSGSLSGGKAALTLSGVQPEDEAEYYCVLWYSNRWVFGSGTKLTVL

SEQ ID NO: 3039 - protein, 750 aa, Artificial Sequence
  Synthetic
EVQLVESGGGLVQPGRSLRLSCAASGFTFHDYTMHWVRQAPGKCLEWVSGISWNSGTIGYADSVRGRFTISRDNAKNSLYLQVNSLRPEDTALYYCAKDGHYGAYYYGMDVWGQGTTVTVSSGGGGQGGGGQGGGGQEIVLTQSPATLSVSPGERATLSCRASQSVNNNLAWYQQKPGQAPRLLIYGASTRATGIPARFSGSGSGTEFTLTISSLQSEDFAVYYCQQYNDWPITFGCGTRLEIKSGGGGQQVQLVQSGAEVKKPGASVKVSCKASGYTFTTYGISWVRQAPGQCLEWMGWISPKNGVTTYAQKFQGRVTITADESTSTAYMELSRLTSDDTAMYYCARDPDYYGSGSYSDYWGQGTLVTVSSGGGGQGGGGQGGGGQEIVLTQSPATLSVSPGERATLSCRASQSVSSNLAWYQQKPGQAPRLLIYGASSRATGIPARFSGSGSGTEFTLTISSLQSEDFAVYYCQQYHSWPLLTFGCGTKVEIKSGGGGQEVQLVESGGGLVQPGGSLKLSCAASGFTFNKYAINWVRQAPGKGLEWVARIRSKYNNYATYYADAVKDRFTISRDDSKNTVYLQMNNLKTEDTAVYYCARAGNFGSSYISYWAYWGQGTLVTVSSGGGGQGGGGQGGGGQQTVVTQEPSLTVSPGGTVTITCGSSTGAVTSGNYPNWVQKKPGQAPRGLIGGTKFLAPGTPARFSGSLSGGKAALTLSGVQPEDEAEYYCVLWYSNRWVFGSGTKLTVL

SEQ ID NO: 3040 - protein, 1238 aa, Artificial Sequence
  Synthetic
EVQLVESGGGLVQPGRSLRLSCAASGFTFHDYTMHWVRQAPGKCLEWVSGISWNSGTIGYADSVRGRFTISRDNAKNSLYLQVNSLRPEDTALYYCAKDGHYGAYYYGMDVWGQGTTVTVSSGGGGSGGGGSGGGGSEIVLTQSPATLSVSPGERATLSCRASQSVNNNLAWYQQKPGQAPRLLIYGASTRATGIPARFSGSGSGTEFTLTISSLQSEDFAVYYCQQYNDWPITFGCGTRLEIKSGGGGSQVQLVQSGAEVKKPGASVKVSCKASGYTFTTYGISWVRQAPGQCLEWMGWISPKNGVTTYAQKFQGRVTITADESTSTAYMELSRLTSDDTAMYYCARDPDYYGSGSYSDYWGQGTLVTVSSGGGGSGGGGSGGGGSEIVLTQSPATLSVSPGERATLSCRASQSVSSNLAWYQQKPGQAPRLLIYGASSRATGIPARFSGSGSGTEFTLTISSLQSEDFAVYYCQQYHSWPLLTFGCGTKVEIKSGGGGSEVQLVESGGGLVQPGGSLKLSCAASGFTFNKYAMNWVRQAPGKGLEWVARIRSKYNNYATYYADSVKDRFTISRDDSKNTAYLQMNNLKTEDTAVYYCVRHGNFGNSYISYWAYWGQGTLVTVSSGGGGSGGGGSGGGGSQTVVTQEPSLTVSPGGTVTLTCGSSTGAVTSGNYPNWVQQKPGQAPRGLIGGTKFLAPGTPARFSGSLLGGKAALTLSGVQPEDEAEYYCVLWYSNRWVFGGGTKLTVLGGGGDKTHTCPPCPAPELLGGPSVFLFPPKPKDTLMISRTPEVTCVVVDVSHEDPEVKFNWYVDGVEVHNAKTKPCEEQYGSTYRCVSVLTVLHQDWLNGKEYKCKVSNKALPAPIEKTISKAKGQPREPQVYTLPPSREEMTKNQVSLTCLVKGFYPSDIAVEWESNGQPENNYKTTPPVLDSDGSFFLYSKLTVDKSRWQQGNVFSCSVMHEALHNHYTQKSLSLSPGKGGGGSGGGGSGGGGSGGGGSGGGGSGGGGSDKTHTCPPCPAPELLGGPSVFLFPPKPKDTLMISRTPEVTCVVVDVSHEDPEVKFNWYVDGVEVHNAKTKPCEEQYGSTYRCVSVLTVLHQDWLNGKEYKCKVSNKALPAPIEKTISKAKGQPREPQVYTLPPSREEMTKNQVSLTCLVKGFYPSDIAVEWESNGQPENNYKTTPPVLDSDGSFFLYSKLTVDKSRWQQGNVFSCSVMHEALHNHYTQKSLSLSPGK

SEQ ID NO: 3041 - protein, 1228 aa, Artificial Sequence
  Synthetic
EVQLVESGGGLVQPGRSLRLSCAASGFTFHDYTMHWVRQAPGKCLEWVSGISWNSGTIGYADSVRGRFTISRDNAKNSLYLQVNSLRPEDTALYYCAKDGHYGAYYYGMDVWGQGTTVTVSSGGGGQGGGGQGGGGQEIVLTQSPATLSVSPGERATLSCRASQSVNNNLAWYQQKPGQAPRLLIYGASTRATGIPARFSGSGSGTEFTLTISSLQSEDFAVYYCQQYNDWPITFGCGTRLEIKSGGGGQQVQLVQSGAEVKKPGASVKVSCKASGYTFTTYGISWVRQAPGQCLEWMGWISPKNGVTTYAQKFQGRVTITADESTSTAYMELSRLTSDDTAMYYCARDPDYYGSGSYSDYWGQGTLVTVSSGGGGQGGGGQGGGGQEIVLTQSPATLSVSPGERATLSCRASQSVSSNLAWYQQKPGQAPRLLIYGASSRATGIPARFSGSGSGTEFTLTISSLQSEDFAVYYCQQYHSWPLLTFGCGTKVEIKSGGGGQEVQLVESGGGLVQPGGSLKLSCAASGFTFNKYAMNWVRQAPGKGLEWVARIRSKYNNYATYYADSVKDRFTISRDDSKNTAYLQMNNLKTEDTAVYYCVRHGNFGNSYISYWAYWGQGTLVTVSSGGGGQGGGGQGGGGQQTVVTQEPSLTVSPGGTVTLTCGSSTGAVTSGNYPNWVQQKPGQAPRGLIGGTKFLAPGTPARFSGSLLGGKAALTLSGVQPEDEAEYYCVLWYSNRWVFGGGTKLTVLGGGGCPPCPAPELLGGPSVFLFPPKPKDTLMISRTPEVTCVVVDVSHEEPEVKFNWYVDGVEVHNAKTKPCEEQYGSTYRCVSVLTVLHQDWLNGKEYKCKVSNKALPAPIEKTISKAKGQPREPQVYTLPPSREEMTKNQVSLTCLVKGFYPSDIAVEWESNGQPENNYKTTPPVLDSDGSFFLYSKLTVDKSRWQQGNVFSCSVMHEALHNHYTQKSLSLSPGKGGGGQGGGGQGGGGQGGGGQGGGGQGGGGQCPPCPAPELLGGPSVFLFPPKPKDTLMISRTPEVTCVVVDVSHEEPEVKFNWYVDGVEVHNAKTKPCEEQYGSTYRCVSVLTVLHQDWLNGKEYKCKVSNKALPAPIEKTISKAKGQPREPQVYTLPPSREEMTKNQVSLTCLVKGFYPSDIAVEWESNGQPENNYKTTPPVLDSDGSFFLYSKLTVDKSRWQQGNVFSCSVMHEALHNHYTQKSLSLSPGK

SEQ ID NO: 3042 - protein, 1238 aa, Artificial Sequence
  Synthetic
EVQLVESGGGLVQPGRSLRLSCAASGFTFHDYTMHWVRQAPGKCLEWVSGISWNSGTIGYADSVRGRFTISRDNAKNSLYLQVNSLRPEDTALYYCAKDGHYGAYYYGMDVWGQGTTVTVSSGGGGSGGGGSGGGGSEIVLTQSPATLSVSPGERATLSCRASQSVNNNLAWYQQKPGQAPRLLIYGASTRATGIPARFSGSGSGTEFTLTISSLQSEDFAVYYCQQYNDWPITFGCGTRLEIKSGGGGSQVQLVQSGAEVKKPGASVKVSCKASGYTFTTYGISWVRQAPGQCLEWMGWISPKNGVTTYAQKFQGRVTITADESTSTAYMELSRLTSDDTAMYYCARDPDYYGSGSYSDYWGQGTLVTVSSGGGGSGGGGSGGGGSEIVLTQSPATLSVSPGERATLSCRASQSVSSNLAWYQQKPGQAPRLLIYGASSRATGIPARFSGSGSGTEFTLTISSLQSEDFAVYYCQQYHSWPLLTFGCGTKVEIKSGGGGSEVQLVESGGGLVQPGGSLKLSCAASGFTFNKYAINWVRQAPGKGLEWVARIRSKYNNYATYYADAVKDRFTISRDDSKNTVYLQMNNLKTEDTAVYYCARAGNFGSSYISYWAYWGQGTLVTVSSGGGGSGGGGSGGGGSQTVVTQEPSLTVSPGGTVTITCGSSTGAVTSGNYPNWVQKKPGQAPRGLIGGTKFLAPGTPARFSGSLSGGKAALTLSGVQPEDEAEYYCVLWYSNRWVFGSGTKLTVLGGGGDKTHTCPPCPAPELLGGPSVFLFPPKPKDTLMISRTPEVTCVVVDVSHEDPEVKFNWYVDGVEVHNAKTKPCEEQYGSTYRCVSVLTVLHQDWLNGKEYKCKVSNKALPAPIEKTISKAKGQPREPQVYTLPPSREEMTKNQVSLTCLVKGFYPSDIAVEWESNGQPENNYKTTPPVLDSDGSFFLYSKLTVDKSRWQQGNVFSCSVMHEALHNHYTQKSLSLSPGKGGGGSGGGGSGGGGSGGGGSGGGGSGGGGSDKTHTCPPCPAPELLGGPSVFLFPPKPKDTLMISRTPEVTCVVVDVSHEDPEVKFNWYVDGVEVHNAKTKPCEEQYGSTYRCVSVLTVLHQDWLNGKEYKCKVSNKALPAPIEKTISKAKGQPREPQVYTLPPSREEMTKNQVSLTCLVKGFYPSDIAVEWESNGQPENNYKTTPPVLDSDGSFFLYSKLTVDKSRWQQGNVFSCSVMHEALHNHYTQKSLSLSPGK

SEQ ID NO: 3043 - protein, 1228 aa, Artificial Sequence
  Synthetic
EVQLVESGGGLVQPGRSLRLSCAASGFTFHDYTMHWVRQAPGKCLEWVSGISWNSGTIGYADSVRGRFTISRDNAKNSLYLQVNSLRPEDTALYYCAKDGHYGAYYYGMDVWGQGTTVTVSSGGGGQGGGGQGGGGQEIVLTQSPATLSVSPGERATLSCRASQSVNNNLAWYQQKPGQAPRLLIYGASTRATGIPARFSGSGSGTEFTLTISSLQSEDFAVYYCQQYNDWPITFGCGTRLEIKSGGGGQQVQLVQSGAEVKKPGASVKVSCKASGYTFTTYGISWVRQAPGQCLEWMGWISPKNGVTTYAQKFQGRVTITADESTSTAYMELSRLTSDDTAMYYCARDPDYYGSGSYSDYWGQGTLVTVSSGGGGQGGGGQGGGGQEIVLTQSPATLSVSPGERATLSCRASQSVSSNLAWYQQKPGQAPRLLIYGASSRATGIPARFSGSGSGTEFTLTISSLQSEDFAVYYCQQYHSWPLLTFGCGTKVEIKSGGGGQEVQLVESGGGLVQPGGSLKLSCAASGFTFNKYAINWVRQAPGKGLEWVARIRSKYNNYATYYADAVKDRFTISRDDSKNTVYLQMNNLKTEDTAVYYCARAGNFGSSYISYWAYWGQGTLVTVSSGGGGQGGGGQGGGGQQTVVTQEPSLTVSPGGTVTITCGSSTGAVTSGNYPNWVQKKPGQAPRGLIGGTKFLAPGTPARFSGSLSGGKAALTLSGVQPEDEAEYYCVLWYSNRWVFGSGTKLTVLGGGGCPPCPAPELLGGPSVFLFPPKPKDTLMISRTPEVTCVVVDVSHEEPEVKFNWYVDGVEVHNAKTKPCEEQYGSTYRCVSVLTVLHQDWLNGKEYKCKVSNKALPAPIEKTISKAKGQPREPQVYTLPPSREEMTKNQVSLTCLVKGFYPSDIAVEWESNGQPENNYKTTPPVLDSDGSFFLYSKLTVDKSRWQQGNVFSCSVMHEALHNHYTQKSLSLSPGKGGGGQGGGGQGGGGQGGGGQGGGGQGGGGQCPPCPAPELLGGPSVFLFPPKPKDTLMISRTPEVTCVVVDVSHEEPEVKFNWYVDGVEVHNAKTKPCEEQYGSTYRCVSVLTVLHQDWLNGKEYKCKVSNKALPAPIEKTISKAKGQPREPQVYTLPPSREEMTKNQVSLTCLVKGFYPSDIAVEWESNGQPENNYKTTPPVLDSDGSFFLYSKLTVDKSRWQQGNVFSCSVMHEALHNHYTQKSLSLSPGK

SEQ ID NO: 3044 - protein, 495 aa, Artificial Sequence
  Synthetic
EVQLVESGGGLVQPGRSLRLSCAASGFTFHDYTMHWVRQAPGKCLEWVSGISWNSGTIGYADSVRGRFTISRDNAKNSLYLQVNSLRPEDTALYYCAKDGHYGAYYYGMDVWGQGTTVTVSSGGGGSGGGGSGGGGSEIVLTQSPATLSVSPGERATLSCRASQSVNNNLAWYQQKPGQAPRLLIYGASTRATGIPARFSGSGSGTEFTLTISSLQSEDFAVYYCQQYNDWPITFGCGTRLEIKSGGGGSQVQLVQSGGEVKKPGASVKVSCKASGYTFTSYGISWVRQAPGQCLEWMGWISAYTGETLYAQKLQGRVTMTRDTSTSTAYMELRSLRSDDTAVYYCARDPDYYGSGSYSDYWGQGTLVTVSSGGGGSGGGGSGGGGSEIVLTQSPATLSVSPGERATLSCRASQSVSSNLAWYQQKPGQAPRLLIYGASSRATGIPARFSGSGSGTEFTLTISSLQSEDFAVYYCQQYHSWPLLTFGCGTKVEIK

SEQ ID NO: 3045 - protein, 495 aa, Artificial Sequence
  Synthetic
EVQLVESGGGLVQPGRSLRLSCAASGFTFHDYTMHWVRQAPGKCLEWVSGISWNSGTIGYADSVRGRFTISRDNAKNSLYLQVNSLRPEDTALYYCAKDGHYGAYYYGMDVWGQGTTVTVSSGGGGQGGGGQGGGGQEIVLTQSPATLSVSPGERATLSCRASQSVNNNLAWYQQKPGQAPRLLIYGASTRATGIPARFSGSGSGTEFTLTISSLQSEDFAVYYCQQYNDWPITFGCGTRLEIKSGGGGQQVQLVQSGGEVKKPGASVKVSCKASGYTFTSYGISWVRQAPGQCLEWMGWISAYTGETLYAQKLQGRVTMTRDTSTSTAYMELRSLRSDDTAVYYCARDPDYYGSGSYSDYWGQGTLVTVSSGGGGQGGGGQGGGGQEIVLTQSPATLSVSPGERATLSCRASQSVSSNLAWYQQKPGQAPRLLIYGASSRATGIPARFSGSGSGTEFTLTISSLQSEDFAVYYCQQYHSWPLLTFGCGTKVEIK

SEQ ID NO: 3046 - protein, 750 aa, Artificial Sequence
  Synthetic
EVQLVESGGGLVQPGRSLRLSCAASGFTFHDYTMHWVRQAPGKCLEWVSGISWNSGTIGYADSVRGRFTISRDNAKNSLYLQVNSLRPEDTALYYCAKDGHYGAYYYGMDVWGQGTTVTVSSGGGGSGGGGSGGGGSEIVLTQSPATLSVSPGERATLSCRASQSVNNNLAWYQQKPGQAPRLLIYGASTRATGIPARFSGSGSGTEFTLTISSLQSEDFAVYYCQQYNDWPITFGCGTRLEIKSGGGGSQVQLVQSGGEVKKPGASVKVSCKASGYTFTSYGISWVRQAPGQCLEWMGWISAYTGETLYAQKLQGRVTMTRDTSTSTAYMELRSLRSDDTAVYYCARDPDYYGSGSYSDYWGQGTLVTVSSGGGGSGGGGSGGGGSEIVLTQSPATLSVSPGERATLSCRASQSVSSNLAWYQQKPGQAPRLLIYGASSRATGIPARFSGSGSGTEFTLTISSLQSEDFAVYYCQQYHSWPLLTFGCGTKVEIKSGGGGSEVQLVESGGGLVQPGGSLKLSCAASGFTFNKYAMNWVRQAPGKGLEWVARIRSKYNNYATYYADSVKDRFTISRDDSKNTAYLQMNNLKTEDTAVYYCVRHGNFGNSYISYWAYWGQGTLVTVSSGGGGSGGGGSGGGGSQTVVTQEPSLTVSPGGTVTLTCGSSTGAVTSGNYPNWVQQKPGQAPRGLIGGTKFLAPGTPARFSGSLLGGKAALTLSGVQPEDEAEYYCVLWYSNRWVFGGGTKLTVL

SEQ ID NO: 3047 - protein, 750 aa, Artificial Sequence
  Synthetic
EVQLVESGGGLVQPGRSLRLSCAASGFTFHDYTMHWVRQAPGKCLEWVSGISWNSGTIGYADSVRGRFTISRDNAKNSLYLQVNSLRPEDTALYYCAKDGHYGAYYYGMDVWGQGTTVTVSSGGGGQGGGGQGGGGQEIVLTQSPATLSVSPGERATLSCRASQSVNNNLAWYQQKPGQAPRLLIYGASTRATGIPARFSGSGSGTEFTLTISSLQSEDFAVYYCQQYNDWPITFGCGTRLEIKSGGGGQQVQLVQSGGEVKKPGASVKVSCKASGYTFTSYGISWVRQAPGQCLEWMGWISAYTGETLYAQKLQGRVTMTRDTSTSTAYMELRSLRSDDTAVYYCARDPDYYGSGSYSDYWGQGTLVTVSSGGGGQGGGGQGGGGQEIVLTQSPATLSVSPGERATLSCRASQSVSSNLAWYQQKPGQAPRLLIYGASSRATGIPARFSGSGSGTEFTLTISSLQSEDFAVYYCQQYHSWPLLTFGCGTKVEIKSGGGGQEVQLVESGGGLVQPGGSLKLSCAASGFTFNKYAMNWVRQAPGKGLEWVARIRSKYNNYATYYADSVKDRFTISRDDSKNTAYLQMNNLKTEDTAVYYCVRHGNFGNSYISYWAYWGQGTLVTVSSGGGGQGGGGQGGGGQQTVVTQEPSLTVSPGGTVTLTCGSSTGAVTSGNYPNWVQQKPGQAPRGLIGGTKFLAPGTPARFSGSLLGGKAALTLSGVQPEDEAEYYCVLWYSNRWVFGGGTKLTVL

SEQ ID NO: 3048 - protein, 750 aa, Artificial Sequence
  Synthetic
EVQLVESGGGLVQPGRSLRLSCAASGFTFHDYTMHWVRQAPGKCLEWVSGISWNSGTIGYADSVRGRFTISRDNAKNSLYLQVNSLRPEDTALYYCAKDGHYGAYYYGMDVWGQGTTVTVSSGGGGSGGGGSGGGGSEIVLTQSPATLSVSPGERATLSCRASQSVNNNLAWYQQKPGQAPRLLIYGASTRATGIPARFSGSGSGTEFTLTISSLQSEDFAVYYCQQYNDWPITFGCGTRLEIKSGGGGSQVQLVQSGGEVKKPGASVKVSCKASGYTFTSYGISWVRQAPGQCLEWMGWISAYTGETLYAQKLQGRVTMTRDTSTSTAYMELRSLRSDDTAVYYCARDPDYYGSGSYSDYWGQGTLVTVSSGGGGSGGGGSGGGGSEIVLTQSPATLSVSPGERATLSCRASQSVSSNLAWYQQKPGQAPRLLIYGASSRATGIPARFSGSGSGTEFTLTISSLQSEDFAVYYCQQYHSWPLLTFGCGTKVEIKSGGGGSEVQLVESGGGLVQPGGSLKLSCAASGFTFNKYAINWVRQAPGKGLEWVARIRSKYNNYATYYADAVKDRFTISRDDSKNTVYLQMNNLKTEDTAVYYCARAGNFGSSYISYWAYWGQGTLVTVSSGGGGSGGGGSGGGGSQTVVTQEPSLTVSPGGTVTITCGSSTGAVTSGNYPNWVQKKPGQAPRGLIGGTKFLAPGTPARFSGSLSGGKAALTLSGVQPEDEAEYYCVLWYSNRWVFGSGTKLTVL

SEQ ID NO: 3049 - protein, 750 aa, Artificial Sequence
  Synthetic
EVQLVESGGGLVQPGRSLRLSCAASGFTFHDYTMHWVRQAPGKCLEWVSGISWNSGTIGYADSVRGRFTISRDNAKNSLYLQVNSLRPEDTALYYCAKDGHYGAYYYGMDVWGQGTTVTVSSGGGGQGGGGQGGGGQEIVLTQSPATLSVSPGERATLSCRASQSVNNNLAWYQQKPGQAPRLLIYGASTRATGIPARFSGSGSGTEFTLTISSLQSEDFAVYYCQQYNDWPITFGCGTRLEIKSGGGGQQVQLVQSGGEVKKPGASVKVSCKASGYTFTSYGISWVRQAPGQCLEWMGWISAYTGETLYAQKLQGRVTMTRDTSTSTAYMELRSLRSDDTAVYYCARDPDYYGSGSYSDYWGQGTLVTVSSGGGGQGGGGQGGGGQEIVLTQSPATLSVSPGERATLSCRASQSVSSNLAWYQQKPGQAPRLLIYGASSRATGIPARFSGSGSGTEFTLTISSLQSEDFAVYYCQQYHSWPLLTFGCGTKVEIKSGGGGQEVQLVESGGGLVQPGGSLKLSCAASGFTFNKYAINWVRQAPGKGLEWVARIRSKYNNYATYYADAVKDRFTISRDDSKNTVYLQMNNLKTEDTAVYYCARAGNFGSSYISYWAYWGQGTLVTVSSGGGGQGGGGQGGGGQQTVVTQEPSLTVSPGGTVTITCGSSTGAVTSGNYPNWVQKKPGQAPRGLIGGTKFLAPGTPARFSGSLSGGKAALTLSGVQPEDEAEYYCVLWYSNRWVFGSGTKLTVL

SEQ ID NO: 3050 - protein, 1238 aa, Artificial Sequence
  Synthetic
EVQLVESGGGLVQPGRSLRLSCAASGFTFHDYTMHWVRQAPGKCLEWVSGISWNSGTIGYADSVRGRFTISRDNAKNSLYLQVNSLRPEDTALYYCAKDGHYGAYYYGMDVWGQGTTVTVSSGGGGSGGGGSGGGGSEIVLTQSPATLSVSPGERATLSCRASQSVNNNLAWYQQKPGQAPRLLIYGASTRATGIPARFSGSGSGTEFTLTISSLQSEDFAVYYCQQYNDWPITFGCGTRLEIKSGGGGSQVQLVQSGGEVKKPGASVKVSCKASGYTFTSYGISWVRQAPGQCLEWMGWISAYTGETLYAQKLQGRVTMTRDTSTSTAYMELRSLRSDDTAVYYCARDPDYYGSGSYSDYWGQGTLVTVSSGGGGSGGGGSGGGGSEIVLTQSPATLSVSPGERATLSCRASQSVSSNLAWYQQKPGQAPRLLIYGASSRATGIPARFSGSGSGTEFTLTISSLQSEDFAVYYCQQYHSWPLLTFGCGTKVEIKSGGGGSEVQLVESGGGLVQPGGSLKLSCAASGFTFNKYAMNWVRQAPGKGLEWVARIRSKYNNYATYYADSVKDRFTISRDDSKNTAYLQMNNLKTEDTAVYYCVRHGNFGNSYISYWAYWGQGTLVTVSSGGGGSGGGGSGGGGSQTVVTQEPSLTVSPGGTVTLTCGSSTGAVTSGNYPNWVQQKPGQAPRGLIGGTKFLAPGTPARFSGSLLGGKAALTLSGVQPEDEAEYYCVLWYSNRWVFGGGTKLTVLGGGGDKTHTCPPCPAPELLGGPSVFLFPPKPKDTLMISRTPEVTCVVVDVSHEDPEVKFNWYVDGVEVHNAKTKPCEEQYGSTYRCVSVLTVLHQDWLNGKEYKCKVSNKALPAPIEKTISKAKGQPREPQVYTLPPSREEMTKNQVSLTCLVKGFYPSDIAVEWESNGQPENNYKTTPPVLDSDGSFFLYSKLTVDKSRWQQGNVFSCSVMHEALHNHYTQKSLSLSPGKGGGGSGGGGSGGGGSGGGGSGGGGSGGGGSDKTHTCPPCPAPELLGGPSVFLFPPKPKDTLMISRTPEVTCVVVDVSHEDPEVKFNWYVDGVEVHNAKTKPCEEQYGSTYRCVSVLTVLHQDWLNGKEYKCKVSNKALPAPIEKTISKAKGQPREPQVYTLPPSREEMTKNQVSLTCLVKGFYPSDIAVEWESNGQPENNYKTTPPVLDSDGSFFLYSKLTVDKSRWQQGNVFSCSVMHEALHNHYTQKSLSLSPGK

SEQ ID NO: 3051 - protein, 1228 aa, Artificial Sequence
  Synthetic
EVQLVESGGGLVQPGRSLRLSCAASGFTFHDYTMHWVRQAPGKCLEWVSGISWNSGTIGYADSVRGRFTISRDNAKNSLYLQVNSLRPEDTALYYCAKDGHYGAYYYGMDVWGQGTTVTVSSGGGGQGGGGQGGGGQEIVLTQSPATLSVSPGERATLSCRASQSVNNNLAWYQQKPGQAPRLLIYGASTRATGIPARFSGSGSGTEFTLTISSLQSEDFAVYYCQQYNDWPITFGCGTRLEIKSGGGGQQVQLVQSGGEVKKPGASVKVSCKASGYTFTSYGISWVRQAPGQCLEWMGWISAYTGETLYAQKLQGRVTMTRDTSTSTAYMELRSLRSDDTAVYYCARDPDYYGSGSYSDYWGQGTLVTVSSGGGGQGGGGQGGGGQEIVLTQSPATLSVSPGERATLSCRASQSVSSNLAWYQQKPGQAPRLLIYGASSRATGIPARFSGSGSGTEFTLTISSLQSEDFAVYYCQQYHSWPLLTFGCGTKVEIKSGGGGQEVQLVESGGGLVQPGGSLKLSCAASGFTFNKYAMNWVRQAPGKGLEWVARIRSKYNNYATYYADSVKDRFTISRDDSKNTAYLQMNNLKTEDTAVYYCVRHGNFGNSYISYWAYWGQGTLVTVSSGGGGQGGGGQGGGGQQTVVTQEPSLTVSPGGTVTLTCGSSTGAVTSGNYPNWVQQKPGQAPRGLIGGTKFLAPGTPARFSGSLLGGKAALTLSGVQPEDEAEYYCVLWYSNRWVFGGGTKLTVLGGGGCPPCPAPELLGGPSVFLFPPKPKDTLMISRTPEVTCVVVDVSHEEPEVKFNWYVDGVEVHNAKTKPCEEQYGSTYRCVSVLTVLHQDWLNGKEYKCKVSNKALPAPIEKTISKAKGQPREPQVYTLPPSREEMTKNQVSLTCLVKGFYPSDIAVEWESNGQPENNYKTTPPVLDSDGSFFLYSKLTVDKSRWQQGNVFSCSVMHEALHNHYTQKSLSLSPGKGGGGQGGGGQGGGGQGGGGQGGGGQGGGGQCPPCPAPELLGGPSVFLFPPKPKDTLMISRTPEVTCVVVDVSHEEPEVKFNWYVDGVEVHNAKTKPCEEQYGSTYRCVSVLTVLHQDWLNGKEYKCKVSNKALPAPIEKTISKAKGQPREPQVYTLPPSREEMTKNQVSLTCLVKGFYPSDIAVEWESNGQPENNYKTTPPVLDSDGSFFLYSKLTVDKSRWQQGNVFSCSVMHEALHNHYTQKSLSLSPGK

SEQ ID NO: 3052 - protein, 1238 aa, Artificial Sequence
  Synthetic
EVQLVESGGGLVQPGRSLRLSCAASGFTFHDYTMHWVRQAPGKCLEWVSGISWNSGTIGYADSVRGRFTISRDNAKNSLYLQVNSLRPEDTALYYCAKDGHYGAYYYGMDVWGQGTTVTVSSGGGGSGGGGSGGGGSEIVLTQSPATLSVSPGERATLSCRASQSVNNNLAWYQQKPGQAPRLLIYGASTRATGIPARFSGSGSGTEFTLTISSLQSEDFAVYYCQQYNDWPITFGCGTRLEIKSGGGGSQVQLVQSGGEVKKPGASVKVSCKASGYTFTSYGISWVRQAPGQCLEWMGWISAYTGETLYAQKLQGRVTMTRDTSTSTAYMELRSLRSDDTAVYYCARDPDYYGSGSYSDYWGQGTLVTVSSGGGGSGGGGSGGGGSEIVLTQSPATLSVSPGERATLSCRASQSVSSNLAWYQQKPGQAPRLLIYGASSRATGIPARFSGSGSGTEFTLTISSLQSEDFAVYYCQQYHSWPLLTFGCGTKVEIKSGGGGSEVQLVESGGGLVQPGGSLKLSCAASGFTFNKYAINWVRQAPGKGLEWVARIRSKYNNYATYYADAVKDRFTISRDDSKNTVYLQMNNLKTEDTAVYYCARAGNFGSSYISYWAYWGQGTLVTVSSGGGGSGGGGSGGGGSQTVVTQEPSLTVSPGGTVTITCGSSTGAVTSGNYPNWVQKKPGQAPRGLIGGTKFLAPGTPARFSGSLSGGKAALTLSGVQPEDEAEYYCVLWYSNRWVFGSGTKLTVLGGGGDKTHTCPPCPAPELLGGPSVFLFPPKPKDTLMISRTPEVTCVVVDVSHEDPEVKFNWYVDGVEVHNAKTKPCEEQYGSTYRCVSVLTVLHQDWLNGKEYKCKVSNKALPAPIEKTISKAKGQPREPQVYTLPPSREEMTKNQVSLTCLVKGFYPSDIAVEWESNGQPENNYKTTPPVLDSDGSFFLYSKLTVDKSRWQQGNVFSCSVMHEALHNHYTQKSLSLSPGKGGGGSGGGGSGGGGSGGGGSGGGGSGGGGSDKTHTCPPCPAPELLGGPSVFLFPPKPKDTLMISRTPEVTCVVVDVSHEDPEVKFNWYVDGVEVHNAKTKPCEEQYGSTYRCVSVLTVLHQDWLNGKEYKCKVSNKALPAPIEKTISKAKGQPREPQVYTLPPSREEMTKNQVSLTCLVKGFYPSDIAVEWESNGQPENNYKTTPPVLDSDGSFFLYSKLTVDKSRWQQGNVFSCSVMHEALHNHYTQKSLSLSPGK

SEQ ID NO: 3053 - protein, 1228 aa, Artificial Sequence
  Synthetic
EVQLVESGGGLVQPGRSLRLSCAASGFTFHDYTMHWVRQAPGKCLEWVSGISWNSGTIGYADSVRGRFTISRDNAKNSLYLQVNSLRPEDTALYYCAKDGHYGAYYYGMDVWGQGTTVTVSSGGGGQGGGGQGGGGQEIVLTQSPATLSVSPGERATLSCRASQSVNNNLAWYQQKPGQAPRLLIYGASTRATGIPARFSGSGSGTEFTLTISSLQSEDFAVYYCQQYNDWPITFGCGTRLEIKSGGGGQQVQLVQSGGEVKKPGASVKVSCKASGYTFTSYGISWVRQAPGQCLEWMGWISAYTGETLYAQKLQGRVTMTRDTSTSTAYMELRSLRSDDTAVYYCARDPDYYGSGSYSDYWGQGTLVTVSSGGGGQGGGGQGGGGQEIVLTQSPATLSVSPGERATLSCRASQSVSSNLAWYQQKPGQAPRLLIYGASSRATGIPARFSGSGSGTEFTLTISSLQSEDFAVYYCQQYHSWPLLTFGCGTKVEIKSGGGGQEVQLVESGGGLVQPGGSLKLSCAASGFTFNKYAINWVRQAPGKGLEWVARIRSKYNNYATYYADAVKDRFTISRDDSKNTVYLQMNNLKTEDTAVYYCARAGNFGSSYISYWAYWGQGTLVTVSSGGGGQGGGGQGGGGQQTVVTQEPSLTVSPGGTVTITCGSSTGAVTSGNYPNWVQKKPGQAPRGLIGGTKFLAPGTPARFSGSLSGGKAALTLSGVQPEDEAEYYCVLWYSNRWVFGSGTKLTVLGGGGCPPCPAPELLGGPSVFLFPPKPKDTLMISRTPEVTCVVVDVSHEEPEVKFNWYVDGVEVHNAKTKPCEEQYGSTYRCVSVLTVLHQDWLNGKEYKCKVSNKALPAPIEKTISKAKGQPREPQVYTLPPSREEMTKNQVSLTCLVKGFYPSDIAVEWESNGQPENNYKTTPPVLDSDGSFFLYSKLTVDKSRWQQGNVFSCSVMHEALHNHYTQKSLSLSPGKGGGGQGGGGQGGGGQGGGGQGGGGQGGGGQCPPCPAPELLGGPSVFLFPPKPKDTLMISRTPEVTCVVVDVSHEEPEVKFNWYVDGVEVHNAKTKPCEEQYGSTYRCVSVLTVLHQDWLNGKEYKCKVSNKALPAPIEKTISKAKGQPREPQVYTLPPSREEMTKNQVSLTCLVKGFYPSDIAVEWESNGQPENNYKTTPPVLDSDGSFFLYSKLTVDKSRWQQGNVFSCSVMHEALHNHYTQKSLSLSPGK

SEQ ID NO: 3054 - protein, 495 aa, Artificial Sequence
  Synthetic
EVQLVESGGGLVQPGRSLRLSCAASGFTFHDYTMHWVRQAPGKCLEWVSGISWNSGTIGYADSVRGRFTISRDNAKNSLYLQVNSLRPEDTALYYCAKDGHYGAYYYGMDVWGQGTTVTVSSGGGGSGGGGSGGGGSEIVLTQSPATLSVSPGERATLSCRASQSVNNNLAWYQQKPGQAPRLLIYGASTRATGIPARFSGSGSGTEFTLTISSLQSEDFAVYYCQQYNDWPITFGCGTRLEIKSGGGGSQVQLVQSGGEVKKPGASVKVSCKASGYTFTSYGISWVRQAPGQCLEWMGWISPQTGNAIYAQKLQGRVTMTRDTSTSTAYMELRSLRSDDTAVYYCARDPDYYGSGSYSDYWGQGTLVTVSSGGGGSGGGGSGGGGSEIVLTQSPATLSVSPGERATLSCRASQSVSSNLAWYQQKPGQAPRLLIYGASSRATGIPARFSGSGSGTEFTLTISSLQSEDFAVYYCQQYHSWPLLTFGCGTKVEIK

SEQ ID NO: 3055 - protein, 495 aa, Artificial Sequence
  Synthetic
EVQLVESGGGLVQPGRSLRLSCAASGFTFHDYTMHWVRQAPGKCLEWVSGISWNSGTIGYADSVRGRFTISRDNAKNSLYLQVNSLRPEDTALYYCAKDGHYGAYYYGMDVWGQGTTVTVSSGGGGQGGGGQGGGGQEIVLTQSPATLSVSPGERATLSCRASQSVNNNLAWYQQKPGQAPRLLIYGASTRATGIPARFSGSGSGTEFTLTISSLQSEDFAVYYCQQYNDWPITFGCGTRLEIKSGGGGQQVQLVQSGGEVKKPGASVKVSCKASGYTFTSYGISWVRQAPGQCLEWMGWISPQTGNAIYAQKLQGRVTMTRDTSTSTAYMELRSLRSDDTAVYYCARDPDYYGSGSYSDYWGQGTLVTVSSGGGGQGGGGQGGGGQEIVLTQSPATLSVSPGERATLSCRASQSVSSNLAWYQQKPGQAPRLLIYGASSRATGIPARFSGSGSGTEFTLTISSLQSEDFAVYYCQQYHSWPLLTFGCGTKVEIK

SEQ ID NO: 3056 - protein, 750 aa, Artificial Sequence
  Synthetic
EVQLVESGGGLVQPGRSLRLSCAASGFTFHDYTMHWVRQAPGKCLEWVSGISWNSGTIGYADSVRGRFTISRDNAKNSLYLQVNSLRPEDTALYYCAKDGHYGAYYYGMDVWGQGTTVTVSSGGGGSGGGGSGGGGSEIVLTQSPATLSVSPGERATLSCRASQSVNNNLAWYQQKPGQAPRLLIYGASTRATGIPARFSGSGSGTEFTLTISSLQSEDFAVYYCQQYNDWPITFGCGTRLEIKSGGGGSQVQLVQSGGEVKKPGASVKVSCKASGYTFTSYGISWVRQAPGQCLEWMGWISPQTGNAIYAQKLQGRVTMTRDTSTSTAYMELRSLRSDDTAVYYCARDPDYYGSGSYSDYWGQGTLVTVSSGGGGSGGGGSGGGGSEIVLTQSPATLSVSPGERATLSCRASQSVSSNLAWYQQKPGQAPRLLIYGASSRATGIPARFSGSGSGTEFTLTISSLQSEDFAVYYCQQYHSWPLLTFGCGTKVEIKSGGGGSEVQLVESGGGLVQPGGSLKLSCAASGFTFNKYAMNWVRQAPGKGLEWVARIRSKYNNYATYYADSVKDRFTISRDDSKNTAYLQMNNLKTEDTAVYYCVRHGNFGNSYISYWAYWGQGTLVTVSSGGGGSGGGGSGGGGSQTVVTQEPSLTVSPGGTVTLTCGSSTGAVTSGNYPNWVQQKPGQAPRGLIGGTKFLAPGTPARFSGSLLGGKAALTLSGVQPEDEAEYYCVLWYSNRWVFGGGTKLTVL

SEQ ID NO: 3057 - protein, 750 aa, Artificial Sequence
  Synthetic
EVQLVESGGGLVQPGRSLRLSCAASGFTFHDYTMHWVRQAPGKCLEWVSGISWNSGTIGYADSVRGRFTISRDNAKNSLYLQVNSLRPEDTALYYCAKDGHYGAYYYGMDVWGQGTTVTVSSGGGGQGGGGQGGGGQEIVLTQSPATLSVSPGERATLSCRASQSVNNNLAWYQQKPGQAPRLLIYGASTRATGIPARFSGSGSGTEFTLTISSLQSEDFAVYYCQQYNDWPITFGCGTRLEIKSGGGGQQVQLVQSGGEVKKPGASVKVSCKASGYTFTSYGISWVRQAPGQCLEWMGWISPQTGNAIYAQKLQGRVTMTRDTSTSTAYMELRSLRSDDTAVYYCARDPDYYGSGSYSDYWGQGTLVTVSSGGGGQGGGGQGGGGQEIVLTQSPATLSVSPGERATLSCRASQSVSSNLAWYQQKPGQAPRLLIYGASSRATGIPARFSGSGSGTEFTLTISSLQSEDFAVYYCQQYHSWPLLTFGCGTKVEIKSGGGGQEVQLVESGGGLVQPGGSLKLSCAASGFTFNKYAMNWVRQAPGKGLEWVARIRSKYNNYATYYADSVKDRFTISRDDSKNTAYLQMNNLKTEDTAVYYCVRHGNFGNSYISYWAYWGQGTLVTVSSGGGGQGGGGQGGGGQQTVVTQEPSLTVSPGGTVTLTCGSSTGAVTSGNYPNWVQQKPGQAPRGLIGGTKFLAPGTPARFSGSLLGGKAALTLSGVQPEDEAEYYCVLWYSNRWVFGGGTKLTVL

SEQ ID NO: 3058 - protein, 750 aa, Artificial Sequence
  Synthetic
EVQLVESGGGLVQPGRSLRLSCAASGFTFHDYTMHWVRQAPGKCLEWVSGISWNSGTIGYADSVRGRFTISRDNAKNSLYLQVNSLRPEDTALYYCAKDGHYGAYYYGMDVWGQGTTVTVSSGGGGSGGGGSGGGGSEIVLTQSPATLSVSPGERATLSCRASQSVNNNLAWYQQKPGQAPRLLIYGASTRATGIPARFSGSGSGTEFTLTISSLQSEDFAVYYCQQYNDWPITFGCGTRLEIKSGGGGSQVQLVQSGGEVKKPGASVKVSCKASGYTFTSYGISWVRQAPGQCLEWMGWISPQTGNAIYAQKLQGRVTMTRDTSTSTAYMELRSLRSDDTAVYYCARDPDYYGSGSYSDYWGQGTLVTVSSGGGGSGGGGSGGGGSEIVLTQSPATLSVSPGERATLSCRASQSVSSNLAWYQQKPGQAPRLLIYGASSRATGIPARFSGSGSGTEFTLTISSLQSEDFAVYYCQQYHSWPLLTFGCGTKVEIKSGGGGSEVQLVESGGGLVQPGGSLKLSCAASGFTFNKYAINWVRQAPGKGLEWVARIRSKYNNYATYYADAVKDRFTISRDDSKNTVYLQMNNLKTEDTAVYYCARAGNFGSSYISYWAYWGQGTLVTVSSGGGGSGGGGSGGGGSQTVVTQEPSLTVSPGGTVTITCGSSTGAVTSGNYPNWVQKKPGQAPRGLIGGTKFLAPGTPARFSGSLSGGKAALTLSGVQPEDEAEYYCVLWYSNRWVFGSGTKLTVL

SEQ ID NO: 3059 - protein, 750 aa, Artificial Sequence
  Synthetic
EVQLVESGGGLVQPGRSLRLSCAASGFTFHDYTMHWVRQAPGKCLEWVSGISWNSGTIGYADSVRGRFTISRDNAKNSLYLQVNSLRPEDTALYYCAKDGHYGAYYYGMDVWGQGTTVTVSSGGGGQGGGGQGGGGQEIVLTQSPATLSVSPGERATLSCRASQSVNNNLAWYQQKPGQAPRLLIYGASTRATGIPARFSGSGSGTEFTLTISSLQSEDFAVYYCQQYNDWPITFGCGTRLEIKSGGGGQQVQLVQSGGEVKKPGASVKVSCKASGYTFTSYGISWVRQAPGQCLEWMGWISPQTGNAIYAQKLQGRVTMTRDTSTSTAYMELRSLRSDDTAVYYCARDPDYYGSGSYSDYWGQGTLVTVSSGGGGQGGGGQGGGGQEIVLTQSPATLSVSPGERATLSCRASQSVSSNLAWYQQKPGQAPRLLIYGASSRATGIPARFSGSGSGTEFTLTISSLQSEDFAVYYCQQYHSWPLLTFGCGTKVEIKSGGGGQEVQLVESGGGLVQPGGSLKLSCAASGFTFNKYAINWVRQAPGKGLEWVARIRSKYNNYATYYADAVKDRFTISRDDSKNTVYLQMNNLKTEDTAVYYCARAGNFGSSYISYWAYWGQGTLVTVSSGGGGQGGGGQGGGGQQTVVTQEPSLTVSPGGTVTITCGSSTGAVTSGNYPNWVQKKPGQAPRGLIGGTKFLAPGTPARFSGSLSGGKAALTLSGVQPEDEAEYYCVLWYSNRWVFGSGTKLTVL

SEQ ID NO: 3060 - protein, 1238 aa, Artificial Sequence
  Synthetic
EVQLVESGGGLVQPGRSLRLSCAASGFTFHDYTMHWVRQAPGKCLEWVSGISWNSGTIGYADSVRGRFTISRDNAKNSLYLQVNSLRPEDTALYYCAKDGHYGAYYYGMDVWGQGTTVTVSSGGGGSGGGGSGGGGSEIVLTQSPATLSVSPGERATLSCRASQSVNNNLAWYQQKPGQAPRLLIYGASTRATGIPARFSGSGSGTEFTLTISSLQSEDFAVYYCQQYNDWPITFGCGTRLEIKSGGGGSQVQLVQSGGEVKKPGASVKVSCKASGYTFTSYGISWVRQAPGQCLEWMGWISPQTGNAIYAQKLQGRVTMTRDTSTSTAYMELRSLRSDDTAVYYCARDPDYYGSGSYSDYWGQGTLVTVSSGGGGSGGGGSGGGGSEIVLTQSPATLSVSPGERATLSCRASQSVSSNLAWYQQKPGQAPRLLIYGASSRATGIPARFSGSGSGTEFTLTISSLQSEDFAVYYCQQYHSWPLLTFGCGTKVEIKSGGGGSEVQLVESGGGLVQPGGSLKLSCAASGFTFNKYAMNWVRQAPGKGLEWVARIRSKYNNYATYYADSVKDRFTISRDDSKNTAYLQMNNLKTEDTAVYYCVRHGNFGNSYISYWAYWGQGTLVTVSSGGGGSGGGGSGGGGSQTVVTQEPSLTVSPGGTVTLTCGSSTGAVTSGNYPNWVQQKPGQAPRGLIGGTKFLAPGTPARFSGSLLGGKAALTLSGVQPEDEAEYYCVLWYSNRWVFGGGTKLTVLGGGGDKTHTCPPCPAPELLGGPSVFLFPPKPKDTLMISRTPEVTCVVVDVSHEDPEVKFNWYVDGVEVHNAKTKPCEEQYGSTYRCVSVLTVLHQDWLNGKEYKCKVSNKALPAPIEKTISKAKGQPREPQVYTLPPSREEMTKNQVSLTCLVKGFYPSDIAVEWESNGQPENNYKTTPPVLDSDGSFFLYSKLTVDKSRWQQGNVFSCSVMHEALHNHYTQKSLSLSPGKGGGGSGGGGSGGGGSGGGGSGGGGSGGGGSDKTHTCPPCPAPELLGGPSVFLFPPKPKDTLMISRTPEVTCVVVDVSHEDPEVKFNWYVDGVEVHNAKTKPCEEQYGSTYRCVSVLTVLHQDWLNGKEYKCKVSNKALPAPIEKTISKAKGQPREPQVYTLPPSREEMTKNQVSLTCLVKGFYPSDIAVEWESNGQPENNYKTTPPVLDSDGSFFLYSKLTVDKSRWQQGNVFSCSVMHEALHNHYTQKSLSLSPGK

SEQ ID NO: 3061 - protein, 1228 aa, Artificial Sequence
  Synthetic
EVQLVESGGGLVQPGRSLRLSCAASGFTFHDYTMHWVRQAPGKCLEWVSGISWNSGTIGYADSVRGRFTISRDNAKNSLYLQVNSLRPEDTALYYCAKDGHYGAYYYGMDVWGQGTTVTVSSGGGGQGGGGQGGGGQEIVLTQSPATLSVSPGERATLSCRASQSVNNNLAWYQQKPGQAPRLLIYGASTRATGIPARFSGSGSGTEFTLTISSLQSEDFAVYYCQQYNDWPITFGCGTRLEIKSGGGGQQVQLVQSGGEVKKPGASVKVSCKASGYTFTSYGISWVRQAPGQCLEWMGWISPQTGNAIYAQKLQGRVTMTRDTSTSTAYMELRSLRSDDTAVYYCARDPDYYGSGSYSDYWGQGTLVTVSSGGGGQGGGGQGGGGQEIVLTQSPATLSVSPGERATLSCRASQSVSSNLAWYQQKPGQAPRLLIYGASSRATGIPARFSGSGSGTEFTLTISSLQSEDFAVYYCQQYHSWPLLTFGCGTKVEIKSGGGGQEVQLVESGGGLVQPGGSLKLSCAASGFTFNKYAMNWVRQAPGKGLEWVARIRSKYNNYATYYADSVKDRFTISRDDSKNTAYLQMNNLKTEDTAVYYCVRHGNFGNSYISYWAYWGQGTLVTVSSGGGGQGGGGQGGGGQQTVVTQEPSLTVSPGGTVTLTCGSSTGAVTSGNYPNWVQQKPGQAPRGLIGGTKFLAPGTPARFSGSLLGGKAALTLSGVQPEDEAEYYCVLWYSNRWVFGGGTKLTVLGGGGCPPCPAPELLGGPSVFLFPPKPKDTLMISRTPEVTCVVVDVSHEEPEVKFNWYVDGVEVHNAKTKPCEEQYGSTYRCVSVLTVLHQDWLNGKEYKCKVSNKALPAPIEKTISKAKGQPREPQVYTLPPSREEMTKNQVSLTCLVKGFYPSDIAVEWESNGQPENNYKTTPPVLDSDGSFFLYSKLTVDKSRWQQGNVFSCSVMHEALHNHYTQKSLSLSPGKGGGGQGGGGQGGGGQGGGGQGGGGQGGGGQCPPCPAPELLGGPSVFLFPPKPKDTLMISRTPEVTCVVVDVSHEEPEVKFNWYVDGVEVHNAKTKPCEEQYGSTYRCVSVLTVLHQDWLNGKEYKCKVSNKALPAPIEKTISKAKGQPREPQVYTLPPSREEMTKNQVSLTCLVKGFYPSDIAVEWESNGQPENNYKTTPPVLDSDGSFFLYSKLTVDKSRWQQGNVFSCSVMHEALHNHYTQKSLSLSPGK

SEQ ID NO: 3062 - protein, 1238 aa, Artificial Sequence
  Synthetic
EVQLVESGGGLVQPGRSLRLSCAASGFTFHDYTMHWVRQAPGKCLEWVSGISWNSGTIGYADSVRGRFTISRDNAKNSLYLQVNSLRPEDTALYYCAKDGHYGAYYYGMDVWGQGTTVTVSSGGGGSGGGGSGGGGSEIVLTQSPATLSVSPGERATLSCRASQSVNNNLAWYQQKPGQAPRLLIYGASTRATGIPARFSGSGSGTEFTLTISSLQSEDFAVYYCQQYNDWPITFGCGTRLEIKSGGGGSQVQLVQSGGEVKKPGASVKVSCKASGYTFTSYGISWVRQAPGQCLEWMGWISPQTGNAIYAQKLQGRVTMTRDTSTSTAYMELRSLRSDDTAVYYCARDPDYYGSGSYSDYWGQGTLVTVSSGGGGSGGGGSGGGGSEIVLTQSPATLSVSPGERATLSCRASQSVSSNLAWYQQKPGQAPRLLIYGASSRATGIPARFSGSGSGTEFTLTISSLQSEDFAVYYCQQYHSWPLLTFGCGTKVEIKSGGGGSEVQLVESGGGLVQPGGSLKLSCAASGFTFNKYAINWVRQAPGKGLEWVARIRSKYNNYATYYADAVKDRFTISRDDSKNTVYLQMNNLKTEDTAVYYCARAGNFGSSYISYWAYWGQGTLVTVSSGGGGSGGGGSGGGGSQTVVTQEPSLTVSPGGTVTITCGSSTGAVTSGNYPNWVQKKPGQAPRGLIGGTKFLAPGTPARFSGSLSGGKAALTLSGVQPEDEAEYYCVLWYSNRWVFGSGTKLTVLGGGGDKTHTCPPCPAPELLGGPSVFLFPPKPKDTLMISRTPEVTCVVVDVSHEDPEVKFNWYVDGVEVHNAKTKPCEEQYGSTYRCVSVLTVLHQDWLNGKEYKCKVSNKALPAPIEKTISKAKGQPREPQVYTLPPSREEMTKNQVSLTCLVKGFYPSDIAVEWESNGQPENNYKTTPPVLDSDGSFFLYSKLTVDKSRWQQGNVFSCSVMHEALHNHYTQKSLSLSPGKGGGGSGGGGSGGGGSGGGGSGGGGSGGGGSDKTHTCPPCPAPELLGGPSVFLFPPKPKDTLMISRTPEVTCVVVDVSHEDPEVKFNWYVDGVEVHNAKTKPCEEQYGSTYRCVSVLTVLHQDWLNGKEYKCKVSNKALPAPIEKTISKAKGQPREPQVYTLPPSREEMTKNQVSLTCLVKGFYPSDIAVEWESNGQPENNYKTTPPVLDSDGSFFLYSKLTVDKSRWQQGNVFSCSVMHEALHNHYTQKSLSLSPGK

SEQ ID NO: 3063 - protein, 1228 aa, Artificial Sequence
  Synthetic
EVQLVESGGGLVQPGRSLRLSCAASGFTFHDYTMHWVRQAPGKCLEWVSGISWNSGTIGYADSVRGRFTISRDNAKNSLYLQVNSLRPEDTALYYCAKDGHYGAYYYGMDVWGQGTTVTVSSGGGGQGGGGQGGGGQEIVLTQSPATLSVSPGERATLSCRASQSVNNNLAWYQQKPGQAPRLLIYGASTRATGIPARFSGSGSGTEFTLTISSLQSEDFAVYYCQQYNDWPITFGCGTRLEIKSGGGGQQVQLVQSGGEVKKPGASVKVSCKASGYTFTSYGISWVRQAPGQCLEWMGWISPQTGNAIYAQKLQGRVTMTRDTSTSTAYMELRSLRSDDTAVYYCARDPDYYGSGSYSDYWGQGTLVTVSSGGGGQGGGGQGGGGQEIVLTQSPATLSVSPGERATLSCRASQSVSSNLAWYQQKPGQAPRLLIYGASSRATGIPARFSGSGSGTEFTLTISSLQSEDFAVYYCQQYHSWPLLTFGCGTKVEIKSGGGGQEVQLVESGGGLVQPGGSLKLSCAASGFTFNKYAINWVRQAPGKGLEWVARIRSKYNNYATYYADAVKDRFTISRDDSKNTVYLQMNNLKTEDTAVYYCARAGNFGSSYISYWAYWGQGTLVTVSSGGGGQGGGGQGGGGQQTVVTQEPSLTVSPGGTVTITCGSSTGAVTSGNYPNWVQKKPGQAPRGLIGGTKFLAPGTPARFSGSLSGGKAALTLSGVQPEDEAEYYCVLWYSNRWVFGSGTKLTVLGGGGCPPCPAPELLGGPSVFLFPPKPKDTLMISRTPEVTCVVVDVSHEEPEVKFNWYVDGVEVHNAKTKPCEEQYGSTYRCVSVLTVLHQDWLNGKEYKCKVSNKALPAPIEKTISKAKGQPREPQVYTLPPSREEMTKNQVSLTCLVKGFYPSDIAVEWESNGQPENNYKTTPPVLDSDGSFFLYSKLTVDKSRWQQGNVFSCSVMHEALHNHYTQKSLSLSPGKGGGGQGGGGQGGGGQGGGGQGGGGQGGGGQCPPCPAPELLGGPSVFLFPPKPKDTLMISRTPEVTCVVVDVSHEEPEVKFNWYVDGVEVHNAKTKPCEEQYGSTYRCVSVLTVLHQDWLNGKEYKCKVSNKALPAPIEKTISKAKGQPREPQVYTLPPSREEMTKNQVSLTCLVKGFYPSDIAVEWESNGQPENNYKTTPPVLDSDGSFFLYSKLTVDKSRWQQGNVFSCSVMHEALHNHYTQKSLSLSPGK

SEQ ID NO: 3064 - protein, 495 aa, Artificial Sequence
  Synthetic
EVQLVESGGGLVQPGRSLRLSCAASGFTFHDYTMHWVRQAPGKCLEWVSGISWNSGTIGYADSVRGRFTISRDNAKNSLYLQVNSLRPEDTALYYCAKDGHYGAYYYGMDVWGQGTTVTVSSGGGGSGGGGSGGGGSEIVLTQSPATLSVSPGERATLSCRASQSVNNNLAWYQQKPGQAPRLLIYGASTRATGIPARFSGSGSGTEFTLTISSLQSEDFAVYYCQQYNDWPITFGCGTRLEIKSGGGGSQVQLVQSGAEVKKPGASVKVSCKASGYTFTSYGISWVRQAPGQCLEWMGWISAYNGNAIYAQKLQGRVTMTRDTSTSTAYMELRSLRSDDTAVYYCARDPDYYGSGSYSDYWGQGTLVTVSSGGGGSGGGGSGGGGSEIVLTQSPATLSVSPGERATLSCRASQSVSSNLAWYQQKPGQAPRLLIYGASSRATGIPARFSGSGSGTEFTLTISSLQSEDFAVYYCQQYHSWPILHFGCGTKVEIK

SEQ ID NO: 3065 - protein, 495 aa, Artificial Sequence
  Synthetic
EVQLVESGGGLVQPGRSLRLSCAASGFTFHDYTMHWVRQAPGKCLEWVSGISWNSGTIGYADSVRGRFTISRDNAKNSLYLQVNSLRPEDTALYYCAKDGHYGAYYYGMDVWGQGTTVTVSSGGGGQGGGGQGGGGQEIVLTQSPATLSVSPGERATLSCRASQSVNNNLAWYQQKPGQAPRLLIYGASTRATGIPARFSGSGSGTEFTLTISSLQSEDFAVYYCQQYNDWPITFGCGTRLEIKSGGGGQQVQLVQSGAEVKKPGASVKVSCKASGYTFTSYGISWVRQAPGQCLEWMGWISAYNGNAIYAQKLQGRVTMTRDTSTSTAYMELRSLRSDDTAVYYCARDPDYYGSGSYSDYWGQGTLVTVSSGGGGQGGGGQGGGGQEIVLTQSPATLSVSPGERATLSCRASQSVSSNLAWYQQKPGQAPRLLIYGASSRATGIPARFSGSGSGTEFTLTISSLQSEDFAVYYCQQYHSWPILHFGCGTKVEIK

SEQ ID NO: 3066 - protein, 750 aa, Artificial Sequence
  Synthetic
EVQLVESGGGLVQPGRSLRLSCAASGFTFHDYTMHWVRQAPGKCLEWVSGISWNSGTIGYADSVRGRFTISRDNAKNSLYLQVNSLRPEDTALYYCAKDGHYGAYYYGMDVWGQGTTVTVSSGGGGSGGGGSGGGGSEIVLTQSPATLSVSPGERATLSCRASQSVNNNLAWYQQKPGQAPRLLIYGASTRATGIPARFSGSGSGTEFTLTISSLQSEDFAVYYCQQYNDWPITFGCGTRLEIKSGGGGSQVQLVQSGAEVKKPGASVKVSCKASGYTFTSYGISWVRQAPGQCLEWMGWISAYNGNAIYAQKLQGRVTMTRDTSTSTAYMELRSLRSDDTAVYYCARDPDYYGSGSYSDYWGQGTLVTVSSGGGGSGGGGSGGGGSEIVLTQSPATLSVSPGERATLSCRASQSVSSNLAWYQQKPGQAPRLLIYGASSRATGIPARFSGSGSGTEFTLTISSLQSEDFAVYYCQQYHSWPILHFGCGTKVEIKSGGGGSEVQLVESGGGLVQPGGSLKLSCAASGFTFNKYAMNWVRQAPGKGLEWVARIRSKYNNYATYYADSVKDRFTISRDDSKNTAYLQMNNLKTEDTAVYYCVRHGNFGNSYISYWAYWGQGTLVTVSSGGGGSGGGGSGGGGSQTVVTQEPSLTVSPGGTVTLTCGSSTGAVTSGNYPNWVQQKPGQAPRGLIGGTKFLAPGTPARFSGSLLGGKAALTLSGVQPEDEAEYYCVLWYSNRWVFGGGTKLTVL

SEQ ID NO: 3067 - protein, 750 aa, Artificial Sequence
  Synthetic
EVQLVESGGGLVQPGRSLRLSCAASGFTFHDYTMHWVRQAPGKCLEWVSGISWNSGTIGYADSVRGRFTISRDNAKNSLYLQVNSLRPEDTALYYCAKDGHYGAYYYGMDVWGQGTTVTVSSGGGGQGGGGQGGGGQEIVLTQSPATLSVSPGERATLSCRASQSVNNNLAWYQQKPGQAPRLLIYGASTRATGIPARFSGSGSGTEFTLTISSLQSEDFAVYYCQQYNDWPITFGCGTRLEIKSGGGGQQVQLVQSGAEVKKPGASVKVSCKASGYTFTSYGISWVRQAPGQCLEWMGWISAYNGNAIYAQKLQGRVTMTRDTSTSTAYMELRSLRSDDTAVYYCARDPDYYGSGSYSDYWGQGTLVTVSSGGGGQGGGGQGGGGQEIVLTQSPATLSVSPGERATLSCRASQSVSSNLAWYQQKPGQAPRLLIYGASSRATGIPARFSGSGSGTEFTLTISSLQSEDFAVYYCQQYHSWPILHFGCGTKVEIKSGGGGQEVQLVESGGGLVQPGGSLKLSCAASGFTFNKYAMNWVRQAPGKGLEWVARIRSKYNNYATYYADSVKDRFTISRDDSKNTAYLQMNNLKTEDTAVYYCVRHGNFGNSYISYWAYWGQGTLVTVSSGGGGQGGGGQGGGGQQTVVTQEPSLTVSPGGTVTLTCGSSTGAVTSGNYPNWVQQKPGQAPRGLIGGTKFLAPGTPARFSGSLLGGKAALTLSGVQPEDEAEYYCVLWYSNRWVFGGGTKLTVL

SEQ ID NO: 3068 - protein, 750 aa, Artificial Sequence
  Synthetic
EVQLVESGGGLVQPGRSLRLSCAASGFTFHDYTMHWVRQAPGKCLEWVSGISWNSGTIGYADSVRGRFTISRDNAKNSLYLQVNSLRPEDTALYYCAKDGHYGAYYYGMDVWGQGTTVTVSSGGGGSGGGGSGGGGSEIVLTQSPATLSVSPGERATLSCRASQSVNNNLAWYQQKPGQAPRLLIYGASTRATGIPARFSGSGSGTEFTLTISSLQSEDFAVYYCQQYNDWPITFGCGTRLEIKSGGGGSQVQLVQSGAEVKKPGASVKVSCKASGYTFTSYGISWVRQAPGQCLEWMGWISAYNGNAIYAQKLQGRVTMTRDTSTSTAYMELRSLRSDDTAVYYCARDPDYYGSGSYSDYWGQGTLVTVSSGGGGSGGGGSGGGGSEIVLTQSPATLSVSPGERATLSCRASQSVSSNLAWYQQKPGQAPRLLIYGASSRATGIPARFSGSGSGTEFTLTISSLQSEDFAVYYCQQYHSWPILHFGCGTKVEIKSGGGGSEVQLVESGGGLVQPGGSLKLSCAASGFTFNKYAINWVRQAPGKGLEWVARIRSKYNNYATYYADAVKDRFTISRDDSKNTVYLQMNNLKTEDTAVYYCARAGNFGSSYISYWAYWGQGTLVTVSSGGGGSGGGGSGGGGSQTVVTQEPSLTVSPGGTVTITCGSSTGAVTSGNYPNWVQKKPGQAPRGLIGGTKFLAPGTPARFSGSLSGGKAALTLSGVQPEDEAEYYCVLWYSNRWVFGSGTKLTVL

SEQ ID NO: 3069 - protein, 750 aa, Artificial Sequence
  Synthetic
EVQLVESGGGLVQPGRSLRLSCAASGFTFHDYTMHWVRQAPGKCLEWVSGISWNSGTIGYADSVRGRFTISRDNAKNSLYLQVNSLRPEDTALYYCAKDGHYGAYYYGMDVWGQGTTVTVSSGGGGQGGGGQGGGGQEIVLTQSPATLSVSPGERATLSCRASQSVNNNLAWYQQKPGQAPRLLIYGASTRATGIPARFSGSGSGTEFTLTISSLQSEDFAVYYCQQYNDWPITFGCGTRLEIKSGGGGQQVQLVQSGAEVKKPGASVKVSCKASGYTFTSYGISWVRQAPGQCLEWMGWISAYNGNAIYAQKLQGRVTMTRDTSTSTAYMELRSLRSDDTAVYYCARDPDYYGSGSYSDYWGQGTLVTVSSGGGGQGGGGQGGGGQEIVLTQSPATLSVSPGERATLSCRASQSVSSNLAWYQQKPGQAPRLLIYGASSRATGIPARFSGSGSGTEFTLTISSLQSEDFAVYYCQQYHSWPILHFGCGTKVEIKSGGGGQEVQLVESGGGLVQPGGSLKLSCAASGFTFNKYAINWVRQAPGKGLEWVARIRSKYNNYATYYADAVKDRFTISRDDSKNTVYLQMNNLKTEDTAVYYCARAGNFGSSYISYWAYWGQGTLVTVSSGGGGQGGGGQGGGGQQTVVTQEPSLTVSPGGTVTITCGSSTGAVTSGNYPNWVQKKPGQAPRGLIGGTKFLAPGTPARFSGSLSGGKAALTLSGVQPEDEAEYYCVLWYSNRWVFGSGTKLTVL

SEQ ID NO: 3070 - protein, 1238 aa, Artificial Sequence
  Synthetic
EVQLVESGGGLVQPGRSLRLSCAASGFTFHDYTMHWVRQAPGKCLEWVSGISWNSGTIGYADSVRGRFTISRDNAKNSLYLQVNSLRPEDTALYYCAKDGHYGAYYYGMDVWGQGTTVTVSSGGGGSGGGGSGGGGSEIVLTQSPATLSVSPGERATLSCRASQSVNNNLAWYQQKPGQAPRLLIYGASTRATGIPARFSGSGSGTEFTLTISSLQSEDFAVYYCQQYNDWPITFGCGTRLEIKSGGGGSQVQLVQSGAEVKKPGASVKVSCKASGYTFTSYGISWVRQAPGQCLEWMGWISAYNGNAIYAQKLQGRVTMTRDTSTSTAYMELRSLRSDDTAVYYCARDPDYYGSGSYSDYWGQGTLVTVSSGGGGSGGGGSGGGGSEIVLTQSPATLSVSPGERATLSCRASQSVSSNLAWYQQKPGQAPRLLIYGASSRATGIPARFSGSGSGTEFTLTISSLQSEDFAVYYCQQYHSWPILHFGCGTKVEIKSGGGGSEVQLVESGGGLVQPGGSLKLSCAASGFTFNKYAMNWVRQAPGKGLEWVARIRSKYNNYATYYADSVKDRFTISRDDSKNTAYLQMNNLKTEDTAVYYCVRHGNFGNSYISYWAYWGQGTLVTVSSGGGGSGGGGSGGGGSQTVVTQEPSLTVSPGGTVTLTCGSSTGAVTSGNYPNWVQQKPGQAPRGLIGGTKFLAPGTPARFSGSLLGGKAALTLSGVQPEDEAEYYCVLWYSNRWVFGGGTKLTVLGGGGDKTHTCPPCPAPELLGGPSVFLFPPKPKDTLMISRTPEVTCVVVDVSHEDPEVKFNWYVDGVEVHNAKTKPCEEQYGSTYRCVSVLTVLHQDWLNGKEYKCKVSNKALPAPIEKTISKAKGQPREPQVYTLPPSREEMTKNQVSLTCLVKGFYPSDIAVEWESNGQPENNYKTTPPVLDSDGSFFLYSKLTVDKSRWQQGNVFSCSVMHEALHNHYTQKSLSLSPGKGGGGSGGGGSGGGGSGGGGSGGGGSGGGGSDKTHTCPPCPAPELLGGPSVFLFPPKPKDTLMISRTPEVTCVVVDVSHEDPEVKFNWYVDGVEVHNAKTKPCEEQYGSTYRCVSVLTVLHQDWLNGKEYKCKVSNKALPAPIEKTISKAKGQPREPQVYTLPPSREEMTKNQVSLTCLVKGFYPSDIAVEWESNGQPENNYKTTPPVLDSDGSFFLYSKLTVDKSRWQQGNVFSCSVMHEALHNHYTQKSLSLSPGK

SEQ ID NO: 3071 - protein, 1228 aa, Artificial Sequence
  Synthetic
EVQLVESGGGLVQPGRSLRLSCAASGFTFHDYTMHWVRQAPGKCLEWVSGISWNSGTIGYADSVRGRFTISRDNAKNSLYLQVNSLRPEDTALYYCAKDGHYGAYYYGMDVWGQGTTVTVSSGGGGQGGGGQGGGGQEIVLTQSPATLSVSPGERATLSCRASQSVNNNLAWYQQKPGQAPRLLIYGASTRATGIPARFSGSGSGTEFTLTISSLQSEDFAVYYCQQYNDWPITFGCGTRLEIKSGGGGQQVQLVQSGAEVKKPGASVKVSCKASGYTFTSYGISWVRQAPGQCLEWMGWISAYNGNAIYAQKLQGRVTMTRDTSTSTAYMELRSLRSDDTAVYYCARDPDYYGSGSYSDYWGQGTLVTVSSGGGGQGGGGQGGGGQEIVLTQSPATLSVSPGERATLSCRASQSVSSNLAWYQQKPGQAPRLLIYGASSRATGIPARFSGSGSGTEFTLTISSLQSEDFAVYYCQQYHSWPILHFGCGTKVEIKSGGGGQEVQLVESGGGLVQPGGSLKLSCAASGFTFNKYAMNWVRQAPGKGLEWVARIRSKYNNYATYYADSVKDRFTISRDDSKNTAYLQMNNLKTEDTAVYYCVRHGNFGNSYISYWAYWGQGTLVTVSSGGGGQGGGGQGGGGQQTVVTQEPSLTVSPGGTVTLTCGSSTGAVTSGNYPNWVQQKPGQAPRGLIGGTKFLAPGTPARFSGSLLGGKAALTLSGVQPEDEAEYYCVLWYSNRWVFGGGTKLTVLGGGGCPPCPAPELLGGPSVFLFPPKPKDTLMISRTPEVTCVVVDVSHEEPEVKFNWYVDGVEVHNAKTKPCEEQYGSTYRCVSVLTVLHQDWLNGKEYKCKVSNKALPAPIEKTISKAKGQPREPQVYTLPPSREEMTKNQVSLTCLVKGFYPSDIAVEWESNGQPENNYKTTPPVLDSDGSFFLYSKLTVDKSRWQQGNVFSCSVMHEALHNHYTQKSLSLSPGKGGGGQGGGGQGGGGQGGGGQGGGGQGGGGQCPPCPAPELLGGPSVFLFPPKPKDTLMISRTPEVTCVVVDVSHEEPEVKFNWYVDGVEVHNAKTKPCEEQYGSTYRCVSVLTVLHQDWLNGKEYKCKVSNKALPAPIEKTISKAKGQPREPQVYTLPPSREEMTKNQVSLTCLVKGFYPSDIAVEWESNGQPENNYKTTPPVLDSDGSFFLYSKLTVDKSRWQQGNVFSCSVMHEALHNHYTQKSLSLSPGK

SEQ ID NO: 3072 - protein, 1238 aa, Artificial Sequence
  Synthetic
EVQLVESGGGLVQPGRSLRLSCAASGFTFHDYTMHWVRQAPGKCLEWVSGISWNSGTIGYADSVRGRFTISRDNAKNSLYLQVNSLRPEDTALYYCAKDGHYGAYYYGMDVWGQGTTVTVSSGGGGSGGGGSGGGGSEIVLTQSPATLSVSPGERATLSCRASQSVNNNLAWYQQKPGQAPRLLIYGASTRATGIPARFSGSGSGTEFTLTISSLQSEDFAVYYCQQYNDWPITFGCGTRLEIKSGGGGSQVQLVQSGAEVKKPGASVKVSCKASGYTFTSYGISWVRQAPGQCLEWMGWISAYNGNAIYAQKLQGRVTMTRDTSTSTAYMELRSLRSDDTAVYYCARDPDYYGSGSYSDYWGQGTLVTVSSGGGGSGGGGSGGGGSEIVLTQSPATLSVSPGERATLSCRASQSVSSNLAWYQQKPGQAPRLLIYGASSRATGIPARFSGSGSGTEFTLTISSLQSEDFAVYYCQQYHSWPILHFGCGTKVEIKSGGGGSEVQLVESGGGLVQPGGSLKLSCAASGFTFNKYAINWVRQAPGKGLEWVARIRSKYNNYATYYADAVKDRFTISRDDSKNTVYLQMNNLKTEDTAVYYCARAGNFGSSYISYWAYWGQGTLVTVSSGGGGSGGGGSGGGGSQTVVTQEPSLTVSPGGTVTITCGSSTGAVTSGNYPNWVQKKPGQAPRGLIGGTKFLAPGTPARFSGSLSGGKAALTLSGVQPEDEAEYYCVLWYSNRWVFGSGTKLTVLGGGGDKTHTCPPCPAPELLGGPSVFLFPPKPKDTLMISRTPEVTCVVVDVSHEDPEVKFNWYVDGVEVHNAKTKPCEEQYGSTYRCVSVLTVLHQDWLNGKEYKCKVSNKALPAPIEKTISKAKGQPREPQVYTLPPSREEMTKNQVSLTCLVKGFYPSDIAVEWESNGQPENNYKTTPPVLDSDGSFFLYSKLTVDKSRWQQGNVFSCSVMHEALHNHYTQKSLSLSPGKGGGGSGGGGSGGGGSGGGGSGGGGSGGGGSDKTHTCPPCPAPELLGGPSVFLFPPKPKDTLMISRTPEVTCVVVDVSHEDPEVKFNWYVDGVEVHNAKTKPCEEQYGSTYRCVSVLTVLHQDWLNGKEYKCKVSNKALPAPIEKTISKAKGQPREPQVYTLPPSREEMTKNQVSLTCLVKGFYPSDIAVEWESNGQPENNYKTTPPVLDSDGSFFLYSKLTVDKSRWQQGNVFSCSVMHEALHNHYTQKSLSLSPGK

SEQ ID NO: 3073 - protein, 1228 aa, Artificial Sequence
  Synthetic
EVQLVESGGGLVQPGRSLRLSCAASGFTFHDYTMHWVRQAPGKCLEWVSGISWNSGTIGYADSVRGRFTISRDNAKNSLYLQVNSLRPEDTALYYCAKDGHYGAYYYGMDVWGQGTTVTVSSGGGGQGGGGQGGGGQEIVLTQSPATLSVSPGERATLSCRASQSVNNNLAWYQQKPGQAPRLLIYGASTRATGIPARFSGSGSGTEFTLTISSLQSEDFAVYYCQQYNDWPITFGCGTRLEIKSGGGGQQVQLVQSGAEVKKPGASVKVSCKASGYTFTSYGISWVRQAPGQCLEWMGWISAYNGNAIYAQKLQGRVTMTRDTSTSTAYMELRSLRSDDTAVYYCARDPDYYGSGSYSDYWGQGTLVTVSSGGGGQGGGGQGGGGQEIVLTQSPATLSVSPGERATLSCRASQSVSSNLAWYQQKPGQAPRLLIYGASSRATGIPARFSGSGSGTEFTLTISSLQSEDFAVYYCQQYHSWPILHFGCGTKVEIKSGGGGQEVQLVESGGGLVQPGGSLKLSCAASGFTFNKYAINWVRQAPGKGLEWVARIRSKYNNYATYYADAVKDRFTISRDDSKNTVYLQMNNLKTEDTAVYYCARAGNFGSSYISYWAYWGQGTLVTVSSGGGGQGGGGQGGGGQQTVVTQEPSLTVSPGGTVTITCGSSTGAVTSGNYPNWVQKKPGQAPRGLIGGTKFLAPGTPARFSGSLSGGKAALTLSGVQPEDEAEYYCVLWYSNRWVFGSGTKLTVLGGGGCPPCPAPELLGGPSVFLFPPKPKDTLMISRTPEVTCVVVDVSHEEPEVKFNWYVDGVEVHNAKTKPCEEQYGSTYRCVSVLTVLHQDWLNGKEYKCKVSNKALPAPIEKTISKAKGQPREPQVYTLPPSREEMTKNQVSLTCLVKGFYPSDIAVEWESNGQPENNYKTTPPVLDSDGSFFLYSKLTVDKSRWQQGNVFSCSVMHEALHNHYTQKSLSLSPGKGGGGQGGGGQGGGGQGGGGQGGGGQGGGGQCPPCPAPELLGGPSVFLFPPKPKDTLMISRTPEVTCVVVDVSHEEPEVKFNWYVDGVEVHNAKTKPCEEQYGSTYRCVSVLTVLHQDWLNGKEYKCKVSNKALPAPIEKTISKAKGQPREPQVYTLPPSREEMTKNQVSLTCLVKGFYPSDIAVEWESNGQPENNYKTTPPVLDSDGSFFLYSKLTVDKSRWQQGNVFSCSVMHEALHNHYTQKSLSLSPGK

SEQ ID NO: 3074 - protein, 489 aa, Artificial Sequence
  Synthetic
EVQLVESGGGLVQPGRSLRLSCAASGFTFHDYTMHWVRQAPGKCLEWVSGISWNSGTIGYADSVRGRFTISRDNAKNSLYLQVNSLRPEDTALYYCAKDGHYGAYYYGMDVWGQGTTVTVSSGGGGSGGGGSGGGGSEIVLTQSPATLSVSPGERATLSCRASQSVNNNLAWYQQKPGQAPRLLIYGASTRATGIPARFSGSGSGTEFTLTISSLQSEDFAVYYCQQYNDWPITFGCGTRLEIKSGGGGSQVQLVQSGAEVKKPGASVKVSCKASGYTFTSYGISWVRQAPGQCLEWMGWISAYNGNTVYAQKLQDRVTMTTDTSTSTAYMELRSLRSDDTAVYFCVRDGDPLDYWGQGTLVTVSSGGGGSGGGGSGGGGSEIVLTQSPGTLSLSPGERATLSCRASQSVSSNLAWYQQKPGQAPRLLIYGASTRATGIPARFSGSGSGTEFTLTISSLQSEDFAVYYCQQYHTWPPVTFGCGTKVEIK

SEQ ID NO: 3075 - protein, 489 aa, Artificial Sequence
  Synthetic
EVQLVESGGGLVQPGRSLRLSCAASGFTFHDYTMHWVRQAPGKCLEWVSGISWNSGTIGYADSVRGRFTISRDNAKNSLYLQVNSLRPEDTALYYCAKDGHYGAYYYGMDVWGQGTTVTVSSGGGGQGGGGQGGGGQEIVLTQSPATLSVSPGERATLSCRASQSVNNNLAWYQQKPGQAPRLLIYGASTRATGIPARFSGSGSGTEFTLTISSLQSEDFAVYYCQQYNDWPITFGCGTRLEIKSGGGGQQVQLVQSGAEVKKPGASVKVSCKASGYTFTSYGISWVRQAPGQCLEWMGWISAYNGNTVYAQKLQDRVTMTTDTSTSTAYMELRSLRSDDTAVYFCVRDGDPLDYWGQGTLVTVSSGGGGQGGGGQGGGGQEIVLTQSPGTLSLSPGERATLSCRASQSVSSNLAWYQQKPGQAPRLLIYGASTRATGIPARFSGSGSGTEFTLTISSLQSEDFAVYYCQQYHTWPPVTFGCGTKVEIK

SEQ ID NO: 3076 - protein, 744 aa, Artificial Sequence
  Synthetic
EVQLVESGGGLVQPGRSLRLSCAASGFTFHDYTMHWVRQAPGKCLEWVSGISWNSGTIGYADSVRGRFTISRDNAKNSLYLQVNSLRPEDTALYYCAKDGHYGAYYYGMDVWGQGTTVTVSSGGGGSGGGGSGGGGSEIVLTQSPATLSVSPGERATLSCRASQSVNNNLAWYQQKPGQAPRLLIYGASTRATGIPARFSGSGSGTEFTLTISSLQSEDFAVYYCQQYNDWPITFGCGTRLEIKSGGGGSQVQLVQSGAEVKKPGASVKVSCKASGYTFTSYGISWVRQAPGQCLEWMGWISAYNGNTVYAQKLQDRVTMTTDTSTSTAYMELRSLRSDDTAVYFCVRDGDPLDYWGQGTLVTVSSGGGGSGGGGSGGGGSEIVLTQSPGTLSLSPGERATLSCRASQSVSSNLAWYQQKPGQAPRLLIYGASTRATGIPARFSGSGSGTEFTLTISSLQSEDFAVYYCQQYHTWPPVTFGCGTKVEIKSGGGGSEVQLVESGGGLVQPGGSLKLSCAASGFTFNKYAMNWVRQAPGKGLEWVARIRSKYNNYATYYADSVKDRFTISRDDSKNTAYLQMNNLKTEDTAVYYCVRHGNFGNSYISYWAYWGQGTLVTVSSGGGGSGGGGSGGGGSQTVVTQEPSLTVSPGGTVTLTCGSSTGAVTSGNYPNWVQQKPGQAPRGLIGGTKFLAPGTPARFSGSLLGGKAALTLSGVQPEDEAEYYCVLWYSNRWVFGGGTKLTVL

SEQ ID NO: 3077 - protein, 744 aa, Artificial Sequence
  Synthetic
EVQLVESGGGLVQPGRSLRLSCAASGFTFHDYTMHWVRQAPGKCLEWVSGISWNSGTIGYADSVRGRFTISRDNAKNSLYLQVNSLRPEDTALYYCAKDGHYGAYYYGMDVWGQGTTVTVSSGGGGQGGGGQGGGGQEIVLTQSPATLSVSPGERATLSCRASQSVNNNLAWYQQKPGQAPRLLIYGASTRATGIPARFSGSGSGTEFTLTISSLQSEDFAVYYCQQYNDWPITFGCGTRLEIKSGGGGQQVQLVQSGAEVKKPGASVKVSCKASGYTFTSYGISWVRQAPGQCLEWMGWISAYNGNTVYAQKLQDRVTMTTDTSTSTAYMELRSLRSDDTAVYFCVRDGDPLDYWGQGTLVTVSSGGGGQGGGGQGGGGQEIVLTQSPGTLSLSPGERATLSCRASQSVSSNLAWYQQKPGQAPRLLIYGASTRATGIPARFSGSGSGTEFTLTISSLQSEDFAVYYCQQYHTWPPVTFGCGTKVEIKSGGGGQEVQLVESGGGLVQPGGSLKLSCAASGFTFNKYAMNWVRQAPGKGLEWVARIRSKYNNYATYYADSVKDRFTISRDDSKNTAYLQMNNLKTEDTAVYYCVRHGNFGNSYISYWAYWGQGTLVTVSSGGGGQGGGGQGGGGQQTVVTQEPSLTVSPGGTVTLTCGSSTGAVTSGNYPNWVQQKPGQAPRGLIGGTKFLAPGTPARFSGSLLGGKAALTLSGVQPEDEAEYYCVLWYSNRWVFGGGTKLTVL

SEQ ID NO: 3078 - protein, 744 aa, Artificial Sequence
  Synthetic
EVQLVESGGGLVQPGRSLRLSCAASGFTFHDYTMHWVRQAPGKCLEWVSGISWNSGTIGYADSVRGRFTISRDNAKNSLYLQVNSLRPEDTALYYCAKDGHYGAYYYGMDVWGQGTTVTVSSGGGGSGGGGSGGGGSEIVLTQSPATLSVSPGERATLSCRASQSVNNNLAWYQQKPGQAPRLLIYGASTRATGIPARFSGSGSGTEFTLTISSLQSEDFAVYYCQQYNDWPITFGCGTRLEIKSGGGGSQVQLVQSGAEVKKPGASVKVSCKASGYTFTSYGISWVRQAPGQCLEWMGWISAYNGNTVYAQKLQDRVTMTTDTSTSTAYMELRSLRSDDTAVYFCVRDGDPLDYWGQGTLVTVSSGGGGSGGGGSGGGGSEIVLTQSPGTLSLSPGERATLSCRASQSVSSNLAWYQQKPGQAPRLLIYGASTRATGIPARFSGSGSGTEFTLTISSLQSEDFAVYYCQQYHTWPPVTFGCGTKVEIKSGGGGSEVQLVESGGGLVQPGGSLKLSCAASGFTFNKYAINWVRQAPGKGLEWVARIRSKYNNYATYYADAVKDRFTISRDDSKNTVYLQMNNLKTEDTAVYYCARAGNFGSSYISYWAYWGQGTLVTVSSGGGGSGGGGSGGGGSQTVVTQEPSLTVSPGGTVTITCGSSTGAVTSGNYPNWVQKKPGQAPRGLIGGTKFLAPGTPARFSGSLSGGKAALTLSGVQPEDEAEYYCVLWYSNRWVFGSGTKLTVL

SEQ ID NO: 3079 - protein, 744 aa, Artificial Sequence
  Synthetic
EVQLVESGGGLVQPGRSLRLSCAASGFTFHDYTMHWVRQAPGKCLEWVSGISWNSGTIGYADSVRGRFTISRDNAKNSLYLQVNSLRPEDTALYYCAKDGHYGAYYYGMDVWGQGTTVTVSSGGGGQGGGGQGGGGQEIVLTQSPATLSVSPGERATLSCRASQSVNNNLAWYQQKPGQAPRLLIYGASTRATGIPARFSGSGSGTEFTLTISSLQSEDFAVYYCQQYNDWPITFGCGTRLEIKSGGGGQQVQLVQSGAEVKKPGASVKVSCKASGYTFTSYGISWVRQAPGQCLEWMGWISAYNGNTVYAQKLQDRVTMTTDTSTSTAYMELRSLRSDDTAVYFCVRDGDPLDYWGQGTLVTVSSGGGGQGGGGQGGGGQEIVLTQSPGTLSLSPGERATLSCRASQSVSSNLAWYQQKPGQAPRLLIYGASTRATGIPARFSGSGSGTEFTLTISSLQSEDFAVYYCQQYHTWPPVTFGCGTKVEIKSGGGGQEVQLVESGGGLVQPGGSLKLSCAASGFTFNKYAINWVRQAPGKGLEWVARIRSKYNNYATYYADAVKDRFTISRDDSKNTVYLQMNNLKTEDTAVYYCARAGNFGSSYISYWAYWGQGTLVTVSSGGGGQGGGGQGGGGQQTVVTQEPSLTVSPGGTVTITCGSSTGAVTSGNYPNWVQKKPGQAPRGLIGGTKFLAPGTPARFSGSLSGGKAALTLSGVQPEDEAEYYCVLWYSNRWVFGSGTKLTVL

SEQ ID NO: 3080 - protein, 1232 aa, Artificial Sequence
  Synthetic
EVQLVESGGGLVQPGRSLRLSCAASGFTFHDYTMHWVRQAPGKCLEWVSGISWNSGTIGYADSVRGRFTISRDNAKNSLYLQVNSLRPEDTALYYCAKDGHYGAYYYGMDVWGQGTTVTVSSGGGGSGGGGSGGGGSEIVLTQSPATLSVSPGERATLSCRASQSVNNNLAWYQQKPGQAPRLLIYGASTRATGIPARFSGSGSGTEFTLTISSLQSEDFAVYYCQQYNDWPITFGCGTRLEIKSGGGGSQVQLVQSGAEVKKPGASVKVSCKASGYTFTSYGISWVRQAPGQCLEWMGWISAYNGNTVYAQKLQDRVTMTTDTSTSTAYMELRSLRSDDTAVYFCVRDGDPLDYWGQGTLVTVSSGGGGSGGGGSGGGGSEIVLTQSPGTLSLSPGERATLSCRASQSVSSNLAWYQQKPGQAPRLLIYGASTRATGIPARFSGSGSGTEFTLTISSLQSEDFAVYYCQQYHTWPPVTFGCGTKVEIKSGGGGSEVQLVESGGGLVQPGGSLKLSCAASGFTFNKYAMNWVRQAPGKGLEWVARIRSKYNNYATYYADSVKDRFTISRDDSKNTAYLQMNNLKTEDTAVYYCVRHGNFGNSYISYWAYWGQGTLVTVSSGGGGSGGGGSGGGGSQTVVTQEPSLTVSPGGTVTLTCGSSTGAVTSGNYPNWVQQKPGQAPRGLIGGTKFLAPGTPARFSGSLLGGKAALTLSGVQPEDEAEYYCVLWYSNRWVFGGGTKLTVLGGGGDKTHTCPPCPAPELLGGPSVFLFPPKPKDTLMISRTPEVTCVVVDVSHEDPEVKFNWYVDGVEVHNAKTKPCEEQYGSTYRCVSVLTVLHQDWLNGKEYKCKVSNKALPAPIEKTISKAKGQPREPQVYTLPPSREEMTKNQVSLTCLVKGFYPSDIAVEWESNGQPENNYKTTPPVLDSDGSFFLYSKLTVDKSRWQQGNVFSCSVMHEALHNHYTQKSLSLSPGKGGGGSGGGGSGGGGSGGGGSGGGGSGGGGSDKTHTCPPCPAPELLGGPSVFLFPPKPKDTLMISRTPEVTCVVVDVSHEDPEVKFNWYVDGVEVHNAKTKPCEEQYGSTYRCVSVLTVLHQDWLNGKEYKCKVSNKALPAPIEKTISKAKGQPREPQVYTLPPSREEMTKNQVSLTCLVKGFYPSDIAVEWESNGQPENNYKTTPPVLDSDGSFFLYSKLTVDKSRWQQGNVFSCSVMHEALHNHYTQKSLSLSPGK

SEQ ID NO: 3081 - protein, 1222 aa, Artificial Sequence
  Synthetic
EVQLVESGGGLVQPGRSLRLSCAASGFTFHDYTMHWVRQAPGKCLEWVSGISWNSGTIGYADSVRGRFTISRDNAKNSLYLQVNSLRPEDTALYYCAKDGHYGAYYYGMDVWGQGTTVTVSSGGGGQGGGGQGGGGQEIVLTQSPATLSVSPGERATLSCRASQSVNNNLAWYQQKPGQAPRLLIYGASTRATGIPARFSGSGSGTEFTLTISSLQSEDFAVYYCQQYNDWPITFGCGTRLEIKSGGGGQQVQLVQSGAEVKKPGASVKVSCKASGYTFTSYGISWVRQAPGQCLEWMGWISAYNGNTVYAQKLQDRVTMTTDTSTSTAYMELRSLRSDDTAVYFCVRDGDPLDYWGQGTLVTVSSGGGGQGGGGQGGGGQEIVLTQSPGTLSLSPGERATLSCRASQSVSSNLAWYQQKPGQAPRLLIYGASTRATGIPARFSGSGSGTEFTLTISSLQSEDFAVYYCQQYHTWPPVTFGCGTKVEIKSGGGGQEVQLVESGGGLVQPGGSLKLSCAASGFTFNKYAMNWVRQAPGKGLEWVARIRSKYNNYATYYADSVKDRFTISRDDSKNTAYLQMNNLKTEDTAVYYCVRHGNFGNSYISYWAYWGQGTLVTVSSGGGGQGGGGQGGGGQQTVVTQEPSLTVSPGGTVTLTCGSSTGAVTSGNYPNWVQQKPGQAPRGLIGGTKFLAPGTPARFSGSLLGGKAALTLSGVQPEDEAEYYCVLWYSNRWVFGGGTKLTVLGGGGCPPCPAPELLGGPSVFLFPPKPKDTLMISRTPEVTCVVVDVSHEEPEVKFNWYVDGVEVHNAKTKPCEEQYGSTYRCVSVLTVLHQDWLNGKEYKCKVSNKALPAPIEKTISKAKGQPREPQVYTLPPSREEMTKNQVSLTCLVKGFYPSDIAVEWESNGQPENNYKTTPPVLDSDGSFFLYSKLTVDKSRWQQGNVFSCSVMHEALHNHYTQKSLSLSPGKGGGGQGGGGQGGGGQGGGGQGGGGQGGGGQCPPCPAPELLGGPSVFLFPPKPKDTLMISRTPEVTCVVVDVSHEEPEVKFNWYVDGVEVHNAKTKPCEEQYGSTYRCVSVLTVLHQDWLNGKEYKCKVSNKALPAPIEKTISKAKGQPREPQVYTLPPSREEMTKNQVSLTCLVKGFYPSDIAVEWESNGQPENNYKTTPPVLDSDGSFFLYSKLTVDKSRWQQGNVFSCSVMHEALHNHYTQKSLSLSPGK

SEQ ID NO: 3082 - protein, 1232 aa, Artificial Sequence
  Synthetic
EVQLVESGGGLVQPGRSLRLSCAASGFTFHDYTMHWVRQAPGKCLEWVSGISWNSGTIGYADSVRGRFTISRDNAKNSLYLQVNSLRPEDTALYYCAKDGHYGAYYYGMDVWGQGTTVTVSSGGGGSGGGGSGGGGSEIVLTQSPATLSVSPGERATLSCRASQSVNNNLAWYQQKPGQAPRLLIYGASTRATGIPARFSGSGSGTEFTLTISSLQSEDFAVYYCQQYNDWPITFGCGTRLEIKSGGGGSQVQLVQSGAEVKKPGASVKVSCKASGYTFTSYGISWVRQAPGQCLEWMGWISAYNGNTVYAQKLQDRVTMTTDTSTSTAYMELRSLRSDDTAVYFCVRDGDPLDYWGQGTLVTVSSGGGGSGGGGSGGGGSEIVLTQSPGTLSLSPGERATLSCRASQSVSSNLAWYQQKPGQAPRLLIYGASTRATGIPARFSGSGSGTEFTLTISSLQSEDFAVYYCQQYHTWPPVTFGCGTKVEIKSGGGGSEVQLVESGGGLVQPGGSLKLSCAASGFTFNKYAINWVRQAPGKGLEWVARIRSKYNNYATYYADAVKDRFTISRDDSKNTVYLQMNNLKTEDTAVYYCARAGNFGSSYISYWAYWGQGTLVTVSSGGGGSGGGGSGGGGSQTVVTQEPSLTVSPGGTVTITCGSSTGAVTSGNYPNWVQKKPGQAPRGLIGGTKFLAPGTPARFSGSLSGGKAALTLSGVQPEDEAEYYCVLWYSNRWVFGSGTKLTVLGGGGDKTHTCPPCPAPELLGGPSVFLFPPKPKDTLMISRTPEVTCVVVDVSHEDPEVKFNWYVDGVEVHNAKTKPCEEQYGSTYRCVSVLTVLHQDWLNGKEYKCKVSNKALPAPIEKTISKAKGQPREPQVYTLPPSREEMTKNQVSLTCLVKGFYPSDIAVEWESNGQPENNYKTTPPVLDSDGSFFLYSKLTVDKSRWQQGNVFSCSVMHEALHNHYTQKSLSLSPGKGGGGSGGGGSGGGGSGGGGSGGGGSGGGGSDKTHTCPPCPAPELLGGPSVFLFPPKPKDTLMISRTPEVTCVVVDVSHEDPEVKFNWYVDGVEVHNAKTKPCEEQYGSTYRCVSVLTVLHQDWLNGKEYKCKVSNKALPAPIEKTISKAKGQPREPQVYTLPPSREEMTKNQVSLTCLVKGFYPSDIAVEWESNGQPENNYKTTPPVLDSDGSFFLYSKLTVDKSRWQQGNVFSCSVMHEALHNHYTQKSLSLSPGK

SEQ ID NO: 3083 - protein, 1222 aa, Artificial Sequence
  Synthetic
EVQLVESGGGLVQPGRSLRLSCAASGFTFHDYTMHWVRQAPGKCLEWVSGISWNSGTIGYADSVRGRFTISRDNAKNSLYLQVNSLRPEDTALYYCAKDGHYGAYYYGMDVWGQGTTVTVSSGGGGQGGGGQGGGGQEIVLTQSPATLSVSPGERATLSCRASQSVNNNLAWYQQKPGQAPRLLIYGASTRATGIPARFSGSGSGTEFTLTISSLQSEDFAVYYCQQYNDWPITFGCGTRLEIKSGGGGQQVQLVQSGAEVKKPGASVKVSCKASGYTFTSYGISWVRQAPGQCLEWMGWISAYNGNTVYAQKLQDRVTMTTDTSTSTAYMELRSLRSDDTAVYFCVRDGDPLDYWGQGTLVTVSSGGGGQGGGGQGGGGQEIVLTQSPGTLSLSPGERATLSCRASQSVSSNLAWYQQKPGQAPRLLIYGASTRATGIPARFSGSGSGTEFTLTISSLQSEDFAVYYCQQYHTWPPVTFGCGTKVEIKSGGGGQEVQLVESGGGLVQPGGSLKLSCAASGFTFNKYAINWVRQAPGKGLEWVARIRSKYNNYATYYADAVKDRFTISRDDSKNTVYLQMNNLKTEDTAVYYCARAGNFGSSYISYWAYWGQGTLVTVSSGGGGQGGGGQGGGGQQTVVTQEPSLTVSPGGTVTITCGSSTGAVTSGNYPNWVQKKPGQAPRGLIGGTKFLAPGTPARFSGSLSGGKAALTLSGVQPEDEAEYYCVLWYSNRWVFGSGTKLTVLGGGGCPPCPAPELLGGPSVFLFPPKPKDTLMISRTPEVTCVVVDVSHEEPEVKFNWYVDGVEVHNAKTKPCEEQYGSTYRCVSVLTVLHQDWLNGKEYKCKVSNKALPAPIEKTISKAKGQPREPQVYTLPPSREEMTKNQVSLTCLVKGFYPSDIAVEWESNGQPENNYKTTPPVLDSDGSFFLYSKLTVDKSRWQQGNVFSCSVMHEALHNHYTQKSLSLSPGKGGGGQGGGGQGGGGQGGGGQGGGGQGGGGQCPPCPAPELLGGPSVFLFPPKPKDTLMISRTPEVTCVVVDVSHEEPEVKFNWYVDGVEVHNAKTKPCEEQYGSTYRCVSVLTVLHQDWLNGKEYKCKVSNKALPAPIEKTISKAKGQPREPQVYTLPPSREEMTKNQVSLTCLVKGFYPSDIAVEWESNGQPENNYKTTPPVLDSDGSFFLYSKLTVDKSRWQQGNVFSCSVMHEALHNHYTQKSLSLSPGK

SEQ ID NO: 3084 - protein, 489 aa, Artificial Sequence
  Synthetic
EVQLVESGGGLVQPGRSLRLSCAASGFTFHDYTMHWVRQAPGKCLEWVSGISWNSGTIGYADSVRGRFTISRDNAKNSLYLQVNSLRPEDTALYYCAKDGHYGAYYYGMDVWGQGTTVTVSSGGGGSGGGGSGGGGSEIVLTQSPATLSVSPGERATLSCRASQSVNNNLAWYQQKPGQAPRLLIYGASTRATGIPARFSGSGSGTEFTLTISSLQSEDFAVYYCQQYNDWPITFGCGTRLEIKSGGGGSQVQLVQSGAEVKKPGASVKVSCKASGYSFTSYGITWVRQAPGQCLEWMGWISAYNGNTIYAQKLQGRVTMTTDTSTSTAYMELRSLRSDDTAVYYCVRDSNHEDFWGQGTLVTVSSGGGGSGGGGSGGGGSEIVLTQSPATLSVSPGERATLSCRASQSVSSNLAWYQQKPGQAPRLLIYGASTRATGIPARFSGSGSGTEFTLTISSLQSEDFAVYYCQQYHTWPPVTFGCGTKVEIK

SEQ ID NO: 3085 - protein, 489 aa, Artificial Sequence
  Synthetic
EVQLVESGGGLVQPGRSLRLSCAASGFTFHDYTMHWVRQAPGKCLEWVSGISWNSGTIGYADSVRGRFTISRDNAKNSLYLQVNSLRPEDTALYYCAKDGHYGAYYYGMDVWGQGTTVTVSSGGGGQGGGGQGGGGQEIVLTQSPATLSVSPGERATLSCRASQSVNNNLAWYQQKPGQAPRLLIYGASTRATGIPARFSGSGSGTEFTLTISSLQSEDFAVYYCQQYNDWPITFGCGTRLEIKSGGGGQQVQLVQSGAEVKKPGASVKVSCKASGYSFTSYGITWVRQAPGQCLEWMGWISAYNGNTIYAQKLQGRVTMTTDTSTSTAYMELRSLRSDDTAVYYCVRDSNHEDFWGQGTLVTVSSGGGGQGGGGQGGGGQEIVLTQSPATLSVSPGERATLSCRASQSVSSNLAWYQQKPGQAPRLLIYGASTRATGIPARFSGSGSGTEFTLTISSLQSEDFAVYYCQQYHTWPPVTFGCGTKVEIK

SEQ ID NO: 3086 - protein, 744 aa, Artificial Sequence
  Synthetic
EVQLVESGGGLVQPGRSLRLSCAASGFTFHDYTMHWVRQAPGKCLEWVSGISWNSGTIGYADSVRGRFTISRDNAKNSLYLQVNSLRPEDTALYYCAKDGHYGAYYYGMDVWGQGTTVTVSSGGGGSGGGGSGGGGSEIVLTQSPATLSVSPGERATLSCRASQSVNNNLAWYQQKPGQAPRLLIYGASTRATGIPARFSGSGSGTEFTLTISSLQSEDFAVYYCQQYNDWPITFGCGTRLEIKSGGGGSQVQLVQSGAEVKKPGASVKVSCKASGYSFTSYGITWVRQAPGQCLEWMGWISAYNGNTIYAQKLQGRVTMTTDTSTSTAYMELRSLRSDDTAVYYCVRDSNHEDFWGQGTLVTVSSGGGGSGGGGSGGGGSEIVLTQSPATLSVSPGERATLSCRASQSVSSNLAWYQQKPGQAPRLLIYGASTRATGIPARFSGSGSGTEFTLTISSLQSEDFAVYYCQQYHTWPPVTFGCGTKVEIKSGGGGSEVQLVESGGGLVQPGGSLKLSCAASGFTFNKYAMNWVRQAPGKGLEWVARIRSKYNNYATYYADSVKDRFTISRDDSKNTAYLQMNNLKTEDTAVYYCVRHGNFGNSYISYWAYWGQGTLVTVSSGGGGSGGGGSGGGGSQTVVTQEPSLTVSPGGTVTLTCGSSTGAVTSGNYPNWVQQKPGQAPRGLIGGTKFLAPGTPARFSGSLLGGKAALTLSGVQPEDEAEYYCVLWYSNRWVFGGGTKLTVL

SEQ ID NO: 3087 - protein, 744 aa, Artificial Sequence
  Synthetic
EVQLVESGGGLVQPGRSLRLSCAASGFTFHDYTMHWVRQAPGKCLEWVSGISWNSGTIGYADSVRGRFTISRDNAKNSLYLQVNSLRPEDTALYYCAKDGHYGAYYYGMDVWGQGTTVTVSSGGGGQGGGGQGGGGQEIVLTQSPATLSVSPGERATLSCRASQSVNNNLAWYQQKPGQAPRLLIYGASTRATGIPARFSGSGSGTEFTLTISSLQSEDFAVYYCQQYNDWPITFGCGTRLEIKSGGGGQQVQLVQSGAEVKKPGASVKVSCKASGYSFTSYGITWVRQAPGQCLEWMGWISAYNGNTIYAQKLQGRVTMTTDTSTSTAYMELRSLRSDDTAVYYCVRDSNHEDFWGQGTLVTVSSGGGGQGGGGQGGGGQEIVLTQSPATLSVSPGERATLSCRASQSVSSNLAWYQQKPGQAPRLLIYGASTRATGIPARFSGSGSGTEFTLTISSLQSEDFAVYYCQQYHTWPPVTFGCGTKVEIKSGGGGQEVQLVESGGGLVQPGGSLKLSCAASGFTFNKYAMNWVRQAPGKGLEWVARIRSKYNNYATYYADSVKDRFTISRDDSKNTAYLQMNNLKTEDTAVYYCVRHGNFGNSYISYWAYWGQGTLVTVSSGGGGQGGGGQGGGGQQTVVTQEPSLTVSPGGTVTLTCGSSTGAVTSGNYPNWVQQKPGQAPRGLIGGTKFLAPGTPARFSGSLLGGKAALTLSGVQPEDEAEYYCVLWYSNRWVFGGGTKLTVL

SEQ ID NO: 3088 - protein, 744 aa, Artificial Sequence
  Synthetic
EVQLVESGGGLVQPGRSLRLSCAASGFTFHDYTMHWVRQAPGKCLEWVSGISWNSGTIGYADSVRGRFTISRDNAKNSLYLQVNSLRPEDTALYYCAKDGHYGAYYYGMDVWGQGTTVTVSSGGGGSGGGGSGGGGSEIVLTQSPATLSVSPGERATLSCRASQSVNNNLAWYQQKPGQAPRLLIYGASTRATGIPARFSGSGSGTEFTLTISSLQSEDFAVYYCQQYNDWPITFGCGTRLEIKSGGGGSQVQLVQSGAEVKKPGASVKVSCKASGYSFTSYGITWVRQAPGQCLEWMGWISAYNGNTIYAQKLQGRVTMTTDTSTSTAYMELRSLRSDDTAVYYCVRDSNHEDFWGQGTLVTVSSGGGGSGGGGSGGGGSEIVLTQSPATLSVSPGERATLSCRASQSVSSNLAWYQQKPGQAPRLLIYGASTRATGIPARFSGSGSGTEFTLTISSLQSEDFAVYYCQQYHTWPPVTFGCGTKVEIKSGGGGSEVQLVESGGGLVQPGGSLKLSCAASGFTFNKYAINWVRQAPGKGLEWVARIRSKYNNYATYYADAVKDRFTISRDDSKNTVYLQMNNLKTEDTAVYYCARAGNFGSSYISYWAYWGQGTLVTVSSGGGGSGGGGSGGGGSQTVVTQEPSLTVSPGGTVTITCGSSTGAVTSGNYPNWVQKKPGQAPRGLIGGTKFLAPGTPARFSGSLSGGKAALTLSGVQPEDEAEYYCVLWYSNRWVFGSGTKLTVL

SEQ ID NO: 3089 - protein, 744 aa, Artificial Sequence
  Synthetic
EVQLVESGGGLVQPGRSLRLSCAASGFTFHDYTMHWVRQAPGKCLEWVSGISWNSGTIGYADSVRGRFTISRDNAKNSLYLQVNSLRPEDTALYYCAKDGHYGAYYYGMDVWGQGTTVTVSSGGGGQGGGGQGGGGQEIVLTQSPATLSVSPGERATLSCRASQSVNNNLAWYQQKPGQAPRLLIYGASTRATGIPARFSGSGSGTEFTLTISSLQSEDFAVYYCQQYNDWPITFGCGTRLEIKSGGGGQQVQLVQSGAEVKKPGASVKVSCKASGYSFTSYGITWVRQAPGQCLEWMGWISAYNGNTIYAQKLQGRVTMTTDTSTSTAYMELRSLRSDDTAVYYCVRDSNHEDFWGQGTLVTVSSGGGGQGGGGQGGGGQEIVLTQSPATLSVSPGERATLSCRASQSVSSNLAWYQQKPGQAPRLLIYGASTRATGIPARFSGSGSGTEFTLTISSLQSEDFAVYYCQQYHTWPPVTFGCGTKVEIKSGGGGQEVQLVESGGGLVQPGGSLKLSCAASGFTFNKYAINWVRQAPGKGLEWVARIRSKYNNYATYYADAVKDRFTISRDDSKNTVYLQMNNLKTEDTAVYYCARAGNFGSSYISYWAYWGQGTLVTVSSGGGGQGGGGQGGGGQQTVVTQEPSLTVSPGGTVTITCGSSTGAVTSGNYPNWVQKKPGQAPRGLIGGTKFLAPGTPARFSGSLSGGKAALTLSGVQPEDEAEYYCVLWYSNRWVFGSGTKLTVL

SEQ ID NO: 3090 - protein, 1232 aa, Artificial Sequence
  Synthetic
EVQLVESGGGLVQPGRSLRLSCAASGFTFHDYTMHWVRQAPGKCLEWVSGISWNSGTIGYADSVRGRFTISRDNAKNSLYLQVNSLRPEDTALYYCAKDGHYGAYYYGMDVWGQGTTVTVSSGGGGSGGGGSGGGGSEIVLTQSPATLSVSPGERATLSCRASQSVNNNLAWYQQKPGQAPRLLIYGASTRATGIPARFSGSGSGTEFTLTISSLQSEDFAVYYCQQYNDWPITFGCGTRLEIKSGGGGSQVQLVQSGAEVKKPGASVKVSCKASGYSFTSYGITWVRQAPGQCLEWMGWISAYNGNTIYAQKLQGRVTMTTDTSTSTAYMELRSLRSDDTAVYYCVRDSNHEDFWGQGTLVTVSSGGGGSGGGGSGGGGSEIVLTQSPATLSVSPGERATLSCRASQSVSSNLAWYQQKPGQAPRLLIYGASTRATGIPARFSGSGSGTEFTLTISSLQSEDFAVYYCQQYHTWPPVTFGCGTKVEIKSGGGGSEVQLVESGGGLVQPGGSLKLSCAASGFTFNKYAMNWVRQAPGKGLEWVARIRSKYNNYATYYADSVKDRFTISRDDSKNTAYLQMNNLKTEDTAVYYCVRHGNFGNSYISYWAYWGQGTLVTVSSGGGGSGGGGSGGGGSQTVVTQEPSLTVSPGGTVTLTCGSSTGAVTSGNYPNWVQQKPGQAPRGLIGGTKFLAPGTPARFSGSLLGGKAALTLSGVQPEDEAEYYCVLWYSNRWVFGGGTKLTVLGGGGDKTHTCPPCPAPELLGGPSVFLFPPKPKDTLMISRTPEVTCVVVDVSHEDPEVKFNWYVDGVEVHNAKTKPCEEQYGSTYRCVSVLTVLHQDWLNGKEYKCKVSNKALPAPIEKTISKAKGQPREPQVYTLPPSREEMTKNQVSLTCLVKGFYPSDIAVEWESNGQPENNYKTTPPVLDSDGSFFLYSKLTVDKSRWQQGNVFSCSVMHEALHNHYTQKSLSLSPGKGGGGSGGGGSGGGGSGGGGSGGGGSGGGGSDKTHTCPPCPAPELLGGPSVFLFPPKPKDTLMISRTPEVTCVVVDVSHEDPEVKFNWYVDGVEVHNAKTKPCEEQYGSTYRCVSVLTVLHQDWLNGKEYKCKVSNKALPAPIEKTISKAKGQPREPQVYTLPPSREEMTKNQVSLTCLVKGFYPSDIAVEWESNGQPENNYKTTPPVLDSDGSFFLYSKLTVDKSRWQQGNVFSCSVMHEALHNHYTQKSLSLSPGK

SEQ ID NO: 3091 - protein, 1222 aa, Artificial Sequence
  Synthetic
EVQLVESGGGLVQPGRSLRLSCAASGFTFHDYTMHWVRQAPGKCLEWVSGISWNSGTIGYADSVRGRFTISRDNAKNSLYLQVNSLRPEDTALYYCAKDGHYGAYYYGMDVWGQGTTVTVSSGGGGQGGGGQGGGGQEIVLTQSPATLSVSPGERATLSCRASQSVNNNLAWYQQKPGQAPRLLIYGASTRATGIPARFSGSGSGTEFTLTISSLQSEDFAVYYCQQYNDWPITFGCGTRLEIKSGGGGQQVQLVQSGAEVKKPGASVKVSCKASGYSFTSYGITWVRQAPGQCLEWMGWISAYNGNTIYAQKLQGRVTMTTDTSTSTAYMELRSLRSDDTAVYYCVRDSNHEDFWGQGTLVTVSSGGGGQGGGGQGGGGQEIVLTQSPATLSVSPGERATLSCRASQSVSSNLAWYQQKPGQAPRLLIYGASTRATGIPARFSGSGSGTEFTLTISSLQSEDFAVYYCQQYHTWPPVTFGCGTKVEIKSGGGGQEVQLVESGGGLVQPGGSLKLSCAASGFTFNKYAMNWVRQAPGKGLEWVARIRSKYNNYATYYADSVKDRFTISRDDSKNTAYLQMNNLKTEDTAVYYCVRHGNFGNSYISYWAYWGQGTLVTVSSGGGGQGGGGQGGGGQQTVVTQEPSLTVSPGGTVTLTCGSSTGAVTSGNYPNWVQQKPGQAPRGLIGGTKFLAPGTPARFSGSLLGGKAALTLSGVQPEDEAEYYCVLWYSNRWVFGGGTKLTVLGGGGCPPCPAPELLGGPSVFLFPPKPKDTLMISRTPEVTCVVVDVSHEEPEVKFNWYVDGVEVHNAKTKPCEEQYGSTYRCVSVLTVLHQDWLNGKEYKCKVSNKALPAPIEKTISKAKGQPREPQVYTLPPSREEMTKNQVSLTCLVKGFYPSDIAVEWESNGQPENNYKTTPPVLDSDGSFFLYSKLTVDKSRWQQGNVFSCSVMHEALHNHYTQKSLSLSPGKGGGGQGGGGQGGGGQGGGGQGGGGQGGGGQCPPCPAPELLGGPSVFLFPPKPKDTLMISRTPEVTCVVVDVSHEEPEVKFNWYVDGVEVHNAKTKPCEEQYGSTYRCVSVLTVLHQDWLNGKEYKCKVSNKALPAPIEKTISKAKGQPREPQVYTLPPSREEMTKNQVSLTCLVKGFYPSDIAVEWESNGQPENNYKTTPPVLDSDGSFFLYSKLTVDKSRWQQGNVFSCSVMHEALHNHYTQKSLSLSPGK

SEQ ID NO: 3092 - protein, 1232 aa, Artificial Sequence
  Synthetic
EVQLVESGGGLVQPGRSLRLSCAASGFTFHDYTMHWVRQAPGKCLEWVSGISWNSGTIGYADSVRGRFTISRDNAKNSLYLQVNSLRPEDTALYYCAKDGHYGAYYYGMDVWGQGTTVTVSSGGGGSGGGGSGGGGSEIVLTQSPATLSVSPGERATLSCRASQSVNNNLAWYQQKPGQAPRLLIYGASTRATGIPARFSGSGSGTEFTLTISSLQSEDFAVYYCQQYNDWPITFGCGTRLEIKSGGGGSQVQLVQSGAEVKKPGASVKVSCKASGYSFTSYGITWVRQAPGQCLEWMGWISAYNGNTIYAQKLQGRVTMTTDTSTSTAYMELRSLRSDDTAVYYCVRDSNHEDFWGQGTLVTVSSGGGGSGGGGSGGGGSEIVLTQSPATLSVSPGERATLSCRASQSVSSNLAWYQQKPGQAPRLLIYGASTRATGIPARFSGSGSGTEFTLTISSLQSEDFAVYYCQQYHTWPPVTFGCGTKVEIKSGGGGSEVQLVESGGGLVQPGGSLKLSCAASGFTFNKYAINWVRQAPGKGLEWVARIRSKYNNYATYYADAVKDRFTISRDDSKNTVYLQMNNLKTEDTAVYYCARAGNFGSSYISYWAYWGQGTLVTVSSGGGGSGGGGSGGGGSQTVVTQEPSLTVSPGGTVTITCGSSTGAVTSGNYPNWVQKKPGQAPRGLIGGTKFLAPGTPARFSGSLSGGKAALTLSGVQPEDEAEYYCVLWYSNRWVFGSGTKLTVLGGGGDKTHTCPPCPAPELLGGPSVFLFPPKPKDTLMISRTPEVTCVVVDVSHEDPEVKFNWYVDGVEVHNAKTKPCEEQYGSTYRCVSVLTVLHQDWLNGKEYKCKVSNKALPAPIEKTISKAKGQPREPQVYTLPPSREEMTKNQVSLTCLVKGFYPSDIAVEWESNGQPENNYKTTPPVLDSDGSFFLYSKLTVDKSRWQQGNVFSCSVMHEALHNHYTQKSLSLSPGKGGGGSGGGGSGGGGSGGGGSGGGGSGGGGSDKTHTCPPCPAPELLGGPSVFLFPPKPKDTLMISRTPEVTCVVVDVSHEDPEVKFNWYVDGVEVHNAKTKPCEEQYGSTYRCVSVLTVLHQDWLNGKEYKCKVSNKALPAPIEKTISKAKGQPREPQVYTLPPSREEMTKNQVSLTCLVKGFYPSDIAVEWESNGQPENNYKTTPPVLDSDGSFFLYSKLTVDKSRWQQGNVFSCSVMHEALHNHYTQKSLSLSPGK

SEQ ID NO: 3093 - protein, 1222 aa, Artificial Sequence
  Synthetic
EVQLVESGGGLVQPGRSLRLSCAASGFTFHDYTMHWVRQAPGKCLEWVSGISWNSGTIGYADSVRGRFTISRDNAKNSLYLQVNSLRPEDTALYYCAKDGHYGAYYYGMDVWGQGTTVTVSSGGGGQGGGGQGGGGQEIVLTQSPATLSVSPGERATLSCRASQSVNNNLAWYQQKPGQAPRLLIYGASTRATGIPARFSGSGSGTEFTLTISSLQSEDFAVYYCQQYNDWPITFGCGTRLEIKSGGGGQQVQLVQSGAEVKKPGASVKVSCKASGYSFTSYGITWVRQAPGQCLEWMGWISAYNGNTIYAQKLQGRVTMTTDTSTSTAYMELRSLRSDDTAVYYCVRDSNHEDFWGQGTLVTVSSGGGGQGGGGQGGGGQEIVLTQSPATLSVSPGERATLSCRASQSVSSNLAWYQQKPGQAPRLLIYGASTRATGIPARFSGSGSGTEFTLTISSLQSEDFAVYYCQQYHTWPPVTFGCGTKVEIKSGGGGQEVQLVESGGGLVQPGGSLKLSCAASGFTFNKYAINWVRQAPGKGLEWVARIRSKYNNYATYYADAVKDRFTISRDDSKNTVYLQMNNLKTEDTAVYYCARAGNFGSSYISYWAYWGQGTLVTVSSGGGGQGGGGQGGGGQQTVVTQEPSLTVSPGGTVTITCGSSTGAVTSGNYPNWVQKKPGQAPRGLIGGTKFLAPGTPARFSGSLSGGKAALTLSGVQPEDEAEYYCVLWYSNRWVFGSGTKLTVLGGGGCPPCPAPELLGGPSVFLFPPKPKDTLMISRTPEVTCVVVDVSHEEPEVKFNWYVDGVEVHNAKTKPCEEQYGSTYRCVSVLTVLHQDWLNGKEYKCKVSNKALPAPIEKTISKAKGQPREPQVYTLPPSREEMTKNQVSLTCLVKGFYPSDIAVEWESNGQPENNYKTTPPVLDSDGSFFLYSKLTVDKSRWQQGNVFSCSVMHEALHNHYTQKSLSLSPGKGGGGQGGGGQGGGGQGGGGQGGGGQGGGGQCPPCPAPELLGGPSVFLFPPKPKDTLMISRTPEVTCVVVDVSHEEPEVKFNWYVDGVEVHNAKTKPCEEQYGSTYRCVSVLTVLHQDWLNGKEYKCKVSNKALPAPIEKTISKAKGQPREPQVYTLPPSREEMTKNQVSLTCLVKGFYPSDIAVEWESNGQPENNYKTTPPVLDSDGSFFLYSKLTVDKSRWQQGNVFSCSVMHEALHNHYTQKSLSLSPGK

SEQ ID NO: 3094 - protein, 491 aa, Artificial Sequence
  Synthetic
EVQLVESGGGLVQPGRSLRLSCAASGFTFHDYTMHWVRQAPGKCLEWVSGISWNSGTIGYADSVRGRFTISRDNAKNSLYLQVNSLRPEDTALYYCAKDGHYGAYYYGMDVWGQGTTVTVSSGGGGSGGGGSGGGGSEIVLTQSPATLSVSPGERATLSCRASQSVNNNLAWYQQKPGQAPRLLIYGASTRATGIPARFSGSGSGTEFTLTISSLQSEDFAVYYCQQYNDWPITFGCGTRLEIKSGGGGSQVQLVQSGAEVKKPGESLKISCKGSGYSFTSYGISWVRQAPGQCLEWMGWISAYNGNTIYAQKLQGRVTMTTDTSTSTAYMELRRLRSDDTAVYYCARDPGVTGDDYWGQGTLVTVSSGGGGSGGGGSGGGGSEIVLTQSPATLSVSPGERATLSCRASLSVSSNLAWYQQKPGQAPRLLIYGASTRATGIPARFSGSGSGTEFTLTISSLQSEDFAVYFCQQYHSWPALTFGCGTKVEIK

SEQ ID NO: 3095 - protein, 491 aa, Artificial Sequence
  Synthetic
EVQLVESGGGLVQPGRSLRLSCAASGFTFHDYTMHWVRQAPGKCLEWVSGISWNSGTIGYADSVRGRFTISRDNAKNSLYLQVNSLRPEDTALYYCAKDGHYGAYYYGMDVWGQGTTVTVSSGGGGQGGGGQGGGGQEIVLTQSPATLSVSPGERATLSCRASQSVNNNLAWYQQKPGQAPRLLIYGASTRATGIPARFSGSGSGTEFTLTISSLQSEDFAVYYCQQYNDWPITFGCGTRLEIKSGGGGQQVQLVQSGAEVKKPGESLKISCKGSGYSFTSYGISWVRQAPGQCLEWMGWISAYNGNTIYAQKLQGRVTMTTDTSTSTAYMELRRLRSDDTAVYYCARDPGVTGDDYWGQGTLVTVSSGGGGQGGGGQGGGGQEIVLTQSPATLSVSPGERATLSCRASLSVSSNLAWYQQKPGQAPRLLIYGASTRATGIPARFSGSGSGTEFTLTISSLQSEDFAVYFCQQYHSWPALTFGCGTKVEIK

SEQ ID NO: 3096 - protein, 746 aa, Artificial Sequence
  Synthetic
EVQLVESGGGLVQPGRSLRLSCAASGFTFHDYTMHWVRQAPGKCLEWVSGISWNSGTIGYADSVRGRFTISRDNAKNSLYLQVNSLRPEDTALYYCAKDGHYGAYYYGMDVWGQGTTVTVSSGGGGSGGGGSGGGGSEIVLTQSPATLSVSPGERATLSCRASQSVNNNLAWYQQKPGQAPRLLIYGASTRATGIPARFSGSGSGTEFTLTISSLQSEDFAVYYCQQYNDWPITFGCGTRLEIKSGGGGSQVQLVQSGAEVKKPGESLKISCKGSGYSFTSYGISWVRQAPGQCLEWMGWISAYNGNTIYAQKLQGRVTMTTDTSTSTAYMELRRLRSDDTAVYYCARDPGVTGDDYWGQGTLVTVSSGGGGSGGGGSGGGGSEIVLTQSPATLSVSPGERATLSCRASLSVSSNLAWYQQKPGQAPRLLIYGASTRATGIPARFSGSGSGTEFTLTISSLQSEDFAVYFCQQYHSWPALTFGCGTKVEIKSGGGGSEVQLVESGGGLVQPGGSLKLSCAASGFTFNKYAMNWVRQAPGKGLEWVARIRSKYNNYATYYADSVKDRFTISRDDSKNTAYLQMNNLKTEDTAVYYCVRHGNFGNSYISYWAYWGQGTLVTVSSGGGGSGGGGSGGGGSQTVVTQEPSLTVSPGGTVTLTCGSSTGAVTSGNYPNWVQQKPGQAPRGLIGGTKFLAPGTPARFSGSLLGGKAALTLSGVQPEDEAEYYCVLWYSNRWVFGGGTKLTVL

SEQ ID NO: 3097 - protein, 746 aa, Artificial Sequence
  Synthetic
EVQLVESGGGLVQPGRSLRLSCAASGFTFHDYTMHWVRQAPGKCLEWVSGISWNSGTIGYADSVRGRFTISRDNAKNSLYLQVNSLRPEDTALYYCAKDGHYGAYYYGMDVWGQGTTVTVSSGGGGQGGGGQGGGGQEIVLTQSPATLSVSPGERATLSCRASQSVNNNLAWYQQKPGQAPRLLIYGASTRATGIPARFSGSGSGTEFTLTISSLQSEDFAVYYCQQYNDWPITFGCGTRLEIKSGGGGQQVQLVQSGAEVKKPGESLKISCKGSGYSFTSYGISWVRQAPGQCLEWMGWISAYNGNTIYAQKLQGRVTMTTDTSTSTAYMELRRLRSDDTAVYYCARDPGVTGDDYWGQGTLVTVSSGGGGQGGGGQGGGGQEIVLTQSPATLSVSPGERATLSCRASLSVSSNLAWYQQKPGQAPRLLIYGASTRATGIPARFSGSGSGTEFTLTISSLQSEDFAVYFCQQYHSWPALTFGCGTKVEIKSGGGGQEVQLVESGGGLVQPGGSLKLSCAASGFTFNKYAMNWVRQAPGKGLEWVARIRSKYNNYATYYADSVKDRFTISRDDSKNTAYLQMNNLKTEDTAVYYCVRHGNFGNSYISYWAYWGQGTLVTVSSGGGGQGGGGQGGGGQQTVVTQEPSLTVSPGGTVTLTCGSSTGAVTSGNYPNWVQQKPGQAPRGLIGGTKFLAPGTPARFSGSLLGGKAALTLSGVQPEDEAEYYCVLWYSNRWVFGGGTKLTVL

SEQ ID NO: 3098 - protein, 746 aa, Artificial Sequence
  Synthetic
EVQLVESGGGLVQPGRSLRLSCAASGFTFHDYTMHWVRQAPGKCLEWVSGISWNSGTIGYADSVRGRFTISRDNAKNSLYLQVNSLRPEDTALYYCAKDGHYGAYYYGMDVWGQGTTVTVSSGGGGSGGGGSGGGGSEIVLTQSPATLSVSPGERATLSCRASQSVNNNLAWYQQKPGQAPRLLIYGASTRATGIPARFSGSGSGTEFTLTISSLQSEDFAVYYCQQYNDWPITFGCGTRLEIKSGGGGSQVQLVQSGAEVKKPGESLKISCKGSGYSFTSYGISWVRQAPGQCLEWMGWISAYNGNTIYAQKLQGRVTMTTDTSTSTAYMELRRLRSDDTAVYYCARDPGVTGDDYWGQGTLVTVSSGGGGSGGGGSGGGGSEIVLTQSPATLSVSPGERATLSCRASLSVSSNLAWYQQKPGQAPRLLIYGASTRATGIPARFSGSGSGTEFTLTISSLQSEDFAVYFCQQYHSWPALTFGCGTKVEIKSGGGGSEVQLVESGGGLVQPGGSLKLSCAASGFTFNKYAINWVRQAPGKGLEWVARIRSKYNNYATYYADAVKDRFTISRDDSKNTVYLQMNNLKTEDTAVYYCARAGNFGSSYISYWAYWGQGTLVTVSSGGGGSGGGGSGGGGSQTVVTQEPSLTVSPGGTVTITCGSSTGAVTSGNYPNWVQKKPGQAPRGLIGGTKFLAPGTPARFSGSLSGGKAALTLSGVQPEDEAEYYCVLWYSNRWVFGSGTKLTVL

SEQ ID NO: 3099 - protein, 746 aa, Artificial Sequence
  Synthetic
EVQLVESGGGLVQPGRSLRLSCAASGFTFHDYTMHWVRQAPGKCLEWVSGISWNSGTIGYADSVRGRFTISRDNAKNSLYLQVNSLRPEDTALYYCAKDGHYGAYYYGMDVWGQGTTVTVSSGGGGQGGGGQGGGGQEIVLTQSPATLSVSPGERATLSCRASQSVNNNLAWYQQKPGQAPRLLIYGASTRATGIPARFSGSGSGTEFTLTISSLQSEDFAVYYCQQYNDWPITFGCGTRLEIKSGGGGQQVQLVQSGAEVKKPGESLKISCKGSGYSFTSYGISWVRQAPGQCLEWMGWISAYNGNTIYAQKLQGRVTMTTDTSTSTAYMELRRLRSDDTAVYYCARDPGVTGDDYWGQGTLVTVSSGGGGQGGGGQGGGGQEIVLTQSPATLSVSPGERATLSCRASLSVSSNLAWYQQKPGQAPRLLIYGASTRATGIPARFSGSGSGTEFTLTISSLQSEDFAVYFCQQYHSWPALTFGCGTKVEIKSGGGGQEVQLVESGGGLVQPGGSLKLSCAASGFTFNKYAINWVRQAPGKGLEWVARIRSKYNNYATYYADAVKDRFTISRDDSKNTVYLQMNNLKTEDTAVYYCARAGNFGSSYISYWAYWGQGTLVTVSSGGGGQGGGGQGGGGQQTVVTQEPSLTVSPGGTVTITCGSSTGAVTSGNYPNWVQKKPGQAPRGLIGGTKFLAPGTPARFSGSLSGGKAALTLSGVQPEDEAEYYCVLWYSNRWVFGSGTKLTVL

SEQ ID NO: 3100 - protein, 1234 aa, Artificial Sequence
  Synthetic
EVQLVESGGGLVQPGRSLRLSCAASGFTFHDYTMHWVRQAPGKCLEWVSGISWNSGTIGYADSVRGRFTISRDNAKNSLYLQVNSLRPEDTALYYCAKDGHYGAYYYGMDVWGQGTTVTVSSGGGGSGGGGSGGGGSEIVLTQSPATLSVSPGERATLSCRASQSVNNNLAWYQQKPGQAPRLLIYGASTRATGIPARFSGSGSGTEFTLTISSLQSEDFAVYYCQQYNDWPITFGCGTRLEIKSGGGGSQVQLVQSGAEVKKPGESLKISCKGSGYSFTSYGISWVRQAPGQCLEWMGWISAYNGNTIYAQKLQGRVTMTTDTSTSTAYMELRRLRSDDTAVYYCARDPGVTGDDYWGQGTLVTVSSGGGGSGGGGSGGGGSEIVLTQSPATLSVSPGERATLSCRASLSVSSNLAWYQQKPGQAPRLLIYGASTRATGIPARFSGSGSGTEFTLTISSLQSEDFAVYFCQQYHSWPALTFGCGTKVEIKSGGGGSEVQLVESGGGLVQPGGSLKLSCAASGFTFNKYAMNWVRQAPGKGLEWVARIRSKYNNYATYYADSVKDRFTISRDDSKNTAYLQMNNLKTEDTAVYYCVRHGNFGNSYISYWAYWGQGTLVTVSSGGGGSGGGGSGGGGSQTVVTQEPSLTVSPGGTVTLTCGSSTGAVTSGNYPNWVQQKPGQAPRGLIGGTKFLAPGTPARFSGSLLGGKAALTLSGVQPEDEAEYYCVLWYSNRWVFGGGTKLTVLGGGGDKTHTCPPCPAPELLGGPSVFLFPPKPKDTLMISRTPEVTCVVVDVSHEDPEVKFNWYVDGVEVHNAKTKPCEEQYGSTYRCVSVLTVLHQDWLNGKEYKCKVSNKALPAPIEKTISKAKGQPREPQVYTLPPSREEMTKNQVSLTCLVKGFYPSDIAVEWESNGQPENNYKTTPPVLDSDGSFFLYSKLTVDKSRWQQGNVFSCSVMHEALHNHYTQKSLSLSPGKGGGGSGGGGSGGGGSGGGGSGGGGSGGGGSDKTHTCPPCPAPELLGGPSVFLFPPKPKDTLMISRTPEVTCVVVDVSHEDPEVKFNWYVDGVEVHNAKTKPCEEQYGSTYRCVSVLTVLHQDWLNGKEYKCKVSNKALPAPIEKTISKAKGQPREPQVYTLPPSREEMTKNQVSLTCLVKGFYPSDIAVEWESNGQPENNYKTTPPVLDSDGSFFLYSKLTVDKSRWQQGNVFSCSVMHEALHNHYTQKSLSLSPGK

SEQ ID NO: 3101 - protein, 1224 aa, Artificial Sequence
  Synthetic
EVQLVESGGGLVQPGRSLRLSCAASGFTFHDYTMHWVRQAPGKCLEWVSGISWNSGTIGYADSVRGRFTISRDNAKNSLYLQVNSLRPEDTALYYCAKDGHYGAYYYGMDVWGQGTTVTVSSGGGGQGGGGQGGGGQEIVLTQSPATLSVSPGERATLSCRASQSVNNNLAWYQQKPGQAPRLLIYGASTRATGIPARFSGSGSGTEFTLTISSLQSEDFAVYYCQQYNDWPITFGCGTRLEIKSGGGGQQVQLVQSGAEVKKPGESLKISCKGSGYSFTSYGISWVRQAPGQCLEWMGWISAYNGNTIYAQKLQGRVTMTTDTSTSTAYMELRRLRSDDTAVYYCARDPGVTGDDYWGQGTLVTVSSGGGGQGGGGQGGGGQEIVLTQSPATLSVSPGERATLSCRASLSVSSNLAWYQQKPGQAPRLLIYGASTRATGIPARFSGSGSGTEFTLTISSLQSEDFAVYFCQQYHSWPALTFGCGTKVEIKSGGGGQEVQLVESGGGLVQPGGSLKLSCAASGFTFNKYAMNWVRQAPGKGLEWVARIRSKYNNYATYYADSVKDRFTISRDDSKNTAYLQMNNLKTEDTAVYYCVRHGNFGNSYISYWAYWGQGTLVTVSSGGGGQGGGGQGGGGQQTVVTQEPSLTVSPGGTVTLTCGSSTGAVTSGNYPNWVQQKPGQAPRGLIGGTKFLAPGTPARFSGSLLGGKAALTLSGVQPEDEAEYYCVLWYSNRWVFGGGTKLTVLGGGGCPPCPAPELLGGPSVFLFPPKPKDTLMISRTPEVTCVVVDVSHEEPEVKFNWYVDGVEVHNAKTKPCEEQYGSTYRCVSVLTVLHQDWLNGKEYKCKVSNKALPAPIEKTISKAKGQPREPQVYTLPPSREEMTKNQVSLTCLVKGFYPSDIAVEWESNGQPENNYKTTPPVLDSDGSFFLYSKLTVDKSRWQQGNVFSCSVMHEALHNHYTQKSLSLSPGKGGGGQGGGGQGGGGQGGGGQGGGGQGGGGQCPPCPAPELLGGPSVFLFPPKPKDTLMISRTPEVTCVVVDVSHEEPEVKFNWYVDGVEVHNAKTKPCEEQYGSTYRCVSVLTVLHQDWLNGKEYKCKVSNKALPAPIEKTISKAKGQPREPQVYTLPPSREEMTKNQVSLTCLVKGFYPSDIAVEWESNGQPENNYKTTPPVLDSDGSFFLYSKLTVDKSRWQQGNVFSCSVMHEALHNHYTQKSLSLSPGK

SEQ ID NO: 3102 - protein, 1234 aa, Artificial Sequence
  Synthetic
EVQLVESGGGLVQPGRSLRLSCAASGFTFHDYTMHWVRQAPGKCLEWVSGISWNSGTIGYADSVRGRFTISRDNAKNSLYLQVNSLRPEDTALYYCAKDGHYGAYYYGMDVWGQGTTVTVSSGGGGSGGGGSGGGGSEIVLTQSPATLSVSPGERATLSCRASQSVNNNLAWYQQKPGQAPRLLIYGASTRATGIPARFSGSGSGTEFTLTISSLQSEDFAVYYCQQYNDWPITFGCGTRLEIKSGGGGSQVQLVQSGAEVKKPGESLKISCKGSGYSFTSYGISWVRQAPGQCLEWMGWISAYNGNTIYAQKLQGRVTMTTDTSTSTAYMELRRLRSDDTAVYYCARDPGVTGDDYWGQGTLVTVSSGGGGSGGGGSGGGGSEIVLTQSPATLSVSPGERATLSCRASLSVSSNLAWYQQKPGQAPRLLIYGASTRATGIPARFSGSGSGTEFTLTISSLQSEDFAVYFCQQYHSWPALTFGCGTKVEIKSGGGGSEVQLVESGGGLVQPGGSLKLSCAASGFTFNKYAINWVRQAPGKGLEWVARIRSKYNNYATYYADAVKDRFTISRDDSKNTVYLQMNNLKTEDTAVYYCARAGNFGSSYISYWAYWGQGTLVTVSSGGGGSGGGGSGGGGSQTVVTQEPSLTVSPGGTVTITCGSSTGAVTSGNYPNWVQKKPGQAPRGLIGGTKFLAPGTPARFSGSLSGGKAALTLSGVQPEDEAEYYCVLWYSNRWVFGSGTKLTVLGGGGDKTHTCPPCPAPELLGGPSVFLFPPKPKDTLMISRTPEVTCVVVDVSHEDPEVKFNWYVDGVEVHNAKTKPCEEQYGSTYRCVSVLTVLHQDWLNGKEYKCKVSNKALPAPIEKTISKAKGQPREPQVYTLPPSREEMTKNQVSLTCLVKGFYPSDIAVEWESNGQPENNYKTTPPVLDSDGSFFLYSKLTVDKSRWQQGNVFSCSVMHEALHNHYTQKSLSLSPGKGGGGSGGGGSGGGGSGGGGSGGGGSGGGGSDKTHTCPPCPAPELLGGPSVFLFPPKPKDTLMISRTPEVTCVVVDVSHEDPEVKFNWYVDGVEVHNAKTKPCEEQYGSTYRCVSVLTVLHQDWLNGKEYKCKVSNKALPAPIEKTISKAKGQPREPQVYTLPPSREEMTKNQVSLTCLVKGFYPSDIAVEWESNGQPENNYKTTPPVLDSDGSFFLYSKLTVDKSRWQQGNVFSCSVMHEALHNHYTQKSLSLSPGK

SEQ ID NO: 3103 - protein, 1224 aa, Artificial Sequence
  Synthetic
EVQLVESGGGLVQPGRSLRLSCAASGFTFHDYTMHWVRQAPGKCLEWVSGISWNSGTIGYADSVRGRFTISRDNAKNSLYLQVNSLRPEDTALYYCAKDGHYGAYYYGMDVWGQGTTVTVSSGGGGQGGGGQGGGGQEIVLTQSPATLSVSPGERATLSCRASQSVNNNLAWYQQKPGQAPRLLIYGASTRATGIPARFSGSGSGTEFTLTISSLQSEDFAVYYCQQYNDWPITFGCGTRLEIKSGGGGQQVQLVQSGAEVKKPGESLKISCKGSGYSFTSYGISWVRQAPGQCLEWMGWISAYNGNTIYAQKLQGRVTMTTDTSTSTAYMELRRLRSDDTAVYYCARDPGVTGDDYWGQGTLVTVSSGGGGQGGGGQGGGGQEIVLTQSPATLSVSPGERATLSCRASLSVSSNLAWYQQKPGQAPRLLIYGASTRATGIPARFSGSGSGTEFTLTISSLQSEDFAVYFCQQYHSWPALTFGCGTKVEIKSGGGGQEVQLVESGGGLVQPGGSLKLSCAASGFTFNKYAINWVRQAPGKGLEWVARIRSKYNNYATYYADAVKDRFTISRDDSKNTVYLQMNNLKTEDTAVYYCARAGNFGSSYISYWAYWGQGTLVTVSSGGGGQGGGGQGGGGQQTVVTQEPSLTVSPGGTVTITCGSSTGAVTSGNYPNWVQKKPGQAPRGLIGGTKFLAPGTPARFSGSLSGGKAALTLSGVQPEDEAEYYCVLWYSNRWVFGSGTKLTVLGGGGCPPCPAPELLGGPSVFLFPPKPKDTLMISRTPEVTCVVVDVSHEEPEVKFNWYVDGVEVHNAKTKPCEEQYGSTYRCVSVLTVLHQDWLNGKEYKCKVSNKALPAPIEKTISKAKGQPREPQVYTLPPSREEMTKNQVSLTCLVKGFYPSDIAVEWESNGQPENNYKTTPPVLDSDGSFFLYSKLTVDKSRWQQGNVFSCSVMHEALHNHYTQKSLSLSPGKGGGGQGGGGQGGGGQGGGGQGGGGQGGGGQCPPCPAPELLGGPSVFLFPPKPKDTLMISRTPEVTCVVVDVSHEEPEVKFNWYVDGVEVHNAKTKPCEEQYGSTYRCVSVLTVLHQDWLNGKEYKCKVSNKALPAPIEKTISKAKGQPREPQVYTLPPSREEMTKNQVSLTCLVKGFYPSDIAVEWESNGQPENNYKTTPPVLDSDGSFFLYSKLTVDKSRWQQGNVFSCSVMHEALHNHYTQKSLSLSPGK

SEQ ID NO: 3104 - protein, 489 aa, Artificial Sequence
  Synthetic
EVQLVESGGGLVQPGRSLRLSCAASGFTFHDYTMHWVRQAPGKCLEWVSGISWNSGTIGYADSVRGRFTISRDNAKNSLYLQVNSLRPEDTALYYCAKDGHYGAYYYGMDVWGQGTTVTVSSGGGGSGGGGSGGGGSEIVLTQSPATLSVSPGERATLSCRASQSVNNNLAWYQQKPGQAPRLLIYGASTRATGIPARFSGSGSGTEFTLTISSLQSEDFAVYYCQQYNDWPITFGCGTRLEIKSGGGGSQVQLVQSGAEVKKPGASVKVSCKTSGYPFTSYGISWVRQAPGQCLEWMGWISPYSGAPTYAQKVQGRVTMTTDTSTTTAYMELRSLRSDDTAVYYCVRDGLEEDYWGQGTLVTVSSGGGGSGGGGSGGGGSEIVLTQSPATLSVSPGEGATLSCRASQSVSSNLAWYQQSPGQAPRLLIYGASTRATGIPARFSGSGSGTEFTLTISSLQSEDFAVYYCQQYHSWPALTFGCGTKVDIK

SEQ ID NO: 3105 - protein, 489 aa, Artificial Sequence
  Synthetic
EVQLVESGGGLVQPGRSLRLSCAASGFTFHDYTMHWVRQAPGKCLEWVSGISWNSGTIGYADSVRGRFTISRDNAKNSLYLQVNSLRPEDTALYYCAKDGHYGAYYYGMDVWGQGTTVTVSSGGGGQGGGGQGGGGQEIVLTQSPATLSVSPGERATLSCRASQSVNNNLAWYQQKPGQAPRLLIYGASTRATGIPARFSGSGSGTEFTLTISSLQSEDFAVYYCQQYNDWPITFGCGTRLEIKSGGGGQQVQLVQSGAEVKKPGASVKVSCKTSGYPFTSYGISWVRQAPGQCLEWMGWISPYSGAPTYAQKVQGRVTMTTDTSTTTAYMELRSLRSDDTAVYYCVRDGLEEDYWGQGTLVTVSSGGGGQGGGGQGGGGQEIVLTQSPATLSVSPGEGATLSCRASQSVSSNLAWYQQSPGQAPRLLIYGASTRATGIPARFSGSGSGTEFTLTISSLQSEDFAVYYCQQYHSWPALTFGCGTKVDIK

SEQ ID NO: 3106 - protein, 744 aa, Artificial Sequence
  Synthetic
EVQLVESGGGLVQPGRSLRLSCAASGFTFHDYTMHWVRQAPGKCLEWVSGISWNSGTIGYADSVRGRFTISRDNAKNSLYLQVNSLRPEDTALYYCAKDGHYGAYYYGMDVWGQGTTVTVSSGGGGSGGGGSGGGGSEIVLTQSPATLSVSPGERATLSCRASQSVNNNLAWYQQKPGQAPRLLIYGASTRATGIPARFSGSGSGTEFTLTISSLQSEDFAVYYCQQYNDWPITFGCGTRLEIKSGGGGSQVQLVQSGAEVKKPGASVKVSCKTSGYPFTSYGISWVRQAPGQCLEWMGWISPYSGAPTYAQKVQGRVTMTTDTSTTTAYMELRSLRSDDTAVYYCVRDGLEEDYWGQGTLVTVSSGGGGSGGGGSGGGGSEIVLTQSPATLSVSPGEGATLSCRASQSVSSNLAWYQQSPGQAPRLLIYGASTRATGIPARFSGSGSGTEFTLTISSLQSEDFAVYYCQQYHSWPALTFGCGTKVDIKSGGGGSEVQLVESGGGLVQPGGSLKLSCAASGFTFNKYAMNWVRQAPGKGLEWVARIRSKYNNYATYYADSVKDRFTISRDDSKNTAYLQMNNLKTEDTAVYYCVRHGNFGNSYISYWAYWGQGTLVTVSSGGGGSGGGGSGGGGSQTVVTQEPSLTVSPGGTVTLTCGSSTGAVTSGNYPNWVQQKPGQAPRGLIGGTKFLAPGTPARFSGSLLGGKAALTLSGVQPEDEAEYYCVLWYSNRWVFGGGTKLTVL

SEQ ID NO: 3107 - protein, 744 aa, Artificial Sequence
  Synthetic
EVQLVESGGGLVQPGRSLRLSCAASGFTFHDYTMHWVRQAPGKCLEWVSGISWNSGTIGYADSVRGRFTISRDNAKNSLYLQVNSLRPEDTALYYCAKDGHYGAYYYGMDVWGQGTTVTVSSGGGGQGGGGQGGGGQEIVLTQSPATLSVSPGERATLSCRASQSVNNNLAWYQQKPGQAPRLLIYGASTRATGIPARFSGSGSGTEFTLTISSLQSEDFAVYYCQQYNDWPITFGCGTRLEIKSGGGGQQVQLVQSGAEVKKPGASVKVSCKTSGYPFTSYGISWVRQAPGQCLEWMGWISPYSGAPTYAQKVQGRVTMTTDTSTTTAYMELRSLRSDDTAVYYCVRDGLEEDYWGQGTLVTVSSGGGGQGGGGQGGGGQEIVLTQSPATLSVSPGEGATLSCRASQSVSSNLAWYQQSPGQAPRLLIYGASTRATGIPARFSGSGSGTEFTLTISSLQSEDFAVYYCQQYHSWPALTFGCGTKVDIKSGGGGQEVQLVESGGGLVQPGGSLKLSCAASGFTFNKYAMNWVRQAPGKGLEWVARIRSKYNNYATYYADSVKDRFTISRDDSKNTAYLQMNNLKTEDTAVYYCVRHGNFGNSYISYWAYWGQGTLVTVSSGGGGQGGGGQGGGGQQTVVTQEPSLTVSPGGTVTLTCGSSTGAVTSGNYPNWVQQKPGQAPRGLIGGTKFLAPGTPARFSGSLLGGKAALTLSGVQPEDEAEYYCVLWYSNRWVFGGGTKLTVL

SEQ ID NO: 3108 - protein, 744 aa, Artificial Sequence
  Synthetic
EVQLVESGGGLVQPGRSLRLSCAASGFTFHDYTMHWVRQAPGKCLEWVSGISWNSGTIGYADSVRGRFTISRDNAKNSLYLQVNSLRPEDTALYYCAKDGHYGAYYYGMDVWGQGTTVTVSSGGGGSGGGGSGGGGSEIVLTQSPATLSVSPGERATLSCRASQSVNNNLAWYQQKPGQAPRLLIYGASTRATGIPARFSGSGSGTEFTLTISSLQSEDFAVYYCQQYNDWPITFGCGTRLEIKSGGGGSQVQLVQSGAEVKKPGASVKVSCKTSGYPFTSYGISWVRQAPGQCLEWMGWISPYSGAPTYAQKVQGRVTMTTDTSTTTAYMELRSLRSDDTAVYYCVRDGLEEDYWGQGTLVTVSSGGGGSGGGGSGGGGSEIVLTQSPATLSVSPGEGATLSCRASQSVSSNLAWYQQSPGQAPRLLIYGASTRATGIPARFSGSGSGTEFTLTISSLQSEDFAVYYCQQYHSWPALTFGCGTKVDIKSGGGGSEVQLVESGGGLVQPGGSLKLSCAASGFTFNKYAINWVRQAPGKGLEWVARIRSKYNNYATYYADAVKDRFTISRDDSKNTVYLQMNNLKTEDTAVYYCARAGNFGSSYISYWAYWGQGTLVTVSSGGGGSGGGGSGGGGSQTVVTQEPSLTVSPGGTVTITCGSSTGAVTSGNYPNWVQKKPGQAPRGLIGGTKFLAPGTPARFSGSLSGGKAALTLSGVQPEDEAEYYCVLWYSNRWVFGSGTKLTVL

SEQ ID NO: 3109 - protein, 744 aa, Artificial Sequence
  Synthetic
EVQLVESGGGLVQPGRSLRLSCAASGFTFHDYTMHWVRQAPGKCLEWVSGISWNSGTIGYADSVRGRFTISRDNAKNSLYLQVNSLRPEDTALYYCAKDGHYGAYYYGMDVWGQGTTVTVSSGGGGQGGGGQGGGGQEIVLTQSPATLSVSPGERATLSCRASQSVNNNLAWYQQKPGQAPRLLIYGASTRATGIPARFSGSGSGTEFTLTISSLQSEDFAVYYCQQYNDWPITFGCGTRLEIKSGGGGQQVQLVQSGAEVKKPGASVKVSCKTSGYPFTSYGISWVRQAPGQCLEWMGWISPYSGAPTYAQKVQGRVTMTTDTSTTTAYMELRSLRSDDTAVYYCVRDGLEEDYWGQGTLVTVSSGGGGQGGGGQGGGGQEIVLTQSPATLSVSPGEGATLSCRASQSVSSNLAWYQQSPGQAPRLLIYGASTRATGIPARFSGSGSGTEFTLTISSLQSEDFAVYYCQQYHSWPALTFGCGTKVDIKSGGGGQEVQLVESGGGLVQPGGSLKLSCAASGFTFNKYAINWVRQAPGKGLEWVARIRSKYNNYATYYADAVKDRFTISRDDSKNTVYLQMNNLKTEDTAVYYCARAGNFGSSYISYWAYWGQGTLVTVSSGGGGQGGGGQGGGGQQTVVTQEPSLTVSPGGTVTITCGSSTGAVTSGNYPNWVQKKPGQAPRGLIGGTKFLAPGTPARFSGSLSGGKAALTLSGVQPEDEAEYYCVLWYSNRWVFGSGTKLTVL

SEQ ID NO: 3110 - protein, 1232 aa, Artificial Sequence
  Synthetic
EVQLVESGGGLVQPGRSLRLSCAASGFTFHDYTMHWVRQAPGKCLEWVSGISWNSGTIGYADSVRGRFTISRDNAKNSLYLQVNSLRPEDTALYYCAKDGHYGAYYYGMDVWGQGTTVTVSSGGGGSGGGGSGGGGSEIVLTQSPATLSVSPGERATLSCRASQSVNNNLAWYQQKPGQAPRLLIYGASTRATGIPARFSGSGSGTEFTLTISSLQSEDFAVYYCQQYNDWPITFGCGTRLEIKSGGGGSQVQLVQSGAEVKKPGASVKVSCKTSGYPFTSYGISWVRQAPGQCLEWMGWISPYSGAPTYAQKVQGRVTMTTDTSTTTAYMELRSLRSDDTAVYYCVRDGLEEDYWGQGTLVTVSSGGGGSGGGGSGGGGSEIVLTQSPATLSVSPGEGATLSCRASQSVSSNLAWYQQSPGQAPRLLIYGASTRATGIPARFSGSGSGTEFTLTISSLQSEDFAVYYCQQYHSWPALTFGCGTKVDIKSGGGGSEVQLVESGGGLVQPGGSLKLSCAASGFTFNKYAMNWVRQAPGKGLEWVARIRSKYNNYATYYADSVKDRFTISRDDSKNTAYLQMNNLKTEDTAVYYCVRHGNFGNSYISYWAYWGQGTLVTVSSGGGGSGGGGSGGGGSQTVVTQEPSLTVSPGGTVTLTCGSSTGAVTSGNYPNWVQQKPGQAPRGLIGGTKFLAPGTPARFSGSLLGGKAALTLSGVQPEDEAEYYCVLWYSNRWVFGGGTKLTVLGGGGDKTHTCPPCPAPELLGGPSVFLFPPKPKDTLMISRTPEVTCVVVDVSHEDPEVKFNWYVDGVEVHNAKTKPCEEQYGSTYRCVSVLTVLHQDWLNGKEYKCKVSNKALPAPIEKTISKAKGQPREPQVYTLPPSREEMTKNQVSLTCLVKGFYPSDIAVEWESNGQPENNYKTTPPVLDSDGSFFLYSKLTVDKSRWQQGNVFSCSVMHEALHNHYTQKSLSLSPGKGGGGSGGGGSGGGGSGGGGSGGGGSGGGGSDKTHTCPPCPAPELLGGPSVFLFPPKPKDTLMISRTPEVTCVVVDVSHEDPEVKFNWYVDGVEVHNAKTKPCEEQYGSTYRCVSVLTVLHQDWLNGKEYKCKVSNKALPAPIEKTISKAKGQPREPQVYTLPPSREEMTKNQVSLTCLVKGFYPSDIAVEWESNGQPENNYKTTPPVLDSDGSFFLYSKLTVDKSRWQQGNVFSCSVMHEALHNHYTQKSLSLSPGK

SEQ ID NO: 3111 - protein, 1222 aa, Artificial Sequence
  Synthetic
EVQLVESGGGLVQPGRSLRLSCAASGFTFHDYTMHWVRQAPGKCLEWVSGISWNSGTIGYADSVRGRFTISRDNAKNSLYLQVNSLRPEDTALYYCAKDGHYGAYYYGMDVWGQGTTVTVSSGGGGQGGGGQGGGGQEIVLTQSPATLSVSPGERATLSCRASQSVNNNLAWYQQKPGQAPRLLIYGASTRATGIPARFSGSGSGTEFTLTISSLQSEDFAVYYCQQYNDWPITFGCGTRLEIKSGGGGQQVQLVQSGAEVKKPGASVKVSCKTSGYPFTSYGISWVRQAPGQCLEWMGWISPYSGAPTYAQKVQGRVTMTTDTSTTTAYMELRSLRSDDTAVYYCVRDGLEEDYWGQGTLVTVSSGGGGQGGGGQGGGGQEIVLTQSPATLSVSPGEGATLSCRASQSVSSNLAWYQQSPGQAPRLLIYGASTRATGIPARFSGSGSGTEFTLTISSLQSEDFAVYYCQQYHSWPALTFGCGTKVDIKSGGGGQEVQLVESGGGLVQPGGSLKLSCAASGFTFNKYAMNWVRQAPGKGLEWVARIRSKYNNYATYYADSVKDRFTISRDDSKNTAYLQMNNLKTEDTAVYYCVRHGNFGNSYISYWAYWGQGTLVTVSSGGGGQGGGGQGGGGQQTVVTQEPSLTVSPGGTVTLTCGSSTGAVTSGNYPNWVQQKPGQAPRGLIGGTKFLAPGTPARFSGSLLGGKAALTLSGVQPEDEAEYYCVLWYSNRWVFGGGTKLTVLGGGGCPPCPAPELLGGPSVFLFPPKPKDTLMISRTPEVTCVVVDVSHEEPEVKFNWYVDGVEVHNAKTKPCEEQYGSTYRCVSVLTVLHQDWLNGKEYKCKVSNKALPAPIEKTISKAKGQPREPQVYTLPPSREEMTKNQVSLTCLVKGFYPSDIAVEWESNGQPENNYKTTPPVLDSDGSFFLYSKLTVDKSRWQQGNVFSCSVMHEALHNHYTQKSLSLSPGKGGGGQGGGGQGGGGQGGGGQGGGGQGGGGQCPPCPAPELLGGPSVFLFPPKPKDTLMISRTPEVTCVVVDVSHEEPEVKFNWYVDGVEVHNAKTKPCEEQYGSTYRCVSVLTVLHQDWLNGKEYKCKVSNKALPAPIEKTISKAKGQPREPQVYTLPPSREEMTKNQVSLTCLVKGFYPSDIAVEWESNGQPENNYKTTPPVLDSDGSFFLYSKLTVDKSRWQQGNVFSCSVMHEALHNHYTQKSLSLSPGK

SEQ ID NO: 3112 - protein, 1232 aa, Artificial Sequence
  Synthetic
EVQLVESGGGLVQPGRSLRLSCAASGFTFHDYTMHWVRQAPGKCLEWVSGISWNSGTIGYADSVRGRFTISRDNAKNSLYLQVNSLRPEDTALYYCAKDGHYGAYYYGMDVWGQGTTVTVSSGGGGSGGGGSGGGGSEIVLTQSPATLSVSPGERATLSCRASQSVNNNLAWYQQKPGQAPRLLIYGASTRATGIPARFSGSGSGTEFTLTISSLQSEDFAVYYCQQYNDWPITFGCGTRLEIKSGGGGSQVQLVQSGAEVKKPGASVKVSCKTSGYPFTSYGISWVRQAPGQCLEWMGWISPYSGAPTYAQKVQGRVTMTTDTSTTTAYMELRSLRSDDTAVYYCVRDGLEEDYWGQGTLVTVSSGGGGSGGGGSGGGGSEIVLTQSPATLSVSPGEGATLSCRASQSVSSNLAWYQQSPGQAPRLLIYGASTRATGIPARFSGSGSGTEFTLTISSLQSEDFAVYYCQQYHSWPALTFGCGTKVDIKSGGGGSEVQLVESGGGLVQPGGSLKLSCAASGFTFNKYAINWVRQAPGKGLEWVARIRSKYNNYATYYADAVKDRFTISRDDSKNTVYLQMNNLKTEDTAVYYCARAGNFGSSYISYWAYWGQGTLVTVSSGGGGSGGGGSGGGGSQTVVTQEPSLTVSPGGTVTITCGSSTGAVTSGNYPNWVQKKPGQAPRGLIGGTKFLAPGTPARFSGSLSGGKAALTLSGVQPEDEAEYYCVLWYSNRWVFGSGTKLTVLGGGGDKTHTCPPCPAPELLGGPSVFLFPPKPKDTLMISRTPEVTCVVVDVSHEDPEVKFNWYVDGVEVHNAKTKPCEEQYGSTYRCVSVLTVLHQDWLNGKEYKCKVSNKALPAPIEKTISKAKGQPREPQVYTLPPSREEMTKNQVSLTCLVKGFYPSDIAVEWESNGQPENNYKTTPPVLDSDGSFFLYSKLTVDKSRWQQGNVFSCSVMHEALHNHYTQKSLSLSPGKGGGGSGGGGSGGGGSGGGGSGGGGSGGGGSDKTHTCPPCPAPELLGGPSVFLFPPKPKDTLMISRTPEVTCVVVDVSHEDPEVKFNWYVDGVEVHNAKTKPCEEQYGSTYRCVSVLTVLHQDWLNGKEYKCKVSNKALPAPIEKTISKAKGQPREPQVYTLPPSREEMTKNQVSLTCLVKGFYPSDIAVEWESNGQPENNYKTTPPVLDSDGSFFLYSKLTVDKSRWQQGNVFSCSVMHEALHNHYTQKSLSLSPGK

SEQ ID NO: 3113 - protein, 1222 aa, Artificial Sequence
  Synthetic
EVQLVESGGGLVQPGRSLRLSCAASGFTFHDYTMHWVRQAPGKCLEWVSGISWNSGTIGYADSVRGRFTISRDNAKNSLYLQVNSLRPEDTALYYCAKDGHYGAYYYGMDVWGQGTTVTVSSGGGGQGGGGQGGGGQEIVLTQSPATLSVSPGERATLSCRASQSVNNNLAWYQQKPGQAPRLLIYGASTRATGIPARFSGSGSGTEFTLTISSLQSEDFAVYYCQQYNDWPITFGCGTRLEIKSGGGGQQVQLVQSGAEVKKPGASVKVSCKTSGYPFTSYGISWVRQAPGQCLEWMGWISPYSGAPTYAQKVQGRVTMTTDTSTTTAYMELRSLRSDDTAVYYCVRDGLEEDYWGQGTLVTVSSGGGGQGGGGQGGGGQEIVLTQSPATLSVSPGEGATLSCRASQSVSSNLAWYQQSPGQAPRLLIYGASTRATGIPARFSGSGSGTEFTLTISSLQSEDFAVYYCQQYHSWPALTFGCGTKVDIKSGGGGQEVQLVESGGGLVQPGGSLKLSCAASGFTFNKYAINWVRQAPGKGLEWVARIRSKYNNYATYYADAVKDRFTISRDDSKNTVYLQMNNLKTEDTAVYYCARAGNFGSSYISYWAYWGQGTLVTVSSGGGGQGGGGQGGGGQQTVVTQEPSLTVSPGGTVTITCGSSTGAVTSGNYPNWVQKKPGQAPRGLIGGTKFLAPGTPARFSGSLSGGKAALTLSGVQPEDEAEYYCVLWYSNRWVFGSGTKLTVLGGGGCPPCPAPELLGGPSVFLFPPKPKDTLMISRTPEVTCVVVDVSHEEPEVKFNWYVDGVEVHNAKTKPCEEQYGSTYRCVSVLTVLHQDWLNGKEYKCKVSNKALPAPIEKTISKAKGQPREPQVYTLPPSREEMTKNQVSLTCLVKGFYPSDIAVEWESNGQPENNYKTTPPVLDSDGSFFLYSKLTVDKSRWQQGNVFSCSVMHEALHNHYTQKSLSLSPGKGGGGQGGGGQGGGGQGGGGQGGGGQGGGGQCPPCPAPELLGGPSVFLFPPKPKDTLMISRTPEVTCVVVDVSHEEPEVKFNWYVDGVEVHNAKTKPCEEQYGSTYRCVSVLTVLHQDWLNGKEYKCKVSNKALPAPIEKTISKAKGQPREPQVYTLPPSREEMTKNQVSLTCLVKGFYPSDIAVEWESNGQPENNYKTTPPVLDSDGSFFLYSKLTVDKSRWQQGNVFSCSVMHEALHNHYTQKSLSLSPGK

SEQ ID NO: 3114 - protein, 489 aa, Artificial Sequence
  Synthetic
EVQLVESGGGLVQPGRSLRLSCAASGFTFHDYTMHWVRQAPGKCLEWVSGISWNSGTIGYADSVRGRFTISRDNAKNSLYLQVNSLRPEDTALYYCAKDGHYGAYYYGMDVWGQGTTVTVSSGGGGSGGGGSGGGGSEIVLTQSPATLSVSPGERATLSCRASQSVNNNLAWYQQKPGQAPRLLIYGASTRATGIPARFSGSGSGTEFTLTISSLQSEDFAVYYCQQYNDWPITFGCGTRLEIKSGGGGSQVQLVQSGAEVKKPGASVKVSCKASGYTFNNYGISWVRQAPGQCLEWMGWISAYNGKTSYAQKFQGRVTMTTDTSTGTAYMELRSLRSDDTAVYYCARSTGDGEYWGQGTLVTVSSGGGGSGGGGSGGGGSEIVMTQSPATLSVSPGERATLSCRASQSVSSNLAWYQQKPGQAPRLLIYGASTRATGIPARFSGGGSGTEFTLTISSLQSEDFAVYYCQQYHTWPVLTFGCGTKVEIK

SEQ ID NO: 3115 - protein, 489 aa, Artificial Sequence
  Synthetic
EVQLVESGGGLVQPGRSLRLSCAASGFTFHDYTMHWVRQAPGKCLEWVSGISWNSGTIGYADSVRGRFTISRDNAKNSLYLQVNSLRPEDTALYYCAKDGHYGAYYYGMDVWGQGTTVTVSSGGGGQGGGGQGGGGQEIVLTQSPATLSVSPGERATLSCRASQSVNNNLAWYQQKPGQAPRLLIYGASTRATGIPARFSGSGSGTEFTLTISSLQSEDFAVYYCQQYNDWPITFGCGTRLEIKSGGGGQQVQLVQSGAEVKKPGASVKVSCKASGYTFNNYGISWVRQAPGQCLEWMGWISAYNGKTSYAQKFQGRVTMTTDTSTGTAYMELRSLRSDDTAVYYCARSTGDGEYWGQGTLVTVSSGGGGQGGGGQGGGGQEIVMTQSPATLSVSPGERATLSCRASQSVSSNLAWYQQKPGQAPRLLIYGASTRATGIPARFSGGGSGTEFTLTISSLQSEDFAVYYCQQYHTWPVLTFGCGTKVEIK

SEQ ID NO: 3116 - protein, 744 aa, Artificial Sequence
  Synthetic
EVQLVESGGGLVQPGRSLRLSCAASGFTFHDYTMHWVRQAPGKCLEWVSGISWNSGTIGYADSVRGRFTISRDNAKNSLYLQVNSLRPEDTALYYCAKDGHYGAYYYGMDVWGQGTTVTVSSGGGGSGGGGSGGGGSEIVLTQSPATLSVSPGERATLSCRASQSVNNNLAWYQQKPGQAPRLLIYGASTRATGIPARFSGSGSGTEFTLTISSLQSEDFAVYYCQQYNDWPITFGCGTRLEIKSGGGGSQVQLVQSGAEVKKPGASVKVSCKASGYTFNNYGISWVRQAPGQCLEWMGWISAYNGKTSYAQKFQGRVTMTTDTSTGTAYMELRSLRSDDTAVYYCARSTGDGEYWGQGTLVTVSSGGGGSGGGGSGGGGSEIVMTQSPATLSVSPGERATLSCRASQSVSSNLAWYQQKPGQAPRLLIYGASTRATGIPARFSGGGSGTEFTLTISSLQSEDFAVYYCQQYHTWPVLTFGCGTKVEIKSGGGGSEVQLVESGGGLVQPGGSLKLSCAASGFTFNKYAMNWVRQAPGKGLEWVARIRSKYNNYATYYADSVKDRFTISRDDSKNTAYLQMNNLKTEDTAVYYCVRHGNFGNSYISYWAYWGQGTLVTVSSGGGGSGGGGSGGGGSQTVVTQEPSLTVSPGGTVTLTCGSSTGAVTSGNYPNWVQQKPGQAPRGLIGGTKFLAPGTPARFSGSLLGGKAALTLSGVQPEDEAEYYCVLWYSNRWVFGGGTKLTVL

SEQ ID NO: 3117 - protein, 744 aa, Artificial Sequence
  Synthetic
EVQLVESGGGLVQPGRSLRLSCAASGFTFHDYTMHWVRQAPGKCLEWVSGISWNSGTIGYADSVRGRFTISRDNAKNSLYLQVNSLRPEDTALYYCAKDGHYGAYYYGMDVWGQGTTVTVSSGGGGQGGGGQGGGGQEIVLTQSPATLSVSPGERATLSCRASQSVNNNLAWYQQKPGQAPRLLIYGASTRATGIPARFSGSGSGTEFTLTISSLQSEDFAVYYCQQYNDWPITFGCGTRLEIKSGGGGQQVQLVQSGAEVKKPGASVKVSCKASGYTFNNYGISWVRQAPGQCLEWMGWISAYNGKTSYAQKFQGRVTMTTDTSTGTAYMELRSLRSDDTAVYYCARSTGDGEYWGQGTLVTVSSGGGGQGGGGQGGGGQEIVMTQSPATLSVSPGERATLSCRASQSVSSNLAWYQQKPGQAPRLLIYGASTRATGIPARFSGGGSGTEFTLTISSLQSEDFAVYYCQQYHTWPVLTFGCGTKVEIKSGGGGQEVQLVESGGGLVQPGGSLKLSCAASGFTFNKYAMNWVRQAPGKGLEWVARIRSKYNNYATYYADSVKDRFTISRDDSKNTAYLQMNNLKTEDTAVYYCVRHGNFGNSYISYWAYWGQGTLVTVSSGGGGQGGGGQGGGGQQTVVTQEPSLTVSPGGTVTLTCGSSTGAVTSGNYPNWVQQKPGQAPRGLIGGTKFLAPGTPARFSGSLLGGKAALTLSGVQPEDEAEYYCVLWYSNRWVFGGGTKLTVL

SEQ ID NO: 3118 - protein, 744 aa, Artificial Sequence
  Synthetic
EVQLVESGGGLVQPGRSLRLSCAASGFTFHDYTMHWVRQAPGKCLEWVSGISWNSGTIGYADSVRGRFTISRDNAKNSLYLQVNSLRPEDTALYYCAKDGHYGAYYYGMDVWGQGTTVTVSSGGGGSGGGGSGGGGSEIVLTQSPATLSVSPGERATLSCRASQSVNNNLAWYQQKPGQAPRLLIYGASTRATGIPARFSGSGSGTEFTLTISSLQSEDFAVYYCQQYNDWPITFGCGTRLEIKSGGGGSQVQLVQSGAEVKKPGASVKVSCKASGYTFNNYGISWVRQAPGQCLEWMGWISAYNGKTSYAQKFQGRVTMTTDTSTGTAYMELRSLRSDDTAVYYCARSTGDGEYWGQGTLVTVSSGGGGSGGGGSGGGGSEIVMTQSPATLSVSPGERATLSCRASQSVSSNLAWYQQKPGQAPRLLIYGASTRATGIPARFSGGGSGTEFTLTISSLQSEDFAVYYCQQYHTWPVLTFGCGTKVEIKSGGGGSEVQLVESGGGLVQPGGSLKLSCAASGFTFNKYAINWVRQAPGKGLEWVARIRSKYNNYATYYADAVKDRFTISRDDSKNTVYLQMNNLKTEDTAVYYCARAGNFGSSYISYWAYWGQGTLVTVSSGGGGSGGGGSGGGGSQTVVTQEPSLTVSPGGTVTITCGSSTGAVTSGNYPNWVQKKPGQAPRGLIGGTKFLAPGTPARFSGSLSGGKAALTLSGVQPEDEAEYYCVLWYSNRWVFGSGTKLTVL

SEQ ID NO: 3119 - protein, 744 aa, Artificial Sequence
  Synthetic
EVQLVESGGGLVQPGRSLRLSCAASGFTFHDYTMHWVRQAPGKCLEWVSGISWNSGTIGYADSVRGRFTISRDNAKNSLYLQVNSLRPEDTALYYCAKDGHYGAYYYGMDVWGQGTTVTVSSGGGGQGGGGQGGGGQEIVLTQSPATLSVSPGERATLSCRASQSVNNNLAWYQQKPGQAPRLLIYGASTRATGIPARFSGSGSGTEFTLTISSLQSEDFAVYYCQQYNDWPITFGCGTRLEIKSGGGGQQVQLVQSGAEVKKPGASVKVSCKASGYTFNNYGISWVRQAPGQCLEWMGWISAYNGKTSYAQKFQGRVTMTTDTSTGTAYMELRSLRSDDTAVYYCARSTGDGEYWGQGTLVTVSSGGGGQGGGGQGGGGQEIVMTQSPATLSVSPGERATLSCRASQSVSSNLAWYQQKPGQAPRLLIYGASTRATGIPARFSGGGSGTEFTLTISSLQSEDFAVYYCQQYHTWPVLTFGCGTKVEIKSGGGGQEVQLVESGGGLVQPGGSLKLSCAASGFTFNKYAINWVRQAPGKGLEWVARIRSKYNNYATYYADAVKDRFTISRDDSKNTVYLQMNNLKTEDTAVYYCARAGNFGSSYISYWAYWGQGTLVTVSSGGGGQGGGGQGGGGQQTVVTQEPSLTVSPGGTVTITCGSSTGAVTSGNYPNWVQKKPGQAPRGLIGGTKFLAPGTPARFSGSLSGGKAALTLSGVQPEDEAEYYCVLWYSNRWVFGSGTKLTVL

SEQ ID NO: 3120 - protein, 1232 aa, Artificial Sequence
  Synthetic
EVQLVESGGGLVQPGRSLRLSCAASGFTFHDYTMHWVRQAPGKCLEWVSGISWNSGTIGYADSVRGRFTISRDNAKNSLYLQVNSLRPEDTALYYCAKDGHYGAYYYGMDVWGQGTTVTVSSGGGGSGGGGSGGGGSEIVLTQSPATLSVSPGERATLSCRASQSVNNNLAWYQQKPGQAPRLLIYGASTRATGIPARFSGSGSGTEFTLTISSLQSEDFAVYYCQQYNDWPITFGCGTRLEIKSGGGGSQVQLVQSGAEVKKPGASVKVSCKASGYTFNNYGISWVRQAPGQCLEWMGWISAYNGKTSYAQKFQGRVTMTTDTSTGTAYMELRSLRSDDTAVYYCARSTGDGEYWGQGTLVTVSSGGGGSGGGGSGGGGSEIVMTQSPATLSVSPGERATLSCRASQSVSSNLAWYQQKPGQAPRLLIYGASTRATGIPARFSGGGSGTEFTLTISSLQSEDFAVYYCQQYHTWPVLTFGCGTKVEIKSGGGGSEVQLVESGGGLVQPGGSLKLSCAASGFTFNKYAMNWVRQAPGKGLEWVARIRSKYNNYATYYADSVKDRFTISRDDSKNTAYLQMNNLKTEDTAVYYCVRHGNFGNSYISYWAYWGQGTLVTVSSGGGGSGGGGSGGGGSQTVVTQEPSLTVSPGGTVTLTCGSSTGAVTSGNYPNWVQQKPGQAPRGLIGGTKFLAPGTPARFSGSLLGGKAALTLSGVQPEDEAEYYCVLWYSNRWVFGGGTKLTVLGGGGDKTHTCPPCPAPELLGGPSVFLFPPKPKDTLMISRTPEVTCVVVDVSHEDPEVKFNWYVDGVEVHNAKTKPCEEQYGSTYRCVSVLTVLHQDWLNGKEYKCKVSNKALPAPIEKTISKAKGQPREPQVYTLPPSREEMTKNQVSLTCLVKGFYPSDIAVEWESNGQPENNYKTTPPVLDSDGSFFLYSKLTVDKSRWQQGNVFSCSVMHEALHNHYTQKSLSLSPGKGGGGSGGGGSGGGGSGGGGSGGGGSGGGGSDKTHTCPPCPAPELLGGPSVFLFPPKPKDTLMISRTPEVTCVVVDVSHEDPEVKFNWYVDGVEVHNAKTKPCEEQYGSTYRCVSVLTVLHQDWLNGKEYKCKVSNKALPAPIEKTISKAKGQPREPQVYTLPPSREEMTKNQVSLTCLVKGFYPSDIAVEWESNGQPENNYKTTPPVLDSDGSFFLYSKLTVDKSRWQQGNVFSCSVMHEALHNHYTQKSLSLSPGK

SEQ ID NO: 3121 - protein, 1222 aa, Artificial Sequence
  Synthetic
EVQLVESGGGLVQPGRSLRLSCAASGFTFHDYTMHWVRQAPGKCLEWVSGISWNSGTIGYADSVRGRFTISRDNAKNSLYLQVNSLRPEDTALYYCAKDGHYGAYYYGMDVWGQGTTVTVSSGGGGQGGGGQGGGGQEIVLTQSPATLSVSPGERATLSCRASQSVNNNLAWYQQKPGQAPRLLIYGASTRATGIPARFSGSGSGTEFTLTISSLQSEDFAVYYCQQYNDWPITFGCGTRLEIKSGGGGQQVQLVQSGAEVKKPGASVKVSCKASGYTFNNYGISWVRQAPGQCLEWMGWISAYNGKTSYAQKFQGRVTMTTDTSTGTAYMELRSLRSDDTAVYYCARSTGDGEYWGQGTLVTVSSGGGGQGGGGQGGGGQEIVMTQSPATLSVSPGERATLSCRASQSVSSNLAWYQQKPGQAPRLLIYGASTRATGIPARFSGGGSGTEFTLTISSLQSEDFAVYYCQQYHTWPVLTFGCGTKVEIKSGGGGQEVQLVESGGGLVQPGGSLKLSCAASGFTFNKYAMNWVRQAPGKGLEWVARIRSKYNNYATYYADSVKDRFTISRDDSKNTAYLQMNNLKTEDTAVYYCVRHGNFGNSYISYWAYWGQGTLVTVSSGGGGQGGGGQGGGGQQTVVTQEPSLTVSPGGTVTLTCGSSTGAVTSGNYPNWVQQKPGQAPRGLIGGTKFLAPGTPARFSGSLLGGKAALTLSGVQPEDEAEYYCVLWYSNRWVFGGGTKLTVLGGGGCPPCPAPELLGGPSVFLFPPKPKDTLMISRTPEVTCVVVDVSHEEPEVKFNWYVDGVEVHNAKTKPCEEQYGSTYRCVSVLTVLHQDWLNGKEYKCKVSNKALPAPIEKTISKAKGQPREPQVYTLPPSREEMTKNQVSLTCLVKGFYPSDIAVEWESNGQPENNYKTTPPVLDSDGSFFLYSKLTVDKSRWQQGNVFSCSVMHEALHNHYTQKSLSLSPGKGGGGQGGGGQGGGGQGGGGQGGGGQGGGGQCPPCPAPELLGGPSVFLFPPKPKDTLMISRTPEVTCVVVDVSHEEPEVKFNWYVDGVEVHNAKTKPCEEQYGSTYRCVSVLTVLHQDWLNGKEYKCKVSNKALPAPIEKTISKAKGQPREPQVYTLPPSREEMTKNQVSLTCLVKGFYPSDIAVEWESNGQPENNYKTTPPVLDSDGSFFLYSKLTVDKSRWQQGNVFSCSVMHEALHNHYTQKSLSLSPGK

SEQ ID NO: 3122 - protein, 1232 aa, Artificial Sequence
  Synthetic
EVQLVESGGGLVQPGRSLRLSCAASGFTFHDYTMHWVRQAPGKCLEWVSGISWNSGTIGYADSVRGRFTISRDNAKNSLYLQVNSLRPEDTALYYCAKDGHYGAYYYGMDVWGQGTTVTVSSGGGGSGGGGSGGGGSEIVLTQSPATLSVSPGERATLSCRASQSVNNNLAWYQQKPGQAPRLLIYGASTRATGIPARFSGSGSGTEFTLTISSLQSEDFAVYYCQQYNDWPITFGCGTRLEIKSGGGGSQVQLVQSGAEVKKPGASVKVSCKASGYTFNNYGISWVRQAPGQCLEWMGWISAYNGKTSYAQKFQGRVTMTTDTSTGTAYMELRSLRSDDTAVYYCARSTGDGEYWGQGTLVTVSSGGGGSGGGGSGGGGSEIVMTQSPATLSVSPGERATLSCRASQSVSSNLAWYQQKPGQAPRLLIYGASTRATGIPARFSGGGSGTEFTLTISSLQSEDFAVYYCQQYHTWPVLTFGCGTKVEIKSGGGGSEVQLVESGGGLVQPGGSLKLSCAASGFTFNKYAINWVRQAPGKGLEWVARIRSKYNNYATYYADAVKDRFTISRDDSKNTVYLQMNNLKTEDTAVYYCARAGNFGSSYISYWAYWGQGTLVTVSSGGGGSGGGGSGGGGSQTVVTQEPSLTVSPGGTVTITCGSSTGAVTSGNYPNWVQKKPGQAPRGLIGGTKFLAPGTPARFSGSLSGGKAALTLSGVQPEDEAEYYCVLWYSNRWVFGSGTKLTVLGGGGDKTHTCPPCPAPELLGGPSVFLFPPKPKDTLMISRTPEVTCVVVDVSHEDPEVKFNWYVDGVEVHNAKTKPCEEQYGSTYRCVSVLTVLHQDWLNGKEYKCKVSNKALPAPIEKTISKAKGQPREPQVYTLPPSREEMTKNQVSLTCLVKGFYPSDIAVEWESNGQPENNYKTTPPVLDSDGSFFLYSKLTVDKSRWQQGNVFSCSVMHEALHNHYTQKSLSLSPGKGGGGSGGGGSGGGGSGGGGSGGGGSGGGGSDKTHTCPPCPAPELLGGPSVFLFPPKPKDTLMISRTPEVTCVVVDVSHEDPEVKFNWYVDGVEVHNAKTKPCEEQYGSTYRCVSVLTVLHQDWLNGKEYKCKVSNKALPAPIEKTISKAKGQPREPQVYTLPPSREEMTKNQVSLTCLVKGFYPSDIAVEWESNGQPENNYKTTPPVLDSDGSFFLYSKLTVDKSRWQQGNVFSCSVMHEALHNHYTQKSLSLSPGK

SEQ ID NO: 3123 - protein, 1222 aa, Artificial Sequence
  Synthetic
EVQLVESGGGLVQPGRSLRLSCAASGFTFHDYTMHWVRQAPGKCLEWVSGISWNSGTIGYADSVRGRFTISRDNAKNSLYLQVNSLRPEDTALYYCAKDGHYGAYYYGMDVWGQGTTVTVSSGGGGQGGGGQGGGGQEIVLTQSPATLSVSPGERATLSCRASQSVNNNLAWYQQKPGQAPRLLIYGASTRATGIPARFSGSGSGTEFTLTISSLQSEDFAVYYCQQYNDWPITFGCGTRLEIKSGGGGQQVQLVQSGAEVKKPGASVKVSCKASGYTFNNYGISWVRQAPGQCLEWMGWISAYNGKTSYAQKFQGRVTMTTDTSTGTAYMELRSLRSDDTAVYYCARSTGDGEYWGQGTLVTVSSGGGGQGGGGQGGGGQEIVMTQSPATLSVSPGERATLSCRASQSVSSNLAWYQQKPGQAPRLLIYGASTRATGIPARFSGGGSGTEFTLTISSLQSEDFAVYYCQQYHTWPVLTFGCGTKVEIKSGGGGQEVQLVESGGGLVQPGGSLKLSCAASGFTFNKYAINWVRQAPGKGLEWVARIRSKYNNYATYYADAVKDRFTISRDDSKNTVYLQMNNLKTEDTAVYYCARAGNFGSSYISYWAYWGQGTLVTVSSGGGGQGGGGQGGGGQQTVVTQEPSLTVSPGGTVTITCGSSTGAVTSGNYPNWVQKKPGQAPRGLIGGTKFLAPGTPARFSGSLSGGKAALTLSGVQPEDEAEYYCVLWYSNRWVFGSGTKLTVLGGGGCPPCPAPELLGGPSVFLFPPKPKDTLMISRTPEVTCVVVDVSHEEPEVKFNWYVDGVEVHNAKTKPCEEQYGSTYRCVSVLTVLHQDWLNGKEYKCKVSNKALPAPIEKTISKAKGQPREPQVYTLPPSREEMTKNQVSLTCLVKGFYPSDIAVEWESNGQPENNYKTTPPVLDSDGSFFLYSKLTVDKSRWQQGNVFSCSVMHEALHNHYTQKSLSLSPGKGGGGQGGGGQGGGGQGGGGQGGGGQGGGGQCPPCPAPELLGGPSVFLFPPKPKDTLMISRTPEVTCVVVDVSHEEPEVKFNWYVDGVEVHNAKTKPCEEQYGSTYRCVSVLTVLHQDWLNGKEYKCKVSNKALPAPIEKTISKAKGQPREPQVYTLPPSREEMTKNQVSLTCLVKGFYPSDIAVEWESNGQPENNYKTTPPVLDSDGSFFLYSKLTVDKSRWQQGNVFSCSVMHEALHNHYTQKSLSLSPGK

SEQ ID NO: 3124 - protein, 498 aa, Artificial Sequence
  Synthetic
EVQLVESGGGLVQPGRSLRLSCAASGFTFHDYTMHWVRQAPGKCLEWVSGISWNSGTIGYADSVRGRFTISRDNAKNSLYLQVNSLRPEDTALYYCAKDGHYGAYYYGMDVWGQGTTVTVSSGGGGSGGGGSGGGGSEIVLTQSPATLSVSPGERATLSCRASQSVNNNLAWYQQKPGQAPRLLIYGASTRATGIPARFSGSGSGTEFTLTISSLQSEDFAVYYCQQYNDWPITFGCGTRLEIKSGGGGSQVQLQQSGPGLVKPSQTLSLTCAISGDSVSSKSAAWNWIRQSPSGCLEWLGRTFYRSTWYNDYAVSVKSRITINPDTSKNQFSLQLNSVIPEDTAVYYCAREGQWLVYGMDVWGQGTTVTVSSGGGGSGGGGSGGGGSQSVLTQPPSASGTPGQRITISCSGSSSNIGSNTVNWYQQLPGTAPKLLIYRNNQRPSGVPDRFSGSKSGTSASLAISGLQSEDEADYYCAAWDDSLNGRVFGCGTKLTVL

SEQ ID NO: 3125 - protein, 498 aa, Artificial Sequence
  Synthetic
EVQLVESGGGLVQPGRSLRLSCAASGFTFHDYTMHWVRQAPGKCLEWVSGISWNSGTIGYADSVRGRFTISRDNAKNSLYLQVNSLRPEDTALYYCAKDGHYGAYYYGMDVWGQGTTVTVSSGGGGQGGGGQGGGGQEIVLTQSPATLSVSPGERATLSCRASQSVNNNLAWYQQKPGQAPRLLIYGASTRATGIPARFSGSGSGTEFTLTISSLQSEDFAVYYCQQYNDWPITFGCGTRLEIKSGGGGQQVQLQQSGPGLVKPSQTLSLTCAISGDSVSSKSAAWNWIRQSPSGCLEWLGRTFYRSTWYNDYAVSVKSRITINPDTSKNQFSLQLNSVIPEDTAVYYCAREGQWLVYGMDVWGQGTTVTVSSGGGGQGGGGQGGGGQQSVLTQPPSASGTPGQRITISCSGSSSNIGSNTVNWYQQLPGTAPKLLIYRNNQRPSGVPDRFSGSKSGTSASLAISGLQSEDEADYYCAAWDDSLNGRVFGCGTKLTVL

SEQ ID NO: 3126 - protein, 753 aa, Artificial Sequence
  Synthetic
EVQLVESGGGLVQPGRSLRLSCAASGFTFHDYTMHWVRQAPGKCLEWVSGISWNSGTIGYADSVRGRFTISRDNAKNSLYLQVNSLRPEDTALYYCAKDGHYGAYYYGMDVWGQGTTVTVSSGGGGSGGGGSGGGGSEIVLTQSPATLSVSPGERATLSCRASQSVNNNLAWYQQKPGQAPRLLIYGASTRATGIPARFSGSGSGTEFTLTISSLQSEDFAVYYCQQYNDWPITFGCGTRLEIKSGGGGSQVQLQQSGPGLVKPSQTLSLTCAISGDSVSSKSAAWNWIRQSPSGCLEWLGRTFYRSTWYNDYAVSVKSRITINPDTSKNQFSLQLNSVIPEDTAVYYCAREGQWLVYGMDVWGQGTTVTVSSGGGGSGGGGSGGGGSQSVLTQPPSASGTPGQRITISCSGSSSNIGSNTVNWYQQLPGTAPKLLIYRNNQRPSGVPDRFSGSKSGTSASLAISGLQSEDEADYYCAAWDDSLNGRVFGCGTKLTVLSGGGGSEVQLVESGGGLVQPGGSLKLSCAASGFTFNKYAMNWVRQAPGKGLEWVARIRSKYNNYATYYADSVKDRFTISRDDSKNTAYLQMNNLKTEDTAVYYCVRHGNFGNSYISYWAYWGQGTLVTVSSGGGGSGGGGSGGGGSQTVVTQEPSLTVSPGGTVTLTCGSSTGAVTSGNYPNWVQQKPGQAPRGLIGGTKFLAPGTPARFSGSLLGGKAALTLSGVQPEDEAEYYCVLWYSNRWVFGGGTKLTVL

SEQ ID NO: 3127 - protein, 753 aa, Artificial Sequence
  Synthetic
EVQLVESGGGLVQPGRSLRLSCAASGFTFHDYTMHWVRQAPGKCLEWVSGISWNSGTIGYADSVRGRFTISRDNAKNSLYLQVNSLRPEDTALYYCAKDGHYGAYYYGMDVWGQGTTVTVSSGGGGQGGGGQGGGGQEIVLTQSPATLSVSPGERATLSCRASQSVNNNLAWYQQKPGQAPRLLIYGASTRATGIPARFSGSGSGTEFTLTISSLQSEDFAVYYCQQYNDWPITFGCGTRLEIKSGGGGQQVQLQQSGPGLVKPSQTLSLTCAISGDSVSSKSAAWNWIRQSPSGCLEWLGRTFYRSTWYNDYAVSVKSRITINPDTSKNQFSLQLNSVIPEDTAVYYCAREGQWLVYGMDVWGQGTTVTVSSGGGGQGGGGQGGGGQQSVLTQPPSASGTPGQRITISCSGSSSNIGSNTVNWYQQLPGTAPKLLIYRNNQRPSGVPDRFSGSKSGTSASLAISGLQSEDEADYYCAAWDDSLNGRVFGCGTKLTVLSGGGGQEVQLVESGGGLVQPGGSLKLSCAASGFTFNKYAMNWVRQAPGKGLEWVARIRSKYNNYATYYADSVKDRFTISRDDSKNTAYLQMNNLKTEDTAVYYCVRHGNFGNSYISYWAYWGQGTLVTVSSGGGGQGGGGQGGGGQQTVVTQEPSLTVSPGGTVTLTCGSSTGAVTSGNYPNWVQQKPGQAPRGLIGGTKFLAPGTPARFSGSLLGGKAALTLSGVQPEDEAEYYCVLWYSNRWVFGGGTKLTVL

SEQ ID NO: 3128 - protein, 753 aa, Artificial Sequence
  Synthetic
EVQLVESGGGLVQPGRSLRLSCAASGFTFHDYTMHWVRQAPGKCLEWVSGISWNSGTIGYADSVRGRFTISRDNAKNSLYLQVNSLRPEDTALYYCAKDGHYGAYYYGMDVWGQGTTVTVSSGGGGSGGGGSGGGGSEIVLTQSPATLSVSPGERATLSCRASQSVNNNLAWYQQKPGQAPRLLIYGASTRATGIPARFSGSGSGTEFTLTISSLQSEDFAVYYCQQYNDWPITFGCGTRLEIKSGGGGSQVQLQQSGPGLVKPSQTLSLTCAISGDSVSSKSAAWNWIRQSPSGCLEWLGRTFYRSTWYNDYAVSVKSRITINPDTSKNQFSLQLNSVIPEDTAVYYCAREGQWLVYGMDVWGQGTTVTVSSGGGGSGGGGSGGGGSQSVLTQPPSASGTPGQRITISCSGSSSNIGSNTVNWYQQLPGTAPKLLIYRNNQRPSGVPDRFSGSKSGTSASLAISGLQSEDEADYYCAAWDDSLNGRVFGCGTKLTVLSGGGGSEVQLVESGGGLVQPGGSLKLSCAASGFTFNKYAINWVRQAPGKGLEWVARIRSKYNNYATYYADAVKDRFTISRDDSKNTVYLQMNNLKTEDTAVYYCARAGNFGSSYISYWAYWGQGTLVTVSSGGGGSGGGGSGGGGSQTVVTQEPSLTVSPGGTVTITCGSSTGAVTSGNYPNWVQKKPGQAPRGLIGGTKFLAPGTPARFSGSLSGGKAALTLSGVQPEDEAEYYCVLWYSNRWVFGSGTKLTVL

SEQ ID NO: 3129 - protein, 753 aa, Artificial Sequence
  Synthetic
EVQLVESGGGLVQPGRSLRLSCAASGFTFHDYTMHWVRQAPGKCLEWVSGISWNSGTIGYADSVRGRFTISRDNAKNSLYLQVNSLRPEDTALYYCAKDGHYGAYYYGMDVWGQGTTVTVSSGGGGQGGGGQGGGGQEIVLTQSPATLSVSPGERATLSCRASQSVNNNLAWYQQKPGQAPRLLIYGASTRATGIPARFSGSGSGTEFTLTISSLQSEDFAVYYCQQYNDWPITFGCGTRLEIKSGGGGQQVQLQQSGPGLVKPSQTLSLTCAISGDSVSSKSAAWNWIRQSPSGCLEWLGRTFYRSTWYNDYAVSVKSRITINPDTSKNQFSLQLNSVIPEDTAVYYCAREGQWLVYGMDVWGQGTTVTVSSGGGGQGGGGQGGGGQQSVLTQPPSASGTPGQRITISCSGSSSNIGSNTVNWYQQLPGTAPKLLIYRNNQRPSGVPDRFSGSKSGTSASLAISGLQSEDEADYYCAAWDDSLNGRVFGCGTKLTVLSGGGGQEVQLVESGGGLVQPGGSLKLSCAASGFTFNKYAINWVRQAPGKGLEWVARIRSKYNNYATYYADAVKDRFTISRDDSKNTVYLQMNNLKTEDTAVYYCARAGNFGSSYISYWAYWGQGTLVTVSSGGGGQGGGGQGGGGQQTVVTQEPSLTVSPGGTVTITCGSSTGAVTSGNYPNWVQKKPGQAPRGLIGGTKFLAPGTPARFSGSLSGGKAALTLSGVQPEDEAEYYCVLWYSNRWVFGSGTKLTVL

SEQ ID NO: 3130 - protein, 1241 aa, Artificial Sequence
  Synthetic
EVQLVESGGGLVQPGRSLRLSCAASGFTFHDYTMHWVRQAPGKCLEWVSGISWNSGTIGYADSVRGRFTISRDNAKNSLYLQVNSLRPEDTALYYCAKDGHYGAYYYGMDVWGQGTTVTVSSGGGGSGGGGSGGGGSEIVLTQSPATLSVSPGERATLSCRASQSVNNNLAWYQQKPGQAPRLLIYGASTRATGIPARFSGSGSGTEFTLTISSLQSEDFAVYYCQQYNDWPITFGCGTRLEIKSGGGGSQVQLQQSGPGLVKPSQTLSLTCAISGDSVSSKSAAWNWIRQSPSGCLEWLGRTFYRSTWYNDYAVSVKSRITINPDTSKNQFSLQLNSVIPEDTAVYYCAREGQWLVYGMDVWGQGTTVTVSSGGGGSGGGGSGGGGSQSVLTQPPSASGTPGQRITISCSGSSSNIGSNTVNWYQQLPGTAPKLLIYRNNQRPSGVPDRFSGSKSGTSASLAISGLQSEDEADYYCAAWDDSLNGRVFGCGTKLTVLSGGGGSEVQLVESGGGLVQPGGSLKLSCAASGFTFNKYAMNWVRQAPGKGLEWVARIRSKYNNYATYYADSVKDRFTISRDDSKNTAYLQMNNLKTEDTAVYYCVRHGNFGNSYISYWAYWGQGTLVTVSSGGGGSGGGGSGGGGSQTVVTQEPSLTVSPGGTVTLTCGSSTGAVTSGNYPNWVQQKPGQAPRGLIGGTKFLAPGTPARFSGSLLGGKAALTLSGVQPEDEAEYYCVLWYSNRWVFGGGTKLTVLGGGGDKTHTCPPCPAPELLGGPSVFLFPPKPKDTLMISRTPEVTCVVVDVSHEDPEVKFNWYVDGVEVHNAKTKPCEEQYGSTYRCVSVLTVLHQDWLNGKEYKCKVSNKALPAPIEKTISKAKGQPREPQVYTLPPSREEMTKNQVSLTCLVKGFYPSDIAVEWESNGQPENNYKTTPPVLDSDGSFFLYSKLTVDKSRWQQGNVFSCSVMHEALHNHYTQKSLSLSPGKGGGGSGGGGSGGGGSGGGGSGGGGSGGGGSDKTHTCPPCPAPELLGGPSVFLFPPKPKDTLMISRTPEVTCVVVDVSHEDPEVKFNWYVDGVEVHNAKTKPCEEQYGSTYRCVSVLTVLHQDWLNGKEYKCKVSNKALPAPIEKTISKAKGQPREPQVYTLPPSREEMTKNQVSLTCLVKGFYPSDIAVEWESNGQPENNYKTTPPVLDSDGSFFLYSKLTVDKSRWQQGNVFSCSVMHEALHNHYTQKSLSLSPGK

SEQ ID NO: 3131 - protein, 1231 aa, Artificial Sequence
  Synthetic
EVQLVESGGGLVQPGRSLRLSCAASGFTFHDYTMHWVRQAPGKCLEWVSGISWNSGTIGYADSVRGRFTISRDNAKNSLYLQVNSLRPEDTALYYCAKDGHYGAYYYGMDVWGQGTTVTVSSGGGGQGGGGQGGGGQEIVLTQSPATLSVSPGERATLSCRASQSVNNNLAWYQQKPGQAPRLLIYGASTRATGIPARFSGSGSGTEFTLTISSLQSEDFAVYYCQQYNDWPITFGCGTRLEIKSGGGGQQVQLQQSGPGLVKPSQTLSLTCAISGDSVSSKSAAWNWIRQSPSGCLEWLGRTFYRSTWYNDYAVSVKSRITINPDTSKNQFSLQLNSVIPEDTAVYYCAREGQWLVYGMDVWGQGTTVTVSSGGGGQGGGGQGGGGQQSVLTQPPSASGTPGQRITISCSGSSSNIGSNTVNWYQQLPGTAPKLLIYRNNQRPSGVPDRFSGSKSGTSASLAISGLQSEDEADYYCAAWDDSLNGRVFGCGTKLTVLSGGGGQEVQLVESGGGLVQPGGSLKLSCAASGFTFNKYAMNWVRQAPGKGLEWVARIRSKYNNYATYYADSVKDRFTISRDDSKNTAYLQMNNLKTEDTAVYYCVRHGNFGNSYISYWAYWGQGTLVTVSSGGGGQGGGGQGGGGQQTVVTQEPSLTVSPGGTVTLTCGSSTGAVTSGNYPNWVQQKPGQAPRGLIGGTKFLAPGTPARFSGSLLGGKAALTLSGVQPEDEAEYYCVLWYSNRWVFGGGTKLTVLGGGGCPPCPAPELLGGPSVFLFPPKPKDTLMISRTPEVTCVVVDVSHEEPEVKFNWYVDGVEVHNAKTKPCEEQYGSTYRCVSVLTVLHQDWLNGKEYKCKVSNKALPAPIEKTISKAKGQPREPQVYTLPPSREEMTKNQVSLTCLVKGFYPSDIAVEWESNGQPENNYKTTPPVLDSDGSFFLYSKLTVDKSRWQQGNVFSCSVMHEALHNHYTQKSLSLSPGKGGGGQGGGGQGGGGQGGGGQGGGGQGGGGQCPPCPAPELLGGPSVFLFPPKPKDTLMISRTPEVTCVVVDVSHEEPEVKFNWYVDGVEVHNAKTKPCEEQYGSTYRCVSVLTVLHQDWLNGKEYKCKVSNKALPAPIEKTISKAKGQPREPQVYTLPPSREEMTKNQVSLTCLVKGFYPSDIAVEWESNGQPENNYKTTPPVLDSDGSFFLYSKLTVDKSRWQQGNVFSCSVMHEALHNHYTQKSLSLSPGK

SEQ ID NO: 3132 - protein, 1241 aa, Artificial Sequence
  Synthetic
EVQLVESGGGLVQPGRSLRLSCAASGFTFHDYTMHWVRQAPGKCLEWVSGISWNSGTIGYADSVRGRFTISRDNAKNSLYLQVNSLRPEDTALYYCAKDGHYGAYYYGMDVWGQGTTVTVSSGGGGSGGGGSGGGGSEIVLTQSPATLSVSPGERATLSCRASQSVNNNLAWYQQKPGQAPRLLIYGASTRATGIPARFSGSGSGTEFTLTISSLQSEDFAVYYCQQYNDWPITFGCGTRLEIKSGGGGSQVQLQQSGPGLVKPSQTLSLTCAISGDSVSSKSAAWNWIRQSPSGCLEWLGRTFYRSTWYNDYAVSVKSRITINPDTSKNQFSLQLNSVIPEDTAVYYCAREGQWLVYGMDVWGQGTTVTVSSGGGGSGGGGSGGGGSQSVLTQPPSASGTPGQRITISCSGSSSNIGSNTVNWYQQLPGTAPKLLIYRNNQRPSGVPDRFSGSKSGTSASLAISGLQSEDEADYYCAAWDDSLNGRVFGCGTKLTVLSGGGGSEVQLVESGGGLVQPGGSLKLSCAASGFTFNKYAINWVRQAPGKGLEWVARIRSKYNNYATYYADAVKDRFTISRDDSKNTVYLQMNNLKTEDTAVYYCARAGNFGSSYISYWAYWGQGTLVTVSSGGGGSGGGGSGGGGSQTVVTQEPSLTVSPGGTVTITCGSSTGAVTSGNYPNWVQKKPGQAPRGLIGGTKFLAPGTPARFSGSLSGGKAALTLSGVQPEDEAEYYCVLWYSNRWVFGSGTKLTVLGGGGDKTHTCPPCPAPELLGGPSVFLFPPKPKDTLMISRTPEVTCVVVDVSHEDPEVKFNWYVDGVEVHNAKTKPCEEQYGSTYRCVSVLTVLHQDWLNGKEYKCKVSNKALPAPIEKTISKAKGQPREPQVYTLPPSREEMTKNQVSLTCLVKGFYPSDIAVEWESNGQPENNYKTTPPVLDSDGSFFLYSKLTVDKSRWQQGNVFSCSVMHEALHNHYTQKSLSLSPGKGGGGSGGGGSGGGGSGGGGSGGGGSGGGGSDKTHTCPPCPAPELLGGPSVFLFPPKPKDTLMISRTPEVTCVVVDVSHEDPEVKFNWYVDGVEVHNAKTKPCEEQYGSTYRCVSVLTVLHQDWLNGKEYKCKVSNKALPAPIEKTISKAKGQPREPQVYTLPPSREEMTKNQVSLTCLVKGFYPSDIAVEWESNGQPENNYKTTPPVLDSDGSFFLYSKLTVDKSRWQQGNVFSCSVMHEALHNHYTQKSLSLSPGK

SEQ ID NO: 3133 - protein, 1231 aa, Artificial Sequence
  Synthetic
EVQLVESGGGLVQPGRSLRLSCAASGFTFHDYTMHWVRQAPGKCLEWVSGISWNSGTIGYADSVRGRFTISRDNAKNSLYLQVNSLRPEDTALYYCAKDGHYGAYYYGMDVWGQGTTVTVSSGGGGQGGGGQGGGGQEIVLTQSPATLSVSPGERATLSCRASQSVNNNLAWYQQKPGQAPRLLIYGASTRATGIPARFSGSGSGTEFTLTISSLQSEDFAVYYCQQYNDWPITFGCGTRLEIKSGGGGQQVQLQQSGPGLVKPSQTLSLTCAISGDSVSSKSAAWNWIRQSPSGCLEWLGRTFYRSTWYNDYAVSVKSRITINPDTSKNQFSLQLNSVIPEDTAVYYCAREGQWLVYGMDVWGQGTTVTVSSGGGGQGGGGQGGGGQQSVLTQPPSASGTPGQRITISCSGSSSNIGSNTVNWYQQLPGTAPKLLIYRNNQRPSGVPDRFSGSKSGTSASLAISGLQSEDEADYYCAAWDDSLNGRVFGCGTKLTVLSGGGGQEVQLVESGGGLVQPGGSLKLSCAASGFTFNKYAINWVRQAPGKGLEWVARIRSKYNNYATYYADAVKDRFTISRDDSKNTVYLQMNNLKTEDTAVYYCARAGNFGSSYISYWAYWGQGTLVTVSSGGGGQGGGGQGGGGQQTVVTQEPSLTVSPGGTVTITCGSSTGAVTSGNYPNWVQKKPGQAPRGLIGGTKFLAPGTPARFSGSLSGGKAALTLSGVQPEDEAEYYCVLWYSNRWVFGSGTKLTVLGGGGCPPCPAPELLGGPSVFLFPPKPKDTLMISRTPEVTCVVVDVSHEEPEVKFNWYVDGVEVHNAKTKPCEEQYGSTYRCVSVLTVLHQDWLNGKEYKCKVSNKALPAPIEKTISKAKGQPREPQVYTLPPSREEMTKNQVSLTCLVKGFYPSDIAVEWESNGQPENNYKTTPPVLDSDGSFFLYSKLTVDKSRWQQGNVFSCSVMHEALHNHYTQKSLSLSPGKGGGGQGGGGQGGGGQGGGGQGGGGQGGGGQCPPCPAPELLGGPSVFLFPPKPKDTLMISRTPEVTCVVVDVSHEEPEVKFNWYVDGVEVHNAKTKPCEEQYGSTYRCVSVLTVLHQDWLNGKEYKCKVSNKALPAPIEKTISKAKGQPREPQVYTLPPSREEMTKNQVSLTCLVKGFYPSDIAVEWESNGQPENNYKTTPPVLDSDGSFFLYSKLTVDKSRWQQGNVFSCSVMHEALHNHYTQKSLSLSPGK

SEQ ID NO: 3134 - protein, 492 aa, Artificial Sequence
  Synthetic
EVQLVESGGGLVQPGRSLRLSCAASGFTFHDYTMHWVRQAPGKCLEWVSGISWNSGTIGYADSVRGRFTISRDNAKNSLYLQVNSLRPEDTALYYCAKDGHYGAYYYGMDVWGQGTTVTVSSGGGGSGGGGSGGGGSEIVLTQSPATLSVSPGERATLSCRASQSVNNNLAWYQQKPGQAPRLLIYGASTRATGIPARFSGSGSGTEFTLTISSLQSEDFAVYYCQQYNDWPITFGCGTRLEIKSGGGGSQVQLVQSGAEVKKPGASVKVSCKASGYTFNNYGISWVRQAPGQCLEWMGWISAYNGKTSYAQKFQGRVTMTTDTSTGTAYMELRSLRSDDTAVYYCARDLDFLTGWEYWGQGTLVTVSSGGGGSGGGGSGGGGSEIVLTQSPATLSVSPGERATLSCRASQSVNSNLAWYQQKPGQAPRLLIYGASTRATGIPARFSGSGSGTEFTLTISSLQSEDFAVYYCQQYHTWPVLTFGCGTKVEIK

SEQ ID NO: 3135 - protein, 492 aa, Artificial Sequence
  Synthetic
EVQLVESGGGLVQPGRSLRLSCAASGFTFHDYTMHWVRQAPGKCLEWVSGISWNSGTIGYADSVRGRFTISRDNAKNSLYLQVNSLRPEDTALYYCAKDGHYGAYYYGMDVWGQGTTVTVSSGGGGQGGGGQGGGGQEIVLTQSPATLSVSPGERATLSCRASQSVNNNLAWYQQKPGQAPRLLIYGASTRATGIPARFSGSGSGTEFTLTISSLQSEDFAVYYCQQYNDWPITFGCGTRLEIKSGGGGQQVQLVQSGAEVKKPGASVKVSCKASGYTFNNYGISWVRQAPGQCLEWMGWISAYNGKTSYAQKFQGRVTMTTDTSTGTAYMELRSLRSDDTAVYYCARDLDFLTGWEYWGQGTLVTVSSGGGGQGGGGQGGGGQEIVLTQSPATLSVSPGERATLSCRASQSVNSNLAWYQQKPGQAPRLLIYGASTRATGIPARFSGSGSGTEFTLTISSLQSEDFAVYYCQQYHTWPVLTFGCGTKVEIK

SEQ ID NO: 3136 - protein, 747 aa, Artificial Sequence
  Synthetic
EVQLVESGGGLVQPGRSLRLSCAASGFTFHDYTMHWVRQAPGKCLEWVSGISWNSGTIGYADSVRGRFTISRDNAKNSLYLQVNSLRPEDTALYYCAKDGHYGAYYYGMDVWGQGTTVTVSSGGGGSGGGGSGGGGSEIVLTQSPATLSVSPGERATLSCRASQSVNNNLAWYQQKPGQAPRLLIYGASTRATGIPARFSGSGSGTEFTLTISSLQSEDFAVYYCQQYNDWPITFGCGTRLEIKSGGGGSQVQLVQSGAEVKKPGASVKVSCKASGYTFNNYGISWVRQAPGQCLEWMGWISAYNGKTSYAQKFQGRVTMTTDTSTGTAYMELRSLRSDDTAVYYCARDLDFLTGWEYWGQGTLVTVSSGGGGSGGGGSGGGGSEIVLTQSPATLSVSPGERATLSCRASQSVNSNLAWYQQKPGQAPRLLIYGASTRATGIPARFSGSGSGTEFTLTISSLQSEDFAVYYCQQYHTWPVLTFGCGTKVEIKSGGGGSEVQLVESGGGLVQPGGSLKLSCAASGFTFNKYAMNWVRQAPGKGLEWVARIRSKYNNYATYYADSVKDRFTISRDDSKNTAYLQMNNLKTEDTAVYYCVRHGNFGNSYISYWAYWGQGTLVTVSSGGGGSGGGGSGGGGSQTVVTQEPSLTVSPGGTVTLTCGSSTGAVTSGNYPNWVQQKPGQAPRGLIGGTKFLAPGTPARFSGSLLGGKAALTLSGVQPEDEAEYYCVLWYSNRWVFGGGTKLTVL

SEQ ID NO: 3137 - protein, 747 aa, Artificial Sequence
  Synthetic
EVQLVESGGGLVQPGRSLRLSCAASGFTFHDYTMHWVRQAPGKCLEWVSGISWNSGTIGYADSVRGRFTISRDNAKNSLYLQVNSLRPEDTALYYCAKDGHYGAYYYGMDVWGQGTTVTVSSGGGGQGGGGQGGGGQEIVLTQSPATLSVSPGERATLSCRASQSVNNNLAWYQQKPGQAPRLLIYGASTRATGIPARFSGSGSGTEFTLTISSLQSEDFAVYYCQQYNDWPITFGCGTRLEIKSGGGGQQVQLVQSGAEVKKPGASVKVSCKASGYTFNNYGISWVRQAPGQCLEWMGWISAYNGKTSYAQKFQGRVTMTTDTSTGTAYMELRSLRSDDTAVYYCARDLDFLTGWEYWGQGTLVTVSSGGGGQGGGGQGGGGQEIVLTQSPATLSVSPGERATLSCRASQSVNSNLAWYQQKPGQAPRLLIYGASTRATGIPARFSGSGSGTEFTLTISSLQSEDFAVYYCQQYHTWPVLTFGCGTKVEIKSGGGGQEVQLVESGGGLVQPGGSLKLSCAASGFTFNKYAMNWVRQAPGKGLEWVARIRSKYNNYATYYADSVKDRFTISRDDSKNTAYLQMNNLKTEDTAVYYCVRHGNFGNSYISYWAYWGQGTLVTVSSGGGGQGGGGQGGGGQQTVVTQEPSLTVSPGGTVTLTCGSSTGAVTSGNYPNWVQQKPGQAPRGLIGGTKFLAPGTPARFSGSLLGGKAALTLSGVQPEDEAEYYCVLWYSNRWVFGGGTKLTVL

SEQ ID NO: 3138 - protein, 747 aa, Artificial Sequence
  Synthetic
EVQLVESGGGLVQPGRSLRLSCAASGFTFHDYTMHWVRQAPGKCLEWVSGISWNSGTIGYADSVRGRFTISRDNAKNSLYLQVNSLRPEDTALYYCAKDGHYGAYYYGMDVWGQGTTVTVSSGGGGSGGGGSGGGGSEIVLTQSPATLSVSPGERATLSCRASQSVNNNLAWYQQKPGQAPRLLIYGASTRATGIPARFSGSGSGTEFTLTISSLQSEDFAVYYCQQYNDWPITFGCGTRLEIKSGGGGSQVQLVQSGAEVKKPGASVKVSCKASGYTFNNYGISWVRQAPGQCLEWMGWISAYNGKTSYAQKFQGRVTMTTDTSTGTAYMELRSLRSDDTAVYYCARDLDFLTGWEYWGQGTLVTVSSGGGGSGGGGSGGGGSEIVLTQSPATLSVSPGERATLSCRASQSVNSNLAWYQQKPGQAPRLLIYGASTRATGIPARFSGSGSGTEFTLTISSLQSEDFAVYYCQQYHTWPVLTFGCGTKVEIKSGGGGSEVQLVESGGGLVQPGGSLKLSCAASGFTFNKYAINWVRQAPGKGLEWVARIRSKYNNYATYYADAVKDRFTISRDDSKNTVYLQMNNLKTEDTAVYYCARAGNFGSSYISYWAYWGQGTLVTVSSGGGGSGGGGSGGGGSQTVVTQEPSLTVSPGGTVTITCGSSTGAVTSGNYPNWVQKKPGQAPRGLIGGTKFLAPGTPARFSGSLSGGKAALTLSGVQPEDEAEYYCVLWYSNRWVFGSGTKLTVL

SEQ ID NO: 3139 - protein, 747 aa, Artificial Sequence
  Synthetic
EVQLVESGGGLVQPGRSLRLSCAASGFTFHDYTMHWVRQAPGKCLEWVSGISWNSGTIGYADSVRGRFTISRDNAKNSLYLQVNSLRPEDTALYYCAKDGHYGAYYYGMDVWGQGTTVTVSSGGGGQGGGGQGGGGQEIVLTQSPATLSVSPGERATLSCRASQSVNNNLAWYQQKPGQAPRLLIYGASTRATGIPARFSGSGSGTEFTLTISSLQSEDFAVYYCQQYNDWPITFGCGTRLEIKSGGGGQQVQLVQSGAEVKKPGASVKVSCKASGYTFNNYGISWVRQAPGQCLEWMGWISAYNGKTSYAQKFQGRVTMTTDTSTGTAYMELRSLRSDDTAVYYCARDLDFLTGWEYWGQGTLVTVSSGGGGQGGGGQGGGGQEIVLTQSPATLSVSPGERATLSCRASQSVNSNLAWYQQKPGQAPRLLIYGASTRATGIPARFSGSGSGTEFTLTISSLQSEDFAVYYCQQYHTWPVLTFGCGTKVEIKSGGGGQEVQLVESGGGLVQPGGSLKLSCAASGFTFNKYAINWVRQAPGKGLEWVARIRSKYNNYATYYADAVKDRFTISRDDSKNTVYLQMNNLKTEDTAVYYCARAGNFGSSYISYWAYWGQGTLVTVSSGGGGQGGGGQGGGGQQTVVTQEPSLTVSPGGTVTITCGSSTGAVTSGNYPNWVQKKPGQAPRGLIGGTKFLAPGTPARFSGSLSGGKAALTLSGVQPEDEAEYYCVLWYSNRWVFGSGTKLTVL

SEQ ID NO: 3140 - protein, 1235 aa, Artificial Sequence
  Synthetic
EVQLVESGGGLVQPGRSLRLSCAASGFTFHDYTMHWVRQAPGKCLEWVSGISWNSGTIGYADSVRGRFTISRDNAKNSLYLQVNSLRPEDTALYYCAKDGHYGAYYYGMDVWGQGTTVTVSSGGGGSGGGGSGGGGSEIVLTQSPATLSVSPGERATLSCRASQSVNNNLAWYQQKPGQAPRLLIYGASTRATGIPARFSGSGSGTEFTLTISSLQSEDFAVYYCQQYNDWPITFGCGTRLEIKSGGGGSQVQLVQSGAEVKKPGASVKVSCKASGYTFNNYGISWVRQAPGQCLEWMGWISAYNGKTSYAQKFQGRVTMTTDTSTGTAYMELRSLRSDDTAVYYCARDLDFLTGWEYWGQGTLVTVSSGGGGSGGGGSGGGGSEIVLTQSPATLSVSPGERATLSCRASQSVNSNLAWYQQKPGQAPRLLIYGASTRATGIPARFSGSGSGTEFTLTISSLQSEDFAVYYCQQYHTWPVLTFGCGTKVEIKSGGGGSEVQLVESGGGLVQPGGSLKLSCAASGFTFNKYAMNWVRQAPGKGLEWVARIRSKYNNYATYYADSVKDRFTISRDDSKNTAYLQMNNLKTEDTAVYYCVRHGNFGNSYISYWAYWGQGTLVTVSSGGGGSGGGGSGGGGSQTVVTQEPSLTVSPGGTVTLTCGSSTGAVTSGNYPNWVQQKPGQAPRGLIGGTKFLAPGTPARFSGSLLGGKAALTLSGVQPEDEAEYYCVLWYSNRWVFGGGTKLTVLGGGGDKTHTCPPCPAPELLGGPSVFLFPPKPKDTLMISRTPEVTCVVVDVSHEDPEVKFNWYVDGVEVHNAKTKPCEEQYGSTYRCVSVLTVLHQDWLNGKEYKCKVSNKALPAPIEKTISKAKGQPREPQVYTLPPSREEMTKNQVSLTCLVKGFYPSDIAVEWESNGQPENNYKTTPPVLDSDGSFFLYSKLTVDKSRWQQGNVFSCSVMHEALHNHYTQKSLSLSPGKGGGGSGGGGSGGGGSGGGGSGGGGSGGGGSDKTHTCPPCPAPELLGGPSVFLFPPKPKDTLMISRTPEVTCVVVDVSHEDPEVKFNWYVDGVEVHNAKTKPCEEQYGSTYRCVSVLTVLHQDWLNGKEYKCKVSNKALPAPIEKTISKAKGQPREPQVYTLPPSREEMTKNQVSLTCLVKGFYPSDIAVEWESNGQPENNYKTTPPVLDSDGSFFLYSKLTVDKSRWQQGNVFSCSVMHEALHNHYTQKSLSLSPGK

SEQ ID NO: 3141 - protein, 1225 aa, Artificial Sequence
  Synthetic
EVQLVESGGGLVQPGRSLRLSCAASGFTFHDYTMHWVRQAPGKCLEWVSGISWNSGTIGYADSVRGRFTISRDNAKNSLYLQVNSLRPEDTALYYCAKDGHYGAYYYGMDVWGQGTTVTVSSGGGGQGGGGQGGGGQEIVLTQSPATLSVSPGERATLSCRASQSVNNNLAWYQQKPGQAPRLLIYGASTRATGIPARFSGSGSGTEFTLTISSLQSEDFAVYYCQQYNDWPITFGCGTRLEIKSGGGGQQVQLVQSGAEVKKPGASVKVSCKASGYTFNNYGISWVRQAPGQCLEWMGWISAYNGKTSYAQKFQGRVTMTTDTSTGTAYMELRSLRSDDTAVYYCARDLDFLTGWEYWGQGTLVTVSSGGGGQGGGGQGGGGQEIVLTQSPATLSVSPGERATLSCRASQSVNSNLAWYQQKPGQAPRLLIYGASTRATGIPARFSGSGSGTEFTLTISSLQSEDFAVYYCQQYHTWPVLTFGCGTKVEIKSGGGGQEVQLVESGGGLVQPGGSLKLSCAASGFTFNKYAMNWVRQAPGKGLEWVARIRSKYNNYATYYADSVKDRFTISRDDSKNTAYLQMNNLKTEDTAVYYCVRHGNFGNSYISYWAYWGQGTLVTVSSGGGGQGGGGQGGGGQQTVVTQEPSLTVSPGGTVTLTCGSSTGAVTSGNYPNWVQQKPGQAPRGLIGGTKFLAPGTPARFSGSLLGGKAALTLSGVQPEDEAEYYCVLWYSNRWVFGGGTKLTVLGGGGCPPCPAPELLGGPSVFLFPPKPKDTLMISRTPEVTCVVVDVSHEEPEVKFNWYVDGVEVHNAKTKPCEEQYGSTYRCVSVLTVLHQDWLNGKEYKCKVSNKALPAPIEKTISKAKGQPREPQVYTLPPSREEMTKNQVSLTCLVKGFYPSDIAVEWESNGQPENNYKTTPPVLDSDGSFFLYSKLTVDKSRWQQGNVFSCSVMHEALHNHYTQKSLSLSPGKGGGGQGGGGQGGGGQGGGGQGGGGQGGGGQCPPCPAPELLGGPSVFLFPPKPKDTLMISRTPEVTCVVVDVSHEEPEVKFNWYVDGVEVHNAKTKPCEEQYGSTYRCVSVLTVLHQDWLNGKEYKCKVSNKALPAPIEKTISKAKGQPREPQVYTLPPSREEMTKNQVSLTCLVKGFYPSDIAVEWESNGQPENNYKTTPPVLDSDGSFFLYSKLTVDKSRWQQGNVFSCSVMHEALHNHYTQKSLSLSPGK

SEQ ID NO: 3142 - protein, 1235 aa, Artificial Sequence
  Synthetic
EVQLVESGGGLVQPGRSLRLSCAASGFTFHDYTMHWVRQAPGKCLEWVSGISWNSGTIGYADSVRGRFTISRDNAKNSLYLQVNSLRPEDTALYYCAKDGHYGAYYYGMDVWGQGTTVTVSSGGGGSGGGGSGGGGSEIVLTQSPATLSVSPGERATLSCRASQSVNNNLAWYQQKPGQAPRLLIYGASTRATGIPARFSGSGSGTEFTLTISSLQSEDFAVYYCQQYNDWPITFGCGTRLEIKSGGGGSQVQLVQSGAEVKKPGASVKVSCKASGYTFNNYGISWVRQAPGQCLEWMGWISAYNGKTSYAQKFQGRVTMTTDTSTGTAYMELRSLRSDDTAVYYCARDLDFLTGWEYWGQGTLVTVSSGGGGSGGGGSGGGGSEIVLTQSPATLSVSPGERATLSCRASQSVNSNLAWYQQKPGQAPRLLIYGASTRATGIPARFSGSGSGTEFTLTISSLQSEDFAVYYCQQYHTWPVLTFGCGTKVEIKSGGGGSEVQLVESGGGLVQPGGSLKLSCAASGFTFNKYAINWVRQAPGKGLEWVARIRSKYNNYATYYADAVKDRFTISRDDSKNTVYLQMNNLKTEDTAVYYCARAGNFGSSYISYWAYWGQGTLVTVSSGGGGSGGGGSGGGGSQTVVTQEPSLTVSPGGTVTITCGSSTGAVTSGNYPNWVQKKPGQAPRGLIGGTKFLAPGTPARFSGSLSGGKAALTLSGVQPEDEAEYYCVLWYSNRWVFGSGTKLTVLGGGGDKTHTCPPCPAPELLGGPSVFLFPPKPKDTLMISRTPEVTCVVVDVSHEDPEVKFNWYVDGVEVHNAKTKPCEEQYGSTYRCVSVLTVLHQDWLNGKEYKCKVSNKALPAPIEKTISKAKGQPREPQVYTLPPSREEMTKNQVSLTCLVKGFYPSDIAVEWESNGQPENNYKTTPPVLDSDGSFFLYSKLTVDKSRWQQGNVFSCSVMHEALHNHYTQKSLSLSPGKGGGGSGGGGSGGGGSGGGGSGGGGSGGGGSDKTHTCPPCPAPELLGGPSVFLFPPKPKDTLMISRTPEVTCVVVDVSHEDPEVKFNWYVDGVEVHNAKTKPCEEQYGSTYRCVSVLTVLHQDWLNGKEYKCKVSNKALPAPIEKTISKAKGQPREPQVYTLPPSREEMTKNQVSLTCLVKGFYPSDIAVEWESNGQPENNYKTTPPVLDSDGSFFLYSKLTVDKSRWQQGNVFSCSVMHEALHNHYTQKSLSLSPGK

SEQ ID NO: 3143 - protein, 1225 aa, Artificial Sequence
  Synthetic
EVQLVESGGGLVQPGRSLRLSCAASGFTFHDYTMHWVRQAPGKCLEWVSGISWNSGTIGYADSVRGRFTISRDNAKNSLYLQVNSLRPEDTALYYCAKDGHYGAYYYGMDVWGQGTTVTVSSGGGGQGGGGQGGGGQEIVLTQSPATLSVSPGERATLSCRASQSVNNNLAWYQQKPGQAPRLLIYGASTRATGIPARFSGSGSGTEFTLTISSLQSEDFAVYYCQQYNDWPITFGCGTRLEIKSGGGGQQVQLVQSGAEVKKPGASVKVSCKASGYTFNNYGISWVRQAPGQCLEWMGWISAYNGKTSYAQKFQGRVTMTTDTSTGTAYMELRSLRSDDTAVYYCARDLDFLTGWEYWGQGTLVTVSSGGGGQGGGGQGGGGQEIVLTQSPATLSVSPGERATLSCRASQSVNSNLAWYQQKPGQAPRLLIYGASTRATGIPARFSGSGSGTEFTLTISSLQSEDFAVYYCQQYHTWPVLTFGCGTKVEIKSGGGGQEVQLVESGGGLVQPGGSLKLSCAASGFTFNKYAINWVRQAPGKGLEWVARIRSKYNNYATYYADAVKDRFTISRDDSKNTVYLQMNNLKTEDTAVYYCARAGNFGSSYISYWAYWGQGTLVTVSSGGGGQGGGGQGGGGQQTVVTQEPSLTVSPGGTVTITCGSSTGAVTSGNYPNWVQKKPGQAPRGLIGGTKFLAPGTPARFSGSLSGGKAALTLSGVQPEDEAEYYCVLWYSNRWVFGSGTKLTVLGGGGCPPCPAPELLGGPSVFLFPPKPKDTLMISRTPEVTCVVVDVSHEEPEVKFNWYVDGVEVHNAKTKPCEEQYGSTYRCVSVLTVLHQDWLNGKEYKCKVSNKALPAPIEKTISKAKGQPREPQVYTLPPSREEMTKNQVSLTCLVKGFYPSDIAVEWESNGQPENNYKTTPPVLDSDGSFFLYSKLTVDKSRWQQGNVFSCSVMHEALHNHYTQKSLSLSPGKGGGGQGGGGQGGGGQGGGGQGGGGQGGGGQCPPCPAPELLGGPSVFLFPPKPKDTLMISRTPEVTCVVVDVSHEEPEVKFNWYVDGVEVHNAKTKPCEEQYGSTYRCVSVLTVLHQDWLNGKEYKCKVSNKALPAPIEKTISKAKGQPREPQVYTLPPSREEMTKNQVSLTCLVKGFYPSDIAVEWESNGQPENNYKTTPPVLDSDGSFFLYSKLTVDKSRWQQGNVFSCSVMHEALHNHYTQKSLSLSPGK

SEQ ID NO: 3144 - protein, 495 aa, Artificial Sequence
  Synthetic
EVQLVESGGGLVQPGRSLRLSCAASGFTFHDYTMHWVRQAPGKCLEWVSGISWNSGTIGYADSVRGRFTISRDNAKNSLYLQVNSLRPEDTALYYCAKDGHYGAYYYGMDVWGQGTTVTVSSGGGGSGGGGSGGGGSEIVLTQSPATLSVSPGERATLSCRASQSVNNNLAWYQQKPGQAPRLLIYGASTRATGIPARFSGSGSGTEFTLTISSLQSEDFAVYYCQQYNDWPITFGCGTRLEIKSGGGGSQLQLQESGPGLVKPSETLSLTCFVSGGSISNSDYFWGWIRQPPGKCLEWIGTIYYSGRTYYNPSLKSRVTISVDTSKNQFSLMLSSVTAVDTAVYYCARYQYGSFDYWGQGTLVTVSSGGGGSGGGGSGGGGSDIVMTQTPLSLPVTPGEPASISCRSSQSLLHSNGYNYLDWYLQKPGQSPQLLIYLGSNRASGVPDRFSGSGSGTDFTLKISRVEAEDVGVYYCMQALQTPYTFGCGTKVEIR

SEQ ID NO: 3145 - protein, 495 aa, Artificial Sequence
  Synthetic
EVQLVESGGGLVQPGRSLRLSCAASGFTFHDYTMHWVRQAPGKCLEWVSGISWNSGTIGYADSVRGRFTISRDNAKNSLYLQVNSLRPEDTALYYCAKDGHYGAYYYGMDVWGQGTTVTVSSGGGGQGGGGQGGGGQEIVLTQSPATLSVSPGERATLSCRASQSVNNNLAWYQQKPGQAPRLLIYGASTRATGIPARFSGSGSGTEFTLTISSLQSEDFAVYYCQQYNDWPITFGCGTRLEIKSGGGGQQLQLQESGPGLVKPSETLSLTCFVSGGSISNSDYFWGWIRQPPGKCLEWIGTIYYSGRTYYNPSLKSRVTISVDTSKNQFSLMLSSVTAVDTAVYYCARYQYGSFDYWGQGTLVTVSSGGGGQGGGGQGGGGQEIVMTQTPLSLPVTPGEPASISCRSSQSLLHSNGYNYLDWYLQKPGQSPQLLIYLGSNRASGVPDRFSGSGSGTDFTLKISRVEAEDVGVYYCMQALQTPYTFGCGTKVEIR

SEQ ID NO: 3146 - protein, 750 aa, Artificial Sequence
  Synthetic
EVQLVESGGGLVQPGRSLRLSCAASGFTFHDYTMHWVRQAPGKCLEWVSGISWNSGTIGYADSVRGRFTISRDNAKNSLYLQVNSLRPEDTALYYCAKDGHYGAYYYGMDVWGQGTTVTVSSGGGGSGGGGSGGGGSEIVLTQSPATLSVSPGERATLSCRASQSVNNNLAWYQQKPGQAPRLLIYGASTRATGIPARFSGSGSGTEFTLTISSLQSEDFAVYYCQQYNDWPITFGCGTRLEIKSGGGGSQLQLQESGPGLVKPSETLSLTCFVSGGSISNSDYFWGWIRQPPGKCLEWIGTIYYSGRTYYNPSLKSRVTISVDTSKNQFSLMLSSVTAVDTAVYYCARYQYGSFDYWGQGTLVTVSSGGGGSGGGGSGGGGSDIVMTQTPLSLPVTPGEPASISCRSSQSLLHSNGYNYLDWYLQKPGQSPQLLIYLGSNRASGVPDRFSGSGSGTDFTLKISRVEAEDVGVYYCMQALQTPYTFGCGTKVEIRSGGGGSEVQLVESGGGLVQPGGSLKLSCAASGFTFNKYAMNWVRQAPGKGLEWVARIRSKYNNYATYYADSVKDRFTISRDDSKNTAYLQMNNLKTEDTAVYYCVRHGNFGNSYISYWAYWGQGTLVTVSSGGGGSGGGGSGGGGSQTVVTQEPSLTVSPGGTVTLTCGSSTGAVTSGNYPNWVQQKPGQAPRGLIGGTKFLAPGTPARFSGSLLGGKAALTLSGVQPEDEAEYYCVLWYSNRWVFGGGTKLTVL

SEQ ID NO: 3147 - protein, 750 aa, Artificial Sequence
  Synthetic
EVQLVESGGGLVQPGRSLRLSCAASGFTFHDYTMHWVRQAPGKCLEWVSGISWNSGTIGYADSVRGRFTISRDNAKNSLYLQVNSLRPEDTALYYCAKDGHYGAYYYGMDVWGQGTTVTVSSGGGGQGGGGQGGGGQEIVLTQSPATLSVSPGERATLSCRASQSVNNNLAWYQQKPGQAPRLLIYGASTRATGIPARFSGSGSGTEFTLTISSLQSEDFAVYYCQQYNDWPITFGCGTRLEIKSGGGGQQLQLQESGPGLVKPSETLSLTCFVSGGSISNSDYFWGWIRQPPGKCLEWIGTIYYSGRTYYNPSLKSRVTISVDTSKNQFSLMLSSVTAVDTAVYYCARYQYGSFDYWGQGTLVTVSSGGGGQGGGGQGGGGQEIVMTQTPLSLPVTPGEPASISCRSSQSLLHSNGYNYLDWYLQKPGQSPQLLIYLGSNRASGVPDRFSGSGSGTDFTLKISRVEAEDVGVYYCMQALQTPYTFGCGTKVEIRSGGGGQEVQLVESGGGLVQPGGSLKLSCAASGFTFNKYAMNWVRQAPGKGLEWVARIRSKYNNYATYYADSVKDRFTISRDDSKNTAYLQMNNLKTEDTAVYYCVRHGNFGNSYISYWAYWGQGTLVTVSSGGGGQGGGGQGGGGQQTVVTQEPSLTVSPGGTVTLTCGSSTGAVTSGNYPNWVQQKPGQAPRGLIGGTKFLAPGTPARFSGSLLGGKAALTLSGVQPEDEAEYYCVLWYSNRWVFGGGTKLTVL

SEQ ID NO: 3148 - protein, 750 aa, Artificial Sequence
  Synthetic
EVQLVESGGGLVQPGRSLRLSCAASGFTFHDYTMHWVRQAPGKCLEWVSGISWNSGTIGYADSVRGRFTISRDNAKNSLYLQVNSLRPEDTALYYCAKDGHYGAYYYGMDVWGQGTTVTVSSGGGGSGGGGSGGGGSEIVLTQSPATLSVSPGERATLSCRASQSVNNNLAWYQQKPGQAPRLLIYGASTRATGIPARFSGSGSGTEFTLTISSLQSEDFAVYYCQQYNDWPITFGCGTRLEIKSGGGGSQLQLQESGPGLVKPSETLSLTCFVSGGSISNSDYFWGWIRQPPGKCLEWIGTIYYSGRTYYNPSLKSRVTISVDTSKNQFSLMLSSVTAVDTAVYYCARYQYGSFDYWGQGTLVTVSSGGGGSGGGGSGGGGSDIVMTQTPLSLPVTPGEPASISCRSSQSLLHSNGYNYLDWYLQKPGQSPQLLIYLGSNRASGVPDRFSGSGSGTDFTLKISRVEAEDVGVYYCMQALQTPYTFGCGTKVEIRSGGGGSEVQLVESGGGLVQPGGSLKLSCAASGFTFNKYAINWVRQAPGKGLEWVARIRSKYNNYATYYADAVKDRFTISRDDSKNTVYLQMNNLKTEDTAVYYCARAGNFGSSYISYWAYWGQGTLVTVSSGGGGSGGGGSGGGGSQTVVTQEPSLTVSPGGTVTITCGSSTGAVTSGNYPNWVQKKPGQAPRGLIGGTKFLAPGTPARFSGSLSGGKAALTLSGVQPEDEAEYYCVLWYSNRWVFGSGTKLTVL

SEQ ID NO: 3149 - protein, 750 aa, Artificial Sequence
  Synthetic
EVQLVESGGGLVQPGRSLRLSCAASGFTFHDYTMHWVRQAPGKCLEWVSGISWNSGTIGYADSVRGRFTISRDNAKNSLYLQVNSLRPEDTALYYCAKDGHYGAYYYGMDVWGQGTTVTVSSGGGGQGGGGQGGGGQEIVLTQSPATLSVSPGERATLSCRASQSVNNNLAWYQQKPGQAPRLLIYGASTRATGIPARFSGSGSGTEFTLTISSLQSEDFAVYYCQQYNDWPITFGCGTRLEIKSGGGGQQLQLQESGPGLVKPSETLSLTCFVSGGSISNSDYFWGWIRQPPGKCLEWIGTIYYSGRTYYNPSLKSRVTISVDTSKNQFSLMLSSVTAVDTAVYYCARYQYGSFDYWGQGTLVTVSSGGGGQGGGGQGGGGQEIVMTQTPLSLPVTPGEPASISCRSSQSLLHSNGYNYLDWYLQKPGQSPQLLIYLGSNRASGVPDRFSGSGSGTDFTLKISRVEAEDVGVYYCMQALQTPYTFGCGTKVEIRSGGGGQEVQLVESGGGLVQPGGSLKLSCAASGFTFNKYAINWVRQAPGKGLEWVARIRSKYNNYATYYADAVKDRFTISRDDSKNTVYLQMNNLKTEDTAVYYCARAGNFGSSYISYWAYWGQGTLVTVSSGGGGQGGGGQGGGGQQTVVTQEPSLTVSPGGTVTITCGSSTGAVTSGNYPNWVQKKPGQAPRGLIGGTKFLAPGTPARFSGSLSGGKAALTLSGVQPEDEAEYYCVLWYSNRWVFGSGTKLTVL

SEQ ID NO: 3150 - protein, 1238 aa, Artificial Sequence
  Synthetic
EVQLVESGGGLVQPGRSLRLSCAASGFTFHDYTMHWVRQAPGKCLEWVSGISWNSGTIGYADSVRGRFTISRDNAKNSLYLQVNSLRPEDTALYYCAKDGHYGAYYYGMDVWGQGTTVTVSSGGGGSGGGGSGGGGSEIVLTQSPATLSVSPGERATLSCRASQSVNNNLAWYQQKPGQAPRLLIYGASTRATGIPARFSGSGSGTEFTLTISSLQSEDFAVYYCQQYNDWPITFGCGTRLEIKSGGGGSQLQLQESGPGLVKPSETLSLTCFVSGGSISNSDYFWGWIRQPPGKCLEWIGTIYYSGRTYYNPSLKSRVTISVDTSKNQFSLMLSSVTAVDTAVYYCARYQYGSFDYWGQGTLVTVSSGGGGSGGGGSGGGGSDIVMTQTPLSLPVTPGEPASISCRSSQSLLHSNGYNYLDWYLQKPGQSPQLLIYLGSNRASGVPDRFSGSGSGTDFTLKISRVEAEDVGVYYCMQALQTPYTFGCGTKVEIRSGGGGSEVQLVESGGGLVQPGGSLKLSCAASGFTFNKYAMNWVRQAPGKGLEWVARIRSKYNNYATYYADSVKDRFTISRDDSKNTAYLQMNNLKTEDTAVYYCVRHGNFGNSYISYWAYWGQGTLVTVSSGGGGSGGGGSGGGGSQTVVTQEPSLTVSPGGTVTLTCGSSTGAVTSGNYPNWVQQKPGQAPRGLIGGTKFLAPGTPARFSGSLLGGKAALTLSGVQPEDEAEYYCVLWYSNRWVFGGGTKLTVLGGGGDKTHTCPPCPAPELLGGPSVFLFPPKPKDTLMISRTPEVTCVVVDVSHEDPEVKFNWYVDGVEVHNAKTKPCEEQYGSTYRCVSVLTVLHQDWLNGKEYKCKVSNKALPAPIEKTISKAKGQPREPQVYTLPPSREEMTKNQVSLTCLVKGFYPSDIAVEWESNGQPENNYKTTPPVLDSDGSFFLYSKLTVDKSRWQQGNVFSCSVMHEALHNHYTQKSLSLSPGKGGGGSGGGGSGGGGSGGGGSGGGGSGGGGSDKTHTCPPCPAPELLGGPSVFLFPPKPKDTLMISRTPEVTCVVVDVSHEDPEVKFNWYVDGVEVHNAKTKPCEEQYGSTYRCVSVLTVLHQDWLNGKEYKCKVSNKALPAPIEKTISKAKGQPREPQVYTLPPSREEMTKNQVSLTCLVKGFYPSDIAVEWESNGQPENNYKTTPPVLDSDGSFFLYSKLTVDKSRWQQGNVFSCSVMHEALHNHYTQKSLSLSPGK

SEQ ID NO: 3151 - protein, 1228 aa, Artificial Sequence
  Synthetic
EVQLVESGGGLVQPGRSLRLSCAASGFTFHDYTMHWVRQAPGKCLEWVSGISWNSGTIGYADSVRGRFTISRDNAKNSLYLQVNSLRPEDTALYYCAKDGHYGAYYYGMDVWGQGTTVTVSSGGGGQGGGGQGGGGQEIVLTQSPATLSVSPGERATLSCRASQSVNNNLAWYQQKPGQAPRLLIYGASTRATGIPARFSGSGSGTEFTLTISSLQSEDFAVYYCQQYNDWPITFGCGTRLEIKSGGGGQQLQLQESGPGLVKPSETLSLTCFVSGGSISNSDYFWGWIRQPPGKCLEWIGTIYYSGRTYYNPSLKSRVTISVDTSKNQFSLMLSSVTAVDTAVYYCARYQYGSFDYWGQGTLVTVSSGGGGQGGGGQGGGGQEIVMTQTPLSLPVTPGEPASISCRSSQSLLHSNGYNYLDWYLQKPGQSPQLLIYLGSNRASGVPDRFSGSGSGTDFTLKISRVEAEDVGVYYCMQALQTPYTFGCGTKVEIRSGGGGQEVQLVESGGGLVQPGGSLKLSCAASGFTFNKYAMNWVRQAPGKGLEWVARIRSKYNNYATYYADSVKDRFTISRDDSKNTAYLQMNNLKTEDTAVYYCVRHGNFGNSYISYWAYWGQGTLVTVSSGGGGQGGGGQGGGGQQTVVTQEPSLTVSPGGTVTLTCGSSTGAVTSGNYPNWVQQKPGQAPRGLIGGTKFLAPGTPARFSGSLLGGKAALTLSGVQPEDEAEYYCVLWYSNRWVFGGGTKLTVLGGGGCPPCPAPELLGGPSVFLFPPKPKDTLMISRTPEVTCVVVDVSHEEPEVKFNWYVDGVEVHNAKTKPCEEQYGSTYRCVSVLTVLHQDWLNGKEYKCKVSNKALPAPIEKTISKAKGQPREPQVYTLPPSREEMTKNQVSLTCLVKGFYPSDIAVEWESNGQPENNYKTTPPVLDSDGSFFLYSKLTVDKSRWQQGNVFSCSVMHEALHNHYTQKSLSLSPGKGGGGQGGGGQGGGGQGGGGQGGGGQGGGGQCPPCPAPELLGGPSVFLFPPKPKDTLMISRTPEVTCVVVDVSHEEPEVKFNWYVDGVEVHNAKTKPCEEQYGSTYRCVSVLTVLHQDWLNGKEYKCKVSNKALPAPIEKTISKAKGQPREPQVYTLPPSREEMTKNQVSLTCLVKGFYPSDIAVEWESNGQPENNYKTTPPVLDSDGSFFLYSKLTVDKSRWQQGNVFSCSVMHEALHNHYTQKSLSLSPGK

SEQ ID NO: 3152 - protein, 1238 aa, Artificial Sequence
  Synthetic
EVQLVESGGGLVQPGRSLRLSCAASGFTFHDYTMHWVRQAPGKCLEWVSGISWNSGTIGYADSVRGRFTISRDNAKNSLYLQVNSLRPEDTALYYCAKDGHYGAYYYGMDVWGQGTTVTVSSGGGGSGGGGSGGGGSEIVLTQSPATLSVSPGERATLSCRASQSVNNNLAWYQQKPGQAPRLLIYGASTRATGIPARFSGSGSGTEFTLTISSLQSEDFAVYYCQQYNDWPITFGCGTRLEIKSGGGGSQLQLQESGPGLVKPSETLSLTCFVSGGSISNSDYFWGWIRQPPGKCLEWIGTIYYSGRTYYNPSLKSRVTISVDTSKNQFSLMLSSVTAVDTAVYYCARYQYGSFDYWGQGTLVTVSSGGGGSGGGGSGGGGSDIVMTQTPLSLPVTPGEPASISCRSSQSLLHSNGYNYLDWYLQKPGQSPQLLIYLGSNRASGVPDRFSGSGSGTDFTLKISRVEAEDVGVYYCMQALQTPYTFGCGTKVEIRSGGGGSEVQLVESGGGLVQPGGSLKLSCAASGFTFNKYAINWVRQAPGKGLEWVARIRSKYNNYATYYADAVKDRFTISRDDSKNTVYLQMNNLKTEDTAVYYCARAGNFGSSYISYWAYWGQGTLVTVSSGGGGSGGGGSGGGGSQTVVTQEPSLTVSPGGTVTITCGSSTGAVTSGNYPNWVQKKPGQAPRGLIGGTKFLAPGTPARFSGSLSGGKAALTLSGVQPEDEAEYYCVLWYSNRWVFGSGTKLTVLGGGGDKTHTCPPCPAPELLGGPSVFLFPPKPKDTLMISRTPEVTCVVVDVSHEDPEVKFNWYVDGVEVHNAKTKPCEEQYGSTYRCVSVLTVLHQDWLNGKEYKCKVSNKALPAPIEKTISKAKGQPREPQVYTLPPSREEMTKNQVSLTCLVKGFYPSDIAVEWESNGQPENNYKTTPPVLDSDGSFFLYSKLTVDKSRWQQGNVFSCSVMHEALHNHYTQKSLSLSPGKGGGGSGGGGSGGGGSGGGGSGGGGSGGGGSDKTHTCPPCPAPELLGGPSVFLFPPKPKDTLMISRTPEVTCVVVDVSHEDPEVKFNWYVDGVEVHNAKTKPCEEQYGSTYRCVSVLTVLHQDWLNGKEYKCKVSNKALPAPIEKTISKAKGQPREPQVYTLPPSREEMTKNQVSLTCLVKGFYPSDIAVEWESNGQPENNYKTTPPVLDSDGSFFLYSKLTVDKSRWQQGNVFSCSVMHEALHNHYTQKSLSLSPGK

SEQ ID NO: 3153 - protein, 1228 aa, Artificial Sequence
  Synthetic
EVQLVESGGGLVQPGRSLRLSCAASGFTFHDYTMHWVRQAPGKCLEWVSGISWNSGTIGYADSVRGRFTISRDNAKNSLYLQVNSLRPEDTALYYCAKDGHYGAYYYGMDVWGQGTTVTVSSGGGGQGGGGQGGGGQEIVLTQSPATLSVSPGERATLSCRASQSVNNNLAWYQQKPGQAPRLLIYGASTRATGIPARFSGSGSGTEFTLTISSLQSEDFAVYYCQQYNDWPITFGCGTRLEIKSGGGGQQLQLQESGPGLVKPSETLSLTCFVSGGSISNSDYFWGWIRQPPGKCLEWIGTIYYSGRTYYNPSLKSRVTISVDTSKNQFSLMLSSVTAVDTAVYYCARYQYGSFDYWGQGTLVTVSSGGGGQGGGGQGGGGQEIVMTQTPLSLPVTPGEPASISCRSSQSLLHSNGYNYLDWYLQKPGQSPQLLIYLGSNRASGVPDRFSGSGSGTDFTLKISRVEAEDVGVYYCMQALQTPYTFGCGTKVEIRSGGGGQEVQLVESGGGLVQPGGSLKLSCAASGFTFNKYAINWVRQAPGKGLEWVARIRSKYNNYATYYADAVKDRFTISRDDSKNTVYLQMNNLKTEDTAVYYCARAGNFGSSYISYWAYWGQGTLVTVSSGGGGQGGGGQGGGGQQTVVTQEPSLTVSPGGTVTITCGSSTGAVTSGNYPNWVQKKPGQAPRGLIGGTKFLAPGTPARFSGSLSGGKAALTLSGVQPEDEAEYYCVLWYSNRWVFGSGTKLTVLGGGGCPPCPAPELLGGPSVFLFPPKPKDTLMISRTPEVTCVVVDVSHEEPEVKFNWYVDGVEVHNAKTKPCEEQYGSTYRCVSVLTVLHQDWLNGKEYKCKVSNKALPAPIEKTISKAKGQPREPQVYTLPPSREEMTKNQVSLTCLVKGFYPSDIAVEWESNGQPENNYKTTPPVLDSDGSFFLYSKLTVDKSRWQQGNVFSCSVMHEALHNHYTQKSLSLSPGKGGGGQGGGGQGGGGQGGGGQGGGGQGGGGQCPPCPAPELLGGPSVFLFPPKPKDTLMISRTPEVTCVVVDVSHEEPEVKFNWYVDGVEVHNAKTKPCEEQYGSTYRCVSVLTVLHQDWLNGKEYKCKVSNKALPAPIEKTISKAKGQPREPQVYTLPPSREEMTKNQVSLTCLVKGFYPSDIAVEWESNGQPENNYKTTPPVLDSDGSFFLYSKLTVDKSRWQQGNVFSCSVMHEALHNHYTQKSLSLSPGK

SEQ ID NO: 3154 - protein, 497 aa, Artificial Sequence
  Synthetic
EVQLVESGGGLVQPGRSLRLSCAASGFTFHDYTMHWVRQAPGKCLEWVSGISWNSGTIGYADSVRGRFTISRDNAKNSLYLQVNSLRPEDTALYYCAKDGHYGAYYYGMDVWGQGTTVTVSSGGGGSGGGGSGGGGSEIVLTQSPATLSVSPGERATLSCRASQSVNNNLAWYQQKPGQAPRLLIYGASTRATGIPARFSGSGSGTEFTLTISSLQSEDFAVYYCQQYNDWPITFGCGTRLEIKSGGGGSQVQLVESGGGVVQPGRSLRLSCAASGFTFSAYGMHWVRQAPGKCLEWVAVILYDGSNKYYADSVKGRFTISRDNSKNTLYLQMNSLRAEDTAVYYCARGSGWLQLGDYFDYWGQGTLVTVSSGGGGSGGGGSGGGGSQSALTQPPSVSGSPGQSITISCTGTSSDVGGYNYVSWYQQHPGKAPKLMIYEVSNRPSGVSNRFSGSKSGNTASLTISGLQAEDEADYYCSSYTSSSTLVFGCGTKLTVL

SEQ ID NO: 3155 - protein, 497 aa, Artificial Sequence
  Synthetic
EVQLVESGGGLVQPGRSLRLSCAASGFTFHDYTMHWVRQAPGKCLEWVSGISWNSGTIGYADSVRGRFTISRDNAKNSLYLQVNSLRPEDTALYYCAKDGHYGAYYYGMDVWGQGTTVTVSSGGGGQGGGGQGGGGQEIVLTQSPATLSVSPGERATLSCRASQSVNNNLAWYQQKPGQAPRLLIYGASTRATGIPARFSGSGSGTEFTLTISSLQSEDFAVYYCQQYNDWPITFGCGTRLEIKSGGGGQQVQLVESGGGVVQPGRSLRLSCAASGFTFSAYGMHWVRQAPGKCLEWVAVILYDGSNKYYADSVKGRFTISRDNSKNTLYLQMNSLRAEDTAVYYCARGSGWLQLGDYFDYWGQGTLVTVSSGGGGQGGGGQGGGGQQSALTQPPSVSGSPGQSITISCTGTSSDVGGYNYVSWYQQHPGKAPKLMIYEVSNRPSGVSNRFSGSKSGNTASLTISGLQAEDEADYYCSSYTSSSTLVFGCGTKLTVL

SEQ ID NO: 3156 - protein, 752 aa, Artificial Sequence
  Synthetic
EVQLVESGGGLVQPGRSLRLSCAASGFTFHDYTMHWVRQAPGKCLEWVSGISWNSGTIGYADSVRGRFTISRDNAKNSLYLQVNSLRPEDTALYYCAKDGHYGAYYYGMDVWGQGTTVTVSSGGGGSGGGGSGGGGSEIVLTQSPATLSVSPGERATLSCRASQSVNNNLAWYQQKPGQAPRLLIYGASTRATGIPARFSGSGSGTEFTLTISSLQSEDFAVYYCQQYNDWPITFGCGTRLEIKSGGGGSQVQLVESGGGVVQPGRSLRLSCAASGFTFSAYGMHWVRQAPGKCLEWVAVILYDGSNKYYADSVKGRFTISRDNSKNTLYLQMNSLRAEDTAVYYCARGSGWLQLGDYFDYWGQGTLVTVSSGGGGSGGGGSGGGGSQSALTQPPSVSGSPGQSITISCTGTSSDVGGYNYVSWYQQHPGKAPKLMIYEVSNRPSGVSNRFSGSKSGNTASLTISGLQAEDEADYYCSSYTSSSTLVFGCGTKLTVLSGGGGSEVQLVESGGGLVQPGGSLKLSCAASGFTFNKYAMNWVRQAPGKGLEWVARIRSKYNNYATYYADSVKDRFTISRDDSKNTAYLQMNNLKTEDTAVYYCVRHGNFGNSYISYWAYWGQGTLVTVSSGGGGSGGGGSGGGGSQTVVTQEPSLTVSPGGTVTLTCGSSTGAVTSGNYPNWVQQKPGQAPRGLIGGTKFLAPGTPARFSGSLLGGKAALTLSGVQPEDEAEYYCVLWYSNRWVFGGGTKLTVL

SEQ ID NO: 3157 - protein, 752 aa, Artificial Sequence
  Synthetic
EVQLVESGGGLVQPGRSLRLSCAASGFTFHDYTMHWVRQAPGKCLEWVSGISWNSGTIGYADSVRGRFTISRDNAKNSLYLQVNSLRPEDTALYYCAKDGHYGAYYYGMDVWGQGTTVTVSSGGGGQGGGGQGGGGQEIVLTQSPATLSVSPGERATLSCRASQSVNNNLAWYQQKPGQAPRLLIYGASTRATGIPARFSGSGSGTEFTLTISSLQSEDFAVYYCQQYNDWPITFGCGTRLEIKSGGGGQQVQLVESGGGVVQPGRSLRLSCAASGFTFSAYGMHWVRQAPGKCLEWVAVILYDGSNKYYADSVKGRFTISRDNSKNTLYLQMNSLRAEDTAVYYCARGSGWLQLGDYFDYWGQGTLVTVSSGGGGQGGGGQGGGGQQSALTQPPSVSGSPGQSITISCTGTSSDVGGYNYVSWYQQHPGKAPKLMIYEVSNRPSGVSNRFSGSKSGNTASLTISGLQAEDEADYYCSSYTSSSTLVFGCGTKLTVLSGGGGQEVQLVESGGGLVQPGGSLKLSCAASGFTFNKYAMNWVRQAPGKGLEWVARIRSKYNNYATYYADSVKDRFTISRDDSKNTAYLQMNNLKTEDTAVYYCVRHGNFGNSYISYWAYWGQGTLVTVSSGGGGQGGGGQGGGGQQTVVTQEPSLTVSPGGTVTLTCGSSTGAVTSGNYPNWVQQKPGQAPRGLIGGTKFLAPGTPARFSGSLLGGKAALTLSGVQPEDEAEYYCVLWYSNRWVFGGGTKLTVL

SEQ ID NO: 3158 - protein, 752 aa, Artificial Sequence
  Synthetic
EVQLVESGGGLVQPGRSLRLSCAASGFTFHDYTMHWVRQAPGKCLEWVSGISWNSGTIGYADSVRGRFTISRDNAKNSLYLQVNSLRPEDTALYYCAKDGHYGAYYYGMDVWGQGTTVTVSSGGGGSGGGGSGGGGSEIVLTQSPATLSVSPGERATLSCRASQSVNNNLAWYQQKPGQAPRLLIYGASTRATGIPARFSGSGSGTEFTLTISSLQSEDFAVYYCQQYNDWPITFGCGTRLEIKSGGGGSQVQLVESGGGVVQPGRSLRLSCAASGFTFSAYGMHWVRQAPGKCLEWVAVILYDGSNKYYADSVKGRFTISRDNSKNTLYLQMNSLRAEDTAVYYCARGSGWLQLGDYFDYWGQGTLVTVSSGGGGSGGGGSGGGGSQSALTQPPSVSGSPGQSITISCTGTSSDVGGYNYVSWYQQHPGKAPKLMIYEVSNRPSGVSNRFSGSKSGNTASLTISGLQAEDEADYYCSSYTSSSTLVFGCGTKLTVLSGGGGSEVQLVESGGGLVQPGGSLKLSCAASGFTFNKYAINWVRQAPGKGLEWVARIRSKYNNYATYYADAVKDRFTISRDDSKNTVYLQMNNLKTEDTAVYYCARAGNFGSSYISYWAYWGQGTLVTVSSGGGGSGGGGSGGGGSQTVVTQEPSLTVSPGGTVTITCGSSTGAVTSGNYPNWVQKKPGQAPRGLIGGTKFLAPGTPARFSGSLSGGKAALTLSGVQPEDEAEYYCVLWYSNRWVFGSGTKLTVL

SEQ ID NO: 3159 - protein, 752 aa, Artificial Sequence
  Synthetic
EVQLVESGGGLVQPGRSLRLSCAASGFTFHDYTMHWVRQAPGKCLEWVSGISWNSGTIGYADSVRGRFTISRDNAKNSLYLQVNSLRPEDTALYYCAKDGHYGAYYYGMDVWGQGTTVTVSSGGGGQGGGGQGGGGQEIVLTQSPATLSVSPGERATLSCRASQSVNNNLAWYQQKPGQAPRLLIYGASTRATGIPARFSGSGSGTEFTLTISSLQSEDFAVYYCQQYNDWPITFGCGTRLEIKSGGGGQQVQLVESGGGVVQPGRSLRLSCAASGFTFSAYGMHWVRQAPGKCLEWVAVILYDGSNKYYADSVKGRFTISRDNSKNTLYLQMNSLRAEDTAVYYCARGSGWLQLGDYFDYWGQGTLVTVSSGGGGQGGGGQGGGGQQSALTQPPSVSGSPGQSITISCTGTSSDVGGYNYVSWYQQHPGKAPKLMIYEVSNRPSGVSNRFSGSKSGNTASLTISGLQAEDEADYYCSSYTSSSTLVFGCGTKLTVLSGGGGQEVQLVESGGGLVQPGGSLKLSCAASGFTFNKYAINWVRQAPGKGLEWVARIRSKYNNYATYYADAVKDRFTISRDDSKNTVYLQMNNLKTEDTAVYYCARAGNFGSSYISYWAYWGQGTLVTVSSGGGGQGGGGQGGGGQQTVVTQEPSLTVSPGGTVTITCGSSTGAVTSGNYPNWVQKKPGQAPRGLIGGTKFLAPGTPARFSGSLSGGKAALTLSGVQPEDEAEYYCVLWYSNRWVFGSGTKLTVL

SEQ ID NO: 3160 - protein, 1240 aa, Artificial Sequence
  Synthetic
EVQLVESGGGLVQPGRSLRLSCAASGFTFHDYTMHWVRQAPGKCLEWVSGISWNSGTIGYADSVRGRFTISRDNAKNSLYLQVNSLRPEDTALYYCAKDGHYGAYYYGMDVWGQGTTVTVSSGGGGSGGGGSGGGGSEIVLTQSPATLSVSPGERATLSCRASQSVNNNLAWYQQKPGQAPRLLIYGASTRATGIPARFSGSGSGTEFTLTISSLQSEDFAVYYCQQYNDWPITFGCGTRLEIKSGGGGSQVQLVESGGGVVQPGRSLRLSCAASGFTFSAYGMHWVRQAPGKCLEWVAVILYDGSNKYYADSVKGRFTISRDNSKNTLYLQMNSLRAEDTAVYYCARGSGWLQLGDYFDYWGQGTLVTVSSGGGGSGGGGSGGGGSQSALTQPPSVSGSPGQSITISCTGTSSDVGGYNYVSWYQQHPGKAPKLMIYEVSNRPSGVSNRFSGSKSGNTASLTISGLQAEDEADYYCSSYTSSSTLVFGCGTKLTVLSGGGGSEVQLVESGGGLVQPGGSLKLSCAASGFTFNKYAMNWVRQAPGKGLEWVARIRSKYNNYATYYADSVKDRFTISRDDSKNTAYLQMNNLKTEDTAVYYCVRHGNFGNSYISYWAYWGQGTLVTVSSGGGGSGGGGSGGGGSQTVVTQEPSLTVSPGGTVTLTCGSSTGAVTSGNYPNWVQQKPGQAPRGLIGGTKFLAPGTPARFSGSLLGGKAALTLSGVQPEDEAEYYCVLWYSNRWVFGGGTKLTVLGGGGDKTHTCPPCPAPELLGGPSVFLFPPKPKDTLMISRTPEVTCVVVDVSHEDPEVKFNWYVDGVEVHNAKTKPCEEQYGSTYRCVSVLTVLHQDWLNGKEYKCKVSNKALPAPIEKTISKAKGQPREPQVYTLPPSREEMTKNQVSLTCLVKGFYPSDIAVEWESNGQPENNYKTTPPVLDSDGSFFLYSKLTVDKSRWQQGNVFSCSVMHEALHNHYTQKSLSLSPGKGGGGSGGGGSGGGGSGGGGSGGGGSGGGGSDKTHTCPPCPAPELLGGPSVFLFPPKPKDTLMISRTPEVTCVVVDVSHEDPEVKFNWYVDGVEVHNAKTKPCEEQYGSTYRCVSVLTVLHQDWLNGKEYKCKVSNKALPAPIEKTISKAKGQPREPQVYTLPPSREEMTKNQVSLTCLVKGFYPSDIAVEWESNGQPENNYKTTPPVLDSDGSFFLYSKLTVDKSRWQQGNVFSCSVMHEALHNHYTQKSLSLSPGK

SEQ ID NO: 3161 - protein, 1230 aa, Artificial Sequence
  Synthetic
EVQLVESGGGLVQPGRSLRLSCAASGFTFHDYTMHWVRQAPGKCLEWVSGISWNSGTIGYADSVRGRFTISRDNAKNSLYLQVNSLRPEDTALYYCAKDGHYGAYYYGMDVWGQGTTVTVSSGGGGQGGGGQGGGGQEIVLTQSPATLSVSPGERATLSCRASQSVNNNLAWYQQKPGQAPRLLIYGASTRATGIPARFSGSGSGTEFTLTISSLQSEDFAVYYCQQYNDWPITFGCGTRLEIKSGGGGQQVQLVESGGGVVQPGRSLRLSCAASGFTFSAYGMHWVRQAPGKCLEWVAVILYDGSNKYYADSVKGRFTISRDNSKNTLYLQMNSLRAEDTAVYYCARGSGWLQLGDYFDYWGQGTLVTVSSGGGGQGGGGQGGGGQQSALTQPPSVSGSPGQSITISCTGTSSDVGGYNYVSWYQQHPGKAPKLMIYEVSNRPSGVSNRFSGSKSGNTASLTISGLQAEDEADYYCSSYTSSSTLVFGCGTKLTVLSGGGGQEVQLVESGGGLVQPGGSLKLSCAASGFTFNKYAMNWVRQAPGKGLEWVARIRSKYNNYATYYADSVKDRFTISRDDSKNTAYLQMNNLKTEDTAVYYCVRHGNFGNSYISYWAYWGQGTLVTVSSGGGGQGGGGQGGGGQQTVVTQEPSLTVSPGGTVTLTCGSSTGAVTSGNYPNWVQQKPGQAPRGLIGGTKFLAPGTPARFSGSLLGGKAALTLSGVQPEDEAEYYCVLWYSNRWVFGGGTKLTVLGGGGCPPCPAPELLGGPSVFLFPPKPKDTLMISRTPEVTCVVVDVSHEEPEVKFNWYVDGVEVHNAKTKPCEEQYGSTYRCVSVLTVLHQDWLNGKEYKCKVSNKALPAPIEKTISKAKGQPREPQVYTLPPSREEMTKNQVSLTCLVKGFYPSDIAVEWESNGQPENNYKTTPPVLDSDGSFFLYSKLTVDKSRWQQGNVFSCSVMHEALHNHYTQKSLSLSPGKGGGGQGGGGQGGGGQGGGGQGGGGQGGGGQCPPCPAPELLGGPSVFLFPPKPKDTLMISRTPEVTCVVVDVSHEEPEVKFNWYVDGVEVHNAKTKPCEEQYGSTYRCVSVLTVLHQDWLNGKEYKCKVSNKALPAPIEKTISKAKGQPREPQVYTLPPSREEMTKNQVSLTCLVKGFYPSDIAVEWESNGQPENNYKTTPPVLDSDGSFFLYSKLTVDKSRWQQGNVFSCSVMHEALHNHYTQKSLSLSPGK

SEQ ID NO: 3162 - protein, 1240 aa, Artificial Sequence
  Synthetic
EVQLVESGGGLVQPGRSLRLSCAASGFTFHDYTMHWVRQAPGKCLEWVSGISWNSGTIGYADSVRGRFTISRDNAKNSLYLQVNSLRPEDTALYYCAKDGHYGAYYYGMDVWGQGTTVTVSSGGGGSGGGGSGGGGSEIVLTQSPATLSVSPGERATLSCRASQSVNNNLAWYQQKPGQAPRLLIYGASTRATGIPARFSGSGSGTEFTLTISSLQSEDFAVYYCQQYNDWPITFGCGTRLEIKSGGGGSQVQLVESGGGVVQPGRSLRLSCAASGFTFSAYGMHWVRQAPGKCLEWVAVILYDGSNKYYADSVKGRFTISRDNSKNTLYLQMNSLRAEDTAVYYCARGSGWLQLGDYFDYWGQGTLVTVSSGGGGSGGGGSGGGGSQSALTQPPSVSGSPGQSITISCTGTSSDVGGYNYVSWYQQHPGKAPKLMIYEVSNRPSGVSNRFSGSKSGNTASLTISGLQAEDEADYYCSSYTSSSTLVFGCGTKLTVLSGGGGSEVQLVESGGGLVQPGGSLKLSCAASGFTFNKYAINWVRQAPGKGLEWVARIRSKYNNYATYYADAVKDRFTISRDDSKNTVYLQMNNLKTEDTAVYYCARAGNFGSSYISYWAYWGQGTLVTVSSGGGGSGGGGSGGGGSQTVVTQEPSLTVSPGGTVTITCGSSTGAVTSGNYPNWVQKKPGQAPRGLIGGTKFLAPGTPARFSGSLSGGKAALTLSGVQPEDEAEYYCVLWYSNRWVFGSGTKLTVLGGGGDKTHTCPPCPAPELLGGPSVFLFPPKPKDTLMISRTPEVTCVVVDVSHEDPEVKFNWYVDGVEVHNAKTKPCEEQYGSTYRCVSVLTVLHQDWLNGKEYKCKVSNKALPAPIEKTISKAKGQPREPQVYTLPPSREEMTKNQVSLTCLVKGFYPSDIAVEWESNGQPENNYKTTPPVLDSDGSFFLYSKLTVDKSRWQQGNVFSCSVMHEALHNHYTQKSLSLSPGKGGGGSGGGGSGGGGSGGGGSGGGGSGGGGSDKTHTCPPCPAPELLGGPSVFLFPPKPKDTLMISRTPEVTCVVVDVSHEDPEVKFNWYVDGVEVHNAKTKPCEEQYGSTYRCVSVLTVLHQDWLNGKEYKCKVSNKALPAPIEKTISKAKGQPREPQVYTLPPSREEMTKNQVSLTCLVKGFYPSDIAVEWESNGQPENNYKTTPPVLDSDGSFFLYSKLTVDKSRWQQGNVFSCSVMHEALHNHYTQKSLSLSPGK

SEQ ID NO: 3163 - protein, 1230 aa, Artificial Sequence
  Synthetic
EVQLVESGGGLVQPGRSLRLSCAASGFTFHDYTMHWVRQAPGKCLEWVSGISWNSGTIGYADSVRGRFTISRDNAKNSLYLQVNSLRPEDTALYYCAKDGHYGAYYYGMDVWGQGTTVTVSSGGGGQGGGGQGGGGQEIVLTQSPATLSVSPGERATLSCRASQSVNNNLAWYQQKPGQAPRLLIYGASTRATGIPARFSGSGSGTEFTLTISSLQSEDFAVYYCQQYNDWPITFGCGTRLEIKSGGGGQQVQLVESGGGVVQPGRSLRLSCAASGFTFSAYGMHWVRQAPGKCLEWVAVILYDGSNKYYADSVKGRFTISRDNSKNTLYLQMNSLRAEDTAVYYCARGSGWLQLGDYFDYWGQGTLVTVSSGGGGQGGGGQGGGGQQSALTQPPSVSGSPGQSITISCTGTSSDVGGYNYVSWYQQHPGKAPKLMIYEVSNRPSGVSNRFSGSKSGNTASLTISGLQAEDEADYYCSSYTSSSTLVFGCGTKLTVLSGGGGQEVQLVESGGGLVQPGGSLKLSCAASGFTFNKYAINWVRQAPGKGLEWVARIRSKYNNYATYYADAVKDRFTISRDDSKNTVYLQMNNLKTEDTAVYYCARAGNFGSSYISYWAYWGQGTLVTVSSGGGGQGGGGQGGGGQQTVVTQEPSLTVSPGGTVTITCGSSTGAVTSGNYPNWVQKKPGQAPRGLIGGTKFLAPGTPARFSGSLSGGKAALTLSGVQPEDEAEYYCVLWYSNRWVFGSGTKLTVLGGGGCPPCPAPELLGGPSVFLFPPKPKDTLMISRTPEVTCVVVDVSHEEPEVKFNWYVDGVEVHNAKTKPCEEQYGSTYRCVSVLTVLHQDWLNGKEYKCKVSNKALPAPIEKTISKAKGQPREPQVYTLPPSREEMTKNQVSLTCLVKGFYPSDIAVEWESNGQPENNYKTTPPVLDSDGSFFLYSKLTVDKSRWQQGNVFSCSVMHEALHNHYTQKSLSLSPGKGGGGQGGGGQGGGGQGGGGQGGGGQGGGGQCPPCPAPELLGGPSVFLFPPKPKDTLMISRTPEVTCVVVDVSHEEPEVKFNWYVDGVEVHNAKTKPCEEQYGSTYRCVSVLTVLHQDWLNGKEYKCKVSNKALPAPIEKTISKAKGQPREPQVYTLPPSREEMTKNQVSLTCLVKGFYPSDIAVEWESNGQPENNYKTTPPVLDSDGSFFLYSKLTVDKSRWQQGNVFSCSVMHEALHNHYTQKSLSLSPGK

SEQ ID NO: 3164 - protein, 495 aa, Artificial Sequence
  Synthetic
QVQLVQSGGEVKKPGASVKVSCKASGYTFTSYGISWVRQAPGQCLEWMGWMSPYNGNAIYAQKLQGRVTMTRDTSTSTAYMELRSLRSDDTAVYYCARDPDYYGSGSYSDYWGQGTLVTVSSGGGGSGGGGSGGGGSEIVLTQSPATLSVSPGERATLSCRASQSVSSNLAWYQQKPGQAPRLLIYGASSRATGIPARFSGSGSGTEFTLTISSLQSEDFAVYYCQQYHSWPLLTFGCGTKVEIKSGGGGSEVQLVESGGGLVQPGRSLRLSCAASGFTFHDYPMHWVRQAPGKCLEWVSGISWNSDYIVYADSVKGRFTISRDNAKNSLYLQMNSLSAEDTALYYCAKDTAYGGKYSAFDYWGQGTLVTVSSGGGGSGGGGSGGGGSEIVLTQSPATLSVSPGERATLSCRASQSVSRNLAWYQQKPGQAPRRLIYGASTRATGIPDRFSGSGSGTDFTLTISRLEPEDFAVYYCQQYNNWPLTFGCGTKVEIK

SEQ ID NO: 3165 - protein, 495 aa, Artificial Sequence
  Synthetic
QVQLVQSGGEVKKPGASVKVSCKASGYTFTSYGISWVRQAPGQCLEWMGWMSPYNGNAIYAQKLQGRVTMTRDTSTSTAYMELRSLRSDDTAVYYCARDPDYYGSGSYSDYWGQGTLVTVSSGGGGQGGGGQGGGGQEIVLTQSPATLSVSPGERATLSCRASQSVSSNLAWYQQKPGQAPRLLIYGASSRATGIPARFSGSGSGTEFTLTISSLQSEDFAVYYCQQYHSWPLLTFGCGTKVEIKSGGGGQEVQLVESGGGLVQPGRSLRLSCAASGFTFHDYPMHWVRQAPGKCLEWVSGISWNSDYIVYADSVKGRFTISRDNAKNSLYLQMNSLSAEDTALYYCAKDTAYGGKYSAFDYWGQGTLVTVSSGGGGQGGGGQGGGGQEIVLTQSPATLSVSPGERATLSCRASQSVSRNLAWYQQKPGQAPRRLIYGASTRATGIPDRFSGSGSGTDFTLTISRLEPEDFAVYYCQQYNNWPLTFGCGTKVEIK

SEQ ID NO: 3166 - protein, 750 aa, Artificial Sequence
  Synthetic
QVQLVQSGGEVKKPGASVKVSCKASGYTFTSYGISWVRQAPGQCLEWMGWMSPYNGNAIYAQKLQGRVTMTRDTSTSTAYMELRSLRSDDTAVYYCARDPDYYGSGSYSDYWGQGTLVTVSSGGGGSGGGGSGGGGSEIVLTQSPATLSVSPGERATLSCRASQSVSSNLAWYQQKPGQAPRLLIYGASSRATGIPARFSGSGSGTEFTLTISSLQSEDFAVYYCQQYHSWPLLTFGCGTKVEIKSGGGGSEVQLVESGGGLVQPGRSLRLSCAASGFTFHDYPMHWVRQAPGKCLEWVSGISWNSDYIVYADSVKGRFTISRDNAKNSLYLQMNSLSAEDTALYYCAKDTAYGGKYSAFDYWGQGTLVTVSSGGGGSGGGGSGGGGSEIVLTQSPATLSVSPGERATLSCRASQSVSRNLAWYQQKPGQAPRRLIYGASTRATGIPDRFSGSGSGTDFTLTISRLEPEDFAVYYCQQYNNWPLTFGCGTKVEIKSGGGGSEVQLVESGGGLVQPGGSLKLSCAASGFTFNKYAMNWVRQAPGKGLEWVARIRSKYNNYATYYADSVKDRFTISRDDSKNTAYLQMNNLKTEDTAVYYCVRHGNFGNSYISYWAYWGQGTLVTVSSGGGGSGGGGSGGGGSQTVVTQEPSLTVSPGGTVTLTCGSSTGAVTSGNYPNWVQQKPGQAPRGLIGGTKFLAPGTPARFSGSLLGGKAALTLSGVQPEDEAEYYCVLWYSNRWVFGGGTKLTVL

SEQ ID NO: 3167 - protein, 750 aa, Artificial Sequence
  Synthetic
QVQLVQSGGEVKKPGASVKVSCKASGYTFTSYGISWVRQAPGQCLEWMGWMSPYNGNAIYAQKLQGRVTMTRDTSTSTAYMELRSLRSDDTAVYYCARDPDYYGSGSYSDYWGQGTLVTVSSGGGGQGGGGQGGGGQEIVLTQSPATLSVSPGERATLSCRASQSVSSNLAWYQQKPGQAPRLLIYGASSRATGIPARFSGSGSGTEFTLTISSLQSEDFAVYYCQQYHSWPLLTFGCGTKVEIKSGGGGQEVQLVESGGGLVQPGRSLRLSCAASGFTFHDYPMHWVRQAPGKCLEWVSGISWNSDYIVYADSVKGRFTISRDNAKNSLYLQMNSLSAEDTALYYCAKDTAYGGKYSAFDYWGQGTLVTVSSGGGGQGGGGQGGGGQEIVLTQSPATLSVSPGERATLSCRASQSVSRNLAWYQQKPGQAPRRLIYGASTRATGIPDRFSGSGSGTDFTLTISRLEPEDFAVYYCQQYNNWPLTFGCGTKVEIKSGGGGQEVQLVESGGGLVQPGGSLKLSCAASGFTFNKYAMNWVRQAPGKGLEWVARIRSKYNNYATYYADSVKDRFTISRDDSKNTAYLQMNNLKTEDTAVYYCVRHGNFGNSYISYWAYWGQGTLVTVSSGGGGQGGGGQGGGGQQTVVTQEPSLTVSPGGTVTLTCGSSTGAVTSGNYPNWVQQKPGQAPRGLIGGTKFLAPGTPARFSGSLLGGKAALTLSGVQPEDEAEYYCVLWYSNRWVFGGGTKLTVL

SEQ ID NO: 3168 - protein, 750 aa, Artificial Sequence
  Synthetic
QVQLVQSGGEVKKPGASVKVSCKASGYTFTSYGISWVRQAPGQCLEWMGWMSPYNGNAIYAQKLQGRVTMTRDTSTSTAYMELRSLRSDDTAVYYCARDPDYYGSGSYSDYWGQGTLVTVSSGGGGSGGGGSGGGGSEIVLTQSPATLSVSPGERATLSCRASQSVSSNLAWYQQKPGQAPRLLIYGASSRATGIPARFSGSGSGTEFTLTISSLQSEDFAVYYCQQYHSWPLLTFGCGTKVEIKSGGGGSEVQLVESGGGLVQPGRSLRLSCAASGFTFHDYPMHWVRQAPGKCLEWVSGISWNSDYIVYADSVKGRFTISRDNAKNSLYLQMNSLSAEDTALYYCAKDTAYGGKYSAFDYWGQGTLVTVSSGGGGSGGGGSGGGGSEIVLTQSPATLSVSPGERATLSCRASQSVSRNLAWYQQKPGQAPRRLIYGASTRATGIPDRFSGSGSGTDFTLTISRLEPEDFAVYYCQQYNNWPLTFGCGTKVEIKSGGGGSEVQLVESGGGLVQPGGSLKLSCAASGFTFNKYAINWVRQAPGKGLEWVARIRSKYNNYATYYADAVKDRFTISRDDSKNTVYLQMNNLKTEDTAVYYCARAGNFGSSYISYWAYWGQGTLVTVSSGGGGSGGGGSGGGGSQTVVTQEPSLTVSPGGTVTITCGSSTGAVTSGNYPNWVQKKPGQAPRGLIGGTKFLAPGTPARFSGSLSGGKAALTLSGVQPEDEAEYYCVLWYSNRWVFGSGTKLTVL

SEQ ID NO: 3169 - protein, 750 aa, Artificial Sequence
  Synthetic
QVQLVQSGGEVKKPGASVKVSCKASGYTFTSYGISWVRQAPGQCLEWMGWMSPYNGNAIYAQKLQGRVTMTRDTSTSTAYMELRSLRSDDTAVYYCARDPDYYGSGSYSDYWGQGTLVTVSSGGGGQGGGGQGGGGQEIVLTQSPATLSVSPGERATLSCRASQSVSSNLAWYQQKPGQAPRLLIYGASSRATGIPARFSGSGSGTEFTLTISSLQSEDFAVYYCQQYHSWPLLTFGCGTKVEIKSGGGGQEVQLVESGGGLVQPGRSLRLSCAASGFTFHDYPMHWVRQAPGKCLEWVSGISWNSDYIVYADSVKGRFTISRDNAKNSLYLQMNSLSAEDTALYYCAKDTAYGGKYSAFDYWGQGTLVTVSSGGGGQGGGGQGGGGQEIVLTQSPATLSVSPGERATLSCRASQSVSRNLAWYQQKPGQAPRRLIYGASTRATGIPDRFSGSGSGTDFTLTISRLEPEDFAVYYCQQYNNWPLTFGCGTKVEIKSGGGGQEVQLVESGGGLVQPGGSLKLSCAASGFTFNKYAINWVRQAPGKGLEWVARIRSKYNNYATYYADAVKDRFTISRDDSKNTVYLQMNNLKTEDTAVYYCARAGNFGSSYISYWAYWGQGTLVTVSSGGGGQGGGGQGGGGQQTVVTQEPSLTVSPGGTVTITCGSSTGAVTSGNYPNWVQKKPGQAPRGLIGGTKFLAPGTPARFSGSLSGGKAALTLSGVQPEDEAEYYCVLWYSNRWVFGSGTKLTVL

SEQ ID NO: 3170 - protein, 1238 aa, Artificial Sequence
  Synthetic
QVQLVQSGGEVKKPGASVKVSCKASGYTFTSYGISWVRQAPGQCLEWMGWMSPYNGNAIYAQKLQGRVTMTRDTSTSTAYMELRSLRSDDTAVYYCARDPDYYGSGSYSDYWGQGTLVTVSSGGGGSGGGGSGGGGSEIVLTQSPATLSVSPGERATLSCRASQSVSSNLAWYQQKPGQAPRLLIYGASSRATGIPARFSGSGSGTEFTLTISSLQSEDFAVYYCQQYHSWPLLTFGCGTKVEIKSGGGGSEVQLVESGGGLVQPGRSLRLSCAASGFTFHDYPMHWVRQAPGKCLEWVSGISWNSDYIVYADSVKGRFTISRDNAKNSLYLQMNSLSAEDTALYYCAKDTAYGGKYSAFDYWGQGTLVTVSSGGGGSGGGGSGGGGSEIVLTQSPATLSVSPGERATLSCRASQSVSRNLAWYQQKPGQAPRRLIYGASTRATGIPDRFSGSGSGTDFTLTISRLEPEDFAVYYCQQYNNWPLTFGCGTKVEIKSGGGGSEVQLVESGGGLVQPGGSLKLSCAASGFTFNKYAMNWVRQAPGKGLEWVARIRSKYNNYATYYADSVKDRFTISRDDSKNTAYLQMNNLKTEDTAVYYCVRHGNFGNSYISYWAYWGQGTLVTVSSGGGGSGGGGSGGGGSQTVVTQEPSLTVSPGGTVTLTCGSSTGAVTSGNYPNWVQQKPGQAPRGLIGGTKFLAPGTPARFSGSLLGGKAALTLSGVQPEDEAEYYCVLWYSNRWVFGGGTKLTVLGGGGDKTHTCPPCPAPELLGGPSVFLFPPKPKDTLMISRTPEVTCVVVDVSHEDPEVKFNWYVDGVEVHNAKTKPCEEQYGSTYRCVSVLTVLHQDWLNGKEYKCKVSNKALPAPIEKTISKAKGQPREPQVYTLPPSREEMTKNQVSLTCLVKGFYPSDIAVEWESNGQPENNYKTTPPVLDSDGSFFLYSKLTVDKSRWQQGNVFSCSVMHEALHNHYTQKSLSLSPGKGGGGSGGGGSGGGGSGGGGSGGGGSGGGGSDKTHTCPPCPAPELLGGPSVFLFPPKPKDTLMISRTPEVTCVVVDVSHEDPEVKFNWYVDGVEVHNAKTKPCEEQYGSTYRCVSVLTVLHQDWLNGKEYKCKVSNKALPAPIEKTISKAKGQPREPQVYTLPPSREEMTKNQVSLTCLVKGFYPSDIAVEWESNGQPENNYKTTPPVLDSDGSFFLYSKLTVDKSRWQQGNVFSCSVMHEALHNHYTQKSLSLSPGK

SEQ ID NO: 3171 - protein, 1228 aa, Artificial Sequence
  Synthetic
QVQLVQSGGEVKKPGASVKVSCKASGYTFTSYGISWVRQAPGQCLEWMGWMSPYNGNAIYAQKLQGRVTMTRDTSTSTAYMELRSLRSDDTAVYYCARDPDYYGSGSYSDYWGQGTLVTVSSGGGGQGGGGQGGGGQEIVLTQSPATLSVSPGERATLSCRASQSVSSNLAWYQQKPGQAPRLLIYGASSRATGIPARFSGSGSGTEFTLTISSLQSEDFAVYYCQQYHSWPLLTFGCGTKVEIKSGGGGQEVQLVESGGGLVQPGRSLRLSCAASGFTFHDYPMHWVRQAPGKCLEWVSGISWNSDYIVYADSVKGRFTISRDNAKNSLYLQMNSLSAEDTALYYCAKDTAYGGKYSAFDYWGQGTLVTVSSGGGGQGGGGQGGGGQEIVLTQSPATLSVSPGERATLSCRASQSVSRNLAWYQQKPGQAPRRLIYGASTRATGIPDRFSGSGSGTDFTLTISRLEPEDFAVYYCQQYNNWPLTFGCGTKVEIKSGGGGQEVQLVESGGGLVQPGGSLKLSCAASGFTFNKYAMNWVRQAPGKGLEWVARIRSKYNNYATYYADSVKDRFTISRDDSKNTAYLQMNNLKTEDTAVYYCVRHGNFGNSYISYWAYWGQGTLVTVSSGGGGQGGGGQGGGGQQTVVTQEPSLTVSPGGTVTLTCGSSTGAVTSGNYPNWVQQKPGQAPRGLIGGTKFLAPGTPARFSGSLLGGKAALTLSGVQPEDEAEYYCVLWYSNRWVFGGGTKLTVLGGGGCPPCPAPELLGGPSVFLFPPKPKDTLMISRTPEVTCVVVDVSHEEPEVKFNWYVDGVEVHNAKTKPCEEQYGSTYRCVSVLTVLHQDWLNGKEYKCKVSNKALPAPIEKTISKAKGQPREPQVYTLPPSREEMTKNQVSLTCLVKGFYPSDIAVEWESNGQPENNYKTTPPVLDSDGSFFLYSKLTVDKSRWQQGNVFSCSVMHEALHNHYTQKSLSLSPGKGGGGQGGGGQGGGGQGGGGQGGGGQGGGGQCPPCPAPELLGGPSVFLFPPKPKDTLMISRTPEVTCVVVDVSHEEPEVKFNWYVDGVEVHNAKTKPCEEQYGSTYRCVSVLTVLHQDWLNGKEYKCKVSNKALPAPIEKTISKAKGQPREPQVYTLPPSREEMTKNQVSLTCLVKGFYPSDIAVEWESNGQPENNYKTTPPVLDSDGSFFLYSKLTVDKSRWQQGNVFSCSVMHEALHNHYTQKSLSLSPGK

SEQ ID NO: 3172 - protein, 1238 aa, Artificial Sequence
  Synthetic
QVQLVQSGGEVKKPGASVKVSCKASGYTFTSYGISWVRQAPGQCLEWMGWMSPYNGNAIYAQKLQGRVTMTRDTSTSTAYMELRSLRSDDTAVYYCARDPDYYGSGSYSDYWGQGTLVTVSSGGGGSGGGGSGGGGSEIVLTQSPATLSVSPGERATLSCRASQSVSSNLAWYQQKPGQAPRLLIYGASSRATGIPARFSGSGSGTEFTLTISSLQSEDFAVYYCQQYHSWPLLTFGCGTKVEIKSGGGGSEVQLVESGGGLVQPGRSLRLSCAASGFTFHDYPMHWVRQAPGKCLEWVSGISWNSDYIVYADSVKGRFTISRDNAKNSLYLQMNSLSAEDTALYYCAKDTAYGGKYSAFDYWGQGTLVTVSSGGGGSGGGGSGGGGSEIVLTQSPATLSVSPGERATLSCRASQSVSRNLAWYQQKPGQAPRRLIYGASTRATGIPDRFSGSGSGTDFTLTISRLEPEDFAVYYCQQYNNWPLTFGCGTKVEIKSGGGGSEVQLVESGGGLVQPGGSLKLSCAASGFTFNKYAINWVRQAPGKGLEWVARIRSKYNNYATYYADAVKDRFTISRDDSKNTVYLQMNNLKTEDTAVYYCARAGNFGSSYISYWAYWGQGTLVTVSSGGGGSGGGGSGGGGSQTVVTQEPSLTVSPGGTVTITCGSSTGAVTSGNYPNWVQKKPGQAPRGLIGGTKFLAPGTPARFSGSLSGGKAALTLSGVQPEDEAEYYCVLWYSNRWVFGSGTKLTVLGGGGDKTHTCPPCPAPELLGGPSVFLFPPKPKDTLMISRTPEVTCVVVDVSHEDPEVKFNWYVDGVEVHNAKTKPCEEQYGSTYRCVSVLTVLHQDWLNGKEYKCKVSNKALPAPIEKTISKAKGQPREPQVYTLPPSREEMTKNQVSLTCLVKGFYPSDIAVEWESNGQPENNYKTTPPVLDSDGSFFLYSKLTVDKSRWQQGNVFSCSVMHEALHNHYTQKSLSLSPGKGGGGSGGGGSGGGGSGGGGSGGGGSGGGGSDKTHTCPPCPAPELLGGPSVFLFPPKPKDTLMISRTPEVTCVVVDVSHEDPEVKFNWYVDGVEVHNAKTKPCEEQYGSTYRCVSVLTVLHQDWLNGKEYKCKVSNKALPAPIEKTISKAKGQPREPQVYTLPPSREEMTKNQVSLTCLVKGFYPSDIAVEWESNGQPENNYKTTPPVLDSDGSFFLYSKLTVDKSRWQQGNVFSCSVMHEALHNHYTQKSLSLSPGK

SEQ ID NO: 3173 - protein, 1228 aa, Artificial Sequence
  Synthetic
QVQLVQSGGEVKKPGASVKVSCKASGYTFTSYGISWVRQAPGQCLEWMGWMSPYNGNAIYAQKLQGRVTMTRDTSTSTAYMELRSLRSDDTAVYYCARDPDYYGSGSYSDYWGQGTLVTVSSGGGGQGGGGQGGGGQEIVLTQSPATLSVSPGERATLSCRASQSVSSNLAWYQQKPGQAPRLLIYGASSRATGIPARFSGSGSGTEFTLTISSLQSEDFAVYYCQQYHSWPLLTFGCGTKVEIKSGGGGQEVQLVESGGGLVQPGRSLRLSCAASGFTFHDYPMHWVRQAPGKCLEWVSGISWNSDYIVYADSVKGRFTISRDNAKNSLYLQMNSLSAEDTALYYCAKDTAYGGKYSAFDYWGQGTLVTVSSGGGGQGGGGQGGGGQEIVLTQSPATLSVSPGERATLSCRASQSVSRNLAWYQQKPGQAPRRLIYGASTRATGIPDRFSGSGSGTDFTLTISRLEPEDFAVYYCQQYNNWPLTFGCGTKVEIKSGGGGQEVQLVESGGGLVQPGGSLKLSCAASGFTFNKYAINWVRQAPGKGLEWVARIRSKYNNYATYYADAVKDRFTISRDDSKNTVYLQMNNLKTEDTAVYYCARAGNFGSSYISYWAYWGQGTLVTVSSGGGGQGGGGQGGGGQQTVVTQEPSLTVSPGGTVTITCGSSTGAVTSGNYPNWVQKKPGQAPRGLIGGTKFLAPGTPARFSGSLSGGKAALTLSGVQPEDEAEYYCVLWYSNRWVFGSGTKLTVLGGGGCPPCPAPELLGGPSVFLFPPKPKDTLMISRTPEVTCVVVDVSHEEPEVKFNWYVDGVEVHNAKTKPCEEQYGSTYRCVSVLTVLHQDWLNGKEYKCKVSNKALPAPIEKTISKAKGQPREPQVYTLPPSREEMTKNQVSLTCLVKGFYPSDIAVEWESNGQPENNYKTTPPVLDSDGSFFLYSKLTVDKSRWQQGNVFSCSVMHEALHNHYTQKSLSLSPGKGGGGQGGGGQGGGGQGGGGQGGGGQGGGGQCPPCPAPELLGGPSVFLFPPKPKDTLMISRTPEVTCVVVDVSHEEPEVKFNWYVDGVEVHNAKTKPCEEQYGSTYRCVSVLTVLHQDWLNGKEYKCKVSNKALPAPIEKTISKAKGQPREPQVYTLPPSREEMTKNQVSLTCLVKGFYPSDIAVEWESNGQPENNYKTTPPVLDSDGSFFLYSKLTVDKSRWQQGNVFSCSVMHEALHNHYTQKSLSLSPGK

SEQ ID NO: 3174 - protein, 487 aa, Artificial Sequence
  Synthetic
QVQLQESGPGLVKPSETLSLTCTVSGGSISSFYWSWIRQPPGKCLEWIGRISSSGDVDYNPSLKSRVTISVDTSKNQFSLKLSSVTAADTAVYYCAREGGFYYWGQGTLVTVSSGGGGSGGGGSGGGGSEIVLTQSPGTLSLSPGERATLSCRASQSVSSSYLAWYQQKPGQAPRLLIYGASSRATGIPDRFSGSGSGTDFTLTISRLEPEDFAVYYCQQYGSSPITFGCGTKLEIKSGGGGSEVQLVESGGGLVQPGRSLRLSCAASGFTFHDYPMHWVRQAPGKCLEWVSGISWNSDYIVYADSVKGRFTISRDNAKNSLYLQMNSLSAEDTALYYCAKDTAYGGKYSAFDYWGQGTLVTVSSGGGGSGGGGSGGGGSEIVLTQSPATLSVSPGERATLSCRASQSVSRNLAWYQQKPGQAPRRLIYGASTRATGIPDRFSGSGSGTDFTLTISRLEPEDFAVYYCQQYNNWPLTFGCGTKVEIK

SEQ ID NO: 3175 - protein, 487 aa, Artificial Sequence
  Synthetic
QVQLQESGPGLVKPSETLSLTCTVSGGSISSFYWSWIRQPPGKCLEWIGRISSSGDVDYNPSLKSRVTISVDTSKNQFSLKLSSVTAADTAVYYCAREGGFYYWGQGTLVTVSSGGGGQGGGGQGGGGQEIVLTQSPGTLSLSPGERATLSCRASQSVSSSYLAWYQQKPGQAPRLLIYGASSRATGIPDRFSGSGSGTDFTLTISRLEPEDFAVYYCQQYGSSPITFGCGTKLEIKSGGGGQEVQLVESGGGLVQPGRSLRLSCAASGFTFHDYPMHWVRQAPGKCLEWVSGISWNSDYIVYADSVKGRFTISRDNAKNSLYLQMNSLSAEDTALYYCAKDTAYGGKYSAFDYWGQGTLVTVSSGGGGQGGGGQGGGGQEIVLTQSPATLSVSPGERATLSCRASQSVSRNLAWYQQKPGQAPRRLIYGASTRATGIPDRFSGSGSGTDFTLTISRLEPEDFAVYYCQQYNNWPLTFGCGTKVEIK

SEQ ID NO: 3176 - protein, 742 aa, Artificial Sequence
  Synthetic
QVQLQESGPGLVKPSETLSLTCTVSGGSISSFYWSWIRQPPGKCLEWIGRISSSGDVDYNPSLKSRVTISVDTSKNQFSLKLSSVTAADTAVYYCAREGGFYYWGQGTLVTVSSGGGGSGGGGSGGGGSEIVLTQSPGTLSLSPGERATLSCRASQSVSSSYLAWYQQKPGQAPRLLIYGASSRATGIPDRFSGSGSGTDFTLTISRLEPEDFAVYYCQQYGSSPITFGCGTKLEIKSGGGGSEVQLVESGGGLVQPGRSLRLSCAASGFTFHDYPMHWVRQAPGKCLEWVSGISWNSDYIVYADSVKGRFTISRDNAKNSLYLQMNSLSAEDTALYYCAKDTAYGGKYSAFDYWGQGTLVTVSSGGGGSGGGGSGGGGSEIVLTQSPATLSVSPGERATLSCRASQSVSRNLAWYQQKPGQAPRRLIYGASTRATGIPDRFSGSGSGTDFTLTISRLEPEDFAVYYCQQYNNWPLTFGCGTKVEIKSGGGGSEVQLVESGGGLVQPGGSLKLSCAASGFTFNKYAMNWVRQAPGKGLEWVARIRSKYNNYATYYADSVKDRFTISRDDSKNTAYLQMNNLKTEDTAVYYCVRHGNFGNSYISYWAYWGQGTLVTVSSGGGGSGGGGSGGGGSQTVVTQEPSLTVSPGGTVTLTCGSSTGAVTSGNYPNWVQQKPGQAPRGLIGGTKFLAPGTPARFSGSLLGGKAALTLSGVQPEDEAEYYCVLWYSNRWVFGGGTKLTVL

SEQ ID NO: 3177 - protein, 742 aa, Artificial Sequence
  Synthetic
QVQLQESGPGLVKPSETLSLTCTVSGGSISSFYWSWIRQPPGKCLEWIGRISSSGDVDYNPSLKSRVTISVDTSKNQFSLKLSSVTAADTAVYYCAREGGFYYWGQGTLVTVSSGGGGQGGGGQGGGGQEIVLTQSPGTLSLSPGERATLSCRASQSVSSSYLAWYQQKPGQAPRLLIYGASSRATGIPDRFSGSGSGTDFTLTISRLEPEDFAVYYCQQYGSSPITFGCGTKLEIKSGGGGQEVQLVESGGGLVQPGRSLRLSCAASGFTFHDYPMHWVRQAPGKCLEWVSGISWNSDYIVYADSVKGRFTISRDNAKNSLYLQMNSLSAEDTALYYCAKDTAYGGKYSAFDYWGQGTLVTVSSGGGGQGGGGQGGGGQEIVLTQSPATLSVSPGERATLSCRASQSVSRNLAWYQQKPGQAPRRLIYGASTRATGIPDRFSGSGSGTDFTLTISRLEPEDFAVYYCQQYNNWPLTFGCGTKVEIKSGGGGQEVQLVESGGGLVQPGGSLKLSCAASGFTFNKYAMNWVRQAPGKGLEWVARIRSKYNNYATYYADSVKDRFTISRDDSKNTAYLQMNNLKTEDTAVYYCVRHGNFGNSYISYWAYWGQGTLVTVSSGGGGQGGGGQGGGGQQTVVTQEPSLTVSPGGTVTLTCGSSTGAVTSGNYPNWVQQKPGQAPRGLIGGTKFLAPGTPARFSGSLLGGKAALTLSGVQPEDEAEYYCVLWYSNRWVFGGGTKLTVL

SEQ ID NO: 3178 - protein, 742 aa, Artificial Sequence
  Synthetic
QVQLQESGPGLVKPSETLSLTCTVSGGSISSFYWSWIRQPPGKCLEWIGRISSSGDVDYNPSLKSRVTISVDTSKNQFSLKLSSVTAADTAVYYCAREGGFYYWGQGTLVTVSSGGGGSGGGGSGGGGSEIVLTQSPGTLSLSPGERATLSCRASQSVSSSYLAWYQQKPGQAPRLLIYGASSRATGIPDRFSGSGSGTDFTLTISRLEPEDFAVYYCQQYGSSPITFGCGTKLEIKSGGGGSEVQLVESGGGLVQPGRSLRLSCAASGFTFHDYPMHWVRQAPGKCLEWVSGISWNSDYIVYADSVKGRFTISRDNAKNSLYLQMNSLSAEDTALYYCAKDTAYGGKYSAFDYWGQGTLVTVSSGGGGSGGGGSGGGGSEIVLTQSPATLSVSPGERATLSCRASQSVSRNLAWYQQKPGQAPRRLIYGASTRATGIPDRFSGSGSGTDFTLTISRLEPEDFAVYYCQQYNNWPLTFGCGTKVEIKSGGGGSEVQLVESGGGLVQPGGSLKLSCAASGFTFNKYAINWVRQAPGKGLEWVARIRSKYNNYATYYADAVKDRFTISRDDSKNTVYLQMNNLKTEDTAVYYCARAGNFGSSYISYWAYWGQGTLVTVSSGGGGSGGGGSGGGGSQTVVTQEPSLTVSPGGTVTITCGSSTGAVTSGNYPNWVQKKPGQAPRGLIGGTKFLAPGTPARFSGSLSGGKAALTLSGVQPEDEAEYYCVLWYSNRWVFGSGTKLTVL

SEQ ID NO: 3179 - protein, 742 aa, Artificial Sequence
  Synthetic
QVQLQESGPGLVKPSETLSLTCTVSGGSISSFYWSWIRQPPGKCLEWIGRISSSGDVDYNPSLKSRVTISVDTSKNQFSLKLSSVTAADTAVYYCAREGGFYYWGQGTLVTVSSGGGGQGGGGQGGGGQEIVLTQSPGTLSLSPGERATLSCRASQSVSSSYLAWYQQKPGQAPRLLIYGASSRATGIPDRFSGSGSGTDFTLTISRLEPEDFAVYYCQQYGSSPITFGCGTKLEIKSGGGGQEVQLVESGGGLVQPGRSLRLSCAASGFTFHDYPMHWVRQAPGKCLEWVSGISWNSDYIVYADSVKGRFTISRDNAKNSLYLQMNSLSAEDTALYYCAKDTAYGGKYSAFDYWGQGTLVTVSSGGGGQGGGGQGGGGQEIVLTQSPATLSVSPGERATLSCRASQSVSRNLAWYQQKPGQAPRRLIYGASTRATGIPDRFSGSGSGTDFTLTISRLEPEDFAVYYCQQYNNWPLTFGCGTKVEIKSGGGGQEVQLVESGGGLVQPGGSLKLSCAASGFTFNKYAINWVRQAPGKGLEWVARIRSKYNNYATYYADAVKDRFTISRDDSKNTVYLQMNNLKTEDTAVYYCARAGNFGSSYISYWAYWGQGTLVTVSSGGGGQGGGGQGGGGQQTVVTQEPSLTVSPGGTVTITCGSSTGAVTSGNYPNWVQKKPGQAPRGLIGGTKFLAPGTPARFSGSLSGGKAALTLSGVQPEDEAEYYCVLWYSNRWVFGSGTKLTVL

SEQ ID NO: 3180 - protein, 1230 aa, Artificial Sequence
  Synthetic
QVQLQESGPGLVKPSETLSLTCTVSGGSISSFYWSWIRQPPGKCLEWIGRISSSGDVDYNPSLKSRVTISVDTSKNQFSLKLSSVTAADTAVYYCAREGGFYYWGQGTLVTVSSGGGGSGGGGSGGGGSEIVLTQSPGTLSLSPGERATLSCRASQSVSSSYLAWYQQKPGQAPRLLIYGASSRATGIPDRFSGSGSGTDFTLTISRLEPEDFAVYYCQQYGSSPITFGCGTKLEIKSGGGGSEVQLVESGGGLVQPGRSLRLSCAASGFTFHDYPMHWVRQAPGKCLEWVSGISWNSDYIVYADSVKGRFTISRDNAKNSLYLQMNSLSAEDTALYYCAKDTAYGGKYSAFDYWGQGTLVTVSSGGGGSGGGGSGGGGSEIVLTQSPATLSVSPGERATLSCRASQSVSRNLAWYQQKPGQAPRRLIYGASTRATGIPDRFSGSGSGTDFTLTISRLEPEDFAVYYCQQYNNWPLTFGCGTKVEIKSGGGGSEVQLVESGGGLVQPGGSLKLSCAASGFTFNKYAMNWVRQAPGKGLEWVARIRSKYNNYATYYADSVKDRFTISRDDSKNTAYLQMNNLKTEDTAVYYCVRHGNFGNSYISYWAYWGQGTLVTVSSGGGGSGGGGSGGGGSQTVVTQEPSLTVSPGGTVTLTCGSSTGAVTSGNYPNWVQQKPGQAPRGLIGGTKFLAPGTPARFSGSLLGGKAALTLSGVQPEDEAEYYCVLWYSNRWVFGGGTKLTVLGGGGDKTHTCPPCPAPELLGGPSVFLFPPKPKDTLMISRTPEVTCVVVDVSHEDPEVKFNWYVDGVEVHNAKTKPCEEQYGSTYRCVSVLTVLHQDWLNGKEYKCKVSNKALPAPIEKTISKAKGQPREPQVYTLPPSREEMTKNQVSLTCLVKGFYPSDIAVEWESNGQPENNYKTTPPVLDSDGSFFLYSKLTVDKSRWQQGNVFSCSVMHEALHNHYTQKSLSLSPGKGGGGSGGGGSGGGGSGGGGSGGGGSGGGGSDKTHTCPPCPAPELLGGPSVFLFPPKPKDTLMISRTPEVTCVVVDVSHEDPEVKFNWYVDGVEVHNAKTKPCEEQYGSTYRCVSVLTVLHQDWLNGKEYKCKVSNKALPAPIEKTISKAKGQPREPQVYTLPPSREEMTKNQVSLTCLVKGFYPSDIAVEWESNGQPENNYKTTPPVLDSDGSFFLYSKLTVDKSRWQQGNVFSCSVMHEALHNHYTQKSLSLSPGK

SEQ ID NO: 3181 - protein, 1220 aa, Artificial Sequence
  Synthetic
QVQLQESGPGLVKPSETLSLTCTVSGGSISSFYWSWIRQPPGKCLEWIGRISSSGDVDYNPSLKSRVTISVDTSKNQFSLKLSSVTAADTAVYYCAREGGFYYWGQGTLVTVSSGGGGQGGGGQGGGGQEIVLTQSPGTLSLSPGERATLSCRASQSVSSSYLAWYQQKPGQAPRLLIYGASSRATGIPDRFSGSGSGTDFTLTISRLEPEDFAVYYCQQYGSSPITFGCGTKLEIKSGGGGQEVQLVESGGGLVQPGRSLRLSCAASGFTFHDYPMHWVRQAPGKCLEWVSGISWNSDYIVYADSVKGRFTISRDNAKNSLYLQMNSLSAEDTALYYCAKDTAYGGKYSAFDYWGQGTLVTVSSGGGGQGGGGQGGGGQEIVLTQSPATLSVSPGERATLSCRASQSVSRNLAWYQQKPGQAPRRLIYGASTRATGIPDRFSGSGSGTDFTLTISRLEPEDFAVYYCQQYNNWPLTFGCGTKVEIKSGGGGQEVQLVESGGGLVQPGGSLKLSCAASGFTFNKYAMNWVRQAPGKGLEWVARIRSKYNNYATYYADSVKDRFTISRDDSKNTAYLQMNNLKTEDTAVYYCVRHGNFGNSYISYWAYWGQGTLVTVSSGGGGQGGGGQGGGGQQTVVTQEPSLTVSPGGTVTLTCGSSTGAVTSGNYPNWVQQKPGQAPRGLIGGTKFLAPGTPARFSGSLLGGKAALTLSGVQPEDEAEYYCVLWYSNRWVFGGGTKLTVLGGGGCPPCPAPELLGGPSVFLFPPKPKDTLMISRTPEVTCVVVDVSHEEPEVKFNWYVDGVEVHNAKTKPCEEQYGSTYRCVSVLTVLHQDWLNGKEYKCKVSNKALPAPIEKTISKAKGQPREPQVYTLPPSREEMTKNQVSLTCLVKGFYPSDIAVEWESNGQPENNYKTTPPVLDSDGSFFLYSKLTVDKSRWQQGNVFSCSVMHEALHNHYTQKSLSLSPGKGGGGQGGGGQGGGGQGGGGQGGGGQGGGGQCPPCPAPELLGGPSVFLFPPKPKDTLMISRTPEVTCVVVDVSHEEPEVKFNWYVDGVEVHNAKTKPCEEQYGSTYRCVSVLTVLHQDWLNGKEYKCKVSNKALPAPIEKTISKAKGQPREPQVYTLPPSREEMTKNQVSLTCLVKGFYPSDIAVEWESNGQPENNYKTTPPVLDSDGSFFLYSKLTVDKSRWQQGNVFSCSVMHEALHNHYTQKSLSLSPGK

SEQ ID NO: 3182 - protein, 1230 aa, Artificial Sequence
  Synthetic
QVQLQESGPGLVKPSETLSLTCTVSGGSISSFYWSWIRQPPGKCLEWIGRISSSGDVDYNPSLKSRVTISVDTSKNQFSLKLSSVTAADTAVYYCAREGGFYYWGQGTLVTVSSGGGGSGGGGSGGGGSEIVLTQSPGTLSLSPGERATLSCRASQSVSSSYLAWYQQKPGQAPRLLIYGASSRATGIPDRFSGSGSGTDFTLTISRLEPEDFAVYYCQQYGSSPITFGCGTKLEIKSGGGGSEVQLVESGGGLVQPGRSLRLSCAASGFTFHDYPMHWVRQAPGKCLEWVSGISWNSDYIVYADSVKGRFTISRDNAKNSLYLQMNSLSAEDTALYYCAKDTAYGGKYSAFDYWGQGTLVTVSSGGGGSGGGGSGGGGSEIVLTQSPATLSVSPGERATLSCRASQSVSRNLAWYQQKPGQAPRRLIYGASTRATGIPDRFSGSGSGTDFTLTISRLEPEDFAVYYCQQYNNWPLTFGCGTKVEIKSGGGGSEVQLVESGGGLVQPGGSLKLSCAASGFTFNKYAINWVRQAPGKGLEWVARIRSKYNNYATYYADAVKDRFTISRDDSKNTVYLQMNNLKTEDTAVYYCARAGNFGSSYISYWAYWGQGTLVTVSSGGGGSGGGGSGGGGSQTVVTQEPSLTVSPGGTVTITCGSSTGAVTSGNYPNWVQKKPGQAPRGLIGGTKFLAPGTPARFSGSLSGGKAALTLSGVQPEDEAEYYCVLWYSNRWVFGSGTKLTVLGGGGDKTHTCPPCPAPELLGGPSVFLFPPKPKDTLMISRTPEVTCVVVDVSHEDPEVKFNWYVDGVEVHNAKTKPCEEQYGSTYRCVSVLTVLHQDWLNGKEYKCKVSNKALPAPIEKTISKAKGQPREPQVYTLPPSREEMTKNQVSLTCLVKGFYPSDIAVEWESNGQPENNYKTTPPVLDSDGSFFLYSKLTVDKSRWQQGNVFSCSVMHEALHNHYTQKSLSLSPGKGGGGSGGGGSGGGGSGGGGSGGGGSGGGGSDKTHTCPPCPAPELLGGPSVFLFPPKPKDTLMISRTPEVTCVVVDVSHEDPEVKFNWYVDGVEVHNAKTKPCEEQYGSTYRCVSVLTVLHQDWLNGKEYKCKVSNKALPAPIEKTISKAKGQPREPQVYTLPPSREEMTKNQVSLTCLVKGFYPSDIAVEWESNGQPENNYKTTPPVLDSDGSFFLYSKLTVDKSRWQQGNVFSCSVMHEALHNHYTQKSLSLSPGK

SEQ ID NO: 3183 - protein, 1220 aa, Artificial Sequence
  Synthetic
QVQLQESGPGLVKPSETLSLTCTVSGGSISSFYWSWIRQPPGKCLEWIGRISSSGDVDYNPSLKSRVTISVDTSKNQFSLKLSSVTAADTAVYYCAREGGFYYWGQGTLVTVSSGGGGQGGGGQGGGGQEIVLTQSPGTLSLSPGERATLSCRASQSVSSSYLAWYQQKPGQAPRLLIYGASSRATGIPDRFSGSGSGTDFTLTISRLEPEDFAVYYCQQYGSSPITFGCGTKLEIKSGGGGQEVQLVESGGGLVQPGRSLRLSCAASGFTFHDYPMHWVRQAPGKCLEWVSGISWNSDYIVYADSVKGRFTISRDNAKNSLYLQMNSLSAEDTALYYCAKDTAYGGKYSAFDYWGQGTLVTVSSGGGGQGGGGQGGGGQEIVLTQSPATLSVSPGERATLSCRASQSVSRNLAWYQQKPGQAPRRLIYGASTRATGIPDRFSGSGSGTDFTLTISRLEPEDFAVYYCQQYNNWPLTFGCGTKVEIKSGGGGQEVQLVESGGGLVQPGGSLKLSCAASGFTFNKYAINWVRQAPGKGLEWVARIRSKYNNYATYYADAVKDRFTISRDDSKNTVYLQMNNLKTEDTAVYYCARAGNFGSSYISYWAYWGQGTLVTVSSGGGGQGGGGQGGGGQQTVVTQEPSLTVSPGGTVTITCGSSTGAVTSGNYPNWVQKKPGQAPRGLIGGTKFLAPGTPARFSGSLSGGKAALTLSGVQPEDEAEYYCVLWYSNRWVFGSGTKLTVLGGGGCPPCPAPELLGGPSVFLFPPKPKDTLMISRTPEVTCVVVDVSHEEPEVKFNWYVDGVEVHNAKTKPCEEQYGSTYRCVSVLTVLHQDWLNGKEYKCKVSNKALPAPIEKTISKAKGQPREPQVYTLPPSREEMTKNQVSLTCLVKGFYPSDIAVEWESNGQPENNYKTTPPVLDSDGSFFLYSKLTVDKSRWQQGNVFSCSVMHEALHNHYTQKSLSLSPGKGGGGQGGGGQGGGGQGGGGQGGGGQGGGGQCPPCPAPELLGGPSVFLFPPKPKDTLMISRTPEVTCVVVDVSHEEPEVKFNWYVDGVEVHNAKTKPCEEQYGSTYRCVSVLTVLHQDWLNGKEYKCKVSNKALPAPIEKTISKAKGQPREPQVYTLPPSREEMTKNQVSLTCLVKGFYPSDIAVEWESNGQPENNYKTTPPVLDSDGSFFLYSKLTVDKSRWQQGNVFSCSVMHEALHNHYTQKSLSLSPGK

SEQ ID NO: 3184 - protein, 495 aa, Artificial Sequence
  Synthetic
QVQLVQSGAEVKKPGASVKVSCKASGYTFTSYGISWVRQAPGQCLEWMGWISAYNGNTIYAQKFQGRVTLTRDTSTSTAYMELRSLRSDDTAMYYCARDPDYYGSGSYSDYWGQGTLVTVSSGGGGSGGGGSGGGGSEIVLTQSPATLSVSPGERATLSCRASQSVSSNLAWYQQKPGQAPRLLIYGASSRATGIPARFSGSGSGTEFTLTISSLQSEDFAVYYCQQYHSWPLLTFGCGTKVEIKSGGGGSEVQLVESGGGLVQPGRSLRLSCAASGFTFHDYPMHWVRQAPGKCLEWVSGISWNSDYIVYADSVKGRFTISRDNAKNSLYLQMNSLSAEDTALYYCAKDTAYGGKYSAFDYWGQGTLVTVSSGGGGSGGGGSGGGGSEIVLTQSPATLSVSPGERATLSCRASQSVSRNLAWYQQKPGQAPRRLIYGASTRATGIPDRFSGSGSGTDFTLTISRLEPEDFAVYYCQQYNNWPLTFGCGTKVEIK

SEQ ID NO: 3185 - protein, 495 aa, Artificial Sequence
  Synthetic
QVQLVQSGAEVKKPGASVKVSCKASGYTFTSYGISWVRQAPGQCLEWMGWISAYNGNTIYAQKFQGRVTLTRDTSTSTAYMELRSLRSDDTAMYYCARDPDYYGSGSYSDYWGQGTLVTVSSGGGGQGGGGQGGGGQEIVLTQSPATLSVSPGERATLSCRASQSVSSNLAWYQQKPGQAPRLLIYGASSRATGIPARFSGSGSGTEFTLTISSLQSEDFAVYYCQQYHSWPLLTFGCGTKVEIKSGGGGQEVQLVESGGGLVQPGRSLRLSCAASGFTFHDYPMHWVRQAPGKCLEWVSGISWNSDYIVYADSVKGRFTISRDNAKNSLYLQMNSLSAEDTALYYCAKDTAYGGKYSAFDYWGQGTLVTVSSGGGGQGGGGQGGGGQEIVLTQSPATLSVSPGERATLSCRASQSVSRNLAWYQQKPGQAPRRLIYGASTRATGIPDRFSGSGSGTDFTLTISRLEPEDFAVYYCQQYNNWPLTFGCGTKVEIK

SEQ ID NO: 3186 - protein, 750 aa, Artificial Sequence
  Synthetic
QVQLVQSGAEVKKPGASVKVSCKASGYTFTSYGISWVRQAPGQCLEWMGWISAYNGNTIYAQKFQGRVTLTRDTSTSTAYMELRSLRSDDTAMYYCARDPDYYGSGSYSDYWGQGTLVTVSSGGGGSGGGGSGGGGSEIVLTQSPATLSVSPGERATLSCRASQSVSSNLAWYQQKPGQAPRLLIYGASSRATGIPARFSGSGSGTEFTLTISSLQSEDFAVYYCQQYHSWPLLTFGCGTKVEIKSGGGGSEVQLVESGGGLVQPGRSLRLSCAASGFTFHDYPMHWVRQAPGKCLEWVSGISWNSDYIVYADSVKGRFTISRDNAKNSLYLQMNSLSAEDTALYYCAKDTAYGGKYSAFDYWGQGTLVTVSSGGGGSGGGGSGGGGSEIVLTQSPATLSVSPGERATLSCRASQSVSRNLAWYQQKPGQAPRRLIYGASTRATGIPDRFSGSGSGTDFTLTISRLEPEDFAVYYCQQYNNWPLTFGCGTKVEIKSGGGGSEVQLVESGGGLVQPGGSLKLSCAASGFTFNKYAMNWVRQAPGKGLEWVARIRSKYNNYATYYADSVKDRFTISRDDSKNTAYLQMNNLKTEDTAVYYCVRHGNFGNSYISYWAYWGQGTLVTVSSGGGGSGGGGSGGGGSQTVVTQEPSLTVSPGGTVTLTCGSSTGAVTSGNYPNWVQQKPGQAPRGLIGGTKFLAPGTPARFSGSLLGGKAALTLSGVQPEDEAEYYCVLWYSNRWVFGGGTKLTVL

SEQ ID NO: 3187 - protein, 750 aa, Artificial Sequence
  Synthetic
QVQLVQSGAEVKKPGASVKVSCKASGYTFTSYGISWVRQAPGQCLEWMGWISAYNGNTIYAQKFQGRVTLTRDTSTSTAYMELRSLRSDDTAMYYCARDPDYYGSGSYSDYWGQGTLVTVSSGGGGQGGGGQGGGGQEIVLTQSPATLSVSPGERATLSCRASQSVSSNLAWYQQKPGQAPRLLIYGASSRATGIPARFSGSGSGTEFTLTISSLQSEDFAVYYCQQYHSWPLLTFGCGTKVEIKSGGGGQEVQLVESGGGLVQPGRSLRLSCAASGFTFHDYPMHWVRQAPGKCLEWVSGISWNSDYIVYADSVKGRFTISRDNAKNSLYLQMNSLSAEDTALYYCAKDTAYGGKYSAFDYWGQGTLVTVSSGGGGQGGGGQGGGGQEIVLTQSPATLSVSPGERATLSCRASQSVSRNLAWYQQKPGQAPRRLIYGASTRATGIPDRFSGSGSGTDFTLTISRLEPEDFAVYYCQQYNNWPLTFGCGTKVEIKSGGGGQEVQLVESGGGLVQPGGSLKLSCAASGFTFNKYAMNWVRQAPGKGLEWVARIRSKYNNYATYYADSVKDRFTISRDDSKNTAYLQMNNLKTEDTAVYYCVRHGNFGNSYISYWAYWGQGTLVTVSSGGGGQGGGGQGGGGQQTVVTQEPSLTVSPGGTVTLTCGSSTGAVTSGNYPNWVQQKPGQAPRGLIGGTKFLAPGTPARFSGSLLGGKAALTLSGVQPEDEAEYYCVLWYSNRWVFGGGTKLTVL

SEQ ID NO: 3188 - protein, 750 aa, Artificial Sequence
  Synthetic
QVQLVQSGAEVKKPGASVKVSCKASGYTFTSYGISWVRQAPGQCLEWMGWISAYNGNTIYAQKFQGRVTLTRDTSTSTAYMELRSLRSDDTAMYYCARDPDYYGSGSYSDYWGQGTLVTVSSGGGGSGGGGSGGGGSEIVLTQSPATLSVSPGERATLSCRASQSVSSNLAWYQQKPGQAPRLLIYGASSRATGIPARFSGSGSGTEFTLTISSLQSEDFAVYYCQQYHSWPLLTFGCGTKVEIKSGGGGSEVQLVESGGGLVQPGRSLRLSCAASGFTFHDYPMHWVRQAPGKCLEWVSGISWNSDYIVYADSVKGRFTISRDNAKNSLYLQMNSLSAEDTALYYCAKDTAYGGKYSAFDYWGQGTLVTVSSGGGGSGGGGSGGGGSEIVLTQSPATLSVSPGERATLSCRASQSVSRNLAWYQQKPGQAPRRLIYGASTRATGIPDRFSGSGSGTDFTLTISRLEPEDFAVYYCQQYNNWPLTFGCGTKVEIKSGGGGSEVQLVESGGGLVQPGGSLKLSCAASGFTFNKYAINWVRQAPGKGLEWVARIRSKYNNYATYYADAVKDRFTISRDDSKNTVYLQMNNLKTEDTAVYYCARAGNFGSSYISYWAYWGQGTLVTVSSGGGGSGGGGSGGGGSQTVVTQEPSLTVSPGGTVTITCGSSTGAVTSGNYPNWVQKKPGQAPRGLIGGTKFLAPGTPARFSGSLSGGKAALTLSGVQPEDEAEYYCVLWYSNRWVFGSGTKLTVL

SEQ ID NO: 3189 - protein, 750 aa, Artificial Sequence
  Synthetic
QVQLVQSGAEVKKPGASVKVSCKASGYTFTSYGISWVRQAPGQCLEWMGWISAYNGNTIYAQKFQGRVTLTRDTSTSTAYMELRSLRSDDTAMYYCARDPDYYGSGSYSDYWGQGTLVTVSSGGGGQGGGGQGGGGQEIVLTQSPATLSVSPGERATLSCRASQSVSSNLAWYQQKPGQAPRLLIYGASSRATGIPARFSGSGSGTEFTLTISSLQSEDFAVYYCQQYHSWPLLTFGCGTKVEIKSGGGGQEVQLVESGGGLVQPGRSLRLSCAASGFTFHDYPMHWVRQAPGKCLEWVSGISWNSDYIVYADSVKGRFTISRDNAKNSLYLQMNSLSAEDTALYYCAKDTAYGGKYSAFDYWGQGTLVTVSSGGGGQGGGGQGGGGQEIVLTQSPATLSVSPGERATLSCRASQSVSRNLAWYQQKPGQAPRRLIYGASTRATGIPDRFSGSGSGTDFTLTISRLEPEDFAVYYCQQYNNWPLTFGCGTKVEIKSGGGGQEVQLVESGGGLVQPGGSLKLSCAASGFTFNKYAINWVRQAPGKGLEWVARIRSKYNNYATYYADAVKDRFTISRDDSKNTVYLQMNNLKTEDTAVYYCARAGNFGSSYISYWAYWGQGTLVTVSSGGGGQGGGGQGGGGQQTVVTQEPSLTVSPGGTVTITCGSSTGAVTSGNYPNWVQKKPGQAPRGLIGGTKFLAPGTPARFSGSLSGGKAALTLSGVQPEDEAEYYCVLWYSNRWVFGSGTKLTVL

SEQ ID NO: 3190 - protein, 1238 aa, Artificial Sequence
  Synthetic
QVQLVQSGAEVKKPGASVKVSCKASGYTFTSYGISWVRQAPGQCLEWMGWISAYNGNTIYAQKFQGRVTLTRDTSTSTAYMELRSLRSDDTAMYYCARDPDYYGSGSYSDYWGQGTLVTVSSGGGGSGGGGSGGGGSEIVLTQSPATLSVSPGERATLSCRASQSVSSNLAWYQQKPGQAPRLLIYGASSRATGIPARFSGSGSGTEFTLTISSLQSEDFAVYYCQQYHSWPLLTFGCGTKVEIKSGGGGSEVQLVESGGGLVQPGRSLRLSCAASGFTFHDYPMHWVRQAPGKCLEWVSGISWNSDYIVYADSVKGRFTISRDNAKNSLYLQMNSLSAEDTALYYCAKDTAYGGKYSAFDYWGQGTLVTVSSGGGGSGGGGSGGGGSEIVLTQSPATLSVSPGERATLSCRASQSVSRNLAWYQQKPGQAPRRLIYGASTRATGIPDRFSGSGSGTDFTLTISRLEPEDFAVYYCQQYNNWPLTFGCGTKVEIKSGGGGSEVQLVESGGGLVQPGGSLKLSCAASGFTFNKYAMNWVRQAPGKGLEWVARIRSKYNNYATYYADSVKDRFTISRDDSKNTAYLQMNNLKTEDTAVYYCVRHGNFGNSYISYWAYWGQGTLVTVSSGGGGSGGGGSGGGGSQTVVTQEPSLTVSPGGTVTLTCGSSTGAVTSGNYPNWVQQKPGQAPRGLIGGTKFLAPGTPARFSGSLLGGKAALTLSGVQPEDEAEYYCVLWYSNRWVFGGGTKLTVLGGGGDKTHTCPPCPAPELLGGPSVFLFPPKPKDTLMISRTPEVTCVVVDVSHEDPEVKFNWYVDGVEVHNAKTKPCEEQYGSTYRCVSVLTVLHQDWLNGKEYKCKVSNKALPAPIEKTISKAKGQPREPQVYTLPPSREEMTKNQVSLTCLVKGFYPSDIAVEWESNGQPENNYKTTPPVLDSDGSFFLYSKLTVDKSRWQQGNVFSCSVMHEALHNHYTQKSLSLSPGKGGGGSGGGGSGGGGSGGGGSGGGGSGGGGSDKTHTCPPCPAPELLGGPSVFLFPPKPKDTLMISRTPEVTCVVVDVSHEDPEVKFNWYVDGVEVHNAKTKPCEEQYGSTYRCVSVLTVLHQDWLNGKEYKCKVSNKALPAPIEKTISKAKGQPREPQVYTLPPSREEMTKNQVSLTCLVKGFYPSDIAVEWESNGQPENNYKTTPPVLDSDGSFFLYSKLTVDKSRWQQGNVFSCSVMHEALHNHYTQKSLSLSPGK

SEQ ID NO: 3191 - protein, 1228 aa, Artificial Sequence
  Synthetic
QVQLVQSGAEVKKPGASVKVSCKASGYTFTSYGISWVRQAPGQCLEWMGWISAYNGNTIYAQKFQGRVTLTRDTSTSTAYMELRSLRSDDTAMYYCARDPDYYGSGSYSDYWGQGTLVTVSSGGGGQGGGGQGGGGQEIVLTQSPATLSVSPGERATLSCRASQSVSSNLAWYQQKPGQAPRLLIYGASSRATGIPARFSGSGSGTEFTLTISSLQSEDFAVYYCQQYHSWPLLTFGCGTKVEIKSGGGGQEVQLVESGGGLVQPGRSLRLSCAASGFTFHDYPMHWVRQAPGKCLEWVSGISWNSDYIVYADSVKGRFTISRDNAKNSLYLQMNSLSAEDTALYYCAKDTAYGGKYSAFDYWGQGTLVTVSSGGGGQGGGGQGGGGQEIVLTQSPATLSVSPGERATLSCRASQSVSRNLAWYQQKPGQAPRRLIYGASTRATGIPDRFSGSGSGTDFTLTISRLEPEDFAVYYCQQYNNWPLTFGCGTKVEIKSGGGGQEVQLVESGGGLVQPGGSLKLSCAASGFTFNKYAMNWVRQAPGKGLEWVARIRSKYNNYATYYADSVKDRFTISRDDSKNTAYLQMNNLKTEDTAVYYCVRHGNFGNSYISYWAYWGQGTLVTVSSGGGGQGGGGQGGGGQQTVVTQEPSLTVSPGGTVTLTCGSSTGAVTSGNYPNWVQQKPGQAPRGLIGGTKFLAPGTPARFSGSLLGGKAALTLSGVQPEDEAEYYCVLWYSNRWVFGGGTKLTVLGGGGCPPCPAPELLGGPSVFLFPPKPKDTLMISRTPEVTCVVVDVSHEEPEVKFNWYVDGVEVHNAKTKPCEEQYGSTYRCVSVLTVLHQDWLNGKEYKCKVSNKALPAPIEKTISKAKGQPREPQVYTLPPSREEMTKNQVSLTCLVKGFYPSDIAVEWESNGQPENNYKTTPPVLDSDGSFFLYSKLTVDKSRWQQGNVFSCSVMHEALHNHYTQKSLSLSPGKGGGGQGGGGQGGGGQGGGGQGGGGQGGGGQCPPCPAPELLGGPSVFLFPPKPKDTLMISRTPEVTCVVVDVSHEEPEVKFNWYVDGVEVHNAKTKPCEEQYGSTYRCVSVLTVLHQDWLNGKEYKCKVSNKALPAPIEKTISKAKGQPREPQVYTLPPSREEMTKNQVSLTCLVKGFYPSDIAVEWESNGQPENNYKTTPPVLDSDGSFFLYSKLTVDKSRWQQGNVFSCSVMHEALHNHYTQKSLSLSPGK

SEQ ID NO: 3192 - protein, 1238 aa, Artificial Sequence
  Synthetic
QVQLVQSGAEVKKPGASVKVSCKASGYTFTSYGISWVRQAPGQCLEWMGWISAYNGNTIYAQKFQGRVTLTRDTSTSTAYMELRSLRSDDTAMYYCARDPDYYGSGSYSDYWGQGTLVTVSSGGGGSGGGGSGGGGSEIVLTQSPATLSVSPGERATLSCRASQSVSSNLAWYQQKPGQAPRLLIYGASSRATGIPARFSGSGSGTEFTLTISSLQSEDFAVYYCQQYHSWPLLTFGCGTKVEIKSGGGGSEVQLVESGGGLVQPGRSLRLSCAASGFTFHDYPMHWVRQAPGKCLEWVSGISWNSDYIVYADSVKGRFTISRDNAKNSLYLQMNSLSAEDTALYYCAKDTAYGGKYSAFDYWGQGTLVTVSSGGGGSGGGGSGGGGSEIVLTQSPATLSVSPGERATLSCRASQSVSRNLAWYQQKPGQAPRRLIYGASTRATGIPDRFSGSGSGTDFTLTISRLEPEDFAVYYCQQYNNWPLTFGCGTKVEIKSGGGGSEVQLVESGGGLVQPGGSLKLSCAASGFTFNKYAINWVRQAPGKGLEWVARIRSKYNNYATYYADAVKDRFTISRDDSKNTVYLQMNNLKTEDTAVYYCARAGNFGSSYISYWAYWGQGTLVTVSSGGGGSGGGGSGGGGSQTVVTQEPSLTVSPGGTVTITCGSSTGAVTSGNYPNWVQKKPGQAPRGLIGGTKFLAPGTPARFSGSLSGGKAALTLSGVQPEDEAEYYCVLWYSNRWVFGSGTKLTVLGGGGDKTHTCPPCPAPELLGGPSVFLFPPKPKDTLMISRTPEVTCVVVDVSHEDPEVKFNWYVDGVEVHNAKTKPCEEQYGSTYRCVSVLTVLHQDWLNGKEYKCKVSNKALPAPIEKTISKAKGQPREPQVYTLPPSREEMTKNQVSLTCLVKGFYPSDIAVEWESNGQPENNYKTTPPVLDSDGSFFLYSKLTVDKSRWQQGNVFSCSVMHEALHNHYTQKSLSLSPGKGGGGSGGGGSGGGGSGGGGSGGGGSGGGGSDKTHTCPPCPAPELLGGPSVFLFPPKPKDTLMISRTPEVTCVVVDVSHEDPEVKFNWYVDGVEVHNAKTKPCEEQYGSTYRCVSVLTVLHQDWLNGKEYKCKVSNKALPAPIEKTISKAKGQPREPQVYTLPPSREEMTKNQVSLTCLVKGFYPSDIAVEWESNGQPENNYKTTPPVLDSDGSFFLYSKLTVDKSRWQQGNVFSCSVMHEALHNHYTQKSLSLSPGK

SEQ ID NO: 3193 - protein, 1228 aa, Artificial Sequence
  Synthetic
QVQLVQSGAEVKKPGASVKVSCKASGYTFTSYGISWVRQAPGQCLEWMGWISAYNGNTIYAQKFQGRVTLTRDTSTSTAYMELRSLRSDDTAMYYCARDPDYYGSGSYSDYWGQGTLVTVSSGGGGQGGGGQGGGGQEIVLTQSPATLSVSPGERATLSCRASQSVSSNLAWYQQKPGQAPRLLIYGASSRATGIPARFSGSGSGTEFTLTISSLQSEDFAVYYCQQYHSWPLLTFGCGTKVEIKSGGGGQEVQLVESGGGLVQPGRSLRLSCAASGFTFHDYPMHWVRQAPGKCLEWVSGISWNSDYIVYADSVKGRFTISRDNAKNSLYLQMNSLSAEDTALYYCAKDTAYGGKYSAFDYWGQGTLVTVSSGGGGQGGGGQGGGGQEIVLTQSPATLSVSPGERATLSCRASQSVSRNLAWYQQKPGQAPRRLIYGASTRATGIPDRFSGSGSGTDFTLTISRLEPEDFAVYYCQQYNNWPLTFGCGTKVEIKSGGGGQEVQLVESGGGLVQPGGSLKLSCAASGFTFNKYAINWVRQAPGKGLEWVARIRSKYNNYATYYADAVKDRFTISRDDSKNTVYLQMNNLKTEDTAVYYCARAGNFGSSYISYWAYWGQGTLVTVSSGGGGQGGGGQGGGGQQTVVTQEPSLTVSPGGTVTITCGSSTGAVTSGNYPNWVQKKPGQAPRGLIGGTKFLAPGTPARFSGSLSGGKAALTLSGVQPEDEAEYYCVLWYSNRWVFGSGTKLTVLGGGGCPPCPAPELLGGPSVFLFPPKPKDTLMISRTPEVTCVVVDVSHEEPEVKFNWYVDGVEVHNAKTKPCEEQYGSTYRCVSVLTVLHQDWLNGKEYKCKVSNKALPAPIEKTISKAKGQPREPQVYTLPPSREEMTKNQVSLTCLVKGFYPSDIAVEWESNGQPENNYKTTPPVLDSDGSFFLYSKLTVDKSRWQQGNVFSCSVMHEALHNHYTQKSLSLSPGKGGGGQGGGGQGGGGQGGGGQGGGGQGGGGQCPPCPAPELLGGPSVFLFPPKPKDTLMISRTPEVTCVVVDVSHEEPEVKFNWYVDGVEVHNAKTKPCEEQYGSTYRCVSVLTVLHQDWLNGKEYKCKVSNKALPAPIEKTISKAKGQPREPQVYTLPPSREEMTKNQVSLTCLVKGFYPSDIAVEWESNGQPENNYKTTPPVLDSDGSFFLYSKLTVDKSRWQQGNVFSCSVMHEALHNHYTQKSLSLSPGK

SEQ ID NO: 3194 - protein, 495 aa, Artificial Sequence
  Synthetic
QVQLVQSGAEVKKPGASVKVSCKASGYTFTTYGISWVRQAPGQCLEWMGWISPKNGVTTYAQKFQGRVTITADESTSTAYMELSRLTSDDTAMYYCARDPDYYGSGSYSDYWGQGTLVTVSSGGGGSGGGGSGGGGSEIVLTQSPATLSVSPGERATLSCRASQSVSSNLAWYQQKPGQAPRLLIYGASSRATGIPARFSGSGSGTEFTLTISSLQSEDFAVYYCQQYHSWPLLTFGCGTKVEIKSGGGGSEVQLVESGGGLVQPGRSLRLSCAASGFTFHDYPMHWVRQAPGKCLEWVSGISWNSDYIVYADSVKGRFTISRDNAKNSLYLQMNSLSAEDTALYYCAKDTAYGGKYSAFDYWGQGTLVTVSSGGGGSGGGGSGGGGSEIVLTQSPATLSVSPGERATLSCRASQSVSRNLAWYQQKPGQAPRRLIYGASTRATGIPDRFSGSGSGTDFTLTISRLEPEDFAVYYCQQYNNWPLTFGCGTKVEIK

SEQ ID NO: 3195 - protein, 495 aa, Artificial Sequence
  Synthetic
QVQLVQSGAEVKKPGASVKVSCKASGYTFTTYGISWVRQAPGQCLEWMGWISPKNGVTTYAQKFQGRVTITADESTSTAYMELSRLTSDDTAMYYCARDPDYYGSGSYSDYWGQGTLVTVSSGGGGQGGGGQGGGGQEIVLTQSPATLSVSPGERATLSCRASQSVSSNLAWYQQKPGQAPRLLIYGASSRATGIPARFSGSGSGTEFTLTISSLQSEDFAVYYCQQYHSWPLLTFGCGTKVEIKSGGGGQEVQLVESGGGLVQPGRSLRLSCAASGFTFHDYPMHWVRQAPGKCLEWVSGISWNSDYIVYADSVKGRFTISRDNAKNSLYLQMNSLSAEDTALYYCAKDTAYGGKYSAFDYWGQGTLVTVSSGGGGQGGGGQGGGGQEIVLTQSPATLSVSPGERATLSCRASQSVSRNLAWYQQKPGQAPRRLIYGASTRATGIPDRFSGSGSGTDFTLTISRLEPEDFAVYYCQQYNNWPLTFGCGTKVEIK

SEQ ID NO: 3196 - protein, 750 aa, Artificial Sequence
  Synthetic
QVQLVQSGAEVKKPGASVKVSCKASGYTFTTYGISWVRQAPGQCLEWMGWISPKNGVTTYAQKFQGRVTITADESTSTAYMELSRLTSDDTAMYYCARDPDYYGSGSYSDYWGQGTLVTVSSGGGGSGGGGSGGGGSEIVLTQSPATLSVSPGERATLSCRASQSVSSNLAWYQQKPGQAPRLLIYGASSRATGIPARFSGSGSGTEFTLTISSLQSEDFAVYYCQQYHSWPLLTFGCGTKVEIKSGGGGSEVQLVESGGGLVQPGRSLRLSCAASGFTFHDYPMHWVRQAPGKCLEWVSGISWNSDYIVYADSVKGRFTISRDNAKNSLYLQMNSLSAEDTALYYCAKDTAYGGKYSAFDYWGQGTLVTVSSGGGGSGGGGSGGGGSEIVLTQSPATLSVSPGERATLSCRASQSVSRNLAWYQQKPGQAPRRLIYGASTRATGIPDRFSGSGSGTDFTLTISRLEPEDFAVYYCQQYNNWPLTFGCGTKVEIKSGGGGSEVQLVESGGGLVQPGGSLKLSCAASGFTFNKYAMNWVRQAPGKGLEWVARIRSKYNNYATYYADSVKDRFTISRDDSKNTAYLQMNNLKTEDTAVYYCVRHGNFGNSYISYWAYWGQGTLVTVSSGGGGSGGGGSGGGGSQTVVTQEPSLTVSPGGTVTLTCGSSTGAVTSGNYPNWVQQKPGQAPRGLIGGTKFLAPGTPARFSGSLLGGKAALTLSGVQPEDEAEYYCVLWYSNRWVFGGGTKLTVL

SEQ ID NO: 3197 - protein, 750 aa, Artificial Sequence
  Synthetic
QVQLVQSGAEVKKPGASVKVSCKASGYTFTTYGISWVRQAPGQCLEWMGWISPKNGVTTYAQKFQGRVTITADESTSTAYMELSRLTSDDTAMYYCARDPDYYGSGSYSDYWGQGTLVTVSSGGGGQGGGGQGGGGQEIVLTQSPATLSVSPGERATLSCRASQSVSSNLAWYQQKPGQAPRLLIYGASSRATGIPARFSGSGSGTEFTLTISSLQSEDFAVYYCQQYHSWPLLTFGCGTKVEIKSGGGGQEVQLVESGGGLVQPGRSLRLSCAASGFTFHDYPMHWVRQAPGKCLEWVSGISWNSDYIVYADSVKGRFTISRDNAKNSLYLQMNSLSAEDTALYYCAKDTAYGGKYSAFDYWGQGTLVTVSSGGGGQGGGGQGGGGQEIVLTQSPATLSVSPGERATLSCRASQSVSRNLAWYQQKPGQAPRRLIYGASTRATGIPDRFSGSGSGTDFTLTISRLEPEDFAVYYCQQYNNWPLTFGCGTKVEIKSGGGGQEVQLVESGGGLVQPGGSLKLSCAASGFTFNKYAMNWVRQAPGKGLEWVARIRSKYNNYATYYADSVKDRFTISRDDSKNTAYLQMNNLKTEDTAVYYCVRHGNFGNSYISYWAYWGQGTLVTVSSGGGGQGGGGQGGGGQQTVVTQEPSLTVSPGGTVTLTCGSSTGAVTSGNYPNWVQQKPGQAPRGLIGGTKFLAPGTPARFSGSLLGGKAALTLSGVQPEDEAEYYCVLWYSNRWVFGGGTKLTVL

SEQ ID NO: 3198 - protein, 750 aa, Artificial Sequence
  Synthetic
QVQLVQSGAEVKKPGASVKVSCKASGYTFTTYGISWVRQAPGQCLEWMGWISPKNGVTTYAQKFQGRVTITADESTSTAYMELSRLTSDDTAMYYCARDPDYYGSGSYSDYWGQGTLVTVSSGGGGSGGGGSGGGGSEIVLTQSPATLSVSPGERATLSCRASQSVSSNLAWYQQKPGQAPRLLIYGASSRATGIPARFSGSGSGTEFTLTISSLQSEDFAVYYCQQYHSWPLLTFGCGTKVEIKSGGGGSEVQLVESGGGLVQPGRSLRLSCAASGFTFHDYPMHWVRQAPGKCLEWVSGISWNSDYIVYADSVKGRFTISRDNAKNSLYLQMNSLSAEDTALYYCAKDTAYGGKYSAFDYWGQGTLVTVSSGGGGSGGGGSGGGGSEIVLTQSPATLSVSPGERATLSCRASQSVSRNLAWYQQKPGQAPRRLIYGASTRATGIPDRFSGSGSGTDFTLTISRLEPEDFAVYYCQQYNNWPLTFGCGTKVEIKSGGGGSEVQLVESGGGLVQPGGSLKLSCAASGFTFNKYAINWVRQAPGKGLEWVARIRSKYNNYATYYADAVKDRFTISRDDSKNTVYLQMNNLKTEDTAVYYCARAGNFGSSYISYWAYWGQGTLVTVSSGGGGSGGGGSGGGGSQTVVTQEPSLTVSPGGTVTITCGSSTGAVTSGNYPNWVQKKPGQAPRGLIGGTKFLAPGTPARFSGSLSGGKAALTLSGVQPEDEAEYYCVLWYSNRWVFGSGTKLTVL

SEQ ID NO: 3199 - protein, 750 aa, Artificial Sequence
  Synthetic
QVQLVQSGAEVKKPGASVKVSCKASGYTFTTYGISWVRQAPGQCLEWMGWISPKNGVTTYAQKFQGRVTITADESTSTAYMELSRLTSDDTAMYYCARDPDYYGSGSYSDYWGQGTLVTVSSGGGGQGGGGQGGGGQEIVLTQSPATLSVSPGERATLSCRASQSVSSNLAWYQQKPGQAPRLLIYGASSRATGIPARFSGSGSGTEFTLTISSLQSEDFAVYYCQQYHSWPLLTFGCGTKVEIKSGGGGQEVQLVESGGGLVQPGRSLRLSCAASGFTFHDYPMHWVRQAPGKCLEWVSGISWNSDYIVYADSVKGRFTISRDNAKNSLYLQMNSLSAEDTALYYCAKDTAYGGKYSAFDYWGQGTLVTVSSGGGGQGGGGQGGGGQEIVLTQSPATLSVSPGERATLSCRASQSVSRNLAWYQQKPGQAPRRLIYGASTRATGIPDRFSGSGSGTDFTLTISRLEPEDFAVYYCQQYNNWPLTFGCGTKVEIKSGGGGQEVQLVESGGGLVQPGGSLKLSCAASGFTFNKYAINWVRQAPGKGLEWVARIRSKYNNYATYYADAVKDRFTISRDDSKNTVYLQMNNLKTEDTAVYYCARAGNFGSSYISYWAYWGQGTLVTVSSGGGGQGGGGQGGGGQQTVVTQEPSLTVSPGGTVTITCGSSTGAVTSGNYPNWVQKKPGQAPRGLIGGTKFLAPGTPARFSGSLSGGKAALTLSGVQPEDEAEYYCVLWYSNRWVFGSGTKLTVL

SEQ ID NO: 3200 - protein, 1238 aa, Artificial Sequence
  Synthetic
QVQLVQSGAEVKKPGASVKVSCKASGYTFTTYGISWVRQAPGQCLEWMGWISPKNGVTTYAQKFQGRVTITADESTSTAYMELSRLTSDDTAMYYCARDPDYYGSGSYSDYWGQGTLVTVSSGGGGSGGGGSGGGGSEIVLTQSPATLSVSPGERATLSCRASQSVSSNLAWYQQKPGQAPRLLIYGASSRATGIPARFSGSGSGTEFTLTISSLQSEDFAVYYCQQYHSWPLLTFGCGTKVEIKSGGGGSEVQLVESGGGLVQPGRSLRLSCAASGFTFHDYPMHWVRQAPGKCLEWVSGISWNSDYIVYADSVKGRFTISRDNAKNSLYLQMNSLSAEDTALYYCAKDTAYGGKYSAFDYWGQGTLVTVSSGGGGSGGGGSGGGGSEIVLTQSPATLSVSPGERATLSCRASQSVSRNLAWYQQKPGQAPRRLIYGASTRATGIPDRFSGSGSGTDFTLTISRLEPEDFAVYYCQQYNNWPLTFGCGTKVEIKSGGGGSEVQLVESGGGLVQPGGSLKLSCAASGFTFNKYAMNWVRQAPGKGLEWVARIRSKYNNYATYYADSVKDRFTISRDDSKNTAYLQMNNLKTEDTAVYYCVRHGNFGNSYISYWAYWGQGTLVTVSSGGGGSGGGGSGGGGSQTVVTQEPSLTVSPGGTVTLTCGSSTGAVTSGNYPNWVQQKPGQAPRGLIGGTKFLAPGTPARFSGSLLGGKAALTLSGVQPEDEAEYYCVLWYSNRWVFGGGTKLTVLGGGGDKTHTCPPCPAPELLGGPSVFLFPPKPKDTLMISRTPEVTCVVVDVSHEDPEVKFNWYVDGVEVHNAKTKPCEEQYGSTYRCVSVLTVLHQDWLNGKEYKCKVSNKALPAPIEKTISKAKGQPREPQVYTLPPSREEMTKNQVSLTCLVKGFYPSDIAVEWESNGQPENNYKTTPPVLDSDGSFFLYSKLTVDKSRWQQGNVFSCSVMHEALHNHYTQKSLSLSPGKGGGGSGGGGSGGGGSGGGGSGGGGSGGGGSDKTHTCPPCPAPELLGGPSVFLFPPKPKDTLMISRTPEVTCVVVDVSHEDPEVKFNWYVDGVEVHNAKTKPCEEQYGSTYRCVSVLTVLHQDWLNGKEYKCKVSNKALPAPIEKTISKAKGQPREPQVYTLPPSREEMTKNQVSLTCLVKGFYPSDIAVEWESNGQPENNYKTTPPVLDSDGSFFLYSKLTVDKSRWQQGNVFSCSVMHEALHNHYTQKSLSLSPGK

SEQ ID NO: 3201 - protein, 1228 aa, Artificial Sequence
  Synthetic
QVQLVQSGAEVKKPGASVKVSCKASGYTFTTYGISWVRQAPGQCLEWMGWISPKNGVTTYAQKFQGRVTITADESTSTAYMELSRLTSDDTAMYYCARDPDYYGSGSYSDYWGQGTLVTVSSGGGGQGGGGQGGGGQEIVLTQSPATLSVSPGERATLSCRASQSVSSNLAWYQQKPGQAPRLLIYGASSRATGIPARFSGSGSGTEFTLTISSLQSEDFAVYYCQQYHSWPLLTFGCGTKVEIKSGGGGQEVQLVESGGGLVQPGRSLRLSCAASGFTFHDYPMHWVRQAPGKCLEWVSGISWNSDYIVYADSVKGRFTISRDNAKNSLYLQMNSLSAEDTALYYCAKDTAYGGKYSAFDYWGQGTLVTVSSGGGGQGGGGQGGGGQEIVLTQSPATLSVSPGERATLSCRASQSVSRNLAWYQQKPGQAPRRLIYGASTRATGIPDRFSGSGSGTDFTLTISRLEPEDFAVYYCQQYNNWPLTFGCGTKVEIKSGGGGQEVQLVESGGGLVQPGGSLKLSCAASGFTFNKYAMNWVRQAPGKGLEWVARIRSKYNNYATYYADSVKDRFTISRDDSKNTAYLQMNNLKTEDTAVYYCVRHGNFGNSYISYWAYWGQGTLVTVSSGGGGQGGGGQGGGGQQTVVTQEPSLTVSPGGTVTLTCGSSTGAVTSGNYPNWVQQKPGQAPRGLIGGTKFLAPGTPARFSGSLLGGKAALTLSGVQPEDEAEYYCVLWYSNRWVFGGGTKLTVLGGGGCPPCPAPELLGGPSVFLFPPKPKDTLMISRTPEVTCVVVDVSHEEPEVKFNWYVDGVEVHNAKTKPCEEQYGSTYRCVSVLTVLHQDWLNGKEYKCKVSNKALPAPIEKTISKAKGQPREPQVYTLPPSREEMTKNQVSLTCLVKGFYPSDIAVEWESNGQPENNYKTTPPVLDSDGSFFLYSKLTVDKSRWQQGNVFSCSVMHEALHNHYTQKSLSLSPGKGGGGQGGGGQGGGGQGGGGQGGGGQGGGGQCPPCPAPELLGGPSVFLFPPKPKDTLMISRTPEVTCVVVDVSHEEPEVKFNWYVDGVEVHNAKTKPCEEQYGSTYRCVSVLTVLHQDWLNGKEYKCKVSNKALPAPIEKTISKAKGQPREPQVYTLPPSREEMTKNQVSLTCLVKGFYPSDIAVEWESNGQPENNYKTTPPVLDSDGSFFLYSKLTVDKSRWQQGNVFSCSVMHEALHNHYTQKSLSLSPGK

SEQ ID NO: 3202 - protein, 1238 aa, Artificial Sequence
  Synthetic
QVQLVQSGAEVKKPGASVKVSCKASGYTFTTYGISWVRQAPGQCLEWMGWISPKNGVTTYAQKFQGRVTITADESTSTAYMELSRLTSDDTAMYYCARDPDYYGSGSYSDYWGQGTLVTVSSGGGGSGGGGSGGGGSEIVLTQSPATLSVSPGERATLSCRASQSVSSNLAWYQQKPGQAPRLLIYGASSRATGIPARFSGSGSGTEFTLTISSLQSEDFAVYYCQQYHSWPLLTFGCGTKVEIKSGGGGSEVQLVESGGGLVQPGRSLRLSCAASGFTFHDYPMHWVRQAPGKCLEWVSGISWNSDYIVYADSVKGRFTISRDNAKNSLYLQMNSLSAEDTALYYCAKDTAYGGKYSAFDYWGQGTLVTVSSGGGGSGGGGSGGGGSEIVLTQSPATLSVSPGERATLSCRASQSVSRNLAWYQQKPGQAPRRLIYGASTRATGIPDRFSGSGSGTDFTLTISRLEPEDFAVYYCQQYNNWPLTFGCGTKVEIKSGGGGSEVQLVESGGGLVQPGGSLKLSCAASGFTFNKYAINWVRQAPGKGLEWVARIRSKYNNYATYYADAVKDRFTISRDDSKNTVYLQMNNLKTEDTAVYYCARAGNFGSSYISYWAYWGQGTLVTVSSGGGGSGGGGSGGGGSQTVVTQEPSLTVSPGGTVTITCGSSTGAVTSGNYPNWVQKKPGQAPRGLIGGTKFLAPGTPARFSGSLSGGKAALTLSGVQPEDEAEYYCVLWYSNRWVFGSGTKLTVLGGGGDKTHTCPPCPAPELLGGPSVFLFPPKPKDTLMISRTPEVTCVVVDVSHEDPEVKFNWYVDGVEVHNAKTKPCEEQYGSTYRCVSVLTVLHQDWLNGKEYKCKVSNKALPAPIEKTISKAKGQPREPQVYTLPPSREEMTKNQVSLTCLVKGFYPSDIAVEWESNGQPENNYKTTPPVLDSDGSFFLYSKLTVDKSRWQQGNVFSCSVMHEALHNHYTQKSLSLSPGKGGGGSGGGGSGGGGSGGGGSGGGGSGGGGSDKTHTCPPCPAPELLGGPSVFLFPPKPKDTLMISRTPEVTCVVVDVSHEDPEVKFNWYVDGVEVHNAKTKPCEEQYGSTYRCVSVLTVLHQDWLNGKEYKCKVSNKALPAPIEKTISKAKGQPREPQVYTLPPSREEMTKNQVSLTCLVKGFYPSDIAVEWESNGQPENNYKTTPPVLDSDGSFFLYSKLTVDKSRWQQGNVFSCSVMHEALHNHYTQKSLSLSPGK

SEQ ID NO: 3203 - protein, 1228 aa, Artificial Sequence
  Synthetic
QVQLVQSGAEVKKPGASVKVSCKASGYTFTTYGISWVRQAPGQCLEWMGWISPKNGVTTYAQKFQGRVTITADESTSTAYMELSRLTSDDTAMYYCARDPDYYGSGSYSDYWGQGTLVTVSSGGGGQGGGGQGGGGQEIVLTQSPATLSVSPGERATLSCRASQSVSSNLAWYQQKPGQAPRLLIYGASSRATGIPARFSGSGSGTEFTLTISSLQSEDFAVYYCQQYHSWPLLTFGCGTKVEIKSGGGGQEVQLVESGGGLVQPGRSLRLSCAASGFTFHDYPMHWVRQAPGKCLEWVSGISWNSDYIVYADSVKGRFTISRDNAKNSLYLQMNSLSAEDTALYYCAKDTAYGGKYSAFDYWGQGTLVTVSSGGGGQGGGGQGGGGQEIVLTQSPATLSVSPGERATLSCRASQSVSRNLAWYQQKPGQAPRRLIYGASTRATGIPDRFSGSGSGTDFTLTISRLEPEDFAVYYCQQYNNWPLTFGCGTKVEIKSGGGGQEVQLVESGGGLVQPGGSLKLSCAASGFTFNKYAINWVRQAPGKGLEWVARIRSKYNNYATYYADAVKDRFTISRDDSKNTVYLQMNNLKTEDTAVYYCARAGNFGSSYISYWAYWGQGTLVTVSSGGGGQGGGGQGGGGQQTVVTQEPSLTVSPGGTVTITCGSSTGAVTSGNYPNWVQKKPGQAPRGLIGGTKFLAPGTPARFSGSLSGGKAALTLSGVQPEDEAEYYCVLWYSNRWVFGSGTKLTVLGGGGCPPCPAPELLGGPSVFLFPPKPKDTLMISRTPEVTCVVVDVSHEEPEVKFNWYVDGVEVHNAKTKPCEEQYGSTYRCVSVLTVLHQDWLNGKEYKCKVSNKALPAPIEKTISKAKGQPREPQVYTLPPSREEMTKNQVSLTCLVKGFYPSDIAVEWESNGQPENNYKTTPPVLDSDGSFFLYSKLTVDKSRWQQGNVFSCSVMHEALHNHYTQKSLSLSPGKGGGGQGGGGQGGGGQGGGGQGGGGQGGGGQCPPCPAPELLGGPSVFLFPPKPKDTLMISRTPEVTCVVVDVSHEEPEVKFNWYVDGVEVHNAKTKPCEEQYGSTYRCVSVLTVLHQDWLNGKEYKCKVSNKALPAPIEKTISKAKGQPREPQVYTLPPSREEMTKNQVSLTCLVKGFYPSDIAVEWESNGQPENNYKTTPPVLDSDGSFFLYSKLTVDKSRWQQGNVFSCSVMHEALHNHYTQKSLSLSPGK

SEQ ID NO: 3204 - protein, 495 aa, Artificial Sequence
  Synthetic
QVQLVQSGGEVKKPGASVKVSCKASGYTFTSYGISWVRQAPGQCLEWMGWISAYTGETLYAQKLQGRVTMTRDTSTSTAYMELRSLRSDDTAVYYCARDPDYYGSGSYSDYWGQGTLVTVSSGGGGSGGGGSGGGGSEIVLTQSPATLSVSPGERATLSCRASQSVSSNLAWYQQKPGQAPRLLIYGASSRATGIPARFSGSGSGTEFTLTISSLQSEDFAVYYCQQYHSWPLLTFGCGTKVEIKSGGGGSEVQLVESGGGLVQPGRSLRLSCAASGFTFHDYPMHWVRQAPGKCLEWVSGISWNSDYIVYADSVKGRFTISRDNAKNSLYLQMNSLSAEDTALYYCAKDTAYGGKYSAFDYWGQGTLVTVSSGGGGSGGGGSGGGGSEIVLTQSPATLSVSPGERATLSCRASQSVSRNLAWYQQKPGQAPRRLIYGASTRATGIPDRFSGSGSGTDFTLTISRLEPEDFAVYYCQQYNNWPLTFGCGTKVEIK

SEQ ID NO: 3205 - protein, 495 aa, Artificial Sequence
  Synthetic
QVQLVQSGGEVKKPGASVKVSCKASGYTFTSYGISWVRQAPGQCLEWMGWISAYTGETLYAQKLQGRVTMTRDTSTSTAYMELRSLRSDDTAVYYCARDPDYYGSGSYSDYWGQGTLVTVSSGGGGQGGGGQGGGGQEIVLTQSPATLSVSPGERATLSCRASQSVSSNLAWYQQKPGQAPRLLIYGASSRATGIPARFSGSGSGTEFTLTISSLQSEDFAVYYCQQYHSWPLLTFGCGTKVEIKSGGGGQEVQLVESGGGLVQPGRSLRLSCAASGFTFHDYPMHWVRQAPGKCLEWVSGISWNSDYIVYADSVKGRFTISRDNAKNSLYLQMNSLSAEDTALYYCAKDTAYGGKYSAFDYWGQGTLVTVSSGGGGQGGGGQGGGGQEIVLTQSPATLSVSPGERATLSCRASQSVSRNLAWYQQKPGQAPRRLIYGASTRATGIPDRFSGSGSGTDFTLTISRLEPEDFAVYYCQQYNNWPLTFGCGTKVEIK

SEQ ID NO: 3206 - protein, 750 aa, Artificial Sequence
  Synthetic
QVQLVQSGGEVKKPGASVKVSCKASGYTFTSYGISWVRQAPGQCLEWMGWISAYTGETLYAQKLQGRVTMTRDTSTSTAYMELRSLRSDDTAVYYCARDPDYYGSGSYSDYWGQGTLVTVSSGGGGSGGGGSGGGGSEIVLTQSPATLSVSPGERATLSCRASQSVSSNLAWYQQKPGQAPRLLIYGASSRATGIPARFSGSGSGTEFTLTISSLQSEDFAVYYCQQYHSWPLLTFGCGTKVEIKSGGGGSEVQLVESGGGLVQPGRSLRLSCAASGFTFHDYPMHWVRQAPGKCLEWVSGISWNSDYIVYADSVKGRFTISRDNAKNSLYLQMNSLSAEDTALYYCAKDTAYGGKYSAFDYWGQGTLVTVSSGGGGSGGGGSGGGGSEIVLTQSPATLSVSPGERATLSCRASQSVSRNLAWYQQKPGQAPRRLIYGASTRATGIPDRFSGSGSGTDFTLTISRLEPEDFAVYYCQQYNNWPLTFGCGTKVEIKSGGGGSEVQLVESGGGLVQPGGSLKLSCAASGFTFNKYAMNWVRQAPGKGLEWVARIRSKYNNYATYYADSVKDRFTISRDDSKNTAYLQMNNLKTEDTAVYYCVRHGNFGNSYISYWAYWGQGTLVTVSSGGGGSGGGGSGGGGSQTVVTQEPSLTVSPGGTVTLTCGSSTGAVTSGNYPNWVQQKPGQAPRGLIGGTKFLAPGTPARFSGSLLGGKAALTLSGVQPEDEAEYYCVLWYSNRWVFGGGTKLTVL

SEQ ID NO: 3207 - protein, 750 aa, Artificial Sequence
  Synthetic
QVQLVQSGGEVKKPGASVKVSCKASGYTFTSYGISWVRQAPGQCLEWMGWISAYTGETLYAQKLQGRVTMTRDTSTSTAYMELRSLRSDDTAVYYCARDPDYYGSGSYSDYWGQGTLVTVSSGGGGQGGGGQGGGGQEIVLTQSPATLSVSPGERATLSCRASQSVSSNLAWYQQKPGQAPRLLIYGASSRATGIPARFSGSGSGTEFTLTISSLQSEDFAVYYCQQYHSWPLLTFGCGTKVEIKSGGGGQEVQLVESGGGLVQPGRSLRLSCAASGFTFHDYPMHWVRQAPGKCLEWVSGISWNSDYIVYADSVKGRFTISRDNAKNSLYLQMNSLSAEDTALYYCAKDTAYGGKYSAFDYWGQGTLVTVSSGGGGQGGGGQGGGGQEIVLTQSPATLSVSPGERATLSCRASQSVSRNLAWYQQKPGQAPRRLIYGASTRATGIPDRFSGSGSGTDFTLTISRLEPEDFAVYYCQQYNNWPLTFGCGTKVEIKSGGGGQEVQLVESGGGLVQPGGSLKLSCAASGFTFNKYAMNWVRQAPGKGLEWVARIRSKYNNYATYYADSVKDRFTISRDDSKNTAYLQMNNLKTEDTAVYYCVRHGNFGNSYISYWAYWGQGTLVTVSSGGGGQGGGGQGGGGQQTVVTQEPSLTVSPGGTVTLTCGSSTGAVTSGNYPNWVQQKPGQAPRGLIGGTKFLAPGTPARFSGSLLGGKAALTLSGVQPEDEAEYYCVLWYSNRWVFGGGTKLTVL

SEQ ID NO: 3208 - protein, 750 aa, Artificial Sequence
  Synthetic
QVQLVQSGGEVKKPGASVKVSCKASGYTFTSYGISWVRQAPGQCLEWMGWISAYTGETLYAQKLQGRVTMTRDTSTSTAYMELRSLRSDDTAVYYCARDPDYYGSGSYSDYWGQGTLVTVSSGGGGSGGGGSGGGGSEIVLTQSPATLSVSPGERATLSCRASQSVSSNLAWYQQKPGQAPRLLIYGASSRATGIPARFSGSGSGTEFTLTISSLQSEDFAVYYCQQYHSWPLLTFGCGTKVEIKSGGGGSEVQLVESGGGLVQPGRSLRLSCAASGFTFHDYPMHWVRQAPGKCLEWVSGISWNSDYIVYADSVKGRFTISRDNAKNSLYLQMNSLSAEDTALYYCAKDTAYGGKYSAFDYWGQGTLVTVSSGGGGSGGGGSGGGGSEIVLTQSPATLSVSPGERATLSCRASQSVSRNLAWYQQKPGQAPRRLIYGASTRATGIPDRFSGSGSGTDFTLTISRLEPEDFAVYYCQQYNNWPLTFGCGTKVEIKSGGGGSEVQLVESGGGLVQPGGSLKLSCAASGFTFNKYAINWVRQAPGKGLEWVARIRSKYNNYATYYADAVKDRFTISRDDSKNTVYLQMNNLKTEDTAVYYCARAGNFGSSYISYWAYWGQGTLVTVSSGGGGSGGGGSGGGGSQTVVTQEPSLTVSPGGTVTITCGSSTGAVTSGNYPNWVQKKPGQAPRGLIGGTKFLAPGTPARFSGSLSGGKAALTLSGVQPEDEAEYYCVLWYSNRWVFGSGTKLTVL

SEQ ID NO: 3209 - protein, 750 aa, Artificial Sequence
  Synthetic
QVQLVQSGGEVKKPGASVKVSCKASGYTFTSYGISWVRQAPGQCLEWMGWISAYTGETLYAQKLQGRVTMTRDTSTSTAYMELRSLRSDDTAVYYCARDPDYYGSGSYSDYWGQGTLVTVSSGGGGQGGGGQGGGGQEIVLTQSPATLSVSPGERATLSCRASQSVSSNLAWYQQKPGQAPRLLIYGASSRATGIPARFSGSGSGTEFTLTISSLQSEDFAVYYCQQYHSWPLLTFGCGTKVEIKSGGGGQEVQLVESGGGLVQPGRSLRLSCAASGFTFHDYPMHWVRQAPGKCLEWVSGISWNSDYIVYADSVKGRFTISRDNAKNSLYLQMNSLSAEDTALYYCAKDTAYGGKYSAFDYWGQGTLVTVSSGGGGQGGGGQGGGGQEIVLTQSPATLSVSPGERATLSCRASQSVSRNLAWYQQKPGQAPRRLIYGASTRATGIPDRFSGSGSGTDFTLTISRLEPEDFAVYYCQQYNNWPLTFGCGTKVEIKSGGGGQEVQLVESGGGLVQPGGSLKLSCAASGFTFNKYAINWVRQAPGKGLEWVARIRSKYNNYATYYADAVKDRFTISRDDSKNTVYLQMNNLKTEDTAVYYCARAGNFGSSYISYWAYWGQGTLVTVSSGGGGQGGGGQGGGGQQTVVTQEPSLTVSPGGTVTITCGSSTGAVTSGNYPNWVQKKPGQAPRGLIGGTKFLAPGTPARFSGSLSGGKAALTLSGVQPEDEAEYYCVLWYSNRWVFGSGTKLTVL

SEQ ID NO: 3210 - protein, 1238 aa, Artificial Sequence
  Synthetic
QVQLVQSGGEVKKPGASVKVSCKASGYTFTSYGISWVRQAPGQCLEWMGWISAYTGETLYAQKLQGRVTMTRDTSTSTAYMELRSLRSDDTAVYYCARDPDYYGSGSYSDYWGQGTLVTVSSGGGGSGGGGSGGGGSEIVLTQSPATLSVSPGERATLSCRASQSVSSNLAWYQQKPGQAPRLLIYGASSRATGIPARFSGSGSGTEFTLTISSLQSEDFAVYYCQQYHSWPLLTFGCGTKVEIKSGGGGSEVQLVESGGGLVQPGRSLRLSCAASGFTFHDYPMHWVRQAPGKCLEWVSGISWNSDYIVYADSVKGRFTISRDNAKNSLYLQMNSLSAEDTALYYCAKDTAYGGKYSAFDYWGQGTLVTVSSGGGGSGGGGSGGGGSEIVLTQSPATLSVSPGERATLSCRASQSVSRNLAWYQQKPGQAPRRLIYGASTRATGIPDRFSGSGSGTDFTLTISRLEPEDFAVYYCQQYNNWPLTFGCGTKVEIKSGGGGSEVQLVESGGGLVQPGGSLKLSCAASGFTFNKYAMNWVRQAPGKGLEWVARIRSKYNNYATYYADSVKDRFTISRDDSKNTAYLQMNNLKTEDTAVYYCVRHGNFGNSYISYWAYWGQGTLVTVSSGGGGSGGGGSGGGGSQTVVTQEPSLTVSPGGTVTLTCGSSTGAVTSGNYPNWVQQKPGQAPRGLIGGTKFLAPGTPARFSGSLLGGKAALTLSGVQPEDEAEYYCVLWYSNRWVFGGGTKLTVLGGGGDKTHTCPPCPAPELLGGPSVFLFPPKPKDTLMISRTPEVTCVVVDVSHEDPEVKFNWYVDGVEVHNAKTKPCEEQYGSTYRCVSVLTVLHQDWLNGKEYKCKVSNKALPAPIEKTISKAKGQPREPQVYTLPPSREEMTKNQVSLTCLVKGFYPSDIAVEWESNGQPENNYKTTPPVLDSDGSFFLYSKLTVDKSRWQQGNVFSCSVMHEALHNHYTQKSLSLSPGKGGGGSGGGGSGGGGSGGGGSGGGGSGGGGSDKTHTCPPCPAPELLGGPSVFLFPPKPKDTLMISRTPEVTCVVVDVSHEDPEVKFNWYVDGVEVHNAKTKPCEEQYGSTYRCVSVLTVLHQDWLNGKEYKCKVSNKALPAPIEKTISKAKGQPREPQVYTLPPSREEMTKNQVSLTCLVKGFYPSDIAVEWESNGQPENNYKTTPPVLDSDGSFFLYSKLTVDKSRWQQGNVFSCSVMHEALHNHYTQKSLSLSPGK

SEQ ID NO: 3211 - protein, 1228 aa, Artificial Sequence
  Synthetic
QVQLVQSGGEVKKPGASVKVSCKASGYTFTSYGISWVRQAPGQCLEWMGWISAYTGETLYAQKLQGRVTMTRDTSTSTAYMELRSLRSDDTAVYYCARDPDYYGSGSYSDYWGQGTLVTVSSGGGGQGGGGQGGGGQEIVLTQSPATLSVSPGERATLSCRASQSVSSNLAWYQQKPGQAPRLLIYGASSRATGIPARFSGSGSGTEFTLTISSLQSEDFAVYYCQQYHSWPLLTFGCGTKVEIKSGGGGQEVQLVESGGGLVQPGRSLRLSCAASGFTFHDYPMHWVRQAPGKCLEWVSGISWNSDYIVYADSVKGRFTISRDNAKNSLYLQMNSLSAEDTALYYCAKDTAYGGKYSAFDYWGQGTLVTVSSGGGGQGGGGQGGGGQEIVLTQSPATLSVSPGERATLSCRASQSVSRNLAWYQQKPGQAPRRLIYGASTRATGIPDRFSGSGSGTDFTLTISRLEPEDFAVYYCQQYNNWPLTFGCGTKVEIKSGGGGQEVQLVESGGGLVQPGGSLKLSCAASGFTFNKYAMNWVRQAPGKGLEWVARIRSKYNNYATYYADSVKDRFTISRDDSKNTAYLQMNNLKTEDTAVYYCVRHGNFGNSYISYWAYWGQGTLVTVSSGGGGQGGGGQGGGGQQTVVTQEPSLTVSPGGTVTLTCGSSTGAVTSGNYPNWVQQKPGQAPRGLIGGTKFLAPGTPARFSGSLLGGKAALTLSGVQPEDEAEYYCVLWYSNRWVFGGGTKLTVLGGGGCPPCPAPELLGGPSVFLFPPKPKDTLMISRTPEVTCVVVDVSHEEPEVKFNWYVDGVEVHNAKTKPCEEQYGSTYRCVSVLTVLHQDWLNGKEYKCKVSNKALPAPIEKTISKAKGQPREPQVYTLPPSREEMTKNQVSLTCLVKGFYPSDIAVEWESNGQPENNYKTTPPVLDSDGSFFLYSKLTVDKSRWQQGNVFSCSVMHEALHNHYTQKSLSLSPGKGGGGQGGGGQGGGGQGGGGQGGGGQGGGGQCPPCPAPELLGGPSVFLFPPKPKDTLMISRTPEVTCVVVDVSHEEPEVKFNWYVDGVEVHNAKTKPCEEQYGSTYRCVSVLTVLHQDWLNGKEYKCKVSNKALPAPIEKTISKAKGQPREPQVYTLPPSREEMTKNQVSLTCLVKGFYPSDIAVEWESNGQPENNYKTTPPVLDSDGSFFLYSKLTVDKSRWQQGNVFSCSVMHEALHNHYTQKSLSLSPGK

SEQ ID NO: 3212 - protein, 1238 aa, Artificial Sequence
  Synthetic
QVQLVQSGGEVKKPGASVKVSCKASGYTFTSYGISWVRQAPGQCLEWMGWISAYTGETLYAQKLQGRVTMTRDTSTSTAYMELRSLRSDDTAVYYCARDPDYYGSGSYSDYWGQGTLVTVSSGGGGSGGGGSGGGGSEIVLTQSPATLSVSPGERATLSCRASQSVSSNLAWYQQKPGQAPRLLIYGASSRATGIPARFSGSGSGTEFTLTISSLQSEDFAVYYCQQYHSWPLLTFGCGTKVEIKSGGGGSEVQLVESGGGLVQPGRSLRLSCAASGFTFHDYPMHWVRQAPGKCLEWVSGISWNSDYIVYADSVKGRFTISRDNAKNSLYLQMNSLSAEDTALYYCAKDTAYGGKYSAFDYWGQGTLVTVSSGGGGSGGGGSGGGGSEIVLTQSPATLSVSPGERATLSCRASQSVSRNLAWYQQKPGQAPRRLIYGASTRATGIPDRFSGSGSGTDFTLTISRLEPEDFAVYYCQQYNNWPLTFGCGTKVEIKSGGGGSEVQLVESGGGLVQPGGSLKLSCAASGFTFNKYAINWVRQAPGKGLEWVARIRSKYNNYATYYADAVKDRFTISRDDSKNTVYLQMNNLKTEDTAVYYCARAGNFGSSYISYWAYWGQGTLVTVSSGGGGSGGGGSGGGGSQTVVTQEPSLTVSPGGTVTITCGSSTGAVTSGNYPNWVQKKPGQAPRGLIGGTKFLAPGTPARFSGSLSGGKAALTLSGVQPEDEAEYYCVLWYSNRWVFGSGTKLTVLGGGGDKTHTCPPCPAPELLGGPSVFLFPPKPKDTLMISRTPEVTCVVVDVSHEDPEVKFNWYVDGVEVHNAKTKPCEEQYGSTYRCVSVLTVLHQDWLNGKEYKCKVSNKALPAPIEKTISKAKGQPREPQVYTLPPSREEMTKNQVSLTCLVKGFYPSDIAVEWESNGQPENNYKTTPPVLDSDGSFFLYSKLTVDKSRWQQGNVFSCSVMHEALHNHYTQKSLSLSPGKGGGGSGGGGSGGGGSGGGGSGGGGSGGGGSDKTHTCPPCPAPELLGGPSVFLFPPKPKDTLMISRTPEVTCVVVDVSHEDPEVKFNWYVDGVEVHNAKTKPCEEQYGSTYRCVSVLTVLHQDWLNGKEYKCKVSNKALPAPIEKTISKAKGQPREPQVYTLPPSREEMTKNQVSLTCLVKGFYPSDIAVEWESNGQPENNYKTTPPVLDSDGSFFLYSKLTVDKSRWQQGNVFSCSVMHEALHNHYTQKSLSLSPGK

SEQ ID NO: 3213 - protein, 1228 aa, Artificial Sequence
  Synthetic
QVQLVQSGGEVKKPGASVKVSCKASGYTFTSYGISWVRQAPGQCLEWMGWISAYTGETLYAQKLQGRVTMTRDTSTSTAYMELRSLRSDDTAVYYCARDPDYYGSGSYSDYWGQGTLVTVSSGGGGQGGGGQGGGGQEIVLTQSPATLSVSPGERATLSCRASQSVSSNLAWYQQKPGQAPRLLIYGASSRATGIPARFSGSGSGTEFTLTISSLQSEDFAVYYCQQYHSWPLLTFGCGTKVEIKSGGGGQEVQLVESGGGLVQPGRSLRLSCAASGFTFHDYPMHWVRQAPGKCLEWVSGISWNSDYIVYADSVKGRFTISRDNAKNSLYLQMNSLSAEDTALYYCAKDTAYGGKYSAFDYWGQGTLVTVSSGGGGQGGGGQGGGGQEIVLTQSPATLSVSPGERATLSCRASQSVSRNLAWYQQKPGQAPRRLIYGASTRATGIPDRFSGSGSGTDFTLTISRLEPEDFAVYYCQQYNNWPLTFGCGTKVEIKSGGGGQEVQLVESGGGLVQPGGSLKLSCAASGFTFNKYAINWVRQAPGKGLEWVARIRSKYNNYATYYADAVKDRFTISRDDSKNTVYLQMNNLKTEDTAVYYCARAGNFGSSYISYWAYWGQGTLVTVSSGGGGQGGGGQGGGGQQTVVTQEPSLTVSPGGTVTITCGSSTGAVTSGNYPNWVQKKPGQAPRGLIGGTKFLAPGTPARFSGSLSGGKAALTLSGVQPEDEAEYYCVLWYSNRWVFGSGTKLTVLGGGGCPPCPAPELLGGPSVFLFPPKPKDTLMISRTPEVTCVVVDVSHEEPEVKFNWYVDGVEVHNAKTKPCEEQYGSTYRCVSVLTVLHQDWLNGKEYKCKVSNKALPAPIEKTISKAKGQPREPQVYTLPPSREEMTKNQVSLTCLVKGFYPSDIAVEWESNGQPENNYKTTPPVLDSDGSFFLYSKLTVDKSRWQQGNVFSCSVMHEALHNHYTQKSLSLSPGKGGGGQGGGGQGGGGQGGGGQGGGGQGGGGQCPPCPAPELLGGPSVFLFPPKPKDTLMISRTPEVTCVVVDVSHEEPEVKFNWYVDGVEVHNAKTKPCEEQYGSTYRCVSVLTVLHQDWLNGKEYKCKVSNKALPAPIEKTISKAKGQPREPQVYTLPPSREEMTKNQVSLTCLVKGFYPSDIAVEWESNGQPENNYKTTPPVLDSDGSFFLYSKLTVDKSRWQQGNVFSCSVMHEALHNHYTQKSLSLSPGK

SEQ ID NO: 3214 - protein, 495 aa, Artificial Sequence
  Synthetic
QVQLVQSGGEVKKPGASVKVSCKASGYTFTSYGISWVRQAPGQCLEWMGWISPQTGNAIYAQKLQGRVTMTRDTSTSTAYMELRSLRSDDTAVYYCARDPDYYGSGSYSDYWGQGTLVTVSSGGGGSGGGGSGGGGSEIVLTQSPATLSVSPGERATLSCRASQSVSSNLAWYQQKPGQAPRLLIYGASSRATGIPARFSGSGSGTEFTLTISSLQSEDFAVYYCQQYHSWPLLTFGCGTKVEIKSGGGGSEVQLVESGGGLVQPGRSLRLSCAASGFTFHDYPMHWVRQAPGKCLEWVSGISWNSDYIVYADSVKGRFTISRDNAKNSLYLQMNSLSAEDTALYYCAKDTAYGGKYSAFDYWGQGTLVTVSSGGGGSGGGGSGGGGSEIVLTQSPATLSVSPGERATLSCRASQSVSRNLAWYQQKPGQAPRRLIYGASTRATGIPDRFSGSGSGTDFTLTISRLEPEDFAVYYCQQYNNWPLTFGCGTKVEIK

SEQ ID NO: 3215 - protein, 495 aa, Artificial Sequence
  Synthetic
QVQLVQSGGEVKKPGASVKVSCKASGYTFTSYGISWVRQAPGQCLEWMGWISPQTGNAIYAQKLQGRVTMTRDTSTSTAYMELRSLRSDDTAVYYCARDPDYYGSGSYSDYWGQGTLVTVSSGGGGQGGGGQGGGGQEIVLTQSPATLSVSPGERATLSCRASQSVSSNLAWYQQKPGQAPRLLIYGASSRATGIPARFSGSGSGTEFTLTISSLQSEDFAVYYCQQYHSWPLLTFGCGTKVEIKSGGGGQEVQLVESGGGLVQPGRSLRLSCAASGFTFHDYPMHWVRQAPGKCLEWVSGISWNSDYIVYADSVKGRFTISRDNAKNSLYLQMNSLSAEDTALYYCAKDTAYGGKYSAFDYWGQGTLVTVSSGGGGQGGGGQGGGGQEIVLTQSPATLSVSPGERATLSCRASQSVSRNLAWYQQKPGQAPRRLIYGASTRATGIPDRFSGSGSGTDFTLTISRLEPEDFAVYYCQQYNNWPLTFGCGTKVEIK

SEQ ID NO: 3216 - protein, 750 aa, Artificial Sequence
  Synthetic
QVQLVQSGGEVKKPGASVKVSCKASGYTFTSYGISWVRQAPGQCLEWMGWISPQTGNAIYAQKLQGRVTMTRDTSTSTAYMELRSLRSDDTAVYYCARDPDYYGSGSYSDYWGQGTLVTVSSGGGGSGGGGSGGGGSEIVLTQSPATLSVSPGERATLSCRASQSVSSNLAWYQQKPGQAPRLLIYGASSRATGIPARFSGSGSGTEFTLTISSLQSEDFAVYYCQQYHSWPLLTFGCGTKVEIKSGGGGSEVQLVESGGGLVQPGRSLRLSCAASGFTFHDYPMHWVRQAPGKCLEWVSGISWNSDYIVYADSVKGRFTISRDNAKNSLYLQMNSLSAEDTALYYCAKDTAYGGKYSAFDYWGQGTLVTVSSGGGGSGGGGSGGGGSEIVLTQSPATLSVSPGERATLSCRASQSVSRNLAWYQQKPGQAPRRLIYGASTRATGIPDRFSGSGSGTDFTLTISRLEPEDFAVYYCQQYNNWPLTFGCGTKVEIKSGGGGSEVQLVESGGGLVQPGGSLKLSCAASGFTFNKYAMNWVRQAPGKGLEWVARIRSKYNNYATYYADSVKDRFTISRDDSKNTAYLQMNNLKTEDTAVYYCVRHGNFGNSYISYWAYWGQGTLVTVSSGGGGSGGGGSGGGGSQTVVTQEPSLTVSPGGTVTLTCGSSTGAVTSGNYPNWVQQKPGQAPRGLIGGTKFLAPGTPARFSGSLLGGKAALTLSGVQPEDEAEYYCVLWYSNRWVFGGGTKLTVL

SEQ ID NO: 3217 - protein, 750 aa, Artificial Sequence
  Synthetic
QVQLVQSGGEVKKPGASVKVSCKASGYTFTSYGISWVRQAPGQCLEWMGWISPQTGNAIYAQKLQGRVTMTRDTSTSTAYMELRSLRSDDTAVYYCARDPDYYGSGSYSDYWGQGTLVTVSSGGGGQGGGGQGGGGQEIVLTQSPATLSVSPGERATLSCRASQSVSSNLAWYQQKPGQAPRLLIYGASSRATGIPARFSGSGSGTEFTLTISSLQSEDFAVYYCQQYHSWPLLTFGCGTKVEIKSGGGGQEVQLVESGGGLVQPGRSLRLSCAASGFTFHDYPMHWVRQAPGKCLEWVSGISWNSDYIVYADSVKGRFTISRDNAKNSLYLQMNSLSAEDTALYYCAKDTAYGGKYSAFDYWGQGTLVTVSSGGGGQGGGGQGGGGQEIVLTQSPATLSVSPGERATLSCRASQSVSRNLAWYQQKPGQAPRRLIYGASTRATGIPDRFSGSGSGTDFTLTISRLEPEDFAVYYCQQYNNWPLTFGCGTKVEIKSGGGGQEVQLVESGGGLVQPGGSLKLSCAASGFTFNKYAMNWVRQAPGKGLEWVARIRSKYNNYATYYADSVKDRFTISRDDSKNTAYLQMNNLKTEDTAVYYCVRHGNFGNSYISYWAYWGQGTLVTVSSGGGGQGGGGQGGGGQQTVVTQEPSLTVSPGGTVTLTCGSSTGAVTSGNYPNWVQQKPGQAPRGLIGGTKFLAPGTPARFSGSLLGGKAALTLSGVQPEDEAEYYCVLWYSNRWVFGGGTKLTVL

SEQ ID NO: 3218 - protein, 750 aa, Artificial Sequence
  Synthetic
QVQLVQSGGEVKKPGASVKVSCKASGYTFTSYGISWVRQAPGQCLEWMGWISPQTGNAIYAQKLQGRVTMTRDTSTSTAYMELRSLRSDDTAVYYCARDPDYYGSGSYSDYWGQGTLVTVSSGGGGSGGGGSGGGGSEIVLTQSPATLSVSPGERATLSCRASQSVSSNLAWYQQKPGQAPRLLIYGASSRATGIPARFSGSGSGTEFTLTISSLQSEDFAVYYCQQYHSWPLLTFGCGTKVEIKSGGGGSEVQLVESGGGLVQPGRSLRLSCAASGFTFHDYPMHWVRQAPGKCLEWVSGISWNSDYIVYADSVKGRFTISRDNAKNSLYLQMNSLSAEDTALYYCAKDTAYGGKYSAFDYWGQGTLVTVSSGGGGSGGGGSGGGGSEIVLTQSPATLSVSPGERATLSCRASQSVSRNLAWYQQKPGQAPRRLIYGASTRATGIPDRFSGSGSGTDFTLTISRLEPEDFAVYYCQQYNNWPLTFGCGTKVEIKSGGGGSEVQLVESGGGLVQPGGSLKLSCAASGFTFNKYAINWVRQAPGKGLEWVARIRSKYNNYATYYADAVKDRFTISRDDSKNTVYLQMNNLKTEDTAVYYCARAGNFGSSYISYWAYWGQGTLVTVSSGGGGSGGGGSGGGGSQTVVTQEPSLTVSPGGTVTITCGSSTGAVTSGNYPNWVQKKPGQAPRGLIGGTKFLAPGTPARFSGSLSGGKAALTLSGVQPEDEAEYYCVLWYSNRWVFGSGTKLTVL

SEQ ID NO: 3219 - protein, 750 aa, Artificial Sequence
  Synthetic
QVQLVQSGGEVKKPGASVKVSCKASGYTFTSYGISWVRQAPGQCLEWMGWISPQTGNAIYAQKLQGRVTMTRDTSTSTAYMELRSLRSDDTAVYYCARDPDYYGSGSYSDYWGQGTLVTVSSGGGGQGGGGQGGGGQEIVLTQSPATLSVSPGERATLSCRASQSVSSNLAWYQQKPGQAPRLLIYGASSRATGIPARFSGSGSGTEFTLTISSLQSEDFAVYYCQQYHSWPLLTFGCGTKVEIKSGGGGQEVQLVESGGGLVQPGRSLRLSCAASGFTFHDYPMHWVRQAPGKCLEWVSGISWNSDYIVYADSVKGRFTISRDNAKNSLYLQMNSLSAEDTALYYCAKDTAYGGKYSAFDYWGQGTLVTVSSGGGGQGGGGQGGGGQEIVLTQSPATLSVSPGERATLSCRASQSVSRNLAWYQQKPGQAPRRLIYGASTRATGIPDRFSGSGSGTDFTLTISRLEPEDFAVYYCQQYNNWPLTFGCGTKVEIKSGGGGQEVQLVESGGGLVQPGGSLKLSCAASGFTFNKYAINWVRQAPGKGLEWVARIRSKYNNYATYYADAVKDRFTISRDDSKNTVYLQMNNLKTEDTAVYYCARAGNFGSSYISYWAYWGQGTLVTVSSGGGGQGGGGQGGGGQQTVVTQEPSLTVSPGGTVTITCGSSTGAVTSGNYPNWVQKKPGQAPRGLIGGTKFLAPGTPARFSGSLSGGKAALTLSGVQPEDEAEYYCVLWYSNRWVFGSGTKLTVL

SEQ ID NO: 3220 - protein, 1238 aa, Artificial Sequence
  Synthetic
QVQLVQSGGEVKKPGASVKVSCKASGYTFTSYGISWVRQAPGQCLEWMGWISPQTGNAIYAQKLQGRVTMTRDTSTSTAYMELRSLRSDDTAVYYCARDPDYYGSGSYSDYWGQGTLVTVSSGGGGSGGGGSGGGGSEIVLTQSPATLSVSPGERATLSCRASQSVSSNLAWYQQKPGQAPRLLIYGASSRATGIPARFSGSGSGTEFTLTISSLQSEDFAVYYCQQYHSWPLLTFGCGTKVEIKSGGGGSEVQLVESGGGLVQPGRSLRLSCAASGFTFHDYPMHWVRQAPGKCLEWVSGISWNSDYIVYADSVKGRFTISRDNAKNSLYLQMNSLSAEDTALYYCAKDTAYGGKYSAFDYWGQGTLVTVSSGGGGSGGGGSGGGGSEIVLTQSPATLSVSPGERATLSCRASQSVSRNLAWYQQKPGQAPRRLIYGASTRATGIPDRFSGSGSGTDFTLTISRLEPEDFAVYYCQQYNNWPLTFGCGTKVEIKSGGGGSEVQLVESGGGLVQPGGSLKLSCAASGFTFNKYAMNWVRQAPGKGLEWVARIRSKYNNYATYYADSVKDRFTISRDDSKNTAYLQMNNLKTEDTAVYYCVRHGNFGNSYISYWAYWGQGTLVTVSSGGGGSGGGGSGGGGSQTVVTQEPSLTVSPGGTVTLTCGSSTGAVTSGNYPNWVQQKPGQAPRGLIGGTKFLAPGTPARFSGSLLGGKAALTLSGVQPEDEAEYYCVLWYSNRWVFGGGTKLTVLGGGGDKTHTCPPCPAPELLGGPSVFLFPPKPKDTLMISRTPEVTCVVVDVSHEDPEVKFNWYVDGVEVHNAKTKPCEEQYGSTYRCVSVLTVLHQDWLNGKEYKCKVSNKALPAPIEKTISKAKGQPREPQVYTLPPSREEMTKNQVSLTCLVKGFYPSDIAVEWESNGQPENNYKTTPPVLDSDGSFFLYSKLTVDKSRWQQGNVFSCSVMHEALHNHYTQKSLSLSPGKGGGGSGGGGSGGGGSGGGGSGGGGSGGGGSDKTHTCPPCPAPELLGGPSVFLFPPKPKDTLMISRTPEVTCVVVDVSHEDPEVKFNWYVDGVEVHNAKTKPCEEQYGSTYRCVSVLTVLHQDWLNGKEYKCKVSNKALPAPIEKTISKAKGQPREPQVYTLPPSREEMTKNQVSLTCLVKGFYPSDIAVEWESNGQPENNYKTTPPVLDSDGSFFLYSKLTVDKSRWQQGNVFSCSVMHEALHNHYTQKSLSLSPGK

SEQ ID NO: 3221 - protein, 1228 aa, Artificial Sequence
  Synthetic
QVQLVQSGGEVKKPGASVKVSCKASGYTFTSYGISWVRQAPGQCLEWMGWISPQTGNAIYAQKLQGRVTMTRDTSTSTAYMELRSLRSDDTAVYYCARDPDYYGSGSYSDYWGQGTLVTVSSGGGGQGGGGQGGGGQEIVLTQSPATLSVSPGERATLSCRASQSVSSNLAWYQQKPGQAPRLLIYGASSRATGIPARFSGSGSGTEFTLTISSLQSEDFAVYYCQQYHSWPLLTFGCGTKVEIKSGGGGQEVQLVESGGGLVQPGRSLRLSCAASGFTFHDYPMHWVRQAPGKCLEWVSGISWNSDYIVYADSVKGRFTISRDNAKNSLYLQMNSLSAEDTALYYCAKDTAYGGKYSAFDYWGQGTLVTVSSGGGGQGGGGQGGGGQEIVLTQSPATLSVSPGERATLSCRASQSVSRNLAWYQQKPGQAPRRLIYGASTRATGIPDRFSGSGSGTDFTLTISRLEPEDFAVYYCQQYNNWPLTFGCGTKVEIKSGGGGQEVQLVESGGGLVQPGGSLKLSCAASGFTFNKYAMNWVRQAPGKGLEWVARIRSKYNNYATYYADSVKDRFTISRDDSKNTAYLQMNNLKTEDTAVYYCVRHGNFGNSYISYWAYWGQGTLVTVSSGGGGQGGGGQGGGGQQTVVTQEPSLTVSPGGTVTLTCGSSTGAVTSGNYPNWVQQKPGQAPRGLIGGTKFLAPGTPARFSGSLLGGKAALTLSGVQPEDEAEYYCVLWYSNRWVFGGGTKLTVLGGGGCPPCPAPELLGGPSVFLFPPKPKDTLMISRTPEVTCVVVDVSHEEPEVKFNWYVDGVEVHNAKTKPCEEQYGSTYRCVSVLTVLHQDWLNGKEYKCKVSNKALPAPIEKTISKAKGQPREPQVYTLPPSREEMTKNQVSLTCLVKGFYPSDIAVEWESNGQPENNYKTTPPVLDSDGSFFLYSKLTVDKSRWQQGNVFSCSVMHEALHNHYTQKSLSLSPGKGGGGQGGGGQGGGGQGGGGQGGGGQGGGGQCPPCPAPELLGGPSVFLFPPKPKDTLMISRTPEVTCVVVDVSHEEPEVKFNWYVDGVEVHNAKTKPCEEQYGSTYRCVSVLTVLHQDWLNGKEYKCKVSNKALPAPIEKTISKAKGQPREPQVYTLPPSREEMTKNQVSLTCLVKGFYPSDIAVEWESNGQPENNYKTTPPVLDSDGSFFLYSKLTVDKSRWQQGNVFSCSVMHEALHNHYTQKSLSLSPGK

SEQ ID NO: 3222 - protein, 1238 aa, Artificial Sequence
  Synthetic
QVQLVQSGGEVKKPGASVKVSCKASGYTFTSYGISWVRQAPGQCLEWMGWISPQTGNAIYAQKLQGRVTMTRDTSTSTAYMELRSLRSDDTAVYYCARDPDYYGSGSYSDYWGQGTLVTVSSGGGGSGGGGSGGGGSEIVLTQSPATLSVSPGERATLSCRASQSVSSNLAWYQQKPGQAPRLLIYGASSRATGIPARFSGSGSGTEFTLTISSLQSEDFAVYYCQQYHSWPLLTFGCGTKVEIKSGGGGSEVQLVESGGGLVQPGRSLRLSCAASGFTFHDYPMHWVRQAPGKCLEWVSGISWNSDYIVYADSVKGRFTISRDNAKNSLYLQMNSLSAEDTALYYCAKDTAYGGKYSAFDYWGQGTLVTVSSGGGGSGGGGSGGGGSEIVLTQSPATLSVSPGERATLSCRASQSVSRNLAWYQQKPGQAPRRLIYGASTRATGIPDRFSGSGSGTDFTLTISRLEPEDFAVYYCQQYNNWPLTFGCGTKVEIKSGGGGSEVQLVESGGGLVQPGGSLKLSCAASGFTFNKYAINWVRQAPGKGLEWVARIRSKYNNYATYYADAVKDRFTISRDDSKNTVYLQMNNLKTEDTAVYYCARAGNFGSSYISYWAYWGQGTLVTVSSGGGGSGGGGSGGGGSQTVVTQEPSLTVSPGGTVTITCGSSTGAVTSGNYPNWVQKKPGQAPRGLIGGTKFLAPGTPARFSGSLSGGKAALTLSGVQPEDEAEYYCVLWYSNRWVFGSGTKLTVLGGGGDKTHTCPPCPAPELLGGPSVFLFPPKPKDTLMISRTPEVTCVVVDVSHEDPEVKFNWYVDGVEVHNAKTKPCEEQYGSTYRCVSVLTVLHQDWLNGKEYKCKVSNKALPAPIEKTISKAKGQPREPQVYTLPPSREEMTKNQVSLTCLVKGFYPSDIAVEWESNGQPENNYKTTPPVLDSDGSFFLYSKLTVDKSRWQQGNVFSCSVMHEALHNHYTQKSLSLSPGKGGGGSGGGGSGGGGSGGGGSGGGGSGGGGSDKTHTCPPCPAPELLGGPSVFLFPPKPKDTLMISRTPEVTCVVVDVSHEDPEVKFNWYVDGVEVHNAKTKPCEEQYGSTYRCVSVLTVLHQDWLNGKEYKCKVSNKALPAPIEKTISKAKGQPREPQVYTLPPSREEMTKNQVSLTCLVKGFYPSDIAVEWESNGQPENNYKTTPPVLDSDGSFFLYSKLTVDKSRWQQGNVFSCSVMHEALHNHYTQKSLSLSPGK

SEQ ID NO: 3223 - protein, 1228 aa, Artificial Sequence
  Synthetic
QVQLVQSGGEVKKPGASVKVSCKASGYTFTSYGISWVRQAPGQCLEWMGWISPQTGNAIYAQKLQGRVTMTRDTSTSTAYMELRSLRSDDTAVYYCARDPDYYGSGSYSDYWGQGTLVTVSSGGGGQGGGGQGGGGQEIVLTQSPATLSVSPGERATLSCRASQSVSSNLAWYQQKPGQAPRLLIYGASSRATGIPARFSGSGSGTEFTLTISSLQSEDFAVYYCQQYHSWPLLTFGCGTKVEIKSGGGGQEVQLVESGGGLVQPGRSLRLSCAASGFTFHDYPMHWVRQAPGKCLEWVSGISWNSDYIVYADSVKGRFTISRDNAKNSLYLQMNSLSAEDTALYYCAKDTAYGGKYSAFDYWGQGTLVTVSSGGGGQGGGGQGGGGQEIVLTQSPATLSVSPGERATLSCRASQSVSRNLAWYQQKPGQAPRRLIYGASTRATGIPDRFSGSGSGTDFTLTISRLEPEDFAVYYCQQYNNWPLTFGCGTKVEIKSGGGGQEVQLVESGGGLVQPGGSLKLSCAASGFTFNKYAINWVRQAPGKGLEWVARIRSKYNNYATYYADAVKDRFTISRDDSKNTVYLQMNNLKTEDTAVYYCARAGNFGSSYISYWAYWGQGTLVTVSSGGGGQGGGGQGGGGQQTVVTQEPSLTVSPGGTVTITCGSSTGAVTSGNYPNWVQKKPGQAPRGLIGGTKFLAPGTPARFSGSLSGGKAALTLSGVQPEDEAEYYCVLWYSNRWVFGSGTKLTVLGGGGCPPCPAPELLGGPSVFLFPPKPKDTLMISRTPEVTCVVVDVSHEEPEVKFNWYVDGVEVHNAKTKPCEEQYGSTYRCVSVLTVLHQDWLNGKEYKCKVSNKALPAPIEKTISKAKGQPREPQVYTLPPSREEMTKNQVSLTCLVKGFYPSDIAVEWESNGQPENNYKTTPPVLDSDGSFFLYSKLTVDKSRWQQGNVFSCSVMHEALHNHYTQKSLSLSPGKGGGGQGGGGQGGGGQGGGGQGGGGQGGGGQCPPCPAPELLGGPSVFLFPPKPKDTLMISRTPEVTCVVVDVSHEEPEVKFNWYVDGVEVHNAKTKPCEEQYGSTYRCVSVLTVLHQDWLNGKEYKCKVSNKALPAPIEKTISKAKGQPREPQVYTLPPSREEMTKNQVSLTCLVKGFYPSDIAVEWESNGQPENNYKTTPPVLDSDGSFFLYSKLTVDKSRWQQGNVFSCSVMHEALHNHYTQKSLSLSPGK

SEQ ID NO: 3224 - protein, 495 aa, Artificial Sequence
  Synthetic
QVQLVQSGAEVKKPGASVKVSCKASGYTFTSYGISWVRQAPGQCLEWMGWISAYNGNAIYAQKLQGRVTMTRDTSTSTAYMELRSLRSDDTAVYYCARDPDYYGSGSYSDYWGQGTLVTVSSGGGGSGGGGSGGGGSEIVLTQSPATLSVSPGERATLSCRASQSVSSNLAWYQQKPGQAPRLLIYGASSRATGIPARFSGSGSGTEFTLTISSLQSEDFAVYYCQQYHSWPILHFGCGTKVEIKSGGGGSEVQLVESGGGLVQPGRSLRLSCAASGFTFHDYPMHWVRQAPGKCLEWVSGISWNSDYIVYADSVKGRFTISRDNAKNSLYLQMNSLSAEDTALYYCAKDTAYGGKYSAFDYWGQGTLVTVSSGGGGSGGGGSGGGGSEIVLTQSPATLSVSPGERATLSCRASQSVSRNLAWYQQKPGQAPRRLIYGASTRATGIPDRFSGSGSGTDFTLTISRLEPEDFAVYYCQQYNNWPLTFGCGTKVEIK

SEQ ID NO: 3225 - protein, 495 aa, Artificial Sequence
  Synthetic
QVQLVQSGAEVKKPGASVKVSCKASGYTFTSYGISWVRQAPGQCLEWMGWISAYNGNAIYAQKLQGRVTMTRDTSTSTAYMELRSLRSDDTAVYYCARDPDYYGSGSYSDYWGQGTLVTVSSGGGGQGGGGQGGGGQEIVLTQSPATLSVSPGERATLSCRASQSVSSNLAWYQQKPGQAPRLLIYGASSRATGIPARFSGSGSGTEFTLTISSLQSEDFAVYYCQQYHSWPILHFGCGTKVEIKSGGGGQEVQLVESGGGLVQPGRSLRLSCAASGFTFHDYPMHWVRQAPGKCLEWVSGISWNSDYIVYADSVKGRFTISRDNAKNSLYLQMNSLSAEDTALYYCAKDTAYGGKYSAFDYWGQGTLVTVSSGGGGQGGGGQGGGGQEIVLTQSPATLSVSPGERATLSCRASQSVSRNLAWYQQKPGQAPRRLIYGASTRATGIPDRFSGSGSGTDFTLTISRLEPEDFAVYYCQQYNNWPLTFGCGTKVEIK

SEQ ID NO: 3226 - protein, 750 aa, Artificial Sequence
  Synthetic
QVQLVQSGAEVKKPGASVKVSCKASGYTFTSYGISWVRQAPGQCLEWMGWISAYNGNAIYAQKLQGRVTMTRDTSTSTAYMELRSLRSDDTAVYYCARDPDYYGSGSYSDYWGQGTLVTVSSGGGGSGGGGSGGGGSEIVLTQSPATLSVSPGERATLSCRASQSVSSNLAWYQQKPGQAPRLLIYGASSRATGIPARFSGSGSGTEFTLTISSLQSEDFAVYYCQQYHSWPILHFGCGTKVEIKSGGGGSEVQLVESGGGLVQPGRSLRLSCAASGFTFHDYPMHWVRQAPGKCLEWVSGISWNSDYIVYADSVKGRFTISRDNAKNSLYLQMNSLSAEDTALYYCAKDTAYGGKYSAFDYWGQGTLVTVSSGGGGSGGGGSGGGGSEIVLTQSPATLSVSPGERATLSCRASQSVSRNLAWYQQKPGQAPRRLIYGASTRATGIPDRFSGSGSGTDFTLTISRLEPEDFAVYYCQQYNNWPLTFGCGTKVEIKSGGGGSEVQLVESGGGLVQPGGSLKLSCAASGFTFNKYAMNWVRQAPGKGLEWVARIRSKYNNYATYYADSVKDRFTISRDDSKNTAYLQMNNLKTEDTAVYYCVRHGNFGNSYISYWAYWGQGTLVTVSSGGGGSGGGGSGGGGSQTVVTQEPSLTVSPGGTVTLTCGSSTGAVTSGNYPNWVQQKPGQAPRGLIGGTKFLAPGTPARFSGSLLGGKAALTLSGVQPEDEAEYYCVLWYSNRWVFGGGTKLTVL

SEQ ID NO: 3227 - protein, 750 aa, Artificial Sequence
  Synthetic
QVQLVQSGAEVKKPGASVKVSCKASGYTFTSYGISWVRQAPGQCLEWMGWISAYNGNAIYAQKLQGRVTMTRDTSTSTAYMELRSLRSDDTAVYYCARDPDYYGSGSYSDYWGQGTLVTVSSGGGGQGGGGQGGGGQEIVLTQSPATLSVSPGERATLSCRASQSVSSNLAWYQQKPGQAPRLLIYGASSRATGIPARFSGSGSGTEFTLTISSLQSEDFAVYYCQQYHSWPILHFGCGTKVEIKSGGGGQEVQLVESGGGLVQPGRSLRLSCAASGFTFHDYPMHWVRQAPGKCLEWVSGISWNSDYIVYADSVKGRFTISRDNAKNSLYLQMNSLSAEDTALYYCAKDTAYGGKYSAFDYWGQGTLVTVSSGGGGQGGGGQGGGGQEIVLTQSPATLSVSPGERATLSCRASQSVSRNLAWYQQKPGQAPRRLIYGASTRATGIPDRFSGSGSGTDFTLTISRLEPEDFAVYYCQQYNNWPLTFGCGTKVEIKSGGGGQEVQLVESGGGLVQPGGSLKLSCAASGFTFNKYAMNWVRQAPGKGLEWVARIRSKYNNYATYYADSVKDRFTISRDDSKNTAYLQMNNLKTEDTAVYYCVRHGNFGNSYISYWAYWGQGTLVTVSSGGGGQGGGGQGGGGQQTVVTQEPSLTVSPGGTVTLTCGSSTGAVTSGNYPNWVQQKPGQAPRGLIGGTKFLAPGTPARFSGSLLGGKAALTLSGVQPEDEAEYYCVLWYSNRWVFGGGTKLTVL

SEQ ID NO: 3228 - protein, 750 aa, Artificial Sequence
  Synthetic
QVQLVQSGAEVKKPGASVKVSCKASGYTFTSYGISWVRQAPGQCLEWMGWISAYNGNAIYAQKLQGRVTMTRDTSTSTAYMELRSLRSDDTAVYYCARDPDYYGSGSYSDYWGQGTLVTVSSGGGGSGGGGSGGGGSEIVLTQSPATLSVSPGERATLSCRASQSVSSNLAWYQQKPGQAPRLLIYGASSRATGIPARFSGSGSGTEFTLTISSLQSEDFAVYYCQQYHSWPILHFGCGTKVEIKSGGGGSEVQLVESGGGLVQPGRSLRLSCAASGFTFHDYPMHWVRQAPGKCLEWVSGISWNSDYIVYADSVKGRFTISRDNAKNSLYLQMNSLSAEDTALYYCAKDTAYGGKYSAFDYWGQGTLVTVSSGGGGSGGGGSGGGGSEIVLTQSPATLSVSPGERATLSCRASQSVSRNLAWYQQKPGQAPRRLIYGASTRATGIPDRFSGSGSGTDFTLTISRLEPEDFAVYYCQQYNNWPLTFGCGTKVEIKSGGGGSEVQLVESGGGLVQPGGSLKLSCAASGFTFNKYAINWVRQAPGKGLEWVARIRSKYNNYATYYADAVKDRFTISRDDSKNTVYLQMNNLKTEDTAVYYCARAGNFGSSYISYWAYWGQGTLVTVSSGGGGSGGGGSGGGGSQTVVTQEPSLTVSPGGTVTITCGSSTGAVTSGNYPNWVQKKPGQAPRGLIGGTKFLAPGTPARFSGSLSGGKAALTLSGVQPEDEAEYYCVLWYSNRWVFGSGTKLTVL

SEQ ID NO: 3229 - protein, 750 aa, Artificial Sequence
  Synthetic
QVQLVQSGAEVKKPGASVKVSCKASGYTFTSYGISWVRQAPGQCLEWMGWISAYNGNAIYAQKLQGRVTMTRDTSTSTAYMELRSLRSDDTAVYYCARDPDYYGSGSYSDYWGQGTLVTVSSGGGGQGGGGQGGGGQEIVLTQSPATLSVSPGERATLSCRASQSVSSNLAWYQQKPGQAPRLLIYGASSRATGIPARFSGSGSGTEFTLTISSLQSEDFAVYYCQQYHSWPILHFGCGTKVEIKSGGGGQEVQLVESGGGLVQPGRSLRLSCAASGFTFHDYPMHWVRQAPGKCLEWVSGISWNSDYIVYADSVKGRFTISRDNAKNSLYLQMNSLSAEDTALYYCAKDTAYGGKYSAFDYWGQGTLVTVSSGGGGQGGGGQGGGGQEIVLTQSPATLSVSPGERATLSCRASQSVSRNLAWYQQKPGQAPRRLIYGASTRATGIPDRFSGSGSGTDFTLTISRLEPEDFAVYYCQQYNNWPLTFGCGTKVEIKSGGGGQEVQLVESGGGLVQPGGSLKLSCAASGFTFNKYAINWVRQAPGKGLEWVARIRSKYNNYATYYADAVKDRFTISRDDSKNTVYLQMNNLKTEDTAVYYCARAGNFGSSYISYWAYWGQGTLVTVSSGGGGQGGGGQGGGGQQTVVTQEPSLTVSPGGTVTITCGSSTGAVTSGNYPNWVQKKPGQAPRGLIGGTKFLAPGTPARFSGSLSGGKAALTLSGVQPEDEAEYYCVLWYSNRWVFGSGTKLTVL

SEQ ID NO: 3230 - protein, 1238 aa, Artificial Sequence
  Synthetic
QVQLVQSGAEVKKPGASVKVSCKASGYTFTSYGISWVRQAPGQCLEWMGWISAYNGNAIYAQKLQGRVTMTRDTSTSTAYMELRSLRSDDTAVYYCARDPDYYGSGSYSDYWGQGTLVTVSSGGGGSGGGGSGGGGSEIVLTQSPATLSVSPGERATLSCRASQSVSSNLAWYQQKPGQAPRLLIYGASSRATGIPARFSGSGSGTEFTLTISSLQSEDFAVYYCQQYHSWPILHFGCGTKVEIKSGGGGSEVQLVESGGGLVQPGRSLRLSCAASGFTFHDYPMHWVRQAPGKCLEWVSGISWNSDYIVYADSVKGRFTISRDNAKNSLYLQMNSLSAEDTALYYCAKDTAYGGKYSAFDYWGQGTLVTVSSGGGGSGGGGSGGGGSEIVLTQSPATLSVSPGERATLSCRASQSVSRNLAWYQQKPGQAPRRLIYGASTRATGIPDRFSGSGSGTDFTLTISRLEPEDFAVYYCQQYNNWPLTFGCGTKVEIKSGGGGSEVQLVESGGGLVQPGGSLKLSCAASGFTFNKYAMNWVRQAPGKGLEWVARIRSKYNNYATYYADSVKDRFTISRDDSKNTAYLQMNNLKTEDTAVYYCVRHGNFGNSYISYWAYWGQGTLVTVSSGGGGSGGGGSGGGGSQTVVTQEPSLTVSPGGTVTLTCGSSTGAVTSGNYPNWVQQKPGQAPRGLIGGTKFLAPGTPARFSGSLLGGKAALTLSGVQPEDEAEYYCVLWYSNRWVFGGGTKLTVLGGGGDKTHTCPPCPAPELLGGPSVFLFPPKPKDTLMISRTPEVTCVVVDVSHEDPEVKFNWYVDGVEVHNAKTKPCEEQYGSTYRCVSVLTVLHQDWLNGKEYKCKVSNKALPAPIEKTISKAKGQPREPQVYTLPPSREEMTKNQVSLTCLVKGFYPSDIAVEWESNGQPENNYKTTPPVLDSDGSFFLYSKLTVDKSRWQQGNVFSCSVMHEALHNHYTQKSLSLSPGKGGGGSGGGGSGGGGSGGGGSGGGGSGGGGSDKTHTCPPCPAPELLGGPSVFLFPPKPKDTLMISRTPEVTCVVVDVSHEDPEVKFNWYVDGVEVHNAKTKPCEEQYGSTYRCVSVLTVLHQDWLNGKEYKCKVSNKALPAPIEKTISKAKGQPREPQVYTLPPSREEMTKNQVSLTCLVKGFYPSDIAVEWESNGQPENNYKTTPPVLDSDGSFFLYSKLTVDKSRWQQGNVFSCSVMHEALHNHYTQKSLSLSPGK

SEQ ID NO: 3231 - protein, 1228 aa, Artificial Sequence
  Synthetic
QVQLVQSGAEVKKPGASVKVSCKASGYTFTSYGISWVRQAPGQCLEWMGWISAYNGNAIYAQKLQGRVTMTRDTSTSTAYMELRSLRSDDTAVYYCARDPDYYGSGSYSDYWGQGTLVTVSSGGGGQGGGGQGGGGQEIVLTQSPATLSVSPGERATLSCRASQSVSSNLAWYQQKPGQAPRLLIYGASSRATGIPARFSGSGSGTEFTLTISSLQSEDFAVYYCQQYHSWPILHFGCGTKVEIKSGGGGQEVQLVESGGGLVQPGRSLRLSCAASGFTFHDYPMHWVRQAPGKCLEWVSGISWNSDYIVYADSVKGRFTISRDNAKNSLYLQMNSLSAEDTALYYCAKDTAYGGKYSAFDYWGQGTLVTVSSGGGGQGGGGQGGGGQEIVLTQSPATLSVSPGERATLSCRASQSVSRNLAWYQQKPGQAPRRLIYGASTRATGIPDRFSGSGSGTDFTLTISRLEPEDFAVYYCQQYNNWPLTFGCGTKVEIKSGGGGQEVQLVESGGGLVQPGGSLKLSCAASGFTFNKYAMNWVRQAPGKGLEWVARIRSKYNNYATYYADSVKDRFTISRDDSKNTAYLQMNNLKTEDTAVYYCVRHGNFGNSYISYWAYWGQGTLVTVSSGGGGQGGGGQGGGGQQTVVTQEPSLTVSPGGTVTLTCGSSTGAVTSGNYPNWVQQKPGQAPRGLIGGTKFLAPGTPARFSGSLLGGKAALTLSGVQPEDEAEYYCVLWYSNRWVFGGGTKLTVLGGGGCPPCPAPELLGGPSVFLFPPKPKDTLMISRTPEVTCVVVDVSHEEPEVKFNWYVDGVEVHNAKTKPCEEQYGSTYRCVSVLTVLHQDWLNGKEYKCKVSNKALPAPIEKTISKAKGQPREPQVYTLPPSREEMTKNQVSLTCLVKGFYPSDIAVEWESNGQPENNYKTTPPVLDSDGSFFLYSKLTVDKSRWQQGNVFSCSVMHEALHNHYTQKSLSLSPGKGGGGQGGGGQGGGGQGGGGQGGGGQGGGGQCPPCPAPELLGGPSVFLFPPKPKDTLMISRTPEVTCVVVDVSHEEPEVKFNWYVDGVEVHNAKTKPCEEQYGSTYRCVSVLTVLHQDWLNGKEYKCKVSNKALPAPIEKTISKAKGQPREPQVYTLPPSREEMTKNQVSLTCLVKGFYPSDIAVEWESNGQPENNYKTTPPVLDSDGSFFLYSKLTVDKSRWQQGNVFSCSVMHEALHNHYTQKSLSLSPGK

SEQ ID NO: 3232 - protein, 1238 aa, Artificial Sequence
  Synthetic
QVQLVQSGAEVKKPGASVKVSCKASGYTFTSYGISWVRQAPGQCLEWMGWISAYNGNAIYAQKLQGRVTMTRDTSTSTAYMELRSLRSDDTAVYYCARDPDYYGSGSYSDYWGQGTLVTVSSGGGGSGGGGSGGGGSEIVLTQSPATLSVSPGERATLSCRASQSVSSNLAWYQQKPGQAPRLLIYGASSRATGIPARFSGSGSGTEFTLTISSLQSEDFAVYYCQQYHSWPILHFGCGTKVEIKSGGGGSEVQLVESGGGLVQPGRSLRLSCAASGFTFHDYPMHWVRQAPGKCLEWVSGISWNSDYIVYADSVKGRFTISRDNAKNSLYLQMNSLSAEDTALYYCAKDTAYGGKYSAFDYWGQGTLVTVSSGGGGSGGGGSGGGGSEIVLTQSPATLSVSPGERATLSCRASQSVSRNLAWYQQKPGQAPRRLIYGASTRATGIPDRFSGSGSGTDFTLTISRLEPEDFAVYYCQQYNNWPLTFGCGTKVEIKSGGGGSEVQLVESGGGLVQPGGSLKLSCAASGFTFNKYAINWVRQAPGKGLEWVARIRSKYNNYATYYADAVKDRFTISRDDSKNTVYLQMNNLKTEDTAVYYCARAGNFGSSYISYWAYWGQGTLVTVSSGGGGSGGGGSGGGGSQTVVTQEPSLTVSPGGTVTITCGSSTGAVTSGNYPNWVQKKPGQAPRGLIGGTKFLAPGTPARFSGSLSGGKAALTLSGVQPEDEAEYYCVLWYSNRWVFGSGTKLTVLGGGGDKTHTCPPCPAPELLGGPSVFLFPPKPKDTLMISRTPEVTCVVVDVSHEDPEVKFNWYVDGVEVHNAKTKPCEEQYGSTYRCVSVLTVLHQDWLNGKEYKCKVSNKALPAPIEKTISKAKGQPREPQVYTLPPSREEMTKNQVSLTCLVKGFYPSDIAVEWESNGQPENNYKTTPPVLDSDGSFFLYSKLTVDKSRWQQGNVFSCSVMHEALHNHYTQKSLSLSPGKGGGGSGGGGSGGGGSGGGGSGGGGSGGGGSDKTHTCPPCPAPELLGGPSVFLFPPKPKDTLMISRTPEVTCVVVDVSHEDPEVKFNWYVDGVEVHNAKTKPCEEQYGSTYRCVSVLTVLHQDWLNGKEYKCKVSNKALPAPIEKTISKAKGQPREPQVYTLPPSREEMTKNQVSLTCLVKGFYPSDIAVEWESNGQPENNYKTTPPVLDSDGSFFLYSKLTVDKSRWQQGNVFSCSVMHEALHNHYTQKSLSLSPGK

SEQ ID NO: 3233 - protein, 1228 aa, Artificial Sequence
  Synthetic
QVQLVQSGAEVKKPGASVKVSCKASGYTFTSYGISWVRQAPGQCLEWMGWISAYNGNAIYAQKLQGRVTMTRDTSTSTAYMELRSLRSDDTAVYYCARDPDYYGSGSYSDYWGQGTLVTVSSGGGGQGGGGQGGGGQEIVLTQSPATLSVSPGERATLSCRASQSVSSNLAWYQQKPGQAPRLLIYGASSRATGIPARFSGSGSGTEFTLTISSLQSEDFAVYYCQQYHSWPILHFGCGTKVEIKSGGGGQEVQLVESGGGLVQPGRSLRLSCAASGFTFHDYPMHWVRQAPGKCLEWVSGISWNSDYIVYADSVKGRFTISRDNAKNSLYLQMNSLSAEDTALYYCAKDTAYGGKYSAFDYWGQGTLVTVSSGGGGQGGGGQGGGGQEIVLTQSPATLSVSPGERATLSCRASQSVSRNLAWYQQKPGQAPRRLIYGASTRATGIPDRFSGSGSGTDFTLTISRLEPEDFAVYYCQQYNNWPLTFGCGTKVEIKSGGGGQEVQLVESGGGLVQPGGSLKLSCAASGFTFNKYAINWVRQAPGKGLEWVARIRSKYNNYATYYADAVKDRFTISRDDSKNTVYLQMNNLKTEDTAVYYCARAGNFGSSYISYWAYWGQGTLVTVSSGGGGQGGGGQGGGGQQTVVTQEPSLTVSPGGTVTITCGSSTGAVTSGNYPNWVQKKPGQAPRGLIGGTKFLAPGTPARFSGSLSGGKAALTLSGVQPEDEAEYYCVLWYSNRWVFGSGTKLTVLGGGGCPPCPAPELLGGPSVFLFPPKPKDTLMISRTPEVTCVVVDVSHEEPEVKFNWYVDGVEVHNAKTKPCEEQYGSTYRCVSVLTVLHQDWLNGKEYKCKVSNKALPAPIEKTISKAKGQPREPQVYTLPPSREEMTKNQVSLTCLVKGFYPSDIAVEWESNGQPENNYKTTPPVLDSDGSFFLYSKLTVDKSRWQQGNVFSCSVMHEALHNHYTQKSLSLSPGKGGGGQGGGGQGGGGQGGGGQGGGGQGGGGQCPPCPAPELLGGPSVFLFPPKPKDTLMISRTPEVTCVVVDVSHEEPEVKFNWYVDGVEVHNAKTKPCEEQYGSTYRCVSVLTVLHQDWLNGKEYKCKVSNKALPAPIEKTISKAKGQPREPQVYTLPPSREEMTKNQVSLTCLVKGFYPSDIAVEWESNGQPENNYKTTPPVLDSDGSFFLYSKLTVDKSRWQQGNVFSCSVMHEALHNHYTQKSLSLSPGK

SEQ ID NO: 3234 - protein, 489 aa, Artificial Sequence
  Synthetic
QVQLVQSGAEVKKPGASVKVSCKASGYTFTSYGISWVRQAPGQCLEWMGWISAYNGNTVYAQKLQDRVTMTTDTSTSTAYMELRSLRSDDTAVYFCVRDGDPLDYWGQGTLVTVSSGGGGSGGGGSGGGGSEIVLTQSPGTLSLSPGERATLSCRASQSVSSNLAWYQQKPGQAPRLLIYGASTRATGIPARFSGSGSGTEFTLTISSLQSEDFAVYYCQQYHTWPPVTFGCGTKVEIKSGGGGSEVQLVESGGGLVQPGRSLRLSCAASGFTFHDYPMHWVRQAPGKCLEWVSGISWNSDYIVYADSVKGRFTISRDNAKNSLYLQMNSLSAEDTALYYCAKDTAYGGKYSAFDYWGQGTLVTVSSGGGGSGGGGSGGGGSEIVLTQSPATLSVSPGERATLSCRASQSVSRNLAWYQQKPGQAPRRLIYGASTRATGIPDRFSGSGSGTDFTLTISRLEPEDFAVYYCQQYNNWPLTFGCGTKVEIK

SEQ ID NO: 3235 - protein, 489 aa, Artificial Sequence
  Synthetic
QVQLVQSGAEVKKPGASVKVSCKASGYTFTSYGISWVRQAPGQCLEWMGWISAYNGNTVYAQKLQDRVTMTTDTSTSTAYMELRSLRSDDTAVYFCVRDGDPLDYWGQGTLVTVSSGGGGQGGGGQGGGGQEIVLTQSPGTLSLSPGERATLSCRASQSVSSNLAWYQQKPGQAPRLLIYGASTRATGIPARFSGSGSGTEFTLTISSLQSEDFAVYYCQQYHTWPPVTFGCGTKVEIKSGGGGQEVQLVESGGGLVQPGRSLRLSCAASGFTFHDYPMHWVRQAPGKCLEWVSGISWNSDYIVYADSVKGRFTISRDNAKNSLYLQMNSLSAEDTALYYCAKDTAYGGKYSAFDYWGQGTLVTVSSGGGGQGGGGQGGGGQEIVLTQSPATLSVSPGERATLSCRASQSVSRNLAWYQQKPGQAPRRLIYGASTRATGIPDRFSGSGSGTDFTLTISRLEPEDFAVYYCQQYNNWPLTFGCGTKVEIK

SEQ ID NO: 3236 - protein, 744 aa, Artificial Sequence
  Synthetic
QVQLVQSGAEVKKPGASVKVSCKASGYTFTSYGISWVRQAPGQCLEWMGWISAYNGNTVYAQKLQDRVTMTTDTSTSTAYMELRSLRSDDTAVYFCVRDGDPLDYWGQGTLVTVSSGGGGSGGGGSGGGGSEIVLTQSPGTLSLSPGERATLSCRASQSVSSNLAWYQQKPGQAPRLLIYGASTRATGIPARFSGSGSGTEFTLTISSLQSEDFAVYYCQQYHTWPPVTFGCGTKVEIKSGGGGSEVQLVESGGGLVQPGRSLRLSCAASGFTFHDYPMHWVRQAPGKCLEWVSGISWNSDYIVYADSVKGRFTISRDNAKNSLYLQMNSLSAEDTALYYCAKDTAYGGKYSAFDYWGQGTLVTVSSGGGGSGGGGSGGGGSEIVLTQSPATLSVSPGERATLSCRASQSVSRNLAWYQQKPGQAPRRLIYGASTRATGIPDRFSGSGSGTDFTLTISRLEPEDFAVYYCQQYNNWPLTFGCGTKVEIKSGGGGSEVQLVESGGGLVQPGGSLKLSCAASGFTFNKYAMNWVRQAPGKGLEWVARIRSKYNNYATYYADSVKDRFTISRDDSKNTAYLQMNNLKTEDTAVYYCVRHGNFGNSYISYWAYWGQGTLVTVSSGGGGSGGGGSGGGGSQTVVTQEPSLTVSPGGTVTLTCGSSTGAVTSGNYPNWVQQKPGQAPRGLIGGTKFLAPGTPARFSGSLLGGKAALTLSGVQPEDEAEYYCVLWYSNRWVFGGGTKLTVL

SEQ ID NO: 3237 - protein, 744 aa, Artificial Sequence
  Synthetic
QVQLVQSGAEVKKPGASVKVSCKASGYTFTSYGISWVRQAPGQCLEWMGWISAYNGNTVYAQKLQDRVTMTTDTSTSTAYMELRSLRSDDTAVYFCVRDGDPLDYWGQGTLVTVSSGGGGQGGGGQGGGGQEIVLTQSPGTLSLSPGERATLSCRASQSVSSNLAWYQQKPGQAPRLLIYGASTRATGIPARFSGSGSGTEFTLTISSLQSEDFAVYYCQQYHTWPPVTFGCGTKVEIKSGGGGQEVQLVESGGGLVQPGRSLRLSCAASGFTFHDYPMHWVRQAPGKCLEWVSGISWNSDYIVYADSVKGRFTISRDNAKNSLYLQMNSLSAEDTALYYCAKDTAYGGKYSAFDYWGQGTLVTVSSGGGGQGGGGQGGGGQEIVLTQSPATLSVSPGERATLSCRASQSVSRNLAWYQQKPGQAPRRLIYGASTRATGIPDRFSGSGSGTDFTLTISRLEPEDFAVYYCQQYNNWPLTFGCGTKVEIKSGGGGQEVQLVESGGGLVQPGGSLKLSCAASGFTFNKYAMNWVRQAPGKGLEWVARIRSKYNNYATYYADSVKDRFTISRDDSKNTAYLQMNNLKTEDTAVYYCVRHGNFGNSYISYWAYWGQGTLVTVSSGGGGQGGGGQGGGGQQTVVTQEPSLTVSPGGTVTLTCGSSTGAVTSGNYPNWVQQKPGQAPRGLIGGTKFLAPGTPARFSGSLLGGKAALTLSGVQPEDEAEYYCVLWYSNRWVFGGGTKLTVL

SEQ ID NO: 3238 - protein, 744 aa, Artificial Sequence
  Synthetic
QVQLVQSGAEVKKPGASVKVSCKASGYTFTSYGISWVRQAPGQCLEWMGWISAYNGNTVYAQKLQDRVTMTTDTSTSTAYMELRSLRSDDTAVYFCVRDGDPLDYWGQGTLVTVSSGGGGSGGGGSGGGGSEIVLTQSPGTLSLSPGERATLSCRASQSVSSNLAWYQQKPGQAPRLLIYGASTRATGIPARFSGSGSGTEFTLTISSLQSEDFAVYYCQQYHTWPPVTFGCGTKVEIKSGGGGSEVQLVESGGGLVQPGRSLRLSCAASGFTFHDYPMHWVRQAPGKCLEWVSGISWNSDYIVYADSVKGRFTISRDNAKNSLYLQMNSLSAEDTALYYCAKDTAYGGKYSAFDYWGQGTLVTVSSGGGGSGGGGSGGGGSEIVLTQSPATLSVSPGERATLSCRASQSVSRNLAWYQQKPGQAPRRLIYGASTRATGIPDRFSGSGSGTDFTLTISRLEPEDFAVYYCQQYNNWPLTFGCGTKVEIKSGGGGSEVQLVESGGGLVQPGGSLKLSCAASGFTFNKYAINWVRQAPGKGLEWVARIRSKYNNYATYYADAVKDRFTISRDDSKNTVYLQMNNLKTEDTAVYYCARAGNFGSSYISYWAYWGQGTLVTVSSGGGGSGGGGSGGGGSQTVVTQEPSLTVSPGGTVTITCGSSTGAVTSGNYPNWVQKKPGQAPRGLIGGTKFLAPGTPARFSGSLSGGKAALTLSGVQPEDEAEYYCVLWYSNRWVFGSGTKLTVL

SEQ ID NO: 3239 - protein, 744 aa, Artificial Sequence
  Synthetic
QVQLVQSGAEVKKPGASVKVSCKASGYTFTSYGISWVRQAPGQCLEWMGWISAYNGNTVYAQKLQDRVTMTTDTSTSTAYMELRSLRSDDTAVYFCVRDGDPLDYWGQGTLVTVSSGGGGQGGGGQGGGGQEIVLTQSPGTLSLSPGERATLSCRASQSVSSNLAWYQQKPGQAPRLLIYGASTRATGIPARFSGSGSGTEFTLTISSLQSEDFAVYYCQQYHTWPPVTFGCGTKVEIKSGGGGQEVQLVESGGGLVQPGRSLRLSCAASGFTFHDYPMHWVRQAPGKCLEWVSGISWNSDYIVYADSVKGRFTISRDNAKNSLYLQMNSLSAEDTALYYCAKDTAYGGKYSAFDYWGQGTLVTVSSGGGGQGGGGQGGGGQEIVLTQSPATLSVSPGERATLSCRASQSVSRNLAWYQQKPGQAPRRLIYGASTRATGIPDRFSGSGSGTDFTLTISRLEPEDFAVYYCQQYNNWPLTFGCGTKVEIKSGGGGQEVQLVESGGGLVQPGGSLKLSCAASGFTFNKYAINWVRQAPGKGLEWVARIRSKYNNYATYYADAVKDRFTISRDDSKNTVYLQMNNLKTEDTAVYYCARAGNFGSSYISYWAYWGQGTLVTVSSGGGGQGGGGQGGGGQQTVVTQEPSLTVSPGGTVTITCGSSTGAVTSGNYPNWVQKKPGQAPRGLIGGTKFLAPGTPARFSGSLSGGKAALTLSGVQPEDEAEYYCVLWYSNRWVFGSGTKLTVL

SEQ ID NO: 3240 - protein, 1232 aa, Artificial Sequence
  Synthetic
QVQLVQSGAEVKKPGASVKVSCKASGYTFTSYGISWVRQAPGQCLEWMGWISAYNGNTVYAQKLQDRVTMTTDTSTSTAYMELRSLRSDDTAVYFCVRDGDPLDYWGQGTLVTVSSGGGGSGGGGSGGGGSEIVLTQSPGTLSLSPGERATLSCRASQSVSSNLAWYQQKPGQAPRLLIYGASTRATGIPARFSGSGSGTEFTLTISSLQSEDFAVYYCQQYHTWPPVTFGCGTKVEIKSGGGGSEVQLVESGGGLVQPGRSLRLSCAASGFTFHDYPMHWVRQAPGKCLEWVSGISWNSDYIVYADSVKGRFTISRDNAKNSLYLQMNSLSAEDTALYYCAKDTAYGGKYSAFDYWGQGTLVTVSSGGGGSGGGGSGGGGSEIVLTQSPATLSVSPGERATLSCRASQSVSRNLAWYQQKPGQAPRRLIYGASTRATGIPDRFSGSGSGTDFTLTISRLEPEDFAVYYCQQYNNWPLTFGCGTKVEIKSGGGGSEVQLVESGGGLVQPGGSLKLSCAASGFTFNKYAMNWVRQAPGKGLEWVARIRSKYNNYATYYADSVKDRFTISRDDSKNTAYLQMNNLKTEDTAVYYCVRHGNFGNSYISYWAYWGQGTLVTVSSGGGGSGGGGSGGGGSQTVVTQEPSLTVSPGGTVTLTCGSSTGAVTSGNYPNWVQQKPGQAPRGLIGGTKFLAPGTPARFSGSLLGGKAALTLSGVQPEDEAEYYCVLWYSNRWVFGGGTKLTVLGGGGDKTHTCPPCPAPELLGGPSVFLFPPKPKDTLMISRTPEVTCVVVDVSHEDPEVKFNWYVDGVEVHNAKTKPCEEQYGSTYRCVSVLTVLHQDWLNGKEYKCKVSNKALPAPIEKTISKAKGQPREPQVYTLPPSREEMTKNQVSLTCLVKGFYPSDIAVEWESNGQPENNYKTTPPVLDSDGSFFLYSKLTVDKSRWQQGNVFSCSVMHEALHNHYTQKSLSLSPGKGGGGSGGGGSGGGGSGGGGSGGGGSGGGGSDKTHTCPPCPAPELLGGPSVFLFPPKPKDTLMISRTPEVTCVVVDVSHEDPEVKFNWYVDGVEVHNAKTKPCEEQYGSTYRCVSVLTVLHQDWLNGKEYKCKVSNKALPAPIEKTISKAKGQPREPQVYTLPPSREEMTKNQVSLTCLVKGFYPSDIAVEWESNGQPENNYKTTPPVLDSDGSFFLYSKLTVDKSRWQQGNVFSCSVMHEALHNHYTQKSLSLSPGK

SEQ ID NO: 3241 - protein, 1222 aa, Artificial Sequence
  Synthetic
QVQLVQSGAEVKKPGASVKVSCKASGYTFTSYGISWVRQAPGQCLEWMGWISAYNGNTVYAQKLQDRVTMTTDTSTSTAYMELRSLRSDDTAVYFCVRDGDPLDYWGQGTLVTVSSGGGGQGGGGQGGGGQEIVLTQSPGTLSLSPGERATLSCRASQSVSSNLAWYQQKPGQAPRLLIYGASTRATGIPARFSGSGSGTEFTLTISSLQSEDFAVYYCQQYHTWPPVTFGCGTKVEIKSGGGGQEVQLVESGGGLVQPGRSLRLSCAASGFTFHDYPMHWVRQAPGKCLEWVSGISWNSDYIVYADSVKGRFTISRDNAKNSLYLQMNSLSAEDTALYYCAKDTAYGGKYSAFDYWGQGTLVTVSSGGGGQGGGGQGGGGQEIVLTQSPATLSVSPGERATLSCRASQSVSRNLAWYQQKPGQAPRRLIYGASTRATGIPDRFSGSGSGTDFTLTISRLEPEDFAVYYCQQYNNWPLTFGCGTKVEIKSGGGGQEVQLVESGGGLVQPGGSLKLSCAASGFTFNKYAMNWVRQAPGKGLEWVARIRSKYNNYATYYADSVKDRFTISRDDSKNTAYLQMNNLKTEDTAVYYCVRHGNFGNSYISYWAYWGQGTLVTVSSGGGGQGGGGQGGGGQQTVVTQEPSLTVSPGGTVTLTCGSSTGAVTSGNYPNWVQQKPGQAPRGLIGGTKFLAPGTPARFSGSLLGGKAALTLSGVQPEDEAEYYCVLWYSNRWVFGGGTKLTVLGGGGCPPCPAPELLGGPSVFLFPPKPKDTLMISRTPEVTCVVVDVSHEEPEVKFNWYVDGVEVHNAKTKPCEEQYGSTYRCVSVLTVLHQDWLNGKEYKCKVSNKALPAPIEKTISKAKGQPREPQVYTLPPSREEMTKNQVSLTCLVKGFYPSDIAVEWESNGQPENNYKTTPPVLDSDGSFFLYSKLTVDKSRWQQGNVFSCSVMHEALHNHYTQKSLSLSPGKGGGGQGGGGQGGGGQGGGGQGGGGQGGGGQCPPCPAPELLGGPSVFLFPPKPKDTLMISRTPEVTCVVVDVSHEEPEVKFNWYVDGVEVHNAKTKPCEEQYGSTYRCVSVLTVLHQDWLNGKEYKCKVSNKALPAPIEKTISKAKGQPREPQVYTLPPSREEMTKNQVSLTCLVKGFYPSDIAVEWESNGQPENNYKTTPPVLDSDGSFFLYSKLTVDKSRWQQGNVFSCSVMHEALHNHYTQKSLSLSPGK

SEQ ID NO: 3242 - protein, 1232 aa, Artificial Sequence
  Synthetic
QVQLVQSGAEVKKPGASVKVSCKASGYTFTSYGISWVRQAPGQCLEWMGWISAYNGNTVYAQKLQDRVTMTTDTSTSTAYMELRSLRSDDTAVYFCVRDGDPLDYWGQGTLVTVSSGGGGSGGGGSGGGGSEIVLTQSPGTLSLSPGERATLSCRASQSVSSNLAWYQQKPGQAPRLLIYGASTRATGIPARFSGSGSGTEFTLTISSLQSEDFAVYYCQQYHTWPPVTFGCGTKVEIKSGGGGSEVQLVESGGGLVQPGRSLRLSCAASGFTFHDYPMHWVRQAPGKCLEWVSGISWNSDYIVYADSVKGRFTISRDNAKNSLYLQMNSLSAEDTALYYCAKDTAYGGKYSAFDYWGQGTLVTVSSGGGGSGGGGSGGGGSEIVLTQSPATLSVSPGERATLSCRASQSVSRNLAWYQQKPGQAPRRLIYGASTRATGIPDRFSGSGSGTDFTLTISRLEPEDFAVYYCQQYNNWPLTFGCGTKVEIKSGGGGSEVQLVESGGGLVQPGGSLKLSCAASGFTFNKYAINWVRQAPGKGLEWVARIRSKYNNYATYYADAVKDRFTISRDDSKNTVYLQMNNLKTEDTAVYYCARAGNFGSSYISYWAYWGQGTLVTVSSGGGGSGGGGSGGGGSQTVVTQEPSLTVSPGGTVTITCGSSTGAVTSGNYPNWVQKKPGQAPRGLIGGTKFLAPGTPARFSGSLSGGKAALTLSGVQPEDEAEYYCVLWYSNRWVFGSGTKLTVLGGGGDKTHTCPPCPAPELLGGPSVFLFPPKPKDTLMISRTPEVTCVVVDVSHEDPEVKFNWYVDGVEVHNAKTKPCEEQYGSTYRCVSVLTVLHQDWLNGKEYKCKVSNKALPAPIEKTISKAKGQPREPQVYTLPPSREEMTKNQVSLTCLVKGFYPSDIAVEWESNGQPENNYKTTPPVLDSDGSFFLYSKLTVDKSRWQQGNVFSCSVMHEALHNHYTQKSLSLSPGKGGGGSGGGGSGGGGSGGGGSGGGGSGGGGSDKTHTCPPCPAPELLGGPSVFLFPPKPKDTLMISRTPEVTCVVVDVSHEDPEVKFNWYVDGVEVHNAKTKPCEEQYGSTYRCVSVLTVLHQDWLNGKEYKCKVSNKALPAPIEKTISKAKGQPREPQVYTLPPSREEMTKNQVSLTCLVKGFYPSDIAVEWESNGQPENNYKTTPPVLDSDGSFFLYSKLTVDKSRWQQGNVFSCSVMHEALHNHYTQKSLSLSPGK

SEQ ID NO: 3243 - protein, 1222 aa, Artificial Sequence
  Synthetic
QVQLVQSGAEVKKPGASVKVSCKASGYTFTSYGISWVRQAPGQCLEWMGWISAYNGNTVYAQKLQDRVTMTTDTSTSTAYMELRSLRSDDTAVYFCVRDGDPLDYWGQGTLVTVSSGGGGQGGGGQGGGGQEIVLTQSPGTLSLSPGERATLSCRASQSVSSNLAWYQQKPGQAPRLLIYGASTRATGIPARFSGSGSGTEFTLTISSLQSEDFAVYYCQQYHTWPPVTFGCGTKVEIKSGGGGQEVQLVESGGGLVQPGRSLRLSCAASGFTFHDYPMHWVRQAPGKCLEWVSGISWNSDYIVYADSVKGRFTISRDNAKNSLYLQMNSLSAEDTALYYCAKDTAYGGKYSAFDYWGQGTLVTVSSGGGGQGGGGQGGGGQEIVLTQSPATLSVSPGERATLSCRASQSVSRNLAWYQQKPGQAPRRLIYGASTRATGIPDRFSGSGSGTDFTLTISRLEPEDFAVYYCQQYNNWPLTFGCGTKVEIKSGGGGQEVQLVESGGGLVQPGGSLKLSCAASGFTFNKYAINWVRQAPGKGLEWVARIRSKYNNYATYYADAVKDRFTISRDDSKNTVYLQMNNLKTEDTAVYYCARAGNFGSSYISYWAYWGQGTLVTVSSGGGGQGGGGQGGGGQQTVVTQEPSLTVSPGGTVTITCGSSTGAVTSGNYPNWVQKKPGQAPRGLIGGTKFLAPGTPARFSGSLSGGKAALTLSGVQPEDEAEYYCVLWYSNRWVFGSGTKLTVLGGGGCPPCPAPELLGGPSVFLFPPKPKDTLMISRTPEVTCVVVDVSHEEPEVKFNWYVDGVEVHNAKTKPCEEQYGSTYRCVSVLTVLHQDWLNGKEYKCKVSNKALPAPIEKTISKAKGQPREPQVYTLPPSREEMTKNQVSLTCLVKGFYPSDIAVEWESNGQPENNYKTTPPVLDSDGSFFLYSKLTVDKSRWQQGNVFSCSVMHEALHNHYTQKSLSLSPGKGGGGQGGGGQGGGGQGGGGQGGGGQGGGGQCPPCPAPELLGGPSVFLFPPKPKDTLMISRTPEVTCVVVDVSHEEPEVKFNWYVDGVEVHNAKTKPCEEQYGSTYRCVSVLTVLHQDWLNGKEYKCKVSNKALPAPIEKTISKAKGQPREPQVYTLPPSREEMTKNQVSLTCLVKGFYPSDIAVEWESNGQPENNYKTTPPVLDSDGSFFLYSKLTVDKSRWQQGNVFSCSVMHEALHNHYTQKSLSLSPGK

SEQ ID NO: 3244 - protein, 489 aa, Artificial Sequence
  Synthetic
QVQLVQSGAEVKKPGASVKVSCKASGYSFTSYGITWVRQAPGQCLEWMGWISAYNGNTIYAQKLQGRVTMTTDTSTSTAYMELRSLRSDDTAVYYCVRDSNHEDFWGQGTLVTVSSGGGGSGGGGSGGGGSEIVLTQSPATLSVSPGERATLSCRASQSVSSNLAWYQQKPGQAPRLLIYGASTRATGIPARFSGSGSGTEFTLTISSLQSEDFAVYYCQQYHTWPPVTFGCGTKVEIKSGGGGSEVQLVESGGGLVQPGRSLRLSCAASGFTFHDYPMHWVRQAPGKCLEWVSGISWNSDYIVYADSVKGRFTISRDNAKNSLYLQMNSLSAEDTALYYCAKDTAYGGKYSAFDYWGQGTLVTVSSGGGGSGGGGSGGGGSEIVLTQSPATLSVSPGERATLSCRASQSVSRNLAWYQQKPGQAPRRLIYGASTRATGIPDRFSGSGSGTDFTLTISRLEPEDFAVYYCQQYNNWPLTFGCGTKVEIK

SEQ ID NO: 3245 - protein, 489 aa, Artificial Sequence
  Synthetic
QVQLVQSGAEVKKPGASVKVSCKASGYSFTSYGITWVRQAPGQCLEWMGWISAYNGNTIYAQKLQGRVTMTTDTSTSTAYMELRSLRSDDTAVYYCVRDSNHEDFWGQGTLVTVSSGGGGQGGGGQGGGGQEIVLTQSPATLSVSPGERATLSCRASQSVSSNLAWYQQKPGQAPRLLIYGASTRATGIPARFSGSGSGTEFTLTISSLQSEDFAVYYCQQYHTWPPVTFGCGTKVEIKSGGGGQEVQLVESGGGLVQPGRSLRLSCAASGFTFHDYPMHWVRQAPGKCLEWVSGISWNSDYIVYADSVKGRFTISRDNAKNSLYLQMNSLSAEDTALYYCAKDTAYGGKYSAFDYWGQGTLVTVSSGGGGQGGGGQGGGGQEIVLTQSPATLSVSPGERATLSCRASQSVSRNLAWYQQKPGQAPRRLIYGASTRATGIPDRFSGSGSGTDFTLTISRLEPEDFAVYYCQQYNNWPLTFGCGTKVEIK

SEQ ID NO: 3246 - protein, 744 aa, Artificial Sequence
  Synthetic
QVQLVQSGAEVKKPGASVKVSCKASGYSFTSYGITWVRQAPGQCLEWMGWISAYNGNTIYAQKLQGRVTMTTDTSTSTAYMELRSLRSDDTAVYYCVRDSNHEDFWGQGTLVTVSSGGGGSGGGGSGGGGSEIVLTQSPATLSVSPGERATLSCRASQSVSSNLAWYQQKPGQAPRLLIYGASTRATGIPARFSGSGSGTEFTLTISSLQSEDFAVYYCQQYHTWPPVTFGCGTKVEIKSGGGGSEVQLVESGGGLVQPGRSLRLSCAASGFTFHDYPMHWVRQAPGKCLEWVSGISWNSDYIVYADSVKGRFTISRDNAKNSLYLQMNSLSAEDTALYYCAKDTAYGGKYSAFDYWGQGTLVTVSSGGGGSGGGGSGGGGSEIVLTQSPATLSVSPGERATLSCRASQSVSRNLAWYQQKPGQAPRRLIYGASTRATGIPDRFSGSGSGTDFTLTISRLEPEDFAVYYCQQYNNWPLTFGCGTKVEIKSGGGGSEVQLVESGGGLVQPGGSLKLSCAASGFTFNKYAMNWVRQAPGKGLEWVARIRSKYNNYATYYADSVKDRFTISRDDSKNTAYLQMNNLKTEDTAVYYCVRHGNFGNSYISYWAYWGQGTLVTVSSGGGGSGGGGSGGGGSQTVVTQEPSLTVSPGGTVTLTCGSSTGAVTSGNYPNWVQQKPGQAPRGLIGGTKFLAPGTPARFSGSLLGGKAALTLSGVQPEDEAEYYCVLWYSNRWVFGGGTKLTVL

SEQ ID NO: 3247 - protein, 744 aa, Artificial Sequence
  Synthetic
QVQLVQSGAEVKKPGASVKVSCKASGYSFTSYGITWVRQAPGQCLEWMGWISAYNGNTIYAQKLQGRVTMTTDTSTSTAYMELRSLRSDDTAVYYCVRDSNHEDFWGQGTLVTVSSGGGGQGGGGQGGGGQEIVLTQSPATLSVSPGERATLSCRASQSVSSNLAWYQQKPGQAPRLLIYGASTRATGIPARFSGSGSGTEFTLTISSLQSEDFAVYYCQQYHTWPPVTFGCGTKVEIKSGGGGQEVQLVESGGGLVQPGRSLRLSCAASGFTFHDYPMHWVRQAPGKCLEWVSGISWNSDYIVYADSVKGRFTISRDNAKNSLYLQMNSLSAEDTALYYCAKDTAYGGKYSAFDYWGQGTLVTVSSGGGGQGGGGQGGGGQEIVLTQSPATLSVSPGERATLSCRASQSVSRNLAWYQQKPGQAPRRLIYGASTRATGIPDRFSGSGSGTDFTLTISRLEPEDFAVYYCQQYNNWPLTFGCGTKVEIKSGGGGQEVQLVESGGGLVQPGGSLKLSCAASGFTFNKYAMNWVRQAPGKGLEWVARIRSKYNNYATYYADSVKDRFTISRDDSKNTAYLQMNNLKTEDTAVYYCVRHGNFGNSYISYWAYWGQGTLVTVSSGGGGQGGGGQGGGGQQTVVTQEPSLTVSPGGTVTLTCGSSTGAVTSGNYPNWVQQKPGQAPRGLIGGTKFLAPGTPARFSGSLLGGKAALTLSGVQPEDEAEYYCVLWYSNRWVFGGGTKLTVL

SEQ ID NO: 3248 - protein, 744 aa, Artificial Sequence
  Synthetic
QVQLVQSGAEVKKPGASVKVSCKASGYSFTSYGITWVRQAPGQCLEWMGWISAYNGNTIYAQKLQGRVTMTTDTSTSTAYMELRSLRSDDTAVYYCVRDSNHEDFWGQGTLVTVSSGGGGSGGGGSGGGGSEIVLTQSPATLSVSPGERATLSCRASQSVSSNLAWYQQKPGQAPRLLIYGASTRATGIPARFSGSGSGTEFTLTISSLQSEDFAVYYCQQYHTWPPVTFGCGTKVEIKSGGGGSEVQLVESGGGLVQPGRSLRLSCAASGFTFHDYPMHWVRQAPGKCLEWVSGISWNSDYIVYADSVKGRFTISRDNAKNSLYLQMNSLSAEDTALYYCAKDTAYGGKYSAFDYWGQGTLVTVSSGGGGSGGGGSGGGGSEIVLTQSPATLSVSPGERATLSCRASQSVSRNLAWYQQKPGQAPRRLIYGASTRATGIPDRFSGSGSGTDFTLTISRLEPEDFAVYYCQQYNNWPLTFGCGTKVEIKSGGGGSEVQLVESGGGLVQPGGSLKLSCAASGFTFNKYAINWVRQAPGKGLEWVARIRSKYNNYATYYADAVKDRFTISRDDSKNTVYLQMNNLKTEDTAVYYCARAGNFGSSYISYWAYWGQGTLVTVSSGGGGSGGGGSGGGGSQTVVTQEPSLTVSPGGTVTITCGSSTGAVTSGNYPNWVQKKPGQAPRGLIGGTKFLAPGTPARFSGSLSGGKAALTLSGVQPEDEAEYYCVLWYSNRWVFGSGTKLTVL

SEQ ID NO: 3249 - protein, 744 aa, Artificial Sequence
  Synthetic
QVQLVQSGAEVKKPGASVKVSCKASGYSFTSYGITWVRQAPGQCLEWMGWISAYNGNTIYAQKLQGRVTMTTDTSTSTAYMELRSLRSDDTAVYYCVRDSNHEDFWGQGTLVTVSSGGGGQGGGGQGGGGQEIVLTQSPATLSVSPGERATLSCRASQSVSSNLAWYQQKPGQAPRLLIYGASTRATGIPARFSGSGSGTEFTLTISSLQSEDFAVYYCQQYHTWPPVTFGCGTKVEIKSGGGGQEVQLVESGGGLVQPGRSLRLSCAASGFTFHDYPMHWVRQAPGKCLEWVSGISWNSDYIVYADSVKGRFTISRDNAKNSLYLQMNSLSAEDTALYYCAKDTAYGGKYSAFDYWGQGTLVTVSSGGGGQGGGGQGGGGQEIVLTQSPATLSVSPGERATLSCRASQSVSRNLAWYQQKPGQAPRRLIYGASTRATGIPDRFSGSGSGTDFTLTISRLEPEDFAVYYCQQYNNWPLTFGCGTKVEIKSGGGGQEVQLVESGGGLVQPGGSLKLSCAASGFTFNKYAINWVRQAPGKGLEWVARIRSKYNNYATYYADAVKDRFTISRDDSKNTVYLQMNNLKTEDTAVYYCARAGNFGSSYISYWAYWGQGTLVTVSSGGGGQGGGGQGGGGQQTVVTQEPSLTVSPGGTVTITCGSSTGAVTSGNYPNWVQKKPGQAPRGLIGGTKFLAPGTPARFSGSLSGGKAALTLSGVQPEDEAEYYCVLWYSNRWVFGSGTKLTVL

SEQ ID NO: 3250 - protein, 1232 aa, Artificial Sequence
  Synthetic
QVQLVQSGAEVKKPGASVKVSCKASGYSFTSYGITWVRQAPGQCLEWMGWISAYNGNTIYAQKLQGRVTMTTDTSTSTAYMELRSLRSDDTAVYYCVRDSNHEDFWGQGTLVTVSSGGGGSGGGGSGGGGSEIVLTQSPATLSVSPGERATLSCRASQSVSSNLAWYQQKPGQAPRLLIYGASTRATGIPARFSGSGSGTEFTLTISSLQSEDFAVYYCQQYHTWPPVTFGCGTKVEIKSGGGGSEVQLVESGGGLVQPGRSLRLSCAASGFTFHDYPMHWVRQAPGKCLEWVSGISWNSDYIVYADSVKGRFTISRDNAKNSLYLQMNSLSAEDTALYYCAKDTAYGGKYSAFDYWGQGTLVTVSSGGGGSGGGGSGGGGSEIVLTQSPATLSVSPGERATLSCRASQSVSRNLAWYQQKPGQAPRRLIYGASTRATGIPDRFSGSGSGTDFTLTISRLEPEDFAVYYCQQYNNWPLTFGCGTKVEIKSGGGGSEVQLVESGGGLVQPGGSLKLSCAASGFTFNKYAMNWVRQAPGKGLEWVARIRSKYNNYATYYADSVKDRFTISRDDSKNTAYLQMNNLKTEDTAVYYCVRHGNFGNSYISYWAYWGQGTLVTVSSGGGGSGGGGSGGGGSQTVVTQEPSLTVSPGGTVTLTCGSSTGAVTSGNYPNWVQQKPGQAPRGLIGGTKFLAPGTPARFSGSLLGGKAALTLSGVQPEDEAEYYCVLWYSNRWVFGGGTKLTVLGGGGDKTHTCPPCPAPELLGGPSVFLFPPKPKDTLMISRTPEVTCVVVDVSHEDPEVKFNWYVDGVEVHNAKTKPCEEQYGSTYRCVSVLTVLHQDWLNGKEYKCKVSNKALPAPIEKTISKAKGQPREPQVYTLPPSREEMTKNQVSLTCLVKGFYPSDIAVEWESNGQPENNYKTTPPVLDSDGSFFLYSKLTVDKSRWQQGNVFSCSVMHEALHNHYTQKSLSLSPGKGGGGSGGGGSGGGGSGGGGSGGGGSGGGGSDKTHTCPPCPAPELLGGPSVFLFPPKPKDTLMISRTPEVTCVVVDVSHEDPEVKFNWYVDGVEVHNAKTKPCEEQYGSTYRCVSVLTVLHQDWLNGKEYKCKVSNKALPAPIEKTISKAKGQPREPQVYTLPPSREEMTKNQVSLTCLVKGFYPSDIAVEWESNGQPENNYKTTPPVLDSDGSFFLYSKLTVDKSRWQQGNVFSCSVMHEALHNHYTQKSLSLSPGK

SEQ ID NO: 3251 - protein, 1222 aa, Artificial Sequence
  Synthetic
QVQLVQSGAEVKKPGASVKVSCKASGYSFTSYGITWVRQAPGQCLEWMGWISAYNGNTIYAQKLQGRVTMTTDTSTSTAYMELRSLRSDDTAVYYCVRDSNHEDFWGQGTLVTVSSGGGGQGGGGQGGGGQEIVLTQSPATLSVSPGERATLSCRASQSVSSNLAWYQQKPGQAPRLLIYGASTRATGIPARFSGSGSGTEFTLTISSLQSEDFAVYYCQQYHTWPPVTFGCGTKVEIKSGGGGQEVQLVESGGGLVQPGRSLRLSCAASGFTFHDYPMHWVRQAPGKCLEWVSGISWNSDYIVYADSVKGRFTISRDNAKNSLYLQMNSLSAEDTALYYCAKDTAYGGKYSAFDYWGQGTLVTVSSGGGGQGGGGQGGGGQEIVLTQSPATLSVSPGERATLSCRASQSVSRNLAWYQQKPGQAPRRLIYGASTRATGIPDRFSGSGSGTDFTLTISRLEPEDFAVYYCQQYNNWPLTFGCGTKVEIKSGGGGQEVQLVESGGGLVQPGGSLKLSCAASGFTFNKYAMNWVRQAPGKGLEWVARIRSKYNNYATYYADSVKDRFTISRDDSKNTAYLQMNNLKTEDTAVYYCVRHGNFGNSYISYWAYWGQGTLVTVSSGGGGQGGGGQGGGGQQTVVTQEPSLTVSPGGTVTLTCGSSTGAVTSGNYPNWVQQKPGQAPRGLIGGTKFLAPGTPARFSGSLLGGKAALTLSGVQPEDEAEYYCVLWYSNRWVFGGGTKLTVLGGGGCPPCPAPELLGGPSVFLFPPKPKDTLMISRTPEVTCVVVDVSHEEPEVKFNWYVDGVEVHNAKTKPCEEQYGSTYRCVSVLTVLHQDWLNGKEYKCKVSNKALPAPIEKTISKAKGQPREPQVYTLPPSREEMTKNQVSLTCLVKGFYPSDIAVEWESNGQPENNYKTTPPVLDSDGSFFLYSKLTVDKSRWQQGNVFSCSVMHEALHNHYTQKSLSLSPGKGGGGQGGGGQGGGGQGGGGQGGGGQGGGGQCPPCPAPELLGGPSVFLFPPKPKDTLMISRTPEVTCVVVDVSHEEPEVKFNWYVDGVEVHNAKTKPCEEQYGSTYRCVSVLTVLHQDWLNGKEYKCKVSNKALPAPIEKTISKAKGQPREPQVYTLPPSREEMTKNQVSLTCLVKGFYPSDIAVEWESNGQPENNYKTTPPVLDSDGSFFLYSKLTVDKSRWQQGNVFSCSVMHEALHNHYTQKSLSLSPGK

SEQ ID NO: 3252 - protein, 1232 aa, Artificial Sequence
  Synthetic
QVQLVQSGAEVKKPGASVKVSCKASGYSFTSYGITWVRQAPGQCLEWMGWISAYNGNTIYAQKLQGRVTMTTDTSTSTAYMELRSLRSDDTAVYYCVRDSNHEDFWGQGTLVTVSSGGGGSGGGGSGGGGSEIVLTQSPATLSVSPGERATLSCRASQSVSSNLAWYQQKPGQAPRLLIYGASTRATGIPARFSGSGSGTEFTLTISSLQSEDFAVYYCQQYHTWPPVTFGCGTKVEIKSGGGGSEVQLVESGGGLVQPGRSLRLSCAASGFTFHDYPMHWVRQAPGKCLEWVSGISWNSDYIVYADSVKGRFTISRDNAKNSLYLQMNSLSAEDTALYYCAKDTAYGGKYSAFDYWGQGTLVTVSSGGGGSGGGGSGGGGSEIVLTQSPATLSVSPGERATLSCRASQSVSRNLAWYQQKPGQAPRRLIYGASTRATGIPDRFSGSGSGTDFTLTISRLEPEDFAVYYCQQYNNWPLTFGCGTKVEIKSGGGGSEVQLVESGGGLVQPGGSLKLSCAASGFTFNKYAINWVRQAPGKGLEWVARIRSKYNNYATYYADAVKDRFTISRDDSKNTVYLQMNNLKTEDTAVYYCARAGNFGSSYISYWAYWGQGTLVTVSSGGGGSGGGGSGGGGSQTVVTQEPSLTVSPGGTVTITCGSSTGAVTSGNYPNWVQKKPGQAPRGLIGGTKFLAPGTPARFSGSLSGGKAALTLSGVQPEDEAEYYCVLWYSNRWVFGSGTKLTVLGGGGDKTHTCPPCPAPELLGGPSVFLFPPKPKDTLMISRTPEVTCVVVDVSHEDPEVKFNWYVDGVEVHNAKTKPCEEQYGSTYRCVSVLTVLHQDWLNGKEYKCKVSNKALPAPIEKTISKAKGQPREPQVYTLPPSREEMTKNQVSLTCLVKGFYPSDIAVEWESNGQPENNYKTTPPVLDSDGSFFLYSKLTVDKSRWQQGNVFSCSVMHEALHNHYTQKSLSLSPGKGGGGSGGGGSGGGGSGGGGSGGGGSGGGGSDKTHTCPPCPAPELLGGPSVFLFPPKPKDTLMISRTPEVTCVVVDVSHEDPEVKFNWYVDGVEVHNAKTKPCEEQYGSTYRCVSVLTVLHQDWLNGKEYKCKVSNKALPAPIEKTISKAKGQPREPQVYTLPPSREEMTKNQVSLTCLVKGFYPSDIAVEWESNGQPENNYKTTPPVLDSDGSFFLYSKLTVDKSRWQQGNVFSCSVMHEALHNHYTQKSLSLSPGK

SEQ ID NO: 3253 - protein, 1222 aa, Artificial Sequence
  Synthetic
QVQLVQSGAEVKKPGASVKVSCKASGYSFTSYGITWVRQAPGQCLEWMGWISAYNGNTIYAQKLQGRVTMTTDTSTSTAYMELRSLRSDDTAVYYCVRDSNHEDFWGQGTLVTVSSGGGGQGGGGQGGGGQEIVLTQSPATLSVSPGERATLSCRASQSVSSNLAWYQQKPGQAPRLLIYGASTRATGIPARFSGSGSGTEFTLTISSLQSEDFAVYYCQQYHTWPPVTFGCGTKVEIKSGGGGQEVQLVESGGGLVQPGRSLRLSCAASGFTFHDYPMHWVRQAPGKCLEWVSGISWNSDYIVYADSVKGRFTISRDNAKNSLYLQMNSLSAEDTALYYCAKDTAYGGKYSAFDYWGQGTLVTVSSGGGGQGGGGQGGGGQEIVLTQSPATLSVSPGERATLSCRASQSVSRNLAWYQQKPGQAPRRLIYGASTRATGIPDRFSGSGSGTDFTLTISRLEPEDFAVYYCQQYNNWPLTFGCGTKVEIKSGGGGQEVQLVESGGGLVQPGGSLKLSCAASGFTFNKYAINWVRQAPGKGLEWVARIRSKYNNYATYYADAVKDRFTISRDDSKNTVYLQMNNLKTEDTAVYYCARAGNFGSSYISYWAYWGQGTLVTVSSGGGGQGGGGQGGGGQQTVVTQEPSLTVSPGGTVTITCGSSTGAVTSGNYPNWVQKKPGQAPRGLIGGTKFLAPGTPARFSGSLSGGKAALTLSGVQPEDEAEYYCVLWYSNRWVFGSGTKLTVLGGGGCPPCPAPELLGGPSVFLFPPKPKDTLMISRTPEVTCVVVDVSHEEPEVKFNWYVDGVEVHNAKTKPCEEQYGSTYRCVSVLTVLHQDWLNGKEYKCKVSNKALPAPIEKTISKAKGQPREPQVYTLPPSREEMTKNQVSLTCLVKGFYPSDIAVEWESNGQPENNYKTTPPVLDSDGSFFLYSKLTVDKSRWQQGNVFSCSVMHEALHNHYTQKSLSLSPGKGGGGQGGGGQGGGGQGGGGQGGGGQGGGGQCPPCPAPELLGGPSVFLFPPKPKDTLMISRTPEVTCVVVDVSHEEPEVKFNWYVDGVEVHNAKTKPCEEQYGSTYRCVSVLTVLHQDWLNGKEYKCKVSNKALPAPIEKTISKAKGQPREPQVYTLPPSREEMTKNQVSLTCLVKGFYPSDIAVEWESNGQPENNYKTTPPVLDSDGSFFLYSKLTVDKSRWQQGNVFSCSVMHEALHNHYTQKSLSLSPGK

SEQ ID NO: 3254 - protein, 491 aa, Artificial Sequence
  Synthetic
QVQLVQSGAEVKKPGESLKISCKGSGYSFTSYGISWVRQAPGQCLEWMGWISAYNGNTIYAQKLQGRVTMTTDTSTSTAYMELRRLRSDDTAVYYCARDPGVTGDDYWGQGTLVTVSSGGGGSGGGGSGGGGSEIVLTQSPATLSVSPGERATLSCRASLSVSSNLAWYQQKPGQAPRLLIYGASTRATGIPARFSGSGSGTEFTLTISSLQSEDFAVYFCQQYHSWPALTFGCGTKVEIKSGGGGSEVQLVESGGGLVQPGRSLRLSCAASGFTFHDYPMHWVRQAPGKCLEWVSGISWNSDYIVYADSVKGRFTISRDNAKNSLYLQMNSLSAEDTALYYCAKDTAYGGKYSAFDYWGQGTLVTVSSGGGGSGGGGSGGGGSEIVLTQSPATLSVSPGERATLSCRASQSVSRNLAWYQQKPGQAPRRLIYGASTRATGIPDRFSGSGSGTDFTLTISRLEPEDFAVYYCQQYNNWPLTFGCGTKVEIK

SEQ ID NO: 3255 - protein, 491 aa, Artificial Sequence
  Synthetic
QVQLVQSGAEVKKPGESLKISCKGSGYSFTSYGISWVRQAPGQCLEWMGWISAYNGNTIYAQKLQGRVTMTTDTSTSTAYMELRRLRSDDTAVYYCARDPGVTGDDYWGQGTLVTVSSGGGGQGGGGQGGGGQEIVLTQSPATLSVSPGERATLSCRASLSVSSNLAWYQQKPGQAPRLLIYGASTRATGIPARFSGSGSGTEFTLTISSLQSEDFAVYFCQQYHSWPALTFGCGTKVEIKSGGGGQEVQLVESGGGLVQPGRSLRLSCAASGFTFHDYPMHWVRQAPGKCLEWVSGISWNSDYIVYADSVKGRFTISRDNAKNSLYLQMNSLSAEDTALYYCAKDTAYGGKYSAFDYWGQGTLVTVSSGGGGQGGGGQGGGGQEIVLTQSPATLSVSPGERATLSCRASQSVSRNLAWYQQKPGQAPRRLIYGASTRATGIPDRFSGSGSGTDFTLTISRLEPEDFAVYYCQQYNNWPLTFGCGTKVEIK

SEQ ID NO: 3256 - protein, 746 aa, Artificial Sequence
  Synthetic
QVQLVQSGAEVKKPGESLKISCKGSGYSFTSYGISWVRQAPGQCLEWMGWISAYNGNTIYAQKLQGRVTMTTDTSTSTAYMELRRLRSDDTAVYYCARDPGVTGDDYWGQGTLVTVSSGGGGSGGGGSGGGGSEIVLTQSPATLSVSPGERATLSCRASLSVSSNLAWYQQKPGQAPRLLIYGASTRATGIPARFSGSGSGTEFTLTISSLQSEDFAVYFCQQYHSWPALTFGCGTKVEIKSGGGGSEVQLVESGGGLVQPGRSLRLSCAASGFTFHDYPMHWVRQAPGKCLEWVSGISWNSDYIVYADSVKGRFTISRDNAKNSLYLQMNSLSAEDTALYYCAKDTAYGGKYSAFDYWGQGTLVTVSSGGGGSGGGGSGGGGSEIVLTQSPATLSVSPGERATLSCRASQSVSRNLAWYQQKPGQAPRRLIYGASTRATGIPDRFSGSGSGTDFTLTISRLEPEDFAVYYCQQYNNWPLTFGCGTKVEIKSGGGGSEVQLVESGGGLVQPGGSLKLSCAASGFTFNKYAMNWVRQAPGKGLEWVARIRSKYNNYATYYADSVKDRFTISRDDSKNTAYLQMNNLKTEDTAVYYCVRHGNFGNSYISYWAYWGQGTLVTVSSGGGGSGGGGSGGGGSQTVVTQEPSLTVSPGGTVTLTCGSSTGAVTSGNYPNWVQQKPGQAPRGLIGGTKFLAPGTPARFSGSLLGGKAALTLSGVQPEDEAEYYCVLWYSNRWVFGGGTKLTVL

SEQ ID NO: 3257 - protein, 746 aa, Artificial Sequence
  Synthetic
QVQLVQSGAEVKKPGESLKISCKGSGYSFTSYGISWVRQAPGQCLEWMGWISAYNGNTIYAQKLQGRVTMTTDTSTSTAYMELRRLRSDDTAVYYCARDPGVTGDDYWGQGTLVTVSSGGGGQGGGGQGGGGQEIVLTQSPATLSVSPGERATLSCRASLSVSSNLAWYQQKPGQAPRLLIYGASTRATGIPARFSGSGSGTEFTLTISSLQSEDFAVYFCQQYHSWPALTFGCGTKVEIKSGGGGQEVQLVESGGGLVQPGRSLRLSCAASGFTFHDYPMHWVRQAPGKCLEWVSGISWNSDYIVYADSVKGRFTISRDNAKNSLYLQMNSLSAEDTALYYCAKDTAYGGKYSAFDYWGQGTLVTVSSGGGGQGGGGQGGGGQEIVLTQSPATLSVSPGERATLSCRASQSVSRNLAWYQQKPGQAPRRLIYGASTRATGIPDRFSGSGSGTDFTLTISRLEPEDFAVYYCQQYNNWPLTFGCGTKVEIKSGGGGQEVQLVESGGGLVQPGGSLKLSCAASGFTFNKYAMNWVRQAPGKGLEWVARIRSKYNNYATYYADSVKDRFTISRDDSKNTAYLQMNNLKTEDTAVYYCVRHGNFGNSYISYWAYWGQGTLVTVSSGGGGQGGGGQGGGGQQTVVTQEPSLTVSPGGTVTLTCGSSTGAVTSGNYPNWVQQKPGQAPRGLIGGTKFLAPGTPARFSGSLLGGKAALTLSGVQPEDEAEYYCVLWYSNRWVFGGGTKLTVL

SEQ ID NO: 3258 - protein, 746 aa, Artificial Sequence
  Synthetic
QVQLVQSGAEVKKPGESLKISCKGSGYSFTSYGISWVRQAPGQCLEWMGWISAYNGNTIYAQKLQGRVTMTTDTSTSTAYMELRRLRSDDTAVYYCARDPGVTGDDYWGQGTLVTVSSGGGGSGGGGSGGGGSEIVLTQSPATLSVSPGERATLSCRASLSVSSNLAWYQQKPGQAPRLLIYGASTRATGIPARFSGSGSGTEFTLTISSLQSEDFAVYFCQQYHSWPALTFGCGTKVEIKSGGGGSEVQLVESGGGLVQPGRSLRLSCAASGFTFHDYPMHWVRQAPGKCLEWVSGISWNSDYIVYADSVKGRFTISRDNAKNSLYLQMNSLSAEDTALYYCAKDTAYGGKYSAFDYWGQGTLVTVSSGGGGSGGGGSGGGGSEIVLTQSPATLSVSPGERATLSCRASQSVSRNLAWYQQKPGQAPRRLIYGASTRATGIPDRFSGSGSGTDFTLTISRLEPEDFAVYYCQQYNNWPLTFGCGTKVEIKSGGGGSEVQLVESGGGLVQPGGSLKLSCAASGFTFNKYAINWVRQAPGKGLEWVARIRSKYNNYATYYADAVKDRFTISRDDSKNTVYLQMNNLKTEDTAVYYCARAGNFGSSYISYWAYWGQGTLVTVSSGGGGSGGGGSGGGGSQTVVTQEPSLTVSPGGTVTITCGSSTGAVTSGNYPNWVQKKPGQAPRGLIGGTKFLAPGTPARFSGSLSGGKAALTLSGVQPEDEAEYYCVLWYSNRWVFGSGTKLTVL

SEQ ID NO: 3259 - protein, 746 aa, Artificial Sequence
  Synthetic
QVQLVQSGAEVKKPGESLKISCKGSGYSFTSYGISWVRQAPGQCLEWMGWISAYNGNTIYAQKLQGRVTMTTDTSTSTAYMELRRLRSDDTAVYYCARDPGVTGDDYWGQGTLVTVSSGGGGQGGGGQGGGGQEIVLTQSPATLSVSPGERATLSCRASLSVSSNLAWYQQKPGQAPRLLIYGASTRATGIPARFSGSGSGTEFTLTISSLQSEDFAVYFCQQYHSWPALTFGCGTKVEIKSGGGGQEVQLVESGGGLVQPGRSLRLSCAASGFTFHDYPMHWVRQAPGKCLEWVSGISWNSDYIVYADSVKGRFTISRDNAKNSLYLQMNSLSAEDTALYYCAKDTAYGGKYSAFDYWGQGTLVTVSSGGGGQGGGGQGGGGQEIVLTQSPATLSVSPGERATLSCRASQSVSRNLAWYQQKPGQAPRRLIYGASTRATGIPDRFSGSGSGTDFTLTISRLEPEDFAVYYCQQYNNWPLTFGCGTKVEIKSGGGGQEVQLVESGGGLVQPGGSLKLSCAASGFTFNKYAINWVRQAPGKGLEWVARIRSKYNNYATYYADAVKDRFTISRDDSKNTVYLQMNNLKTEDTAVYYCARAGNFGSSYISYWAYWGQGTLVTVSSGGGGQGGGGQGGGGQQTVVTQEPSLTVSPGGTVTITCGSSTGAVTSGNYPNWVQKKPGQAPRGLIGGTKFLAPGTPARFSGSLSGGKAALTLSGVQPEDEAEYYCVLWYSNRWVFGSGTKLTVL

SEQ ID NO: 3260 - protein, 1234 aa, Artificial Sequence
  Synthetic
QVQLVQSGAEVKKPGESLKISCKGSGYSFTSYGISWVRQAPGQCLEWMGWISAYNGNTIYAQKLQGRVTMTTDTSTSTAYMELRRLRSDDTAVYYCARDPGVTGDDYWGQGTLVTVSSGGGGSGGGGSGGGGSEIVLTQSPATLSVSPGERATLSCRASLSVSSNLAWYQQKPGQAPRLLIYGASTRATGIPARFSGSGSGTEFTLTISSLQSEDFAVYFCQQYHSWPALTFGCGTKVEIKSGGGGSEVQLVESGGGLVQPGRSLRLSCAASGFTFHDYPMHWVRQAPGKCLEWVSGISWNSDYIVYADSVKGRFTISRDNAKNSLYLQMNSLSAEDTALYYCAKDTAYGGKYSAFDYWGQGTLVTVSSGGGGSGGGGSGGGGSEIVLTQSPATLSVSPGERATLSCRASQSVSRNLAWYQQKPGQAPRRLIYGASTRATGIPDRFSGSGSGTDFTLTISRLEPEDFAVYYCQQYNNWPLTFGCGTKVEIKSGGGGSEVQLVESGGGLVQPGGSLKLSCAASGFTFNKYAMNWVRQAPGKGLEWVARIRSKYNNYATYYADSVKDRFTISRDDSKNTAYLQMNNLKTEDTAVYYCVRHGNFGNSYISYWAYWGQGTLVTVSSGGGGSGGGGSGGGGSQTVVTQEPSLTVSPGGTVTLTCGSSTGAVTSGNYPNWVQQKPGQAPRGLIGGTKFLAPGTPARFSGSLLGGKAALTLSGVQPEDEAEYYCVLWYSNRWVFGGGTKLTVLGGGGDKTHTCPPCPAPELLGGPSVFLFPPKPKDTLMISRTPEVTCVVVDVSHEDPEVKFNWYVDGVEVHNAKTKPCEEQYGSTYRCVSVLTVLHQDWLNGKEYKCKVSNKALPAPIEKTISKAKGQPREPQVYTLPPSREEMTKNQVSLTCLVKGFYPSDIAVEWESNGQPENNYKTTPPVLDSDGSFFLYSKLTVDKSRWQQGNVFSCSVMHEALHNHYTQKSLSLSPGKGGGGSGGGGSGGGGSGGGGSGGGGSGGGGSDKTHTCPPCPAPELLGGPSVFLFPPKPKDTLMISRTPEVTCVVVDVSHEDPEVKFNWYVDGVEVHNAKTKPCEEQYGSTYRCVSVLTVLHQDWLNGKEYKCKVSNKALPAPIEKTISKAKGQPREPQVYTLPPSREEMTKNQVSLTCLVKGFYPSDIAVEWESNGQPENNYKTTPPVLDSDGSFFLYSKLTVDKSRWQQGNVFSCSVMHEALHNHYTQKSLSLSPGK

SEQ ID NO: 3261 - protein, 1224 aa, Artificial Sequence
  Synthetic
QVQLVQSGAEVKKPGESLKISCKGSGYSFTSYGISWVRQAPGQCLEWMGWISAYNGNTIYAQKLQGRVTMTTDTSTSTAYMELRRLRSDDTAVYYCARDPGVTGDDYWGQGTLVTVSSGGGGQGGGGQGGGGQEIVLTQSPATLSVSPGERATLSCRASLSVSSNLAWYQQKPGQAPRLLIYGASTRATGIPARFSGSGSGTEFTLTISSLQSEDFAVYFCQQYHSWPALTFGCGTKVEIKSGGGGQEVQLVESGGGLVQPGRSLRLSCAASGFTFHDYPMHWVRQAPGKCLEWVSGISWNSDYIVYADSVKGRFTISRDNAKNSLYLQMNSLSAEDTALYYCAKDTAYGGKYSAFDYWGQGTLVTVSSGGGGQGGGGQGGGGQEIVLTQSPATLSVSPGERATLSCRASQSVSRNLAWYQQKPGQAPRRLIYGASTRATGIPDRFSGSGSGTDFTLTISRLEPEDFAVYYCQQYNNWPLTFGCGTKVEIKSGGGGQEVQLVESGGGLVQPGGSLKLSCAASGFTFNKYAMNWVRQAPGKGLEWVARIRSKYNNYATYYADSVKDRFTISRDDSKNTAYLQMNNLKTEDTAVYYCVRHGNFGNSYISYWAYWGQGTLVTVSSGGGGQGGGGQGGGGQQTVVTQEPSLTVSPGGTVTLTCGSSTGAVTSGNYPNWVQQKPGQAPRGLIGGTKFLAPGTPARFSGSLLGGKAALTLSGVQPEDEAEYYCVLWYSNRWVFGGGTKLTVLGGGGCPPCPAPELLGGPSVFLFPPKPKDTLMISRTPEVTCVVVDVSHEEPEVKFNWYVDGVEVHNAKTKPCEEQYGSTYRCVSVLTVLHQDWLNGKEYKCKVSNKALPAPIEKTISKAKGQPREPQVYTLPPSREEMTKNQVSLTCLVKGFYPSDIAVEWESNGQPENNYKTTPPVLDSDGSFFLYSKLTVDKSRWQQGNVFSCSVMHEALHNHYTQKSLSLSPGKGGGGQGGGGQGGGGQGGGGQGGGGQGGGGQCPPCPAPELLGGPSVFLFPPKPKDTLMISRTPEVTCVVVDVSHEEPEVKFNWYVDGVEVHNAKTKPCEEQYGSTYRCVSVLTVLHQDWLNGKEYKCKVSNKALPAPIEKTISKAKGQPREPQVYTLPPSREEMTKNQVSLTCLVKGFYPSDIAVEWESNGQPENNYKTTPPVLDSDGSFFLYSKLTVDKSRWQQGNVFSCSVMHEALHNHYTQKSLSLSPGK

SEQ ID NO: 3262 - protein, 1234 aa, Artificial Sequence
  Synthetic
QVQLVQSGAEVKKPGESLKISCKGSGYSFTSYGISWVRQAPGQCLEWMGWISAYNGNTIYAQKLQGRVTMTTDTSTSTAYMELRRLRSDDTAVYYCARDPGVTGDDYWGQGTLVTVSSGGGGSGGGGSGGGGSEIVLTQSPATLSVSPGERATLSCRASLSVSSNLAWYQQKPGQAPRLLIYGASTRATGIPARFSGSGSGTEFTLTISSLQSEDFAVYFCQQYHSWPALTFGCGTKVEIKSGGGGSEVQLVESGGGLVQPGRSLRLSCAASGFTFHDYPMHWVRQAPGKCLEWVSGISWNSDYIVYADSVKGRFTISRDNAKNSLYLQMNSLSAEDTALYYCAKDTAYGGKYSAFDYWGQGTLVTVSSGGGGSGGGGSGGGGSEIVLTQSPATLSVSPGERATLSCRASQSVSRNLAWYQQKPGQAPRRLIYGASTRATGIPDRFSGSGSGTDFTLTISRLEPEDFAVYYCQQYNNWPLTFGCGTKVEIKSGGGGSEVQLVESGGGLVQPGGSLKLSCAASGFTFNKYAINWVRQAPGKGLEWVARIRSKYNNYATYYADAVKDRFTISRDDSKNTVYLQMNNLKTEDTAVYYCARAGNFGSSYISYWAYWGQGTLVTVSSGGGGSGGGGSGGGGSQTVVTQEPSLTVSPGGTVTITCGSSTGAVTSGNYPNWVQKKPGQAPRGLIGGTKFLAPGTPARFSGSLSGGKAALTLSGVQPEDEAEYYCVLWYSNRWVFGSGTKLTVLGGGGDKTHTCPPCPAPELLGGPSVFLFPPKPKDTLMISRTPEVTCVVVDVSHEDPEVKFNWYVDGVEVHNAKTKPCEEQYGSTYRCVSVLTVLHQDWLNGKEYKCKVSNKALPAPIEKTISKAKGQPREPQVYTLPPSREEMTKNQVSLTCLVKGFYPSDIAVEWESNGQPENNYKTTPPVLDSDGSFFLYSKLTVDKSRWQQGNVFSCSVMHEALHNHYTQKSLSLSPGKGGGGSGGGGSGGGGSGGGGSGGGGSGGGGSDKTHTCPPCPAPELLGGPSVFLFPPKPKDTLMISRTPEVTCVVVDVSHEDPEVKFNWYVDGVEVHNAKTKPCEEQYGSTYRCVSVLTVLHQDWLNGKEYKCKVSNKALPAPIEKTISKAKGQPREPQVYTLPPSREEMTKNQVSLTCLVKGFYPSDIAVEWESNGQPENNYKTTPPVLDSDGSFFLYSKLTVDKSRWQQGNVFSCSVMHEALHNHYTQKSLSLSPGK

SEQ ID NO: 3263 - protein, 1224 aa, Artificial Sequence
  Synthetic
QVQLVQSGAEVKKPGESLKISCKGSGYSFTSYGISWVRQAPGQCLEWMGWISAYNGNTIYAQKLQGRVTMTTDTSTSTAYMELRRLRSDDTAVYYCARDPGVTGDDYWGQGTLVTVSSGGGGQGGGGQGGGGQEIVLTQSPATLSVSPGERATLSCRASLSVSSNLAWYQQKPGQAPRLLIYGASTRATGIPARFSGSGSGTEFTLTISSLQSEDFAVYFCQQYHSWPALTFGCGTKVEIKSGGGGQEVQLVESGGGLVQPGRSLRLSCAASGFTFHDYPMHWVRQAPGKCLEWVSGISWNSDYIVYADSVKGRFTISRDNAKNSLYLQMNSLSAEDTALYYCAKDTAYGGKYSAFDYWGQGTLVTVSSGGGGQGGGGQGGGGQEIVLTQSPATLSVSPGERATLSCRASQSVSRNLAWYQQKPGQAPRRLIYGASTRATGIPDRFSGSGSGTDFTLTISRLEPEDFAVYYCQQYNNWPLTFGCGTKVEIKSGGGGQEVQLVESGGGLVQPGGSLKLSCAASGFTFNKYAINWVRQAPGKGLEWVARIRSKYNNYATYYADAVKDRFTISRDDSKNTVYLQMNNLKTEDTAVYYCARAGNFGSSYISYWAYWGQGTLVTVSSGGGGQGGGGQGGGGQQTVVTQEPSLTVSPGGTVTITCGSSTGAVTSGNYPNWVQKKPGQAPRGLIGGTKFLAPGTPARFSGSLSGGKAALTLSGVQPEDEAEYYCVLWYSNRWVFGSGTKLTVLGGGGCPPCPAPELLGGPSVFLFPPKPKDTLMISRTPEVTCVVVDVSHEEPEVKFNWYVDGVEVHNAKTKPCEEQYGSTYRCVSVLTVLHQDWLNGKEYKCKVSNKALPAPIEKTISKAKGQPREPQVYTLPPSREEMTKNQVSLTCLVKGFYPSDIAVEWESNGQPENNYKTTPPVLDSDGSFFLYSKLTVDKSRWQQGNVFSCSVMHEALHNHYTQKSLSLSPGKGGGGQGGGGQGGGGQGGGGQGGGGQGGGGQCPPCPAPELLGGPSVFLFPPKPKDTLMISRTPEVTCVVVDVSHEEPEVKFNWYVDGVEVHNAKTKPCEEQYGSTYRCVSVLTVLHQDWLNGKEYKCKVSNKALPAPIEKTISKAKGQPREPQVYTLPPSREEMTKNQVSLTCLVKGFYPSDIAVEWESNGQPENNYKTTPPVLDSDGSFFLYSKLTVDKSRWQQGNVFSCSVMHEALHNHYTQKSLSLSPGK

SEQ ID NO: 3264 - protein, 489 aa, Artificial Sequence
  Synthetic
QVQLVQSGAEVKKPGASVKVSCKTSGYPFTSYGISWVRQAPGQCLEWMGWISPYSGAPTYAQKVQGRVTMTTDTSTTTAYMELRSLRSDDTAVYYCVRDGLEEDYWGQGTLVTVSSGGGGSGGGGSGGGGSEIVLTQSPATLSVSPGEGATLSCRASQSVSSNLAWYQQSPGQAPRLLIYGASTRATGIPARFSGSGSGTEFTLTISSLQSEDFAVYYCQQYHSWPALTFGCGTKVDIKSGGGGSEVQLVESGGGLVQPGRSLRLSCAASGFTFHDYPMHWVRQAPGKCLEWVSGISWNSDYIVYADSVKGRFTISRDNAKNSLYLQMNSLSAEDTALYYCAKDTAYGGKYSAFDYWGQGTLVTVSSGGGGSGGGGSGGGGSEIVLTQSPATLSVSPGERATLSCRASQSVSRNLAWYQQKPGQAPRRLIYGASTRATGIPDRFSGSGSGTDFTLTISRLEPEDFAVYYCQQYNNWPLTFGCGTKVEIK

SEQ ID NO: 3265 - protein, 489 aa, Artificial Sequence
  Synthetic
QVQLVQSGAEVKKPGASVKVSCKTSGYPFTSYGISWVRQAPGQCLEWMGWISPYSGAPTYAQKVQGRVTMTTDTSTTTAYMELRSLRSDDTAVYYCVRDGLEEDYWGQGTLVTVSSGGGGQGGGGQGGGGQEIVLTQSPATLSVSPGEGATLSCRASQSVSSNLAWYQQSPGQAPRLLIYGASTRATGIPARFSGSGSGTEFTLTISSLQSEDFAVYYCQQYHSWPALTFGCGTKVDIKSGGGGQEVQLVESGGGLVQPGRSLRLSCAASGFTFHDYPMHWVRQAPGKCLEWVSGISWNSDYIVYADSVKGRFTISRDNAKNSLYLQMNSLSAEDTALYYCAKDTAYGGKYSAFDYWGQGTLVTVSSGGGGQGGGGQGGGGQEIVLTQSPATLSVSPGERATLSCRASQSVSRNLAWYQQKPGQAPRRLIYGASTRATGIPDRFSGSGSGTDFTLTISRLEPEDFAVYYCQQYNNWPLTFGCGTKVEIK

SEQ ID NO: 3266 - protein, 744 aa, Artificial Sequence
  Synthetic
QVQLVQSGAEVKKPGASVKVSCKTSGYPFTSYGISWVRQAPGQCLEWMGWISPYSGAPTYAQKVQGRVTMTTDTSTTTAYMELRSLRSDDTAVYYCVRDGLEEDYWGQGTLVTVSSGGGGSGGGGSGGGGSEIVLTQSPATLSVSPGEGATLSCRASQSVSSNLAWYQQSPGQAPRLLIYGASTRATGIPARFSGSGSGTEFTLTISSLQSEDFAVYYCQQYHSWPALTFGCGTKVDIKSGGGGSEVQLVESGGGLVQPGRSLRLSCAASGFTFHDYPMHWVRQAPGKCLEWVSGISWNSDYIVYADSVKGRFTISRDNAKNSLYLQMNSLSAEDTALYYCAKDTAYGGKYSAFDYWGQGTLVTVSSGGGGSGGGGSGGGGSEIVLTQSPATLSVSPGERATLSCRASQSVSRNLAWYQQKPGQAPRRLIYGASTRATGIPDRFSGSGSGTDFTLTISRLEPEDFAVYYCQQYNNWPLTFGCGTKVEIKSGGGGSEVQLVESGGGLVQPGGSLKLSCAASGFTFNKYAMNWVRQAPGKGLEWVARIRSKYNNYATYYADSVKDRFTISRDDSKNTAYLQMNNLKTEDTAVYYCVRHGNFGNSYISYWAYWGQGTLVTVSSGGGGSGGGGSGGGGSQTVVTQEPSLTVSPGGTVTLTCGSSTGAVTSGNYPNWVQQKPGQAPRGLIGGTKFLAPGTPARFSGSLLGGKAALTLSGVQPEDEAEYYCVLWYSNRWVFGGGTKLTVL

SEQ ID NO: 3267 - protein, 744 aa, Artificial Sequence
  Synthetic
QVQLVQSGAEVKKPGASVKVSCKTSGYPFTSYGISWVRQAPGQCLEWMGWISPYSGAPTYAQKVQGRVTMTTDTSTTTAYMELRSLRSDDTAVYYCVRDGLEEDYWGQGTLVTVSSGGGGQGGGGQGGGGQEIVLTQSPATLSVSPGEGATLSCRASQSVSSNLAWYQQSPGQAPRLLIYGASTRATGIPARFSGSGSGTEFTLTISSLQSEDFAVYYCQQYHSWPALTFGCGTKVDIKSGGGGQEVQLVESGGGLVQPGRSLRLSCAASGFTFHDYPMHWVRQAPGKCLEWVSGISWNSDYIVYADSVKGRFTISRDNAKNSLYLQMNSLSAEDTALYYCAKDTAYGGKYSAFDYWGQGTLVTVSSGGGGQGGGGQGGGGQEIVLTQSPATLSVSPGERATLSCRASQSVSRNLAWYQQKPGQAPRRLIYGASTRATGIPDRFSGSGSGTDFTLTISRLEPEDFAVYYCQQYNNWPLTFGCGTKVEIKSGGGGQEVQLVESGGGLVQPGGSLKLSCAASGFTFNKYAMNWVRQAPGKGLEWVARIRSKYNNYATYYADSVKDRFTISRDDSKNTAYLQMNNLKTEDTAVYYCVRHGNFGNSYISYWAYWGQGTLVTVSSGGGGQGGGGQGGGGQQTVVTQEPSLTVSPGGTVTLTCGSSTGAVTSGNYPNWVQQKPGQAPRGLIGGTKFLAPGTPARFSGSLLGGKAALTLSGVQPEDEAEYYCVLWYSNRWVFGGGTKLTVL

SEQ ID NO: 3268 - protein, 744 aa, Artificial Sequence
  Synthetic
QVQLVQSGAEVKKPGASVKVSCKTSGYPFTSYGISWVRQAPGQCLEWMGWISPYSGAPTYAQKVQGRVTMTTDTSTTTAYMELRSLRSDDTAVYYCVRDGLEEDYWGQGTLVTVSSGGGGSGGGGSGGGGSEIVLTQSPATLSVSPGEGATLSCRASQSVSSNLAWYQQSPGQAPRLLIYGASTRATGIPARFSGSGSGTEFTLTISSLQSEDFAVYYCQQYHSWPALTFGCGTKVDIKSGGGGSEVQLVESGGGLVQPGRSLRLSCAASGFTFHDYPMHWVRQAPGKCLEWVSGISWNSDYIVYADSVKGRFTISRDNAKNSLYLQMNSLSAEDTALYYCAKDTAYGGKYSAFDYWGQGTLVTVSSGGGGSGGGGSGGGGSEIVLTQSPATLSVSPGERATLSCRASQSVSRNLAWYQQKPGQAPRRLIYGASTRATGIPDRFSGSGSGTDFTLTISRLEPEDFAVYYCQQYNNWPLTFGCGTKVEIKSGGGGSEVQLVESGGGLVQPGGSLKLSCAASGFTFNKYAINWVRQAPGKGLEWVARIRSKYNNYATYYADAVKDRFTISRDDSKNTVYLQMNNLKTEDTAVYYCARAGNFGSSYISYWAYWGQGTLVTVSSGGGGSGGGGSGGGGSQTVVTQEPSLTVSPGGTVTITCGSSTGAVTSGNYPNWVQKKPGQAPRGLIGGTKFLAPGTPARFSGSLSGGKAALTLSGVQPEDEAEYYCVLWYSNRWVFGSGTKLTVL

SEQ ID NO: 3269 - protein, 744 aa, Artificial Sequence
  Synthetic
QVQLVQSGAEVKKPGASVKVSCKTSGYPFTSYGISWVRQAPGQCLEWMGWISPYSGAPTYAQKVQGRVTMTTDTSTTTAYMELRSLRSDDTAVYYCVRDGLEEDYWGQGTLVTVSSGGGGQGGGGQGGGGQEIVLTQSPATLSVSPGEGATLSCRASQSVSSNLAWYQQSPGQAPRLLIYGASTRATGIPARFSGSGSGTEFTLTISSLQSEDFAVYYCQQYHSWPALTFGCGTKVDIKSGGGGQEVQLVESGGGLVQPGRSLRLSCAASGFTFHDYPMHWVRQAPGKCLEWVSGISWNSDYIVYADSVKGRFTISRDNAKNSLYLQMNSLSAEDTALYYCAKDTAYGGKYSAFDYWGQGTLVTVSSGGGGQGGGGQGGGGQEIVLTQSPATLSVSPGERATLSCRASQSVSRNLAWYQQKPGQAPRRLIYGASTRATGIPDRFSGSGSGTDFTLTISRLEPEDFAVYYCQQYNNWPLTFGCGTKVEIKSGGGGQEVQLVESGGGLVQPGGSLKLSCAASGFTFNKYAINWVRQAPGKGLEWVARIRSKYNNYATYYADAVKDRFTISRDDSKNTVYLQMNNLKTEDTAVYYCARAGNFGSSYISYWAYWGQGTLVTVSSGGGGQGGGGQGGGGQQTVVTQEPSLTVSPGGTVTITCGSSTGAVTSGNYPNWVQKKPGQAPRGLIGGTKFLAPGTPARFSGSLSGGKAALTLSGVQPEDEAEYYCVLWYSNRWVFGSGTKLTVL

SEQ ID NO: 3270 - protein, 1232 aa, Artificial Sequence
  Synthetic
QVQLVQSGAEVKKPGASVKVSCKTSGYPFTSYGISWVRQAPGQCLEWMGWISPYSGAPTYAQKVQGRVTMTTDTSTTTAYMELRSLRSDDTAVYYCVRDGLEEDYWGQGTLVTVSSGGGGSGGGGSGGGGSEIVLTQSPATLSVSPGEGATLSCRASQSVSSNLAWYQQSPGQAPRLLIYGASTRATGIPARFSGSGSGTEFTLTISSLQSEDFAVYYCQQYHSWPALTFGCGTKVDIKSGGGGSEVQLVESGGGLVQPGRSLRLSCAASGFTFHDYPMHWVRQAPGKCLEWVSGISWNSDYIVYADSVKGRFTISRDNAKNSLYLQMNSLSAEDTALYYCAKDTAYGGKYSAFDYWGQGTLVTVSSGGGGSGGGGSGGGGSEIVLTQSPATLSVSPGERATLSCRASQSVSRNLAWYQQKPGQAPRRLIYGASTRATGIPDRFSGSGSGTDFTLTISRLEPEDFAVYYCQQYNNWPLTFGCGTKVEIKSGGGGSEVQLVESGGGLVQPGGSLKLSCAASGFTFNKYAMNWVRQAPGKGLEWVARIRSKYNNYATYYADSVKDRFTISRDDSKNTAYLQMNNLKTEDTAVYYCVRHGNFGNSYISYWAYWGQGTLVTVSSGGGGSGGGGSGGGGSQTVVTQEPSLTVSPGGTVTLTCGSSTGAVTSGNYPNWVQQKPGQAPRGLIGGTKFLAPGTPARFSGSLLGGKAALTLSGVQPEDEAEYYCVLWYSNRWVFGGGTKLTVLGGGGDKTHTCPPCPAPELLGGPSVFLFPPKPKDTLMISRTPEVTCVVVDVSHEDPEVKFNWYVDGVEVHNAKTKPCEEQYGSTYRCVSVLTVLHQDWLNGKEYKCKVSNKALPAPIEKTISKAKGQPREPQVYTLPPSREEMTKNQVSLTCLVKGFYPSDIAVEWESNGQPENNYKTTPPVLDSDGSFFLYSKLTVDKSRWQQGNVFSCSVMHEALHNHYTQKSLSLSPGKGGGGSGGGGSGGGGSGGGGSGGGGSGGGGSDKTHTCPPCPAPELLGGPSVFLFPPKPKDTLMISRTPEVTCVVVDVSHEDPEVKFNWYVDGVEVHNAKTKPCEEQYGSTYRCVSVLTVLHQDWLNGKEYKCKVSNKALPAPIEKTISKAKGQPREPQVYTLPPSREEMTKNQVSLTCLVKGFYPSDIAVEWESNGQPENNYKTTPPVLDSDGSFFLYSKLTVDKSRWQQGNVFSCSVMHEALHNHYTQKSLSLSPGK

SEQ ID NO: 3271 - protein, 1222 aa, Artificial Sequence
  Synthetic
QVQLVQSGAEVKKPGASVKVSCKTSGYPFTSYGISWVRQAPGQCLEWMGWISPYSGAPTYAQKVQGRVTMTTDTSTTTAYMELRSLRSDDTAVYYCVRDGLEEDYWGQGTLVTVSSGGGGQGGGGQGGGGQEIVLTQSPATLSVSPGEGATLSCRASQSVSSNLAWYQQSPGQAPRLLIYGASTRATGIPARFSGSGSGTEFTLTISSLQSEDFAVYYCQQYHSWPALTFGCGTKVDIKSGGGGQEVQLVESGGGLVQPGRSLRLSCAASGFTFHDYPMHWVRQAPGKCLEWVSGISWNSDYIVYADSVKGRFTISRDNAKNSLYLQMNSLSAEDTALYYCAKDTAYGGKYSAFDYWGQGTLVTVSSGGGGQGGGGQGGGGQEIVLTQSPATLSVSPGERATLSCRASQSVSRNLAWYQQKPGQAPRRLIYGASTRATGIPDRFSGSGSGTDFTLTISRLEPEDFAVYYCQQYNNWPLTFGCGTKVEIKSGGGGQEVQLVESGGGLVQPGGSLKLSCAASGFTFNKYAMNWVRQAPGKGLEWVARIRSKYNNYATYYADSVKDRFTISRDDSKNTAYLQMNNLKTEDTAVYYCVRHGNFGNSYISYWAYWGQGTLVTVSSGGGGQGGGGQGGGGQQTVVTQEPSLTVSPGGTVTLTCGSSTGAVTSGNYPNWVQQKPGQAPRGLIGGTKFLAPGTPARFSGSLLGGKAALTLSGVQPEDEAEYYCVLWYSNRWVFGGGTKLTVLGGGGCPPCPAPELLGGPSVFLFPPKPKDTLMISRTPEVTCVVVDVSHEEPEVKFNWYVDGVEVHNAKTKPCEEQYGSTYRCVSVLTVLHQDWLNGKEYKCKVSNKALPAPIEKTISKAKGQPREPQVYTLPPSREEMTKNQVSLTCLVKGFYPSDIAVEWESNGQPENNYKTTPPVLDSDGSFFLYSKLTVDKSRWQQGNVFSCSVMHEALHNHYTQKSLSLSPGKGGGGQGGGGQGGGGQGGGGQGGGGQGGGGQCPPCPAPELLGGPSVFLFPPKPKDTLMISRTPEVTCVVVDVSHEEPEVKFNWYVDGVEVHNAKTKPCEEQYGSTYRCVSVLTVLHQDWLNGKEYKCKVSNKALPAPIEKTISKAKGQPREPQVYTLPPSREEMTKNQVSLTCLVKGFYPSDIAVEWESNGQPENNYKTTPPVLDSDGSFFLYSKLTVDKSRWQQGNVFSCSVMHEALHNHYTQKSLSLSPGK

SEQ ID NO: 3272 - protein, 1232 aa, Artificial Sequence
  Synthetic
QVQLVQSGAEVKKPGASVKVSCKTSGYPFTSYGISWVRQAPGQCLEWMGWISPYSGAPTYAQKVQGRVTMTTDTSTTTAYMELRSLRSDDTAVYYCVRDGLEEDYWGQGTLVTVSSGGGGSGGGGSGGGGSEIVLTQSPATLSVSPGEGATLSCRASQSVSSNLAWYQQSPGQAPRLLIYGASTRATGIPARFSGSGSGTEFTLTISSLQSEDFAVYYCQQYHSWPALTFGCGTKVDIKSGGGGSEVQLVESGGGLVQPGRSLRLSCAASGFTFHDYPMHWVRQAPGKCLEWVSGISWNSDYIVYADSVKGRFTISRDNAKNSLYLQMNSLSAEDTALYYCAKDTAYGGKYSAFDYWGQGTLVTVSSGGGGSGGGGSGGGGSEIVLTQSPATLSVSPGERATLSCRASQSVSRNLAWYQQKPGQAPRRLIYGASTRATGIPDRFSGSGSGTDFTLTISRLEPEDFAVYYCQQYNNWPLTFGCGTKVEIKSGGGGSEVQLVESGGGLVQPGGSLKLSCAASGFTFNKYAINWVRQAPGKGLEWVARIRSKYNNYATYYADAVKDRFTISRDDSKNTVYLQMNNLKTEDTAVYYCARAGNFGSSYISYWAYWGQGTLVTVSSGGGGSGGGGSGGGGSQTVVTQEPSLTVSPGGTVTITCGSSTGAVTSGNYPNWVQKKPGQAPRGLIGGTKFLAPGTPARFSGSLSGGKAALTLSGVQPEDEAEYYCVLWYSNRWVFGSGTKLTVLGGGGDKTHTCPPCPAPELLGGPSVFLFPPKPKDTLMISRTPEVTCVVVDVSHEDPEVKFNWYVDGVEVHNAKTKPCEEQYGSTYRCVSVLTVLHQDWLNGKEYKCKVSNKALPAPIEKTISKAKGQPREPQVYTLPPSREEMTKNQVSLTCLVKGFYPSDIAVEWESNGQPENNYKTTPPVLDSDGSFFLYSKLTVDKSRWQQGNVFSCSVMHEALHNHYTQKSLSLSPGKGGGGSGGGGSGGGGSGGGGSGGGGSGGGGSDKTHTCPPCPAPELLGGPSVFLFPPKPKDTLMISRTPEVTCVVVDVSHEDPEVKFNWYVDGVEVHNAKTKPCEEQYGSTYRCVSVLTVLHQDWLNGKEYKCKVSNKALPAPIEKTISKAKGQPREPQVYTLPPSREEMTKNQVSLTCLVKGFYPSDIAVEWESNGQPENNYKTTPPVLDSDGSFFLYSKLTVDKSRWQQGNVFSCSVMHEALHNHYTQKSLSLSPGK

SEQ ID NO: 3273 - protein, 1222 aa, Artificial Sequence
  Synthetic
QVQLVQSGAEVKKPGASVKVSCKTSGYPFTSYGISWVRQAPGQCLEWMGWISPYSGAPTYAQKVQGRVTMTTDTSTTTAYMELRSLRSDDTAVYYCVRDGLEEDYWGQGTLVTVSSGGGGQGGGGQGGGGQEIVLTQSPATLSVSPGEGATLSCRASQSVSSNLAWYQQSPGQAPRLLIYGASTRATGIPARFSGSGSGTEFTLTISSLQSEDFAVYYCQQYHSWPALTFGCGTKVDIKSGGGGQEVQLVESGGGLVQPGRSLRLSCAASGFTFHDYPMHWVRQAPGKCLEWVSGISWNSDYIVYADSVKGRFTISRDNAKNSLYLQMNSLSAEDTALYYCAKDTAYGGKYSAFDYWGQGTLVTVSSGGGGQGGGGQGGGGQEIVLTQSPATLSVSPGERATLSCRASQSVSRNLAWYQQKPGQAPRRLIYGASTRATGIPDRFSGSGSGTDFTLTISRLEPEDFAVYYCQQYNNWPLTFGCGTKVEIKSGGGGQEVQLVESGGGLVQPGGSLKLSCAASGFTFNKYAINWVRQAPGKGLEWVARIRSKYNNYATYYADAVKDRFTISRDDSKNTVYLQMNNLKTEDTAVYYCARAGNFGSSYISYWAYWGQGTLVTVSSGGGGQGGGGQGGGGQQTVVTQEPSLTVSPGGTVTITCGSSTGAVTSGNYPNWVQKKPGQAPRGLIGGTKFLAPGTPARFSGSLSGGKAALTLSGVQPEDEAEYYCVLWYSNRWVFGSGTKLTVLGGGGCPPCPAPELLGGPSVFLFPPKPKDTLMISRTPEVTCVVVDVSHEEPEVKFNWYVDGVEVHNAKTKPCEEQYGSTYRCVSVLTVLHQDWLNGKEYKCKVSNKALPAPIEKTISKAKGQPREPQVYTLPPSREEMTKNQVSLTCLVKGFYPSDIAVEWESNGQPENNYKTTPPVLDSDGSFFLYSKLTVDKSRWQQGNVFSCSVMHEALHNHYTQKSLSLSPGKGGGGQGGGGQGGGGQGGGGQGGGGQGGGGQCPPCPAPELLGGPSVFLFPPKPKDTLMISRTPEVTCVVVDVSHEEPEVKFNWYVDGVEVHNAKTKPCEEQYGSTYRCVSVLTVLHQDWLNGKEYKCKVSNKALPAPIEKTISKAKGQPREPQVYTLPPSREEMTKNQVSLTCLVKGFYPSDIAVEWESNGQPENNYKTTPPVLDSDGSFFLYSKLTVDKSRWQQGNVFSCSVMHEALHNHYTQKSLSLSPGK

SEQ ID NO: 3274 - protein, 489 aa, Artificial Sequence
  Synthetic
QVQLVQSGAEVKKPGASVKVSCKASGYTFNNYGISWVRQAPGQCLEWMGWISAYNGKTSYAQKFQGRVTMTTDTSTGTAYMELRSLRSDDTAVYYCARSTGDGEYWGQGTLVTVSSGGGGSGGGGSGGGGSEIVMTQSPATLSVSPGERATLSCRASQSVSSNLAWYQQKPGQAPRLLIYGASTRATGIPARFSGGGSGTEFTLTISSLQSEDFAVYYCQQYHTWPVLTFGCGTKVEIKSGGGGSEVQLVESGGGLVQPGRSLRLSCAASGFTFHDYPMHWVRQAPGKCLEWVSGISWNSDYIVYADSVKGRFTISRDNAKNSLYLQMNSLSAEDTALYYCAKDTAYGGKYSAFDYWGQGTLVTVSSGGGGSGGGGSGGGGSEIVLTQSPATLSVSPGERATLSCRASQSVSRNLAWYQQKPGQAPRRLIYGASTRATGIPDRFSGSGSGTDFTLTISRLEPEDFAVYYCQQYNNWPLTFGCGTKVEIK

SEQ ID NO: 3275 - protein, 489 aa, Artificial Sequence
  Synthetic
QVQLVQSGAEVKKPGASVKVSCKASGYTFNNYGISWVRQAPGQCLEWMGWISAYNGKTSYAQKFQGRVTMTTDTSTGTAYMELRSLRSDDTAVYYCARSTGDGEYWGQGTLVTVSSGGGGQGGGGQGGGGQEIVMTQSPATLSVSPGERATLSCRASQSVSSNLAWYQQKPGQAPRLLIYGASTRATGIPARFSGGGSGTEFTLTISSLQSEDFAVYYCQQYHTWPVLTFGCGTKVEIKSGGGGQEVQLVESGGGLVQPGRSLRLSCAASGFTFHDYPMHWVRQAPGKCLEWVSGISWNSDYIVYADSVKGRFTISRDNAKNSLYLQMNSLSAEDTALYYCAKDTAYGGKYSAFDYWGQGTLVTVSSGGGGQGGGGQGGGGQEIVLTQSPATLSVSPGERATLSCRASQSVSRNLAWYQQKPGQAPRRLIYGASTRATGIPDRFSGSGSGTDFTLTISRLEPEDFAVYYCQQYNNWPLTFGCGTKVEIK

SEQ ID NO: 3276 - protein, 744 aa, Artificial Sequence
  Synthetic
QVQLVQSGAEVKKPGASVKVSCKASGYTFNNYGISWVRQAPGQCLEWMGWISAYNGKTSYAQKFQGRVTMTTDTSTGTAYMELRSLRSDDTAVYYCARSTGDGEYWGQGTLVTVSSGGGGSGGGGSGGGGSEIVMTQSPATLSVSPGERATLSCRASQSVSSNLAWYQQKPGQAPRLLIYGASTRATGIPARFSGGGSGTEFTLTISSLQSEDFAVYYCQQYHTWPVLTFGCGTKVEIKSGGGGSEVQLVESGGGLVQPGRSLRLSCAASGFTFHDYPMHWVRQAPGKCLEWVSGISWNSDYIVYADSVKGRFTISRDNAKNSLYLQMNSLSAEDTALYYCAKDTAYGGKYSAFDYWGQGTLVTVSSGGGGSGGGGSGGGGSEIVLTQSPATLSVSPGERATLSCRASQSVSRNLAWYQQKPGQAPRRLIYGASTRATGIPDRFSGSGSGTDFTLTISRLEPEDFAVYYCQQYNNWPLTFGCGTKVEIKSGGGGSEVQLVESGGGLVQPGGSLKLSCAASGFTFNKYAMNWVRQAPGKGLEWVARIRSKYNNYATYYADSVKDRFTISRDDSKNTAYLQMNNLKTEDTAVYYCVRHGNFGNSYISYWAYWGQGTLVTVSSGGGGSGGGGSGGGGSQTVVTQEPSLTVSPGGTVTLTCGSSTGAVTSGNYPNWVQQKPGQAPRGLIGGTKFLAPGTPARFSGSLLGGKAALTLSGVQPEDEAEYYCVLWYSNRWVFGGGTKLTVL

SEQ ID NO: 3277 - protein, 744 aa, Artificial Sequence
  Synthetic
QVQLVQSGAEVKKPGASVKVSCKASGYTFNNYGISWVRQAPGQCLEWMGWISAYNGKTSYAQKFQGRVTMTTDTSTGTAYMELRSLRSDDTAVYYCARSTGDGEYWGQGTLVTVSSGGGGQGGGGQGGGGQEIVMTQSPATLSVSPGERATLSCRASQSVSSNLAWYQQKPGQAPRLLIYGASTRATGIPARFSGGGSGTEFTLTISSLQSEDFAVYYCQQYHTWPVLTFGCGTKVEIKSGGGGQEVQLVESGGGLVQPGRSLRLSCAASGFTFHDYPMHWVRQAPGKCLEWVSGISWNSDYIVYADSVKGRFTISRDNAKNSLYLQMNSLSAEDTALYYCAKDTAYGGKYSAFDYWGQGTLVTVSSGGGGQGGGGQGGGGQEIVLTQSPATLSVSPGERATLSCRASQSVSRNLAWYQQKPGQAPRRLIYGASTRATGIPDRFSGSGSGTDFTLTISRLEPEDFAVYYCQQYNNWPLTFGCGTKVEIKSGGGGQEVQLVESGGGLVQPGGSLKLSCAASGFTFNKYAMNWVRQAPGKGLEWVARIRSKYNNYATYYADSVKDRFTISRDDSKNTAYLQMNNLKTEDTAVYYCVRHGNFGNSYISYWAYWGQGTLVTVSSGGGGQGGGGQGGGGQQTVVTQEPSLTVSPGGTVTLTCGSSTGAVTSGNYPNWVQQKPGQAPRGLIGGTKFLAPGTPARFSGSLLGGKAALTLSGVQPEDEAEYYCVLWYSNRWVFGGGTKLTVL

SEQ ID NO: 3278 - protein, 744 aa, Artificial Sequence
  Synthetic
QVQLVQSGAEVKKPGASVKVSCKASGYTFNNYGISWVRQAPGQCLEWMGWISAYNGKTSYAQKFQGRVTMTTDTSTGTAYMELRSLRSDDTAVYYCARSTGDGEYWGQGTLVTVSSGGGGSGGGGSGGGGSEIVMTQSPATLSVSPGERATLSCRASQSVSSNLAWYQQKPGQAPRLLIYGASTRATGIPARFSGGGSGTEFTLTISSLQSEDFAVYYCQQYHTWPVLTFGCGTKVEIKSGGGGSEVQLVESGGGLVQPGRSLRLSCAASGFTFHDYPMHWVRQAPGKCLEWVSGISWNSDYIVYADSVKGRFTISRDNAKNSLYLQMNSLSAEDTALYYCAKDTAYGGKYSAFDYWGQGTLVTVSSGGGGSGGGGSGGGGSEIVLTQSPATLSVSPGERATLSCRASQSVSRNLAWYQQKPGQAPRRLIYGASTRATGIPDRFSGSGSGTDFTLTISRLEPEDFAVYYCQQYNNWPLTFGCGTKVEIKSGGGGSEVQLVESGGGLVQPGGSLKLSCAASGFTFNKYAINWVRQAPGKGLEWVARIRSKYNNYATYYADAVKDRFTISRDDSKNTVYLQMNNLKTEDTAVYYCARAGNFGSSYISYWAYWGQGTLVTVSSGGGGSGGGGSGGGGSQTVVTQEPSLTVSPGGTVTITCGSSTGAVTSGNYPNWVQKKPGQAPRGLIGGTKFLAPGTPARFSGSLSGGKAALTLSGVQPEDEAEYYCVLWYSNRWVFGSGTKLTVL

SEQ ID NO: 3279 - protein, 744 aa, Artificial Sequence
  Synthetic
QVQLVQSGAEVKKPGASVKVSCKASGYTFNNYGISWVRQAPGQCLEWMGWISAYNGKTSYAQKFQGRVTMTTDTSTGTAYMELRSLRSDDTAVYYCARSTGDGEYWGQGTLVTVSSGGGGQGGGGQGGGGQEIVMTQSPATLSVSPGERATLSCRASQSVSSNLAWYQQKPGQAPRLLIYGASTRATGIPARFSGGGSGTEFTLTISSLQSEDFAVYYCQQYHTWPVLTFGCGTKVEIKSGGGGQEVQLVESGGGLVQPGRSLRLSCAASGFTFHDYPMHWVRQAPGKCLEWVSGISWNSDYIVYADSVKGRFTISRDNAKNSLYLQMNSLSAEDTALYYCAKDTAYGGKYSAFDYWGQGTLVTVSSGGGGQGGGGQGGGGQEIVLTQSPATLSVSPGERATLSCRASQSVSRNLAWYQQKPGQAPRRLIYGASTRATGIPDRFSGSGSGTDFTLTISRLEPEDFAVYYCQQYNNWPLTFGCGTKVEIKSGGGGQEVQLVESGGGLVQPGGSLKLSCAASGFTFNKYAINWVRQAPGKGLEWVARIRSKYNNYATYYADAVKDRFTISRDDSKNTVYLQMNNLKTEDTAVYYCARAGNFGSSYISYWAYWGQGTLVTVSSGGGGQGGGGQGGGGQQTVVTQEPSLTVSPGGTVTITCGSSTGAVTSGNYPNWVQKKPGQAPRGLIGGTKFLAPGTPARFSGSLSGGKAALTLSGVQPEDEAEYYCVLWYSNRWVFGSGTKLTVL

SEQ ID NO: 3280 - protein, 1232 aa, Artificial Sequence
  Synthetic
QVQLVQSGAEVKKPGASVKVSCKASGYTFNNYGISWVRQAPGQCLEWMGWISAYNGKTSYAQKFQGRVTMTTDTSTGTAYMELRSLRSDDTAVYYCARSTGDGEYWGQGTLVTVSSGGGGSGGGGSGGGGSEIVMTQSPATLSVSPGERATLSCRASQSVSSNLAWYQQKPGQAPRLLIYGASTRATGIPARFSGGGSGTEFTLTISSLQSEDFAVYYCQQYHTWPVLTFGCGTKVEIKSGGGGSEVQLVESGGGLVQPGRSLRLSCAASGFTFHDYPMHWVRQAPGKCLEWVSGISWNSDYIVYADSVKGRFTISRDNAKNSLYLQMNSLSAEDTALYYCAKDTAYGGKYSAFDYWGQGTLVTVSSGGGGSGGGGSGGGGSEIVLTQSPATLSVSPGERATLSCRASQSVSRNLAWYQQKPGQAPRRLIYGASTRATGIPDRFSGSGSGTDFTLTISRLEPEDFAVYYCQQYNNWPLTFGCGTKVEIKSGGGGSEVQLVESGGGLVQPGGSLKLSCAASGFTFNKYAMNWVRQAPGKGLEWVARIRSKYNNYATYYADSVKDRFTISRDDSKNTAYLQMNNLKTEDTAVYYCVRHGNFGNSYISYWAYWGQGTLVTVSSGGGGSGGGGSGGGGSQTVVTQEPSLTVSPGGTVTLTCGSSTGAVTSGNYPNWVQQKPGQAPRGLIGGTKFLAPGTPARFSGSLLGGKAALTLSGVQPEDEAEYYCVLWYSNRWVFGGGTKLTVLGGGGDKTHTCPPCPAPELLGGPSVFLFPPKPKDTLMISRTPEVTCVVVDVSHEDPEVKFNWYVDGVEVHNAKTKPCEEQYGSTYRCVSVLTVLHQDWLNGKEYKCKVSNKALPAPIEKTISKAKGQPREPQVYTLPPSREEMTKNQVSLTCLVKGFYPSDIAVEWESNGQPENNYKTTPPVLDSDGSFFLYSKLTVDKSRWQQGNVFSCSVMHEALHNHYTQKSLSLSPGKGGGGSGGGGSGGGGSGGGGSGGGGSGGGGSDKTHTCPPCPAPELLGGPSVFLFPPKPKDTLMISRTPEVTCVVVDVSHEDPEVKFNWYVDGVEVHNAKTKPCEEQYGSTYRCVSVLTVLHQDWLNGKEYKCKVSNKALPAPIEKTISKAKGQPREPQVYTLPPSREEMTKNQVSLTCLVKGFYPSDIAVEWESNGQPENNYKTTPPVLDSDGSFFLYSKLTVDKSRWQQGNVFSCSVMHEALHNHYTQKSLSLSPGK

SEQ ID NO: 3281 - protein, 1222 aa, Artificial Sequence
  Synthetic
QVQLVQSGAEVKKPGASVKVSCKASGYTFNNYGISWVRQAPGQCLEWMGWISAYNGKTSYAQKFQGRVTMTTDTSTGTAYMELRSLRSDDTAVYYCARSTGDGEYWGQGTLVTVSSGGGGQGGGGQGGGGQEIVMTQSPATLSVSPGERATLSCRASQSVSSNLAWYQQKPGQAPRLLIYGASTRATGIPARFSGGGSGTEFTLTISSLQSEDFAVYYCQQYHTWPVLTFGCGTKVEIKSGGGGQEVQLVESGGGLVQPGRSLRLSCAASGFTFHDYPMHWVRQAPGKCLEWVSGISWNSDYIVYADSVKGRFTISRDNAKNSLYLQMNSLSAEDTALYYCAKDTAYGGKYSAFDYWGQGTLVTVSSGGGGQGGGGQGGGGQEIVLTQSPATLSVSPGERATLSCRASQSVSRNLAWYQQKPGQAPRRLIYGASTRATGIPDRFSGSGSGTDFTLTISRLEPEDFAVYYCQQYNNWPLTFGCGTKVEIKSGGGGQEVQLVESGGGLVQPGGSLKLSCAASGFTFNKYAMNWVRQAPGKGLEWVARIRSKYNNYATYYADSVKDRFTISRDDSKNTAYLQMNNLKTEDTAVYYCVRHGNFGNSYISYWAYWGQGTLVTVSSGGGGQGGGGQGGGGQQTVVTQEPSLTVSPGGTVTLTCGSSTGAVTSGNYPNWVQQKPGQAPRGLIGGTKFLAPGTPARFSGSLLGGKAALTLSGVQPEDEAEYYCVLWYSNRWVFGGGTKLTVLGGGGCPPCPAPELLGGPSVFLFPPKPKDTLMISRTPEVTCVVVDVSHEEPEVKFNWYVDGVEVHNAKTKPCEEQYGSTYRCVSVLTVLHQDWLNGKEYKCKVSNKALPAPIEKTISKAKGQPREPQVYTLPPSREEMTKNQVSLTCLVKGFYPSDIAVEWESNGQPENNYKTTPPVLDSDGSFFLYSKLTVDKSRWQQGNVFSCSVMHEALHNHYTQKSLSLSPGKGGGGQGGGGQGGGGQGGGGQGGGGQGGGGQCPPCPAPELLGGPSVFLFPPKPKDTLMISRTPEVTCVVVDVSHEEPEVKFNWYVDGVEVHNAKTKPCEEQYGSTYRCVSVLTVLHQDWLNGKEYKCKVSNKALPAPIEKTISKAKGQPREPQVYTLPPSREEMTKNQVSLTCLVKGFYPSDIAVEWESNGQPENNYKTTPPVLDSDGSFFLYSKLTVDKSRWQQGNVFSCSVMHEALHNHYTQKSLSLSPGK

SEQ ID NO: 3282 - protein, 1232 aa, Artificial Sequence
  Synthetic
QVQLVQSGAEVKKPGASVKVSCKASGYTFNNYGISWVRQAPGQCLEWMGWISAYNGKTSYAQKFQGRVTMTTDTSTGTAYMELRSLRSDDTAVYYCARSTGDGEYWGQGTLVTVSSGGGGSGGGGSGGGGSEIVMTQSPATLSVSPGERATLSCRASQSVSSNLAWYQQKPGQAPRLLIYGASTRATGIPARFSGGGSGTEFTLTISSLQSEDFAVYYCQQYHTWPVLTFGCGTKVEIKSGGGGSEVQLVESGGGLVQPGRSLRLSCAASGFTFHDYPMHWVRQAPGKCLEWVSGISWNSDYIVYADSVKGRFTISRDNAKNSLYLQMNSLSAEDTALYYCAKDTAYGGKYSAFDYWGQGTLVTVSSGGGGSGGGGSGGGGSEIVLTQSPATLSVSPGERATLSCRASQSVSRNLAWYQQKPGQAPRRLIYGASTRATGIPDRFSGSGSGTDFTLTISRLEPEDFAVYYCQQYNNWPLTFGCGTKVEIKSGGGGSEVQLVESGGGLVQPGGSLKLSCAASGFTFNKYAINWVRQAPGKGLEWVARIRSKYNNYATYYADAVKDRFTISRDDSKNTVYLQMNNLKTEDTAVYYCARAGNFGSSYISYWAYWGQGTLVTVSSGGGGSGGGGSGGGGSQTVVTQEPSLTVSPGGTVTITCGSSTGAVTSGNYPNWVQKKPGQAPRGLIGGTKFLAPGTPARFSGSLSGGKAALTLSGVQPEDEAEYYCVLWYSNRWVFGSGTKLTVLGGGGDKTHTCPPCPAPELLGGPSVFLFPPKPKDTLMISRTPEVTCVVVDVSHEDPEVKFNWYVDGVEVHNAKTKPCEEQYGSTYRCVSVLTVLHQDWLNGKEYKCKVSNKALPAPIEKTISKAKGQPREPQVYTLPPSREEMTKNQVSLTCLVKGFYPSDIAVEWESNGQPENNYKTTPPVLDSDGSFFLYSKLTVDKSRWQQGNVFSCSVMHEALHNHYTQKSLSLSPGKGGGGSGGGGSGGGGSGGGGSGGGGSGGGGSDKTHTCPPCPAPELLGGPSVFLFPPKPKDTLMISRTPEVTCVVVDVSHEDPEVKFNWYVDGVEVHNAKTKPCEEQYGSTYRCVSVLTVLHQDWLNGKEYKCKVSNKALPAPIEKTISKAKGQPREPQVYTLPPSREEMTKNQVSLTCLVKGFYPSDIAVEWESNGQPENNYKTTPPVLDSDGSFFLYSKLTVDKSRWQQGNVFSCSVMHEALHNHYTQKSLSLSPGK

SEQ ID NO: 3283 - protein, 1222 aa, Artificial Sequence
  Synthetic
QVQLVQSGAEVKKPGASVKVSCKASGYTFNNYGISWVRQAPGQCLEWMGWISAYNGKTSYAQKFQGRVTMTTDTSTGTAYMELRSLRSDDTAVYYCARSTGDGEYWGQGTLVTVSSGGGGQGGGGQGGGGQEIVMTQSPATLSVSPGERATLSCRASQSVSSNLAWYQQKPGQAPRLLIYGASTRATGIPARFSGGGSGTEFTLTISSLQSEDFAVYYCQQYHTWPVLTFGCGTKVEIKSGGGGQEVQLVESGGGLVQPGRSLRLSCAASGFTFHDYPMHWVRQAPGKCLEWVSGISWNSDYIVYADSVKGRFTISRDNAKNSLYLQMNSLSAEDTALYYCAKDTAYGGKYSAFDYWGQGTLVTVSSGGGGQGGGGQGGGGQEIVLTQSPATLSVSPGERATLSCRASQSVSRNLAWYQQKPGQAPRRLIYGASTRATGIPDRFSGSGSGTDFTLTISRLEPEDFAVYYCQQYNNWPLTFGCGTKVEIKSGGGGQEVQLVESGGGLVQPGGSLKLSCAASGFTFNKYAINWVRQAPGKGLEWVARIRSKYNNYATYYADAVKDRFTISRDDSKNTVYLQMNNLKTEDTAVYYCARAGNFGSSYISYWAYWGQGTLVTVSSGGGGQGGGGQGGGGQQTVVTQEPSLTVSPGGTVTITCGSSTGAVTSGNYPNWVQKKPGQAPRGLIGGTKFLAPGTPARFSGSLSGGKAALTLSGVQPEDEAEYYCVLWYSNRWVFGSGTKLTVLGGGGCPPCPAPELLGGPSVFLFPPKPKDTLMISRTPEVTCVVVDVSHEEPEVKFNWYVDGVEVHNAKTKPCEEQYGSTYRCVSVLTVLHQDWLNGKEYKCKVSNKALPAPIEKTISKAKGQPREPQVYTLPPSREEMTKNQVSLTCLVKGFYPSDIAVEWESNGQPENNYKTTPPVLDSDGSFFLYSKLTVDKSRWQQGNVFSCSVMHEALHNHYTQKSLSLSPGKGGGGQGGGGQGGGGQGGGGQGGGGQGGGGQCPPCPAPELLGGPSVFLFPPKPKDTLMISRTPEVTCVVVDVSHEEPEVKFNWYVDGVEVHNAKTKPCEEQYGSTYRCVSVLTVLHQDWLNGKEYKCKVSNKALPAPIEKTISKAKGQPREPQVYTLPPSREEMTKNQVSLTCLVKGFYPSDIAVEWESNGQPENNYKTTPPVLDSDGSFFLYSKLTVDKSRWQQGNVFSCSVMHEALHNHYTQKSLSLSPGK

SEQ ID NO: 3284 - protein, 498 aa, Artificial Sequence
  Synthetic
QVQLQQSGPGLVKPSQTLSLTCAISGDSVSSKSAAWNWIRQSPSGCLEWLGRTFYRSTWYNDYAVSVKSRITINPDTSKNQFSLQLNSVIPEDTAVYYCAREGQWLVYGMDVWGQGTTVTVSSGGGGSGGGGSGGGGSQSVLTQPPSASGTPGQRITISCSGSSSNIGSNTVNWYQQLPGTAPKLLIYRNNQRPSGVPDRFSGSKSGTSASLAISGLQSEDEADYYCAAWDDSLNGRVFGCGTKLTVLSGGGGSEVQLVESGGGLVQPGRSLRLSCAASGFTFHDYPMHWVRQAPGKCLEWVSGISWNSDYIVYADSVKGRFTISRDNAKNSLYLQMNSLSAEDTALYYCAKDTAYGGKYSAFDYWGQGTLVTVSSGGGGSGGGGSGGGGSEIVLTQSPATLSVSPGERATLSCRASQSVSRNLAWYQQKPGQAPRRLIYGASTRATGIPDRFSGSGSGTDFTLTISRLEPEDFAVYYCQQYNNWPLTFGCGTKVEIK

SEQ ID NO: 3285 - protein, 498 aa, Artificial Sequence
  Synthetic
QVQLQQSGPGLVKPSQTLSLTCAISGDSVSSKSAAWNWIRQSPSGCLEWLGRTFYRSTWYNDYAVSVKSRITINPDTSKNQFSLQLNSVIPEDTAVYYCAREGQWLVYGMDVWGQGTTVTVSSGGGGQGGGGQGGGGQQSVLTQPPSASGTPGQRITISCSGSSSNIGSNTVNWYQQLPGTAPKLLIYRNNQRPSGVPDRFSGSKSGTSASLAISGLQSEDEADYYCAAWDDSLNGRVFGCGTKLTVLSGGGGQEVQLVESGGGLVQPGRSLRLSCAASGFTFHDYPMHWVRQAPGKCLEWVSGISWNSDYIVYADSVKGRFTISRDNAKNSLYLQMNSLSAEDTALYYCAKDTAYGGKYSAFDYWGQGTLVTVSSGGGGQGGGGQGGGGQEIVLTQSPATLSVSPGERATLSCRASQSVSRNLAWYQQKPGQAPRRLIYGASTRATGIPDRFSGSGSGTDFTLTISRLEPEDFAVYYCQQYNNWPLTFGCGTKVEIK

SEQ ID NO: 3286 - protein, 753 aa, Artificial Sequence
  Synthetic
QVQLQQSGPGLVKPSQTLSLTCAISGDSVSSKSAAWNWIRQSPSGCLEWLGRTFYRSTWYNDYAVSVKSRITINPDTSKNQFSLQLNSVIPEDTAVYYCAREGQWLVYGMDVWGQGTTVTVSSGGGGSGGGGSGGGGSQSVLTQPPSASGTPGQRITISCSGSSSNIGSNTVNWYQQLPGTAPKLLIYRNNQRPSGVPDRFSGSKSGTSASLAISGLQSEDEADYYCAAWDDSLNGRVFGCGTKLTVLSGGGGSEVQLVESGGGLVQPGRSLRLSCAASGFTFHDYPMHWVRQAPGKCLEWVSGISWNSDYIVYADSVKGRFTISRDNAKNSLYLQMNSLSAEDTALYYCAKDTAYGGKYSAFDYWGQGTLVTVSSGGGGSGGGGSGGGGSEIVLTQSPATLSVSPGERATLSCRASQSVSRNLAWYQQKPGQAPRRLIYGASTRATGIPDRFSGSGSGTDFTLTISRLEPEDFAVYYCQQYNNWPLTFGCGTKVEIKSGGGGSEVQLVESGGGLVQPGGSLKLSCAASGFTFNKYAMNWVRQAPGKGLEWVARIRSKYNNYATYYADSVKDRFTISRDDSKNTAYLQMNNLKTEDTAVYYCVRHGNFGNSYISYWAYWGQGTLVTVSSGGGGSGGGGSGGGGSQTVVTQEPSLTVSPGGTVTLTCGSSTGAVTSGNYPNWVQQKPGQAPRGLIGGTKFLAPGTPARFSGSLLGGKAALTLSGVQPEDEAEYYCVLWYSNRWVFGGGTKLTVL

SEQ ID NO: 3287 - protein, 753 aa, Artificial Sequence
  Synthetic
QVQLQQSGPGLVKPSQTLSLTCAISGDSVSSKSAAWNWIRQSPSGCLEWLGRTFYRSTWYNDYAVSVKSRITINPDTSKNQFSLQLNSVIPEDTAVYYCAREGQWLVYGMDVWGQGTTVTVSSGGGGQGGGGQGGGGQQSVLTQPPSASGTPGQRITISCSGSSSNIGSNTVNWYQQLPGTAPKLLIYRNNQRPSGVPDRFSGSKSGTSASLAISGLQSEDEADYYCAAWDDSLNGRVFGCGTKLTVLSGGGGQEVQLVESGGGLVQPGRSLRLSCAASGFTFHDYPMHWVRQAPGKCLEWVSGISWNSDYIVYADSVKGRFTISRDNAKNSLYLQMNSLSAEDTALYYCAKDTAYGGKYSAFDYWGQGTLVTVSSGGGGQGGGGQGGGGQEIVLTQSPATLSVSPGERATLSCRASQSVSRNLAWYQQKPGQAPRRLIYGASTRATGIPDRFSGSGSGTDFTLTISRLEPEDFAVYYCQQYNNWPLTFGCGTKVEIKSGGGGQEVQLVESGGGLVQPGGSLKLSCAASGFTFNKYAMNWVRQAPGKGLEWVARIRSKYNNYATYYADSVKDRFTISRDDSKNTAYLQMNNLKTEDTAVYYCVRHGNFGNSYISYWAYWGQGTLVTVSSGGGGQGGGGQGGGGQQTVVTQEPSLTVSPGGTVTLTCGSSTGAVTSGNYPNWVQQKPGQAPRGLIGGTKFLAPGTPARFSGSLLGGKAALTLSGVQPEDEAEYYCVLWYSNRWVFGGGTKLTVL

SEQ ID NO: 3288 - protein, 753 aa, Artificial Sequence
  Synthetic
QVQLQQSGPGLVKPSQTLSLTCAISGDSVSSKSAAWNWIRQSPSGCLEWLGRTFYRSTWYNDYAVSVKSRITINPDTSKNQFSLQLNSVIPEDTAVYYCAREGQWLVYGMDVWGQGTTVTVSSGGGGSGGGGSGGGGSQSVLTQPPSASGTPGQRITISCSGSSSNIGSNTVNWYQQLPGTAPKLLIYRNNQRPSGVPDRFSGSKSGTSASLAISGLQSEDEADYYCAAWDDSLNGRVFGCGTKLTVLSGGGGSEVQLVESGGGLVQPGRSLRLSCAASGFTFHDYPMHWVRQAPGKCLEWVSGISWNSDYIVYADSVKGRFTISRDNAKNSLYLQMNSLSAEDTALYYCAKDTAYGGKYSAFDYWGQGTLVTVSSGGGGSGGGGSGGGGSEIVLTQSPATLSVSPGERATLSCRASQSVSRNLAWYQQKPGQAPRRLIYGASTRATGIPDRFSGSGSGTDFTLTISRLEPEDFAVYYCQQYNNWPLTFGCGTKVEIKSGGGGSEVQLVESGGGLVQPGGSLKLSCAASGFTFNKYAINWVRQAPGKGLEWVARIRSKYNNYATYYADAVKDRFTISRDDSKNTVYLQMNNLKTEDTAVYYCARAGNFGSSYISYWAYWGQGTLVTVSSGGGGSGGGGSGGGGSQTVVTQEPSLTVSPGGTVTITCGSSTGAVTSGNYPNWVQKKPGQAPRGLIGGTKFLAPGTPARFSGSLSGGKAALTLSGVQPEDEAEYYCVLWYSNRWVFGSGTKLTVL

SEQ ID NO: 3289 - protein, 753 aa, Artificial Sequence
  Synthetic
QVQLQQSGPGLVKPSQTLSLTCAISGDSVSSKSAAWNWIRQSPSGCLEWLGRTFYRSTWYNDYAVSVKSRITINPDTSKNQFSLQLNSVIPEDTAVYYCAREGQWLVYGMDVWGQGTTVTVSSGGGGQGGGGQGGGGQQSVLTQPPSASGTPGQRITISCSGSSSNIGSNTVNWYQQLPGTAPKLLIYRNNQRPSGVPDRFSGSKSGTSASLAISGLQSEDEADYYCAAWDDSLNGRVFGCGTKLTVLSGGGGQEVQLVESGGGLVQPGRSLRLSCAASGFTFHDYPMHWVRQAPGKCLEWVSGISWNSDYIVYADSVKGRFTISRDNAKNSLYLQMNSLSAEDTALYYCAKDTAYGGKYSAFDYWGQGTLVTVSSGGGGQGGGGQGGGGQEIVLTQSPATLSVSPGERATLSCRASQSVSRNLAWYQQKPGQAPRRLIYGASTRATGIPDRFSGSGSGTDFTLTISRLEPEDFAVYYCQQYNNWPLTFGCGTKVEIKSGGGGQEVQLVESGGGLVQPGGSLKLSCAASGFTFNKYAINWVRQAPGKGLEWVARIRSKYNNYATYYADAVKDRFTISRDDSKNTVYLQMNNLKTEDTAVYYCARAGNFGSSYISYWAYWGQGTLVTVSSGGGGQGGGGQGGGGQQTVVTQEPSLTVSPGGTVTITCGSSTGAVTSGNYPNWVQKKPGQAPRGLIGGTKFLAPGTPARFSGSLSGGKAALTLSGVQPEDEAEYYCVLWYSNRWVFGSGTKLTVL

SEQ ID NO: 3290 - protein, 1241 aa, Artificial Sequence
  Synthetic
QVQLQQSGPGLVKPSQTLSLTCAISGDSVSSKSAAWNWIRQSPSGCLEWLGRTFYRSTWYNDYAVSVKSRITINPDTSKNQFSLQLNSVIPEDTAVYYCAREGQWLVYGMDVWGQGTTVTVSSGGGGSGGGGSGGGGSQSVLTQPPSASGTPGQRITISCSGSSSNIGSNTVNWYQQLPGTAPKLLIYRNNQRPSGVPDRFSGSKSGTSASLAISGLQSEDEADYYCAAWDDSLNGRVFGCGTKLTVLSGGGGSEVQLVESGGGLVQPGRSLRLSCAASGFTFHDYPMHWVRQAPGKCLEWVSGISWNSDYIVYADSVKGRFTISRDNAKNSLYLQMNSLSAEDTALYYCAKDTAYGGKYSAFDYWGQGTLVTVSSGGGGSGGGGSGGGGSEIVLTQSPATLSVSPGERATLSCRASQSVSRNLAWYQQKPGQAPRRLIYGASTRATGIPDRFSGSGSGTDFTLTISRLEPEDFAVYYCQQYNNWPLTFGCGTKVEIKSGGGGSEVQLVESGGGLVQPGGSLKLSCAASGFTFNKYAMNWVRQAPGKGLEWVARIRSKYNNYATYYADSVKDRFTISRDDSKNTAYLQMNNLKTEDTAVYYCVRHGNFGNSYISYWAYWGQGTLVTVSSGGGGSGGGGSGGGGSQTVVTQEPSLTVSPGGTVTLTCGSSTGAVTSGNYPNWVQQKPGQAPRGLIGGTKFLAPGTPARFSGSLLGGKAALTLSGVQPEDEAEYYCVLWYSNRWVFGGGTKLTVLGGGGDKTHTCPPCPAPELLGGPSVFLFPPKPKDTLMISRTPEVTCVVVDVSHEDPEVKFNWYVDGVEVHNAKTKPCEEQYGSTYRCVSVLTVLHQDWLNGKEYKCKVSNKALPAPIEKTISKAKGQPREPQVYTLPPSREEMTKNQVSLTCLVKGFYPSDIAVEWESNGQPENNYKTTPPVLDSDGSFFLYSKLTVDKSRWQQGNVFSCSVMHEALHNHYTQKSLSLSPGKGGGGSGGGGSGGGGSGGGGSGGGGSGGGGSDKTHTCPPCPAPELLGGPSVFLFPPKPKDTLMISRTPEVTCVVVDVSHEDPEVKFNWYVDGVEVHNAKTKPCEEQYGSTYRCVSVLTVLHQDWLNGKEYKCKVSNKALPAPIEKTISKAKGQPREPQVYTLPPSREEMTKNQVSLTCLVKGFYPSDIAVEWESNGQPENNYKTTPPVLDSDGSFFLYSKLTVDKSRWQQGNVFSCSVMHEALHNHYTQKSLSLSPGK

SEQ ID NO: 3291 - protein, 1231 aa, Artificial Sequence
  Synthetic
QVQLQQSGPGLVKPSQTLSLTCAISGDSVSSKSAAWNWIRQSPSGCLEWLGRTFYRSTWYNDYAVSVKSRITINPDTSKNQFSLQLNSVIPEDTAVYYCAREGQWLVYGMDVWGQGTTVTVSSGGGGQGGGGQGGGGQQSVLTQPPSASGTPGQRITISCSGSSSNIGSNTVNWYQQLPGTAPKLLIYRNNQRPSGVPDRFSGSKSGTSASLAISGLQSEDEADYYCAAWDDSLNGRVFGCGTKLTVLSGGGGQEVQLVESGGGLVQPGRSLRLSCAASGFTFHDYPMHWVRQAPGKCLEWVSGISWNSDYIVYADSVKGRFTISRDNAKNSLYLQMNSLSAEDTALYYCAKDTAYGGKYSAFDYWGQGTLVTVSSGGGGQGGGGQGGGGQEIVLTQSPATLSVSPGERATLSCRASQSVSRNLAWYQQKPGQAPRRLIYGASTRATGIPDRFSGSGSGTDFTLTISRLEPEDFAVYYCQQYNNWPLTFGCGTKVEIKSGGGGQEVQLVESGGGLVQPGGSLKLSCAASGFTFNKYAMNWVRQAPGKGLEWVARIRSKYNNYATYYADSVKDRFTISRDDSKNTAYLQMNNLKTEDTAVYYCVRHGNFGNSYISYWAYWGQGTLVTVSSGGGGQGGGGQGGGGQQTVVTQEPSLTVSPGGTVTLTCGSSTGAVTSGNYPNWVQQKPGQAPRGLIGGTKFLAPGTPARFSGSLLGGKAALTLSGVQPEDEAEYYCVLWYSNRWVFGGGTKLTVLGGGGCPPCPAPELLGGPSVFLFPPKPKDTLMISRTPEVTCVVVDVSHEEPEVKFNWYVDGVEVHNAKTKPCEEQYGSTYRCVSVLTVLHQDWLNGKEYKCKVSNKALPAPIEKTISKAKGQPREPQVYTLPPSREEMTKNQVSLTCLVKGFYPSDIAVEWESNGQPENNYKTTPPVLDSDGSFFLYSKLTVDKSRWQQGNVFSCSVMHEALHNHYTQKSLSLSPGKGGGGQGGGGQGGGGQGGGGQGGGGQGGGGQCPPCPAPELLGGPSVFLFPPKPKDTLMISRTPEVTCVVVDVSHEEPEVKFNWYVDGVEVHNAKTKPCEEQYGSTYRCVSVLTVLHQDWLNGKEYKCKVSNKALPAPIEKTISKAKGQPREPQVYTLPPSREEMTKNQVSLTCLVKGFYPSDIAVEWESNGQPENNYKTTPPVLDSDGSFFLYSKLTVDKSRWQQGNVFSCSVMHEALHNHYTQKSLSLSPGK

SEQ ID NO: 3292 - protein, 1241 aa, Artificial Sequence
  Synthetic
QVQLQQSGPGLVKPSQTLSLTCAISGDSVSSKSAAWNWIRQSPSGCLEWLGRTFYRSTWYNDYAVSVKSRITINPDTSKNQFSLQLNSVIPEDTAVYYCAREGQWLVYGMDVWGQGTTVTVSSGGGGSGGGGSGGGGSQSVLTQPPSASGTPGQRITISCSGSSSNIGSNTVNWYQQLPGTAPKLLIYRNNQRPSGVPDRFSGSKSGTSASLAISGLQSEDEADYYCAAWDDSLNGRVFGCGTKLTVLSGGGGSEVQLVESGGGLVQPGRSLRLSCAASGFTFHDYPMHWVRQAPGKCLEWVSGISWNSDYIVYADSVKGRFTISRDNAKNSLYLQMNSLSAEDTALYYCAKDTAYGGKYSAFDYWGQGTLVTVSSGGGGSGGGGSGGGGSEIVLTQSPATLSVSPGERATLSCRASQSVSRNLAWYQQKPGQAPRRLIYGASTRATGIPDRFSGSGSGTDFTLTISRLEPEDFAVYYCQQYNNWPLTFGCGTKVEIKSGGGGSEVQLVESGGGLVQPGGSLKLSCAASGFTFNKYAINWVRQAPGKGLEWVARIRSKYNNYATYYADAVKDRFTISRDDSKNTVYLQMNNLKTEDTAVYYCARAGNFGSSYISYWAYWGQGTLVTVSSGGGGSGGGGSGGGGSQTVVTQEPSLTVSPGGTVTITCGSSTGAVTSGNYPNWVQKKPGQAPRGLIGGTKFLAPGTPARFSGSLSGGKAALTLSGVQPEDEAEYYCVLWYSNRWVFGSGTKLTVLGGGGDKTHTCPPCPAPELLGGPSVFLFPPKPKDTLMISRTPEVTCVVVDVSHEDPEVKFNWYVDGVEVHNAKTKPCEEQYGSTYRCVSVLTVLHQDWLNGKEYKCKVSNKALPAPIEKTISKAKGQPREPQVYTLPPSREEMTKNQVSLTCLVKGFYPSDIAVEWESNGQPENNYKTTPPVLDSDGSFFLYSKLTVDKSRWQQGNVFSCSVMHEALHNHYTQKSLSLSPGKGGGGSGGGGSGGGGSGGGGSGGGGSGGGGSDKTHTCPPCPAPELLGGPSVFLFPPKPKDTLMISRTPEVTCVVVDVSHEDPEVKFNWYVDGVEVHNAKTKPCEEQYGSTYRCVSVLTVLHQDWLNGKEYKCKVSNKALPAPIEKTISKAKGQPREPQVYTLPPSREEMTKNQVSLTCLVKGFYPSDIAVEWESNGQPENNYKTTPPVLDSDGSFFLYSKLTVDKSRWQQGNVFSCSVMHEALHNHYTQKSLSLSPGK

SEQ ID NO: 3293 - protein, 1231 aa, Artificial Sequence
  Synthetic
QVQLQQSGPGLVKPSQTLSLTCAISGDSVSSKSAAWNWIRQSPSGCLEWLGRTFYRSTWYNDYAVSVKSRITINPDTSKNQFSLQLNSVIPEDTAVYYCAREGQWLVYGMDVWGQGTTVTVSSGGGGQGGGGQGGGGQQSVLTQPPSASGTPGQRITISCSGSSSNIGSNTVNWYQQLPGTAPKLLIYRNNQRPSGVPDRFSGSKSGTSASLAISGLQSEDEADYYCAAWDDSLNGRVFGCGTKLTVLSGGGGQEVQLVESGGGLVQPGRSLRLSCAASGFTFHDYPMHWVRQAPGKCLEWVSGISWNSDYIVYADSVKGRFTISRDNAKNSLYLQMNSLSAEDTALYYCAKDTAYGGKYSAFDYWGQGTLVTVSSGGGGQGGGGQGGGGQEIVLTQSPATLSVSPGERATLSCRASQSVSRNLAWYQQKPGQAPRRLIYGASTRATGIPDRFSGSGSGTDFTLTISRLEPEDFAVYYCQQYNNWPLTFGCGTKVEIKSGGGGQEVQLVESGGGLVQPGGSLKLSCAASGFTFNKYAINWVRQAPGKGLEWVARIRSKYNNYATYYADAVKDRFTISRDDSKNTVYLQMNNLKTEDTAVYYCARAGNFGSSYISYWAYWGQGTLVTVSSGGGGQGGGGQGGGGQQTVVTQEPSLTVSPGGTVTITCGSSTGAVTSGNYPNWVQKKPGQAPRGLIGGTKFLAPGTPARFSGSLSGGKAALTLSGVQPEDEAEYYCVLWYSNRWVFGSGTKLTVLGGGGCPPCPAPELLGGPSVFLFPPKPKDTLMISRTPEVTCVVVDVSHEEPEVKFNWYVDGVEVHNAKTKPCEEQYGSTYRCVSVLTVLHQDWLNGKEYKCKVSNKALPAPIEKTISKAKGQPREPQVYTLPPSREEMTKNQVSLTCLVKGFYPSDIAVEWESNGQPENNYKTTPPVLDSDGSFFLYSKLTVDKSRWQQGNVFSCSVMHEALHNHYTQKSLSLSPGKGGGGQGGGGQGGGGQGGGGQGGGGQGGGGQCPPCPAPELLGGPSVFLFPPKPKDTLMISRTPEVTCVVVDVSHEEPEVKFNWYVDGVEVHNAKTKPCEEQYGSTYRCVSVLTVLHQDWLNGKEYKCKVSNKALPAPIEKTISKAKGQPREPQVYTLPPSREEMTKNQVSLTCLVKGFYPSDIAVEWESNGQPENNYKTTPPVLDSDGSFFLYSKLTVDKSRWQQGNVFSCSVMHEALHNHYTQKSLSLSPGK

SEQ ID NO: 3294 - protein, 502 aa, Artificial Sequence
  Synthetic
QVQLQESGPGLVKPSQTLSLTCTVSGDSISSGGYYWSWIRQHPGKCLEWIGYIYFTGYTYYNPSLKSRLTISVDTSKNQFSLKLSSVTAADTAVYYCARGRLGFGEFGYYYYGMDVWGQGTAVTVSSGGGGSGGGGSGGGGSQSALTQPPSASGSPGQSITISCTGTSSDVGGYNYVSWYQQHPGKAPKLIIYEVSNRPSGVPDRFSGSKSGNTASLTVSGLQAEDEADYYCSSYAGSNNWVFGCGTKLTVLSGGGGSEVQLVESGGGLVQPGRSLRLSCAASGFTFHDYPMHWVRQAPGKCLEWVSGISWNSDYIVYADSVKGRFTISRDNAKNSLYLQMNSLSAEDTALYYCAKDTAYGGKYSAFDYWGQGTLVTVSSGGGGSGGGGSGGGGSEIVLTQSPATLSVSPGERATLSCRASQSVSRNLAWYQQKPGQAPRRLIYGASTRATGIPDRFSGSGSGTDFTLTISRLEPEDFAVYYCQQYNNWPLTFGCGTKVEIK

SEQ ID NO: 3295 - protein, 502 aa, Artificial Sequence
  Synthetic
QVQLQESGPGLVKPSQTLSLTCTVSGDSISSGGYYWSWIRQHPGKCLEWIGYIYFTGYTYYNPSLKSRLTISVDTSKNQFSLKLSSVTAADTAVYYCARGRLGFGEFGYYYYGMDVWGQGTAVTVSSGGGGQGGGGQGGGGQQSALTQPPSASGSPGQSITISCTGTSSDVGGYNYVSWYQQHPGKAPKLIIYEVSNRPSGVPDRFSGSKSGNTASLTVSGLQAEDEADYYCSSYAGSNNWVFGCGTKLTVLSGGGGQEVQLVESGGGLVQPGRSLRLSCAASGFTFHDYPMHWVRQAPGKCLEWVSGISWNSDYIVYADSVKGRFTISRDNAKNSLYLQMNSLSAEDTALYYCAKDTAYGGKYSAFDYWGQGTLVTVSSGGGGQGGGGQGGGGQEIVLTQSPATLSVSPGERATLSCRASQSVSRNLAWYQQKPGQAPRRLIYGASTRATGIPDRFSGSGSGTDFTLTISRLEPEDFAVYYCQQYNNWPLTFGCGTKVEIK

SEQ ID NO: 3296 - protein, 757 aa, Artificial Sequence
  Synthetic
QVQLQESGPGLVKPSQTLSLTCTVSGDSISSGGYYWSWIRQHPGKCLEWIGYIYFTGYTYYNPSLKSRLTISVDTSKNQFSLKLSSVTAADTAVYYCARGRLGFGEFGYYYYGMDVWGQGTAVTVSSGGGGSGGGGSGGGGSQSALTQPPSASGSPGQSITISCTGTSSDVGGYNYVSWYQQHPGKAPKLIIYEVSNRPSGVPDRFSGSKSGNTASLTVSGLQAEDEADYYCSSYAGSNNWVFGCGTKLTVLSGGGGSEVQLVESGGGLVQPGRSLRLSCAASGFTFHDYPMHWVRQAPGKCLEWVSGISWNSDYIVYADSVKGRFTISRDNAKNSLYLQMNSLSAEDTALYYCAKDTAYGGKYSAFDYWGQGTLVTVSSGGGGSGGGGSGGGGSEIVLTQSPATLSVSPGERATLSCRASQSVSRNLAWYQQKPGQAPRRLIYGASTRATGIPDRFSGSGSGTDFTLTISRLEPEDFAVYYCQQYNNWPLTFGCGTKVEIKSGGGGSEVQLVESGGGLVQPGGSLKLSCAASGFTFNKYAMNWVRQAPGKGLEWVARIRSKYNNYATYYADSVKDRFTISRDDSKNTAYLQMNNLKTEDTAVYYCVRHGNFGNSYISYWAYWGQGTLVTVSSGGGGSGGGGSGGGGSQTVVTQEPSLTVSPGGTVTLTCGSSTGAVTSGNYPNWVQQKPGQAPRGLIGGTKFLAPGTPARFSGSLLGGKAALTLSGVQPEDEAEYYCVLWYSNRWVFGGGTKLTVL

SEQ ID NO: 3297 - protein, 757 aa, Artificial Sequence
  Synthetic
QVQLQESGPGLVKPSQTLSLTCTVSGDSISSGGYYWSWIRQHPGKCLEWIGYIYFTGYTYYNPSLKSRLTISVDTSKNQFSLKLSSVTAADTAVYYCARGRLGFGEFGYYYYGMDVWGQGTAVTVSSGGGGQGGGGQGGGGQQSALTQPPSASGSPGQSITISCTGTSSDVGGYNYVSWYQQHPGKAPKLIIYEVSNRPSGVPDRFSGSKSGNTASLTVSGLQAEDEADYYCSSYAGSNNWVFGCGTKLTVLSGGGGQEVQLVESGGGLVQPGRSLRLSCAASGFTFHDYPMHWVRQAPGKCLEWVSGISWNSDYIVYADSVKGRFTISRDNAKNSLYLQMNSLSAEDTALYYCAKDTAYGGKYSAFDYWGQGTLVTVSSGGGGQGGGGQGGGGQEIVLTQSPATLSVSPGERATLSCRASQSVSRNLAWYQQKPGQAPRRLIYGASTRATGIPDRFSGSGSGTDFTLTISRLEPEDFAVYYCQQYNNWPLTFGCGTKVEIKSGGGGQEVQLVESGGGLVQPGGSLKLSCAASGFTFNKYAMNWVRQAPGKGLEWVARIRSKYNNYATYYADSVKDRFTISRDDSKNTAYLQMNNLKTEDTAVYYCVRHGNFGNSYISYWAYWGQGTLVTVSSGGGGQGGGGQGGGGQQTVVTQEPSLTVSPGGTVTLTCGSSTGAVTSGNYPNWVQQKPGQAPRGLIGGTKFLAPGTPARFSGSLLGGKAALTLSGVQPEDEAEYYCVLWYSNRWVFGGGTKLTVL

SEQ ID NO: 3298 - protein, 757 aa, Artificial Sequence
  Synthetic
QVQLQESGPGLVKPSQTLSLTCTVSGDSISSGGYYWSWIRQHPGKCLEWIGYIYFTGYTYYNPSLKSRLTISVDTSKNQFSLKLSSVTAADTAVYYCARGRLGFGEFGYYYYGMDVWGQGTAVTVSSGGGGSGGGGSGGGGSQSALTQPPSASGSPGQSITISCTGTSSDVGGYNYVSWYQQHPGKAPKLIIYEVSNRPSGVPDRFSGSKSGNTASLTVSGLQAEDEADYYCSSYAGSNNWVFGCGTKLTVLSGGGGSEVQLVESGGGLVQPGRSLRLSCAASGFTFHDYPMHWVRQAPGKCLEWVSGISWNSDYIVYADSVKGRFTISRDNAKNSLYLQMNSLSAEDTALYYCAKDTAYGGKYSAFDYWGQGTLVTVSSGGGGSGGGGSGGGGSEIVLTQSPATLSVSPGERATLSCRASQSVSRNLAWYQQKPGQAPRRLIYGASTRATGIPDRFSGSGSGTDFTLTISRLEPEDFAVYYCQQYNNWPLTFGCGTKVEIKSGGGGSEVQLVESGGGLVQPGGSLKLSCAASGFTFNKYAINWVRQAPGKGLEWVARIRSKYNNYATYYADAVKDRFTISRDDSKNTVYLQMNNLKTEDTAVYYCARAGNFGSSYISYWAYWGQGTLVTVSSGGGGSGGGGSGGGGSQTVVTQEPSLTVSPGGTVTITCGSSTGAVTSGNYPNWVQKKPGQAPRGLIGGTKFLAPGTPARFSGSLSGGKAALTLSGVQPEDEAEYYCVLWYSNRWVFGSGTKLTVL

SEQ ID NO: 3299 - protein, 757 aa, Artificial Sequence
  Synthetic
QVQLQESGPGLVKPSQTLSLTCTVSGDSISSGGYYWSWIRQHPGKCLEWIGYIYFTGYTYYNPSLKSRLTISVDTSKNQFSLKLSSVTAADTAVYYCARGRLGFGEFGYYYYGMDVWGQGTAVTVSSGGGGQGGGGQGGGGQQSALTQPPSASGSPGQSITISCTGTSSDVGGYNYVSWYQQHPGKAPKLIIYEVSNRPSGVPDRFSGSKSGNTASLTVSGLQAEDEADYYCSSYAGSNNWVFGCGTKLTVLSGGGGQEVQLVESGGGLVQPGRSLRLSCAASGFTFHDYPMHWVRQAPGKCLEWVSGISWNSDYIVYADSVKGRFTISRDNAKNSLYLQMNSLSAEDTALYYCAKDTAYGGKYSAFDYWGQGTLVTVSSGGGGQGGGGQGGGGQEIVLTQSPATLSVSPGERATLSCRASQSVSRNLAWYQQKPGQAPRRLIYGASTRATGIPDRFSGSGSGTDFTLTISRLEPEDFAVYYCQQYNNWPLTFGCGTKVEIKSGGGGQEVQLVESGGGLVQPGGSLKLSCAASGFTFNKYAINWVRQAPGKGLEWVARIRSKYNNYATYYADAVKDRFTISRDDSKNTVYLQMNNLKTEDTAVYYCARAGNFGSSYISYWAYWGQGTLVTVSSGGGGQGGGGQGGGGQQTVVTQEPSLTVSPGGTVTITCGSSTGAVTSGNYPNWVQKKPGQAPRGLIGGTKFLAPGTPARFSGSLSGGKAALTLSGVQPEDEAEYYCVLWYSNRWVFGSGTKLTVL

SEQ ID NO: 3300 - protein, 1245 aa, Artificial Sequence
  Synthetic
QVQLQESGPGLVKPSQTLSLTCTVSGDSISSGGYYWSWIRQHPGKCLEWIGYIYFTGYTYYNPSLKSRLTISVDTSKNQFSLKLSSVTAADTAVYYCARGRLGFGEFGYYYYGMDVWGQGTAVTVSSGGGGSGGGGSGGGGSQSALTQPPSASGSPGQSITISCTGTSSDVGGYNYVSWYQQHPGKAPKLIIYEVSNRPSGVPDRFSGSKSGNTASLTVSGLQAEDEADYYCSSYAGSNNWVFGCGTKLTVLSGGGGSEVQLVESGGGLVQPGRSLRLSCAASGFTFHDYPMHWVRQAPGKCLEWVSGISWNSDYIVYADSVKGRFTISRDNAKNSLYLQMNSLSAEDTALYYCAKDTAYGGKYSAFDYWGQGTLVTVSSGGGGSGGGGSGGGGSEIVLTQSPATLSVSPGERATLSCRASQSVSRNLAWYQQKPGQAPRRLIYGASTRATGIPDRFSGSGSGTDFTLTISRLEPEDFAVYYCQQYNNWPLTFGCGTKVEIKSGGGGSEVQLVESGGGLVQPGGSLKLSCAASGFTFNKYAMNWVRQAPGKGLEWVARIRSKYNNYATYYADSVKDRFTISRDDSKNTAYLQMNNLKTEDTAVYYCVRHGNFGNSYISYWAYWGQGTLVTVSSGGGGSGGGGSGGGGSQTVVTQEPSLTVSPGGTVTLTCGSSTGAVTSGNYPNWVQQKPGQAPRGLIGGTKFLAPGTPARFSGSLLGGKAALTLSGVQPEDEAEYYCVLWYSNRWVFGGGTKLTVLGGGGDKTHTCPPCPAPELLGGPSVFLFPPKPKDTLMISRTPEVTCVVVDVSHEDPEVKFNWYVDGVEVHNAKTKPCEEQYGSTYRCVSVLTVLHQDWLNGKEYKCKVSNKALPAPIEKTISKAKGQPREPQVYTLPPSREEMTKNQVSLTCLVKGFYPSDIAVEWESNGQPENNYKTTPPVLDSDGSFFLYSKLTVDKSRWQQGNVFSCSVMHEALHNHYTQKSLSLSPGKGGGGSGGGGSGGGGSGGGGSGGGGSGGGGSDKTHTCPPCPAPELLGGPSVFLFPPKPKDTLMISRTPEVTCVVVDVSHEDPEVKFNWYVDGVEVHNAKTKPCEEQYGSTYRCVSVLTVLHQDWLNGKEYKCKVSNKALPAPIEKTISKAKGQPREPQVYTLPPSREEMTKNQVSLTCLVKGFYPSDIAVEWESNGQPENNYKTTPPVLDSDGSFFLYSKLTVDKSRWQQGNVFSCSVMHEALHNHYTQKSLSLSPGK

SEQ ID NO: 3301 - protein, 1235 aa, Artificial Sequence
  Synthetic
QVQLQESGPGLVKPSQTLSLTCTVSGDSISSGGYYWSWIRQHPGKCLEWIGYIYFTGYTYYNPSLKSRLTISVDTSKNQFSLKLSSVTAADTAVYYCARGRLGFGEFGYYYYGMDVWGQGTAVTVSSGGGGQGGGGQGGGGQQSALTQPPSASGSPGQSITISCTGTSSDVGGYNYVSWYQQHPGKAPKLIIYEVSNRPSGVPDRFSGSKSGNTASLTVSGLQAEDEADYYCSSYAGSNNWVFGCGTKLTVLSGGGGQEVQLVESGGGLVQPGRSLRLSCAASGFTFHDYPMHWVRQAPGKCLEWVSGISWNSDYIVYADSVKGRFTISRDNAKNSLYLQMNSLSAEDTALYYCAKDTAYGGKYSAFDYWGQGTLVTVSSGGGGQGGGGQGGGGQEIVLTQSPATLSVSPGERATLSCRASQSVSRNLAWYQQKPGQAPRRLIYGASTRATGIPDRFSGSGSGTDFTLTISRLEPEDFAVYYCQQYNNWPLTFGCGTKVEIKSGGGGQEVQLVESGGGLVQPGGSLKLSCAASGFTFNKYAMNWVRQAPGKGLEWVARIRSKYNNYATYYADSVKDRFTISRDDSKNTAYLQMNNLKTEDTAVYYCVRHGNFGNSYISYWAYWGQGTLVTVSSGGGGQGGGGQGGGGQQTVVTQEPSLTVSPGGTVTLTCGSSTGAVTSGNYPNWVQQKPGQAPRGLIGGTKFLAPGTPARFSGSLLGGKAALTLSGVQPEDEAEYYCVLWYSNRWVFGGGTKLTVLGGGGCPPCPAPELLGGPSVFLFPPKPKDTLMISRTPEVTCVVVDVSHEEPEVKFNWYVDGVEVHNAKTKPCEEQYGSTYRCVSVLTVLHQDWLNGKEYKCKVSNKALPAPIEKTISKAKGQPREPQVYTLPPSREEMTKNQVSLTCLVKGFYPSDIAVEWESNGQPENNYKTTPPVLDSDGSFFLYSKLTVDKSRWQQGNVFSCSVMHEALHNHYTQKSLSLSPGKGGGGQGGGGQGGGGQGGGGQGGGGQGGGGQCPPCPAPELLGGPSVFLFPPKPKDTLMISRTPEVTCVVVDVSHEEPEVKFNWYVDGVEVHNAKTKPCEEQYGSTYRCVSVLTVLHQDWLNGKEYKCKVSNKALPAPIEKTISKAKGQPREPQVYTLPPSREEMTKNQVSLTCLVKGFYPSDIAVEWESNGQPENNYKTTPPVLDSDGSFFLYSKLTVDKSRWQQGNVFSCSVMHEALHNHYTQKSLSLSPGK

SEQ ID NO: 3302 - protein, 1245 aa, Artificial Sequence
  Synthetic
QVQLQESGPGLVKPSQTLSLTCTVSGDSISSGGYYWSWIRQHPGKCLEWIGYIYFTGYTYYNPSLKSRLTISVDTSKNQFSLKLSSVTAADTAVYYCARGRLGFGEFGYYYYGMDVWGQGTAVTVSSGGGGSGGGGSGGGGSQSALTQPPSASGSPGQSITISCTGTSSDVGGYNYVSWYQQHPGKAPKLIIYEVSNRPSGVPDRFSGSKSGNTASLTVSGLQAEDEADYYCSSYAGSNNWVFGCGTKLTVLSGGGGSEVQLVESGGGLVQPGRSLRLSCAASGFTFHDYPMHWVRQAPGKCLEWVSGISWNSDYIVYADSVKGRFTISRDNAKNSLYLQMNSLSAEDTALYYCAKDTAYGGKYSAFDYWGQGTLVTVSSGGGGSGGGGSGGGGSEIVLTQSPATLSVSPGERATLSCRASQSVSRNLAWYQQKPGQAPRRLIYGASTRATGIPDRFSGSGSGTDFTLTISRLEPEDFAVYYCQQYNNWPLTFGCGTKVEIKSGGGGSEVQLVESGGGLVQPGGSLKLSCAASGFTFNKYAINWVRQAPGKGLEWVARIRSKYNNYATYYADAVKDRFTISRDDSKNTVYLQMNNLKTEDTAVYYCARAGNFGSSYISYWAYWGQGTLVTVSSGGGGSGGGGSGGGGSQTVVTQEPSLTVSPGGTVTITCGSSTGAVTSGNYPNWVQKKPGQAPRGLIGGTKFLAPGTPARFSGSLSGGKAALTLSGVQPEDEAEYYCVLWYSNRWVFGSGTKLTVLGGGGDKTHTCPPCPAPELLGGPSVFLFPPKPKDTLMISRTPEVTCVVVDVSHEDPEVKFNWYVDGVEVHNAKTKPCEEQYGSTYRCVSVLTVLHQDWLNGKEYKCKVSNKALPAPIEKTISKAKGQPREPQVYTLPPSREEMTKNQVSLTCLVKGFYPSDIAVEWESNGQPENNYKTTPPVLDSDGSFFLYSKLTVDKSRWQQGNVFSCSVMHEALHNHYTQKSLSLSPGKGGGGSGGGGSGGGGSGGGGSGGGGSGGGGSDKTHTCPPCPAPELLGGPSVFLFPPKPKDTLMISRTPEVTCVVVDVSHEDPEVKFNWYVDGVEVHNAKTKPCEEQYGSTYRCVSVLTVLHQDWLNGKEYKCKVSNKALPAPIEKTISKAKGQPREPQVYTLPPSREEMTKNQVSLTCLVKGFYPSDIAVEWESNGQPENNYKTTPPVLDSDGSFFLYSKLTVDKSRWQQGNVFSCSVMHEALHNHYTQKSLSLSPGK

SEQ ID NO: 3303 - protein, 1235 aa, Artificial Sequence
  Synthetic
QVQLQESGPGLVKPSQTLSLTCTVSGDSISSGGYYWSWIRQHPGKCLEWIGYIYFTGYTYYNPSLKSRLTISVDTSKNQFSLKLSSVTAADTAVYYCARGRLGFGEFGYYYYGMDVWGQGTAVTVSSGGGGQGGGGQGGGGQQSALTQPPSASGSPGQSITISCTGTSSDVGGYNYVSWYQQHPGKAPKLIIYEVSNRPSGVPDRFSGSKSGNTASLTVSGLQAEDEADYYCSSYAGSNNWVFGCGTKLTVLSGGGGQEVQLVESGGGLVQPGRSLRLSCAASGFTFHDYPMHWVRQAPGKCLEWVSGISWNSDYIVYADSVKGRFTISRDNAKNSLYLQMNSLSAEDTALYYCAKDTAYGGKYSAFDYWGQGTLVTVSSGGGGQGGGGQGGGGQEIVLTQSPATLSVSPGERATLSCRASQSVSRNLAWYQQKPGQAPRRLIYGASTRATGIPDRFSGSGSGTDFTLTISRLEPEDFAVYYCQQYNNWPLTFGCGTKVEIKSGGGGQEVQLVESGGGLVQPGGSLKLSCAASGFTFNKYAINWVRQAPGKGLEWVARIRSKYNNYATYYADAVKDRFTISRDDSKNTVYLQMNNLKTEDTAVYYCARAGNFGSSYISYWAYWGQGTLVTVSSGGGGQGGGGQGGGGQQTVVTQEPSLTVSPGGTVTITCGSSTGAVTSGNYPNWVQKKPGQAPRGLIGGTKFLAPGTPARFSGSLSGGKAALTLSGVQPEDEAEYYCVLWYSNRWVFGSGTKLTVLGGGGCPPCPAPELLGGPSVFLFPPKPKDTLMISRTPEVTCVVVDVSHEEPEVKFNWYVDGVEVHNAKTKPCEEQYGSTYRCVSVLTVLHQDWLNGKEYKCKVSNKALPAPIEKTISKAKGQPREPQVYTLPPSREEMTKNQVSLTCLVKGFYPSDIAVEWESNGQPENNYKTTPPVLDSDGSFFLYSKLTVDKSRWQQGNVFSCSVMHEALHNHYTQKSLSLSPGKGGGGQGGGGQGGGGQGGGGQGGGGQGGGGQCPPCPAPELLGGPSVFLFPPKPKDTLMISRTPEVTCVVVDVSHEEPEVKFNWYVDGVEVHNAKTKPCEEQYGSTYRCVSVLTVLHQDWLNGKEYKCKVSNKALPAPIEKTISKAKGQPREPQVYTLPPSREEMTKNQVSLTCLVKGFYPSDIAVEWESNGQPENNYKTTPPVLDSDGSFFLYSKLTVDKSRWQQGNVFSCSVMHEALHNHYTQKSLSLSPGK

SEQ ID NO: 3304 - protein, 492 aa, Artificial Sequence
  Synthetic
QVQLVQSGAEVKKPGASVKVSCKASGYTFNNYGISWVRQAPGQCLEWMGWISAYNGKTSYAQKFQGRVTMTTDTSTGTAYMELRSLRSDDTAVYYCARDLDFLTGWEYWGQGTLVTVSSGGGGSGGGGSGGGGSEIVLTQSPATLSVSPGERATLSCRASQSVNSNLAWYQQKPGQAPRLLIYGASTRATGIPARFSGSGSGTEFTLTISSLQSEDFAVYYCQQYHTWPVLTFGCGTKVEIKSGGGGSEVQLVESGGGLVQPGRSLRLSCAASGFTFHDYPMHWVRQAPGKCLEWVSGISWNSDYIVYADSVKGRFTISRDNAKNSLYLQMNSLSAEDTALYYCAKDTAYGGKYSAFDYWGQGTLVTVSSGGGGSGGGGSGGGGSEIVLTQSPATLSVSPGERATLSCRASQSVSRNLAWYQQKPGQAPRRLIYGASTRATGIPDRFSGSGSGTDFTLTISRLEPEDFAVYYCQQYNNWPLTFGCGTKVEIK

SEQ ID NO: 3305 - protein, 492 aa, Artificial Sequence
  Synthetic
QVQLVQSGAEVKKPGASVKVSCKASGYTFNNYGISWVRQAPGQCLEWMGWISAYNGKTSYAQKFQGRVTMTTDTSTGTAYMELRSLRSDDTAVYYCARDLDFLTGWEYWGQGTLVTVSSGGGGQGGGGQGGGGQEIVLTQSPATLSVSPGERATLSCRASQSVNSNLAWYQQKPGQAPRLLIYGASTRATGIPARFSGSGSGTEFTLTISSLQSEDFAVYYCQQYHTWPVLTFGCGTKVEIKSGGGGQEVQLVESGGGLVQPGRSLRLSCAASGFTFHDYPMHWVRQAPGKCLEWVSGISWNSDYIVYADSVKGRFTISRDNAKNSLYLQMNSLSAEDTALYYCAKDTAYGGKYSAFDYWGQGTLVTVSSGGGGQGGGGQGGGGQEIVLTQSPATLSVSPGERATLSCRASQSVSRNLAWYQQKPGQAPRRLIYGASTRATGIPDRFSGSGSGTDFTLTISRLEPEDFAVYYCQQYNNWPLTFGCGTKVEIK

SEQ ID NO: 3306 - protein, 747 aa, Artificial Sequence
  Synthetic
QVQLVQSGAEVKKPGASVKVSCKASGYTFNNYGISWVRQAPGQCLEWMGWISAYNGKTSYAQKFQGRVTMTTDTSTGTAYMELRSLRSDDTAVYYCARDLDFLTGWEYWGQGTLVTVSSGGGGSGGGGSGGGGSEIVLTQSPATLSVSPGERATLSCRASQSVNSNLAWYQQKPGQAPRLLIYGASTRATGIPARFSGSGSGTEFTLTISSLQSEDFAVYYCQQYHTWPVLTFGCGTKVEIKSGGGGSEVQLVESGGGLVQPGRSLRLSCAASGFTFHDYPMHWVRQAPGKCLEWVSGISWNSDYIVYADSVKGRFTISRDNAKNSLYLQMNSLSAEDTALYYCAKDTAYGGKYSAFDYWGQGTLVTVSSGGGGSGGGGSGGGGSEIVLTQSPATLSVSPGERATLSCRASQSVSRNLAWYQQKPGQAPRRLIYGASTRATGIPDRFSGSGSGTDFTLTISRLEPEDFAVYYCQQYNNWPLTFGCGTKVEIKSGGGGSEVQLVESGGGLVQPGGSLKLSCAASGFTFNKYAMNWVRQAPGKGLEWVARIRSKYNNYATYYADSVKDRFTISRDDSKNTAYLQMNNLKTEDTAVYYCVRHGNFGNSYISYWAYWGQGTLVTVSSGGGGSGGGGSGGGGSQTVVTQEPSLTVSPGGTVTLTCGSSTGAVTSGNYPNWVQQKPGQAPRGLIGGTKFLAPGTPARFSGSLLGGKAALTLSGVQPEDEAEYYCVLWYSNRWVFGGGTKLTVL

SEQ ID NO: 3307 - protein, 747 aa, Artificial Sequence
  Synthetic
QVQLVQSGAEVKKPGASVKVSCKASGYTFNNYGISWVRQAPGQCLEWMGWISAYNGKTSYAQKFQGRVTMTTDTSTGTAYMELRSLRSDDTAVYYCARDLDFLTGWEYWGQGTLVTVSSGGGGQGGGGQGGGGQEIVLTQSPATLSVSPGERATLSCRASQSVNSNLAWYQQKPGQAPRLLIYGASTRATGIPARFSGSGSGTEFTLTISSLQSEDFAVYYCQQYHTWPVLTFGCGTKVEIKSGGGGQEVQLVESGGGLVQPGRSLRLSCAASGFTFHDYPMHWVRQAPGKCLEWVSGISWNSDYIVYADSVKGRFTISRDNAKNSLYLQMNSLSAEDTALYYCAKDTAYGGKYSAFDYWGQGTLVTVSSGGGGQGGGGQGGGGQEIVLTQSPATLSVSPGERATLSCRASQSVSRNLAWYQQKPGQAPRRLIYGASTRATGIPDRFSGSGSGTDFTLTISRLEPEDFAVYYCQQYNNWPLTFGCGTKVEIKSGGGGQEVQLVESGGGLVQPGGSLKLSCAASGFTFNKYAMNWVRQAPGKGLEWVARIRSKYNNYATYYADSVKDRFTISRDDSKNTAYLQMNNLKTEDTAVYYCVRHGNFGNSYISYWAYWGQGTLVTVSSGGGGQGGGGQGGGGQQTVVTQEPSLTVSPGGTVTLTCGSSTGAVTSGNYPNWVQQKPGQAPRGLIGGTKFLAPGTPARFSGSLLGGKAALTLSGVQPEDEAEYYCVLWYSNRWVFGGGTKLTVL

SEQ ID NO: 3308 - protein, 747 aa, Artificial Sequence
  Synthetic
QVQLVQSGAEVKKPGASVKVSCKASGYTFNNYGISWVRQAPGQCLEWMGWISAYNGKTSYAQKFQGRVTMTTDTSTGTAYMELRSLRSDDTAVYYCARDLDFLTGWEYWGQGTLVTVSSGGGGSGGGGSGGGGSEIVLTQSPATLSVSPGERATLSCRASQSVNSNLAWYQQKPGQAPRLLIYGASTRATGIPARFSGSGSGTEFTLTISSLQSEDFAVYYCQQYHTWPVLTFGCGTKVEIKSGGGGSEVQLVESGGGLVQPGRSLRLSCAASGFTFHDYPMHWVRQAPGKCLEWVSGISWNSDYIVYADSVKGRFTISRDNAKNSLYLQMNSLSAEDTALYYCAKDTAYGGKYSAFDYWGQGTLVTVSSGGGGSGGGGSGGGGSEIVLTQSPATLSVSPGERATLSCRASQSVSRNLAWYQQKPGQAPRRLIYGASTRATGIPDRFSGSGSGTDFTLTISRLEPEDFAVYYCQQYNNWPLTFGCGTKVEIKSGGGGSEVQLVESGGGLVQPGGSLKLSCAASGFTFNKYAINWVRQAPGKGLEWVARIRSKYNNYATYYADAVKDRFTISRDDSKNTVYLQMNNLKTEDTAVYYCARAGNFGSSYISYWAYWGQGTLVTVSSGGGGSGGGGSGGGGSQTVVTQEPSLTVSPGGTVTITCGSSTGAVTSGNYPNWVQKKPGQAPRGLIGGTKFLAPGTPARFSGSLSGGKAALTLSGVQPEDEAEYYCVLWYSNRWVFGSGTKLTVL

SEQ ID NO: 3309 - protein, 747 aa, Artificial Sequence
  Synthetic
QVQLVQSGAEVKKPGASVKVSCKASGYTFNNYGISWVRQAPGQCLEWMGWISAYNGKTSYAQKFQGRVTMTTDTSTGTAYMELRSLRSDDTAVYYCARDLDFLTGWEYWGQGTLVTVSSGGGGQGGGGQGGGGQEIVLTQSPATLSVSPGERATLSCRASQSVNSNLAWYQQKPGQAPRLLIYGASTRATGIPARFSGSGSGTEFTLTISSLQSEDFAVYYCQQYHTWPVLTFGCGTKVEIKSGGGGQEVQLVESGGGLVQPGRSLRLSCAASGFTFHDYPMHWVRQAPGKCLEWVSGISWNSDYIVYADSVKGRFTISRDNAKNSLYLQMNSLSAEDTALYYCAKDTAYGGKYSAFDYWGQGTLVTVSSGGGGQGGGGQGGGGQEIVLTQSPATLSVSPGERATLSCRASQSVSRNLAWYQQKPGQAPRRLIYGASTRATGIPDRFSGSGSGTDFTLTISRLEPEDFAVYYCQQYNNWPLTFGCGTKVEIKSGGGGQEVQLVESGGGLVQPGGSLKLSCAASGFTFNKYAINWVRQAPGKGLEWVARIRSKYNNYATYYADAVKDRFTISRDDSKNTVYLQMNNLKTEDTAVYYCARAGNFGSSYISYWAYWGQGTLVTVSSGGGGQGGGGQGGGGQQTVVTQEPSLTVSPGGTVTITCGSSTGAVTSGNYPNWVQKKPGQAPRGLIGGTKFLAPGTPARFSGSLSGGKAALTLSGVQPEDEAEYYCVLWYSNRWVFGSGTKLTVL

SEQ ID NO: 3310 - protein, 1235 aa, Artificial Sequence
  Synthetic
QVQLVQSGAEVKKPGASVKVSCKASGYTFNNYGISWVRQAPGQCLEWMGWISAYNGKTSYAQKFQGRVTMTTDTSTGTAYMELRSLRSDDTAVYYCARDLDFLTGWEYWGQGTLVTVSSGGGGSGGGGSGGGGSEIVLTQSPATLSVSPGERATLSCRASQSVNSNLAWYQQKPGQAPRLLIYGASTRATGIPARFSGSGSGTEFTLTISSLQSEDFAVYYCQQYHTWPVLTFGCGTKVEIKSGGGGSEVQLVESGGGLVQPGRSLRLSCAASGFTFHDYPMHWVRQAPGKCLEWVSGISWNSDYIVYADSVKGRFTISRDNAKNSLYLQMNSLSAEDTALYYCAKDTAYGGKYSAFDYWGQGTLVTVSSGGGGSGGGGSGGGGSEIVLTQSPATLSVSPGERATLSCRASQSVSRNLAWYQQKPGQAPRRLIYGASTRATGIPDRFSGSGSGTDFTLTISRLEPEDFAVYYCQQYNNWPLTFGCGTKVEIKSGGGGSEVQLVESGGGLVQPGGSLKLSCAASGFTFNKYAMNWVRQAPGKGLEWVARIRSKYNNYATYYADSVKDRFTISRDDSKNTAYLQMNNLKTEDTAVYYCVRHGNFGNSYISYWAYWGQGTLVTVSSGGGGSGGGGSGGGGSQTVVTQEPSLTVSPGGTVTLTCGSSTGAVTSGNYPNWVQQKPGQAPRGLIGGTKFLAPGTPARFSGSLLGGKAALTLSGVQPEDEAEYYCVLWYSNRWVFGGGTKLTVLGGGGDKTHTCPPCPAPELLGGPSVFLFPPKPKDTLMISRTPEVTCVVVDVSHEDPEVKFNWYVDGVEVHNAKTKPCEEQYGSTYRCVSVLTVLHQDWLNGKEYKCKVSNKALPAPIEKTISKAKGQPREPQVYTLPPSREEMTKNQVSLTCLVKGFYPSDIAVEWESNGQPENNYKTTPPVLDSDGSFFLYSKLTVDKSRWQQGNVFSCSVMHEALHNHYTQKSLSLSPGKGGGGSGGGGSGGGGSGGGGSGGGGSGGGGSDKTHTCPPCPAPELLGGPSVFLFPPKPKDTLMISRTPEVTCVVVDVSHEDPEVKFNWYVDGVEVHNAKTKPCEEQYGSTYRCVSVLTVLHQDWLNGKEYKCKVSNKALPAPIEKTISKAKGQPREPQVYTLPPSREEMTKNQVSLTCLVKGFYPSDIAVEWESNGQPENNYKTTPPVLDSDGSFFLYSKLTVDKSRWQQGNVFSCSVMHEALHNHYTQKSLSLSPGK

SEQ ID NO: 3311 - protein, 1225 aa, Artificial Sequence
  Synthetic
QVQLVQSGAEVKKPGASVKVSCKASGYTFNNYGISWVRQAPGQCLEWMGWISAYNGKTSYAQKFQGRVTMTTDTSTGTAYMELRSLRSDDTAVYYCARDLDFLTGWEYWGQGTLVTVSSGGGGQGGGGQGGGGQEIVLTQSPATLSVSPGERATLSCRASQSVNSNLAWYQQKPGQAPRLLIYGASTRATGIPARFSGSGSGTEFTLTISSLQSEDFAVYYCQQYHTWPVLTFGCGTKVEIKSGGGGQEVQLVESGGGLVQPGRSLRLSCAASGFTFHDYPMHWVRQAPGKCLEWVSGISWNSDYIVYADSVKGRFTISRDNAKNSLYLQMNSLSAEDTALYYCAKDTAYGGKYSAFDYWGQGTLVTVSSGGGGQGGGGQGGGGQEIVLTQSPATLSVSPGERATLSCRASQSVSRNLAWYQQKPGQAPRRLIYGASTRATGIPDRFSGSGSGTDFTLTISRLEPEDFAVYYCQQYNNWPLTFGCGTKVEIKSGGGGQEVQLVESGGGLVQPGGSLKLSCAASGFTFNKYAMNWVRQAPGKGLEWVARIRSKYNNYATYYADSVKDRFTISRDDSKNTAYLQMNNLKTEDTAVYYCVRHGNFGNSYISYWAYWGQGTLVTVSSGGGGQGGGGQGGGGQQTVVTQEPSLTVSPGGTVTLTCGSSTGAVTSGNYPNWVQQKPGQAPRGLIGGTKFLAPGTPARFSGSLLGGKAALTLSGVQPEDEAEYYCVLWYSNRWVFGGGTKLTVLGGGGCPPCPAPELLGGPSVFLFPPKPKDTLMISRTPEVTCVVVDVSHEEPEVKFNWYVDGVEVHNAKTKPCEEQYGSTYRCVSVLTVLHQDWLNGKEYKCKVSNKALPAPIEKTISKAKGQPREPQVYTLPPSREEMTKNQVSLTCLVKGFYPSDIAVEWESNGQPENNYKTTPPVLDSDGSFFLYSKLTVDKSRWQQGNVFSCSVMHEALHNHYTQKSLSLSPGKGGGGQGGGGQGGGGQGGGGQGGGGQGGGGQCPPCPAPELLGGPSVFLFPPKPKDTLMISRTPEVTCVVVDVSHEEPEVKFNWYVDGVEVHNAKTKPCEEQYGSTYRCVSVLTVLHQDWLNGKEYKCKVSNKALPAPIEKTISKAKGQPREPQVYTLPPSREEMTKNQVSLTCLVKGFYPSDIAVEWESNGQPENNYKTTPPVLDSDGSFFLYSKLTVDKSRWQQGNVFSCSVMHEALHNHYTQKSLSLSPGK

SEQ ID NO: 3312 - protein, 1235 aa, Artificial Sequence
  Synthetic
QVQLVQSGAEVKKPGASVKVSCKASGYTFNNYGISWVRQAPGQCLEWMGWISAYNGKTSYAQKFQGRVTMTTDTSTGTAYMELRSLRSDDTAVYYCARDLDFLTGWEYWGQGTLVTVSSGGGGSGGGGSGGGGSEIVLTQSPATLSVSPGERATLSCRASQSVNSNLAWYQQKPGQAPRLLIYGASTRATGIPARFSGSGSGTEFTLTISSLQSEDFAVYYCQQYHTWPVLTFGCGTKVEIKSGGGGSEVQLVESGGGLVQPGRSLRLSCAASGFTFHDYPMHWVRQAPGKCLEWVSGISWNSDYIVYADSVKGRFTISRDNAKNSLYLQMNSLSAEDTALYYCAKDTAYGGKYSAFDYWGQGTLVTVSSGGGGSGGGGSGGGGSEIVLTQSPATLSVSPGERATLSCRASQSVSRNLAWYQQKPGQAPRRLIYGASTRATGIPDRFSGSGSGTDFTLTISRLEPEDFAVYYCQQYNNWPLTFGCGTKVEIKSGGGGSEVQLVESGGGLVQPGGSLKLSCAASGFTFNKYAINWVRQAPGKGLEWVARIRSKYNNYATYYADAVKDRFTISRDDSKNTVYLQMNNLKTEDTAVYYCARAGNFGSSYISYWAYWGQGTLVTVSSGGGGSGGGGSGGGGSQTVVTQEPSLTVSPGGTVTITCGSSTGAVTSGNYPNWVQKKPGQAPRGLIGGTKFLAPGTPARFSGSLSGGKAALTLSGVQPEDEAEYYCVLWYSNRWVFGSGTKLTVLGGGGDKTHTCPPCPAPELLGGPSVFLFPPKPKDTLMISRTPEVTCVVVDVSHEDPEVKFNWYVDGVEVHNAKTKPCEEQYGSTYRCVSVLTVLHQDWLNGKEYKCKVSNKALPAPIEKTISKAKGQPREPQVYTLPPSREEMTKNQVSLTCLVKGFYPSDIAVEWESNGQPENNYKTTPPVLDSDGSFFLYSKLTVDKSRWQQGNVFSCSVMHEALHNHYTQKSLSLSPGKGGGGSGGGGSGGGGSGGGGSGGGGSGGGGSDKTHTCPPCPAPELLGGPSVFLFPPKPKDTLMISRTPEVTCVVVDVSHEDPEVKFNWYVDGVEVHNAKTKPCEEQYGSTYRCVSVLTVLHQDWLNGKEYKCKVSNKALPAPIEKTISKAKGQPREPQVYTLPPSREEMTKNQVSLTCLVKGFYPSDIAVEWESNGQPENNYKTTPPVLDSDGSFFLYSKLTVDKSRWQQGNVFSCSVMHEALHNHYTQKSLSLSPGK

SEQ ID NO: 3313 - protein, 1225 aa, Artificial Sequence
  Synthetic
QVQLVQSGAEVKKPGASVKVSCKASGYTFNNYGISWVRQAPGQCLEWMGWISAYNGKTSYAQKFQGRVTMTTDTSTGTAYMELRSLRSDDTAVYYCARDLDFLTGWEYWGQGTLVTVSSGGGGQGGGGQGGGGQEIVLTQSPATLSVSPGERATLSCRASQSVNSNLAWYQQKPGQAPRLLIYGASTRATGIPARFSGSGSGTEFTLTISSLQSEDFAVYYCQQYHTWPVLTFGCGTKVEIKSGGGGQEVQLVESGGGLVQPGRSLRLSCAASGFTFHDYPMHWVRQAPGKCLEWVSGISWNSDYIVYADSVKGRFTISRDNAKNSLYLQMNSLSAEDTALYYCAKDTAYGGKYSAFDYWGQGTLVTVSSGGGGQGGGGQGGGGQEIVLTQSPATLSVSPGERATLSCRASQSVSRNLAWYQQKPGQAPRRLIYGASTRATGIPDRFSGSGSGTDFTLTISRLEPEDFAVYYCQQYNNWPLTFGCGTKVEIKSGGGGQEVQLVESGGGLVQPGGSLKLSCAASGFTFNKYAINWVRQAPGKGLEWVARIRSKYNNYATYYADAVKDRFTISRDDSKNTVYLQMNNLKTEDTAVYYCARAGNFGSSYISYWAYWGQGTLVTVSSGGGGQGGGGQGGGGQQTVVTQEPSLTVSPGGTVTITCGSSTGAVTSGNYPNWVQKKPGQAPRGLIGGTKFLAPGTPARFSGSLSGGKAALTLSGVQPEDEAEYYCVLWYSNRWVFGSGTKLTVLGGGGCPPCPAPELLGGPSVFLFPPKPKDTLMISRTPEVTCVVVDVSHEEPEVKFNWYVDGVEVHNAKTKPCEEQYGSTYRCVSVLTVLHQDWLNGKEYKCKVSNKALPAPIEKTISKAKGQPREPQVYTLPPSREEMTKNQVSLTCLVKGFYPSDIAVEWESNGQPENNYKTTPPVLDSDGSFFLYSKLTVDKSRWQQGNVFSCSVMHEALHNHYTQKSLSLSPGKGGGGQGGGGQGGGGQGGGGQGGGGQGGGGQCPPCPAPELLGGPSVFLFPPKPKDTLMISRTPEVTCVVVDVSHEEPEVKFNWYVDGVEVHNAKTKPCEEQYGSTYRCVSVLTVLHQDWLNGKEYKCKVSNKALPAPIEKTISKAKGQPREPQVYTLPPSREEMTKNQVSLTCLVKGFYPSDIAVEWESNGQPENNYKTTPPVLDSDGSFFLYSKLTVDKSRWQQGNVFSCSVMHEALHNHYTQKSLSLSPGK

SEQ ID NO: 3314 - protein, 492 aa, Artificial Sequence
  Synthetic
QVQLVESGGGVVQPGRSLRLSCAASGFTFSSYGMHWVRQAPGKCLEWVAVIWNDGSNKYYADSVKGRFTISRDNSKNTVYLQMNSLRAEDTAVYYCARSLPRPHYYGMDVWGQGTTVTVSSGGGGSGGGGSGGGGSSYELTQPASVSVSPGQTASITCSGDKLGDKYVSWYQQKPGQSPVLVIYQDSKRPSGIPERFSGSNSGNTATLTISGTQAMDEADYYCQAWDSSTVVFGCGTKLTVLSGGGGSEVQLVESGGGLVQPGRSLRLSCAASGFTFHDYPMHWVRQAPGKCLEWVSGISWNSDYIVYADSVKGRFTISRDNAKNSLYLQMNSLSAEDTALYYCAKDTAYGGKYSAFDYWGQGTLVTVSSGGGGSGGGGSGGGGSEIVLTQSPATLSVSPGERATLSCRASQSVSRNLAWYQQKPGQAPRRLIYGASTRATGIPDRFSGSGSGTDFTLTISRLEPEDFAVYYCQQYNNWPLTFGCGTKVEIK

SEQ ID NO: 3315 - protein, 492 aa, Artificial Sequence
  Synthetic
QVQLVESGGGVVQPGRSLRLSCAASGFTFSSYGMHWVRQAPGKCLEWVAVIWNDGSNKYYADSVKGRFTISRDNSKNTVYLQMNSLRAEDTAVYYCARSLPRPHYYGMDVWGQGTTVTVSSGGGGQGGGGQGGGGQSYELTQPASVSVSPGQTASITCSGDKLGDKYVSWYQQKPGQSPVLVIYQDSKRPSGIPERFSGSNSGNTATLTISGTQAMDEADYYCQAWDSSTVVFGCGTKLTVLSGGGGQEVQLVESGGGLVQPGRSLRLSCAASGFTFHDYPMHWVRQAPGKCLEWVSGISWNSDYIVYADSVKGRFTISRDNAKNSLYLQMNSLSAEDTALYYCAKDTAYGGKYSAFDYWGQGTLVTVSSGGGGQGGGGQGGGGQEIVLTQSPATLSVSPGERATLSCRASQSVSRNLAWYQQKPGQAPRRLIYGASTRATGIPDRFSGSGSGTDFTLTISRLEPEDFAVYYCQQYNNWPLTFGCGTKVEIK

SEQ ID NO: 3316 - protein, 747 aa, Artificial Sequence
  Synthetic
QVQLVESGGGVVQPGRSLRLSCAASGFTFSSYGMHWVRQAPGKCLEWVAVIWNDGSNKYYADSVKGRFTISRDNSKNTVYLQMNSLRAEDTAVYYCARSLPRPHYYGMDVWGQGTTVTVSSGGGGSGGGGSGGGGSSYELTQPASVSVSPGQTASITCSGDKLGDKYVSWYQQKPGQSPVLVIYQDSKRPSGIPERFSGSNSGNTATLTISGTQAMDEADYYCQAWDSSTVVFGCGTKLTVLSGGGGSEVQLVESGGGLVQPGRSLRLSCAASGFTFHDYPMHWVRQAPGKCLEWVSGISWNSDYIVYADSVKGRFTISRDNAKNSLYLQMNSLSAEDTALYYCAKDTAYGGKYSAFDYWGQGTLVTVSSGGGGSGGGGSGGGGSEIVLTQSPATLSVSPGERATLSCRASQSVSRNLAWYQQKPGQAPRRLIYGASTRATGIPDRFSGSGSGTDFTLTISRLEPEDFAVYYCQQYNNWPLTFGCGTKVEIKSGGGGSEVQLVESGGGLVQPGGSLKLSCAASGFTFNKYAMNWVRQAPGKGLEWVARIRSKYNNYATYYADSVKDRFTISRDDSKNTAYLQMNNLKTEDTAVYYCVRHGNFGNSYISYWAYWGQGTLVTVSSGGGGSGGGGSGGGGSQTVVTQEPSLTVSPGGTVTLTCGSSTGAVTSGNYPNWVQQKPGQAPRGLIGGTKFLAPGTPARFSGSLLGGKAALTLSGVQPEDEAEYYCVLWYSNRWVFGGGTKLTVL

SEQ ID NO: 3317 - protein, 747 aa, Artificial Sequence
  Synthetic
QVQLVESGGGVVQPGRSLRLSCAASGFTFSSYGMHWVRQAPGKCLEWVAVIWNDGSNKYYADSVKGRFTISRDNSKNTVYLQMNSLRAEDTAVYYCARSLPRPHYYGMDVWGQGTTVTVSSGGGGQGGGGQGGGGQSYELTQPASVSVSPGQTASITCSGDKLGDKYVSWYQQKPGQSPVLVIYQDSKRPSGIPERFSGSNSGNTATLTISGTQAMDEADYYCQAWDSSTVVFGCGTKLTVLSGGGGQEVQLVESGGGLVQPGRSLRLSCAASGFTFHDYPMHWVRQAPGKCLEWVSGISWNSDYIVYADSVKGRFTISRDNAKNSLYLQMNSLSAEDTALYYCAKDTAYGGKYSAFDYWGQGTLVTVSSGGGGQGGGGQGGGGQEIVLTQSPATLSVSPGERATLSCRASQSVSRNLAWYQQKPGQAPRRLIYGASTRATGIPDRFSGSGSGTDFTLTISRLEPEDFAVYYCQQYNNWPLTFGCGTKVEIKSGGGGQEVQLVESGGGLVQPGGSLKLSCAASGFTFNKYAMNWVRQAPGKGLEWVARIRSKYNNYATYYADSVKDRFTISRDDSKNTAYLQMNNLKTEDTAVYYCVRHGNFGNSYISYWAYWGQGTLVTVSSGGGGQGGGGQGGGGQQTVVTQEPSLTVSPGGTVTLTCGSSTGAVTSGNYPNWVQQKPGQAPRGLIGGTKFLAPGTPARFSGSLLGGKAALTLSGVQPEDEAEYYCVLWYSNRWVFGGGTKLTVL

SEQ ID NO: 3318 - protein, 747 aa, Artificial Sequence
  Synthetic
QVQLVESGGGVVQPGRSLRLSCAASGFTFSSYGMHWVRQAPGKCLEWVAVIWNDGSNKYYADSVKGRFTISRDNSKNTVYLQMNSLRAEDTAVYYCARSLPRPHYYGMDVWGQGTTVTVSSGGGGSGGGGSGGGGSSYELTQPASVSVSPGQTASITCSGDKLGDKYVSWYQQKPGQSPVLVIYQDSKRPSGIPERFSGSNSGNTATLTISGTQAMDEADYYCQAWDSSTVVFGCGTKLTVLSGGGGSEVQLVESGGGLVQPGRSLRLSCAASGFTFHDYPMHWVRQAPGKCLEWVSGISWNSDYIVYADSVKGRFTISRDNAKNSLYLQMNSLSAEDTALYYCAKDTAYGGKYSAFDYWGQGTLVTVSSGGGGSGGGGSGGGGSEIVLTQSPATLSVSPGERATLSCRASQSVSRNLAWYQQKPGQAPRRLIYGASTRATGIPDRFSGSGSGTDFTLTISRLEPEDFAVYYCQQYNNWPLTFGCGTKVEIKSGGGGSEVQLVESGGGLVQPGGSLKLSCAASGFTFNKYAINWVRQAPGKGLEWVARIRSKYNNYATYYADAVKDRFTISRDDSKNTVYLQMNNLKTEDTAVYYCARAGNFGSSYISYWAYWGQGTLVTVSSGGGGSGGGGSGGGGSQTVVTQEPSLTVSPGGTVTITCGSSTGAVTSGNYPNWVQKKPGQAPRGLIGGTKFLAPGTPARFSGSLSGGKAALTLSGVQPEDEAEYYCVLWYSNRWVFGSGTKLTVL

SEQ ID NO: 3319 - protein, 747 aa, Artificial Sequence
  Synthetic
QVQLVESGGGVVQPGRSLRLSCAASGFTFSSYGMHWVRQAPGKCLEWVAVIWNDGSNKYYADSVKGRFTISRDNSKNTVYLQMNSLRAEDTAVYYCARSLPRPHYYGMDVWGQGTTVTVSSGGGGQGGGGQGGGGQSYELTQPASVSVSPGQTASITCSGDKLGDKYVSWYQQKPGQSPVLVIYQDSKRPSGIPERFSGSNSGNTATLTISGTQAMDEADYYCQAWDSSTVVFGCGTKLTVLSGGGGQEVQLVESGGGLVQPGRSLRLSCAASGFTFHDYPMHWVRQAPGKCLEWVSGISWNSDYIVYADSVKGRFTISRDNAKNSLYLQMNSLSAEDTALYYCAKDTAYGGKYSAFDYWGQGTLVTVSSGGGGQGGGGQGGGGQEIVLTQSPATLSVSPGERATLSCRASQSVSRNLAWYQQKPGQAPRRLIYGASTRATGIPDRFSGSGSGTDFTLTISRLEPEDFAVYYCQQYNNWPLTFGCGTKVEIKSGGGGQEVQLVESGGGLVQPGGSLKLSCAASGFTFNKYAINWVRQAPGKGLEWVARIRSKYNNYATYYADAVKDRFTISRDDSKNTVYLQMNNLKTEDTAVYYCARAGNFGSSYISYWAYWGQGTLVTVSSGGGGQGGGGQGGGGQQTVVTQEPSLTVSPGGTVTITCGSSTGAVTSGNYPNWVQKKPGQAPRGLIGGTKFLAPGTPARFSGSLSGGKAALTLSGVQPEDEAEYYCVLWYSNRWVFGSGTKLTVL

SEQ ID NO: 3320 - protein, 1235 aa, Artificial Sequence
  Synthetic
QVQLVESGGGVVQPGRSLRLSCAASGFTFSSYGMHWVRQAPGKCLEWVAVIWNDGSNKYYADSVKGRFTISRDNSKNTVYLQMNSLRAEDTAVYYCARSLPRPHYYGMDVWGQGTTVTVSSGGGGSGGGGSGGGGSSYELTQPASVSVSPGQTASITCSGDKLGDKYVSWYQQKPGQSPVLVIYQDSKRPSGIPERFSGSNSGNTATLTISGTQAMDEADYYCQAWDSSTVVFGCGTKLTVLSGGGGSEVQLVESGGGLVQPGRSLRLSCAASGFTFHDYPMHWVRQAPGKCLEWVSGISWNSDYIVYADSVKGRFTISRDNAKNSLYLQMNSLSAEDTALYYCAKDTAYGGKYSAFDYWGQGTLVTVSSGGGGSGGGGSGGGGSEIVLTQSPATLSVSPGERATLSCRASQSVSRNLAWYQQKPGQAPRRLIYGASTRATGIPDRFSGSGSGTDFTLTISRLEPEDFAVYYCQQYNNWPLTFGCGTKVEIKSGGGGSEVQLVESGGGLVQPGGSLKLSCAASGFTFNKYAMNWVRQAPGKGLEWVARIRSKYNNYATYYADSVKDRFTISRDDSKNTAYLQMNNLKTEDTAVYYCVRHGNFGNSYISYWAYWGQGTLVTVSSGGGGSGGGGSGGGGSQTVVTQEPSLTVSPGGTVTLTCGSSTGAVTSGNYPNWVQQKPGQAPRGLIGGTKFLAPGTPARFSGSLLGGKAALTLSGVQPEDEAEYYCVLWYSNRWVFGGGTKLTVLGGGGDKTHTCPPCPAPELLGGPSVFLFPPKPKDTLMISRTPEVTCVVVDVSHEDPEVKFNWYVDGVEVHNAKTKPCEEQYGSTYRCVSVLTVLHQDWLNGKEYKCKVSNKALPAPIEKTISKAKGQPREPQVYTLPPSREEMTKNQVSLTCLVKGFYPSDIAVEWESNGQPENNYKTTPPVLDSDGSFFLYSKLTVDKSRWQQGNVFSCSVMHEALHNHYTQKSLSLSPGKGGGGSGGGGSGGGGSGGGGSGGGGSGGGGSDKTHTCPPCPAPELLGGPSVFLFPPKPKDTLMISRTPEVTCVVVDVSHEDPEVKFNWYVDGVEVHNAKTKPCEEQYGSTYRCVSVLTVLHQDWLNGKEYKCKVSNKALPAPIEKTISKAKGQPREPQVYTLPPSREEMTKNQVSLTCLVKGFYPSDIAVEWESNGQPENNYKTTPPVLDSDGSFFLYSKLTVDKSRWQQGNVFSCSVMHEALHNHYTQKSLSLSPGK

SEQ ID NO: 3321 - protein, 1225 aa, Artificial Sequence
  Synthetic
QVQLVESGGGVVQPGRSLRLSCAASGFTFSSYGMHWVRQAPGKCLEWVAVIWNDGSNKYYADSVKGRFTISRDNSKNTVYLQMNSLRAEDTAVYYCARSLPRPHYYGMDVWGQGTTVTVSSGGGGQGGGGQGGGGQSYELTQPASVSVSPGQTASITCSGDKLGDKYVSWYQQKPGQSPVLVIYQDSKRPSGIPERFSGSNSGNTATLTISGTQAMDEADYYCQAWDSSTVVFGCGTKLTVLSGGGGQEVQLVESGGGLVQPGRSLRLSCAASGFTFHDYPMHWVRQAPGKCLEWVSGISWNSDYIVYADSVKGRFTISRDNAKNSLYLQMNSLSAEDTALYYCAKDTAYGGKYSAFDYWGQGTLVTVSSGGGGQGGGGQGGGGQEIVLTQSPATLSVSPGERATLSCRASQSVSRNLAWYQQKPGQAPRRLIYGASTRATGIPDRFSGSGSGTDFTLTISRLEPEDFAVYYCQQYNNWPLTFGCGTKVEIKSGGGGQEVQLVESGGGLVQPGGSLKLSCAASGFTFNKYAMNWVRQAPGKGLEWVARIRSKYNNYATYYADSVKDRFTISRDDSKNTAYLQMNNLKTEDTAVYYCVRHGNFGNSYISYWAYWGQGTLVTVSSGGGGQGGGGQGGGGQQTVVTQEPSLTVSPGGTVTLTCGSSTGAVTSGNYPNWVQQKPGQAPRGLIGGTKFLAPGTPARFSGSLLGGKAALTLSGVQPEDEAEYYCVLWYSNRWVFGGGTKLTVLGGGGCPPCPAPELLGGPSVFLFPPKPKDTLMISRTPEVTCVVVDVSHEEPEVKFNWYVDGVEVHNAKTKPCEEQYGSTYRCVSVLTVLHQDWLNGKEYKCKVSNKALPAPIEKTISKAKGQPREPQVYTLPPSREEMTKNQVSLTCLVKGFYPSDIAVEWESNGQPENNYKTTPPVLDSDGSFFLYSKLTVDKSRWQQGNVFSCSVMHEALHNHYTQKSLSLSPGKGGGGQGGGGQGGGGQGGGGQGGGGQGGGGQCPPCPAPELLGGPSVFLFPPKPKDTLMISRTPEVTCVVVDVSHEEPEVKFNWYVDGVEVHNAKTKPCEEQYGSTYRCVSVLTVLHQDWLNGKEYKCKVSNKALPAPIEKTISKAKGQPREPQVYTLPPSREEMTKNQVSLTCLVKGFYPSDIAVEWESNGQPENNYKTTPPVLDSDGSFFLYSKLTVDKSRWQQGNVFSCSVMHEALHNHYTQKSLSLSPGK

SEQ ID NO: 3322 - protein, 1235 aa, Artificial Sequence
  Synthetic
QVQLVESGGGVVQPGRSLRLSCAASGFTFSSYGMHWVRQAPGKCLEWVAVIWNDGSNKYYADSVKGRFTISRDNSKNTVYLQMNSLRAEDTAVYYCARSLPRPHYYGMDVWGQGTTVTVSSGGGGSGGGGSGGGGSSYELTQPASVSVSPGQTASITCSGDKLGDKYVSWYQQKPGQSPVLVIYQDSKRPSGIPERFSGSNSGNTATLTISGTQAMDEADYYCQAWDSSTVVFGCGTKLTVLSGGGGSEVQLVESGGGLVQPGRSLRLSCAASGFTFHDYPMHWVRQAPGKCLEWVSGISWNSDYIVYADSVKGRFTISRDNAKNSLYLQMNSLSAEDTALYYCAKDTAYGGKYSAFDYWGQGTLVTVSSGGGGSGGGGSGGGGSEIVLTQSPATLSVSPGERATLSCRASQSVSRNLAWYQQKPGQAPRRLIYGASTRATGIPDRFSGSGSGTDFTLTISRLEPEDFAVYYCQQYNNWPLTFGCGTKVEIKSGGGGSEVQLVESGGGLVQPGGSLKLSCAASGFTFNKYAINWVRQAPGKGLEWVARIRSKYNNYATYYADAVKDRFTISRDDSKNTVYLQMNNLKTEDTAVYYCARAGNFGSSYISYWAYWGQGTLVTVSSGGGGSGGGGSGGGGSQTVVTQEPSLTVSPGGTVTITCGSSTGAVTSGNYPNWVQKKPGQAPRGLIGGTKFLAPGTPARFSGSLSGGKAALTLSGVQPEDEAEYYCVLWYSNRWVFGSGTKLTVLGGGGDKTHTCPPCPAPELLGGPSVFLFPPKPKDTLMISRTPEVTCVVVDVSHEDPEVKFNWYVDGVEVHNAKTKPCEEQYGSTYRCVSVLTVLHQDWLNGKEYKCKVSNKALPAPIEKTISKAKGQPREPQVYTLPPSREEMTKNQVSLTCLVKGFYPSDIAVEWESNGQPENNYKTTPPVLDSDGSFFLYSKLTVDKSRWQQGNVFSCSVMHEALHNHYTQKSLSLSPGKGGGGSGGGGSGGGGSGGGGSGGGGSGGGGSDKTHTCPPCPAPELLGGPSVFLFPPKPKDTLMISRTPEVTCVVVDVSHEDPEVKFNWYVDGVEVHNAKTKPCEEQYGSTYRCVSVLTVLHQDWLNGKEYKCKVSNKALPAPIEKTISKAKGQPREPQVYTLPPSREEMTKNQVSLTCLVKGFYPSDIAVEWESNGQPENNYKTTPPVLDSDGSFFLYSKLTVDKSRWQQGNVFSCSVMHEALHNHYTQKSLSLSPGK

SEQ ID NO: 3323 - protein, 1225 aa, Artificial Sequence
  Synthetic
QVQLVESGGGVVQPGRSLRLSCAASGFTFSSYGMHWVRQAPGKCLEWVAVIWNDGSNKYYADSVKGRFTISRDNSKNTVYLQMNSLRAEDTAVYYCARSLPRPHYYGMDVWGQGTTVTVSSGGGGQGGGGQGGGGQSYELTQPASVSVSPGQTASITCSGDKLGDKYVSWYQQKPGQSPVLVIYQDSKRPSGIPERFSGSNSGNTATLTISGTQAMDEADYYCQAWDSSTVVFGCGTKLTVLSGGGGQEVQLVESGGGLVQPGRSLRLSCAASGFTFHDYPMHWVRQAPGKCLEWVSGISWNSDYIVYADSVKGRFTISRDNAKNSLYLQMNSLSAEDTALYYCAKDTAYGGKYSAFDYWGQGTLVTVSSGGGGQGGGGQGGGGQEIVLTQSPATLSVSPGERATLSCRASQSVSRNLAWYQQKPGQAPRRLIYGASTRATGIPDRFSGSGSGTDFTLTISRLEPEDFAVYYCQQYNNWPLTFGCGTKVEIKSGGGGQEVQLVESGGGLVQPGGSLKLSCAASGFTFNKYAINWVRQAPGKGLEWVARIRSKYNNYATYYADAVKDRFTISRDDSKNTVYLQMNNLKTEDTAVYYCARAGNFGSSYISYWAYWGQGTLVTVSSGGGGQGGGGQGGGGQQTVVTQEPSLTVSPGGTVTITCGSSTGAVTSGNYPNWVQKKPGQAPRGLIGGTKFLAPGTPARFSGSLSGGKAALTLSGVQPEDEAEYYCVLWYSNRWVFGSGTKLTVLGGGGCPPCPAPELLGGPSVFLFPPKPKDTLMISRTPEVTCVVVDVSHEEPEVKFNWYVDGVEVHNAKTKPCEEQYGSTYRCVSVLTVLHQDWLNGKEYKCKVSNKALPAPIEKTISKAKGQPREPQVYTLPPSREEMTKNQVSLTCLVKGFYPSDIAVEWESNGQPENNYKTTPPVLDSDGSFFLYSKLTVDKSRWQQGNVFSCSVMHEALHNHYTQKSLSLSPGKGGGGQGGGGQGGGGQGGGGQGGGGQGGGGQCPPCPAPELLGGPSVFLFPPKPKDTLMISRTPEVTCVVVDVSHEEPEVKFNWYVDGVEVHNAKTKPCEEQYGSTYRCVSVLTVLHQDWLNGKEYKCKVSNKALPAPIEKTISKAKGQPREPQVYTLPPSREEMTKNQVSLTCLVKGFYPSDIAVEWESNGQPENNYKTTPPVLDSDGSFFLYSKLTVDKSRWQQGNVFSCSVMHEALHNHYTQKSLSLSPGK

SEQ ID NO: 3324 - protein, 495 aa, Artificial Sequence
  Synthetic
QLQLQESGPGLVKPSETLSLTCFVSGGSISNSDYFWGWIRQPPGKCLEWIGTIYYSGRTYYNPSLKSRVTISVDTSKNQFSLMLSSVTAVDTAVYYCARYQYGSFDYWGQGTLVTVSSGGGGSGGGGSGGGGSDIVMTQTPLSLPVTPGEPASISCRSSQSLLHSNGYNYLDWYLQKPGQSPQLLIYLGSNRASGVPDRFSGSGSGTDFTLKISRVEAEDVGVYYCMQALQTPYTFGCGTKVEIRSGGGGSEVQLVESGGGLVQPGRSLRLSCAASGFTFHDYPMHWVRQAPGKCLEWVSGISWNSDYIVYADSVKGRFTISRDNAKNSLYLQMNSLSAEDTALYYCAKDTAYGGKYSAFDYWGQGTLVTVSSGGGGSGGGGSGGGGSEIVLTQSPATLSVSPGERATLSCRASQSVSRNLAWYQQKPGQAPRRLIYGASTRATGIPDRFSGSGSGTDFTLTISRLEPEDFAVYYCQQYNNWPLTFGCGTKVEIK

SEQ ID NO: 3325 - protein, 495 aa, Artificial Sequence
  Synthetic
QLQLQESGPGLVKPSETLSLTCFVSGGSISNSDYFWGWIRQPPGKCLEWIGTIYYSGRTYYNPSLKSRVTISVDTSKNQFSLMLSSVTAVDTAVYYCARYQYGSFDYWGQGTLVTVSSGGGGQGGGGQGGGGQEIVMTQTPLSLPVTPGEPASISCRSSQSLLHSNGYNYLDWYLQKPGQSPQLLIYLGSNRASGVPDRFSGSGSGTDFTLKISRVEAEDVGVYYCMQALQTPYTFGCGTKVEIRSGGGGQEVQLVESGGGLVQPGRSLRLSCAASGFTFHDYPMHWVRQAPGKCLEWVSGISWNSDYIVYADSVKGRFTISRDNAKNSLYLQMNSLSAEDTALYYCAKDTAYGGKYSAFDYWGQGTLVTVSSGGGGQGGGGQGGGGQEIVLTQSPATLSVSPGERATLSCRASQSVSRNLAWYQQKPGQAPRRLIYGASTRATGIPDRFSGSGSGTDFTLTISRLEPEDFAVYYCQQYNNWPLTFGCGTKVEIK

SEQ ID NO: 3326 - protein, 750 aa, Artificial Sequence
  Synthetic
QLQLQESGPGLVKPSETLSLTCFVSGGSISNSDYFWGWIRQPPGKCLEWIGTIYYSGRTYYNPSLKSRVTISVDTSKNQFSLMLSSVTAVDTAVYYCARYQYGSFDYWGQGTLVTVSSGGGGSGGGGSGGGGSDIVMTQTPLSLPVTPGEPASISCRSSQSLLHSNGYNYLDWYLQKPGQSPQLLIYLGSNRASGVPDRFSGSGSGTDFTLKISRVEAEDVGVYYCMQALQTPYTFGCGTKVEIRSGGGGSEVQLVESGGGLVQPGRSLRLSCAASGFTFHDYPMHWVRQAPGKCLEWVSGISWNSDYIVYADSVKGRFTISRDNAKNSLYLQMNSLSAEDTALYYCAKDTAYGGKYSAFDYWGQGTLVTVSSGGGGSGGGGSGGGGSEIVLTQSPATLSVSPGERATLSCRASQSVSRNLAWYQQKPGQAPRRLIYGASTRATGIPDRFSGSGSGTDFTLTISRLEPEDFAVYYCQQYNNWPLTFGCGTKVEIKSGGGGSEVQLVESGGGLVQPGGSLKLSCAASGFTFNKYAMNWVRQAPGKGLEWVARIRSKYNNYATYYADSVKDRFTISRDDSKNTAYLQMNNLKTEDTAVYYCVRHGNFGNSYISYWAYWGQGTLVTVSSGGGGSGGGGSGGGGSQTVVTQEPSLTVSPGGTVTLTCGSSTGAVTSGNYPNWVQQKPGQAPRGLIGGTKFLAPGTPARFSGSLLGGKAALTLSGVQPEDEAEYYCVLWYSNRWVFGGGTKLTVL

SEQ ID NO: 3327 - protein, 750 aa, Artificial Sequence
  Synthetic
QLQLQESGPGLVKPSETLSLTCFVSGGSISNSDYFWGWIRQPPGKCLEWIGTIYYSGRTYYNPSLKSRVTISVDTSKNQFSLMLSSVTAVDTAVYYCARYQYGSFDYWGQGTLVTVSSGGGGQGGGGQGGGGQEIVMTQTPLSLPVTPGEPASISCRSSQSLLHSNGYNYLDWYLQKPGQSPQLLIYLGSNRASGVPDRFSGSGSGTDFTLKISRVEAEDVGVYYCMQALQTPYTFGCGTKVEIRSGGGGQEVQLVESGGGLVQPGRSLRLSCAASGFTFHDYPMHWVRQAPGKCLEWVSGISWNSDYIVYADSVKGRFTISRDNAKNSLYLQMNSLSAEDTALYYCAKDTAYGGKYSAFDYWGQGTLVTVSSGGGGQGGGGQGGGGQEIVLTQSPATLSVSPGERATLSCRASQSVSRNLAWYQQKPGQAPRRLIYGASTRATGIPDRFSGSGSGTDFTLTISRLEPEDFAVYYCQQYNNWPLTFGCGTKVEIKSGGGGQEVQLVESGGGLVQPGGSLKLSCAASGFTFNKYAMNWVRQAPGKGLEWVARIRSKYNNYATYYADSVKDRFTISRDDSKNTAYLQMNNLKTEDTAVYYCVRHGNFGNSYISYWAYWGQGTLVTVSSGGGGQGGGGQGGGGQQTVVTQEPSLTVSPGGTVTLTCGSSTGAVTSGNYPNWVQQKPGQAPRGLIGGTKFLAPGTPARFSGSLLGGKAALTLSGVQPEDEAEYYCVLWYSNRWVFGGGTKLTVL

SEQ ID NO: 3328 - protein, 750 aa, Artificial Sequence
  Synthetic
QLQLQESGPGLVKPSETLSLTCFVSGGSISNSDYFWGWIRQPPGKCLEWIGTIYYSGRTYYNPSLKSRVTISVDTSKNQFSLMLSSVTAVDTAVYYCARYQYGSFDYWGQGTLVTVSSGGGGSGGGGSGGGGSDIVMTQTPLSLPVTPGEPASISCRSSQSLLHSNGYNYLDWYLQKPGQSPQLLIYLGSNRASGVPDRFSGSGSGTDFTLKISRVEAEDVGVYYCMQALQTPYTFGCGTKVEIRSGGGGSEVQLVESGGGLVQPGRSLRLSCAASGFTFHDYPMHWVRQAPGKCLEWVSGISWNSDYIVYADSVKGRFTISRDNAKNSLYLQMNSLSAEDTALYYCAKDTAYGGKYSAFDYWGQGTLVTVSSGGGGSGGGGSGGGGSEIVLTQSPATLSVSPGERATLSCRASQSVSRNLAWYQQKPGQAPRRLIYGASTRATGIPDRFSGSGSGTDFTLTISRLEPEDFAVYYCQQYNNWPLTFGCGTKVEIKSGGGGSEVQLVESGGGLVQPGGSLKLSCAASGFTFNKYAINWVRQAPGKGLEWVARIRSKYNNYATYYADAVKDRFTISRDDSKNTVYLQMNNLKTEDTAVYYCARAGNFGSSYISYWAYWGQGTLVTVSSGGGGSGGGGSGGGGSQTVVTQEPSLTVSPGGTVTITCGSSTGAVTSGNYPNWVQKKPGQAPRGLIGGTKFLAPGTPARFSGSLSGGKAALTLSGVQPEDEAEYYCVLWYSNRWVFGSGTKLTVL

SEQ ID NO: 3329 - protein, 750 aa, Artificial Sequence
  Synthetic
QLQLQESGPGLVKPSETLSLTCFVSGGSISNSDYFWGWIRQPPGKCLEWIGTIYYSGRTYYNPSLKSRVTISVDTSKNQFSLMLSSVTAVDTAVYYCARYQYGSFDYWGQGTLVTVSSGGGGQGGGGQGGGGQEIVMTQTPLSLPVTPGEPASISCRSSQSLLHSNGYNYLDWYLQKPGQSPQLLIYLGSNRASGVPDRFSGSGSGTDFTLKISRVEAEDVGVYYCMQALQTPYTFGCGTKVEIRSGGGGQEVQLVESGGGLVQPGRSLRLSCAASGFTFHDYPMHWVRQAPGKCLEWVSGISWNSDYIVYADSVKGRFTISRDNAKNSLYLQMNSLSAEDTALYYCAKDTAYGGKYSAFDYWGQGTLVTVSSGGGGQGGGGQGGGGQEIVLTQSPATLSVSPGERATLSCRASQSVSRNLAWYQQKPGQAPRRLIYGASTRATGIPDRFSGSGSGTDFTLTISRLEPEDFAVYYCQQYNNWPLTFGCGTKVEIKSGGGGQEVQLVESGGGLVQPGGSLKLSCAASGFTFNKYAINWVRQAPGKGLEWVARIRSKYNNYATYYADAVKDRFTISRDDSKNTVYLQMNNLKTEDTAVYYCARAGNFGSSYISYWAYWGQGTLVTVSSGGGGQGGGGQGGGGQQTVVTQEPSLTVSPGGTVTITCGSSTGAVTSGNYPNWVQKKPGQAPRGLIGGTKFLAPGTPARFSGSLSGGKAALTLSGVQPEDEAEYYCVLWYSNRWVFGSGTKLTVL

SEQ ID NO: 3330 - protein, 1238 aa, Artificial Sequence
  Synthetic
QLQLQESGPGLVKPSETLSLTCFVSGGSISNSDYFWGWIRQPPGKCLEWIGTIYYSGRTYYNPSLKSRVTISVDTSKNQFSLMLSSVTAVDTAVYYCARYQYGSFDYWGQGTLVTVSSGGGGSGGGGSGGGGSDIVMTQTPLSLPVTPGEPASISCRSSQSLLHSNGYNYLDWYLQKPGQSPQLLIYLGSNRASGVPDRFSGSGSGTDFTLKISRVEAEDVGVYYCMQALQTPYTFGCGTKVEIRSGGGGSEVQLVESGGGLVQPGRSLRLSCAASGFTFHDYPMHWVRQAPGKCLEWVSGISWNSDYIVYADSVKGRFTISRDNAKNSLYLQMNSLSAEDTALYYCAKDTAYGGKYSAFDYWGQGTLVTVSSGGGGSGGGGSGGGGSEIVLTQSPATLSVSPGERATLSCRASQSVSRNLAWYQQKPGQAPRRLIYGASTRATGIPDRFSGSGSGTDFTLTISRLEPEDFAVYYCQQYNNWPLTFGCGTKVEIKSGGGGSEVQLVESGGGLVQPGGSLKLSCAASGFTFNKYAMNWVRQAPGKGLEWVARIRSKYNNYATYYADSVKDRFTISRDDSKNTAYLQMNNLKTEDTAVYYCVRHGNFGNSYISYWAYWGQGTLVTVSSGGGGSGGGGSGGGGSQTVVTQEPSLTVSPGGTVTLTCGSSTGAVTSGNYPNWVQQKPGQAPRGLIGGTKFLAPGTPARFSGSLLGGKAALTLSGVQPEDEAEYYCVLWYSNRWVFGGGTKLTVLGGGGDKTHTCPPCPAPELLGGPSVFLFPPKPKDTLMISRTPEVTCVVVDVSHEDPEVKFNWYVDGVEVHNAKTKPCEEQYGSTYRCVSVLTVLHQDWLNGKEYKCKVSNKALPAPIEKTISKAKGQPREPQVYTLPPSREEMTKNQVSLTCLVKGFYPSDIAVEWESNGQPENNYKTTPPVLDSDGSFFLYSKLTVDKSRWQQGNVFSCSVMHEALHNHYTQKSLSLSPGKGGGGSGGGGSGGGGSGGGGSGGGGSGGGGSDKTHTCPPCPAPELLGGPSVFLFPPKPKDTLMISRTPEVTCVVVDVSHEDPEVKFNWYVDGVEVHNAKTKPCEEQYGSTYRCVSVLTVLHQDWLNGKEYKCKVSNKALPAPIEKTISKAKGQPREPQVYTLPPSREEMTKNQVSLTCLVKGFYPSDIAVEWESNGQPENNYKTTPPVLDSDGSFFLYSKLTVDKSRWQQGNVFSCSVMHEALHNHYTQKSLSLSPGK

SEQ ID NO: 3331 - protein, 1228 aa, Artificial Sequence
  Synthetic
QLQLQESGPGLVKPSETLSLTCFVSGGSISNSDYFWGWIRQPPGKCLEWIGTIYYSGRTYYNPSLKSRVTISVDTSKNQFSLMLSSVTAVDTAVYYCARYQYGSFDYWGQGTLVTVSSGGGGQGGGGQGGGGQEIVMTQTPLSLPVTPGEPASISCRSSQSLLHSNGYNYLDWYLQKPGQSPQLLIYLGSNRASGVPDRFSGSGSGTDFTLKISRVEAEDVGVYYCMQALQTPYTFGCGTKVEIRSGGGGQEVQLVESGGGLVQPGRSLRLSCAASGFTFHDYPMHWVRQAPGKCLEWVSGISWNSDYIVYADSVKGRFTISRDNAKNSLYLQMNSLSAEDTALYYCAKDTAYGGKYSAFDYWGQGTLVTVSSGGGGQGGGGQGGGGQEIVLTQSPATLSVSPGERATLSCRASQSVSRNLAWYQQKPGQAPRRLIYGASTRATGIPDRFSGSGSGTDFTLTISRLEPEDFAVYYCQQYNNWPLTFGCGTKVEIKSGGGGQEVQLVESGGGLVQPGGSLKLSCAASGFTFNKYAMNWVRQAPGKGLEWVARIRSKYNNYATYYADSVKDRFTISRDDSKNTAYLQMNNLKTEDTAVYYCVRHGNFGNSYISYWAYWGQGTLVTVSSGGGGQGGGGQGGGGQQTVVTQEPSLTVSPGGTVTLTCGSSTGAVTSGNYPNWVQQKPGQAPRGLIGGTKFLAPGTPARFSGSLLGGKAALTLSGVQPEDEAEYYCVLWYSNRWVFGGGTKLTVLGGGGCPPCPAPELLGGPSVFLFPPKPKDTLMISRTPEVTCVVVDVSHEEPEVKFNWYVDGVEVHNAKTKPCEEQYGSTYRCVSVLTVLHQDWLNGKEYKCKVSNKALPAPIEKTISKAKGQPREPQVYTLPPSREEMTKNQVSLTCLVKGFYPSDIAVEWESNGQPENNYKTTPPVLDSDGSFFLYSKLTVDKSRWQQGNVFSCSVMHEALHNHYTQKSLSLSPGKGGGGQGGGGQGGGGQGGGGQGGGGQGGGGQCPPCPAPELLGGPSVFLFPPKPKDTLMISRTPEVTCVVVDVSHEEPEVKFNWYVDGVEVHNAKTKPCEEQYGSTYRCVSVLTVLHQDWLNGKEYKCKVSNKALPAPIEKTISKAKGQPREPQVYTLPPSREEMTKNQVSLTCLVKGFYPSDIAVEWESNGQPENNYKTTPPVLDSDGSFFLYSKLTVDKSRWQQGNVFSCSVMHEALHNHYTQKSLSLSPGK

SEQ ID NO: 3332 - protein, 1238 aa, Artificial Sequence
  Synthetic
QLQLQESGPGLVKPSETLSLTCFVSGGSISNSDYFWGWIRQPPGKCLEWIGTIYYSGRTYYNPSLKSRVTISVDTSKNQFSLMLSSVTAVDTAVYYCARYQYGSFDYWGQGTLVTVSSGGGGSGGGGSGGGGSDIVMTQTPLSLPVTPGEPASISCRSSQSLLHSNGYNYLDWYLQKPGQSPQLLIYLGSNRASGVPDRFSGSGSGTDFTLKISRVEAEDVGVYYCMQALQTPYTFGCGTKVEIRSGGGGSEVQLVESGGGLVQPGRSLRLSCAASGFTFHDYPMHWVRQAPGKCLEWVSGISWNSDYIVYADSVKGRFTISRDNAKNSLYLQMNSLSAEDTALYYCAKDTAYGGKYSAFDYWGQGTLVTVSSGGGGSGGGGSGGGGSEIVLTQSPATLSVSPGERATLSCRASQSVSRNLAWYQQKPGQAPRRLIYGASTRATGIPDRFSGSGSGTDFTLTISRLEPEDFAVYYCQQYNNWPLTFGCGTKVEIKSGGGGSEVQLVESGGGLVQPGGSLKLSCAASGFTFNKYAINWVRQAPGKGLEWVARIRSKYNNYATYYADAVKDRFTISRDDSKNTVYLQMNNLKTEDTAVYYCARAGNFGSSYISYWAYWGQGTLVTVSSGGGGSGGGGSGGGGSQTVVTQEPSLTVSPGGTVTITCGSSTGAVTSGNYPNWVQKKPGQAPRGLIGGTKFLAPGTPARFSGSLSGGKAALTLSGVQPEDEAEYYCVLWYSNRWVFGSGTKLTVLGGGGDKTHTCPPCPAPELLGGPSVFLFPPKPKDTLMISRTPEVTCVVVDVSHEDPEVKFNWYVDGVEVHNAKTKPCEEQYGSTYRCVSVLTVLHQDWLNGKEYKCKVSNKALPAPIEKTISKAKGQPREPQVYTLPPSREEMTKNQVSLTCLVKGFYPSDIAVEWESNGQPENNYKTTPPVLDSDGSFFLYSKLTVDKSRWQQGNVFSCSVMHEALHNHYTQKSLSLSPGKGGGGSGGGGSGGGGSGGGGSGGGGSGGGGSDKTHTCPPCPAPELLGGPSVFLFPPKPKDTLMISRTPEVTCVVVDVSHEDPEVKFNWYVDGVEVHNAKTKPCEEQYGSTYRCVSVLTVLHQDWLNGKEYKCKVSNKALPAPIEKTISKAKGQPREPQVYTLPPSREEMTKNQVSLTCLVKGFYPSDIAVEWESNGQPENNYKTTPPVLDSDGSFFLYSKLTVDKSRWQQGNVFSCSVMHEALHNHYTQKSLSLSPGK

SEQ ID NO: 3333 - protein, 1228 aa, Artificial Sequence
  Synthetic
QLQLQESGPGLVKPSETLSLTCFVSGGSISNSDYFWGWIRQPPGKCLEWIGTIYYSGRTYYNPSLKSRVTISVDTSKNQFSLMLSSVTAVDTAVYYCARYQYGSFDYWGQGTLVTVSSGGGGQGGGGQGGGGQEIVMTQTPLSLPVTPGEPASISCRSSQSLLHSNGYNYLDWYLQKPGQSPQLLIYLGSNRASGVPDRFSGSGSGTDFTLKISRVEAEDVGVYYCMQALQTPYTFGCGTKVEIRSGGGGQEVQLVESGGGLVQPGRSLRLSCAASGFTFHDYPMHWVRQAPGKCLEWVSGISWNSDYIVYADSVKGRFTISRDNAKNSLYLQMNSLSAEDTALYYCAKDTAYGGKYSAFDYWGQGTLVTVSSGGGGQGGGGQGGGGQEIVLTQSPATLSVSPGERATLSCRASQSVSRNLAWYQQKPGQAPRRLIYGASTRATGIPDRFSGSGSGTDFTLTISRLEPEDFAVYYCQQYNNWPLTFGCGTKVEIKSGGGGQEVQLVESGGGLVQPGGSLKLSCAASGFTFNKYAINWVRQAPGKGLEWVARIRSKYNNYATYYADAVKDRFTISRDDSKNTVYLQMNNLKTEDTAVYYCARAGNFGSSYISYWAYWGQGTLVTVSSGGGGQGGGGQGGGGQQTVVTQEPSLTVSPGGTVTITCGSSTGAVTSGNYPNWVQKKPGQAPRGLIGGTKFLAPGTPARFSGSLSGGKAALTLSGVQPEDEAEYYCVLWYSNRWVFGSGTKLTVLGGGGCPPCPAPELLGGPSVFLFPPKPKDTLMISRTPEVTCVVVDVSHEEPEVKFNWYVDGVEVHNAKTKPCEEQYGSTYRCVSVLTVLHQDWLNGKEYKCKVSNKALPAPIEKTISKAKGQPREPQVYTLPPSREEMTKNQVSLTCLVKGFYPSDIAVEWESNGQPENNYKTTPPVLDSDGSFFLYSKLTVDKSRWQQGNVFSCSVMHEALHNHYTQKSLSLSPGKGGGGQGGGGQGGGGQGGGGQGGGGQGGGGQCPPCPAPELLGGPSVFLFPPKPKDTLMISRTPEVTCVVVDVSHEEPEVKFNWYVDGVEVHNAKTKPCEEQYGSTYRCVSVLTVLHQDWLNGKEYKCKVSNKALPAPIEKTISKAKGQPREPQVYTLPPSREEMTKNQVSLTCLVKGFYPSDIAVEWESNGQPENNYKTTPPVLDSDGSFFLYSKLTVDKSRWQQGNVFSCSVMHEALHNHYTQKSLSLSPGK

SEQ ID NO: 3334 - protein, 497 aa, Artificial Sequence
  Synthetic
QVQLVESGGGVVQPGRSLRLSCAASGFTFSAYGMHWVRQAPGKCLEWVAVILYDGSNKYYADSVKGRFTISRDNSKNTLYLQMNSLRAEDTAVYYCARGSGWLQLGDYFDYWGQGTLVTVSSGGGGSGGGGSGGGGSQSALTQPPSVSGSPGQSITISCTGTSSDVGGYNYVSWYQQHPGKAPKLMIYEVSNRPSGVSNRFSGSKSGNTASLTISGLQAEDEADYYCSSYTSSSTLVFGCGTKLTVLSGGGGSEVQLVESGGGLVQPGRSLRLSCAASGFTFHDYPMHWVRQAPGKCLEWVSGISWNSDYIVYADSVKGRFTISRDNAKNSLYLQMNSLSAEDTALYYCAKDTAYGGKYSAFDYWGQGTLVTVSSGGGGSGGGGSGGGGSEIVLTQSPATLSVSPGERATLSCRASQSVSRNLAWYQQKPGQAPRRLIYGASTRATGIPDRFSGSGSGTDFTLTISRLEPEDFAVYYCQQYNNWPLTFGCGTKVEIK

SEQ ID NO: 3335 - protein, 497 aa, Artificial Sequence
  Synthetic
QVQLVESGGGVVQPGRSLRLSCAASGFTFSAYGMHWVRQAPGKCLEWVAVILYDGSNKYYADSVKGRFTISRDNSKNTLYLQMNSLRAEDTAVYYCARGSGWLQLGDYFDYWGQGTLVTVSSGGGGQGGGGQGGGGQQSALTQPPSVSGSPGQSITISCTGTSSDVGGYNYVSWYQQHPGKAPKLMIYEVSNRPSGVSNRFSGSKSGNTASLTISGLQAEDEADYYCSSYTSSSTLVFGCGTKLTVLSGGGGQEVQLVESGGGLVQPGRSLRLSCAASGFTFHDYPMHWVRQAPGKCLEWVSGISWNSDYIVYADSVKGRFTISRDNAKNSLYLQMNSLSAEDTALYYCAKDTAYGGKYSAFDYWGQGTLVTVSSGGGGQGGGGQGGGGQEIVLTQSPATLSVSPGERATLSCRASQSVSRNLAWYQQKPGQAPRRLIYGASTRATGIPDRFSGSGSGTDFTLTISRLEPEDFAVYYCQQYNNWPLTFGCGTKVEIK

SEQ ID NO: 3336 - protein, 752 aa, Artificial Sequence
  Synthetic
QVQLVESGGGVVQPGRSLRLSCAASGFTFSAYGMHWVRQAPGKCLEWVAVILYDGSNKYYADSVKGRFTISRDNSKNTLYLQMNSLRAEDTAVYYCARGSGWLQLGDYFDYWGQGTLVTVSSGGGGSGGGGSGGGGSQSALTQPPSVSGSPGQSITISCTGTSSDVGGYNYVSWYQQHPGKAPKLMIYEVSNRPSGVSNRFSGSKSGNTASLTISGLQAEDEADYYCSSYTSSSTLVFGCGTKLTVLSGGGGSEVQLVESGGGLVQPGRSLRLSCAASGFTFHDYPMHWVRQAPGKCLEWVSGISWNSDYIVYADSVKGRFTISRDNAKNSLYLQMNSLSAEDTALYYCAKDTAYGGKYSAFDYWGQGTLVTVSSGGGGSGGGGSGGGGSEIVLTQSPATLSVSPGERATLSCRASQSVSRNLAWYQQKPGQAPRRLIYGASTRATGIPDRFSGSGSGTDFTLTISRLEPEDFAVYYCQQYNNWPLTFGCGTKVEIKSGGGGSEVQLVESGGGLVQPGGSLKLSCAASGFTFNKYAMNWVRQAPGKGLEWVARIRSKYNNYATYYADSVKDRFTISRDDSKNTAYLQMNNLKTEDTAVYYCVRHGNFGNSYISYWAYWGQGTLVTVSSGGGGSGGGGSGGGGSQTVVTQEPSLTVSPGGTVTLTCGSSTGAVTSGNYPNWVQQKPGQAPRGLIGGTKFLAPGTPARFSGSLLGGKAALTLSGVQPEDEAEYYCVLWYSNRWVFGGGTKLTVL

SEQ ID NO: 3337 - protein, 752 aa, Artificial Sequence
  Synthetic
QVQLVESGGGVVQPGRSLRLSCAASGFTFSAYGMHWVRQAPGKCLEWVAVILYDGSNKYYADSVKGRFTISRDNSKNTLYLQMNSLRAEDTAVYYCARGSGWLQLGDYFDYWGQGTLVTVSSGGGGQGGGGQGGGGQQSALTQPPSVSGSPGQSITISCTGTSSDVGGYNYVSWYQQHPGKAPKLMIYEVSNRPSGVSNRFSGSKSGNTASLTISGLQAEDEADYYCSSYTSSSTLVFGCGTKLTVLSGGGGQEVQLVESGGGLVQPGRSLRLSCAASGFTFHDYPMHWVRQAPGKCLEWVSGISWNSDYIVYADSVKGRFTISRDNAKNSLYLQMNSLSAEDTALYYCAKDTAYGGKYSAFDYWGQGTLVTVSSGGGGQGGGGQGGGGQEIVLTQSPATLSVSPGERATLSCRASQSVSRNLAWYQQKPGQAPRRLIYGASTRATGIPDRFSGSGSGTDFTLTISRLEPEDFAVYYCQQYNNWPLTFGCGTKVEIKSGGGGQEVQLVESGGGLVQPGGSLKLSCAASGFTFNKYAMNWVRQAPGKGLEWVARIRSKYNNYATYYADSVKDRFTISRDDSKNTAYLQMNNLKTEDTAVYYCVRHGNFGNSYISYWAYWGQGTLVTVSSGGGGQGGGGQGGGGQQTVVTQEPSLTVSPGGTVTLTCGSSTGAVTSGNYPNWVQQKPGQAPRGLIGGTKFLAPGTPARFSGSLLGGKAALTLSGVQPEDEAEYYCVLWYSNRWVFGGGTKLTVL

SEQ ID NO: 3338 - protein, 752 aa, Artificial Sequence
  Synthetic
QVQLVESGGGVVQPGRSLRLSCAASGFTFSAYGMHWVRQAPGKCLEWVAVILYDGSNKYYADSVKGRFTISRDNSKNTLYLQMNSLRAEDTAVYYCARGSGWLQLGDYFDYWGQGTLVTVSSGGGGSGGGGSGGGGSQSALTQPPSVSGSPGQSITISCTGTSSDVGGYNYVSWYQQHPGKAPKLMIYEVSNRPSGVSNRFSGSKSGNTASLTISGLQAEDEADYYCSSYTSSSTLVFGCGTKLTVLSGGGGSEVQLVESGGGLVQPGRSLRLSCAASGFTFHDYPMHWVRQAPGKCLEWVSGISWNSDYIVYADSVKGRFTISRDNAKNSLYLQMNSLSAEDTALYYCAKDTAYGGKYSAFDYWGQGTLVTVSSGGGGSGGGGSGGGGSEIVLTQSPATLSVSPGERATLSCRASQSVSRNLAWYQQKPGQAPRRLIYGASTRATGIPDRFSGSGSGTDFTLTISRLEPEDFAVYYCQQYNNWPLTFGCGTKVEIKSGGGGSEVQLVESGGGLVQPGGSLKLSCAASGFTFNKYAINWVRQAPGKGLEWVARIRSKYNNYATYYADAVKDRFTISRDDSKNTVYLQMNNLKTEDTAVYYCARAGNFGSSYISYWAYWGQGTLVTVSSGGGGSGGGGSGGGGSQTVVTQEPSLTVSPGGTVTITCGSSTGAVTSGNYPNWVQKKPGQAPRGLIGGTKFLAPGTPARFSGSLSGGKAALTLSGVQPEDEAEYYCVLWYSNRWVFGSGTKLTVL

SEQ ID NO: 3339 - protein, 752 aa, Artificial Sequence
  Synthetic
QVQLVESGGGVVQPGRSLRLSCAASGFTFSAYGMHWVRQAPGKCLEWVAVILYDGSNKYYADSVKGRFTISRDNSKNTLYLQMNSLRAEDTAVYYCARGSGWLQLGDYFDYWGQGTLVTVSSGGGGQGGGGQGGGGQQSALTQPPSVSGSPGQSITISCTGTSSDVGGYNYVSWYQQHPGKAPKLMIYEVSNRPSGVSNRFSGSKSGNTASLTISGLQAEDEADYYCSSYTSSSTLVFGCGTKLTVLSGGGGQEVQLVESGGGLVQPGRSLRLSCAASGFTFHDYPMHWVRQAPGKCLEWVSGISWNSDYIVYADSVKGRFTISRDNAKNSLYLQMNSLSAEDTALYYCAKDTAYGGKYSAFDYWGQGTLVTVSSGGGGQGGGGQGGGGQEIVLTQSPATLSVSPGERATLSCRASQSVSRNLAWYQQKPGQAPRRLIYGASTRATGIPDRFSGSGSGTDFTLTISRLEPEDFAVYYCQQYNNWPLTFGCGTKVEIKSGGGGQEVQLVESGGGLVQPGGSLKLSCAASGFTFNKYAINWVRQAPGKGLEWVARIRSKYNNYATYYADAVKDRFTISRDDSKNTVYLQMNNLKTEDTAVYYCARAGNFGSSYISYWAYWGQGTLVTVSSGGGGQGGGGQGGGGQQTVVTQEPSLTVSPGGTVTITCGSSTGAVTSGNYPNWVQKKPGQAPRGLIGGTKFLAPGTPARFSGSLSGGKAALTLSGVQPEDEAEYYCVLWYSNRWVFGSGTKLTVL

SEQ ID NO: 3340 - protein, 1240 aa, Artificial Sequence
  Synthetic
QVQLVESGGGVVQPGRSLRLSCAASGFTFSAYGMHWVRQAPGKCLEWVAVILYDGSNKYYADSVKGRFTISRDNSKNTLYLQMNSLRAEDTAVYYCARGSGWLQLGDYFDYWGQGTLVTVSSGGGGSGGGGSGGGGSQSALTQPPSVSGSPGQSITISCTGTSSDVGGYNYVSWYQQHPGKAPKLMIYEVSNRPSGVSNRFSGSKSGNTASLTISGLQAEDEADYYCSSYTSSSTLVFGCGTKLTVLSGGGGSEVQLVESGGGLVQPGRSLRLSCAASGFTFHDYPMHWVRQAPGKCLEWVSGISWNSDYIVYADSVKGRFTISRDNAKNSLYLQMNSLSAEDTALYYCAKDTAYGGKYSAFDYWGQGTLVTVSSGGGGSGGGGSGGGGSEIVLTQSPATLSVSPGERATLSCRASQSVSRNLAWYQQKPGQAPRRLIYGASTRATGIPDRFSGSGSGTDFTLTISRLEPEDFAVYYCQQYNNWPLTFGCGTKVEIKSGGGGSEVQLVESGGGLVQPGGSLKLSCAASGFTFNKYAMNWVRQAPGKGLEWVARIRSKYNNYATYYADSVKDRFTISRDDSKNTAYLQMNNLKTEDTAVYYCVRHGNFGNSYISYWAYWGQGTLVTVSSGGGGSGGGGSGGGGSQTVVTQEPSLTVSPGGTVTLTCGSSTGAVTSGNYPNWVQQKPGQAPRGLIGGTKFLAPGTPARFSGSLLGGKAALTLSGVQPEDEAEYYCVLWYSNRWVFGGGTKLTVLGGGGDKTHTCPPCPAPELLGGPSVFLFPPKPKDTLMISRTPEVTCVVVDVSHEDPEVKFNWYVDGVEVHNAKTKPCEEQYGSTYRCVSVLTVLHQDWLNGKEYKCKVSNKALPAPIEKTISKAKGQPREPQVYTLPPSREEMTKNQVSLTCLVKGFYPSDIAVEWESNGQPENNYKTTPPVLDSDGSFFLYSKLTVDKSRWQQGNVFSCSVMHEALHNHYTQKSLSLSPGKGGGGSGGGGSGGGGSGGGGSGGGGSGGGGSDKTHTCPPCPAPELLGGPSVFLFPPKPKDTLMISRTPEVTCVVVDVSHEDPEVKFNWYVDGVEVHNAKTKPCEEQYGSTYRCVSVLTVLHQDWLNGKEYKCKVSNKALPAPIEKTISKAKGQPREPQVYTLPPSREEMTKNQVSLTCLVKGFYPSDIAVEWESNGQPENNYKTTPPVLDSDGSFFLYSKLTVDKSRWQQGNVFSCSVMHEALHNHYTQKSLSLSPGK

SEQ ID NO: 3341 - protein, 1230 aa, Artificial Sequence
  Synthetic
QVQLVESGGGVVQPGRSLRLSCAASGFTFSAYGMHWVRQAPGKCLEWVAVILYDGSNKYYADSVKGRFTISRDNSKNTLYLQMNSLRAEDTAVYYCARGSGWLQLGDYFDYWGQGTLVTVSSGGGGQGGGGQGGGGQQSALTQPPSVSGSPGQSITISCTGTSSDVGGYNYVSWYQQHPGKAPKLMIYEVSNRPSGVSNRFSGSKSGNTASLTISGLQAEDEADYYCSSYTSSSTLVFGCGTKLTVLSGGGGQEVQLVESGGGLVQPGRSLRLSCAASGFTFHDYPMHWVRQAPGKCLEWVSGISWNSDYIVYADSVKGRFTISRDNAKNSLYLQMNSLSAEDTALYYCAKDTAYGGKYSAFDYWGQGTLVTVSSGGGGQGGGGQGGGGQEIVLTQSPATLSVSPGERATLSCRASQSVSRNLAWYQQKPGQAPRRLIYGASTRATGIPDRFSGSGSGTDFTLTISRLEPEDFAVYYCQQYNNWPLTFGCGTKVEIKSGGGGQEVQLVESGGGLVQPGGSLKLSCAASGFTFNKYAMNWVRQAPGKGLEWVARIRSKYNNYATYYADSVKDRFTISRDDSKNTAYLQMNNLKTEDTAVYYCVRHGNFGNSYISYWAYWGQGTLVTVSSGGGGQGGGGQGGGGQQTVVTQEPSLTVSPGGTVTLTCGSSTGAVTSGNYPNWVQQKPGQAPRGLIGGTKFLAPGTPARFSGSLLGGKAALTLSGVQPEDEAEYYCVLWYSNRWVFGGGTKLTVLGGGGCPPCPAPELLGGPSVFLFPPKPKDTLMISRTPEVTCVVVDVSHEEPEVKFNWYVDGVEVHNAKTKPCEEQYGSTYRCVSVLTVLHQDWLNGKEYKCKVSNKALPAPIEKTISKAKGQPREPQVYTLPPSREEMTKNQVSLTCLVKGFYPSDIAVEWESNGQPENNYKTTPPVLDSDGSFFLYSKLTVDKSRWQQGNVFSCSVMHEALHNHYTQKSLSLSPGKGGGGQGGGGQGGGGQGGGGQGGGGQGGGGQCPPCPAPELLGGPSVFLFPPKPKDTLMISRTPEVTCVVVDVSHEEPEVKFNWYVDGVEVHNAKTKPCEEQYGSTYRCVSVLTVLHQDWLNGKEYKCKVSNKALPAPIEKTISKAKGQPREPQVYTLPPSREEMTKNQVSLTCLVKGFYPSDIAVEWESNGQPENNYKTTPPVLDSDGSFFLYSKLTVDKSRWQQGNVFSCSVMHEALHNHYTQKSLSLSPGK

SEQ ID NO: 3342 - protein, 1240 aa, Artificial Sequence
  Synthetic
QVQLVESGGGVVQPGRSLRLSCAASGFTFSAYGMHWVRQAPGKCLEWVAVILYDGSNKYYADSVKGRFTISRDNSKNTLYLQMNSLRAEDTAVYYCARGSGWLQLGDYFDYWGQGTLVTVSSGGGGSGGGGSGGGGSQSALTQPPSVSGSPGQSITISCTGTSSDVGGYNYVSWYQQHPGKAPKLMIYEVSNRPSGVSNRFSGSKSGNTASLTISGLQAEDEADYYCSSYTSSSTLVFGCGTKLTVLSGGGGSEVQLVESGGGLVQPGRSLRLSCAASGFTFHDYPMHWVRQAPGKCLEWVSGISWNSDYIVYADSVKGRFTISRDNAKNSLYLQMNSLSAEDTALYYCAKDTAYGGKYSAFDYWGQGTLVTVSSGGGGSGGGGSGGGGSEIVLTQSPATLSVSPGERATLSCRASQSVSRNLAWYQQKPGQAPRRLIYGASTRATGIPDRFSGSGSGTDFTLTISRLEPEDFAVYYCQQYNNWPLTFGCGTKVEIKSGGGGSEVQLVESGGGLVQPGGSLKLSCAASGFTFNKYAINWVRQAPGKGLEWVARIRSKYNNYATYYADAVKDRFTISRDDSKNTVYLQMNNLKTEDTAVYYCARAGNFGSSYISYWAYWGQGTLVTVSSGGGGSGGGGSGGGGSQTVVTQEPSLTVSPGGTVTITCGSSTGAVTSGNYPNWVQKKPGQAPRGLIGGTKFLAPGTPARFSGSLSGGKAALTLSGVQPEDEAEYYCVLWYSNRWVFGSGTKLTVLGGGGDKTHTCPPCPAPELLGGPSVFLFPPKPKDTLMISRTPEVTCVVVDVSHEDPEVKFNWYVDGVEVHNAKTKPCEEQYGSTYRCVSVLTVLHQDWLNGKEYKCKVSNKALPAPIEKTISKAKGQPREPQVYTLPPSREEMTKNQVSLTCLVKGFYPSDIAVEWESNGQPENNYKTTPPVLDSDGSFFLYSKLTVDKSRWQQGNVFSCSVMHEALHNHYTQKSLSLSPGKGGGGSGGGGSGGGGSGGGGSGGGGSGGGGSDKTHTCPPCPAPELLGGPSVFLFPPKPKDTLMISRTPEVTCVVVDVSHEDPEVKFNWYVDGVEVHNAKTKPCEEQYGSTYRCVSVLTVLHQDWLNGKEYKCKVSNKALPAPIEKTISKAKGQPREPQVYTLPPSREEMTKNQVSLTCLVKGFYPSDIAVEWESNGQPENNYKTTPPVLDSDGSFFLYSKLTVDKSRWQQGNVFSCSVMHEALHNHYTQKSLSLSPGK

SEQ ID NO: 3343 - protein, 1230 aa, Artificial Sequence
  Synthetic
QVQLVESGGGVVQPGRSLRLSCAASGFTFSAYGMHWVRQAPGKCLEWVAVILYDGSNKYYADSVKGRFTISRDNSKNTLYLQMNSLRAEDTAVYYCARGSGWLQLGDYFDYWGQGTLVTVSSGGGGQGGGGQGGGGQQSALTQPPSVSGSPGQSITISCTGTSSDVGGYNYVSWYQQHPGKAPKLMIYEVSNRPSGVSNRFSGSKSGNTASLTISGLQAEDEADYYCSSYTSSSTLVFGCGTKLTVLSGGGGQEVQLVESGGGLVQPGRSLRLSCAASGFTFHDYPMHWVRQAPGKCLEWVSGISWNSDYIVYADSVKGRFTISRDNAKNSLYLQMNSLSAEDTALYYCAKDTAYGGKYSAFDYWGQGTLVTVSSGGGGQGGGGQGGGGQEIVLTQSPATLSVSPGERATLSCRASQSVSRNLAWYQQKPGQAPRRLIYGASTRATGIPDRFSGSGSGTDFTLTISRLEPEDFAVYYCQQYNNWPLTFGCGTKVEIKSGGGGQEVQLVESGGGLVQPGGSLKLSCAASGFTFNKYAINWVRQAPGKGLEWVARIRSKYNNYATYYADAVKDRFTISRDDSKNTVYLQMNNLKTEDTAVYYCARAGNFGSSYISYWAYWGQGTLVTVSSGGGGQGGGGQGGGGQQTVVTQEPSLTVSPGGTVTITCGSSTGAVTSGNYPNWVQKKPGQAPRGLIGGTKFLAPGTPARFSGSLSGGKAALTLSGVQPEDEAEYYCVLWYSNRWVFGSGTKLTVLGGGGCPPCPAPELLGGPSVFLFPPKPKDTLMISRTPEVTCVVVDVSHEEPEVKFNWYVDGVEVHNAKTKPCEEQYGSTYRCVSVLTVLHQDWLNGKEYKCKVSNKALPAPIEKTISKAKGQPREPQVYTLPPSREEMTKNQVSLTCLVKGFYPSDIAVEWESNGQPENNYKTTPPVLDSDGSFFLYSKLTVDKSRWQQGNVFSCSVMHEALHNHYTQKSLSLSPGKGGGGQGGGGQGGGGQGGGGQGGGGQGGGGQCPPCPAPELLGGPSVFLFPPKPKDTLMISRTPEVTCVVVDVSHEEPEVKFNWYVDGVEVHNAKTKPCEEQYGSTYRCVSVLTVLHQDWLNGKEYKCKVSNKALPAPIEKTISKAKGQPREPQVYTLPPSREEMTKNQVSLTCLVKGFYPSDIAVEWESNGQPENNYKTTPPVLDSDGSFFLYSKLTVDKSRWQQGNVFSCSVMHEALHNHYTQKSLSLSPGK

SEQ ID NO: 3344 - protein, 1235 aa, Artificial Sequence
  Synthetic
QVQLVQSGAEVKKPGASVKVSCKASGYTFTSYWMHWVRQAPGQCLEWIGYITPSTGYTEYNQKFKGRVTMTRDKSTSTVYMELSSLTSEDTAVYYCARVHDYDRAMEYWGQGTTVTVSSGGGGSGGGGSGGGGSDIQMTQSPSSLSASVGDRVTITCKASQDINKYIAWYQQKPGKGPKLLIYYTSTLQPGVPSRFSGSGSGTDFTFTISSLQPEDIATYYCLQYASYPFTFGCGTRLEIKSGGGGSQVQLVQSGAEVKKPGASVKVSCKASGYTFTSYGISWVRQAPGQCLEWMGWISPLSKATIYAQKLQGRVTMTTDTSTTTAYMELRSLRSDDTAVYFCARDPDYYGSGSYSDYWGQGTLVTVSSGGGGSGGGGSGGGGSEIVMTQSPATLSVSPGERATLSCRASQSVSSNLAWYQQKPGQAPRLLIYGTSTRATGIPARFSGSGSGTEFTLTISSLQSEDFAVYYCQQYHSWPLLTFGCGTKVEIKSGGGGSEVQLVESGGGLVQPGGSLKLSCAASGFTFNKYAMNWVRQAPGKGLEWVARIRSKYNNYATYYADSVKDRFTISRDDSKNTAYLQMNNLKTEDTAVYYCVRHGNFGNSYISYWAYWGQGTLVTVSSGGGGSGGGGSGGGGSQTVVTQEPSLTVSPGGTVTLTCGSSTGAVTSGNYPNWVQQKPGQAPRGLIGGTKFLAPGTPARFSGSLLGGKAALTLSGVQPEDEAEYYCVLWYSNRWVFGGGTKLTVLGGGGDKTHTCPPCPAPELLGGPSVFLFPPKPKDTLMISRTPEVTCVVVDVSHEDPEVKFNWYVDGVEVHNAKTKPCEEQYGSTYRCVSVLTVLHQDWLNGKEYKCKVSNKALPAPIEKTISKAKGQPREPQVYTLPPSREEMTKNQVSLTCLVKGFYPSDIAVEWESNGQPENNYKTTPPVLDSDGSFFLYSKLTVDKSRWQQGNVFSCSVMHEALHNHYTQKSLSLSPGKGGGGSGGGGSGGGGSGGGGSGGGGSGGGGSDKTHTCPPCPAPELLGGPSVFLFPPKPKDTLMISRTPEVTCVVVDVSHEDPEVKFNWYVDGVEVHNAKTKPCEEQYGSTYRCVSVLTVLHQDWLNGKEYKCKVSNKALPAPIEKTISKAKGQPREPQVYTLPPSREEMTKNQVSLTCLVKGFYPSDIAVEWESNGQPENNYKTTPPVLDSDGSFFLYSKLTVDKSRWQQGNVFSCSVMHEALHNHYTQKSLSLSPGK

SEQ ID NO: 3345 - protein, 988 aa, Artificial Sequence
  Synthetic
QVQLVQSGAEVKKPGASVKVSCKASGYTFTSYGISWVRQAPGQCLEWMGWISPLSKATIYAQKLQGRVTMTTDTSTTTAYMELRSLRSDDTAVYFCARDPDYYGSGSYSDYWGQGTLVTVSSGGGGSGGGGSGGGGSEIVMTQSPATLSVSPGERATLSCRASQSVSSNLAWYQQKPGQAPRLLIYGTSTRATGIPARFSGSGSGTEFTLTISSLQSEDFAVYYCQQYHSWPLLTFGCGTKVEIKSGGGGSEVQLVESGGGLVQPGGSLKLSCAASGFTFNKYAMNWVRQAPGKGLEWVARIRSKYNNYATYYADSVKDRFTISRDDSKNTAYLQMNNLKTEDTAVYYCVRHGNFGNSYISYWAYWGQGTLVTVSSGGGGSGGGGSGGGGSQTVVTQEPSLTVSPGGTVTLTCGSSTGAVTSGNYPNWVQQKPGQAPRGLIGGTKFLAPGTPARFSGSLLGGKAALTLSGVQPEDEAEYYCVLWYSNRWVFGGGTKLTVLGGGGDKTHTCPPCPAPELLGGPSVFLFPPKPKDTLMISRTPEVTCVVVDVSHEDPEVKFNWYVDGVEVHNAKTKPCEEQYGSTYRCVSVLTVLHQDWLNGKEYKCKVSNKALPAPIEKTISKAKGQPREPQVYTLPPSREEMTKNQVSLTCLVKGFYPSDIAVEWESNGQPENNYKTTPPVLDSDGSFFLYSKLTVDKSRWQQGNVFSCSVMHEALHNHYTQKSLSLSPGKGGGGSGGGGSGGGGSGGGGSGGGGSGGGGSDKTHTCPPCPAPELLGGPSVFLFPPKPKDTLMISRTPEVTCVVVDVSHEDPEVKFNWYVDGVEVHNAKTKPCEEQYGSTYRCVSVLTVLHQDWLNGKEYKCKVSNKALPAPIEKTISKAKGQPREPQVYTLPPSREEMTKNQVSLTCLVKGFYPSDIAVEWESNGQPENNYKTTPPVLDSDGSFFLYSKLTVDKSRWQQGNVFSCSVMHEALHNHYTQKSLSLSPGK

SEQ ID NO: 3346 - protein, 5 aa, Artificial Sequence
  Synthetic
SYPIN

SEQ ID NO: 3347 - protein, 16 aa, Artificial Sequence
  Synthetic
VIWTGGGTNYASSVKG

SEQ ID NO: 3348 - protein, 15 aa, Artificial Sequence
  Synthetic
SRGVYDFKGRGAMDY

SEQ ID NO: 3349 - protein, 17 aa, Artificial Sequence
  Synthetic
KSSQSLLYSSNQKNYFA

SEQ ID NO: 3350 - protein, 7 aa, Artificial Sequence
  Synthetic
WASTRES

SEQ ID NO: 3351 - protein, 9 aa, Artificial Sequence
  Synthetic
QQYYSYPYT

SEQ ID NO: 3352 - protein, 123 aa, Artificial Sequence
  Synthetic
EVQLLESGGGLVQPGGSLRLSCAASGFSFSSYPINWVRQAPGKCLEWVGVIWTGGGTNYASSVKGRFTISRDNSKNTVYLQMNSLRAEDTAVYYCAKSRGVYDFKGRGAMDYWGQGTLVTVSS

SEQ ID NO: 3353 - protein, 113 aa, Artificial Sequence
  Synthetic
DIVMTQSPDSLAVSLGERATINCKSSQSLLYSSNQKNYFAWYQQKPGQPPKLLIYWASTRESGVPDRFSGSGSGTDFTLTISSLQAEDVAVYYCQQYYSYPYTFGCGTKLEIK

SEQ ID NO: 3354 - protein, 251 aa, Artificial Sequence
  Synthetic
EVQLLESGGGLVQPGGSLRLSCAASGFSFSSYPINWVRQAPGKCLEWVGVIWTGGGTNYASSVKGRFTISRDNSKNTVYLQMNSLRAEDTAVYYCAKSRGVYDFKGRGAMDYWGQGTLVTVSSGGGGSGGGGSGGGGSDIVMTQSPDSLAVSLGERATINCKSSQSLLYSSNQKNYFAWYQQKPGQPPKLLIYWASTRESGVPDRFSGSGSGTDFTLTISSLQAEDVAVYYCQQYYSYPYTFGCGTKLEIK

SEQ ID NO: 3355 - protein, 506 aa, Artificial Sequence
  Synthetic
EVQLLESGGGLVQPGGSLRLSCAASGFSFSSYPINWVRQAPGKCLEWVGVIWTGGGTNYASSVKGRFTISRDNSKNTVYLQMNSLRAEDTAVYYCAKSRGVYDFKGRGAMDYWGQGTLVTVSSGGGGSGGGGSGGGGSDIVMTQSPDSLAVSLGERATINCKSSQSLLYSSNQKNYFAWYQQKPGQPPKLLIYWASTRESGVPDRFSGSGSGTDFTLTISSLQAEDVAVYYCQQYYSYPYTFGCGTKLEIKSGGGGSEVQLVESGGGLVQPGGSLKLSCAASGFTFNKYAMNWVRQAPGKGLEWVARIRSKYNNYATYYADSVKDRFTISRDDSKNTAYLQMNNLKTEDTAVYYCVRHGNFGNSYISYWAYWGQGTLVTVSSGGGGSGGGGSGGGGSQTVVTQEPSLTVSPGGTVTLTCGSSTGAVTSGNYPNWVQQKPGQAPRGLIGGTKFLAPGTPARFSGSLLGGKAALTLSGVQPEDEAEYYCVLWYSNRWVFGGGTKLTVL

SEQ ID NO: 3356 - protein, 994 aa, Artificial Sequence
  Synthetic
EVQLLESGGGLVQPGGSLRLSCAASGFSFSSYPINWVRQAPGKCLEWVGVIWTGGGTNYASSVKGRFTISRDNSKNTVYLQMNSLRAEDTAVYYCAKSRGVYDFKGRGAMDYWGQGTLVTVSSGGGGSGGGGSGGGGSDIVMTQSPDSLAVSLGERATINCKSSQSLLYSSNQKNYFAWYQQKPGQPPKLLIYWASTRESGVPDRFSGSGSGTDFTLTISSLQAEDVAVYYCQQYYSYPYTFGCGTKLEIKSGGGGSEVQLVESGGGLVQPGGSLKLSCAASGFTFNKYAMNWVRQAPGKGLEWVARIRSKYNNYATYYADSVKDRFTISRDDSKNTAYLQMNNLKTEDTAVYYCVRHGNFGNSYISYWAYWGQGTLVTVSSGGGGSGGGGSGGGGSQTVVTQEPSLTVSPGGTVTLTCGSSTGAVTSGNYPNWVQQKPGQAPRGLIGGTKFLAPGTPARFSGSLLGGKAALTLSGVQPEDEAEYYCVLWYSNRWVFGGGTKLTVLGGGGDKTHTCPPCPAPELLGGPSVFLFPPKPKDTLMISRTPEVTCVVVDVSHEDPEVKFNWYVDGVEVHNAKTKPCEEQYGSTYRCVSVLTVLHQDWLNGKEYKCKVSNKALPAPIEKTISKAKGQPREPQVYTLPPSREEMTKNQVSLTCLVKGFYPSDIAVEWESNGQPENNYKTTPPVLDSDGSFFLYSKLTVDKSRWQQGNVFSCSVMHEALHNHYTQKSLSLSPGKGGGGSGGGGSGGGGSGGGGSGGGGSGGGGSDKTHTCPPCPAPELLGGPSVFLFPPKPKDTLMISRTPEVTCVVVDVSHEDPEVKFNWYVDGVEVHNAKTKPCEEQYGSTYRCVSVLTVLHQDWLNGKEYKCKVSNKALPAPIEKTISKAKGQPREPQVYTLPPSREEMTKNQVSLTCLVKGFYPSDIAVEWESNGQPENNYKTTPPVLDSDGSFFLYSKLTVDKSRWQQGNVFSCSVMHEALHNHYTQKSLSLSPGK

SEQ ID NO: 3357 - protein, 5 aa, Artificial Sequence
  Synthetic
NYWMN

SEQ ID NO: 3358 - protein, 17 aa, Artificial Sequence
  Synthetic
NIAYGVKGTNYNQKFQG

SEQ ID NO: 3359 - protein, 8 aa, Artificial Sequence
  Synthetic
RYFYVMDY

SEQ ID NO: 3360 - protein, 11 aa, Artificial Sequence
  Synthetic
RASQDISNYLN

SEQ ID NO: 3361 - protein, 7 aa, Artificial Sequence
  Synthetic
YTSRLHS

SEQ ID NO: 3362 - protein, 9 aa, Artificial Sequence
  Synthetic
VQYAQFPLT

SEQ ID NO: 3363 - protein, 117 aa, Artificial Sequence
  Synthetic
QVQLVQSGAEVKKPGASVKVSCKASGYTFTNYWMNWVRQAPGQCLEWMGNIAYGVKGTNYNQKFQGRVTMTVDTSSSTAYMELSRLRSDDTAVYYCATRYFYVMDYWGQGTLVTVSS

SEQ ID NO: 3364 - protein, 107 aa, Artificial Sequence
  Synthetic
DIQMTQSPSSLSASVGDRVTITCRASQDISNYLNWYQQKPGKVPKLLIYYTSRLHSGVPSRFSGSGSGTDFTLTISSLQPEDVATYYCVQYAQFPLTFGCGTKVEIK

SEQ ID NO: 3365 - protein, 239 aa, Artificial Sequence
  Synthetic
QVQLVQSGAEVKKPGASVKVSCKASGYTFTNYWMNWVRQAPGQCLEWMGNIAYGVKGTNYNQKFQGRVTMTVDTSSSTAYMELSRLRSDDTAVYYCATRYFYVMDYWGQGTLVTVSSGGGGSGGGGSGGGGSDIQMTQSPSSLSASVGDRVTITCRASQDISNYLNWYQQKPGKVPKLLIYYTSRLHSGVPSRFSGSGSGTDFTLTISSLQPEDVATYYCVQYAQFPLTFGCGTKVEIK

SEQ ID NO: 3366 - protein, 494 aa, Artificial Sequence
  Synthetic
QVQLVQSGAEVKKPGASVKVSCKASGYTFTNYWMNWVRQAPGQCLEWMGNIAYGVKGTNYNQKFQGRVTMTVDTSSSTAYMELSRLRSDDTAVYYCATRYFYVMDYWGQGTLVTVSSGGGGSGGGGSGGGGSDIQMTQSPSSLSASVGDRVTITCRASQDISNYLNWYQQKPGKVPKLLIYYTSRLHSGVPSRFSGSGSGTDFTLTISSLQPEDVATYYCVQYAQFPLTFGCGTKVEIKSGGGGSEVQLVESGGGLVQPGGSLKLSCAASGFTFNKYAMNWVRQAPGKGLEWVARIRSKYNNYATYYADSVKDRFTISRDDSKNTAYLQMNNLKTEDTAVYYCVRHGNFGNSYISYWAYWGQGTLVTVSSGGGGSGGGGSGGGGSQTVVTQEPSLTVSPGGTVTLTCGSSTGAVTSGNYPNWVQQKPGQAPRGLIGGTKFLAPGTPARFSGSLLGGKAALTLSGVQPEDEAEYYCVLWYSNRWVFGGGTKLTVL

SEQ ID NO: 3367 - protein, 982 aa, Artificial Sequence
  Synthetic
QVQLVQSGAEVKKPGASVKVSCKASGYTFTNYWMNWVRQAPGQCLEWMGNIAYGVKGTNYNQKFQGRVTMTVDTSSSTAYMELSRLRSDDTAVYYCATRYFYVMDYWGQGTLVTVSSGGGGSGGGGSGGGGSDIQMTQSPSSLSASVGDRVTITCRASQDISNYLNWYQQKPGKVPKLLIYYTSRLHSGVPSRFSGSGSGTDFTLTISSLQPEDVATYYCVQYAQFPLTFGCGTKVEIKSGGGGSEVQLVESGGGLVQPGGSLKLSCAASGFTFNKYAMNWVRQAPGKGLEWVARIRSKYNNYATYYADSVKDRFTISRDDSKNTAYLQMNNLKTEDTAVYYCVRHGNFGNSYISYWAYWGQGTLVTVSSGGGGSGGGGSGGGGSQTVVTQEPSLTVSPGGTVTLTCGSSTGAVTSGNYPNWVQQKPGQAPRGLIGGTKFLAPGTPARFSGSLLGGKAALTLSGVQPEDEAEYYCVLWYSNRWVFGGGTKLTVLGGGGDKTHTCPPCPAPELLGGPSVFLFPPKPKDTLMISRTPEVTCVVVDVSHEDPEVKFNWYVDGVEVHNAKTKPCEEQYGSTYRCVSVLTVLHQDWLNGKEYKCKVSNKALPAPIEKTISKAKGQPREPQVYTLPPSREEMTKNQVSLTCLVKGFYPSDIAVEWESNGQPENNYKTTPPVLDSDGSFFLYSKLTVDKSRWQQGNVFSCSVMHEALHNHYTQKSLSLSPGKGGGGSGGGGSGGGGSGGGGSGGGGSGGGGSDKTHTCPPCPAPELLGGPSVFLFPPKPKDTLMISRTPEVTCVVVDVSHEDPEVKFNWYVDGVEVHNAKTKPCEEQYGSTYRCVSVLTVLHQDWLNGKEYKCKVSNKALPAPIEKTISKAKGQPREPQVYTLPPSREEMTKNQVSLTCLVKGFYPSDIAVEWESNGQPENNYKTTPPVLDSDGSFFLYSKLTVDKSRWQQGNVFSCSVMHEALHNHYTQKSLSLSPGK

SEQ ID NO: 3368 - protein, 5 aa, Artificial Sequence
  Synthetic
SSWMN

SEQ ID NO: 3369 - protein, 17 aa, Artificial Sequence
  Synthetic
RIYTGTGETKYSGKFQG

SEQ ID NO: 3370 - protein, 12 aa, Artificial Sequence
  Synthetic
QRDYGALYAMDY

SEQ ID NO: 3371 - protein, 11 aa, Artificial Sequence
  Synthetic
RASDDIYSYLA

SEQ ID NO: 3372 - protein, 7 aa, Artificial Sequence
  Synthetic
NAKTLAE

SEQ ID NO: 3373 - protein, 9 aa, Artificial Sequence
  Synthetic
QNHDRTPFT

SEQ ID NO: 3374 - protein, 121 aa, Artificial Sequence
  Synthetic
QVQLVQSGAEVVKPGASVKVSCKASGYTFTSSWMNWVRQAPGQCLEWMGRIYTGTGETKYSGKFQGRVTITRDTSASTAYMELSSLTSEDTAVYYCARQRDYGALYAMDYWGQGTLVTVSS

SEQ ID NO: 3375 - protein, 107 aa, Artificial Sequence
  Synthetic
DIQLTQSPSFLSASVGDRVTITCRASDDIYSYLAWYQQKPGKAPKLLVYNAKTLAEGVPSRFSGSGSGTEFTLTISSLQPEDFATYYCQNHDRTPFTFGCGTKVDIK

SEQ ID NO: 3376 - protein, 243 aa, Artificial Sequence
  Synthetic
QVQLVQSGAEVVKPGASVKVSCKASGYTFTSSWMNWVRQAPGQCLEWMGRIYTGTGETKYSGKFQGRVTITRDTSASTAYMELSSLTSEDTAVYYCARQRDYGALYAMDYWGQGTLVTVSSGGGGSGGGGSGGGGSDIQLTQSPSFLSASVGDRVTITCRASDDIYSYLAWYQQKPGKAPKLLVYNAKTLAEGVPSRFSGSGSGTEFTLTISSLQPEDFATYYCQNHDRTPFTFGCGTKVDIK

SEQ ID NO: 3377 - protein, 498 aa, Artificial Sequence
  Synthetic
QVQLVQSGAEVVKPGASVKVSCKASGYTFTSSWMNWVRQAPGQCLEWMGRIYTGTGETKYSGKFQGRVTITRDTSASTAYMELSSLTSEDTAVYYCARQRDYGALYAMDYWGQGTLVTVSSGGGGSGGGGSGGGGSDIQLTQSPSFLSASVGDRVTITCRASDDIYSYLAWYQQKPGKAPKLLVYNAKTLAEGVPSRFSGSGSGTEFTLTISSLQPEDFATYYCQNHDRTPFTFGCGTKVDIKSGGGGSEVQLVESGGGLVQPGGSLKLSCAASGFTFNKYAMNWVRQAPGKGLEWVARIRSKYNNYATYYADSVKDRFTISRDDSKNTAYLQMNNLKTEDTAVYYCVRHGNFGNSYISYWAYWGQGTLVTVSSGGGGSGGGGSGGGGSQTVVTQEPSLTVSPGGTVTLTCGSSTGAVTSGNYPNWVQQKPGQAPRGLIGGTKFLAPGTPARFSGSLLGGKAALTLSGVQPEDEAEYYCVLWYSNRWVFGGGTKLTVL

SEQ ID NO: 3378 - protein, 986 aa, Artificial Sequence
  Synthetic
QVQLVQSGAEVVKPGASVKVSCKASGYTFTSSWMNWVRQAPGQCLEWMGRIYTGTGETKYSGKFQGRVTITRDTSASTAYMELSSLTSEDTAVYYCARQRDYGALYAMDYWGQGTLVTVSSGGGGSGGGGSGGGGSDIQLTQSPSFLSASVGDRVTITCRASDDIYSYLAWYQQKPGKAPKLLVYNAKTLAEGVPSRFSGSGSGTEFTLTISSLQPEDFATYYCQNHDRTPFTFGCGTKVDIKSGGGGSEVQLVESGGGLVQPGGSLKLSCAASGFTFNKYAMNWVRQAPGKGLEWVARIRSKYNNYATYYADSVKDRFTISRDDSKNTAYLQMNNLKTEDTAVYYCVRHGNFGNSYISYWAYWGQGTLVTVSSGGGGSGGGGSGGGGSQTVVTQEPSLTVSPGGTVTLTCGSSTGAVTSGNYPNWVQQKPGQAPRGLIGGTKFLAPGTPARFSGSLLGGKAALTLSGVQPEDEAEYYCVLWYSNRWVFGGGTKLTVLGGGGDKTHTCPPCPAPELLGGPSVFLFPPKPKDTLMISRTPEVTCVVVDVSHEDPEVKFNWYVDGVEVHNAKTKPCEEQYGSTYRCVSVLTVLHQDWLNGKEYKCKVSNKALPAPIEKTISKAKGQPREPQVYTLPPSREEMTKNQVSLTCLVKGFYPSDIAVEWESNGQPENNYKTTPPVLDSDGSFFLYSKLTVDKSRWQQGNVFSCSVMHEALHNHYTQKSLSLSPGKGGGGSGGGGSGGGGSGGGGSGGGGSGGGGSDKTHTCPPCPAPELLGGPSVFLFPPKPKDTLMISRTPEVTCVVVDVSHEDPEVKFNWYVDGVEVHNAKTKPCEEQYGSTYRCVSVLTVLHQDWLNGKEYKCKVSNKALPAPIEKTISKAKGQPREPQVYTLPPSREEMTKNQVSLTCLVKGFYPSDIAVEWESNGQPENNYKTTPPVLDSDGSFFLYSKLTVDKSRWQQGNVFSCSVMHEALHNHYTQKSLSLSPGK

SEQ ID NO: 3379 - protein, 5 aa, Artificial Sequence
  Synthetic
NYWMN

SEQ ID NO: 3380 - protein, 17 aa, Artificial Sequence
  Synthetic
NIHSKAHGTNYNQKFQG

SEQ ID NO: 3381 - protein, 8 aa, Artificial Sequence
  Synthetic
RYFYVMDY

SEQ ID NO: 3382 - protein, 11 aa, Artificial Sequence
  Synthetic
RASQDISNYLN

SEQ ID NO: 3383 - protein, 7 aa, Artificial Sequence
  Synthetic
YTSRLHS

SEQ ID NO: 3384 - protein, 9 aa, Artificial Sequence
  Synthetic
VQYAQFPLT

SEQ ID NO: 3385 - protein, 117 aa, Artificial Sequence
  Synthetic
QVQLVQSGAEVKKPGASVKVSCKASGYTFTNYWMNWVRQAPGQCLEWMGNIHSKAHGTNYNQKFQGRVTMTVDTSSSTAYMELSRLRSDDTAVYYCATRYFYVMDYWGQGTLVTVSS

SEQ ID NO: 3386 - protein, 107 aa, Artificial Sequence; identical to SEQ ID NO: 3364
  Synthetic

SEQ ID NO: 3387 - protein, 239 aa, Artificial Sequence
  Synthetic
QVQLVQSGAEVKKPGASVKVSCKASGYTFTNYWMNWVRQAPGQCLEWMGNIHSKAHGTNYNQKFQGRVTMTVDTSSSTAYMELSRLRSDDTAVYYCATRYFYVMDYWGQGTLVTVSSGGGGSGGGGSGGGGSDIQMTQSPSSLSASVGDRVTITCRASQDISNYLNWYQQKPGKVPKLLIYYTSRLHSGVPSRFSGSGSGTDFTLTISSLQPEDVATYYCVQYAQFPLTFGCGTKVEIK

SEQ ID NO: 3388 - protein, 494 aa, Artificial Sequence
  Synthetic
QVQLVQSGAEVKKPGASVKVSCKASGYTFTNYWMNWVRQAPGQCLEWMGNIHSKAHGTNYNQKFQGRVTMTVDTSSSTAYMELSRLRSDDTAVYYCATRYFYVMDYWGQGTLVTVSSGGGGSGGGGSGGGGSDIQMTQSPSSLSASVGDRVTITCRASQDISNYLNWYQQKPGKVPKLLIYYTSRLHSGVPSRFSGSGSGTDFTLTISSLQPEDVATYYCVQYAQFPLTFGCGTKVEIKSGGGGSEVQLVESGGGLVQPGGSLKLSCAASGFTFNKYAMNWVRQAPGKGLEWVARIRSKYNNYATYYADSVKDRFTISRDDSKNTAYLQMNNLKTEDTAVYYCVRHGNFGNSYISYWAYWGQGTLVTVSSGGGGSGGGGSGGGGSQTVVTQEPSLTVSPGGTVTLTCGSSTGAVTSGNYPNWVQQKPGQAPRGLIGGTKFLAPGTPARFSGSLLGGKAALTLSGVQPEDEAEYYCVLWYSNRWVFGGGTKLTVL

SEQ ID NO: 3389 - protein, 982 aa, Artificial Sequence
  Synthetic
QVQLVQSGAEVKKPGASVKVSCKASGYTFTNYWMNWVRQAPGQCLEWMGNIHSKAHGTNYNQKFQGRVTMTVDTSSSTAYMELSRLRSDDTAVYYCATRYFYVMDYWGQGTLVTVSSGGGGSGGGGSGGGGSDIQMTQSPSSLSASVGDRVTITCRASQDISNYLNWYQQKPGKVPKLLIYYTSRLHSGVPSRFSGSGSGTDFTLTISSLQPEDVATYYCVQYAQFPLTFGCGTKVEIKSGGGGSEVQLVESGGGLVQPGGSLKLSCAASGFTFNKYAMNWVRQAPGKGLEWVARIRSKYNNYATYYADSVKDRFTISRDDSKNTAYLQMNNLKTEDTAVYYCVRHGNFGNSYISYWAYWGQGTLVTVSSGGGGSGGGGSGGGGSQTVVTQEPSLTVSPGGTVTLTCGSSTGAVTSGNYPNWVQQKPGQAPRGLIGGTKFLAPGTPARFSGSLLGGKAALTLSGVQPEDEAEYYCVLWYSNRWVFGGGTKLTVLGGGGDKTHTCPPCPAPELLGGPSVFLFPPKPKDTLMISRTPEVTCVVVDVSHEDPEVKFNWYVDGVEVHNAKTKPCEEQYGSTYRCVSVLTVLHQDWLNGKEYKCKVSNKALPAPIEKTISKAKGQPREPQVYTLPPSREEMTKNQVSLTCLVKGFYPSDIAVEWESNGQPENNYKTTPPVLDSDGSFFLYSKLTVDKSRWQQGNVFSCSVMHEALHNHYTQKSLSLSPGKGGGGSGGGGSGGGGSGGGGSGGGGSGGGGSDKTHTCPPCPAPELLGGPSVFLFPPKPKDTLMISRTPEVTCVVVDVSHEDPEVKFNWYVDGVEVHNAKTKPCEEQYGSTYRCVSVLTVLHQDWLNGKEYKCKVSNKALPAPIEKTISKAKGQPREPQVYTLPPSREEMTKNQVSLTCLVKGFYPSDIAVEWESNGQPENNYKTTPPVLDSDGSFFLYSKLTVDKSRWQQGNVFSCSVMHEALHNHYTQKSLSLSPGK

SEQ ID NO: 3390 - protein, 5 aa, Artificial Sequence
  Synthetic
SYWMH

SEQ ID NO: 3391 - protein, 17 aa, Artificial Sequence
  Synthetic
VIRTSTSYTIYNQKFKG

SEQ ID NO: 3392 - protein, 8 aa, Artificial Sequence
  Synthetic
SGPGYFDV

SEQ ID NO: 3393 - protein, 11 aa, Artificial Sequence
  Synthetic
RASENIYSYLA

SEQ ID NO: 3394 - protein, 7 aa, Artificial Sequence
  Synthetic
NAKTLAE

SEQ ID NO: 3395 - protein, 9 aa, Artificial Sequence
  Synthetic
QHNYGTPYT

SEQ ID NO: 3396 - protein, 117 aa, Artificial Sequence
  Synthetic
QVQLVQSGAEVKKPGASVKVSCKASGYTFTSYWMHWVRQAPGQCLEWMGVIRTSTSYTIYNQKFKGRVTMTRDTSTSTVYMELSSLRSEDTAVYYCARSGPGYFDVWGQGTMVTVSS

SEQ ID NO: 3397 - protein, 107 aa, Artificial Sequence
  Synthetic
DIQLTQSPSFLSASVGDRVTITCRASENIYSYLAWYQQKPGKAPKLLIYNAKTLAEGVPSRFSGSGSGTEFTLTISSLQPEDFATYYCQHNYGTPYTFGCGTKLEIK

SEQ ID NO: 3398 - protein, 239 aa, Artificial Sequence
  Synthetic
QVQLVQSGAEVKKPGASVKVSCKASGYTFTSYWMHWVRQAPGQCLEWMGVIRTSTSYTIYNQKFKGRVTMTRDTSTSTVYMELSSLRSEDTAVYYCARSGPGYFDVWGQGTMVTVSSGGGGSGGGGSGGGGSDIQLTQSPSFLSASVGDRVTITCRASENIYSYLAWYQQKPGKAPKLLIYNAKTLAEGVPSRFSGSGSGTEFTLTISSLQPEDFATYYCQHNYGTPYTFGCGTKLEIK

SEQ ID NO: 3399 - protein, 494 aa, Artificial Sequence
  Synthetic
QVQLVQSGAEVKKPGASVKVSCKASGYTFTSYWMHWVRQAPGQCLEWMGVIRTSTSYTIYNQKFKGRVTMTRDTSTSTVYMELSSLRSEDTAVYYCARSGPGYFDVWGQGTMVTVSSGGGGSGGGGSGGGGSDIQLTQSPSFLSASVGDRVTITCRASENIYSYLAWYQQKPGKAPKLLIYNAKTLAEGVPSRFSGSGSGTEFTLTISSLQPEDFATYYCQHNYGTPYTFGCGTKLEIKSGGGGSEVQLVESGGGLVQPGGSLKLSCAASGFTFNKYAMNWVRQAPGKGLEWVARIRSKYNNYATYYADSVKDRFTISRDDSKNTAYLQMNNLKTEDTAVYYCVRHGNFGNSYISYWAYWGQGTLVTVSSGGGGSGGGGSGGGGSQTVVTQEPSLTVSPGGTVTLTCGSSTGAVTSGNYPNWVQQKPGQAPRGLIGGTKFLAPGTPARFSGSLLGGKAALTLSGVQPEDEAEYYCVLWYSNRWVFGGGTKLTVL

SEQ ID NO: 3400 - protein, 982 aa, Artificial Sequence
  Synthetic
QVQLVQSGAEVKKPGASVKVSCKASGYTFTSYWMHWVRQAPGQCLEWMGVIRTSTSYTIYNQKFKGRVTMTRDTSTSTVYMELSSLRSEDTAVYYCARSGPGYFDVWGQGTMVTVSSGGGGSGGGGSGGGGSDIQLTQSPSFLSASVGDRVTITCRASENIYSYLAWYQQKPGKAPKLLIYNAKTLAEGVPSRFSGSGSGTEFTLTISSLQPEDFATYYCQHNYGTPYTFGCGTKLEIKSGGGGSEVQLVESGGGLVQPGGSLKLSCAASGFTFNKYAMNWVRQAPGKGLEWVARIRSKYNNYATYYADSVKDRFTISRDDSKNTAYLQMNNLKTEDTAVYYCVRHGNFGNSYISYWAYWGQGTLVTVSSGGGGSGGGGSGGGGSQTVVTQEPSLTVSPGGTVTLTCGSSTGAVTSGNYPNWVQQKPGQAPRGLIGGTKFLAPGTPARFSGSLLGGKAALTLSGVQPEDEAEYYCVLWYSNRWVFGGGTKLTVLGGGGDKTHTCPPCPAPELLGGPSVFLFPPKPKDTLMISRTPEVTCVVVDVSHEDPEVKFNWYVDGVEVHNAKTKPCEEQYGSTYRCVSVLTVLHQDWLNGKEYKCKVSNKALPAPIEKTISKAKGQPREPQVYTLPPSREEMTKNQVSLTCLVKGFYPSDIAVEWESNGQPENNYKTTPPVLDSDGSFFLYSKLTVDKSRWQQGNVFSCSVMHEALHNHYTQKSLSLSPGKGGGGSGGGGSGGGGSGGGGSGGGGSGGGGSDKTHTCPPCPAPELLGGPSVFLFPPKPKDTLMISRTPEVTCVVVDVSHEDPEVKFNWYVDGVEVHNAKTKPCEEQYGSTYRCVSVLTVLHQDWLNGKEYKCKVSNKALPAPIEKTISKAKGQPREPQVYTLPPSREEMTKNQVSLTCLVKGFYPSDIAVEWESNGQPENNYKTTPPVLDSDGSFFLYSKLTVDKSRWQQGNVFSCSVMHEALHNHYTQKSLSLSPGK

SEQ ID NO: 3401 - protein, 5 aa, Artificial Sequence
  Synthetic
SYWMH

SEQ ID NO: 3402 - protein, 17 aa, Artificial Sequence
  Synthetic
KIDPSDDYTNYNQKVKG

SEQ ID NO: 3403 - protein, 8 aa, Artificial Sequence
  Synthetic
WDYSHFDV

SEQ ID NO: 3404 - protein, 10 aa, Artificial Sequence
  Synthetic
RASSSVSYMH

SEQ ID NO: 3405 - protein, 7 aa, Artificial Sequence
  Synthetic
GTSNLVS

SEQ ID NO: 3406 - protein, 9 aa, Artificial Sequence
  Synthetic
QQWSSYPLT

SEQ ID NO: 3407 - protein, 117 aa, Artificial Sequence
  Synthetic
EVQLLESGGGLVQPGGSLRLSCAASGFTFSSYWMHWVRQTPGKCLEWVSKIDPSDDYTNYNQKVKGRFTISIDKSKNTLYLQMNSLRAEDTAVYYCARWDYSHFDVWGQGTTVTVSS

(The sequence listing continues in the following parts.)
